United States Patent Application Publication US 2012/0017292 A1 - sequence listing, part 5

SEQ ID NO: 16604 - DNA, 462 bp, Zea mays
  Peptide Sequence Number=SeqID_59979
atgatgtgtgttggggcgaaggcgaagacaccacccttcgctcaaagtcttcgccgacctcgctgcaccgacgaaggcaagacgacgggcagacctacccttcgccccacacgtcgccggacaaaggcttgtgacgaggtcgtctcatcctgcgacctcgctcgacatggaggcccacgtatgatccggcccattgtaacaggccctgcgcggccgccgcgctttacgggcctaatttgtaaaggtctccatgtaattacggagagcaagtgccaacatttggcgcccaccgttcgtgctacaaaaactccacccgcgatggcacccaagagaacctcgtcgaaggctgatgaagccgcgaaggcggcactgctggccgagaaaaagggcaaggccctcgtcgaaaacactctccaagagctcagtggaagacgatgcaaacagcaagaagcagcgcaatga

SEQ ID NO: 16605 - DNA, 522 bp, Zea mays
  Peptide Sequence Number=SeqID_59980
atggggaaccgagggacttacacgacggcgccggcgacaagggggaaggagagccgcatcctgattcctgaattcccaattctccttgcgtcgaagacgactgacgcaaaggaaagacaggatgggcttcgagtttccaagtggacgcggatgccgaccctcacctccgatgccatcatcgcgtccccgaggtggggcgtcctccccttatgcggcggcggccgctcgggcggaccgcgcactcgccgcccgtcgtcgtccggcggccacggctgcgggtggccgccgctggaccgcgtggccgtctgggtcggcggcggcatcgccgcggtgttcttcgcgtccctggagcggtgctcgtgcgtcaacgtgcgcacgcacgacgacctcctcgacgacgagcggagggactcggaggcgccgctgatgatgttcgacgacggcaacggtaactcctgcgtgcagaggcgcggagccaggtggtgcggcaagggcaagggtactggtagtggagattgttag

SEQ ID NO: 16606 - DNA, 1464 bp, Zea mays
  Peptide Sequence Number=SeqID_59981
atgtcagccaatgtgggtgaatcaactagcggtgtcagcagcagcgatgcagctggggggagctttgagtgcaacatatgcttcgagctgcctcaggagccaatagtgactctctgtggccacctcttctgctggccgtgcctttaccggtggctgcacattcacgcacactcgccagagtgcccagtgtgcaaggccctcgtggaggaggacaagctcgtccccctttatgggcgtggcaaggatcgcgtcgacccgaggtcgaagaacatgcccgagggcgagattcctcaccgcccaactggccagaggcccgccacagccccccgggccgatgctaacagcaactttgccaatgccaatgccaatccatggttcccgggcccaggagtccctctggcaaatgcgcgatgggggaactacgcattctcagctgccttcgggggactgttccctatgcttagcttccaagtccatgggtttccagatgccgccgcttacgcgcagcctgctgggttccactatggatacgggcatgggcatgggcatgggttccaccatggcgggcatatgggacaagcacaagcccatggcgtccaccgacaggcaccgttggggcaacaacagcagcaggcagatatttatctgaaggccctgctcttcatgattaacatgtttgcttctcgggaggttgtcttccgcacgcggacacgtcgtcagggcaggcaggcaggcaggcagccctgccccaagagtagcagactagtctcgccgccgagtgaccgcaacgagccccgcaccgcacacggcgaccgagtgggaaacctccccccgcctatatctatctatctacacagcgcgggctgggctctcgtgttgtgtctcgtcccggcatcggcgaggacggagcacgaagcacggagcttctacttccacagcatggaccacggcggcaggaggaggagcggcgccggcgcggcggggggcggccagccgccgccgccgcctcccaaggtgtaccgcgtggagcccagggacttccgggagctggtgcagaggctcacgggcgccggcacgcccgccgccgccgccgccgcgacggggccggcgaccctggccgcgcaccagagggtgccggtgacgccggccatggccgcggcgccgcccgcgcccgggacggcagagcagttcgactacgcgccctggttctccgcgccgctgctcagcccggcgtcgtacggcgcgccgggcttcggcgccgccgccggctacccgcaccacgggagcgcagagcacagcgaaggtgggggaagtcacctgggagaaggccacgggatcgagaaaggtggtggggtgcgggttaaagaagttgaggcgtccggtggagtcaacagcgaagtagtggcgctcgtcgggggaggtattgagctgaaccacatcaagagcattatggagggaagctag

SEQ ID NO: 16607 - DNA, 1266 bp, Zea mays
  Peptide Sequence Number=SeqID_59982
atggccgccgcgaggaggctctcggagctgctgcaggagcagcaggaaccgttcctcgtcgagaccgccagggcaaggcggccccggcgcgggcgtggcgcggtgggagcaggagtagcaggaggaggactgggctgctgccccgccgccgcgtgccggcggctgttcaggctctgcaaccaagggttcaagaagaggagggccgccgccgccgccggcggcggctctggctcgggcgtcgcgagcggcctgaggttggcgctgagcaaggtgctgtgcggcaggggcatgcgccgggtgctgcgcctggacgacctctgtggcggtggcgggtgcttctccggcgccagcgcctgcggcgcccgcgagttccgccgcctgcgccgctccctcggcgacagcggcgagtgcgacccccgcgccatggtcttgcctggggatgatggggaggaggagcagatgggttggaaggccgacatggacgtcgactcgtcgcgccagcttagcccggtctccgtcctggagctgcactccgacgacgacgacgacgagtcgccggtgcactcgcactggggcgacgagaagccatccacctccgggaccgggagctcacctccgtccgagtctttcctcggtccgactccgacctccccatgcttcagctacgacctccaggacaagttctgcgagatggaggtggacgaggccgaggaggaggagacggtccgaaccggcaggtccatcgaggagcaggtctcgtcgtgggagaagatcgcgggggacatctcgaggatccccgcgatgatggagctggacctgtcgcgttccacgcggcagtggcgggagccggagcccgaggtcagggaggtcggcgccaggatagaggtcctcatcttcgacgacatcaggagggagaccgtgctccagcagcagcatgtgctcccacagttgcgagctgcggctggtagcacggcgatatgcatgccggcgcaccttctggcgggcttccgtgctagctgccgccagaggtatagacagcctcggatgcccttccacacacagcctccaaggctcgacacgacatgcctatcggaggagcaggctgatctctctcgatccgcgctcgtcgtggcgacctctctcctccagttcccgttcctgttcctgaaatcaatccctactttcgccatttgtgtgttttctcgaggttttcgcccctcgtttggacgttcccagatctcgactgaggttttagagcaagtctaa

SEQ ID NO: 16608 - DNA, 210 bp, Zea mays
  Peptide Sequence Number=SeqID_59983
atgcggcgctgccctgccctgccctgcctgctatctggcgagcagagcagccaagcccaagcatcatgtcacgttgttggagatgctctaactactagtaggccagtacagaggggatactatgaatggtatgacctaaatataacgctcacaaacgtggacctggtgatagagaccgtcacgataaatggtcatattgtcttgcattaa

SEQ ID NO: 16609 - DNA, 666 bp, Zea mays
  Peptide Sequence Number=SeqID_59984
atgggtcacgaccatatgtctcgtataaagatgcatatggcagaaggttcttttggtggtatgtcttctccatgcctcaacgtctccatagcttgtgattttgcaaggagcggactggagagctcaggtttatctgtgcgccctgttaacgacagccaatttaagggatctgtttccattgcagcagtgccatgcactgagcaagagttacatgtcaagcatgaaggtggtgatcgagcatgtggccaaggccgtagcgaccgctgcgtgaggcacggtggcggcaagagatgtaaattcgaagggaagagcctgttgggcggtgacaatgccatccctgaagctttggccgccccttcagaaaaacgacgccgggccaagacgccccaaagggaagcgaagccgtccgaggtcttccaagagaatgtcacaacagcagctactgctggtaacagcacacagcacacgggcttccttctcgtagctgcccctgttgctaaccgtgacatactgaccaatggtatggcagtgacggggcaagctgcaatagccccccaacggatagtggcaccgatgttcatgagatcaccaacgccatctggatcagtggctgcctcggcacagaggtgggaggcgggagcaagcaggggtatgctgggtctgtag

SEQ ID NO: 16610 - DNA, 441 bp, Zea mays
  Peptide Sequence Number=SeqID_59985
atggtaccgatccgaggagggagagtcacgctgcctgtagaggccgcgatctccgtcgactcggtcgccgcggccgggagcaccgccggtgtgtctacgcccgtctgggctgccgccgcatgcaccctctcccggagcgtcggcggcgcgtcggcgcctatctgggctgccgccacgcgcgcccccatggggatgtgcggctgcccactatgccgcctgctctcgcgctgcttccctcgccagcctgagctcttcgtcggtgttgtcgtcgacagaagcagagctgccggctctactgccgcacagagcctcgagctctgctgccgccgcacgtgcagcatccgccgcctccgctgcttctacttccgctctcgctgctgccagtttcgccgccgccagccgtgctgccctcgccgctgtcgctgcagctgtgggggatag

SEQ ID NO: 16611 - DNA, 199 bp, Zea mays
  Peptide Sequence Number=SeqID_59986
ggcgttgaaaattgaaagaccccacttgtcagtgaaagttgctattctagcaaagggaaggtaccttcggactcagaattacgaacatgaagtgcggtcaagacgaagcctgaaccagacgaaggacgggctgattaccaagctccacgaaggatggtgcacagccgaagctgtgcgcagggaagcttcgtcgcgatag

SEQ ID NO: 16612 - DNA, 463 bp, Zea mays
  Peptide Sequence Number=SeqID_59987
atgtactcttcctatcgatcttacatccagcatagtcggaatctgaatatccaattaggtcaaagccggcccaatcccgcgcgcgcgctctcccccccgctctctctgccctggcgggcccgccgtcagcgcagcgcttctcgcgcgcccgcctccgctcttctctctctctgctcgcgggcccgggctgtcagcccgtcgtccccgcgtaaccgccgccgagctgtgcgcgcccgcttctccgcgcccacgtcgcgcgtggagctcgcaactgacccgcccctggcacttgagccccgagccccactcgccctcgccccctcccccatttgcgctctagggacccctcttccacctctccctcgctgcggcacgcagagtccccgccacgaatccccgcgcccgagctcgtttctcggcgccgtggaactccgcgtgtccgtgccacgtgagcttcgcccgg

SEQ ID NO: 16613 - DNA, 717 bp, Zea mays
  Peptide Sequence Number=SeqID_59988
atggcgccccgcatgctctgtgacgacggcggctctcagcccccttacgaaagcaagaggacggccctcttagagagggttggccgcgcggggacgaggacgagacaggcgctctcttggggccgctcgcttccctctcccgcgtggacgcttgtaaccccctactgcaagcgcacccgacctgggcgcgggacgaacacgaaggccgcaggattcccacctctctcacgcggtctccggccgcctcgctcctcccccttcgcgctcgccctcgcgctcgacccatctgtgctggggcacgcggcgacactcactcgtcggcccaagggaccccccggtctcggaacgccgacagcggcgaagcacgccggatcgagggctcggccccaggagatgcagtcgccagcgcggggtaggaggaggcggaagttttctcgcggcggctggtggaggagttgcgcggatagcgcactctcggaggcctccacatttagaaaccctttacagggtgttgttggagacagtcttaccattcgtggtcttggtctgggcagtccgcaagccgctgtgccgctgtcggcgctgtgcctgctgcagtgctgccgcccaccgcccgctcagccgctctttgtcctctgccgctcgcccgctccccgctccccgctctgcgtgctgctggtctgctgctgcgtctgcgggctaccggctggtggctga

SEQ ID NO: 16614 - DNA, 438 bp, Zea mays
  Peptide Sequence Number=SeqID_59989
atggccaaatgtaaccctagcttatgtgcgggatgtgcctgtgtgtgctgcgtggcgtggtgcgtgcgtgctgccgctcagccgcaagccgctgtgccgctgtcgacgttgtgcctgctgcagtgctgccgcccaccgcccgctcagccgctctttgtcctctgccgctcgcccgctccccgctccccgctctgcgtgctgctggtctgctgctgcgtctgcgggctacgggctaccggctggtggctgagcaaagtagcggaaggggacagcggcggcctgctccacgcacggacgcaccagcagcaggccagcggactagaacatgccaccgactgggggtgctgctgccgatggctctgctgtgggctcgtcatcatcggcatccaaggccaagcgcttcatcctggatccaccattgccggtggtggtgcatag

SEQ ID NO: 16615 - DNA, 552 bp, Zea mays
  Peptide Sequence Number=SeqID_59990
atggctagggatccactacgaggcttttacaaagttccactagcttccgaaaacccgctacagtttataggaagatccagtacagggttcctggctgacagccatcgcagcaaaatcaaccagggacctccccgcactgacctctcccctactgcccttgcccctttcggtttctctattttatctgatctcgggactgggcctcaattcctaggaagcgcaggggttctggggcaagaaaccagaaactcagtgaatagcgttcactggacggcgggttcattcttaactaaccgaggggctcttttaaaagactgccagggcgaaggggtacgggtgaaccacagccgcccgatcatcaactatcgctccagattagatccacccattacgaaccgatccaacggcagaacaccactctccttcctcctgacctccggaatggcagcgccgccccgaccgcacggcggagcacgccgacgagaaagcggaaacgcgcctggtgaccctaaaccccacactgattactccaaattggtccaggggcaatag

SEQ ID NO: 16616 - DNA, 240 bp, Zea mays
  Peptide Sequence Number=SeqID_59991
atggggagggggcttgttgtcgacgatgatggtggcggtgggtgctctgcaaaggggagtggggcagtggtggtgcgcatggcggcgggcacgcgtgcgggggcacgagtgagtggtggggtcaatgaccctgatgtttgtggtctctggttccaagaatctttgcctctctgtatgcttattccaggcttcaagggtaagcttctcggtatcttcttgggtagggtgcttttctcttga

SEQ ID NO: 16617 - DNA, 201 bp, Zea mays
  Peptide Sequence Number=SeqID_59992
atgccggctacacgcaaagtgtcgctttgcctccagtccaccctcttgtcactcaatctgaactcgtacggtccaaaccccagggttatgaaggctggggagcaccgggaggataaggagggggaatgttttatctggtttggacatggcggtggcctgactccttccggtataaccgttaagaaaaaggagatcgggtaa

SEQ ID NO: 16618 - DNA, 423 bp, Zea mays
  Peptide Sequence Number=SeqID_59993
atggggcgccatggtccgctgtggagggaaattgggtgccgccgcgcggacgattcaccggcgccgcggtctcaagcttggcatgagggcggaggagagagtgagatagaaacgccaccatgcggatcttcttcgagcgctgattgctcgggttcgggtgccggggatctccggaattcctcgtcggtgcgccttccgcgttgccatgccgtggccggctctccaaccttcacctcggtcttcgtttatttcatgttccgtgcaccggttgccgctttgggctgtcaccagccatggcaccaccgtgctgggcgtcgcgtcgccgccggtgttccgtcaggggtgtcgatgcaatctcgcgtaattgaaactggaccgtggatggttgatcctgcggccacaattgcgtaccggttcggataa

SEQ ID NO: 16619 - DNA, 366 bp, Zea mays
  Peptide Sequence Number=SeqID_59994
atgcaggaggcgtgcaaccgcaccacgattgtgcaccctttcggcttcatcgcgtccggtggggaccgggaaagggggtatttcgagaaaggatccttctcagcgaaggaaacgggcccccgagccctcctactgatcaggggttcgaaggctggcccctccgaagggttcgacagccagccagagcactcgggcttcgagcccattactgatcagggtttcgaaggctggccccttggaagggttcaacagatgccccagagcactcgggctccacgccctctactgatcaatggttcgaaggctggcccctcggaagggttcgacagctgccctagagcattcgggctccgtgccctctactaa

SEQ ID NO: 16620 - DNA, 378 bp, Zea mays
  Peptide Sequence Number=SeqID_59995
atgaaggttgtcatgattgtgtacatcataatcttggtccatgtagttgttcatgttttcgtgcgctttgatgttgcgcatctcttcggttacttcatcaatcttcatctgaggcttagaaagacgaagcattttctccttgcccttctcaacttgctagtggatgagttcaaggttgctgatctcatcatcaagttcctcttcttggggtgtagtgttaattacatagtaactagtatatcgcaacaacaacaacaaaacggctcgaggaacaacaaattctacttgctccaagcatttgcatcgaaagggccaaaagagagcggggaaagcggagacactgtggcgagcgcagcgaaggaatgtcccccgccctag

SEQ ID NO: 16621 - DNA, 459 bp, Zea mays
  Peptide Sequence Number=SeqID_59996
atgtcgctgacacctttgtcagatgtaccagagatgagggttaaagagtttgctttagcagcgggagctactgcctctcaagctgaggccatctctatgaatccgtctaaagacaacgacaatattggcattgaggaggacagcagaatcatacgtcccacgaagccaagccatgtggacttcgacaaatccaaaatgaaaggagaacatattgaggattcgaagaagaggaagaagaaggtaactacaaggcagagcaaagttctgaaggtgcaagttgaatcaactcctcaagcctcagaggttgcacctgtagctaaggtggcagctgagattgacgaactccctcctatgggagccaaagaggcaaaaattagagaagttattaccttgatagcgcaaggggttacaccattggaattgtttctagagagcgaggaagaagaagaagaggagtga

SEQ ID NO: 16622 - DNA, 129 bp, Zea mays
  Peptide Sequence Number=SeqID_59997
atggctgctacaccatacttgatcaagaggaaaaagaatggaaagattgatgatgaaccgaagattcaatcgataaaccgaaagagcggtgatgaagctatcaccgagacagtcacgacgatgttctag

SEQ ID NO: 16623 - DNA, 537 bp, Zea mays
  Peptide Sequence Number=SeqID_59998
atggatacctataggctaccacactttgatggcactaacttcccatattatagtgctagaatggcttgttacctagaagtcattgatctaggtgtttggagagttactcgtgatgggatgaaaccacctaagaatcccgagaagctcaccatcaataatgatcttgttagagacatgtattctcgtttgaatttaatcatcaatgagctcaattctattggaattaataagctaggtgatgtggacattgtgaggaagattatctctctgctaccacaacaaaaatatgggagcatcatcaccgttctttgcaacatggaggacttgagcacaattaccctgaccattgtgattggaaagattgcggcatttgaaatgtcacaaaagatgggtcaagaggagccaacttcttcaaggccatatgcttttgcatgtgatgaaaagaagaaaggcaagaagaaggctcccactctgagctcctcaagtgaagaagaggaggaagaagaaaatgatgatgatgaagatggtcaaccctaa

SEQ ID NO: 16624 - DNA, 249 bp, Zea mays
  Peptide Sequence Number=SeqID_59999
atggcgaaaacgatgtttgagagacagggtgactggaccagccatgatgcatgcatgaacgccatcgagcatgctgctgcatgcagaattgatagcgacggacagagctccgagcccaagtgcaggtgtgctcccattgctgcaatgcgtccagcagcaagtgtacatatggcggatggcgatgctggtgcatgtgacatcctgatctatgtcgagggcgcgcatagcttccgatcgatcaattggtag

SEQ ID NO: 16625 - DNA, 735 bp, Zea mays
  Peptide Sequence Number=SeqID_60000
atggcgcctcctgttgacgtggctggtctgcgccctaggttgggcgatgtggaagctcctccgaagccgaggtcgagtctgtcttccgtggccgaggtcgagtccgagcccctgggtcgggcgaggcggatgccgccgtctgaggcccagggcggagtccggagccctggggtcgagcagagcggagttcgccgtcttctggggctgaagccccaagtccgagccctgggtcgggcggagcggagttcgcccgtcttccgggatttagcccgagtcccgagccctggatcgggcggagcggagttcgtcgtctttcgggacttaacccgtgtccgagccctgggtcgggcagagcggagttcgtcgtcttctggggctgagcccaagtccgagccctgggtcgggcggagcggagttcgccgtcttccgggacttagcccgagtccgagccctgggtcgggcggagcggagttcgccgtcttccgggacttagcccgtgtccgagccctgggtcgggcggagcggatcggagtggcgcaggcggcgctgtccttctgtcaggccggtcagtggagcggcgaagtgacggcgggcctcgggcgagccagagatatgttcgccgctggagggggacctcgggcgagacggaaatcctccgggctttatgctgatgggggttaccagctgagaattaggagccttgagggtacccctaattatggtccccgacagtag

SEQ ID NO: 16626 - DNA, 324 bp, Zea mays
  Peptide Sequence Number=SeqID_60001
atggtgcccgccatgtttccgagagtacagcaccccaccttccagtctcttgccacggaggacgggcgacctttcctgctcaacgtctggtctcatattaagttatttttgaaaacctggtacctgtcagaggatattgcagttagcagcaaatccaaatgggacaccctccggaggaccttcagtgacagcctcatttggagaagtttcagatggaggaacaggctccccttctacttcaacttcaaattcttcttcaagccgctaagactggccattgacgaccttctcagacgacgacaacccatcatacatgagccataa

SEQ ID NO: 16627 - DNA, 501 bp, Zea mays
  Peptide Sequence Number=SeqID_60002
atgacgcgcttctccgggtggtgctcggcctgccccctcctgcccgatagtctgccggagctgcacaagttgtcctgcttcctcgtcgagcctggcctgtgttgggggccttcggcttccgaaggtcctcaaaaacatgatttaacaatgcctctagagtataatgtgtggacagggatcttcgaacaagagcccacgcatttgagaacaagtccccaacattggcgcccacctccggtgaactcacttccactttttgagtttcgaacaccttcggcaagcatagaccttcgtcatgccgcccaagaaagcttcagcaacaggggctgccgctctgcagccgctggaccccaaccaggagaccctctctcttcgggaggcccgaagccagaagaggaaggccaccagtccaacacctcaggaggacgacttggaccaagagatcagaaatatggagatgctccatcagcaggtgcaaaggaagaaggaaaagatggctag

SEQ ID NO: 16628 - DNA, 870 bp, Zea mays
  Peptide Sequence Number=SeqID_60003
atggcgggggcatccgatccgagtatcgcgactgctctcgcggcgcagtcgaagcaactggatgcccagtcgcgcaacatcgccgcccaatccaaaattctccagcaattgtgcgaccgtttcgaatcgcaagaagctcgctggagttctctggagaaatcggtcgcccacaactccgacgacatcgctattcttcaatcccaactcgcggaccgcgcggatcgggggtccggcgtggacaccagcgtcgagttcgtctcccacaccaacacaagagtcgctgcgctggagaacgtccaatccgttttcgactcgtggcgcacacggatggatgcgtccgtcgacggcatgcgcgcatatctcaccaaggtctcgcgcttcctcgagcgtggcgttatggcgaaggccgaagctccaagcggcgtcttgggtccataccagtcggcgacggcggagcgcccacctgctcccgcgtggaccgccgacggcccgatagggcaccacgctgatctgcaaccacgggggctgggttttggggttccatacacccatcacccacctccgacattggtgcaacgccctcgcgatctcgatactgtctatgttcttgctcagttgcaggaggaggtgcacgacgcgcacaagcctcacgagaccaagacgtatgccagaggtgtaccgaggccatatgcttcttcggtcgccaccttggacatcaaaaatccatcctcagccaagctggacacatcgacatctaaaccctccacggttgaagataaattgactgcattgtccctcaaggtttaccaccgcatcgagaatgtgaccatcgcattccactcatcgacggagctcgtccggtgcaactga

SEQ ID NO: 16629 - DNA, 1182 bp, Zea mays
  Peptide Sequence Number=SeqID_60004
atgtcttcgcgctcccttatgcatcgtgtctttccaccttccaagcccccggatgggggatacccgccatctttccgtctcatcgttggaggaacgcaactccgtgggagttggtacctttcagccatcgttcagcttcaaggattttcatcatgcagcccggctgcatccctccgccggcggtcacccaagatgatgacctccagtttgatggtgggggaaagcaagccgggctgcgattttggtcccaccctcagcttcaaggatgttcatcatcctcgctggggtggaggccgagctgagccggagctctacctcccgcgcgggttcgtgggtcaccctcccctgcggcgttcgagggagagggcgctcgctggccctgcgggcgggtcggacttcgacaacgcggggctggtcgacggcgggcgtcgtcagccccagcgtgtcgagctcgtcggcttggctcccggtgtcccctcctgccggagggcggctgtcgcgccgtgtgcacgggaggaccgcccaagatgtcacgcgctgctagggcggcgttcgtgttctggggcggtcctgcctttgcaccggtatggcgcctccgcgcgaaggccgatcgccggcaactcgggcatccttctgagctacatcgtccacttcgcgcttgccggcctcccgacgccactcaactggcgcctcatgatcggcatcggcgccgtccctcctctgttcctagcggccgcagccgcgcttgccatgccggagaccccgcgctcgctcgtcgtccacgaccaccgcgacgaggcgcgccgcgtgctggtgcgcacggtgggggacgcagaccgccggctccaggagatcgtgacgtccgtgcaggaggccacgaagcaggcgggctccggcggcgagcgtgcggcgcgagatcctgctccggccgacgcccgccgtccgccgcgtgatgctggccatcctggggctgcaggtgttccaggcttccagcaggcgtgcggcgtggcagccatggtgctgtacgctgtcagcacaacacatgccatgcaagaccatgacatcgacaaggcaaaaccggagagttctcagcagcagttgggccaccgagccagcgtccgaacgtgcgttacatgggcccaaagtgggttgtgtaagggaaggtatatgtacgagagctga

SEQ ID NO: 16630 - DNA, 2160 bp, Zea mays
  Peptide Sequence Number=SeqID_60005
atgctccaaggtcctccccctacgacatgggggctgggtcccgcgcgtcatgcaagctggcccagggcaaaagaagccaaaccaccgcgcgcagagcgcgtaactgcccagcggttacaagcactcctccactttcgcccaaaccaacgggtgaaagggtggaccgccatgcaggcggcatgcaactgcaccaagggggcgcgcccgttcgactttgacacgtccagcatggggcccaggcccacacgtcatgtaaccggtgtgccggttactacgtgcgagaaactgcaccgccacttgcgccagtaccgcgccttctcgactgcggaaccggtgtcgcgactcgaggaaaccttgcgcacggcccaacagtgccaaccgagcacatcggtcacgggtcggtccgccgcgggagaagacgcgacggtcgatatggccaaaagtgggccgacagtaatggtggcggcaggtgggcggaagcagcagtcaagtcgtttgcaggctcacgtcccctcctgggatagcgagagagccctctcccacggcgtgaagacgacgcgcccgtgttccgttcctcgaacggctcgcgcacgcacaacgaccgccccgcgaaccactcgtcccgtcgcattaactctgcggcagggcaggcggcacctttggcaggcgaagcgggcgacgcttcacctccgccataatgactgcgtcaaaaaagggaccgggaaaggggatactccaaaagggatccttctccgcgaaggaagcgggccccgagccctcatactgatcagagccgccttagagcactcgggccccgcgcctactactgatcagaggttcgaaggctggcccctcggaagggttcgacatccgcctcagagcactcgggctacgcgcctactactgatcagaggttcgaaggctagcccctcggatgggttcgacaaccgcctcagagcactcgggctccgcgcccactactggtcagaggttcgaaggctggcccctcggaggggttcgacaaccgcctcaggccactcgggcttcgtgcccactactgatcaggggttcgtaggctggcccccgaagggtttgacagccacctcagagcacgcagagcgagggatgactctgggtacgtctgatacatggccgaggcttgggctacgctcccgaggtagcctaggacatttccgagaccagcaggagcgattctgtaatggaatcccatcagagggaggcatcgagccctcggaccctatcaaacgggaccgggtccggcaaatcacctgcaggtcaaggctccgtccactcaagggacacgatctcgcctcgcccgagcccagcctcgggcaaaggcagccgacccaggagaattcacgtctcacccgaggtcgacagagccgaagtgaccgcagtcacttcgctgctccactgaccgacctgacaggaaaacagtgccgcatgtgctgctccgactgctgtgccacccgtcaggggctcggactcaacctcgacctcggacgatggactccgcctcacccgaccccagggctcggactcaacctcgacgccggccgacggactctgcctctcccgaccccagggatcggactcagcctcgacctcagaagacggactctgcctcgcccgaccccagggcccggactcagcctcgactccggaaggcggtctccgccttgcccgaccccagggctcggacccaacctcgacctcggacgacggtctccgcctcgctcgacccccggggctcgaactcaacctcgacctcggacgacggtctccgcctcgcccgacccctgggcccagactcagcctcgacctcggaggagcctccgcctcgcccgacctcgggctcggaccgaccacgtcacaggaggggccatcattaccctacccctagctagctcaggctacggggaacaagaccggcgtcccatctgcctcgccccgggaccccccggggtcgaaacgccgacagtctctccccatccggctgaatcagcggccgcctgtcctgaagtatgggatgctgagggagactcgcgggacctcacagagatgacactcgacaaagaatctgctttgccgagtgccggctttcggccctcggcaaaggctgacggccgtcagctgtag

SEQ ID NO: 16631 - DNA, 411 bp, Zea mays
  Peptide Sequence Number=SeqID_60006
atggctgaaaacttggatgcattgaagtgtggtggttggggggtatttatagccccaaccaccaagttgaccgttggtgaaggcttctgtcgtatggcgcaccggacagtccggaaaacaaatgctatgcagcgttctacctatgaaaacgatgacaaacactgcaagacagtgtattccaagcgcgaatctcgatcggtaacgaaaggtccctgttccgtggaccgtcagactacttcaaggcgtcttgctgacaggaagagtgcaaagttccagaagaacatcacaaagaggggttctgtgcctgagaccacggtgaaaaagagcaatgactaccctgttggacctatagttcttggattcttcatttttgtggtcattggatcatattttggaaatttacttgcctaa

SEQ ID NO: 16632 - DNA, 315 bp, Zea mays
  Peptide Sequence Number=SeqID_60007
atgaagaaagatgatgacctcgagtcggcgctgctggccgccaaagagccggcgccggcgcccgccaagggctacgcgtacgcgctcatctgcgcgctcctagctggcttccctcacctctatcatctacggctacagaccatgaaaaagcggaagagacatgcatgcatcatcaagccaagccatcaccgcggggtgatgagcggggcgcagaagttcgtgcaagccgacctcggcgtcacggacacgcagctggaggtgctcatcggcgccaccagcgtctactccctcgtcggctcgctggcggcgggctga

SEQ ID NO: 16633 - DNA, 99 bp, Zea mays
  Peptide Sequence Number=SeqID_60008
atggcaagagaaattattcagagaagtgaaaggggcatccatgatgctagagaagtggctaaggctgctagaaagagcacagagcccgaaggcttttaa

SEQ ID NO: 16634 - DNA, 1341 bp, Zea mays
  Peptide Sequence Number=SeqID_60009
atggccgcctttcaaggggatcaccctccttttaaaggcgactctccctacttgcgtcctcagccgttgcgggctgagtcttctccaacacgctccaaggtcctccccctacgacgcgggggctgggtcccacgcgtcatgcaagccggtccagggcagaagaagccaaaccgtcgcgcgcagggcatacagctgcccagcggttacaagcattcctccactttcgcccagaccagcgggagaagcaagcgacgcttcgccttcgccataatgaccgcgtcgaaaaagggaccgggaaagggggataccctgaaaaggatccttctccgtgaaggaaacaggccccgagccaccctactgatcagaggttcaaaggctggcccctcggaggggttcaacggccgcctcagagcgcttgggttctgcgcccactactggtcagaggctggccctcgaagggttcacagtcgcctcagacacagagcgagggatgaccctgggtacgttcgatacataaccaaggctcgggctacgctcccgaggcatccactcggattacccgccaacagctcaccggagacaccatgttcggcgccctccgagggcaacatggcgctttcccccctcctccttgcggaaaggcgacgcaggggcgtatgtaaaaaagtcgagtctgtccttgaccgtcctctcgccctgtgcagaggctcgggggctgctctcgcaaacccggctccagccaacccgttgacagcgtcaacataccagcccgagaacttgggacccgaccgtgcacccgggctacggccagctcgcatgagggaacaactagaccagccgaacgccgcctgcgccgctccgactgctgagccactcgacagagtgaggctgacagcagcccggtccggcctcaggcgtcataggaaactccgcctcgcccgaccccagggctcagacacgggctcagccctggaagacgacgaactccgcttcgcccgaccccagggctcggacacgggctcagccccggaagacgacgaactccgcttcgcccgaccccagggctcggacacgggctcagccccggaagacgacgaactccgcttcgcccgaccccagggctcggactcagccctggcctcagccgacgggctccgccttgtccgacccgggggctcggactcgacctcgaccttggaagacagactcgacctcgacctcggaggagcctccacctcgcccaacctagggcacgaaccgaccacgtcgacaggaggcgccatcattatcctaccccgagctgactcaggctacgaggaacaagaccgacgtcccatctag

SEQ ID NO: 16635 - DNA, 453 bp, Zea mays
  Peptide Sequence Number=SeqID_60010
atgggcaagaacaacaagcgcaagcgtgagccgactcctccatcggaggagtttggtgactcggaatactcagaggaggaattctcctctgagtctgaggggtctctggctcccatccccctgcgtgagtcgtctgacgactcagacgactcccaggggctcgtggcggaggtctggacatacatccgggccgtcgagcgttccgggctcgagggctcggatgagtcggagtactcctcgaatgaggaggactcggacggcggcggcgaggacgaggacgacgacgacgacgacgacggtggcgacggtgacggtgatggcagcggcaggggcggcggcggcggcagcaaggacggtgacggcggcagcagcaggggcagcaaccggggcggcagcagcaggggcagcaccaggggcggcagcggcggcggcagcaacaaggccagtggctag

SEQ ID NO: 16636 - DNA, 426 bp, Zea mays
  Peptide Sequence Number=SeqID_60011
atggctagcgatggtgatgcttcacctccacggaagcgtatgttgttggagtttccttgtgatgaagaaggtgttaatgtgagtcaaactgttggtgtgtccgcatcatcagccacacctgccgctgccagagcttctgatgaacaaggtgaaaatccagaaggtgaaagtaatgttgatggggatgattcttcaaagcaaaagcagtcaaagaagtccacttcagatgtttggcagtattttgagaagtatgaagttgtggtagaggagaatggcaaatcagtgaagcaaatttgggccaaatgcaagacagcaaggagcgtgaggttctacactgaaattgaacgagagcttggcagctcctatcttgcgagacatgatggacgtatccatcttgcaaaatacgttggagatccccttgcgtag

SEQ ID NO: 16637 - DNA, 669 bp, Zea mays
  Peptide Sequence Number=SeqID_60012
atgcagcaagggcttcagacccacatggatagccacttcaaaggaatgatgacccatatggaccagcgcatggatgccatgcaatctcgctttgatgataactgggatgcgctaaacactgagtactctgaatttcgcagtcacatccaagaccatgttactgatcccatcatgaacagcctcaacaacatgcagcagagttttcaggacaacatgggagctctgtctagtcaatttgacaatctctctaccaatgacagcatgcaagagataagtcagaggcagcagcagctccaacaagactttggcactcactactatagcatgcatcctccaccaggaggtgccaaaggttcacaacaaaccaatacaaagataaaagaaagggttcaacacaaaggagcaaaatgtaccgaaggcagccttggtctggcgcaccggactgtccgaagtcagagcaggcaccagaaggcgcaccggacagtctacaggacctgtccggtgcaccaccagactgtccggtggctccagaagtcagagcttcaacagtcggaacccaacggcctggtgacgtggctggcgcaccagacagtgtccggtggcacatcggactgtccgggtctaagtgacccgggaaatcaaggaaggaagctcactcggtctaagtga

SEQ ID NO: 16638 - DNA, 789 bp, Zea mays
  Peptide Sequence Number=SeqID_60013
atggatgtttctcacatttattgcagtggtctaggtggtcttcgaaagaagcttactggtcgcttcaaatcaaagcgccctcgtgtagatgatgtagactacaatccaaccactgactcagaggcccaatcttcagctaggggcagtgtctccatggatacagaagatgttacgcatacccatcctgactatccgattgacatcacaggatggacttacccaaagaggaggttctcaatggcagaatattgctccaggaggactgtcaatcaatatactctgccatcagacactaatgttcaattctttcacactcagctccaatttgatgtcttttgggggcacatagatggataccaactttcacaaacatcaattatggaggacctgattccaaaatttgagacatatggcctgtatcactttatgggtcagaggactgatttcagtgagatggcagtaaagcaattcctggccactgctgagattgatatagatgaggaatccatcacatggatgactggtttcaagagatattctgcaacatttgctgaatttgtagctgccaatagtctggattatggtaccatttcagctgggattgatttatacaataaagataactttgaagactttgtgcaattttatgagccagcaaggctaggaatacctaggaggtttggagagacagcaggcctgaggcatcatcctgctgtgattaacaaaattgcaagagtcataattcttcccaagagtggggacaagagcaaaattagagacaacttctga

SEQ ID NO: 16639 - DNA, 1545 bp, Zea mays
  Peptide Sequence Number=SeqID_60014
atgacgagcttgattttactagttctggacgcgctgattccccgcggggttccccatggggataaattccccgacggggacggggacaggagaaaaagctccccgggcctgcagcaaattttttcgcctcccaccccccaacgcgccgcggttgaaacaaaaacccccctccctccccctcgtcttcctcacaaatcccaccccaaaaaaaaaacgcctcccggttgctcgcctctatccgcattgaaaatctttgaaagaggtttcgatcccgaaaccgccaagggcccgccccgcaagtgcatggcagtgaacttcctggccaatgagttgtcggacctgtgcatcggcaagccggccgtgaggtcgctcccgctctccgccgccaccggcgaccttgccgccgccctccggagggtgtcccgctctggcgccgcagcctgcgtcgcggtgaccggaccagcgcgcgccgtcgtcggccgggtcggccccgcggacgtgctctgcctcctctgcaccgaccctgaggcgctcgcgcgccccgccgcggtcttctccaagccggtctccgcgctcctgcctaaggacggcgccggagaggtccgccgcgtcgatccccgctccaggcaaggctcaactgtcaactcctatccttcctccgctcttctcggtctgtgcaaacgacgcgtgggattcgttcgagattggaagaacgctaaggccgttcatcacgaggaaacacgtatcttggaggcccttgatgcgattctgagcggggcgcaggtgctggccgtccccctccgcgctggcgggcgcaagaagcagctcgttggcgccgccgacggcgacttctgctggctcacgcaggaggacctcgtgcgctacttcctcaactacatctgcctcgtctacaatgtggcggcgcgctccgtgtcctccctcgggctcgtgcgcgccgacttcctctcggtgcgccccggcgaggcggccctgtccgccgtgcccctcatccgccgcgccgtcgccacggagacggcggttgccgtggtcgccgaagacgggcacctcgtcggcgagatctcccctgcccttctcgcggcctgcgacgagacggcggcggcagccatcgccacgctctcggccgccgacctcatggcctacatcgaccactacgtgtcgccgcctgagcacatcctgcgcgccgtcaaggccggactgaaggacaagggcctggacgccttgcttgcgctggttgaggacgagacgctgtcatcgttctcgtccctctcctccgcgtcctcctcgtccgacgaggaggcaggccgggcgcagctgaggcgtccgtcgtcggggagctacgggcggcgggcggctgacgagccggtggtgtgcagccccgcgagctcactggtggccgtcttggtgcaggccctcgcgcacagggtgagctacgtctgggtcctcgacgaggacaacgactgccgcctcgccggcatcgtcacgttcgcggacgtgctgagggttttccgggagcagctgctgtga

SEQ ID NO: 16640 - DNA, 330 bp, Zea mays
  Peptide Sequence Number=SeqID_60015
atgggaatggacgtgacagtcggcatggccataggtgggccggcagtaattgcgccagcaggcccgcaagagcagcacgcagatcgccaatcaggctctagccccacctgcaggctcgcctcctcccctgaggcgggcccgggggccactatcagtaccctcaatcaggggagcgccgcatggcaaggaaaggagtacatcctgctgttcgtcgctagggccggacccccgcaggaagacaccggacccctatacatactagtccgggacccaagaagaccttgtcctgcactgcccaatgctgtcgcatggcttgtgcccgacacttaa

SEQ ID NO: 16641 - DNA, 348 bp, Zea mays
  Peptide Sequence Number=SeqID_60016
atgaaagttcagattcaccagcttaaggtgaaacgctatggtagcgctggcaaagtttcgtgtgggttgcgacttcgtatggcggagagccctcggttgaagtcttcaccaagaattactgccttcattggcagaaagaaggggaaggttgtggttacggcagcgaggaagaagaaaaaggttgaagttaaggtgaaaggtacgacgaaggcatccggggctgcaagggccttggagggttttgttcatgaattaacggagacgtgcgctaatcctggggaggtcatgaccttgtccgacctccagacaccatcttcgggaatgctgaaggtgaccaggggtgagtag

SEQ ID NO: 16642 - DNA, 315 bp, Zea mays
  Peptide Sequence Number=SeqID_60017
atgaagggagcagcagcggcagcaacgatccaattggagacttggaagcccaagtggaacagcttcggacagagctatgtcaccgaaacagggtgtactgcaaatactttacatgaggaagtacatgtactgtattcacgactgcacctggatgtgcctgccgaccctgttgcaatgggagccggaccatcagtgacagcaggtgaagaacctgatggggagttggacctttttaggcctcctccttccatgaacctggctgacgatcgatctcccacggcaggaaatgaagaatccaaggacgacgaagactag

SEQ ID NO: 16643 - DNA, 621 bp, Zea mays
  Peptide Sequence Number=SeqID_60018
atggcgccacagaggaggagagagagggcggtgggggaggcgcggccgagctcgtcggcgccgacaccggcggggccggggtgggtcgaggtgcagcgccggcgggtgggcggcggttggacaagccgccggatctctatctacgcctcccgagtctacttcctcctcctgatgctccagatcccgctcttcaggtcggtcggtggaggcgactcaccgatccagagggcgagcgacggcgggcccctgtgcgggcaagcgacggtgtccccggggcaccgaggcggcggcactcccaaggcggatgagcaagcggcgccccccgacgtgcgagtagcgacggcgccgcaggaggcgcgaggttcgagcagcgtcatggaaggcgcgagggttccttgtagagcaggcacatgcacaactcctattcaagtcacatcgtctcagttggtgtcaaacgagatattcccaccagctgttgtgaaggccatgctctaccctggagctatcgtgagcagcctaactaaaagcaaggcatttccgagttggagtgacctgtttgacatgtacaacctgacagaagccaaaaatgcttctgctgtagttgatctccagcgtctagag

SEQ ID NO: 16644 - DNA, 1521 bp, Zea mays
  Peptide Sequence Number=SeqID_60019
atgaacagacaccggcactcaaggtgccattacaaacggaactccggttccgtccccgagggcggcgctgacgacctcgacggtggggaagcttcctccagctaccaccacgtcagcaccgacggcggcatctgcctctccaccaacgccgcaccggcaagcgcgggccgctccgaagcgcgccggcaggacgcctccgccgcagaaccggaggatggtctccaccaccagaagctggaagaggaggtggccagccgacccgtgcgggaggtagagccccagctcacctcgctccatgccccagcaaggatgatgaagatccttgaagctgagggcgggaccaagatcacagcccgaaggtggaaagacacgatgcatgaggggagcgcagagacatggttgcctttcaagggggtcaccctccttttaaaggcaactctccccacttgcgtcctcagccctcgcgggctgagtcttctccaacacgctccaaggtcctccccctacgacatgggggctgggtcccacgcgtcatgcaagctggcccagggcagaagaagccaaatcgccgcgcgcggtgcgcgcaactgcccagcggttacaagcattcctccactttcgcccagaccagcggatgaaagggcggaccgccatgcaggcggcatgcaaccgcaccaagtgagcgcaccctttcgactccgacgcacccagcatggggggcccaggcccacacgtcatgcaaccggcgcgccggttgctacgtgcaagcaactgcaccgccactcgtgccactaccatgcctcctcgactgcggaaccagtaccgcgactcgaggcaaccctgcgtatgacccaacagtgccagccaggcacatcggtcacgggtcagtcagctgtgggagaaggcgcgacggtcgatacggccaaaaatgggctggcagtaatggcggtggcaggcgggcggaagcagcgggaccgggaaaggggataccccgtaagggttcctttacttgaaggaaacgggccccgagcccccctactgatcagaggttcgaaggctggcccctcggaggggttcaacagccgcctcagagcgctcgtgctccgcgcccactactgggggttcgtaggctgggccctcgaagggttcacagccgcctcagatgcagagcgagagatgacccgggggtacgttcgatacataaccaaggctcgagctatgctcccgagctcactggagacaccatgttcggcgccctccaagggcaacatggcgctttcccccctcctccttgcggaaaggcgacacaggggcatatgtaaaaaagtcgagtctgccctcgaccgtcctctcgctctgtgcggaggctcgggggctgctctcgcaaacccggctccggccaaaccgttgacagcgtcaacataccagcccgagaacttgggacccgaccgtgcacccgggctacggccagctcgcatgagggaacaacctgactggccgaagcatcgcgaaacgcattaa

SEQ ID NO: 16645 - DNA, 54 bp, Zea mays
  Peptide Sequence Number=SeqID_60020
atggccaagtcattcatcatagccctcgagggcccagctctcacatggttatag

SEQ ID NO: 16646 - DNA, 117 bp, Zea mays
  Peptide Sequence Number=SeqID_60021
atggctggtgtgccaccacatccctctgtgtccctgcctcccctctcttgctgttgggcgatggggggcttcggcttcaggatcaaggttttctcttataacaaggtgaacatgtag

SEQ ID NO: 16647 - DNA, 2073 bp, Zea mays
  Peptide Sequence Number=SeqID_60022
atgcgcggccccaggggggaggatgtcttcgcccgagctccgggagtcttcggcgcagatgctgaggagtgtttcatgtatgggcggaatattgctgctgttgtgtcggcagtgatggacaaggatcgtcagggagctgcgcagaagcgccaggcggtcgtcaggcttcatgaggccaggccgaagaggccgcgggggactgcgaaggctgctgcccccggcggaagccagccgccgctagcgccgaagtcggccgcccctgtgtccagcagggcgccggaggcggcgaaggcggctgccgccggcggtaccaagtctgcgaaggccgcccctaggtctagcagggcgccggaggctgcgaaggcggcccgagagttgccgccgccgggcaagcgcgttgccgacttcgccaccgatattagtgtggaagattatctttttgggtcggacgaaggccaacttgttgttgttccgcctgccgtggcgaccgcggcggctgccgtggtgcccagggtgaagggtagtgctcttggtgccggtggagagattccggcactcactgccgtcagggacgaggcgggcgctgtgtcccgccggctgaagaagctgaaggaggcattaagtcaggcggctgacttcgcagatcgcgcggcgtcgggggcccttacagcagttatgtctgccgaagtcgagagacttcagacgcaacatgctaacgccgtccgggaaaagtcggccgccgatagcaagtgccgcaagctggcggataaggtggccgtgctggagggtgagaggactgacctccggcgccaactggcggaggagaggaaggaggctaatgaggccctcgccaaggcgcagtctgcgcaggcggaggccaatttggcgcgggcggagggcagtcttgccaggcagcgcgccgaggagttggaggagcggctcagcgctctgcagacccgtgtggagagggtcgaggcctcgacgcgcttggaggttgagcggacacgcaaacagcttatggattcataccatgagctgggcgcgcggaccgctgacttcgaagtgccggaccgagagcccggacttcgctgcctcgagtggatacaggaggagttgctggcgctccccgccatcgtggaggggtttatgtcttatgcctccctggtcacctgcgagggggcgatgaacgcgctctctcgcgaagggtgccgacactatgaggtcttcgaccaagctgatgaggattttgagcgcgatatctacaaggttgaggaccctgtggtgaaggaatctgcgggagccctctacgaccggatgtggggcccccacggtcgggaggtggtcagggagcgggccgagatggcgaggggtcaggcggcgcgtggcgagaaggtggaggactttggggctttgaacagcgcacagcctgattcggagttgaacccgatggtggctgcgcccgagaccgccccggagccgcccccggaaaccgtcgaaagcgttcccgatgcccccgcagccactgtggccggcggaggcccgtcgccaactgtcacgccgagggctgaggatcctgtgaagatggcagcggagccggcagcagaggatcccgcgacggccggctctgttgagtggaccaaagagtcgtcggatgaggacttggactactttgcggccttggatgtggtggcggcggaggcttcgccgcatgctgtggatgctgaagttgtgcctggtccgagtactgggcgtaggcggcgaagggcggttgcgaagcgtagagtgagtgaggcggacggcggccggcttcgtgtgagcagggctagcaggcaggaactgttgtcattgccggccgctgtgagttcaggagtgctccaagtcttcgccgtttggtgttgcgagcctgtatgcgctgggggaggccttcgtcttgacaatgaatgggccctcccacttgggctccagcttgcccctggactctgtccgagctgttcggacgagtacgagagcgaagactcggtctccatcgatgagatccttcgaagtggcttcgtccacttcggggacagctga

SEQ ID NO: 16648 - DNA, 455 bp, Zea mays
  Peptide Sequence Number=SeqID_60023
gcgctgaccggtgggacccaaaggcagagtgcacgagcgcgaaccgttatccacggatctgagccgttggatcaggggcggacgtttgcgatggggcgcacgaggcttaacaacttggtggccgacgttgcctcatccgtggcggcgaggtcaccggagatgaggcagacgcgatcactgggtaggctggggtcaccggggagggatggaacgggtccagagggcttggtaaactcactggcagactaccggccgcaagaacatgaccagagaaggaagaacaacgaagggaaggtgctccgggggcactggttcgggctaaatcagctggtcaccgcacgggcacggcaaaccggcacgaccatcaccggcgaagccaaattggccaataacagggaggaattgggagaaattgagtgtgggagcagacatctcacctcgggatggagcttggg

SEQ ID NO: 16649 - DNA, 252 bp, Zea mays
  Peptide Sequence Number=SeqID_60024
atggctgggatccatgccttctgccccatcacgattaccaagagatccaggctcctggccgccgcgctgtgccgcgtcccggacccggactccttcgtgcgcgccgcgctcattctcgccgcggcactggccctgctcgccgacgccgtgctccacaagccggaccagtgcgcgcagctggccgccgtgctcgccgctgccgccaccgtcgaagccttggagcccaccgacgaccttgcctcgtacctctag

SEQ ID NO: 16650 - DNA, 360 bp, Zea mays
  Peptide Sequence Number=SeqID_60025
atgactggggataagcaaaggcaaaagctcaagcaaaagccaacaagcaaaatctccaacacctacatcaaaaaggtggataaaaaggctgctacaccatatttgatagagaagaaaaagaatggaaaggtgatagcaatcaaggccaacaagcaagccaacaaaggaaagggggccaaacgcatctgggtgccaaaggaaataatttcaaccatgaaaagcaccaagaaggtttggatcccgaaagggaattcacaggatgctaaagtaacttggaccaagacattgaggaaagcaacactcaccggacagtccggtggtgcaccggatagcgcactgttcagtgtccggtgcgcctag

SEQ ID NO: 16651 - DNA, 336 bp, Zea mays
  Peptide Sequence Number=SeqID_60026
atgcgagactcgaagctggaggtggagcggggcgaggctgtgttgtttacatcgtggcatggcgggtgtaggtgcacagcaaagtcacgcgggcacgacgcgcggctagatggcgacgtgcatggatgcggcgacgacgcagagctgcgtctaaggagggggtggggacgagcgaaggaaggagctcctaccggtgtgcgtcgtgacatcactgctcgaaggcaaaggaacgacagcaggggaggggcagtaagggggagtgcatcaagagcaagggtgcatttttttggggggatgagggagggaggtggggagctcctgctggcgttcatttga

SEQ ID NO: 16652 - DNA, 615 bp, Zea mays
  Peptide Sequence Number=SeqID_60027
atggccggctctggacaatcgccagcgatggtaggagatgacgttcgtcttgatccagagacagagagagtagttgatggtaacttactggttacaccacctcctgctctactggggcctgtaatcgacgagatgagcataggggaggaaggagaacaaagggttcgacctccgatgtccaatatttgctccagggagatggatacgcctcaaatactgcactcaaaaaacattgatccgaatatagtgccaacagtagggatgactttcaaggatattgatgatgcatataaattttataaaaggtatgcatatgaagttgaatttcgattgaagaaatacagggagaagacattcagtaagtggataaatcgttcacgtgaagctgtaaagattgaactggtgaatttggagcataaccatgagttcataactgacgaagcagagaaacaacatctacgttgcaacaaaagtcaggatgcagaattcataaattttgttgatgcaatgcatgatagccgagtgccccagcattgcataattgattttatatcagacatgcatgatgggccagagaacgtttcggtaactactcaagatctgaaaaacatgtaa

SEQ ID NO: 16653 - DNA, 405 bp, Zea mays
  Peptide Sequence Number=SeqID_60028
atggacaaccgaagtgtgccctggtctggcgcaccggactgtccggtgtgccaccggacagtgtccggtgcaccagggaactcgatgcccaactcttcaccttcgggaattttcagagggctccgctataattcatcggactatccggtgcaccaccggacagtgtccgatgctccaggggagagcgactctgaacccgccagcttcggaaatccgctccgctataattcaccggacatgtctggtgcacaccggactgtccggccttgtccggtgcgccaccggacagccaggcaggcccacaagtcagagctccaacgatcggaacccaacggcctggtgacgtggctggcgcaccggactgtctggtgcgcccatcgacagcagccttcaccaaacggctag

SEQ ID NO: 16654 - DNA, 606 bp, Zea mays
  Peptide Sequence Number=SeqID_60029
atggattttctggccgtcgatgacaaggaaatcacagttagtcattggataaatattgttttgtatgaacattctgtcgggccatataacataattaaggcaactgcttcaatgatgtggaaggttgatcgactcccaaccaatccgaagagattaatcattgagtcaagtcaagaatgcttcagtgtcgacatcccgcgctcgacagacaccggagaccctccaaatactcgatgtgatggtgatcctctgcaacatagaaagagaggtgttgttgccgatgctaaaaagctccccatgtgcagtatggatgatgatgatgactttgagccccaaaaaaagaagtgtaatatcaaaatggatgccccaaacaagacgcagagactcaacatcagatgcaacccaggagatgttcttgcgtccattcagataatgaatgaaaggcaacgtcaagctatagtcagaaaaggtttatccagcattcttgacatgacgattgatgcaattggatgtcggacacttctttgttggctcatgcagaagctagaccccagagacatgactcttcgtattggtccagacaaagaactaaaaatcaccaagtag

SEQ ID NO: 16655 - DNA, 858 bp, Zea mays
  Peptide Sequence Number=SeqID_60030
atgcttccttgtcaaggtcgctacatcaacatgaggctcaacaaggtggaagtgaacattataaggctgctggaggctgctccccggcagcaaaatcaggctaaactactctatgtactgatagagaacaatctcaggatattttgtttcagtatcaacacacggtgtctgaaacttcccaatggattggattgtggggttgaaagagatcagtgccagctcggtttgcttgatggccttgtgcaggtccctcaggtgagagatgagcttgaacaattattggatgatgacgacgatatggctgatctttacttgtctagaaagttggctggggcatcttcccctgtcagtggttctgtcagaccaaactggttccctgcatccccaactattggctcaaaaatatcaagagcaagcagagccagtgcagctactgtgcatggaaatgagaatgacgttgaagagctagagatgttgctagaggcatatttcatgcaaatcgatggcacactaaccaaattaacaacactgagagagtacattgatgatacagaagattatattaatatccagcttgataaccaccgtaatcagttgattcagtggcacagaccttgcactgcttcggacaaacatagtgaaggaacagctgaagaaatcgactgtaggagttctcctaccactgatctagaccttcttgaaagtattgctggcaagtgtcatttagtgctctttgttcttatggtgtaccttttcttacaggacatccatgtttattacctacaaaagccctctcagtttttggtttctattggttgtgaatttgaggccatggagattatacaggatcacaattga

SEQ ID NO: 16656 - DNA, 1419 bp, Zea mays
  Peptide Sequence Number=SeqID_60031
atggaagggaagaagattattggttcttaccaggctccctgcctggtaagcggacgacgcgggggctggggacgcgccggtgtgaccggagacggcggtgcggggaatggggacgcgccgcctagggagtctgccgaccaggatgggggctcgccggcgctgattcacgactggcgctatcgcccggcgcgcggaggcggagaggtgtcgaggagcagcacgctgaatggcatcgaatccggtcccatttctgcctccacggagattgggttgcggagccggggcggtgatctggggcgattagagaggagattggggggctctcgattggtgcgcggcatactcgtggtcgggagagaggccgcagtggcgcagggtttcgtcacctccctgccgccgcctccgtttgttgtccgcaccgccgcctccattccccatccgcaccatcgccgtccatgctggtcgcctccgttccccatccacaccagcgattctggtcaaggccgaccactgtcaaacaatcgagagctagaggagcggctggcgcgcgtccgcggcgaggcggcggcgtggcaggccaaggcgctcttcgagcaggccgcggccgcggcgcgggcgtcaatcgaggagctcgccaccgccgtccaggcggagtcgtcggcgttcgtggaccctcgccgcgccgggccgccgccagaccacgcgcatgcccccgctcctagccacggtttcgtcacctccctgccgccgcctccgttcgttgtccgcaccgccgcctccattccccatccgcaccatcgccgtccatgctggtcgcctccgttccccatccacaccagcgattctggtcaaggccgaccactgtcaaacaatcgagagctggaggagcggctggcgcgcgtccgcggcgaggcggtggcgtggcaggccaaggcgctcttcgagcaggccgcggccgcggcgcgggcgtcggtcgaggagctcgccaccgccgtccaggcggagtcgtcggcgttcgtggaccctcgccgcgctgggccgccgccagaccacgcgcatgcccccgctcctagccacgcgcgcggcctctccttccccgcgacacccaaatcctgccatggtcgagggcttccccacagtgccgccttccttccccgcggcgcccaaaatcacgccatggccgagggcttcctattacggcgccttcccatcaccgcgtggcctcgacagcgccaacagcgtgtggcctccaaatcgccgtcattgccccgacatcgccccaaacctcgccccaaaccgacgcaaaccttccatcgacgccgatttgggtcctgcttaaagaccatgccggccaacaactcattatccaaccgcctcccgcaccgtcttctcctctggctccgtctgtcgaggtcatga

SEQ ID NO: 16657 - DNA, 291 bp, Zea mays
  Peptide Sequence Number=SeqID_60032
atgaagcacgtggaccgtcctccgaataatcccaaacgtataacaattcagtcaagccaggagtgtttcagcgttgacattccgtgcgcagaacagtccaatccaagtcaacttgtgggaaatccttcaaatgttgagagtcaaactttcattaatgaaacagtagagctggattctgatgacgatgactttatgccagcagttaagaagcataatgtttctggaagcaatacaatagttctcagaaaggttgtgacaaagaggataaaagcggaggatcttccccgatag

SEQ ID NO: 16658 - DNA, 1215 bp, Zea mays
  Peptide Sequence Number=SeqID_60033
atggagatcctgaagcctagggtagaatgcaatattaattccgaatggatgttttgcagccaattgcaggatggcttagcttttttgataggtaaatttagcatattagaggattttcctcttgagaagattttatatatcataatgatgcttgtatataggactgatggaattcttggagcaaaggaccagcgcacggtcacctccaaagcaagacccaggctgcttctacaaggagatgtacaaagctatgtgcagcgggtgccagataagctgcagatatggcacctcatatcatgttctcgcaataatatgttgtacataaatagtattttttaccgtcagaagcaaatggaggaggttgttcatgctttggctaccggccaagcttcaaccgatgccatgacgaagcagcctgtgaaggtgtacaaatgggacatggatgagacacttattttgctcaagtcacttctggttggctcatatgctagggattttgaaggcctcaaggatcgtgagaaaagtactcaaacaaggaagcgatgggagaacctcattttacaactctgtgatgagcacttcttttatgaggagcggagtgccggtccaagagagattcaccaagccttttcagtcatgccaggagcatcatgtacgccctcaaggagaagaagattgacatgttcaagattatatgtacctgatgttccaaggataactaacagaaagcataccagcctggtggattttgggttattgggaagagatggcagcgatgcaaatgaaaacgctgcagtaccagcgaatggaggagcagtcagagacaaggaggcgttgcagctactgaaccagctggttagcaagtgggcgagggacgagcaggagctggagagagagctcgagttgtacaggcagaaggtgcagcactacgaggacaaggagaggaggaggacagcgagcttcaaggccaatggggtaagccccagtggcagtggcacttctgtgtcctccaggggcgaggacagcgatgggcactccgatgactactacgagctcagcgattctcctgacgacggcaacgttcagagctcatcggatgctgctcttagctccatgagggaccaggacgacatgaagcacctagctgctctggatgattccttgacgtactttgagatggagagactctatcctagaggaactcgagacgtttga

SEQ ID NO: 16659 - DNA, 432 bp, Zea mays
  Peptide Sequence Number=SeqID_60034
atgtggaactggtccttcaactacttccatgttcagatcgaatctatgcatagcgaggtataccatgcaaaggctgacaggaacatggttgagtgggcccaagcaatgggaggtatgaatgctctggtgctcaacaatacaacaggtaggggcaactatgttgttaagcgtgtcctgccaatgtacagtgtgggacatggtcgagtgggcccaagcaatgtgagtgtgggggtatttataggtaaccagattgtgggtgttgatgtagaaggtcccaccgagcatgccagaatgtgtttctgttcgaaactcaccgacgagagactacaggcaacacgaggagccgagagggtcccggagtggctggtgggcctcgatccctcggttaatggcctaggttctagcacaaaacctgactttgaagttcgatag

SEQ ID NO: 16660 - DNA, 684 bp, Zea mays
  Peptide Sequence Number=SeqID_60035
atgaatgtcgacagccagctattcccgagcgttaacatggtgaagcgtgcgggtcaaggtttcacatttgacatcaacatggtgggacctgcgcgacgctatgacaaactgggagataatgtcgatctaggcgatcagccccaaaaggagatagggaatacatcatggaggagaaggttcgacatgggacacgatctcgcctcgcccgagcccagcctcgggcgggacagaagtcccagacgaattctcgccttgcccgagggcctcctcaagcaacgggaaaacaggaccgctcgccccgctccgactgctgtgccacccgccagagtgaggctggcaacaaccaagttcagcctcaggcgcaacaggaagctccgcctcgcccgaccttgggcctcggcctcaggaggaggtctccgcctcgcccgaccccagggctcggcccctgcctcagcctcggaaggtggtctccgcctcgcccgaccccagggctcggcctcaaccccggcctcgaaaggtggtctccgcctcgcccgaccccagggctcggcctcaacctcggcctcgggaggaatcgcgtcctcgcccgaccccggcctcggcctcaggaggagtctccgcctcgcccgaccttgggctcggaccgaccgcgccatggaggatgcatcattaccctacccctag

SEQ ID NO: 16661 - DNA, 1620 bp, Zea mays
  Peptide Sequence Number=SeqID_60036
atggaggcccaggcccacacgtcatgtaaccggcgcaccggttactacgtgcaagaaactgcaccgccacttgcgccaatgtcgcgccttctcgactgcggaaccagtgccgcgactcgaggcaaccctgcgcatggcccaacagtgccaatcgagcacatcgatcacagggaccgggaaaggggatatttcgaaagggatccttctccgcgaaggaagcgggccccgagccctcctactgatcaggggtttgaaggctggcccccccagaggggttcaacagccgccccagagcacttgggcttcaggctcattactgatcaggggttcgaaggctggcccctcggaagggttcaacagccgcctcagagcactcaggctccgcgcccactactgatcaggggttcgaaggctggcccctctcgctttgcccttccactgaccgacctgacaggaaaacagtgccgctcgccccgttctaactgctgtgccacccgccagagtgaggctggcaatagccaagttcagcctcaggcgcaacaggaagctccgcctcgcccaaccttgggcctcggcctcaggaggaggtctccgcctcgcccgaccccagggctcggcccccacctcgacctcggaaggtggtctccgcctcgcccgaccccagggctcggcctcaaccccggcctcggaaggtggtctccgcctcgcctgaccctagggctcggcctcaaccccggcctcggaaggtggtctccgccttgcccgaccccagggctcggcctcaacctcggcctcgggaggaatcgcgtcctcgccctaccccgacctcggcctcaggaggagtctccgcctcgtccgaccttgggctcggaccgaccgtgccacggaggatgcatcattatcctacccctagctagctcaggctacgggggaacaagaccggcgtcctatccagactcgccccgccccgacagctgtgcttctacagggctcaagcgctcctccgacgaccacgataccgcggccctcatgcgggagggtcgcgcgggaggacgggctgacgagcaggctcactctctctccctcgcgaacgcttgtaacccctactgcaagcgcatccccctggcgcagaataacacgagccgtgttttcccccttgaacccccggggtcgaaacgcttagtatttcagtgctttggaccggtggcacgccaggacaggagggttgggccaccacgtaggggagattttgaggatgaagaaaacaagtaccaccggccatggtggtgccctgatggtctcagtcatacccaaaaacatagagtacagcgactacgaaacctagaagaagccgaggccaaataccttgaagtacataggaaggcgcacccaaatttgctagtaaaagtatggtgccccaggagggcagagcagcgctctcagaagaaggaatggtgtcccaaacaacaggaagctgatgcggaggtcgatgaggaggccgatgagacaccattggctagtataaacatgtgggatggagatgaagtggaagtggtccatatggatgactcgagtgagatctcactcactgatatgaacatgtgggacgcagaattataa

SEQ ID NO: 16662 - DNA, 1152 bp, Zea mays
  Peptide Sequence Number=SeqID_60037
atggtgaccaccagttcgatggtggggagaagcaagccgggctgcggcctctgccccgccctcagcttcaaggatcttcatcacccgagctggggaggagggcggggcaagtcggggcctgcctccgcgtgggccggcgaccctcttcttcctccagcacccgggggagcaagacatcctccagctctgcggaggaggcgtcctccagccatgcgagggaaggcgaactgctgctgcctggccagggtgcagcatttcgtcctccatccgggcgactgtggccggctgcaccggggggtcgcacaacacgtcgtacgcagcgagggcggtactcgtgttctaggacggtcccgttctcgttctcgtggcgagaacgggagtgaggacctgccagtgtgctttggagcggccgccgctcgctggtgcggtgttggtgggcaggtggccgctgtcgtcggtgctgaggtggtggtcgccagaggaggtttctccgccgacgagatcgtcggcgccacccgcggacagacctccggctctttggctttgatagctcgtcctcgcccctcgagtggggacgtgggcgaggtccttgtcacagcagcgtctgctctgaggtcatcgctgctactgtttagccacccaaagcggaggtcgttgtcgctgctgcagtggtcggcggcgagccacctggagtttgttatcccgcaggccctctgccgtgtttcttcctcatttcgagcattaggactcgcctgtcgactagctgaaccgcttaaccgagagcaggtggcttcctacgctgaggaggtgcagcagcggcggctggagcttggccaggtcatccatgagcgggaccaaccccggagtcatgctgccgaggctgaccctggaggagaccctggctgtggtggcccaagcgcggtgctggcgtcctccttcgaggtggagatccttctgcccgagtcgccgtccgaggccgggccagattccgccgaaggtggaaacaacgccgagggtgctgctgctccctctgtcgatgacttgttcgtcggtagcagaatcgcttatccgagcgagagttacttttcgtggaaggtgatgagtgaggattctgttatcgatatagtcgagaaggcacggaaatcgttctag

SEQ ID NO: 16663 - DNA, 384 bp, Zea mays
  Peptide Sequence Number=SeqID_60038
atgggtgtgggcaagggacggcttgatgggtgggagtgcttattgaatgctttgcgactgttcagtgaccgcgacgactcccaggggattgccgcggaggtctggacgtacatccgggccgtcgagtgctccgggctcgagggctcggatgagtccgagttctcctcggacgaggaggactcggacggcggcgaggacgaagatgatgacgacgacgacgacggcgacgacgacgacggtggcggcagcaacggcggcgggggcagcggcggcaagggcagcaccagaggcggcagcagcacgggcagcaccagaggcggcagcagcacgggcagcaccaggggcggcggcggcaagggcaatagcagcaaggccagtggctaa

SEQ ID NO: 16664 - DNA, 465 bp, Zea mays
  Peptide Sequence Number=SeqID_60039
atgcagatgactgttgatgaggctgaggtgaacgctattctcagtatgctggcgagtgagtcgattgactctgcctgtactgagtgggtgagtgctgcagctggacattgccttggcgaggatgaaggagtttatagtcctggaagtgttcgtcgcaaacgattgcgtcgaacgagccatctagccatgcctgccgaggggaagaaaagaaagaaaagacttcggcggtcatcaggattggaactgggtactgactctactcccttcgtcctcgacgatggctcgacgagcgccaacctcgagaatgatattgaaaattgtgatggtgccagagttggtggtcatgtgcttgatgaggatgaagaggaggaagaggaagttgtccctatgattctcaagaacagccgcagcaacagcagcaacgatgtcccaattcaggctttatcaggactggttagtctctag

SEQ ID NO: 16665 - DNA, 147 bp, Zea mays
  Peptide Sequence Number=SeqID_60040
atggccatgatgggttcaacatctgaaaagaggtacctctaccaggtgatgaaacggctgagttcggctgtttctgttccaaggtggttcccaagcaggaggatgaacactaaacttatttggggagggtgttttgcctcccagtga

SEQ ID NO: 16666 - DNA, 225 bp, Zea mays
  Peptide Sequence Number=SeqID_60041
atggccatgatgggttcaacatctgaaaagaggtacctctgccagctgcacccgaaagtgccaccagaggttgcagcaatgggagccggagcatttggagtagttggcggaggaccttatggggagttggatctttttgaagcccctccttccatgaacctcacagatgaacgttctcccgaagctggcagtggagcgggagcagccaaggatgaagataactag

SEQ ID NO: 16667 - DNA, 405 bp, Zea mays
  Peptide Sequence Number=SeqID_60042
atgcggcttctcgtgactgcggttctttttcttcctcctcttaccatcctgggtgacggtactagagccacccgtctgggcatccccgacctgtggtgccgagtgccacgcacggccctcggcggccctggcgcacttgtcggccagagcgaagagagtggagatagtttccacgtcatgcgtagccaacttttccaacatcttttcatcacgcactccctggcgaaaggccgtgatgatagaagcatcggagatgcaaggtatagtacctcgcaccttggtgaagcggagataaatgtctggagagtttctccgggctcctacctcattgtgtggaggtgggcctccacgccgtgctgctggtgcggccggaacatggatggccagggcgccgcgcggagatga

SEQ ID NO: 16668 - DNA, 177 bp, Zea mays
  Peptide Sequence Number=SeqID_60043
atgcaccaggggagtctttgtaaaggctatgtagtgtatccctggccattcacctcggtagtgaagatcgggcatgtacaacccaggctggaaagggatcatggcttgtggtgctcaggaggtgatgctggcaatatggaggactttgaggagttccaggactacgacgagttctag

SEQ ID NO: 16669 - DNA, 266 bp, Zea mays
  Peptide Sequence Number=SeqID_60044
atgccaacagtgggtctagcccccatgggaaagcgtcggacccctgtacaaatagaccagacctccggggcaaggtccaggacccctacgagggtccggtgccgacacgtgtccaggcctagcctggtgcggacctgtccgcataatgctactgctcctcgctcaggcggagacccgatgctaccacgcgtaacgcagcgtctaggccatcctgcaggcggcgtgcctgtccatcccattgccaaacagtacgcccacgctgcaag

SEQ ID NO: 16670 - DNA, 1103 bp, Zea mays
  Peptide Sequence Number=SeqID_60045
atggaaaagcaattagaaaatccagggaaaaaggaaaagccaaaacagcccaagccagtccaccaggcccagcagcgcgcgcccgcgcccgcgctcctgccgcccctgacaggcggaccccgcctgtcggcgccagggctgcctcgcactctcctctccctcttgctcgctgcccagtggggccaagatgtcggcgccggtttcttcgaccgcgcgcccctcttccctctctgcctcgcgggcccgaattctcggccacaacgcccgcccacgcgccccagctccctttttgagccccgcccgtgcccgcactcactcccccgcctcatttcacgcagtcccgctcctgctcgtgctctgcccacgctgtccgaccttgctggagacccgcgcccgcctccccggtcatctagctcgccggaggccacgccaagcgaccccgagctccgccccgaggtgagacacccgccccgtgctcgttttgctctattcatgcctgcccttagccaatttggcctcgccggcgtgcgaccgcgctttctcgccgcgctcgcacgaatttctcaccggagttacctcggtctgcctggagctttccccccgccgttctcccctctctgtcctcggtctcgtggccacaaccccgccatcgagtttgccgagtcatcttccccccctctgaccaactccgacgaccccggaaccgccgtagcacgcacccaccccaactctggcgacttcaccgccgcgggaaggagcggcgccgcccgcagccgttcaccccctcggtctgacaacgagcagtccgaggttcccgagtgtgttactggagacctccctgagcaacaacctggtgaaggcaaggaaagaggtacactccaagatgccaacagtgggtctagcccccatgggaaagcgtcggacccctgtacaaatagaccagacctccggggcaaggtccaggacccctacgagtacggcccggaccttcggatcgggtcccggatccctctgcatggggtccagactacccatagccgggtcccggaactcttgggggaaaatacccaggccttgctcaggcaggggtccggtgccgacac

SEQ ID NO: 16671 - DNA, 138 bp, Zea mays
  Peptide Sequence Number=SeqID_60046
atggcccaaggcgcaggctatagccacggcggcattgatggagaagcccacaggcctgacatccagttcgccatcacgagctgcaggggggtctgctgggaggacggacgatgcacgggtgcagtagcagcagaataa

SEQ ID NO: 16672 - DNA, 1602 bp, Zea mays
  Peptide Sequence Number=SeqID_60047
atggcctccgcccccaacccctccttccgcccggaggaggcacgctcccctcccgccctcgagctcccgaccccgccgctctccaagttcaaggtggcgctgtgccagctctcggtgacggcggacaagaatcgcaacatcgcgcacgcgcgcgcggccatcgagaaggcggcctccgagggcgctaagctcgtccttctcccagttattggtgacacaaagatcacaaaccttttatttagtttgaagcctaaaactcattgtggaaatgacggtaaagcaaattttcagggttgggctgtggagatatggaatggtccgtattcaaatgacagctttccagagtacgcggaggacattgaagctggcggagatgcggccccttcattttcaatgatgtcggaggttgctcgcatcttacaagtcactcttgttggtgggtccatagctgaacgttcgggaaacaacttatacaatacatgctgcatctttggttcagatggcaaacttaagggtaaacatagaaagatccatctttttgacattgacattccaggaaagatcactttcaaggaatcgaagactcttactgctgggcagaatcctactgttgtagacacagatgttgggcgaattggtattggtatatgttatgacatccgtttccaggaattagcaatgttgtatgctgcaagaggtgctcatttgttatgctatcctggtgcattcaatatgactactggaccactgcattgggagttgctgcaaagggcaagggctacagacaaccagctgtttgttgcaacatgcggcccagctcgagataccagtgcaggatatgttgcttggggacactccactcttgttggaccttttggagaggtgattgcaacaactgagcatgaggaggcaactataatagcagaaattgactactcactgattgagcagaggaggaaaatagaaatcacttgggaaaatatgattgccagactagccctcagtgtaaatgtctccatgtcaagggcggtattgcccaagggttatgcccccacgccgagctacccgtcgacaggagaagttctcctggtcgccggtttagagaagagaggaagagacttgatagggaagggcaaacctgtgaacaggttccctgtcgatgctgcagagggcggcagacctgcacggtgcacaactgtcagctgtttgttgcagcatgcgctccgggtcgagataccataccagtgcagccgaagtggcaatggatcctcccaccatttgtttggccatcagcagccacagtacaagagtaaattggttatgtatgatggcagggtagggcaacaaacctgtgagctgcgggaagccgggaagcataatgagggggtcagtagccgcaggaaccctggcggtgctgcagagagcgggccgcggcactgcagtaccgccaccgcagctcaggaactgccgctgctcacaggcacagcgcactgctaccgcaggtggctgtgcctcacactgtcagtcaggcaggcaaggcatggggagctcatgagccaacaactgaagaagcccccagccttttggtggccggagctgtga

SEQ ID NO: 16673 - DNA, 687 bp, Zea mays
  Peptide Sequence Number=SeqID_60048
atggctggctggcgcccgcccatcactcgtgtcgtgtgtcgttcggacgggagaaccccagcgaacaggatcgttatcgggctccccgggctgtcgcgtcaaccaacaacagctgggtacgtgctcgacccatcatcacggcccgcggacttgcattgcattgcattgaacggacgggacgggatggccgacgcggtgcggtcgcggcagcctgggctcgccatcaccgcatcgcctcgcccgcgcgactgttgggcatgggcgccggccgggtcggtcgaggagacaggggtaccagcgcagagcgcacggtctatcccgcggggggtaacgccaccgggggccggtgaccgtgaatgtctgcgtgggctcacccgcagagagatcgccatcacccaatccagaccccacgtccccacccgcacgcccaacgggcgccacaccccgtttcgtttccacctccctgtcgccacgtcggcgcctccctccgccccgcccccgccccgccgctatatcttcacgccggtcgctccactcttcctccccagctttccaccaccctttcgccacaccgcgctcgacactacacagcgcgcacgctcggcttcgctagccgccaccaccaccaagcgacctcttctccagctctcctgttccatgcaccaccgctcgctccttgtctcctag

SEQ ID NO: 16674 - DNA, 252 bp, Zea mays
  Peptide Sequence Number=SeqID_60049
atgtccggtgcaccagaggactccgacttcaaactcgtcaccttcgggaaattccagaggcaactccgctataattcaccggactgtccggtgtacaccggacatgtccggtgctccaaggaagagcggcctccggaactcgccagcctcgggaattccttcggccactccgctataattcaccggactgtccggtgtaacagcggggcaacggctactacggcgccaacggctacctgcaggcgcaattaa

SEQ ID NO: 16675 - DNA, 507 bp, Zea mays
  Peptide Sequence Number=SeqID_60050
atgggcaagaacaacaagcgcaagcgcgagccgactcctccatcggaggatttcggtgactcggaatactcggaggaggagttctcctccgagtccgagaggtctccggctcccgtctctcccccggcgtcgtccgatgactcggacgactcccaggggatagccgcggaggtctggacgtacatccgggccgtcgagcgctccgggctcgaaggctcggatgagtcggagtactcctcggatgaggaggactcggacggcggcgacgagggtgaagacgacgacgacgacgacgacgacgacgacggcgacggtgacggcagcggcagtggcaggggcggcggtgacggcagcagggacaacaccaagggcgtcagcagcaagggcagcatcaagggcgacagcagcaagggcagcaccaagggcagcagcaggggcagcaccaagggcagcagcaggggcagcaccaagggcggcggcggcggcaggggcagggccagtggctag

SEQ ID NO: 16676 - DNA, 801 bp, Zea mays
  Peptide Sequence Number=SeqID_60051
atggccatggagctccctctcttcctcggggacggcccggacgccgcgctcttctcctccctctggccctccttcctcgacgacctgcagcagcccccgcaagagcagagcgtggcggagctgaagcaggcgctgctggcgacgacgctggagctggaggcggcgagggaggagctgaggcgcaaggagcagagcatcgccaagctggccggcctggtccgcgaggtggccagggagcgcgacgacgcgcgggaccagctgcagagcctccgcctcctggccgcgcaggcggcggcggcggcgccgccgctcgtcacgtccagcgtcaccgactccgacggcagcctcgcctcgtcccccgccgaccccttcttcgaccccgtcacctccgccgaccggcgctgcaagctcagccccgccacgccccccgcgccgccgcccaagccggtgcagcagcgccactgccagcccggagcctgcggccgcgggtcggcgccggcggcagacgccgtgctcgagacgctcgccagcaagcggccccttccgcagaggggccgcctgctggccgccgtcatggaggcggggcccctgctgcagaatctgctcgtcgccgggcagctaccgcggtggcgcaacccgcccacggttcgcgccccggacacgacgctgccgctaggcgccgccacgctggcctccaccgcctgcatgaagcggccggtggcggcggcggccatgtccgtgctgcccgccgccagctgcccgccggctttcatagccaagcggcagaggctgctgcactga

SEQ ID NO: 16677 - DNA, 132 bp, Zea mays
  Peptide Sequence Number=SeqID_60052
atgtcgcgcgcgttcgacgactactatatcaaggattgtggcgtcatctcggcgccggaggatcacctattcaccccctctctaggtgctctcaattggtatcggagccgttctcttcaagaaagggactaa

SEQ ID NO: 16678 - DNA, 342 bp, Zea mays
  Peptide Sequence Number=SeqID_60053
atgccactggacgacggcgcggaggcggcggacttcgtgctgctggacgagctcctggcggcgctgccgcgggacccctacgagcagctggcctcgacgaagaggagctccccactgacgatgagacggtttatgctgatggagatagctcagtgtcgacatatgaaaggcgggcaagccttagggaattctatgcagcttgagagtagtttgatcgagagcgacctgaaagggaagggccgatgcaaggatatagtgagtaggaggaggatggaggattggaaaaagaactccacgcatgccacacgcaacacctcctacgacagtgtaggaaacgggtga

SEQ ID NO: 16679 - DNA, 693 bp, Zea mays
  Peptide Sequence Number=SeqID_60054
atgtccgcgttggtccctgtgaagcccgcgccgaaacgccgtggcaggaaaccgaaacgcattgtgcacaaacagctggacatcccagatatctgcgaccggcttacatcgtctgtggcatgcgaagaaatattgtactgtgaggaagtgaagaaccagtccgtttctgaaatcgatgccctgtacgacgagataaggcctgcggttgaagagcacgagagggacagccaagatagcgtctccacaagcctcgcggagaagtggatcgaggctagctgccgcaagtataaggccgaattcgacctgtatgctgcagtactcaagaacgttgcctccactccgctacggtcgaaggatgatgtggccccaagagtgcagaacgggttgaagtacctggagaacggtgggtcccacctcctttgtcatccaacagaagccctgaacgtgaaaatgaatccacatttgctgttggtagaagtaggattgttgaggttgttacagaatacttacactcaaggagacctcgattccaacaaaggttgctcggcctatgcaacaaaggtgtctgacattcttcataatagtagcgctcctgtgaagaacgcatctgcattccaaacgaagtttgaagcttgtttgccagatgttatggaaaacttcaatgacttgtatcactggaaggattaccgctga

SEQ ID NO: 16680 - DNA, 861 bp, Zea mays
  Peptide Sequence Number=SeqID_60055
atggcggacgcggcggcggacagggagagggacaagggcaaggacgaccgccgccgctgggcggctcgctgcggtttcgccgtcctcggcatcatgagcaccctcctcgtctacggcgtcctgcaggagaagatcatgagggttccgtacggagcggacaaggagttcttcagatactcgctattccttgttttctgcaaccgtatcaccacatccatggtgtctgcaatggtgttactggcaagtaagaaatccttggaccctgtggctcctctacacaaatatggcgttgtctccatatcaaacatactgaccacaacctgccagtatgaggccctcaagtatgtcagcttccctgtccaaacacttgctaaatgtgccaagatgatacctgtcatgatctggggcacaataataatgagaaagaagtatggtggaaaagattacttctttgctgtcatcgtgactctgggctgcgcattgttcattctatatccggcaatgatggatgtgagcccatttaataaaggcagagaaagcactatttggggtgtttcactcatgtttggttatcttggttttgatgggttcacaagcacgttccaagataaactcttcaaagggtatgacatggaaatacacaaccaaatattctacacgacagtgtgctcttgtcttcttagtttaagtgggctgattctccagaatcatctgattccagctgtggattttatgtttcatcacccagattgcttctctgatgttctaatcctgtccagcaatgtgtcggctcagaatgtaaagcaaaatcacttgcgtgtagatgcaagtgttcgatgcagggttcaagcacgtggataa

SEQ ID NO: 16681 - DNA, 948 bp, Zea mays
  Peptide Sequence Number=SeqID_60056
atggctcgacttagacacactgctcgtaagtcggtgattcctttcctgccgtctcgccttgcggagcgtcccctgcgccgcactgtgtccggtcagtcgagtcacctggagaggctgcaccaccgcctgcgtgaggagcaggagcgccagcgtcagcacagagagcagcagggctcttcctccccacctgagcaggaggtggagtccgtgaggcgccgctcctctgttccccagctggaggcgccccttgcaccatcgcgggacgccccggctgttggaggagctactggaggaggtcctggaggagaccccgacgacgacgactcagaccacagcacggagtcctctgagccacaggaggcggaaggatgggtcgcccgacccatcacccgtgacgccgctcgcggttgtcacttccacgacgcactcgacaccttgctgcgccaggctttcgaccgacacacctggtcgatcgagtatcgttgtgtagtctaccagcacagccgcgggaggtacccggaccgctgggaggctacctacctagttcgccgtccggaggatgacctccggggtgcagaggccgtttcggagcactactccatctccgagagggacactgcagaggcggctatgcaggatgcagcacggcgtgcactctcccagtactgttccttgttcggtggggtggccgacggtcttaaccttaggttgagcagcacagtcaacctagtcgcagtgcttaacactgagctggatcactctctggacgagctgagcagggctcgaacggagattgctgagttgcgtgctgagctagcagagcgccgccaccaggagggtggttctcccgctcctgctgggactcagcacccataccgctcgccgccacgtggtcaccacacttatggttcccctgcctgtaagaccaggatagatctggatccttag

SEQ ID NO: 16682 - DNA, 339 bp, Zea mays
  Peptide Sequence Number=SeqID_60057
atggagacccgtgcactcttgttttgcttaggaatcagggagaagatcgaaagggaaaaggatttgaacatgctggattcggactgcagaagaacaccaacttgtgacggtcaccacggtcagatgcggggctcggattggaatgttcaagcacaacatggaaagcttatcaagtctactttcatatggatccggaattatagtcatatctgttccgaggccgccaacgagtgccctagtggccagggtgtcacgctccacaagatcgtgacagccataggaggtggtgtatcggttgataaggcgcagcgtctttggaaggctgtagtcgggccgtga

SEQ ID NO: 16683 - DNA, 225 bp, Zea mays
  Peptide Sequence Number=SeqID_60058
atggagacccgtgcactcttgttttgcttaggaatcagggagaagaccgaaagggaaaaggatttgaacatgctggattcggactgcagaagaacaccaacttgtgacggtcaccacggttctctggaggatatggttgctggagtgacttggccgtccatcttgccatcgggctggacagtcgagtgggaccctacctcagcagaggaggagcatgaggagtga

SEQ ID NO: 16684 - DNA, 231 bp, Zea mays
  Peptide Sequence Number=SeqID_60059
atggtgctgacatcccgggcccagttgctagtgactcaggcgggagagcgtgagcgcgatatgttcttcagaaccttcgtccaagactcgttatacccgaaggggaataatgttttgaaggatgaaggtgtggagcataggggatggtggtcaacgacgaaggtaaaggtcatgcaggttcatgttgatggaacgagaatggcgaaggacaagcgctgggacttgacatga

SEQ ID NO: 16685 - DNA, 1224 bp, Zea mays
  Peptide Sequence Number=SeqID_60060
atgatgaaggtcaatgcttgccgaaggtggtcgaaaagggttcaccggaggaccttcggaagccgaaggcccccaacagttgcaatcttctactttgaatatttctacccaaacgatggagtcttcaaaaaggaggggcgtggtacccttaagggtatagtagcagccaccaagcgaatcaagaatggtgatcacaaacttaagattgaattttcttctaagcttggaggtcctgtaggaccaaacactcgcacttttgtggatgaaattgtattgtttacaaagaaaaaggcaccactcattggagtgaaaaagtggaaagatatagagctcaatgttaggtcttctatagcctctaacgtactgcgaaggtgggagtttctaaccaatgaggacgcgcatgaaaagatctggtctattgctaaggagagatacaaaggatggcgatcaacgttaagctcaacatacaaggcatacaatagttatgctgaaaggatgaaaaacaagcctgaagatgtagacatcgtcgagtggcattacatgatgttgtattttggatctgagaaattccagaaaataagcagtcggaactcagaaaaccgtcagaaacaaagaacgaagcatataatgggttctagaactttttcccaaataagctttcaacaggagaaggcaactgagaaaattgttgtgaaaatgtatccaacaagaagtcaagtgatggaatcaaagttcctcgaacaagctcgtgcaacggttgtaaccaaccaaaagaacattgaactcgaaagtcaggtgcagttgttatatgaaaaacttgcgtgtgaggttggagaacgagaaagaatactacaggaaaaaatgcaagcactgcaagaagaagaagaaagaaaaagacaagtgcttagagaagaaatgaggcaagaaatggttgctgcccttgctgctgtagcacaacagagcaaccgtgaaagcaccactccaatcgatccttcttccgttgtccctactaaacctcctgaactcatcccagctgatcctcctgcacctgcaccaagtagtgcaaacaatgttcgtacaccagacacaaacaataagaaagacaatatgccagcaaactatattagctcttacactctaaggaatgctgtgacaagacgtgtgcaggcaaggggcaacaaaacaagcgaatgtgtatggaatgcaaatgttcttgtattatga

SEQ ID NO: 16686 - DNA, 303 bp, Zea mays
  Peptide Sequence Number=SeqID_60061
atggtgggcgtgatgagggcgccgaaggtaactgggatgactatgttgctgatactgaacaagatgaccaagaagcacctaatcgccgcccactacgtactaaccgtagaggtatgggtggttttcaccgacgtgaggaaaatctacaccatggcaacagcgcacgactacgtccatgaccggtcgtacaccagcaccaactccctcgccaagtcgaccagcacccccgccttcctccagcgacaaaccacgtgcatcttccacaaattcaacaaccaaatctgcccagaaaccagcaggtag

SEQ ID NO: 16687 - DNA, 363 bp, Zea mays
  Peptide Sequence Number=SeqID_60062
atgcaggcggcatgcaaccgcaccaagggggcgcaccctttcgacttcgacgcgtccagcatggaggcccaggcccacacgtcatgtaaccaccgcgccggttactacgtgcaagaaactgcaccaccactcgcgccaggaccgagaaaggggatactccgaaagggatccttctccgcgaaggaagcgggccccgagccccctactgatcagaggttcgaaggctggcccctcggaagggttcaacagccgcctcagagcactcgggctccgcgcccactactggttagaggttcgaaggctggcccctcggaagggttcaacggccgcctcaggccactcaagctccacgcccactactga

SEQ ID NO: 16688 - DNA, 333 bp, Zea mays
  Peptide Sequence Number=SeqID_60063
atggctcaggtgttgcgtggcgagtgggtgcacgacctcggggcgctgaacagcgtgctgcctgacccggagccgacccctgcggaggccgtgtccgcggtcgccctggagccaaccccggagaccgcggcgatcgcgacggctgcccccacatctgctgcggccgacgaagacctgcccccaaaggtggccgaaggcgcccctgatgcccccgcagctgctgtgccgagtgctgaagatcccgcagcggaggcggcggaaacaacagcagaagcggcggcggagccagcggcggaggctcccgcagcgtcagggccttcgcaggtggcatag

SEQ ID NO: 16689 - DNA, 270 bp, Zea mays
  Peptide Sequence Number=SeqID_60064
atggcagtcggggtcagtgaggcattgtacgccaaggcgaccatggagacccgtgcactcttgttttgcttaggaatcagggagaagaccgaaagggaaaaggatttgaacatgctggattcggactgcagaagaacaccaacttgtgacggtcaccacggtcagatgcgggctcggattggaatgttcaagcacaacatggaaagcttatcaagtctactttcatatggttccggaattatagtcatatctgttctgaggccgccgtaa

SEQ ID NO: 16690 - DNA, 192 bp, Zea mays
  Peptide Sequence Number=SeqID_60065
atggcgaggcactccgtccccacacacatcaaccgtccccatcgattccccgtcagcagagaggggctcaccgccttggcgtacaatgcctcactgaccccgactgccatcgtgcagcagatcctctatggcaggctctggtgctggctcatgggctaccatttaagcaactccttgctccagaacgaggat

SEQ ID NO: 16691 - DNA, 315 bp, Zea mays
  Peptide Sequence Number=SeqID_60066
atgacctggccaagctccaactgctgtcgctgcgcctctgcgcttgccgccgctgcctctgctcccagatcgacacagagcaaccgaagggaccgggaaaggggatactccgaaagggatccttctccgcgaaggaagcgggccccgagcccccctactaatcagaggttcaaaggctggcccctcggaagggttcaacagccgcctcagagcactcgggctctgcgcccactactggtcagaggttcgaaggctggtccctcggaagggttcaacggccgcctcaggccactcgggctccacgcccactactga

SEQ ID NO: 16692 - DNA, 1383 bp, Zea mays
  Peptide Sequence Number=SeqID_60067
atgctccgctcgccgggcaattcgccccgcctcctctcaccgtcgcccacacccgcgccctccacccctcgcccggcctccccgcccccctccaacgccccctcctcgaagcgccgccggtcggaggtgctcgacgaggacacctacgtcgccgccatcgagcgcatcatcgagcgcgactactttcccgacctgccccgcctccgggaccgcctcgactggctgcaggccgtgcggtcccacgacccgctcatcctacgggacgcgcagctcaagatcctagaccgccgccgccgcgcccagcgccacgcgggcggggcccgtccccacgccgacgccggccacctccaccgcgctccgctccccgtcctttctcaccacccccgccgggatccgtcgccggcggccgaggacaacgactccttctcgcgcatcctagacaaggtgaaccagcgccgccgcgagcgctacgcgcacctgctggagccgccgccgcctgccgaggcggggagcaaaccgtcagaggacgccaagcgcaacaggatcacggacgggtacggtacatcggggcagccaccgagcacgctcgaggtcgccaagttcacggcaaagaaccagctcatgtactacccggctgaccagggggaagcgcccctcacggaggaggagcgcgcagagcggctcagggggatgaccaaggagataaacaagtcgaacaccaggctacatggcagagccacggctgatgacgcgaggcccaaggaggaggagggggccgccatactgtacgcgctggttgcaggctctactccgggagggatggcctaccacgaccctgacaagttgaagaagtacgatctggaggacctgaggaagaccccgaaccctttctacctcgagtcggacaagaaggccggcaacgggtacagttttgtgaggacgccgtcgccggcacccggcgtggacgagtcgccgttcatgacctggggtgagatcgatggaacaccgctgaggctggactccgatgagacgccgggcggtagcgagagagcgcatttcaagatgccgccgcctcctgctcgcgatgtcaaggcgcacctgctttcgagggacgccgctcggaaaataaaggagcggtctaataccttccataggccgcccctcccctcccctgcgaggggtgtcagcgcaagccctagaaccctctcgcgggccgcgcaaaaattcgtgaggaacgccatctccaagtcggcaaagtcctccagcgccattgacgaatctctccgtgcaagctacagaggctcgaccccgtctgcgagcactcccaagtcaaggttttcacgagaccctggccttgcatcgcgttctccatccacaaggtag

SEQ ID NO: 16693 - DNA, 1464 bp, Zea mays
  Peptide Sequence Number=SeqID_60068
atggcttcttctgattcttcgtgtcgtcgcgtcgccgtggccgctagtacccttctcacagcttctctccctcgttcccacccaggagagggtggcggcgctggctccagcgcggtagagctggacctcagggactcgggcctgaccttctcatggccgtgctcgcgcctccgcggggcgctgggggaagagatcagcgccaaccccggggctccggcgccgtgctcccccgaccagcttgccgctattgccaggctcttgcaggaccaggacatccctgaggccaagatctggctctccgccggcctctccgccttccttttcctctacacctccattttgggatgcaggcctggcaaggcagtggtgtcctcggacctgcccatgggcgcagggcttggctcatcggcagcattttgtgtctccatgtcgggggcactattgacggctgctggcgcagtaagtgttggagcacacaggggtgctgagggttgggaggtgttggagaagggtgctcttgagctggtcaaccaatgggcgttccaaggggaaaagattattcatggcaagccttctggcatcgacaattccgtcagcacttttgggaaaatgatcaaattcaagaagggggaactgacaaaccttgagtccaggaacccagtcaaaatgcttattactgatacaagagttggtaggaacacaaaggcactggttgctggtgtgtctgaaagagcatctagacatccagatgctatggcttctgtattccatgcagtgaacactatcagtgaagagctttcaagcattgttgagttagtagccgaggatgagatagccatcacctctaaggaggataagctagcagagcttatggagatgaaccaagtatcgtccaatattgttctggagaaagtcaccagggagctcgaatctcatggttatcgctgcttcaaagttgaggcggcttcaacagcgccacacttcaacaccagtgatctggctgtggggtggtcaccacctatgcgcccgccccggtcacaggtgccaaaaccttctatggatctagctcctccgatttacagctctggggtaccatcttgtccagttaactctgcacatcagttttcctgtgttgcactacttgtctacttcgtccactcatccggaaacctgcagacgatgaatgaggatctgctcaaaacgtatcatgagagagctgtttccactgatgctcgctcgctaatcactttgttcagagagctgacaaactcacagcagttaagtggcagttgcttatcagcatttgtcctcgagatggctgcacttattgttaaccttcagccacaccgttctgtgcatgagcaccagggcaagaaagctgagcaagagtaccctctgaagtcaaaaactggcggaaattatcagataaatattcaccaccagaatcagaacgaaaggttttaa

SEQ ID NO: 16694 - DNA, 255 bp, Zea mays
  Peptide Sequence Number=SeqID_60069
atggcacatcaaccaggctttggccccgcctacaggcttgtaacctcccctgaggcgggcccgggggccactgtcggtaccctggaacaggggtaccccttactgatagcggtgtgccagtccaatcagatagcggacagtacgctcacacagctgcacgcgcgtagcgaccatcatgacttgtacgataccaaggaaccttctgctgcacgccaatccaactcaagtggtggatgtcgagacacagggagataa

SEQ ID NO: 16695 - DNA, 879 bp, Zea mays
  Peptide Sequence Number=SeqID_60070
atggtggatgaagtgcaaatcatcaataagaatcagagaaaatacaaaaggaaaaagacttggctggagcagccaagactctgcgcagtctgggtgcaccagactgtccggtggtgcactagacagtgtctggtgcgccaggctggagtctggtcaactgaccgctctcgtgaattcgtcggcggcgtacggctaaaattcaccagactgtccggtggtgcaccgaactgtccggcggcgcagggttcccaggcggtggaggccaccaggaaggcccttgaagaccttcaggcggagcatcgcgccggggtccagcgcatcgccgcatgggccggcgaggcgagcacggccctggtgccgctagggatgagtcccatcccggtgtcggagctgccgacgtctatctccgacgcgctcccggtgttggactccgccgccgaccgcctccaacgcctggaccagattcttagcgcccgcctggagactgagggcggcaggctctgccgggtggacctacaggatttagtctgggaagccaagccgtatgctcggacccttgaatcaaagttccaaatactaggacacccgtcgcagagtggtggagcctgccaacaggccgggcttacgagggcggacctcaccggattgacgtacacatatgcacaacctagttacgaaggaagaaaactcaaccccctagtttcgcttctatgggaagaacttacggagatgctctatgttccaggggttgggaagaggcactccttcagttgtggcaaggcggacacacccgggtcggcatacttccgtcaccttgaagggtccttcccaactgggggagagtttgtggagcccttcttggttcagtactcaccttag

SEQ ID NO: 16696 - DNA, 417 bp, Zea mays
  Peptide Sequence Number=SeqID_60071
atgagcaagaacacaagagacacaagatttataccgaggttcggtcacaccaccaaggtgccctacttcctcgttgaggcgcccacaaagagccaggtctctttcaaccctaatcctacctttgccgaccacaaaggtcaagcccacacaataatctttgctcaaacgagcggctcgaatcaagaagagcaagaaggatttagagatgaagcaccaaaatcgcagctcttcaatctcactcaaagatttctctccaaagatttgaaatgggagaggcaagaggtgtgtgagcgagagtgggaggtgtttctcaggttggaagtggagttttgtgcgtgctctcctgtggggaagagtgtggcaggtgtatataaaggtgcccccaaaagctggtggccgttggggaaatctgactga

SEQ ID NO: 16697 - DNA, 1809 bp, Zea mays
  Peptide Sequence Number=SeqID_60072
atggagtacgagcgcattgagaagccgttccccgtccagcagggcggcgggttctcgcccaagcggctgcgcgcgatgctgctgggggtggacaagcgccgcaaggggcaggacggcgccgccgaggaggacgaggacggcggcggcgactacggcgccctgccgaaggcccacgccagatccggcgccggcgacggtggtggcggtggaggcgccacgtgcgaagaatacaaggacgtggacgtggtgagcaccacctcagagttctcgtcctcgctggagacagcgggtgggcaccggccccgggacgctcaccccgtcgccacgggttctaggaccagggtgccgcccgaggaggactcgtgcgactcggagagcgtggcatccaacttcgagttccacaaggagcggcgggcagcggcgtcggcggcggcgtcggtcgtccctccattctcaaagcccgccccgtcaaagtgggacgatgcacagaagtggatcgccagcccgacggcgaactgccctggcaggggtggcgcggctcctgcgccgaagaagacagagaaacctggctccggcatcgggaggctgccgctgccggcgaccaaggtcgtggtagaggccactgaggagatagataccaagaggatggatccgagccaggagaagcgagagattgggtggcagaaagcggcgaggtgggccccgcccgacccctgtccggaggcggagccctgcccaacaaagaccacactactcgctgtagaaactacagtggctgctgcttcagcagctggtaagggctgtgctgtgctcacttcgccttcccctcatgatatgattttgctctcttcttctaactggaaaaaagtggcactggatgcagttaatttcaaccgccatgatgcatccaccacgcttcagagcgcagcaacatgcatacctcctccaacaacggtccggtcagtgtcgatgagggacatgggcacagagatgacgcccatcgcaagccaagagccgtcccggaccgggacgccggtgagggcgacgagcccaaactgctcccagccaacgactccacggaggacgctcggtggccccagcgcagtcggctccttcatcagccacggaggagaatgcagcagctcggagctgagcgagcaggagctgcagaccaaaaccaggagggagatcatgctccttggcacgcagctaggcaagaccagcatcgcggcatgggcgagcaagaaggaggaggagaaggacgcctcgctctcgctgaaaccggtgcccatggaccagtcgacgcagaacataaccgcgatccgtgcggctgcgtgggaggaggcggagaaggccaagtatttagcgagattcaagcgagaagagatcaagatccaggcttgggaggaccatcagaaagcccagatagaagctgagatgaggaaaatcgaggtcgaggtggagcggatgcgtgcccgcgcgcaagacaagctgatgaccaagctcgcgtcggcgaggcacagcgcagacgagaagcgtgccacggcggagctgaaacggaaccgcgcagccgcgaggaccgctgagcaggcagagcacatcaggaggaccggccggaacaccaacctgagtaccggcaagaaaaagatgtgtcggcgagtcttcagttctgggcctgcggtttctatttgggaaggagtgtactacagcatgaaggagcaggaactgaagaacatatactggatgttcgttcatttctgccttgaaagagtcctacagcacgaaggaaccgaagagagcagaacataa

SEQ ID NO: 16698 - DNA, 465 bp, Zea mays
  Peptide Sequence Number=SeqID_60073
atgtcggagcagcagcagccattgtcgcagcctcggagcagcatacgggaggctctggagaaggaggacaaggagaaggcggcggtggccaaggagaaggcggccgtccccaagaacggcaacggcgacaagaatggcagtggcgccggcagcggcaatggcaacggcggagcgcccccgcagtctggggaggaggcggtccgcgagatccaggtggtcagggaggcgtactgccgcgagacggccgcgccggcctacgtcatacccgaggagccgccggccatggtcgagctcgtcggctggtacatctatggcttctggtcctacttcatcacccacttgctgctgtcggtcctcttcacagccatcatcacgcaggtcgccttccccaactccgacttcacgcccgaccccaagtacaccctcaagggtgtcacctgctccgtccacgagatgtccatgtaa

SEQ ID NO: 16699 - DNA, 411 bp, Zea mays
  Peptide Sequence Number=SeqID_60074
atggagcaccgtcccgggttggagaggttgttggagactgcccatctggagcttgacgggaagctgttcgtcaacacgcagcaggcccctacctggcgcgccaactatcggcgtttcgagaccggggggtccctgagccgacgagtgagtgtgccgcgtgccccagcccagatgggtcgagcgcgtgggcgagcgcgaaggggggaagcgaggcggccggagacgggcgtgagagaggtggaaatcccgcggccttcgtgttcgtcccgcgcccaggtcgggcgtaaggagaggatccaggtgtacaatgggggtgtagcagagtgctacgtgtctagcggagggagagctagcgccctaagtacatgccaatgtggcagccggagagatcttgacacccagctggcgtga

SEQ ID NO: 16700 - DNA, 1020 bp, Zea mays
  Peptide Sequence Number=SeqID_60075
atggccatcttgcgcccccaccaggagccccatccctgctctcctcaaacgtgccgccgcaggaccaaataccatcatctcctcgcgcaaacgtccgtcgccagggatcgcacttgccccctgcctccacgccgtgatgcctcggccctccctccgcctgatccgacctgtgggctcgaaaacgcgtccaccactcggagcttcttggcctcccacacgggcggagcctcggccgccaggtcgccagtctgctgttggtgcggctccttctccctgctacacccgctggctgctacctcattacctccttctccctgctacctcattacctccttctccctgctacacccgctggctgcggctccacgtcgccagtctgctgttgctgccttctggttttggcttcccacaatcccacggcctaggggctaccagtaccaggatcatttaatgcaaaggtggcctgacatctttatcctgacgcgcgccctccggcagagccgaagtgaccgccgtcacttcgccgctccactgaccggtctgacagaaggacagcgccgcctgcgccactccgactacagtgccactcgacagagtgagactgacaggcgggctcggactcgggctaagacccggaagacggcgaactccgctccgcccgacccagggctcggactcgggctaagacccggaagacggcgaactctgctccgcccgacccagggctcggactcgggctcagccccagaagacgacgaacttcgctccgcccgaccccagggctcggactccgccctggcctctgccgacgacctccgcctcgcccgacccaggggctcggactcggcctcggccatggaagacagactcgacctcggcttcggaggagcctccacatcgcccagcctagggcgcaggccagccacttcaacgggaagcgccatcatcaccctaccccaagctgactcgggccacagggaacaagaccggtgtcccatctggccagctccgcccagatag

SEQ ID NO: 16701 - DNA, 495 bp, Zea mays
  Peptide Sequence Number=SeqID_60076
atggagatagcgtctctatgtgaagatggaaagggaaatgggagtaattcggcaaagacatcgcttccactcaacttccattggtattatccactctttgccggtatcccgccgtctctccgtctttggtgccaaaggttcatctacaactatactaaatcgactgtccggaataccgtagattattccggacaggagaagctttttggaaaaacagactatgagcggaccgtccgggcccttgcggcggacagtccgcgacaccgagttgacttcgaccaggaactacaaatcagggacagtccgactaaaccgcggaccgtccagctacaacgtgcggaccgtccggctataattcgcggacagtccgcaggtgaagacctggttcagcccgaaggtgacaagttgatcaaaaggaattatatagctggcgcggaccgtccgggaccaagggcggaccgtccgcgtggtgtcaccgaggcagagagccgttga

SEQ ID NO: 16702 - DNA, 1371 bp, Zea mays
  Peptide Sequence Number=SeqID_60077
atgtacgggccgccgtcccgaggcggcgggggagccggcgctgccggagagcagccgagggtttaccaagtttggcatggaagcaactgcgtctggatctgggcgtacggtgattaccaagggttttgtgagaagacgtttgaatttgtttctggtagtcaggagtttttcttgcaaggccggttcatatttggacctgatgtgagatccttgtttctcaccatattccttattcttgcaccagtggtggtcttctgcatatttgtggccagacatcttatcaatgactttcctgatcattggggagtttcagtcatggtcatagtgattgtcttcacaatatacgatttgacactgctccttcttacctctggtagagatcctggtatagtgcctcgtaacacccatcctcctgaacctgaagctattgatatgaacaatgatgctggaaatggtcagacaccacaacagttgcggttgccacggacaaaggatgttatcgtaaatgggaccattgtgaaagtcaagtactgtgacacctgcatgctgtacagaccacctcgatgctcacactgttctatctgtaataactgtgtggagcgctttgatcaccactgcccttgggttgggcagtgcataggattgcgcaattatcggttcttctatatgtttgtattctctacaacattactgtgtctctatgtatttggcttctgctttgtgtacattgtcaagattaaagacgcagagcagtcgacgttctggaaagcaatgttaaagaccccagcatcaatcgttctgatcatatactgcttcatctgtgtgtggtttgtgggtggtctgtctgtcttccatttctatctcatgagcactaaccagacaacctatgagaacttcagataccgctatgatcggcgggacaatccgtacaacagagggaccgtgaacaacttcatggagatattctgcacctcagtcgctccttccaaaaacaatttccgagctagggtcccagcagagcaaggtttacagcaagcacgtgcgccagcaaggggtttcatgagcccaaacatgggtaaacctattggggaacttgaattgggcaggaagccaatatcatgggatgaacctcggtcagcagctgatatcagagacttggaggttggtctaggcagcctactggacgagaaggaaggcagggtagcccatgcatccccggacctgagcagagaagcccttcctgagcttgtggaagggagggctggtacgcattcgaggcgatcaagctggggtcacagaagtgggacctcggcctccatggatagccttgctgcgcaaatggggaccgcagaatcaatggggctccattag

SEQ ID NO: 16703 - DNA, 219 bp, Zea mays
  Peptide Sequence Number=SeqID_60078
atggggacgtatggatttctccggacgcatccagggacattccttccccggatccactatttgcagataacaaatagggcatctatattagatttcgcactggcccatgaaaagtcaggaacaaccctaggtgctgttgtaaagagccttagttttgacgctcaagtagtcaaaccacttccagtgtcccgcctcacacacacccagaaaacaagttaa

SEQ ID NO: 16704 - DNA, 1776 bp, Zea mays
  Peptide Sequence Number=SeqID_60079
atgggttgccaaattaaaaccagctgtgaaatcaaatctgtttcaagttctgagggaggtttcagggttacagtgtttgatggttcagaggagacgtatgacagaatcatatttggtgtccatgcacctgatgctctaaagattctaggagctgaagcaacacatgaagaattgaggatcctaggagcttttcagtacgtctacagtgatatatacctccactccgataaaagtttgatgccacggagtttgtctgcttggagttcctggaacttcctggggacgacaagcaagggggtttgtgtaacctactggctaaatctgcttcagaacatagaatctacaagcagaccttttctggtgacgctgaatcctcctcatgtcccagaccacgtctttcttaaatggtacactagccaccctgtcccatctgtggctgccgcaaaggcttctcttgagcttcatcacattcaaggaaacagaggaatttggttttgtggggcataccaaggttatggtttccatgaagatggactcaaggctgggaaagctgcagctcaagatttgcttggtaaggagagtgaccttttggtgaacccaaaacagatgatcccatcgtggtctgaggctggggcgcgtcttctggttgcaactgaagcagaccttggcttggcagatgcctacattaacggttatttctcatttgtagacaagagagaaggtcttctaaatcttttcctgattctcattgcgaacagggacgcaaacaagagtagtagcagcgctgctggtaaaaggggttggtggacacccctgctattgacagctggggttgcctccgctaaatacttcctgcgtcacatagcaaggaggaattctgtctcacaaacacgtcaaaacatctctcaacactatgatctgagtaatgaattcttctctcttttcctggatccatcgatgacttactcttgtgccatcttcaagacggaggatcaaagcttagaggcagcccagctacagaaagtttgcctcctaatcgataaggctaaagtggagcgagatcaccatgttcttgagattggctgtggttggggcagcttagcaatccaattggtgaagcaaactggttgcaaatacactgggatcacattatcagtggagcaattgaaatatgcacagagaaaggtgaaagaagctggattagaggaccacataagcttcatgttgtgtgattaccgtcaaataccaactcagcgcaaatacgacaggatcatctcttgcgagatgatcgaaggtgttgggcacgaatacatggacgatttcttcggctgctgcgagtcccttttggctcaagacggcatatttgtcctgcagttcatctcaatcccagaagaacggtatgaggaatacaggcgcagctcagacttcatcaaggaatacatcttccctgggggttgcctgccttcgttagcccggatcacgtctgccatgtctgcagcatcaaggctctgcatcgagcaccttgagaatattgggtaccattactacccaacgctgatacagtggagggacaacttcatggccaataaggatgcaattttggccctgggcttcgatgagaaattcatccgtatatgggaatactacttcatatactgcgccgctggtttcaagtcacggacacttgggaactaccagattgtgttttctcgccctggcaacgacaaattaggtgacagcggtatacactccttaagcaagctttctggcagctaa

SEQ ID NO: 16705 - DNA, 327 bp, Zea mays
  Peptide Sequence Number=SeqID_60080
atggccatgaccgtggcggtcacctggctcccgtcgaccgcctcccgcgggagaaccttagccgctccgctccctccgttcgcgggccctatctccatccacatgccactgcgggcgccgcctcctattcccttccccacaagccgcgcctcgccgtcgcctccgcacagttcgatttctccagaggcaatgatgggcctcatatatctcggcttcctggctatgaacccaaaggaggcctccgactctaggttggatgaagcaacgggcgacccatcggaagaccaaattgaagaggcccgaaggataatggagaaatacaagtaa

SEQ ID NO: 16706 - DNA, 1341 bp, Zea mays
  Peptide Sequence Number=SeqID_60081
atggccatggccacggagaaaggaaggaagccggggctcatcacgaagacgctgggccggtgccgcggcgcgcggcggaggagcaggccgccggcgccggaggggtgcttcgcggtgcgcgtcggcgcggggcggcagcgcttcgtggtccggacggagtgcgtgaaccacccgctgttccgggcgctgctggaggaggccgaggaggcgttcgggtacgcggccgccggcccgctcgtgctgccctgcgacgccgacgccttcgtgcgggtgctggagcagatccaggaggaggaggaggacgctgctggccaggcggcgccggccgtggcgaggtgcggccttgtcaggggccactccgcgtaccgactgctgctcgtccccgcccgcccgctcctcgtcggccggtcctaccctcgacagaagcataggcatatagatcaagatgggagagaaagaaccgaggaatcacctctccgcctccaagcgccagtcgccgcctctccccactccctctcgtcgccgtcctctcccgttcgcaacgccacgctccccaccgccgaaatggccccgaagcgaggtggcagggcaccggtgccggccaagaagaagacggataaagtgacgaaccctctgttcgagaaaaggccgaagcagttcggcatcggcggcgcgttgcctcccaagaaggacctgcaccgattcgtcaagtggcccaaggtcgtgcgcatccagcgccagcgtcgcatcctcaagcagcgcctcaaggtgcctccggcgctcaaccagttcacccgcaccctcgacaagaacctcgctaccaacctgttcaagatgcttcttaagtaccggcccgaagacaaggctgccaagaaggagaggcttctgaagagggcccaggctgagaatgaaggaaaaactgttgaatccaagaaaccaattgttgtgaagtatggccttaaccatgtgacttacctcattgagcagaacaaggctcagctcgttgtcatcgctcatgatgtggatccgattgaactggttgtttggcttccagccctgtgcaggaagatggaggtcccatactgcattgttaaaggaaaggctcgccttggatcgatcgttcacaagaagactgcatcagtcttgtgtctgaccactgtcaagaacgaggacaagcttgagttcagcaagatcttggaggctattaaggcgaacttcaatgacaagtttgatgaagtcaggaagaagtggggaggtggcatcatgggctccaagtcgcaggccaagaccaaggccagggaaaagttgctggccaaggaggccgcccagcggatgacgtag

SEQ ID NO: 16707 - DNA, 1578 bp, Zea mays
  Peptide Sequence Number=SeqID_60082
atgccaaacttggtaaaccctcggctgctctccggcagcgccggctcccccgccgcctcgggacggcggcccgtacatctccagctccctcctgccgcggcgccaaagtccgggatctcccgaaccgagcgcacccaacgcaccacccggcgcctcggcctcggagccgcaactccagcgcccacgcccgccgtcgagccgtaccgggggaagaacgatgagaaggagcgcggacgatgcgatggcgcggcagaacggcgaggcaaaacggcggatgtgggcgaaaagaaaacggagcaggcaagtcctcgagcactcgcgacagaaatgcgcctccgcgagcgcgcacggcctggggggtactataggataagaactatacagctaggaggtagcggagggaggagcacgccgccagcagtagggatgtacaagaaccagctccaagaactggcgcagaggagctgcttcagcctgccgtcgtacgtgtgcacgcgcgagggccctgaccacgcgccacgcttccgggcggccgtcaccttcaacggcgagaccttcgagggccccagcggctgcaccacgctccgccaggccgagcacgccgctgccgaagtcgccctcgcccgcctctccctccgcggcccgtccactaccctcgccgcccgggtcctcgtaagtcaccgcccatcatcttcacgtgctctgcttcttgctggcgccgagcttgatgtggaagtgaaaccgtgcccgttatgtcaggatgagacgggggtgtacaagaacctgctgcaggagacggcccaccgggcggggctgaagctgccggcgtacaccacggtgcgatcgggcccgggccactcgccggtgttctcctccaccgtcgagctcgccggcttgagcttcgcgggcgaccccgccaggaccaagaagcaggcggagaagaacgccgccatggccgcctggtcctcgctcaaacagatgccggaggctcgcaaggagcccggcgccggcgacgagcaggagcacgtggctgtcgccagagctctcgcggcgctgaagccgcgagacggcggcgacggaaaggcggcgccgcctctgcagaagcacagcagcaacggctcttcttcctccgctcttccgaacccgtcgctgtacagacaccaatggcggcctcggaccagtacccctgcccaagcccaacccctgccgccgaggacgggggccctgcccctgcagccgccggccggcccaaggatcctgcccccactgcatctgctacaacggccggcgtgcggctccagggacgccgcggcggcagagctggtgcggatgctggagcgcgccatggtgcgcgaccgggaggcaacgccgccttcgccgtgctactacgcggcgcctgccgcctcggcgtaccgccacggcagcgcgccgaggaccttcgccgcgggcgggttccacgccccggctgtgagcgtgcggtcggtgatcccggtgtgcgccgccccgccgccgcagaccccggtcaaggaggaaaggaatggcccggcgacaccctcaggcgcatgcaagagggcgtga

SEQ ID NO: 16708 - DNA, 188 bp, Zea mays
  Peptide Sequence Number=SeqID_60083
gatacacccgtgataatgtgggtggtttttttgttgctccatgtgtcaatgttgaagaaagggaggcacgtgagctgctgcgcacggatgggagagcgagctgtgcgagcgggctgggaacggagcggctccgtcccattgattttttggagtgggatggttccggatctgaggagaatattccctaa

SEQ ID NO: 16709 - DNA, 1041 bp, Zea mays
  Peptide Sequence Number=SeqID_60084
atggagagacctgcgcaggcgcccacgcagctgccgccggggttccggttccaccccaccgacgaggagctggtagtgctgtacctccgccggaaggccctggctcgcccgctgccggccgccgtcatccccgtcgtccacgacgtcgccgggctcgatccatgggacctccctggggcaagcgaaggggagggttacttctttagcctgcggcgagcgccggcgaccggccgtggcagccgcaggaggagagctgggagcgggtactggaaggccacgggcaaggaggagccggtgttcctgcagtgcggcggcggcggcgtaggcggcaagaggcagctgctcgtgggcggcaagacggcgctcgccttccaccgcagtgagccgtcgccgccgtcgtcgtcgcggacaggctgggtcatgcacgagtaccggctcgccgccgcgtcccgcggcgtggccgagcagaggaagaagaatgcgagccacggttgttgcgatgctgagccgggagagtgggtcgtgtgccgggtctttctgaagaagggagcaagaagaagcaggccgggccgggatggtaaccacagcagagctctgagacaccgcgcatccgctgcgccgccgcagctccgggaaggtgtgggaggacggcagccgttgctgttcccggcgccacagtcgccgtcctcaagctgtgtcaccggcgttaccgacttgtcagacgaagaagacgaagtcagcagcggcagcataacaagagacactcggtacaggtccacactcggcaaatccatgtttgccgagtgtcaaacactcggcaaatggggctctcggcaaagggccgtcagcggccgtcccaaagctgacggccgtcagtctttgccgagtgccaacagtcggctctcggcaaagatgcttctttgccgagtgccgcgcatctggcactcggcaaaggatgatttaccgagtgtcttatccagacactcggcaaagtatgctttgccgactgtccccaggttgacactcggcaaagatgtgtaa

SEQ ID NO: 16710 - DNA, 336 bp, Zea mays
  Peptide Sequence Number=SeqID_60085
atgtccggtggggatggacctcctcccgtttttgatggtgacgattttccatattggaaaatttgtatggaagcatatttagagtctatagacattggtgtctacaaagccgccacacaaggattccccgaacctagagatcccacaaatcttgtaggtgaagagtttaactatgagaaatgtgatgcggacatcaacaccaacacgagcacatctacaccagcagcaccttctccagcccaggcgccaccccttccacctgggccagtgactcgggcccgtgcaagagaattgaactacatcatgttgttaaagaacgaaggcccggaagaatag

SEQ ID NO: 16711 - DNA, 510 bp, Zea mays
  Peptide Sequence Number=SeqID_60086
atggatccccttcctcgcgttcctgcaccgattgccactacggcgcccacaccgaagctgtcggcgcagaccaagattctcctagaggtgatgacgaacaaggagcgagatgatgtcgatcgttggtatcgggtgatggcacaactcgatcggctcacggagaaggtgatgagcaaggatgacgttcaacaacagttgctggcgcaagcagggttggcggccgatgtggctcggcaggcgatggaagagctagttcgcttcgcgcagcagttggatcaagcagagaaggcgctcgcggaactccgtctggagcagacggcgtgggacatggagtcagcgcagtctgtgcgcagtgaacagcatcgcggcgggcctccaccatctccactgcttgctcctccatgtccacagcgcaggtatgcgggtgtgccattgggtcatccgagagagactggagggcggagggttgatgattttgaaggagggcatcttccaataccacgtatgtga

SEQ ID NO: 16712 - DNA, 186 bp, Zea mays
  Peptide Sequence Number=SeqID_60087
atgactctcggacagaaccaatgcaaaaatacaagtttccactacggactgtccagaggaaaagctaagaccgtccgagccctcgcgcggaccgtccggcctcaggcgcggaccgtccggtcggggcggaacgtccgggactggctcgcggacccgtcgcgctcagcagaatggcccaacggctag

SEQ ID NO: 16713 - DNA, 489 bp, Zea mays
  Peptide Sequence Number=SeqID_60088
atggcacccaagagaacctcatcgaaggctgacgaagccgcgaaggcagcactactggccgagaaaaagggcaaggcccttgtcgacaacactctccaagagccctgcgaagacgacgcaaacagcaagaagcagcgcaatgaacaacccactaccaaaggcagcctccacacctgcagctccgggggaccacagcagcctcccccaggcttcgctccaccagagggcgcggacgccaccgaggacggcgaagtcatcggcgtttcggccgaagagcagctacagctgcgcgccctgcgcatcaagaaccgcaacctccaaaagcaaaaagagatcctcgaggccaagcgccaacgtgtgtctgcacaagccaaggtgcgacaaatgatacgcgatgaagaacagaaggcacaagagcttgaacaagagatcgcgcttatgcagagggaaggccaactcggcctgcaacacggcccacccctccagtag

SEQ ID NO: 16714 - DNA, 360 bp, Zea mays
  Peptide Sequence Number=SeqID_60089
atggatcagatgaggtcgtcaccggaggatgcccaaagccgtcggatcggaggataccgtcgccggaggatgcccaaagccgccgaatcagaggatgccacgcggaccgtggtgcagatggcgaacctctcgtgcgcgcttcctaggagccgccactgccacgcctccggatcggggatcagccatcgatctcgcatccagaggccaccgcctcgcctccggatcggggatcagccatcgatctcgcatccagaggccgccgccgccgcacgcgtctcaggtttttaccattgttgcctgctcttggggaacccctactgccacgcgcacctcggggagctatcgctgccacatgcctag

SEQ ID NO: 16715 - DNA, 2073 bp, Zea mays
  Peptide Sequence Number=SeqID_60090
atgtcgtcttcttcctcatctgctgcaaatgtgtcgtcggctgattcgtcgtctaaagatacctcgagcgatttggcggcggtggagttacagccgggccacatagtggagtttagcgtttcgatgatttcctcggtgcaccagttgacacctaatgccgtggtggccctggcgaagtatgtctgggcggtgacttcgtacggcggtcagccttccatagaggtcttcgccaagaattactgtctgcactggcaaaagagaaagattggaagtaagattgcacagtttggattgtgcaccttcacgccgaggaccggaaagacttcggtggaagtcgtggaattagttccttgtgctcgcaacaattggggcaactggtgggattattggttttatgttttgggaagcgatgtcgaaaacctcctagggctccccatggctgtgatgtgctcccactattatgtggcattcctatcatttgaggtggcggaggatgatgaggacgaaggggccctccggtgcgctgcccgcatgagcagcgggcgtgatttggttgaggaattcattggttatggactggtgcgaagtccggcctttgctttggatctgcgtggccaagacccagccacgttcgttcgtgaagtggaggatggggctgtgaggattgtagggcggtatacgctgaggacggagagtctgcggagttgggatattcgtggatccaatgttcgcttgaatcgggtcttcgagttaaactgtttgccatactgtggttaccctggagacaacgttgctgcggctgttgaccgcggtgggaaaaacacagtggccgtggctgaggaaggccctttgcgagaggctgccccggccactaagaagagaaaaataggtactgcagttggggggttggggttaccgggggtcgatggccaaggaacgtttcgattcctcgggcggctggcgaggacatatttacgtctcgtttggcccgcgttcactagggtcggggaccctagtcgcgaggtgaagaaggcgtggggaggcacgaagtccaccgcccctggcagcggcaaaccaccgccgacagcaaagtcggccgtccccgggcctagcaagtcttcggcgggtttgaggactgtcgcttctggcacgggcaagccgccctcggctgagcccacgaaggagcgaaggtcgccttcgccggtgcgcaccgacgaagcggcggtgggtggtgccgacttctacacggacatctgcgtggaggattacctcgttgttggagcgaagggtacttcgcaggacccatggtccaaattctgcaccagcggcgagatttcattggccgcaaccgctaaagacgtggcaggctctgtgtcccagcagctgaggcatgcgtcacggcagctgaagcatgtggccgccttctctgaccatgttgtgtcgggcgccctgacttcggagttcgctgccgagaggcaacgactcgagggcaggatcgagcgcctccgagcgcagcatacggatgttgtttgggacaagtcagctacggagaacatgagctgtaggctgggggagaggttggcggctgctgaggccgagaaggaggatctcatgcgtcagttggcggaggagaggagggacgcaaacagagcctgtgctgaggcgcaggctgcgcaagccaaggccaagcttgcgcgggaggaggctagtctcacccgccaacgcttcaaggagatggagacaaggctcggcggcctgcgcgatcgcctggataaaatggaggcctcgacgcgcgcagaggttgaacggacgcatacgcagcttgtggacgcatactgggaactaggtgcgcggaccgctccctttgaagtgcccagtcaggaggtgggcctccgcttccttgggtggctacaggaggagctggaggtgctcccaacaattgtgacgggcctcatgtcctttgcctccctcatcacctgcgagggggccgtgaatgccttgtcccatgagggatgtgggcacttcgaggtcttcgaccagtcggatgaaggcttcgagcgcggaatcttctag

SEQ ID NO: 16716 - DNA, 450 bp, Zea mays
  Peptide Sequence Number=SeqID_60091
atggcgctagcagctcgccgaggtagacgtctgagctacgcgcgcgacagtagggacggcacatggcctagagtgcttgggatcgggcgaggcagcgcggtcaggctacacagtggaggaaggcggctgccggaggtccgaggtcggctggggcggggccgagcgcgctctgcgttcgccgagcagggcagagaagggagcgaactcactgaaaatgaagagctcgccggagatggagggctcgacgccgtcggtggggagccgaggggtcaggcaagcttggccagcgaacagaggttgaagacacgacgacggcggttgcgcggcgagtggggcgtggccgcggtgctgctcgacgtggagaggcacggcgcaatgacgtcgacggctgtgagcaccgcgagggcagtggttgctatagcgtctacgagggagaatagagcggagtag

SEQ ID NO: 16717 - DNA, 450 bp, Zea mays
  Peptide Sequence Number=SeqID_60092
atgccacgcatgaagaatgtgttggcgccagggggaggagatgacgaggaccctccttgccccttcaaggaggtcaaggggaagaatgactacttggagcagcaggaaggccgcaagaagcggtgtttggatagagcagcccgagcagctctagcagcagcagcagctgagcaggctgagagagagtttgatgttgttgacttccttatatgtgagatagaggacacattattggatggacttcgtgcatggcgacagctgccttatgctcactatctctgccacatcttcgcacagctgatccggccaccacagttccagggaactcttgaggcctcacgcctcctctttggctcctaccgtccagcccctgaggacctagtgtcggcacctaatccagtaattgacactcaggaagaggatacagctttccatcagtttgagacttag

SEQ ID NO: 16718 - DNA, 216 bp, Zea mays
  Peptide Sequence Number=SeqID_60093
atggcgcacgacgtggatggaaaaaggggaaaggaagggttgactgagctatataagggtgaagcgcagtcggatgacgacgagcgaatctcagaaatgccattgggtccctggattgtggcgggcgcggtcgtggcggcgtgcttccaaatagagcggaggtgggcgagtcgacaacgtggggccgaagcgtcggtgaaacgggcgcgatactga

SEQ ID NO: 16719 - DNA, 768 bp, Zea mays
  Peptide Sequence Number=SeqID_60094
atggaccgaaggccagcgcaaaaatcccgtcggtctgcattgaatgccgccataggtacgatttctggaggctggcatccatcgtcacaagataatcgtcgcagccccacgaacgacagtcatgcaacacatgcaaaacctgaagcttcgtcggtagctgcatctgtgcaaaaccctctagacaacagcattgatgcctcgtggatgcttcctgattacaacatactaccctcccaagataactactataggaatctgatgaaccaagatgatacagataatttaggctcggaggattacgtgcaagttgatcctcttgtagctaatatgaattcccagacaaaaccaaagggcctcacagaaaatttcactgatgatgaggacattctactgttgtcagcgtatctcaatgttagcaaagatcctattgctggaagggaccaaaaagatggcagattttgggaaagaattgaaaagtattatcatgtcaatttaacatttgaatcgctcttcattgcatcatcgatggggtataatccaaaagaaagtaagtctttccaaagttactatgaagccatacaaaggaagaatgaaagtggaaagacaatgaatgacaagattgctgatgctaaagctatgttccaaaccttaagaaaaaaggcttttactttgtttcatgcttggaatattcttagacacgagccaaagtggtcatcaataaaggacttcacaatgactaccaagaagctagatccttcacaacggtaa

SEQ ID NO: 16720 - DNA, 135 bp, Zea mays
  Peptide Sequence Number=SeqID_60095
atggatcaggtgctcaacaaggtggggagctactggttcagcaaaagggccagcaaggaaatcgactccatcggcgacgacatcagcattagttcaacagattccttaacaaagcatcagaatcagattcgctga

SEQ ID NO: 16721 - DNA, 654 bp, Zea mays
  Peptide Sequence Number=SeqID_60096
atggtcgtggccaccgcggtcttagctcacgcggcgctgctgtgggcggttgctgtggtggtgtacctgtggggatgtcgtagtgaaagctgtgcacaacttcgtgtggctgccggcgacgatgacacccatggctaccatgtccctccttggaggcatcatcatcaccacccagcctacactgataccacaatgatcctttgggttaaaacccagttcggctcttccggatgtgcttcgttcaaggagaatgctagcagttgcctgtggtcggtaatggccatgttgcgtgaccattgggtcctctacttcatcatccttctcctgttagtggtgttggaactcgctctcagcagcaagaaggccaacaaggaggcggccacgcggggcccgttacaatgggccagatcgcacgtgggccttgggactgaacgaggacgcgccgtggcaggacgtcgccgcaggccttcgtcaaagtgccgagtcctgcgaagggtgtccctgcccgctttgtctctgtcggaccagcggctgcagcgaaggcctcgagcaaagggtggcgtctttgccttcgccccaacaagtggcaacatcaatcttatgccaggtggtcccatgatctcgccctcctccaagaggcttcctcccctttaa

SEQ ID NO: 16722 - DNA, 267 bp, Zea mays
  Peptide Sequence Number=SeqID_60097
atgagcctaccatgcaagggtaggagcctccccagtgcgaagcgcggcgacggaggaacagacaccaaaacgtacaacgacatcatgaagccggggaacgggatccggcacagcccatatcctgagatgaagcctcagagatgggagaaactcccgatgagtgagtgcactgagaaaggcacaatgaggaaccgcatccccgaagtcgctgaggcggccgtaattgaagacttctaccgggggtccaacgactcggccttcgtctga

SEQ ID NO: 16723 - DNA, 792 bp, Zea mays
  Peptide Sequence Number=SeqID_60098
atggggacgcgcacccattacacacagccccggccggccttgtcgaatgtcgatgacgcacgggacagacgtcaggggttggggtggaagcgagcaagctcggttcggctcgctcatgtaacgagtcgagattggctcgtcccatttggcgagctcgaaaaagcagctcggctcagctcggttcaccgagccaacaagcctagtcataaacctagcatagcgcagcgatccattccactacaagcaagcagcaaggagcaaggcagcggcccggtagacgtcgagggcggccaacaccagccaccgtcgtccgccgcggcagggcacccaagaatgtgcttcccgatcgactgctggctctgcatgccccacaccgacgacgacgaccttgcccccgcgagcagggcacagccgccgccgccgccgcccgcgcagcgcaacggcagccactacaacggcgacggccactaccggcctgcgcactacagcgcggctgccgaggcggaccgcaaggcgtccaacgacgcgaggagaggccccgcgcatcatggcgccaccggcgcgcaggcgaaatcggcgtacccgtacgcagccgaagccgccgacggcgacggggcgctgaagcagcagcccgaggcgccgaacggcagggtcgctgccgccgatggccatggagcacgcgccgcgccgcgccacgactacgaacgcgcacagccgcctgcccgcaaggaggacgccgcggattcctactacccggctgcgaccgctgcagcctatcgcgaaaggtattag

SEQ ID NO: 16724 - DNA, 888 bp, Zea mays
  Peptide Sequence Number=SeqID_60099
atgaacaaaaacaccggcattcaaagtgtcattacaaacggaactccggttccgcctccgcaggtacgaacaaccccactcgacgggggggagcctgcggagcaacagaagaccgacgggcggctcgccgtcgcccgctccggcagcaacaacaacgacccccgctccgggtggccgaactgcagccgcgatggcctcagggcggacgctgctacaaccttgccctcgcctacgccgacgctcgaggggcgaggacaagggccgtcagccctccggcagatccccactcagatcctcccggacgagtggggcatcgacctccgcgtggaggcaccgtaccggtgcaaaggcaggaccgccccagaacacgaatgccgccctggcagcgcgcgatatcttgggcggtcctcccgtgcgcacggcgcgacaaccgccttcgcggcaggagggggcaccgggagccaagccggcgagtccaacgcgtcgaggctgacgacgcccgcagtcggccagccccgcgttgtcgaagtccgcccctctcgtagggccacgacaaggcggaaggactgcgggcatcccccatccgggggctcggaaggtggaaagacacgatgcataagggagcgcgaagacatggtcgcctttcaagggggtcaccctccttttaaaggcgactctccctacttgcgtccccagctgtcgtgggctgagtcttctccaacacgctccaaggtcctccccctacggcgcgggggatgggtcccacacgtcatgcaagccggcccggagcagaagaagccaaaccgccgcgcgcggtgcatgcaaccgcccagcggttacaagtggccctccacttttgcccagaccagcgggcgaaagggcgggtag

SEQ ID NO: 16725 - DNA, 2175 bp, Zea mays
  Peptide Sequence Number=SeqID_60100
atgcagccgcctacccttctcccgctaggcgccgtcgtggtcgccatcctcctgctcgccaccgccccgagccccgccgtctcccgccaccgccactcgtccgccgcggacacggagacgctcgatgtagccgcctcgctctcccgcgcccgcgccgcgctctccaccgacgccgtctcgctgcaccagtccgcggccgccgccgccggggcgaagcgctccccgcgagcgcgggagggcggcctcacgctgcggctccactcccgggacttcctgcccgaggagcaggggcggcacgagacgtaccgctcgctcgtgctctcccgcctccgccgcgactcggcgcgcgccgcggcggtgtcggcccgcgcgacgctggcggcggacggcgtgacccggctggacctgcgccccgcgaacgggtcggcggtgttcgcggcgtccgcggcgatccagggccccgtggtgtccggcgtcgggcagggcagcggcgagtacttctcccgcgtgggcatcggcagccccgcgcggcagctgtacatggtgctggacaccggcagcgacgtcacctgggtgcagtgccagccctgcgccgactgctaccagcagtccgacccggtgttcgacccgtcgctctccgcctcctacgccgccgtctcctgcgactcccagcgctgccgggacctggacaccgcggcgtgccgcaacgccacgggcgcctgcctctacgaggtggcctacggcgacggctcctacaccgtgggcgacttcgccaccgagacgctcacgctgggggactccaccccggtcggcaacgtcgccatcgggtgcggccacgacaacgagggcctcttcgtcggcgccgcggggctgctggcgctgggcggcgggccgctctccttcccgtcccagatctccgcgtccaccttctcctactgcctcgtggaccgcgactccccggccgcgtccacgctccagttcggcgacggcgccgccgaggcgggcaccgtgacggcgcctctcgtgcgcagcccgcgcacgagcaccttctactacgtggcgctgtcgggcatctcggtgggcgggcagccgctgtccatcccggcctccgccttcgccatggacgccacgtcgggctcgggcggcgtcatcgtggactccggcaccgccgtgacgcggctccagtccgccgcctacgcggcgctccgcgacgccttcgtccagggcgcgccgtcgctgccccggacctccggggtgtcgctgttcgacacgtgctacgacctgtcggaccggacgagcgtggaggtgcccgcggtgtcgctgcggttcgagggcggcggcgcgctgcggctgccggcgaagaactacctgatccccgtggacggagccggcacctactgcctggcgttcgcgccgacgaacgcggccgtgtccatcatcgggaacgtgcagcagcagggcacccgcgtcagcttcgacaccgccaggggcgccgtcggcttcacccccaacaagacagcaattggtagagcgaagcggtgtcgtcggcggcgcctcttctcatgggaccctgaagttaccgcccgaactagcagggaggaagtggatgagatcgaaggaggccctgcgctgccgctgctggctgctgcgtccgcgtcccagatgccgtggggctgggggggagctgggctttccactccccaaaggatcaaagagacacgtcgtctcgtcgagaactcacggcacgccgtgtatctagcgaaggacgatggagcaggagaaagcgagaagcacagcggcggcacgccggcactcccccccccgccactggccacactgcatgcacgcacccagctggcctggccagggctgagcacgagctccgaggccccaagtccggcggccgaagacgcgggcgccggcggggtggaggaaaaggaggaaggggtcgcgcacgcccccagcttgcccaacagggaacaggcccaggcggatgtttcttcacgggccgactggcctgatttgctgagtggtctcagctgggacggagttcttggctgcctgatgatcaacctgcacataaaccatcagtatactatacctttggcgcggccttcaaacgtctggtacaagaggattaaacggttctctacgctctccaacagcgtcctctaa

SEQ ID NO: 16726 - DNA, 342 bp, Zea mays
  Peptide Sequence Number=SeqID_60101
atggaaaaggaccaaagggaatcctcgaagaagaggaaagctccactgcggctggtggatccgcgccatgagatgagtgccctccaagcgactagggctggtgtttccaagtcccagggaacgatggctgcagctacaactgaggcaatgccaccgcgagcgatgttggctatcgtggtcgcagtgccaccgtcgatgaagaaggttgcgcgggacgaagtggtgagggtggtggatggagagggtggtggcacgatccccgagttgtccatggaggactacctgattgagggagttcttgagttcgatgctcacactccgctggcgggtaaagaaatatga

SEQ ID NO: 16727 - DNA, 705 bp, Zea mays
  Peptide Sequence Number=SeqID_60102
atgacttcccacggatcctcagacgacgggaatgcactgtcccacactgacgggcttgcacgagaaggctttccccgcattttgtgggaggtactacagggggccggatacatgacgcctcctcagtacgcggtgcagcagttcgagaagcaccgagtgccccgttgtagggtgaggatgaccttggagcctcatcccctacagccaggctggcgttcactggactctgagtcctttggataccgggctgaggacacgatagaggcgattgctctgcacgggttgaccactttctgcggatttcatcccttggagctggctacccaccccattggcttgttccccgccgaaaagggaggacgacccaatgtggaaggatcgggtggagcatgccaaggacatctgggctatctacccaggacagactgcgcacttgactgtacggtgcatgaatgctctgtaccgactgcaagtgatgcgtgggagaacaccatcgaggttctcaaggaccagcttattaacactcagcagcagcttgctgaggctaatgagcacctggatatgcatcaccaggagatccgggacatggaggccaacgaggacgtcgacattgagggaggagaggagcctgcctccagcgtggacactgctggctcagggagaccaccttcccccgagtcgagtgttgcctcgttcgctcactag

SEQ ID NO: 16728 - DNA, 306 bp, Zea mays
  Peptide Sequence Number=SeqID_60103
atgcactgggaaattgaatcgtttctcgacaacgagctcagggaagactgtaaccttgctgacggagagtacgtcctcgtgccggagcaaggagctgctcaggaggtagccccagatccagcaccagagcctgcaccagaggacctgcctgccactgctttggaaggcaaggccgggaatccttttgagctggatactagttctctggaggacatggttgctggagtgacttggccgtccatcttgccactgggttggactgtcgagtgggaccctacctcagctgaggaggagcatgagcagtga

SEQ ID NO: 16729 - DNA, 138 bp, Zea mays
  Peptide Sequence Number=SeqID_60104
atggacaatattgatgaagtgaccgacaagagattgacagctttaggagaaatagatcaggacaagatcatagttgccaaagcttacaacaagaaggtcaatgctaaatcgttccacctaggggacctgctccgctaa

SEQ ID NO: 16730 - DNA, 285 bp, Zea mays
  Peptide Sequence Number=SeqID_60105
atggcggctctcggcccccttacggaagcaagaggacgtcagcaaggactcgacagccccgacagctgtccctccgccaggctccagcgctcctccgacggccacgacatcacacaaaccgggcgccaaaatctctccgaccgccacaatggcgtggctcggactcgggctgagccccggaaaacggcgaactctgctccgcccgacccagggctcggactcgggctaagccccggaagacggcgaactccgctccgcccgacccagggctcggactcgggctaa

SEQ ID NO: 16731 - DNA, 963 bp, Zea mays
  Peptide Sequence Number=SeqID_60106
atggctgaaaggtaccaactcccgcggagttgcgttcccccaatgacaaggcggaaagacggcgggtatcccccatccgggggcttggaaggtggaaagacacgatgcataagggagcgcgaagacatggtcgccttccaagggggtcgccctccttttaaaggcgactctccctacttgcgtccccagccgtcgtgggctgagtcttctccaacacgctccaaggtcctcctcctacggcgcaggggctgggtcccacacgtcatacaagccggcccagagcagaagaagccaaaccgccgcgcgcggtgcgtgcaaccgcccagcggttacaagcggctctccacttttgccaaaaccagcgggcgaaagggcgggcaaccatgcaggcggcatgcaaccgcgccaagtgggcgcacttctccgactcccaacacgcccagcatggaggcccaggcccccgcgtcatgcaaccggcgcgccgaatgcttcgtgcatgcgactgcaccgccacttacgccaccaccgcgccacctcgactgcggaaccaataccgcgactcgaggcgacccagcgcacgacccagcagcgccagcctggcgcgacggcggcgcctctggtaggagaagcgagctacgcttcgccttcgccataacaaccgcgtcaaaaaagggaccgggaaagggggataccccgaaaaggatccttccccgtgaaggaaccaggctccgagcctccctactgatcagaggttcgaaggctggcccctcggaagggttcaacagccgcctcagagcacgtgggctccacacccactactggtcaggggttcgaaggccggcccctcggaagggttcaacggccgccttaggctactcgggctccgcgcccactactgatcaggggttcgaaggctggcccccgaagggttcacagccgcctcagacacagagcgagggatga

SEQ ID NO: 16732 - DNA, 399 bp, Zea mays
  Peptide Sequence Number=SeqID_60107
atgcccggttcacgccagttcgcgcaccagcgcccagccgtgcacgcccgctcgctctcgccggtccacgcccgcccgcaaagcctcactggagaccccggatcaccctcgccggacttcggtcacccgccgccgcgcgtgaaccaagctaaccagccggattcctcaccgccgacgagctcccccgcctgcgcgagtggaccgacctactccgaccaccaccgccgacgatccgcacctcgacgtgatcgccagagacccccggacctcgcccgacccttcaccggagcaatgtcaccgccggacatggttgatggtgtgacttggcctaccaccctgccaccgggttggatggtcgagtgggatgctgctccagcaggagaggagcaggaggagtag

SEQ ID NO: 16733 - DNA, 84 bp, Zea mays
  Peptide Sequence Number=SeqID_60108
atgggagaccacgtctcaggtcgcgtgaggagggcaatctgtgggcaggttcactcaggatttagcaaacattatgctaagtga

SEQ ID NO: 16734 - DNA, 870 bp, Zea mays
  Peptide Sequence Number=SeqID_60109
atgacttctcacggatcctcggatgaagggaatgcacagtcccacactgacggacttgcacgagagggtttcccccgtattttgttggaggtacttcagggagctggttacacgacgcctcctcagtacgcggtgcagttgttcgagaagcaccgagtgccccgctgtagggtgaggatgaccctagaacctcatcccctgcagccaggctggcgttcgctggactctgaggcctttggataccgggctgaggatactatcgaggcgattgctcttcacggactgaccaccttctgcggattccaccccttggagctgtccactcaccccattggtttgttccctgcggaaaaggaggatgacccaatgtggaaggatcgagtggagcatgccaaggatatatgggctatctacccaggtcagactgctcacttaacggtgcggtgcatgaatgccctgtatcgtctgcaagtgatgcgtggtgaggcaatgtcccatttgatggcattgttggaggcgaccaagatcactttggataacagagaggaacttgtggttgacttgtccactgagatggtggaaaaggacttacaagtggagcaactatcaaatgggatccaagagcttgaggaactagtgggaacgagggagaacaccatcgaggttctcgaggatcagttggtcaacacccaacaacagcttgcagaggctaaccagcacctggatatgcaccaccaggagatccaagacatggaggccaacgaggatgtcgacatcgagggaggcgaggagcctgcctccagtttggacactgctggcttagggagaccaccttcccccgagtcgagtgttgcctcgtttgctcactag

SEQ ID NO: 16735 - DNA, 585 bp, Zea mays
  Peptide Sequence Number=SeqID_60110
atggaagcaccgggattccagacgctgtgtcgccaagtcgccaccgcaccaggaagccacgccgtgcccggactcttcacggccacacgaaccgaaggcgaggttcttgggattgatcgcgagtggagaaaggagcacggcgcaccgcttttaaccacggagtcatggactcccgagtcgaacgccgaggtctccacgattacggttgaatcccaccgcgcacagaggcatatttctaacaaccactactctggttggcgcaagggtaagcgggagtacacctcctgtaagcacaagtccaagggaggattcaacaagaaggcactcaagaagaagtacctccagaagaccaagatcaaggagcgtgccttcctcacctccatcagcgaccccgaccatgactccgacgacacatcattttcctcgagcgacgtggagtctgacaggaggaagagagatgagctgcaggtttctgagtcgagcaggaagaacatgaactgcccttctcatggggttcatgctcagcctgttcagagacgtcatgcgaggcttataggtgctttgcctcttgctgctatgccttag

SEQ ID NO: 16736 - DNA, 369 bp, Zea mays
  Peptide Sequence Number=SeqID_60111
atggggaagcctgtcccatcactcctcatgctcctcctcagccgaggcaagcagcatggatcaagcagtctcattagctgcgagaagcagacgattctaatcgagtttttaaaccttacaagtgaccgcacttgtacccaccataaccggaatgggagaccatgtctcaggtcacgtgacgagggcaatctacgggcaggttcactcaggttatgcataaaaccggggcttgccttccaaagctggggcaggcagatcctctgggacaggctctggtgctggatccggggctacctcctgagcagctccttgctccggcacgaggacgtactctccatcagcgaggttgcaatctatcgaatgcaatga

SEQ ID NO: 16737 - DNA, 609 bp, Zea mays
  Peptide Sequence Number=SeqID_60112
atggcgagagtagcgtgtaccctccatggcaagaggctggacgatggtgtatctgtgctctcggttggcgtgaacccaggttgtccaagggataaaaccctgagtaggcaattactcagcaagacttacccgactaaggaaaagactcaaggatatgctggcttaaagggattcaaggtccgcgccacccgagagcacaccaccccttttaggtggtcctttgccaggagggtacgtgccactctcgccatctctccactcccagtgcgcgattgtcttttcatgtatggaatattcgggttcaggcttacccatgatgaggaaggtggcaaatgcaccggggcttgccttattgtaggagaaggtcccaaaattattctactctgcgacacacactacagaccgggaagaaccggagataacgtgtgtgaaccccagggggattcgcggcgtggactacaggccagggcgaggtccgagaacgccgacgaaattctggacgtcgagaacggtggatcagggacgagcgccggggagctcacgcgtgtggctgaccgggagcttagacaagcgcgtgtgaagctcgatgccaagctgctgctgttctag

SEQ ID NO: 16738 - DNA, 288 bp, Zea mays
  Peptide Sequence Number=SeqID_60113
atggaagcaccaggattccagacgccgtgtcgccaagtcgccaccgcaccaggaagccatgtcgcgcccggactcttcacggccacacgaactgaaggcaagcggatgcccacgaccggcgatgtgcactcactctctctctcctctgcgtgttctctgtactgggaccgtgtttgttgctgcagcctgggattgatcacgagtggagaaaggagcacgcgcactgcttttaaccacgaagtcgtggactcccgagtcgaacgccgaggtctccgcgattacggttga

SEQ ID NO: 16739 - DNA, 198 bp, Zea mays
  Peptide Sequence Number=SeqID_60114
atgcccaccgtcagctatgggaagaagaccccttctctgcccctggtaaaccggacccaccagtcatccacgtcgagcgcgcaagaggaaaggaatgtaccgactcggcggggccacatgaaagtgacgcaaggaggacgacactctgttaggtgcacgacacgtggtccaccagtgttcacatatgatggtaaatag

SEQ ID NO: 16740 - DNA, 120 bp, Zea mays
  Peptide Sequence Number=SeqID_60115
atgcccaactggggctcactgcatgacactcatctcaagatatatcgaaggactcaagagcagactgtaaaccctcatagagttcacactgcgcaagtgcaggcgcactcactgagctag

SEQ ID NO: 16741 - DNA, 444 bp, Zea mays
  Peptide Sequence Number=SeqID_60116
atggactcgatctacccgcacgatcccgagcgacccgcgtggattgaagaagaccgatccgacaggatggtcccacgatgcagtgacactgcgaggacagaccggtggactaggtactggcgagtgggcccggttccccagtgcccaaacatgcaggcgcagctacagggaagaaggtgggccggtgcggcttatcgtgttcttaaccgggatactactcgcaacctggagacttgtgaaggtacattcgatgagactgcaccttgtccatcccatgactttgagtcaataggtctagatcggatggtacagaccatctttgtggaggaggagcatgatgactccgattggggttatcctgagctgactccactgactgctctagtcaagcctgcttccactactttgactgacggacttgaccccacttcttccaccacttga

SEQ ID NO: 16742 - DNA, 174 bp, Zea mays
  Peptide Sequence Number=SeqID_60117
atggagagtcatgatctccgggcagaatgggaatcacggcttgtgggtggttatgagatcgatggttttggttatgactatggtgctggttgtcagcgttgcaaccactgctcaggagaagatgaagctgtggaaggagacttccaggagttccaagactacgacgagttctag

SEQ ID NO: 16743 - DNA, 495 bp, Zea mays
  Peptide Sequence Number=SeqID_60118
atggcttcagggtcttctaggaggcaaagggtgcgggaaatgagagacgaaaggatgaagggaaagttaaactccaatgtgttttcgatggccctcttggtccagatttttttgaaagaggcggttttactttcccagttcaaagtaaaaaaagatttcaacaaagagcattcattggtcaaggagaattgtgagttcactcgttgggtagatcctcgtccgatttttcctcatgcggaatacatatcctacctacagaataggatatttgatctagagagggaagtaagcaacagaaatgacgaggaagaaagagacaacaacaatggtggtgtttcacaggtgcaagtatgcccagatccatattgttgctgcccttgtcacaacaagaatgttggtccttcgacgtctccaccgctcccacagcagacaacaaaaatgggaggatactatggagaagggtccacacaatttggaatgtgggagcactactag

SEQ ID NO: 16744 - DNA, 222 bp, Zea mays
  Peptide Sequence Number=SeqID_60119
atggacctcaacctcggcgccatcatcattggcgccgaggttgatctatggcgccgaccccctaggacttgccacatcgtctgccacgtagaaaaagtaggcgccaattatgtcggcgccactgtgcgttacctcggcgccaatgatgatggcgcaagaaaagaacaggagagatctggcaacagagacgtgcctggccagtggccactagagcaagtataa

SEQ ID NO: 16745 - DNA, 228 bp, Zea mays
  Peptide Sequence Number=SeqID_60120
atggcccctggtgaggccgtggagcttggagggtgtcgcaacaactccctagctgctgacaacgctctcggagtcgcccttgacggagtccgggatgtctgtgcagctgtgctacatctggagcacttggacgaaccgtgcgaggacgtgaaggacgtcggcgactgcacggcactgctcgacgcgttcgtctacatcgagacgtcttccgctgctctgcgcgtctag

SEQ ID NO: 16746 - DNA, 948 bp, Zea mays
  Peptide Sequence Number=SeqID_60121
atgcattgcgcccttcctccttccgagcccccggatggggagcacccgcgttgctttcgtcttgctgctgttggaggagcgcaacttcgcggaggttggcacctttcagccatcgctcggcttcaaggattttcatcaggcagcctggctgcatcccctcaccaatggtcacgcaggaaggtgaccaccggttcgatggtggggagaagcaagctgggctgcggcctctgccccgccctcagcttcaaggatcttcatcatccttgctggggaggagggcgaggcgagccggggcctgccttcgcgtgggctggcgtcccgctttcccctccggcatctgggggtggaaaccatcctccaactctgtggaggaggcatcctccagccatgcgggggaaggcgaactgctgctgcctggccagggtgcagcattttgtcctctgcccgggcgactgtggccggccgcaccggggggtctcacaacacgtcgtacgccgcgagggcggtactcgtgttctaggacggtcccgttctcgttttcgtggcaaggacgggagtgaggacctgccggtgcgctttggggcggccggcactcgaaggtgcgatgttggtgggcaggtggacgccgttgtcggtgctgaggcggcggcagccggagaaggtttctccaccgacgagaccgtcggcgccccccgcggactaacctccagctctttggctttgatagcttgtcctcgcccctcgagtggggatgcaggcgagggccttgtcgcagcagtgtctgccctgaggtcatcgctgctgttgtttagccgcccggagcggaggtcgttgtcgctgttgatggagcgggcggcggctagccacctggaatttgtcgtcccgcaggccctccgatgtggggggttgttcatacctgcgggagtggaactggagttccgttcgtaa

SEQ ID NO: 16747 - DNA, 1023 bp, Zea mays
  Peptide Sequence Number=SeqID_60122
atggtcacccggtcaaccatcaccaaaacggaagggatggcggagcaaggggcaggaagggcgggaccgggaaagggggataccccgaaaaggatccttccccgtgaaggaactaggctccgagcctccttactgatcagaggttcgaaggctggccccccgaagggttcaacagccgcctcagatcgcgtgggccctacacccactactggtcagaggttcgaaggccggccccccgaagggttccacggccgcctcaggctactcgggctccgcgcccattactgctcaggggttcgaaggctggcccctgaagggttcacagtcgcctcagacgccgagcgagggatgaccaggggggaccgggtctggcagatcacccgcaggtacttttgggcgtgcctctgggcccctagccgacccctaacgaacggggcacagacgtccactcggattacccgcttgcagctcaccggagacaccatgttcggtgcccatagagggctcgggggctgctctcgcgaacctggctccggccgaaccgttgacagcgtcaacataccagcccgagaacttgggccccgaccgtacacccgggctacggccagttcgcatgagggaacaaccagaccagccgaagcattacgcaaggcattaagacctcgaaggagtaacaccactcctccgaggcctcgggggctacacccggcgggtgcgctcgcgcgcacccaccggaacaaaatgcaaccgagaaaggctggtccccttgcaaaaaagtgcgacgaaagcctccaagcgagtgctaacactcccttcgaggctcgggtgctactgtcggggaccataattaggggtaccctcaagactcctaattctcagctgagtgagactgacaggctgtcaggtcctaccaaaggcaccctaggaagctccgctccgcccgacccagggctcggactcgggctaagtcccgaaagacggcgaactccgctccgcccgacccagggctcagactcgggctaa

SEQ ID NO: 16748 - DNA, 429 bp, Zea mays
  Peptide Sequence Number=SeqID_60123
atggccggttcaaaggatagctctgaagtttccaccaacaatatcatagagccgatctggaaaaccttgccggatgacgaacaactccagttcgaggagcacaaggagcagctgatccaagaagcaaaggcgaagttccttgccaactttaaggtggacaggaacaacaaggtcgttcggcaacggacgactgatctggcttcgctcagacacacaacagataccgcaattggtctcccaccagctgctattgatatagtaagggaagaaatagccggggcgttccgagttaagctcgaagcgcaggcaggaaaccaggcgctagcacctgttctgcgcatcacggacggtctgacgcacagacgtggacggtccggaacaccgccagacagtccggatcattccagcagacaatccggtaacgcctag

SEQ ID NO: 16749 - DNA, 942 bp, Zea mays
  Peptide Sequence Number=SeqID_60124
atgaagctggaggtcatgcccaagcccaaacagcgggtgctggaggcgcagcagagggaggaggccatggagatgagcggcctggacctgtggaagcacgagaagccgccaaggatctgccccttgcccccgtcgctcccgccgccgccgccagcgttcgacgaggcggcgctcgtgccgccgctcaacttcgccgtggtcgacgacggcatcttccgctccggattcccagggaccgccaacttccggttcctcaagtccctcaacctccgctccatcgtgtacctgtgcccggagccgtacccggggacgaacacggagttcctagaaaagaatgggatcaggctccaccagttcggaatcgaggggcgcaagcctaatctgtcatgggatcactatgttgccaccgcccagaggttcaaaactgactgtagatatctgagtgctaatggtcgtgccaaacagcatacacgattttatttagaaatgtaccgatttattttttcttatatcatgatatttgaaatgtattttcacactaattcggggtatccctatgttatgtcactatgcaaaaattggatatctaagcatggtagatttgaacaactttttcttataagaaaacatgatttaaaagggaacatatacttgctggatttgtttgaaccatttgtcaacatacccgacgacaaaataagggaggcgctcaaagttgtcttagacccaagaaaccaacctctgcttatccattgcaagagaggcaagcaccgaactggctgtgtggtcggatgcttgaggaagctgcaggaatggtgcttgtcttcagtcttggacgagtaccatcgctttgccgctgcgaaagcgaggatcactgaccagaggttcatggagctgttcgacgtttcaagcttgaagcacctgacaccctcacactgttaa

SEQ ID NO: 16750 - DNA, 1641 bp, Zea mays
  Peptide Sequence Number=SeqID_60125
atgcccctcataaaagtttacaacattgactcagacctttatgggctaaaaagtcattctatctttaagtcggaccttcagcgacgaagcatggtcccaacaattccgcatgtgaatcgtactgagtatcagctgattgatatttctgaggatggatttgtgagccttcttacttcagatggcaacactaaggatgatcttagactcccaactgatgagactcttgtggcccagaggctaaggagagcgtccaccagcttcaccgtggctccccccgccccgtccccgcgtctcgcagtcgtgctcgccgcgtccccacatctctcgcagccgtcaccagcagggtcatccatggtgccgcgggatccatgcctctgccctcaccctcccccccgatccccgcatttcgcagcccgccccatcccagcatctcgcagccacaccccatccccgtatctcgcagccgcgccccatccatggcgtcgcgggatccacgccctcgccctccccccatccccgcatctcacagcccgccccatcccagcatctcgcagccacacctaccgcagttctgccagcgtactcgcctcccccatccacgaccaccgccacgatgacgaaaaccattggggcctacctcgcctcgcagctcaagtgggcaatccactcgccgggcgtcttcctgacctgcggcagacggtggcgcgatgggcgccaagagcgaggagcccggatctaggagcgggcggcgatggggctgtggagggtttggcagcgcaggaggtctcagagatcatgatcgcgttccctggcgcctcggcctacctcctcgccatgctcgctctcgtcattgtcctcttctacttcactatcttcgcctttatcgtcacccacaggggtaccaggaactgggacaggattaggagctgccttcaggactccaagtgtagactgcccccgctcctacccgcacgcgcacgccccgcacgcaacggccccacgccccgcacggcccgccgtccgccgcgcgcccacgcgctcccaaacgccgtcgcgaaaccgccgcacgaccgcgccagcgaatcccacaacggccgccgcgaaacctccgccgcgcaacacccgccgcccaaacgcggcggcgtcaagtaccttcacttggagtgggcagcaggcgcttcggttccaggggcagcggcggcggcacgggtgaacgccgacgcgcagaggcagagcgcaccgccattattcgccgccggtggcagccggttcatcggggcgccgagcttgagcgacaccagcatagactgggctggcggcggcggcgtcaccggcagcgcaagtgaagcgccagcgatgggcgccgtgcaggaccaacagcagatcgagctcccgttgtcacccgaggacgtgccgtttgcgcaggtgtacaggttcgtcggcgacatgttcgacgcggacgcgccggtcccggcggaagcccacctgcagaagctgaaggagatggacgacatcacagccaagacagtcctgctggtgctgcggaacctcgagaaccacctgtcggtgccccagttcgagcgtgtgagaaggctgctgtcgacgtatgatccgacaagagccatgtctggccagttgtag

SEQ ID NO: 16751 - DNA, 1248 bp, Zea mays
  Peptide Sequence Number=SeqID_60126
atggagcctcccgtcgatgtggccggtcctcgccctaggttgggcgatgtggaggctcccccgaagtcgaggtcgaggtggagtccgagccctggggtcgggcgaagcggagttcgtcgtcttccggggctgagcccaagtccgagccctgggtcgggcagagcggagttcgccgtcttccggggcttagcccgagtccgagccctgggtcgggcggagtggagttcgccgtcttccggggctgagcccgagtccgagccctgggtcgggtggagcggagttcgccgtcttccagggcttatcccgagtccgagccctgggtcgggcggagcggagttcgccgtcttccggggcttagcccgagtccgagccctgggtcgggcgaagcggagcttcctatggtgcctgcggccaggcctgactgcctgtcagcctcactctgtcaagtggcactgcagtcggagcggcgcaggcggcgctgtctttctgtcaggccggtcagcggagcagcgaagtgacggcgggttgcttcttggcgaagacagggcctcggacgagccggaagtatgttcgtcgctggaggggggcctcgggcgagacagagatcctccaggctttatgctgatggggtttaccagcggagaattaggagacttgagggtacccttaattatggtccccgacaaagccgccgcgatctgctggccccaaaaccctagcttaatgggagccgccgctgccgccgcgggtgctgatcctcctccctcggaggctgccgctacaccagccagagaagatcaacagcactacgtcgccgccgcgactggcggcgtttcaggcgaatcgtgcgatgcagcggcgcctcctgctggtggaggcggcgcagacgatgccgtggagcctgtggtcatcgatgcctccgcggtggccggcggagcaggggaggaggagcaaggggagtgcgggttctgcctcttcatgaagggcggcggctgcaaggacgagtttgtcgcgtgggagaagtgcgtggaggaggcggaggccgccggtcccagcgtcgacgtcgtggagctgtgccaagacgccacggccgctctgcggaagtgtatggatgcgcacgccgcctactacgagcctatactacgggccgagcgcgccatggctgcggacctcgagtcatttcagaccgaagaagccgcctcccactccgcggcgtcggcgttggcgtcggaggaaggccagagatag

SEQ ID NO: 16752 - DNA, 888 bp, Zea mays
  Peptide Sequence Number=SeqID_60127
atggccggttctaaggaacacaccaagatctccaccgccaacatcatcaagccggccatggaggcgctcccgactgatgaccaaaggccctttgaagacctcgtaatgcgcgatgagaaggaggtgatgcggcaatggaacgaacaacgcgacaaggaagaggcggaactgctgcataaactcttcgaacggcgcaaggaggcggcggacaagtacttgtcacacttcacggtagatcgccaccagaagatcgtccgtcaaggggagatcgatatggaatctctcctacctccacttcagggtcccgctgtaagtactccagatctatctcttacgactttcatggatcaacgaggagatcagttaaagcaatatgtagatgaatctattaaaatgcatttacgtgcatacgagaaatcagctgctcctaactttccatcgcgagagtctaatacagtgccacccgcgtcaaacacatcggctataaatgggtcacccttgacccagccatcatatggtatgccgatgcacgcttttgtgccaccatcacatccacaaccactaggcacgcgggtgatgatggcgcttcctgttgacgtggctggcctgcgccctaggtcgggcgacgtggaggctcctctgaagccgaggtcgaaggccagggcggagtccgagccctggggtcaggcgaagcggagttcgtcgtcttctggggctgagcccgagtccgagccctgggtcgggcggagcggagttcgccgtcttccggggcttagcccgagtccgagccctgagtcgggcggagcggagttcgccgtcttctggggcttagcccgagtccgagccctgggtcgggcggtgcggagttcgccgtcttccggggcttag

SEQ ID NO: 16753 - DNA, 213 bp, Zea mays
  Peptide Sequence Number=SeqID_60128
atggtggaggccccctgggtgaggtaccttagccaagaatacgtccccatgttaacgtgggctgccaacacctaccgctccccctcttgcccatatttcaggagtgactgcataaagttaagttgtagcaatagcatagctgcgaagagtatgcagaagggagaagtccacttgcccttgcttattgaaaacttgaggttcttccacggatag

SEQ ID NO: 16754 - DNA, 276 bp, Zea mays
  Peptide Sequence Number=SeqID_60129
atgagcaagaacacaagagacacaagatttatcccgaggttcggtcacaccaccaaggtgccctacttcttcgttgaggcgcccacaaagagccgggtctctttcaaccctaatcctccctttgccgaccacaaaggtcaagcccacacaataatctttgctcaaacgagcggattctaccttctcccgcagacatccatcagcagcattgcggcagttatacaagggagtatcagcaaagcattaagggtactcatgagaattgatgttgaatga

SEQ ID NO: 16755 - DNA, 888 bp, Zea mays
  Peptide Sequence Number=SeqID_60130
atgtcggggggactaagaaacgaaagtgcttctaagcttgaaaaagttgaggttgcctcgactttatcttttggtgcagatgttgatcctagggcaatagatcttgccatgagaatcgccgaaaggatgttccttaaaatgaaggaagatgaggcgaagaacaaaattgaagaagaaaatgatcgatggagaccaaacgacgaatccacctcttcacaaggttcgtctttcaaatccacttctcatatgtgctttattgctaatgggagtgacagtgaaagcgaaagtgaggatgaggaggagcaagaaagtgatagtgaagatgaggatgatcttcaacaattcttcgctcagctaagcaagaaacatcggatgagcttgctcaaactcatgaaaagagcggaagaacaaaaagaaatgcttcataagcaagaagacttcctcatcagaaaaattgaagacttagagaagttgaccaaagagcatgagaagctaaagtgctctcatgattatttggtccaaagccgacagctgccatccagcgccaccaggaaagccgcccaggcgccccgcctctgcatccgcccgccaggagcagcgcccctgcaacccgctctgaagactcgacgcccagagccgcgcgcaaccccgttcgccgccccgccctccgtctcccgtcgcctcgcccctgcgctccgtcagctgcccctccccgggattgtatgccaccagggcctccccgtccggccgtcgtgcgtccaacagtcgggcaccggcgggcggcggccgctcgcccctgcggcttgggcgctcggccacagccagtgcgggccgtgcggcagtgtccactcgggcctcggccagctgctagctaatcctaatcagtaa

SEQ ID NO: 16756 - DNA, 1089 bp, Zea mays
  Peptide Sequence Number=SeqID_60131
atggtgtctccggtgagctacaagcgggtaatccgagtggacgtccgtgccccgttcgttgggggccggctaggggcccagaggcacgcccaaaagtacctgcggcaactggcgcgctggttgcgcgacgcgtgggcctgggcctccaagccggcgtgtcagaagtcggagaagcgcgtccacctggcgcggttgcatgccgcctgcatggccgcccgccccttccgcccgttggtctgggcgaaacccggtcgcaccccttcaccggcggtcacccaggatggtgacctccagcttgatggtgggggaaagcgagccgggctgcggcctcttcccctccctcagcctcaaggattttcatcaccaaggctggggaggggagagtgtcgagttgggctgcagcgtgcccggtcttcagacgcgagtggcttcggagccgctcgcggcgccggcgtctgccacggcagctggaagaggttcttccgccggagcgacagcccgggccggccacggactgacctccaactctacggccttctgcccgtccttgcctcacgagtttttggcgtgggcgggggccttctggcagcagcacccgccctgaggtcagtgctgccgctgttcgaccccccggagcagaagtcgtcgtcgtcgccgctgctggagcagacccctcggccgctcttcgatgagccgaggccaggggtagcgatatcagtacgaacagaggcggagttggctcggaaatgggaacctggttggccggagcctagccgggttgcccgtcagcgggggtcgacgtcggagtcgatcagccgaggcctcgggtcgggctggcgcccttggaagatgcttggccgaggccctaggggtaaccggccgagccgcctgctcgggccggattccgggagaagtccccggaccgcgtcgccgtccgaggctgggtcagaccttgctgaagacgtcgtcgatgccgagggtgttgcggcccccttcagcgtgaagacccgagcctgcaggatcagattgtcttgtagcgtgtgccttctgcggccgccgaggccagaaaacacaccctcgctccgttga

SEQ ID NO: 16757 - DNA, 2436 bp, Zea mays
  Peptide Sequence Number=SeqID_60132
atggcgagcggctgcgcagaaggtgctagcttggcgtggtgcgcagcagtgagaaccgagggtagcgcggggttctcggcgctgtacaggggcttggctgcgggatatggccaacgaactagagcagaaaaggagagaaagggctctaggagcggttccatttataggtggaggagggagccaggagggtgttacaggcccttggcgcacggctgggcgctgggcgaagtgtgccctcgccagatgccttttcacggaggaagggtggtgcgaagtcctgccttcgcactgaatttgcgaaaccgtgatccgaccgcctttgtgcgtgatgcggaagacttggcggtgcggctcgtggggcgttacgtgccgaggacggaaggccagcgcagctttgatatccgcgggtcaaatgaacgtttgaacagggtcttcgaattaaatcaattgccgtacgacggctaccctggtcaagacgaagcggaccgccgtgggaagaagccggcggtggagactggaggcgaccctgcgctggcagccgccccctcctcaaaaaagagaaaattaggtactgcgatgggaggacttggggtgtctgatagttttgctagagagttaatgaggacgtgcgcggccccgggggaaaggatgtcttcgcccgagctccgggagtcttcggctcggatgctgagggttaccgggggttgttggcctagaaatgttcctatcccctgcgcggctgaggaggactgttttatatctcgtatggttcattggtggagagtttttccttacgggcgaaatattggtgctgttgtgtgggcagtgatggacaaggatcgccaaggggcggcgcaaaaacgccaggcgactgtcagggttcacgaagctcggccaaaaaggcagcggggaactgcgaaggctgcggcctctggcggaggcaagccgccgctgccggcgaaggcgggcgcctctgcacctagcaaggcgtcagaggcaacggtgggcgccggaggctccaaactgacgaaggtggtgccgccggtcagcggagtggcggaggctgcgaaggcggcccgaacgttgccgccgccgggcaaacgcgttgccgacttcggcaccgagattaatgtggaggattatcttggggggtcggacgggggccagcttgctctagttgtgcctggcgcggcgatcgcgacagctgcgctagcgccgaaggcaaggggcgagacccttggcgtcggaggcgaggtgtcggccctcgcgctggtcagggacgaggcgggcgtggcgacccgccgactgaagggagtgacggaggcgctgagtcaggcgacggaggcgctgagcaacggccttacgtgtgctctgcaagtggctgacttcaccagccgcactgcgtcgggggcccttacggcagctttgtctgccgaagtcgagagacttcggacgcaacatgctgacgctgtccgtgagaagtcggcctccgacagcaagtgccgtaaactggcggacaaggtggtcgccctggagaaggagaaggctgacctccggcgccagctggcgggggagaggagggaggccaacgaagccatcgccaaagagcaggctgcgcaggcggaggccaggctggcgcgggcggaaggcaatattgccaaggagctcgctggagagctgcaggggcggcttactgccctggagagccgcgcggagggggccgaggccgcgatgcgagcggaggccgaacggacgcgcacgcagctcatggctgcatatcgcgagctgggtgcgcggaccggtgacttcgaggtgccggagcgagaggccgggcttcgctgtctggaatgggtgcaggaggagctgcaggagctccccactgtcttggaggggttaatgtcgttcacctccctggtcacctgcgaggcggcgatgaacgcactctctcgcgaagggtgccggcactttgaggccctcgaccaggcagatgaggattttgggcgagatatctttgaggtcgaagaccccgtggtgaaggaatccgccggggccctctatgaccggatgtggggttcgtacggtcgtgaggtggtcagggagcgggccgaggctgcgagggctcaggcggagcgcggcgagcgggtggacgacttcggggcactgaacagcgcgttgcctgacccggagacgactcctgcggaggctgcgactggagtcgccctgggaccgaccccggagactgcgggagacgcaccaggcgcccccgcatctgccgcggccggcgaagacctgcccccaaaggtggccgaaggcgcgcctgatgcccccgcagctgctgtgccgagcgctgaagatcccgcggcggtggtggcggaggcagcggcggaggcctcggcggaggcctccgcagcggcagggccttcgcaggtggcgtag

SEQ ID NO: 16758 - DNA, 450 bp, Zea mays
  Peptide Sequence Number=SeqID_60133
atgccacggccgctcttcccccccccccctcgcgcccacgactccctcccctcggcccatttccggcctgctcccacgcgcgcgccagcccgccctgcgctctctctctcactgacgagccgtccccacccgtcagccgccccatccctcgcctcgctcgcgatcactcccactggcagtgtggccccgcttgtcagccgcttcgtcgtcttccccgccgtcccttcatcgcggtcacctccggccatcgcctccgtccccttcttcgtcttctcgccgcacagggaagtttgccaccgctccgtcctccccccctcgaccagcgttctcgccggtaccgccctgccgtggtgtctcatcggcggcgctgtgcggcatttatgggcggcgctgtgcaagctcaccggcaccgcgaagccccaccgctccccttccctcgcgcgcctataa

SEQ ID NO: 16759 - DNA, 369 bp, Zea mays
  Peptide Sequence Number=SeqID_60134
atggagttctcccagatatacgaccccacctacgatgacattggggacatcttccaccagctacatcgcgaggttaaggcacgcgccaaggagatgaagaaggccaagcaggctctctcaacccctccacaaccagtcctcacccagaagaaccttggttccaagggctctggcagtgattcatctcctgaatttaggtccactagaaggctagaaggcctcgcgaaagactttgggcccattattttgcaagatttcttgcagacatgtgcaatccttgaaacgatccatgctgccatcagtgagatgaactatggacctcctttgatatttccttacagtaatgatgtgattgacgttgtggaatga

SEQ ID NO: 16760 - DNA, 195 bp, Zea mays
  Peptide Sequence Number=SeqID_60135
atggatcctaaagggaaggtgaaggtgaccgaggagaaggagaaggacaacccctccggtgacacacccaagggaggagagaccgttgactatgggttcgacaagaggagaaagtgcatcaagaagatacggagcaacggctacttcgcgccaacggtcgtctgcaacgcattaaatgcgcgccagcgcgcgtag

SEQ ID NO: 16761 - DNA, 324 bp, Zea mays
  Peptide Sequence Number=SeqID_60136
atggcgcttcctatcgacgtggtcggtccgcgccctaggttgggcgatgtggaggctcctccgaggtcgaggtcgagtctgtcttccgtggccgtggtcgagtccgagcccctgacgaacgcgtcgagcagtgtcgtgcagtcgccggcgtccttcacgtcctcgcacggttcgtccaagtgctccaaatgcagcacctccgaggggcctagcccgagtccgagccctgggtcgggcggagcggtgttcgccgtcttccggggcttagcccgagtccgagccctgggtcgggcggagcggtgttcgccgtcttctggggcttag

SEQ ID NO: 16762 - DNA, 246 bp, Zea mays
  Peptide Sequence Number=SeqID_60137
atgccaccacgacgggcggatttggagccaggacgccgaatcgaggagatagaggactgtgtggtcggatcgatggaaaattgttctcaatttgatggattgcaaccctacactagtgttttggactctggatattacactgatctactagtgaatgttgttgaggaatctcaagtagggctggaaacgagccgagccgagctcggctcggctcggctcggcgtggctcgttattcatccaactaa

SEQ ID NO: 16763 - DNA, 846 bp, Zea mays
  Peptide Sequence Number=SeqID_60138
atggtggcgagcgtaatcacaagcaagcatcgcccccatctgtcacacccggttttggaagggcacagacaggttgctcacctcgagcagaagcgctggcgtcgcgaagcaacgacggaggcacaagggctcgatggggcgacggtggtagagctccgactgcgcgaagattgctccggtgagcacggactggatgcagcatggggaaaagggcacaccgaagggtgtctcgagcagctaacagtaaggcagagctcaccgtggcactggacgaggcacgtgcgcgacggcggccacagacaggcagtggtcgacggcgggcggtggcggagctccctgcatgcgtgggcagagcgagagagagggcgagaaggtggggcagagggtgcaaatgagagaggagaggtgggcgagcagggtgcgaggttcaaaaggggcgtgggggcgcggacgtggccggagaacgcgcggtcgtgggcgcgtccactgcgggaagatcgtgggcgggaggttgaggacgagctgacaggtggggacgccatatgtgcgaccaccgcgtcggagatccaagcggcgacgttggcgtgtgcacgggcgttatggctggtgtcgagcgggaagccacaaatagtcctccagtacaacacattgggcaccacgccacctccatcgaggccccactacacggacccttgtgcgtcggtggatggtatcttagaggatagtgctatcccctgtcacgtcaaccaggggccctcacgatacagcgtagataaggaggtatgggaaggagaagactacgggaaggggaagaggacgggggcatataaattcggccatcgctga

SEQ ID NO: 16764 - DNA, 357 bp, Zea mays
  Peptide Sequence Number=SeqID_60139
atgcaggaatcccttgcaggaccgccatcgcagcaaaatcctcccgagggcctccctacactgaccactcccctactgcccttgcccctttcgggtaaggtctgcccacgacgctccacggatttgcaatggcggcgtcgaattcccggcgccacagtcggggattccgcccggcttcacgcccacaccgtcccggatacccgcgtcttcacccggtttccgcacacgagtcagatcgacggtccgccgagggatgtcccaagtcgcggcgctttcctcaccgcactgcactccgacgatgtttttctcgcccacgtcgaggtactactttatgggcggcgcaaggaggggttgtag

SEQ ID NO: 16765 - DNA, 327 bp, Zea mays
  Peptide Sequence Number=SeqID_60140
atggagatcggaattgggaggacctgtccttcgacggcaagggacaccacactcaggttaaccttacgttgggttctctttgccgccttcactaccctggtgatggttccatggatggcgcccgtgcctgatgcgtactatgcttggtgccgatattgggcttccgaaggcttccagaaagcgtcagcgcatcacagacaatgtcgaggaaccaatcctaaccacaagtttggcggtgatgacatgatacgaaaagctaaaagaatggaagctacaagtggccaaaagcctagtgacattgaggtctaccaggagggccacttataa

SEQ ID NO: 16766 - DNA, 1437 bp, Zea mays
  Peptide Sequence Number=SeqID_60141
atggctgcaactgggcagcattattataatagtgaaggtggacgtgctgctacttccctcattcccaacatgaatcaagcgttcacattttttggtgcacggttctgccgtcgcccactctcctctctcgcgcccccgctctctgctgtccgccgccagacccgcaatcttcgtgctatcttgtcgccagacccgcccccgctctcccctctatgctgtctctctcgcccgccgtctgcgcgctctctcgctgccatctccgcgcccccgctctcctctctacagtctgccaccatctatggcaacctctgtccgcgcccacaaatcgtgcacgcttcgtggcagccacgccccgctcccaaattacctctgcgcgccccatcgcgccctcctccccgcgcgctcaaatcccgccagccgctgcccgccgtgatccactgccgcaaatccgcctgtgacccgccgccatcaatggccaccttccatcgaccccgcgtctgccccacgcgcctatgcgtgagcctgcctgccctatgccgccgtgcgagccccgtcgcgcgggaagaagcgagcaccctcgactgccaaagaggacgcgcgcgggcgcgactcgcgagagaagcggccgcaagcaccatagcacaagcagcagccgacctcctcgaacgagccgagccctcacccagtcgccgtcgcccgcgcccctcccactccccaccgcgcttcagcttcagtcgaggcgccaccgctcgcccgtcgagcgagaaccaacgagccgccgggctgaagttgcgtgtcgcctcgccgtccgccccagtacgctcctgggccgccgccgcagcggggcggagatccacagcatacctcccacggcttccgtcggttcctgcccttgacacacaactggttagctttgctaccacttgcatttcctatcggtctgtctctgagctccagaactttgggtttgggggcaacgagaggatcacggtcaaggcagccgggatcaagaaggagttcggcgctgataggtgtgtggtccctacagaggatgtgtttgaagaagtgaaaccgatcctcaggtctgcactcgatggccacaacgtctgcatcctcgcgtgggttgcattgcaggaaggaaccaacggtaataagctcggcgtcgtgcctcggacgatccaagagttgttctctcgtgcttcggaggacggctcatgtgcctactctttctctattagcatgcttgagatctacctggggagtctcagggacttgctggcagcaccgaggcagcctctcttcaggcaaacagagtgcaaagcagcggcgtggctcatggtagtaactggggcaggaatgagcactgaatctgggattcctgattacaggagtcctaatggtgcatacagtacaggttttaaaccactttctcattag

SEQ ID NO: 16767 - DNA, 318 bp, Zea mays
  Peptide Sequence Number=SeqID_60142
atgtcgtcctcttcctcttccgctgccgatacaccgccgaccggcgcatcgtccgagggaacgctgagcaacgtggcggcggaggagttgcatcctagtgacacggtggaattcggcgcgtcgcggatgtcctcggtccgcgtgcatgacatgcaacagcttggatattttggcggcggagtggcgcgtgtcccgggggcggaggaggtccccgagccagaaggcgagttggtcgtcttcgaggcctttttcgcagccgaccttcgtcttcatgcgcatcaatttatggcggaggttctacgtaggtttgagctctag

SEQ ID NO: 16768 - DNA, 1134 bp, Zea mays
  Peptide Sequence Number=SeqID_60143
atggggcgacctcgccataggtcttcgtcgttcggcgtgtcggacgaaggcatcgagcgaagggtagcgtcttcgccttcgccccaacatatgtacaggggtccggtgtccctctatggaggtgtcgtacgggtgcagcgtcttcatactatagaagagggtacccctgattcaggcccggctgcaacctccgaccggtggtcatccacaaggatgactaccagccttgtggtggagagaagcgagccgggctgtagcctccccctggcatcagcttcaaggatgttcatcatcctcgctggggtggaaggcgagccgagttggggttctgccttccgcatgggctggcgacccgcttcttcctctagcattcgggggagaagggcgttcaccagccttgcggaggaggcgaacttcggctacgcgggcgtccgcgttcttggatggtcttgtcctcactaccgtagtgaggacgggagcgaggacctcttcgcgcacgccggggcggccgccagttgccggtacgacactagtgcgcaggtggccgctgttgtcggtgctgaggtggtcgccgccgctgcggtggccgccgccgttggtgctgaggtggtcgcctccgctggcgagccgctcggagctagctatcccacggtcctaccgatgtggggggcggtggagcgtgcaggcccacggtacgggaccaggctgagcatctgcacgggctccggaccaccccaggagactaatgtccattctctagctccggtcccgaggcccacggtacgggaccaggctgagcggctacacgggatccggaccaccccatggaatggggtctcattctctagagccagcccccaggctgtcggacctcccaactttcgtatcaggggccctaaactgcaagtctggctgctcaattcggatgtcgtcataccaataggccgggtttatggggacagacccccaccgggttgtcgtacacggctaggtcccgaccctgggttcccatctgcattttacacgggagccctcatctttggttgtggccactcccgcgtatacctgtcggcagcctggacccatggggaatccagaagggtttccaaaggaaggcacgcttcagctccatag

SEQ ID NO: 16769 - DNA, 531 bp, Zea mays
  Peptide Sequence Number=SeqID_60144
atgccgcgtcttctcgactatggaaccagtgctgcaactcgaggcagccctgcgcatgacccaacagtgccaatcgggcacaacgatcacaggtcggtcagccgcaaggggaggcgcgacggtcgatatggccaaaagtgggccggcagtaattgcagcagcagacgagcagaagcagcggtcaaatcgcccgcaggcttgcgccccctcctaaagcggcagaagagccctctcccacggcacgaagacgacgcgcccgtgttccgttcctcgaacgactcgagcacgcacaacggccgccccgcgaaccgctcgtcccatcacattaactcctcggcagggcaagcgacacctttggcaggcgaagcgggcgtcgtttcacggatcgggaaaggggatacctcgaaagggatccttctccgcgaaggaagcgggccccgagccctcctactgatcaggggttcgaaggctggcccctcggaagggttcgatagccgccccagagcactccggctccaagctcattactga

SEQ ID NO: 16770 - DNA, 327 bp, Zea mays
  Peptide Sequence Number=SeqID_60145
atggcgcggtcggtccaagcccaaggtcgggcgaggcggagacttctcctgaggccgaggctgggttcgggcgaggacgtgattcctcccgaggccgaggctgaggccgagtcttggggtcgggcgaggcggagacctcttcctgaggctgaggcccaaggtcgggcgaggcggagcttcctgttgcgcccgaggctgaacttgctgttgttagccttgcccgggtggctggcacagcagtcggagcggggtgagcggcgttgtttcctgtcaggtcggtcagtggaagggcgaagtgactgtggtcacttcgaccttgccgactga

SEQ ID NO: 16771 - DNA, 591 bp, Zea mays
  Peptide Sequence Number=SeqID_60146
atggagcttggagggtgtcgcaacaactccctggctgccgacaatgcccccggggtcacccttgatggagtccgggacgtttgcgcagccgtgtgttgccgtgcggcgtgcacagcagcagtgcctgacataggatggttgggaacatgcgacttggcctgttggcttatgtcacgggccacaagccacgcggcagcagcgggtttccgcctgagcgggaagcgtagggcctcatcattcttctttcttgctctgttactgttgcatcatcgtgctgggagtaatccacttgagctgcatgggagtgtatatgaggtaatttgtttagaatgtggtacatccatcagtcgagaatcattccaggaggaagtgaagaacctaaacccaaagctagctgtttacgcacatcttttccttccacatcgtgatccgagtcgcggagattttgaagatcttagacatcgccggcgagcgaagcctcatcgacaactttgtctgaagctaacacgagtgcattcaaggtgtctacttaaggatgatggcaaaggtgttagagagccacttgatgaagtggtttgcgtatgtttgtag

SEQ ID NO: 16772 - DNA, 156 bp, Zea mays
  Peptide Sequence Number=SeqID_60147
atggtgttggtctgtggacaacaatccatggggattggttatctacgaggttctctgaaggacatggttgctggagtgacttggccgtccaccttaccaccgggttggactgttgagtgggaccctgcctcggctgaggaggagcatgaggagtga

SEQ ID NO: 16773 - DNA, 672 bp, Zea mays
  Peptide Sequence Number=SeqID_60148
atgggcgtgcctcacgcctgcgcgctctggcgcgcattaattgctgttgcaggcgaccgttggcgcgaagggggctgggccactcacaacagggactcgggattctgggagaaggagtacccggaccttaatcaaggccaggtgggggtccggagccgacacgtgtctggatcatatcgcatacgcctctgctccccactcaggcagagacccgaagctgccacgtggccagctgcccgtgaccatttaatgagccatgtccactccgctggaaggcgatgtgccgcctcagcatttaatgtgccctgtccactccgctggcaggcggtgactgggctgtcccgcgggcggcgtgcctgtccatccattggcaggcacatgatggtgcaaatcgtggagcaccgcgccgagactttggaggatttcctggtggaggaagaagctgctactttcacgccacgggttcccaaccgcctagtgctgggtgctactgctatgcacgctgcacagcagcatacaaccgcgcagacatcttggactccgtcgagggctgcttcgggagcgcttgtctcctggggtggtctggagccgtacgaacgcgtcgagcagtgccgtgcagtcgccggcgtccttcacgtcctcgcacggttcgcccaagtgctccagatgtag

SEQ ID NO: 16774 - DNA, 156 bp, Zea mays
  Peptide Sequence Number=SeqID_60149
atggtgttggtctgtggacaacaatccatggggattggttatctacgaggttctctggaggacatggttgctggagtgaattggccgtccaccttaccaccgggttggactgttgagtgggaccctgcctcagctgaggaggagcatgaggagtga

SEQ ID NO: 16775 - DNA, 525 bp, Zea mays
  Peptide Sequence Number=SeqID_60150
atggaccctcctgtgacgtggtcggtccgagccctgggtcgggcgaggcggaggctcctccgaggtcggggtcgagtctgtcttccgaggtcgaggtcgagtccgagccccaggtcgggcgaggcggagaccatcgtctggggccaaggccgagttcgagccctggggtcgggcgaggcggagttcgtcgtcttccggggccgagcccgagtccgagccctggggtcgggcgaggcggagcttcctatggcgcccgaggccgggcttggctgctgtcagcctcactctgtcgagcggcacagcagtcatagcaatgcaggcggcgctatcttcttgataaggtgtcaggccatccttgcattaaatgctcctgcgatacggtcggtcggcgtggcgatctggccaaggttgcttcttggcgaagactgggcctcgggcgagccgaagctttgtgctgatggggggttaccagctgagattaggagtcttgggggtacccctaattatggtccccaacagttctag

SEQ ID NO: 16776 - DNA, 363 bp, Zea mays
  Peptide Sequence Number=SeqID_60151
atgcaccctatctctgtcatgcatgtgcctcctcccccgcccgcacgagacccgccacgctccctctacgcgcctgcctcctcctcggcccggatcccgccgccagcgcctgatatggagatgaaggcgtcggcctccgatgaaaccctagctgccgtcttggaccacctcaagccccacaccgtcggcaccttcctcccccctcgctgcaccggccctcaatctgcatctgcgatagctttgttgcgcgcatacgatttgcggcggcgatcggagctgcgtacagccgccgctgggatgacgaagactacgacaccgtggagggccgcaggcacgacgtacaatgagctcaaggtgaggtga

SEQ ID NO: 16777 - DNA, 612 bp, Zea mays
  Peptide Sequence Number=SeqID_60152
atggcggccacctccgaggaggcaatcaagcagttctcggcgctcatggagcagcgtgagtcttcttctcttgtgctcctcctcttctttgcaaagaaccaggaaaagattcgccttttttcttcttcttggccactgaactgcagcaatttctttcttgcagtagaggagccgctaaagagcacattccagctaatggattgcttaaactggagagtacagaatgagattgacatcgtgttagctaaacccattctgccatctgatatatatagagttattcgggacacgttacttgttggattgacagggtactccaagcagggacaacctgtttatgcatttggtgtgggtcttagtactttcgacaaggcctcggtgaactactatgtgcaatcacacatacagatgaatgaatatcgagatcgtgttgtcctgccggctgcatcaaagaagtttgggagacagattaatacctgcttgaaggttatggatatgactggcctcaagctgtctgcactgagccaaataaagagttacttcactgccattaggcaatttgaatattgtgcgcacatcttgtatagtatcctcaagcctacaggggtgtaa

SEQ ID NO: 16778 - DNA, 381 bp, Zea mays
  Peptide Sequence Number=SeqID_60153
atggaggcaagaagagcttcgaggtaccgagtgcgcgagagaaggtcatggaggccaaggaacccaaagccagggctgaagaagaagacttgcaaagtcaaggaggcgctcgcgttggtatcgctcatcgacgacgagaagaagcttggagactgccagtttgacctcttgaagcagtcctacgtggtcgtatgcgccgctgtgttcggcaagctccggcgcagccgccgcttggacgcggtccaaagcggctgcaccgcactatcgatcgtcaaacagggggacctcatggtcgtcgccaacgccggcgactctcgggttgttctgggcaccgcacccgacgacggcgccaccacgccgtccaactcatcatccacctga

SEQ ID NO: 16779 - DNA, 480 bp, Zea mays
  Peptide Sequence Number=SeqID_60154
atgcccctaatccactacgaacaaatactactcgacgtgtatagcaagacgaacaaagttagaggatcttcacctcggattatggcggtggtggacccggacacgcggtggcggagtatcgtggcagagtttgaactacgacgagcaattgtcgcgacagtgcccgctcaattctccaattacgcccaccagagcttccgcgatgacccaccggccgaccagatccacgaacggaggcgtggtgacagtggaatacctagagggggtgggaatgcagcggcgagcgcacaccttcggttgcaggcgcgcgacgacgatgttaccaggcttgggcgcggcacgatgaggatggttaggaggtcgaggaaggtccgcgcccaccctttatgggcccgcgagtctgtgccgaggtggaggggtgcgtggtggtcagcgcgacattggcggggaggtggttcacggttgagaaggaagcgctga

SEQ ID NO: 16780 - DNA, 402 bp, Zea mays
  Peptide Sequence Number=SeqID_60155
atggagcagacgcccccacggcggtgcatctcgccggagcatccacacactgagctttggccaccatctactcaacggaatgatgcaatacgagaatggaaatggatagaacctaggagatgcaaacttattgcggattgtcgtgtcatcggttatgggctcctggccatgcgctcaatggatgatggggatgctaactctgttttataccctgagcgatgcacattggtcgggaaggccgttacagcggcgacgcgactttcgcggagtctattgtccggccgcgagcatagacgcaaggtgggtgttgaacctgaccagtggggctcgcaaggcagtggcaagggagcgcgtgctcgtggggctggacagtggggcccaggcatctgcgtcctcggttga

SEQ ID NO: 16781 - DNA, 222 bp, Zea mays
  Peptide Sequence Number=SeqID_60156
atgggacaaagccctgaatacaaagtgtactttcgcaagtcttacccgactaaggaaaaagactctcaaggatatgctggatttaggaatcaaggagaggctcttagcaagaatcaacttagatacttttgcagaaatagcttactaaagttggagatcaagtctccactcttcagggatataaggcgatctgaatcgatttactcagctgaagatctctaa

SEQ ID NO: 16782 - DNA, 642 bp, Zea mays
  Peptide Sequence Number=SeqID_60157
gtcggcctgcccgagcctagacaacccctaggatctctcctccccgacggggtccctctcgggagcgagatccaggcgccaccggcgatcttccgccgcccctgcgcacgcgcggaccgtccggccctagggcgcggaccgtccggccgtcaggcaggaaacccttgcctctgcgccaggtcgcggaccgtccggccccaggccgcggaccgtccgagcctgaccagagagcaccgccgccggttcttcttgagtatttggcgctccaaaaaagcgtcaacatactttttggcgactccgctggggaagaccaatatagacgcatcaaatcagccctcaatggccggttcaagagatagctctgatatttccccaagcaacatcatagagccgacttgggagaccttgccggctgacgaacagctgcaattcgaggagcacaaggagcgtatgatccaggaggcaaaagcaaaattcttggccgactttaaagtggacaggaacaacaaggtcgtccgacatcgggcgacagatccggcttcgctccaacccacaccaaatatccccaatgtatcttcggactcgtatcagaaagggagaagctcaaaagatacaaaggttgacacagcgccgaagctgtga

SEQ ID NO: 16783 - DNA, 1233 bp, Zea mays
  Peptide Sequence Number=SeqID_60158
atgaacaagacaccggcactcaaggtgccattacaaatggaactccggttccacctccgcaggaacaaacaaccccacacgattggagggcccgcggagcaacagaaggccgacgggtggctcgcagccgcccgctccaacagcgacgacgacgacttctgccccgaggggccgaacagcagcagcgatgacctcagggcggatgctgcttccataaggccctcgcccacgtcctcactcgagaggcgaggacaagcagaaggccgtagagttggaggtcagtccgtgggcggcaccggctatctcgtcggcggagaaacctcttccggctgccatggcggaaggggctggtggtcaccgtcttgggtgaccaccggcgaggggatgcggccgagctgcctgatgaaaatccttgaagccgaacgatggttgaaagaccagcggttgaaagggcggacagccatgcagtcggcatgcaaccgcgccaagtgggcgcaccccttcgactccaacgcgcccagcatggaggcccaggcccacacggcatgcaaccggcgcgccggttgctacgtgcgagcaactgcaccgcccctcgcgccactaccgcgcctcctcgactgcggaaccagtaccgcgactcgaggcaaccctgcgtatgacccaacagtgccagccaggcgcatcggtcacgagccagcgggtggaagcagcggtcacgtcgtcagccaagctcacgtcccctcatgggacagcgagagaaccctctcccacggcgtgaagacggcgcgcccgtgttccgttcctcgaacggctcgctcacgcgcaacggctgccccgcgaaccactcgccccgtcgcattaactccgcggcgggacaggcggcacctttggcaggagaagcgggcgacgcttcgccttcgccataacgaccgcgtcaaaaatgggaccgggaaaggggataccccgaaagggatccttctccgtgaaggaaacgggctcctagcccccctactgatcagaggttcgaaggctggcccctcggaggggttcaacagccgcctcagagcgctcgggcttcgcgcccactactggtcagaggttcaaaggccgccccctcagaagggttcaacgaccgcctcaggccactcgggctccgcgcccactactgatcaggggttcgtaggctggccctcaaagggttcacagccgcctcagacgcagagcgagggatga

SEQ ID NO: 16784 - DNA, 654 bp, Zea mays
  Peptide Sequence Number=SeqID_60159
atggagcaccgtcccgggctggaaaggttgctggagactgcccatctggagcttgacgggaagctattcgtcaacacgcagcaggcccctacctggcgcgccaactatcggcgttttgaacccggggggtccctgggccgacgagtaaattgtcgccgcgtgccccagcccagatgggtcggcgcgagacggagcgcgaaggggggaaaaagccggagggagacaggcgtaaaaggggaaacccacgaccttcgtgtttgtcccgcgcccaggtcgggtgcgcttgcagtagggggttacaagcgtccacgcgggagggagcgagaggcttacgcgagcgccgtcccgtccttccccgcgcggcaaaccctccgtaagagggccctagaccttccttttataggcgccgaggtcgagtccgagcccctgggtcgggtgaggcggagaccgtcggctgagatcagggctgagtccgagccctggggtcgggtgatgcggagttcgtcgtcttccggggctgagcccaagtccgagccctggtgtggggcgatgcggagtttgtcgtcttccggggctgagcccgagtccgagccctggggtctggtgatgcggagttcgtcgtcttctggggctgagcccgagtctgagccctag

SEQ ID NO: 16785 - DNA, 411 bp, Zea mays
  Peptide Sequence Number=SeqID_60160
atgacggtggcaggcgggcgggagcagcggtcacgtcgtcagccaagctcacgtcccatccgggggcagcaagagaacctcctctcacggcgtgaagacaacgcgcccgtgatccgttcctcgaacggctcgcgcacgcgcgacgaccgccccgccaaccactcgccccgtcgcattaactccgcgggaccgggaaagggggataccccgaaaaggatccttccccgtgaaggaaccgggctccgagcctccctactgatcagaggttcgaaggctggccccccgaggggttcaacagccgcctcagatcgcgtgggccccacacccactactggtcagaggttcgaaggccggccccccgaagggttccacggccgcctcaggctactcgggctccgcgcccattactga

SEQ ID NO: 16786 - DNA, 786 bp, Zea mays
  Peptide Sequence Number=SeqID_60161
atgacttctcacgagtcctcggaaggagggaacgcacattcccacacggacagacttgcgcgagagggttttccccgcatttcgtgggaggtgctgcagggagccggttatacgacgcctccccagtatgcggtgcagttgttcgaggagcaccgggtaccccgctgtagggtgaggatgaccttggagcctcatcccttgcagctgggctggcgttcgttggactccgagtcttttggataccgggctaaagacactcttgaggccatcgctctccacgggctgacgatcttttgtggctttcaccccttggagctgtccactcatcccattggcttgttccccgctgaaaaggaggatgacccaatgtggaaggatcgagtggagcatgccaaggatctgatgggcctggtggaggctaccaagatcaccctggataacagggaggaccttgtggtagacctgtccactgagctggtggagaaggacctcctggtggagcagatggccacccagatccaagagcttgaggagcaagtaggagccagggagaacaccatcgaggttcttgaggatcagctcctaaatactcagcagcaacttgaggaagccaaccagcacctggatatgcaccatcaggaaatccaagacatggaggccgaaagggccgacgaggatgttgacatcgagggaggagaggagacggagcctgcatccagcttggacactgctggctcgggaagaccaccttcccccgaatccagtgttgcctcattttcccattag

SEQ ID NO: 16787 - DNA, 351 bp, Zea mays
  Peptide Sequence Number=SeqID_60162
atgcagtcacaaaagaatgtgttgctccagtatcaaataagacatttgcagaatgggcattgggagctggctgctgctgagctgctttctttgggcaatgatttgcccaatggccttgttccccacaatggaaacatgcacgacttcctccttgagctggcgctgcttgattgttctggttggttgctggggcaggaagacgggttgcctggttgctctaacgctgatattgatttcctccttgctggttgttctgacggtactgctgctgttgctgaggaaactgcctctggtactgctgctgctggttctgacgctaatcctggtgttggtgcgggtgaccctgcttga

SEQ ID NO: 16788 - DNA, 945 bp, Zea mays
  Peptide Sequence Number=SeqID_60163
atggctcgtcttaggtgcactacacgtaagtctatgatcccctttttgccttctcgcctggcggagcgtccactacgtcacacggtgccagctgctggaggagaccctgacggagacggagacgacgacgacgccggtggcagttcgagccatggcacggagctctcggaggagccggagccggagggatggatcgctagacccatcactcgtgacgccgctcatgggtgtcacttccacgacgctctcgataccctactacgtcgggccttcgaccgacacacctggtctatcgagtaccgttgtgtagtctaccaacatcgtcatgggctatacccagaccagtgggaggctacttgtttggtgcgccgtccggatgatgatctctggggtgcagaagccttctcagagcactattcaattacagagagggatactatcgaggtagccatgcaagatgcagcacgacgggcactttctcagtattgctcgttgttcagcggggtggctgatggtcttgacctgaagtactaccctcgccgttcgaccggcagtgctagaggtgtgattgcctcgccagttggtgagggcaatcctaggctgaacaacatggtcaacttggctgtcgtgctcacacagagttggatcacgcccttgacgagttgggcaaggttcgggcggaggttgcggaattgcgtgatgagtgtgcagcacaccactatctggatggtggttcacccgcccctgtcaagattcagcacccttaccgttcgccgccccgtggtcgcttcgactatgatgtctgagaacaggcacagaggtgcgaggcgtgctcagcctgaacagcaggcaccccaagaggaagcagccccgcagcagcatttgccaccaccaccaccgatgaccatcgagcagatgttcttgatgcagacccaagcagtctag

SEQ ID NO: 16789 - DNA, 867 bp, Zea mays
  Peptide Sequence Number=SeqID_60164
atggggcaagttccatgggttagaaaattctctgccatcatgaattggagaccacggattaatgggctgcttggaaatatcaatgcaaacactggtgatcctcaagttggttgggacatagatcagttcatgacagacattgcagaggctactttggttatgtcaagtgtagttaagaatggtggacttgcacctggtggtttcaactttgatgccaaattgtcagtaccttttgtcatattctgctcatcgaagattgcattagtaaggttcgtcattgacaaaagaactgggggttcccatggcttttgtcatgttgattttcaagacgatgaggcgctcgagatagctattgtgttggatcagtccaaactggagggctttcctcttcttggacctactgaagcagtttctatagcgtactctattcttctgtacgacatatatgttccagactgggagtaccagatagcaggccctggttccagttccatagagaagtcgttctctttttctgctcccctgtcacaaagctcaaataagaaactacagcagggatgcaatatagattatccagagaatgggtctcttccacctgacgctccatcgtggtgccaggcgccatttgatcctgaaggcctcctcagctccgttatggcgattgtcacttgcttgaccgggctccagtttgggcatgtaattatacatttcgagagcaccgtgctaaattttgttctagccttcgtaatggacttcgtcggaatgcgaatgaataaaccactatacacgatgagctacactctggctactgctggcgctgtgggtcttctcttcgctggaatctatgctcttgttggcccctcttga

SEQ ID NO: 16790 - DNA, 1071 bp, Zea mays
  Peptide Sequence Number=SeqID_60165
atgaacaccaggtgcgtcgcctctcacggtggcaacagccgcgccgctgccgctgaagggcggtgcaaggaaccccgtccagggcgtttgctgtgtcattgggttactaatgctctagctcaagcaggacttgaatcatcaaatcttattgttggcattgatttcacaaagagcaacgagtggacagctgccatatacacaaaggagagccttttaaacaatgtcttggctgctattcctccaaatcttacaagtgaggagtggtcagctgcattgccaagggcaagggcattagttgttggtttcgtgaaaacagataaagacttccaaacaaaagcaaatcaggaattaaaaacgatctttatagtctcagtaaatgtgtcggttcttgtttttttggttcatcagttggatggtgcaaaccagagccccagctactgcagtgcccctgaagatttcatcgtcgacaattgcaagaacatctactttgctgggcacgaaactacagcggtcactgccacctggtgcctgatgctccttgctgcacacccagactggcaggatcgtgctcgggctgaggtcctagaagtgtgtcgtggacagacagcgatggacatcgacgtccttcgtcagctgaaaatacttacaatggtgatacaagagactctccggctgtacccttcggggtcactgatcatgcgtgaggccctgacaggcatcagtcttggtggagtcgacgtccctcgcggcaccatcatccaagtagccatctcagtgctgcacctggacatggaagcctggggtccagacgctaacgagtttcgtccagaccggttagcgaacggagctgccgcggcgtgcaagccagcccacatgtacatgtcgttcgggtacgggccgaggctgtgcaccgggcagaacctggcaatggcgaagctgaaggttgttcttgcgcgcctgctgagcaagttctcgttctcggtgtcgcctgggtaccagcactccccggtgtttcggttgaccattgagccggagtccggcatgcctcttgtggtgacaaggctagcatga

SEQ ID NO: 16791 - DNA, 1716 bp, Zea mays
  Peptide Sequence Number=SeqID_60166
atgaagcacgtggaccgtcctccaaataaccccaaacgtataacaattcagtcaagccaggagtgtttcagtgttgacattccgtccgcagaacagtctaatccatgtccagaagttggaaatcctccaaatgttgacagtcaaaatttgatcaatgaaacagtacaacttgattctgatgaagatgacttcatgccagctctgaagaagcgtaatgtttctgaaagccatacaagagttttaagaaaagttgtgacaaagaggattaaacatgaggagctaccccgacagaggctcaatgtgaggtgcaaccctcaagatgtcattgcaagcattaacattttgaataaaagacaacgtgaggctataagacgtaaaggtttctctaacattcttgatatgacagtagatgcgctgtgtagtagatcacaccttcaatggttgatggacaagctggaccccaaggacatgacaatttgtcctcgtccaggaaaggaactaaagatcacaaaggacattgttcatcttgtccttggtgtaccaaatcatggcggtggtaaaccattagggattgatgaagcagttgcagcaagcaacttgagggcagagcttggtttggctaaagacgagttcaatgtgacatttctacaagatcgtttaaggaaaggcaaggatgatgaccttacaatcagatgtttcttcctcattttattcaaccgtctgttgtttccaactgctagctggggcataacatatcatgaggtgcttctaacagaagaaatgcaccgtttccatgagaccgactggtgccagttgatttttaatgatctctgtgaagctgcgaagaagtggcacaaccgaatcaccacaaatgtctccacgactatatacagatgctccattgttatccttttgtattacttggatcacctgcatgcagccgctgcccctcaaaataagattggcacacctcgcattaaattctttgataagaatatcataaaagctttgaccaaagctgacaagaggaaggtacgccatggggctgaacctttcggacattgtgaagaaggtggacatggattcttattaattttgttgaacaaccagccggagtgcaggaccaacatttttgatgcaccgcgccctgccccaacgcctcggcccacttttaacatccaactgccatcgatcaaagagatgatgtcaagtaagatcaacgatctcccaccttgtcatcgatctaaattcacagacattcttgctgcatatgacttggaggttgacaagtcatgcatagccataaaagatagcattgacaaaattattgagaagcaatacgacatagcagacaagtttatagagttgatcgacgaggtactatgtgccgagtctgataatttagaaaacgagacagatgagccacaacatccgaggaattcggctgattcagcaggacacactgttcatgccacccaacccacacccgatatgccatcccaagcttcgcagctcgagacccagctgggtggtactcagtttgaagaaattcatgaaagacaacagcatatccgtagagtgttggagacttgtcccgacgaatcggatgtcgttacaggtcaacaggatttctgttttgatgttcgaaacaacaatttgaggaacacaaatatcacacctcaaaccacaccagcttgcaccctgaaagggaattag

SEQ ID NO: 16792 - DNA, 2541 bp, Zea mays
  Peptide Sequence Number=SeqID_60167
atgtgttttccaacccctaccatcccctccctccccggcgcctcacccacaccaccccacagccccacgtcggtgcctactccaggcccggcggccactccctcctcccctttggcgccggaggccacccctgttcctctggccgttggccgttccaaggcccttaggtggcgcgacgatggaagcccggagtcctcttccgtggcttccctaggacttcatcgacgtaggccatcatacaaggaggctcttctccttcccaggcctgctcccttcctaggccgggaggatgactttggagctggctgggtgacagttgaaggaaggcaagctcgtcgacgccgccttcgccacctcaagccccctcctctttcccccagggtcgtgccttccgaccttcgggggaagtgttttaattgcttctctccttcccaccgtgctgctgtgtgtcgtcggcaggtgcggtgcttctgttgccggttgcctgggcaccgtgcttacgtgtgcccgcgtcggcgatcagccgcacccctgccgcagcgaggactggtgtggcggcctgtctccctgtcctctgggatggccggctcaaatgacagtctcgctggaagagtcgtggatggaggtgaagatggcggtggcgtactgaagaggcgcacccgccgtggactgaggaggagaagatctggaaacctgagggatagcgccgatcaagatgcaattgttgcggtgccttcccaacgtccggccgatcagtgccacgatcgtgcattggggaggcccaggaggatcatcaaacactccaggatgattcttcaggcagaagataacctccggcgggccctgatcatcactgtcattgatcaatcgaattctggctgcgccgcggacgtgtctgacgcgctcgctgtgaggtttaacctcgatgcgcagacgctcgacctccgtcgtgctgcgccgaattcattcatcgcgtttctccccaatgaagaggtggcgtgccgggtcttcaatggcggcattccttttgtctctcccaccgttcgtcttcacatcaaacgctggtccagacatgccatggccgtcggcgggagggagctaccagtgccagttgacatcgagttgagaggaatccctgctcacctctgggggttggaaacagcaacacaacttctcgatgaatattgcctcattcgagatgtgcatcctgactccgcggaaggcggcgatctttcagtcttcaagttgagtgcatggtgcgacgagccagagctggtgccggcggaattagatcttctggcggaggagccgcagttgggtgccagtgacttcggcagttttcctcacactctggtgttcccaatcaccgtgcgggtgtgccgttcagatgcgatcttggacaggaggccctcgcctccgccgcagccaccattttccggcgacgatcgcgagcagaaccacggcaagcggcggcgggatcaacattcaatttcttcggtgcctggacgcaggccagtgcacgcgcgtctcgggccatgcgtccggaccgactctgcgcctggggggacatgtgaaacgatcgcgctcccggttcccttgggggcagtgagcaccgcttcggcttctcgaccccgggcgcgcctcgggccttgtggtggtgccggctctgcgcctggatgtacagttgggacgttcagtgccccgggacccttgagcgctgtggttgctgtgggggctgaagaagccgcttcgggctctacaattccgacgccagcccctttggtttctcccccaacggcgctcgtcacttcggttatagtcccaggagccgccaatgctttaacaaccggctctccatctgaagatcctgggcccgcctcattaattggtgcaatttcctctggtctattggattctgagaggccaattctgcatgacaactcatttaatgtggcggcttttgaggaggctggcggttttcagaggttaggacagggcccagaaaatctttgtgctgatgcttcaggacgggcctctgtgccattttctcatgtcccgcatgtcccagatgtccctgctgataatgctgcacaagtcaggaatccctgggatattatcaagtactcactgcaagcaaaaccaccatgctttaaggtgtactctagaagacgagataccgtgcctgtgcaatcccaggaagtgagctcgccatccccgacccccttgcaagaattcagtcagcacatttctaaagccattaatggtttgctgagtcccccgccaatccccaaacgcagaaagaagaccctaccaagaaatttcaggcctaggagatccaggagggtggccaagtttccacctgagctaggatccgatgcagcagcctctgtctgcaagaaattgggattctgtgatgatcatggcaatatcactctggaagatgctagcaaatatgctgtcttattcaattcaccactctccagggagcacatcgctgccttggctgcgctgttcggatgggatacatctgagctcgcataa

SEQ ID NO: 16793 - DNA, 2235 bp, Zea mays
  Peptide Sequence Number=SeqID_60168
atggcgcaccggacagtccggtgcacaccggacagtccggtgcccctgccacgtcatcactgccgttggattctgaccgttggagcttctgacttgtgggcccgcctgggtgtccggtgcacaccggacatgcactgtttgatgtccggtgcaccggcatgggcgttcctgccgtctgcgcgcgctgcgcgcgcattaaatgcagcgcagggagccgttggcgcggagacgaccgttgcttcggagtcgcaccggacagtccgccgagacgccctggaaattcccgaaggtggcgagtttgagtctgagtcccctggtgcaccggacagtgttcgaacaagtgatggagactcaaataacttcccgattagattagaacaactacatcaagggttagctttgagccattaccttttcgccttggtgatggatgagaaacctacagaggcaccagtgtgtagtgggatcctaaagtgtgatagtaatgggaagggaggcaagggaagaccaaagttgacatgggaagagatagtaaaacaagacttgaaagtttccgcctcatattttatgccttatgctagaatttgttatttgcacaattgcagtgaagatgttaatgaacttgatgttaaacctgatgggtcatggcgtgtgatgggtgatgccgctaccagagatttatctcagtggcatatgcctgatggtactctttgtgactcaaaggaagatacaaaccctggtgtcgcaagtgttaatgagttcaagagagagggtgcttctgatgaacatagaactttgaaacttggaattaaaaaaaaccctattggattatggcaggttagcagtaaagcagatgatatgaaacctgtggttagaaatcacatccaaaataacactgggttttcaacaccaaacattgtgcctatgatcagtagccccactgggagttacagagatggcgaagatgtaagtgtgaaccaagaagggggtggtattcaatttgatatatcattgaaccaagagtttgacagttttgcccacaactttggtcagacatacaatacagaggatagaccacaacatccacaccataatgctgcagatgtcattgttcttagtgattctgatgaagaaaatgacccgactgttcagccgccagctgtctatgaaaatactcctacaaatgatgacagttttcctttcgtcactgatgctgccggatctggatatcctgaaaggtaccaggaggatgctagtgttggtacaagtggtcttggtttattgaggcagaacactggtgaatttgaaataaataactggcaaatgctttcttacccacaaccagagcaagggtttcagttttttgtgactgatactgatgttggcaatccttttgttgctccacataattcctttactattgcaccagaagactactctcttggctgtaatgttggaatagaggacccctctgcagctcacgatgtttcaatttgccgaaacagtaatgatgtgcatggaagcttggttgataacccactggcattaacaggtgacgatccatctttgcaaatttttcttccaagtcaaccttccactgttccccttcagcaagaattgagtgagcgttctgatactccaaatggagtccaccctaacgattggaggatatcgcttacgcttgccgctggtggagggggcaatgaagagtctacaagtgttggcggtctaaaatcacaaccaaaagtttcatcgaaagaggcaggagttgaacctttacttgatgctgcttctgctcttggaagcatgaacaatgacagatgcactggatctaatctaaatcctaaaaggattgaaaatatattttctcatcctcgccaaccgcgggtttcatctctatacaacttgcttgccactcacgtcgtgcacattgctcttgctcgcgcatgcagcctggcctccactctcctgcctctcactgctgcccctcgctattcttctctgacagaccgatctctatcatgcatcccttctggatctcgctgccgctgccgcgccgccgcagatgacccaggtgggggttggtacaggatattttctaactgggagtggtttaatgtggctagtggagcaggctgtacattgtccctgacatttactgggtataaaggaatagggggccatcacttggcacaagacaaatacatgtgttgtgtgtaccatcattgtatttag

SEQ ID NO: 16794 - DNA, 1206 bp, Zea mays
  Peptide Sequence Number=SeqID_60169
atgaagccgccggcggcgagcccgggccgcgcggagaagccgcagctggcggcgccgggcctggcgcgcctgctgctcagcaagagccgccggggcgcgcggtcgcgccgggcgccgccggccacgtcgcccatgttcgtgtcgcgcggcgcgcgcacccgcgccgccaacgacggggagccctcgtcgcccaaggtcacctgcattggccaggtgcggatgcgcaaggggaagaagcctgcgactgcgacggcgccggcggtggggaaggcggccgcgcgggacaagggcgccgccaggggcggctactactactactgccgctgcctcaagagggcgttcctgtgcggcgggctgttcgcgtccgacgcgcggaagcggaggcacgagccgccggcggagcgcgggcgccgctcgccctgggtgttcagcagccgggacgtcgctgttgctgccgcgcccaagccgcccgcggacccgagcagcgggcgccgggccgaggacgaggtgcagctcggcgtcggggacgtcgacttggggtcgaccggccgggacggagaacaggaggtggggatcggcgacggcgacggcgaccgggacgcgccgctggccgtgtcgtccgccaccactacgccgcccaagaacgcgctcctgctgatgcgctgccggtccgcgccgcagaaccgcacgtcgccactcacctcccggttcccctccaccgccacggcgccaacgccggcgccggccagggacgccctcgccgccgcggcgtccccgttagcatccccatccccttcgccttctccttctccccggaaggcgccagcttcggcgaacgaggacggcgtggcaacgcaacaaacaggagcggtggcagcgccagcgcgtgagccgcagctggtattgagcggagaaggagaagaggaggaggaggaggaagtagaagtagaagacgacgacgagttcgatgagtacgacgaggaagaggaagaggaggacgagacggtgcggtgctcatcggcgcggccgctggtgctgcagcggtgcaagtcggagccggcgacgaccgcggccgcgaagatggcggcgggacccgcgacgagcgccgggtgcttctgggcccacggagggagcggcggccggaggaggcacgctccgccgccgcccggcgcggcgccggcggcggtggctttgaccggccactga

SEQ ID NO: 16795 - DNA, 1023 bp, Zea mays
  Peptide Sequence Number=SeqID_60170
cctccactcacgccgccgtcgcctccgagccccactgcccgatccagacaaccaccccgcccagatccagatccacctgtactggatctcacagcctccgcttctgctttcctttatgtcgtcgaccgcgatgtcttgggacgggtacggcgggcagatctaccctggaggcggtgttccagcagcctgagacgaccccccttgcaggcgccgacgggggagatggagctgccgagcaacgctggcgacggcgaactcctgcccatggaggagcacaaggagcgcgcgctgcggcacctactccgccgatccaagcgcccgctggaggagttcgtggccgccgtggcagacgtcgcggagcagctggtgagcgcgtatctggacctgggcgtcgagtggcgcggcgcagactggcgggagcggttcctggccagtcccgggtcctccctcgcgtgcctcccgatcacttctggtgggacccaattgtcagattcaccctcaaccgccaagccgaagtccgcggatgccatcgcgatccttgcgtccgtgggcgttgacccgcagctccggcttccgcctaacgcccaccaaccggacccctcggccgcactcgtgcccatatcagcgtccctgggacccgtccgcgccatcccgacctctagaaaccctaccctcgttgagaaccagagagagagagtgggtgaggtagcgcggtgccgccgcgggggaatctccgattcaatcgtcgtccgcaccgtcgagggtgcctggggtcttcctcgggctcggggaaaggctgccgtggccgcttcaccaaggattggatacttgtggtgccggaattgcttaccggagctcggcatccgccgctcaccgtgggcagagcagggcgcttctagattcgatagccggccatggcgccgccgcaggaacccgggcgccaccgtgtgcgcggcatcggggggtggcgcgtgcgccggtgtgctgtggaccattgattctctgcgtaacggccaggattag

SEQ ID NO: 16796 - DNA, 261 bp, Zea mays
  Peptide Sequence Number=SeqID_60171
atgtcgactgagaaacgccacctagatcagatcaaactcctcgccatgtggctcctcctgaaccacctgttcttctcctgtggggggtgtgagacagcaagagtgagctcacatacgttcatagctcaacaagtcgtggggaataatgtggcacgaactcaccaaaggtgggagttcatgaagtgtaaggtagcctcctgcttcactatagcacctcatactggaattttcggtgggctcctgtccatacaatggatctaa

SEQ ID NO: 16797 - DNA, 1203 bp, Zea mays
  Peptide Sequence Number=SeqID_60172
atgtcggacctcgcttccaccagcaaggtatacgcccgcccgagcccagttcgccacctgatccctgtcgatttccccctcgaattccccgggggattcccgccccgctgccgcccggcggataaacttgcgtattttagaataaaggagctcaaagatatcttaaatcagctggggttgccgaagcatggaaagaagcaggaccttgttgacagggtattggcagaattatcagatgagcaaggtcaacgccatcatggatggggaaggaaaaatgctcttacaagggaggcggtggcaaaagttgttgatgacacatacaggcccaaagaggaagccactgacttctactatgtggagactaaggtccgctgcctttgcaatagcacaatgctaaatgacaagattatcaaggtttggtgcattcttgtaaatgacaaagtccagttcaggatgcaatggcctcaatatgcagaattgcaagtgaacggtattcctgtacgagtaatgaccaggcctggttctcagttactagggataaatggacgtgatgatgggccactgccgccggctgcccaactcccgccggcgagcccctcccccctcccctcccgctggcgagcccctgccctcatcgacgacgtcggccacctctcctacgtggccgccgccgccgcccctggtgtgggcctggccgcctccgccgccgcccctggcgtgggcctggccgccgcctccgcccctgacaccctcctggccacctccgacgcctactgcgcgagcccgtttctgcccgcccccctgggtgcggccccatcccttgccgccggcctggccgcccacctgggcgcggttccctctctggcagccggctgggccgcctccctggccgtggcccccaccctgcacgccggcctggccacccccatggccgcaggaccctccctgcctggcctcaccgccctcgcagcgagcacactggtggaagtgctccctacatcgccggcctcgggcccctccgcgacgccactcctctggccctgcgtcgaggctccccgccgggccgccgtggttgcctcgcgggagcgcgagcacgccacgtccctcgccttggagcaagagcgtgctttgggcgctgcactgaccacccagatggctaccgcgcaacgcctccttctcggctgccccgtcggtcactcgtga

SEQ ID NO: 16798 - DNA, 399 bp, Zea mays
  Peptide Sequence Number=SeqID_60173
atgatgggaagcgacaccgcaagccatgatcttgtcaccgtgggagctgcattggtgcccccacacggtcgtttcagcctttcttgggaggctgctttagcaggaggagcctgtgagcgcagcagatctggtggcccgcaagacctccgccgaccactccgccccgacaatctagatctatatatttgcctcttttggtactctcaaattttttgtgagccatttcaagctcaatatcatgacgtgcacaacttttcagcgagaaatgttgggtcctcttctactggcaccataaatgcactcaaggctgcctctgctacaaatgctcgtgcacatgctccatgcattcaaagtataatatttgagaattttttcacatttcacaagcacttcttttaa

SEQ ID NO: 16799 - DNA, 525 bp, Zea mays
  Peptide Sequence Number=SeqID_60174
atggtgcctcccgttgacgtggtcggcccgcgccctaggttgggcgatgtggaggctcctccgaggtcgaggtcgagtccgtcttccgtggtcgaggtcgagtccgagcccctaggtcgggcgaggcggaggctgttggctgaggctagggcggagttcgagtcctggggtcaggcgaagcggagttcgtcgtcttctggggctgagcccaagtccgagccctgggtcgggcggagcggaattcgtcgtcttctggggctgagcccaagtccgagccctggggtcgggcggaacggggttcgccgtcttccggggcttagcccgagtccgagccctgggtcgggcggagcggagttcgccgtcttccggctttatgctgatgggggttaccagctgagaattaggagccttgaggtcaactcgccgcggccgagcgccaaggatctggcagcgacgacccgagtccaccattcgagtccccgttatacggcgcggaacattcttcgcctcccactccccgtctag

SEQ ID NO: 16800 - DNA, 573 bp, Zea mays
  Peptide Sequence Number=SeqID_60175
atggtgacctctagttcgatggcggggaagagcgaactgggccgcggcctctgcccctccctcagccccaaggattttcatcaccagggctggggaggggagtgtgccgagttggggtcggcccctgcgtgggcgctgccgcgtgcctggctctcggacccgagtggcttcggagccgttctcggcgccggcttccgccacggcagcttgaagagcatccgccctgaggtcatcgctgccgctgttcggccccccggagcagaagtcgtcgtcgtcgccgctgccggagcgggcgacggcgcgccgttcgtcggtcttctgttgctccgcaggcccccccccccatcgagtggggttgttcgtacccgcggagactcgcctgttggttgtctgaaccgcttcaccaagcgtgagtcgccccgtgtaaaggtgacgagtgagagcggagacccttggaccgcgtcgccgtccgaggctaggtcggacctcgccgaaggtgttgtcgacgccgagggtgctgctgctccctttagccgtcaagatccgagcctgcaggatcggattatcttgtag

SEQ ID NO: 16801 - DNA, 2004 bp, Zea mays
  Peptide Sequence Number=SeqID_60176
atgaagaacgtagaccgacctccttctaatccaaaacggattataatccaatctactcaagagtgctttagcgttgacataccccgtgttccggcggagacttttagacccgaaacaaggcaggctgctaatgaggatgatgactttatgccattatccaagaagcgtaacttggacgacagtcctggatgtaaatgtttacgatattcattgtatactttttttcagcagaggcttaacgtgacatgcaacccccaagatgtattagtaagcatccagatattaaatgacagacagcgccaagcaattgcacggaggggattttccagtattcttgatatgagactggacgcactcggcagcagatcacatttagcttggctgatggaaaagctcgaccacaatgacatgacaattcgagccggaccagggaaggagctgaaaattacaaaggatacggtgcacctaattttggggttaccgaatgctggtggaggaactgcattgggcatcgatgaagctgttgctgccaacaatttaagagctgaacttggtttatcgaaagaagattttgggttgtattatttggatcatcttcatgactcagcggcaccccagaacaaacgtggaacaccacgaatcaaatattttgataggaatattattcaagccctgacaagagctgacaagggcaagatacgcaaaggagaagaagcatttggacattgttcgcataagaccaggacaaacacttttgatgtacctcgtcctgacccatctggacagcactcaattcacatcgaactccggctcatcagggatttgatatcaagcaagttgaatcagcttccatcccgccaccgcctgggtttcatagagaagttgtcacattttgatacggaggttggtaaggcgtgttcagttattaaacagactcttcagcagattgttgagaagcaatacaatctatctgatgtttttggcgagttaattgatgaggtccttcgtgctgagtcgggggacaacgaagatggttatgatgtgcagaaaacaacttcaaaatcagatgatattcttccccagacagctgaaggatgtacgtgtccggcccccacaactgtacccgatatgtctacttcagtttcccagcaggatacgcagtttacagacacacagggtaaacatggtgacggtggcaagaacatgccgaccaatacaaacgtcactcctaaagcaacaccacatatggatcctgacgcgccgatatttgatgcgactccgcaaatcaaggtttctgttgaaaccgatccatctacaaacactccacaggttggccaggcttctcttgattcggagatgcaaactgtgttagctctacgcgaatatttgtgtggtatgcaatctgacatcagcaggaccataatagattatggtgaatattcagcgacatgttctgatatatatgaatcttttgccgatgggaagtgtctcgacaatgtattcatgcagtgtttcatccaatgtgttattgatgatgcaaaaaatcagcagacttccatgagttcgaacagtttgattcttgatgttaatgttgggtcactactcaactttgaggaacaggaacgacacagtcgcaaccctcaaccttttgatgaatctgtactccacacacttctagacaattcattgcctgagacagatgaattggaccaatgcaaagcgatcatggtccccatggtaagcagggggcattggacattgtatgttgtcaataaggtcaagaagtgcattcatattttagattccaacccatatgggccaacacttgatggaactacatggaaggactatcattttgcacatttgggctcaggtggcagaaagttaccatgggctaagggcaacaccagtgagatacggtctcttgcgctgcattatatcacattccacccgaagaacaaagcattatcgctgctcgaagacatccaaagattcaaggtctaa

SEQ ID NO: 16802 - DNA, 1014 bp, Zea mays
  Peptide Sequence Number=SeqID_60177
atgtcgacaagcgatgacacgagtcgtgatgatgccttcccttgtggtcacgatgcaatcagaactaggaagaagacaatgtcgtcgtcgctcatgatgaaccaggacacgccggggaggccgaggcgggacatctcggagatggtccatgagatgcggatggagcggcacgagtacctgacattagcgaatttaggtattcagaaaattgagcttggaaaatattcgcaagtagttcgcgaggcagctatgctcagcacaagtgaccctaacttttggacaattaggcccttgtctgatatgatggttcgagttgccacagatgttgtctgcttccttcttaatatctatgagaaaatgatgggacagttaataaaagtatctttatggcgtctggcagtttgcaatgagctgcactgcagtgtttgcactgattgtttttccatgtttgtgatagatgacattgaggctgatgtttatgttcatgaagctgatatcctatcagtcttagatgtgcctccagggaaaatgggcgagttattggcaaaaagggggtcaacagcaatggctgtgaaagaatcctgcaaacaggatttgactcttggttcaggtgtcactgtgccagcgcgatcaatattaatagttcctctgcatctcgtgcaaatggatgcttctgtttggggtgatgatgctgaccagtttaatcctcatcggttccttaaaagggacattgatcttggagaaatattaggagcacctaaaggatcaactacgataaatattttcagtgagtgtaccaaggccgaatcatttcttccatttggttctggaagtcgagcatgtgttgggcagaagtttgttgttcttgcaatatcgatgttgattgccagtctgctcttcagctatgaggtacaacctcatccaagtttgtctaaagaaatggacacaacagttgacagcagccaccttcatctcccaaaccctaagatcatcctcaccaaaagaaggatctga

SEQ ID NO: 16803 - DNA, 534 bp, Zea mays
  Peptide Sequence Number=SeqID_60178
atgacggggaggcgagcttggacgtcgacgacgatgagggcgttgggcagtgctgttgcgcgagttgttcggcgtggggggaagagggagtgggcaagacggcactatgagggaggggtttcaagcgggctgggaggggcagttcggcgagagatcgtgggcgcggtggctgctgcgcgcgtcgtggtgaagcaggacgagtgggcggcggcgctgggggacgtggcggctgctctggctagcacacgcagaggggagggcgagctaggccgtgcagctagggtgacgcggagcatgcggggtgggctggccacgcggccagatgggttggcaagggggcaagggagggtgagttgggccacatggagctcacgcgcaaagctggcccacggaatgggccgcgaggagcgagaatgcgaactgggccgcggcggctggctggggtgggccacgagcgggggaggggagccaggtgggctagccgggaagggaaggaagggacgggcccacaaggcgcggggcaggccgagctag

SEQ ID NO: 16804 - DNA, 312 bp, Zea mays
  Peptide Sequence Number=SeqID_60179
atggcgctctcctcctccggcaattcgtacaaacattgtcaggacctgctttcacatggtataaaattgatagatgaaggcaccataaatgctgacctcctcaaaagtatgaagaaaggaaagaaggtggctacatcaaatgtcgccacttttcaaaatgatttggatatccaaaatagcaagttgagtccaagcatgaaagcaaggctctccgccggtggatgcacaccccaagaggtggaacctccacgccacaaagatcaagaaagcgtcgacagcaattctcaagacgacttgctctatgacgagtga

SEQ ID NO: 16805 - DNA, 630 bp, Zea mays
  Peptide Sequence Number=SeqID_60180
atgaacgcgctctctcgcgaagggtgccggcactttgaggtcttcgaccaagctgatgaggattttgagcgagatatctacaaggttgaagaccctatagtgaaggagtccgccggagccatctacgaccggatgtggggcccgcacggtcgagaggtggtcagggagcgggccgagacggcgagggctcagccactgaggccggcggaggcccgcccccagagaccgccggaggcactcctgatgccccccgcagccgctgcgccgagggctgaagatcctgcgacggtggcagcggaggttcaagattttgggcctgcgcacacaaccgccactactaattttttggcggcttcgaccgtggatgatggtaatgaatcggatgggtctatatctaagttttctgatttcggtggctctgggagttcgatcgagtggactgaggagtcgtcggatgaggacttggactactttgcggccttggatgtggctgcggcagaggcttcaccgtgcgctgcggatgcagaaggtgagggggaattgcgaagtctttttgcgggtgaggagcttaggataatgttattcaactatagagagatgggaattattccgaaggctgagccgatgtag

SEQ ID NO: 16806 - DNA, 1086 bp, Zea mays
  Peptide Sequence Number=SeqID_60181
atgcgcggccccgggggaaggatgtcttcgcccgagctccgggagtctttggcgcggatgttgagggttaccgggggttggtggcctaggaatgttcctatcccctgcgcggccggcgaagacttttttacatctcgcatggttcgtgagtggaaagtgtttccttacttgcggaatattgctgctgttgtgttggcagtgatggacaaggatcgccaaggagctgcgcagaagcgccaggcggtcgtcaggcttcatgaagccaggccgaagaggcagcagggggctgcgaaggctacggcccccggcggaggtcagccgccgctggcggcgaagtcggtcgtccctgcatccggcagggcgtcggaggctacggctgccgccggtggttccaagactgcgaaggccgcatcggcgtccggcagggtgtcggaggcggtgaagtcggcccgagggttgccgccgccgggcaagcgcgtcgccgacttcgccaccgacattagtgtggacgactatcttgttgggtcggacgaaggtcaaattgtcgttgttccgcccgtcgcggcgaccacggcagctgccgtactgccaaaggcgaagggtggtgctcttagtgctggcggcgagatgccggcacttgctgctgtgtgggacgaggcgggcactgtgtcccgccggctggaggagatgaaggaggcactaagtcaggcgactgacttcgccggccgtgcggcgtcgggggcccttatggccgttgtgtctgctgaagtcgagagacttcggacgcaacatgccgacgccgtccgggagaaatcgaccgccgacagcaagtgccgcaagctggcggacaaggtggtcgtgctggagggggaaaaaaccgacctccggcgccaattggtggaggagaggagggaggccaatgaggccctcgccaaggcgcaggctgcgctggcggaggccaatctggcgcgggcggagggcagtcttgccagggagcgcgccgcgcagttggaggagcggctcaatgccctgcagagccgtgtggagaggaccgaggccgtggcgcgtgcggaggcggactggtga

SEQ ID NO: 16807 - DNA, 678 bp, Zea mays
  Peptide Sequence Number=SeqID_60182
atggaattactcagcaagtcttacccgactaaagaaaagactctcaagggtatgctggttatatgggagtcaagggtcctcggtcagcaggcctacatcgacaaggtccttaatcgactcagacggagacactacaccgagactctcttctcatgcaagtcacccgcccggtctcagcttaatcatttaaccccaaagggtttcaaggagggtaatcaagatcaaggaagctctggagtaaaaagaaaaaggaaacagatgaatagtactgggctgatttcagcccagtcggcccaggtctacgcagaatgcgcgggcccgcgcccgcgccctggcggctttgcagaaagggcctcggtttcttatctatttggagacagctttactaccctacggagttcggggaggggtcaatttatagtgctagcgggcggtggccgcgaatttcgagcaagacgcgcggcggtcggaggtggagaagaacactggcgcacgcgaattagtgtcctacgccgtggcaacctcaccggcgttgatttgatagcagtagcgagttacagcgacgcggtggaagggttgagccacgcggcgcacggccgggaggcggcggtcgacggtgagcttatcggctacagccgcaaagcagaagggcagtcacgcaaagttatagagctataa

SEQ ID NO: 16808 - DNA, 497 bp, Zea mays
  Peptide Sequence Number=SeqID_60183
atggctcccaagaaagcaacttcgaaggctaccacctccatcgacgacgcagcgaaggcagtccttctcgctaagaagaagggcaaagcagcccttgttggagacgtccctcatgaggccctcaaggatggggcaatcaatagtaagcgagacatcgccaagagaacccccgcttggtcagtcaagagggcaccattcgaatatgcaactctgagggactacctcagaaatccccgccaggcttcacccccagaggctgacaatatcatcgaggacggcgagatcctaggcatgtcagccaaggaccagctcaagttgcacacacttcacataaaaaataatcacctacaaaagcaaaaggaaatactcgcagccaagcgtcagcgcatcaccatgcagaccaaggttaagcagatgatcctaaatgaggagcacaaggccaaagagctggaacaacatattgcagaaatgcaaggcgaagacccccaccaccagct

SEQ ID NO: 16809 - DNA, 192 bp, Zea mays
  Peptide Sequence Number=SeqID_60184
atggctcctcaggcgtgggtcgtggcggagaacggcgaggacctccaacaacccagggaattcctgccgctctctaagcttgaagggagaggcgcgcgcgggacattcgtcgcgctgaggaacacgccaaccgcgcagcaggagatcgcgcagatcaggaggatcacgctgaacaggaaagggcgccagtga

SEQ ID NO: 16810 - DNA, 264 bp, Zea mays
  Peptide Sequence Number=SeqID_60185
atggcgacgagggacaggtgccaaagattcaactcaaaaccaataaaaagaacaagacagggttcaaaagaaaggagcaaagagaaaccgaagtgctccctggtatggcgcaccggactgtccggtgtgccaccggacagtgtccggtgcaccagggaggattgtcttcaaactcttcaccttcgggtttctcaggcgcagcccactataattcacccggactgtccggtgcaccaccggacagtgtccggtgctccagagtga

SEQ ID NO: 16811 - DNA, 900 bp, Zea mays
  Peptide Sequence Number=SeqID_60186
atggcggcagcaggtgagcggaagcagcagtcaaatcatctgcaggctcacgtcccctcctggagcagcaggggagccctctcccacgacggcaagcgccacctttggcaggcgaagcaggcgtcgtttcacctccgccatgatgaccgcgtcaaaaaagccgccctagagcactcgggcttcaggctcattactgatcagaggttcgaaggctggcccctcggaagggttcgacagccgcctcagagcactcgggctccacgcccactactgatcaagggttcgaaggctggcccctcagaagggttcgacagccaccctagagcacgcagagcgagggatgactctgggtacgtccgatacatggccgaggctcgggctacgctcccgagaggcgactcggctataattcaccggactgtccggtgtacaccggacagtgtccggtgcgccaagggaggtcggcctcaggaactcgccagcttcgggaaactccaacggctagtccactataattcaccggactgtccggtgcgactccggagcaacgactacctccgcgccaacggctctctgcggtgcaataaatgcgcgcgcagcgcgcgcagatggcaggcgtgcccatactggcacaccggacaaggaacagtagatgtccggtgtgcaccggacaccctggagggcccacaagtcagaagttccaacggtcagaatccaacggcagtgatgacgtggcgggaggcaccggactgtccggtgcgccatcgaacaggcagccttccaacggccacttttggtggttgggggggccttaaaataccccaccacaccccacccaattcattgcatccaagttttccacttctcaactactacaagagctctagcattcaattctag

SEQ ID NO: 16812 - DNA, 588 bp, Zea mays
  Peptide Sequence Number=SeqID_60187
atgaagaacaagtcttcatcattcataaaatgcatctttcgagattttgcaacttcatatgccgaagctatagttcgtattgaacctgtcttcgattcttctggagttatagcattgtcttcgtacaagagtttgaacgagggggctaagaaccgccgtcgtcatggacgcacgcggggagccatcattacttgttaccagggcgagcctggatgggacgccggtcttgttccccccacagtcggtccgagcccaaggtcgggcgaggcggagactcctcctgaggccgaggttgaggccgagcccacgggtcaggcgaggcggagaccaccttccagggccgaggttgaggccgagccttggggtcgggcgaggcggagtcctccttccgaggccgaggttgaggccgagccctggggttgggcgaggcggagacctccttctgaggccggggcccaaggtcgggcgaggcggagcttcctgttgcgcctgaggctggacttagctgttgtcagcctatcctggcgggtggcacagcagtcggagaggggctgtaacacccctggtgttactataactaaaacttga

SEQ ID NO: 16813 - DNA, 501 bp, Zea mays
  Peptide Sequence Number=SeqID_60188
atgcctggctcgctggctcaactggctctagcgctgcttccggtgccacctcccaccgttggggcggagcgtggctgtccgcccaccgtacgggcggctgttgcgtcgtgcgcaccgggggaccgtccaagacgtcgcacgccgctagggcggcgttcgtgttcttggattgtcttgtcctcactccggcacgacgcctccgtgcggagccatctgaggcggaggtcgttgtcaatgctgctgcagtggtcgctggcgagccacccggagtttgttgtcccgcaggccctccgatgtggaggttgttcataccctcaggagtggaaccggagttctgtttgtaatggcaccttgagtgccgattttaagaacccacggctgctctacgatgagctggagccggaggcagtggtgtcggcgtggacagaggcggagtcggctcgaaaaggggcttcgtcggcccaggagcaggtggcttcccaggccaaggaggtgcagtag

SEQ ID NO: 16814 - DNA, 273 bp, Zea mays
  Peptide Sequence Number=SeqID_60189
atgggtaagcttagcctcggctggaccaataccagaaaggccgacccgcaatgggagtggagagatggcaagagtgttgtgtatccacctagcaagaggctggatggtgggaatttatttccgctgcaaatgttggtgtgtgatttgtgtttacttaatcttgtgatcttggtgattgtgaaacaacctgactacaaagtctccttggatcacattgagcgctcttcatccaaagcatctaactttgggcgaagattctttacaaatgcgtga

SEQ ID NO: 16815 - DNA, 1041 bp, Zea mays
  Peptide Sequence Number=SeqID_60190
atggcttgttacttagaagtggttgatctagatgtttggagagttactcgcgacgagatgaaaccacctaagaatcctgagaagctcaccgtgagtgacaaaaaagaaatacatttgaatgctagagctaaaaattgcttaaagatgaaaggaaagaaggataaaagttcaagctcctcaagtgaagaagaggaagaagaagatgatgaagaagaagaagatgatcaagcctccacatcatcctccaaggatgaagaaatggtccaacgtgtcgaaaagttcgaggatcttctttttaacattgataggaaaaagcacatgaagagaggggtgaaaggtaacacaagtatcccatcctctagtgatagtaatagtgatgatgaagataaactctccttagatgaatttgtgcatgccattaaattctttgaggaggaaggccacaagtcctaccaattcaacgcgaagaccgggaaaaagcaaaagaaaaagccaacacgcaaaatctccaacacctacatcaacatggtagataagaaggcgactacaccaaacttgatcaaaaagaagaagaacggaaaggaaaacaacactattcaccccgttccgactactgtgccaaccaccagggtaaaactaacgacagtaagtcacgacctcccccgagttcagcctcgggcgcaacaggaagctccgcctcgcccgaccccaggcctcggtctcgggagaaggtctccgccttgcccgaccctaggcctcggcctcagcctcggcctcgggaggagtcacaacctcacccgacctcagcctcggcctcaggagaagtcaccgcctcacccgacctcggcctcggaccgactacgccacaggggatacatcattaccctacccctagctagctgcctcaggctacgaaggaacaagatcggtgtcccatctagattactccggaaacaggcaaagaaacatcagcaggacctaggtccgcaccgccagctacgcttctatagggctctggcacttctccgcctgccatgttag

SEQ ID NO: 16816 - DNA, 666 bp, Zea mays
  Peptide Sequence Number=SeqID_60191
atgcagagcttacagcgaaaaataaacgctgattccgccaaagtaaaaggcgaagaagctcctaagggaggcttacagcgaaaaataaacgctgattccgccgaagtaaaaggcgaagaagctcctaagggaggcttacagcgaaaagtcagcgctgatacaccaaaaagcatacataggatcactatcatcatatcatacagaaagggtagatgcttcggctatgaggataaagcttcggagaaagaagaaattttcatgcttcgttgtgtacgaaaagaaggtaaggtgtttttcgccttcggctcaaaaataaaatttcgtccacagcaaagcagattgtacacggataaaggggaaaagatatattacaagaatcatatgcagaaaagactttcggagtatctgttaagcttcagctcgtcattcttcagcttcatcatcctgtacgtattaaaatggaatgagaaaggcccagagttcaaggagaagccagccttcaggaaagcagtagccgtgcctcgagaagctaacagggcgcagaaatcggcatgcccagcgataacttcgtcaagtgcatcaacttcgccctcaatgtattcaaaggtgcttggcaggttttcagctgaagatgtaaacttatcagagctggttccaattgagtaa

SEQ ID NO: 16817 - DNA, 468 bp, Zea mays
  Peptide Sequence Number=SeqID_60192
atgatgcgggtgttggagagagttgatcagcggctagaggctgtcgaggtggggcagcagtggctgcaaactcaggccgatcagtcgtccaacgcggtgagaagatcgaaggtagataggaccatactagcaagacaagtggaagagaccgggaaagctctggcccggatgtgtctggagttgatggctaaagaattggaaggtaacgagtctaactctgagagggagaatagaggaggaagatggtttgatcgtgggggcgtgattagtggtttgatcggccacgagaaccgtatgaacagtgtggaggtgatatacatccagggtcactgtcgaagttggagaagtgtggaggagtatattcaggattttgaggatgctcgttatgctacctcggttcacaatcccaagatggatgagactttttatgtcactcagtttgtgaaagggctgaagggtgaaatctag

SEQ ID NO: 16818 - DNA, 546 bp, Zea mays
  Peptide Sequence Number=SeqID_60193
atgccctcccggggcgggcagtgggtgcgaagtcctgccttcatgttggatctgcgcggccgggatcccgccgcgttcgtgcgtgaagtggaagacggtgtggtgaggatcgtggggcgctacgtgccgaagacagagggtctgcagagctgggatatcagtgggtccaacgacatattgaatcaggtcttcgaattgaaccgcttgccatacagtggttatcacggggaagacgccaccgatcgccgtgggaagaaaccgatgggcgtgaccgaggaagggccttcacaggacgctgccccggcagctaagaagagaaaattagccctcgggggaaggatgtcttcgaccgagctccgggagtcttcggcgcgaatgctggagattaccgggggtcgatggcccaagaatgttccgatcccccgcgcggctggcgaagacttctatacgtcccgcatagcacgcgacttgaaggtgtttccttacggacgaaatattgctgctgttgtgtcggtagttgaaagtcgcctagaggggggtgaatag

SEQ ID NO: 16819 - DNA, 378 bp, Zea mays
  Peptide Sequence Number=SeqID_60194
atgccgtcctcgtcttcttccgctgccgctacgccgccggccgatccctcgccgccggccgccgcctcgtctgaggagacgctgagtagtttgatggcagaggagttgcgcgtcggcgattcggttgattttggcgtatcgcgtgtaacaccccaggtgttactcagggtgtccaccccagggagccgccgacgacccccgccgcctgtgctcgtggccagagtagctccgaccacctccgacaccgacccgcacaccgacgtgaccgccgcaacctcccggacgtcgctgaccaccccgccggagctctactgccgccgggggctttgcgcaatgtcagtgacccaagcaaatagtggaccatgggctgttctgtga

SEQ ID NO: 16820 - DNA, 780 bp, Zea mays
  Peptide Sequence Number=SeqID_60195
atgctcatccagaaccgtcgatcaagtgatccacgaccgagattctatgtggacgaagggccacggcggcgcaggatccccacgcggcgtcgcgacccgccggagttggcctacctatgcgcttcgatgccctaccccgattcaacggccctacttgttgctccaacggaagtgaacacggataagggttccgtaccagggattaccgacgctggcgagctgtccacgggagggggaagctccgcccctgattcgcgctccggtgaggaattcacttcgattcggaacgcacggcttgagtcgagggcacggacggacttcccgggcgctggagaatcacacacgaccatgcgccgaggacggaacaccgccgcagatggttttcaccggtggcgcgcgacctcccctgtaaccggcgcacgacggctgttccaattgggcactggtcgtggcggcagagaggtgaagaagagctcgagctggaggctcccgagctcggcgatggaagctatttggagtagagataggggcgcccagaccttggttcttatacctagggataaggttggattgggggtcggacccggcgggcacggcgagctgttgcaacggactccgaaggaagcggaggctccccatagtgaagcctcttgtgaggcgaagacaatgccatggcgggacctgggcttcaggcggatcccgttcttgaagtatggcttcaagggctacaatcctggcatgggcatcctccagctccaagtgcaccctagagagatctag

SEQ ID NO: 16821 - DNA, 570 bp, Zea mays
  Peptide Sequence Number=SeqID_60196
atgggcggtctgcttgacgtgggccagatctccgacaagcaggagcaaggagggcaggcgagaggacgagggatgcttcgtaccctccaaaccactagggttaacaccagctacgcccctccgccacgacaaattcctgtctaccaagtggtaatagaggaagttccggtggatctccctcacattcgagtggagcatggagtcatcctggaagatagctcagaggaccttctaccgatgcccaccccgttggtggagtcactggccttcacagctaggtcatcaacctcgacacctcctacaccagccgttcaagctcctgtacccagaggcgacgacccagacgactctggggacgatgatgatgagatgacgacgacaacgaagacgaagaggaacaagtcaatgaggagtccaactacgcccagcaggactacttcatggggggataggggattcaggactctatctgctcatgagtccctgacactgctatccacctacgctgcttcggaagctagaccagcatcgttccaggtggagctggtgaggatcgcctcaacaccctag

SEQ ID NO: 16822 - DNA, 504 bp, Zea mays
  Peptide Sequence Number=SeqID_60197
atgacgggcttcatgtcttttgcctcccttgtcacctgcgagggggccatgaatgccttgtcccgcgaggggtgtaggcactacgaggtctttgaccaagcggacgagaactttgagcgtgaaatcttcaaggtcgaagaccctgtagtgaagcagtcggctggggcactttttgataggatgtggggtccgcacgcccgagaggctatcagggatcggtccgaccgggtgatagagcagatggctcatgccgaagacgtcgaggaccttgttggtctggacggtgcactgcctgaggccgcggcggtggaaccggtgccaccgcctgatgccggtgaaggcacctcggcgatccctgcgtccgcggcggctggcgaaaatcccgcaccggcccctgtgccgacgggcaaagccgccctgaaggtggcggccgagcaggcggccgcgccggcagccgaagaccccgcagccgtggctgggatcccgccgcatgtggctgagtag

SEQ ID NO: 16823 - DNA, 519 bp, Zea mays
  Peptide Sequence Number=SeqID_60198
atgacgcgtaccaagaccacccaacgaaaggcaaccagacctagtggtgtgccctggtatgagttggctcctagacatgaggggagcagcagtggaagcaacgatcccataggggatatggaggccagggtggagcaactcatgttagaactatgccatggaaatagggagcgtgcgcgagatagccaccgcattgcggagctatcagcggaggttaatctcttgcagcaggaaatcgtggaacgagacatggctatcgactgggtcgtaaattcatgctctttcgcctgggactgtgaggcaaatgctctagcctgggtgcacatgttatatgaccggctacatccgaatgtgccaccagaggttgcagcaatgggagtcggaccatctggagcagctagtggaggacctaatggggagttggacctttttggagcccctccttccatgaacctcacagatgaatgttctcctgaggctggcagtggagcaggagcggccaaggacgaagataattag

SEQ ID NO: 16824 - DNA, 384 bp, Zea mays
  Peptide Sequence Number=SeqID_60199
atgccggtcacccagttcgctagaaggcacgccaagccgcccgagcaacgtcccaagcctcggaaccaccgtagcctgcacccgcctcggctccggcgacctcaccgccgtgagcaagagcggcgccgcatgcagccattaacccttccggtgcttgattccagtcgcccgatctttatcgtgcgggccggatcaccggataccgctttgcgcacacgcaccctgcgcctggaccccacctatcgaccgtcggtgtctctggcactgggctcggccggcaacgagcagcccgtggttcctgagtgtgttgccgaagatcttcttgaccaacaacctggtgaaggcaagtgtcctctaaccttttatgtcgtacatactttataa

SEQ ID NO: 16825 - DNA, 783 bp, Zea mays
  Peptide Sequence Number=SeqID_60200
atggtgcgtacaatccaaaccacccggaccaataccaactacacccctccaccacggcaagctcccgtctacccagtggtagtcgaggaaatccttgtggatatacctcacattcgtgtggagaacagagttattctggaggacagctcggaggagtttctgcctacacccaccccgttggcagaatcactagccttcacagctggatcgtcatcttcagcaccgccagcaccagcagtccaagcccttgctcccagaggcgacgacccaaacgactctggtgacgatgatgaagacgaagaagaagaagaagaaaaggagaacatcaacgaggaagccaacagtgatagagggtttaggtctctgtcagctcatgaatctctaacgtcgctatccacctacactgcttcggtcagcgatgctgctaggcaaactctatggtccctcagccacacttaccggcagcagctgcacaacacaaagtacagacatcttcctgtgcgacttcgtggagaaagccagaccagcattgttctaggtcttaacaccgacctggacagtgctaccctggacctctctagggcacatttggagctggaggatgcacacgcaaggattgcatccctggaagctcaactagaaagaagggatccccctgaagctcaagtccctgccatggtgttgtcccctccccacaagaggatccgctatggagaaccaggatccatcaccaggctgctaaagattttcatttacattgtaataagacaacttttgctttag

SEQ ID NO: 16826 - DNA, 579 bp, Zea mays
  Peptide Sequence Number=SeqID_60201
atggcgcagtcgaccgttggtagcctgagagtcgttggcgcaccggacatgtccggtgcacaccgggacagtccggtgcccccttctagccgttggctcggccacgtgtcccgcgcagataagttactaccagaaagtggcaagataagaatgaaagaatgtttcaagaaagagtacttattacataatcgggtgttcgagtgtggaacttattattacattattgggaggcaaaacaccctcccccaaacaagtttagtgatcttcctcctgcttgggcaccaccttcgagcagaaacagcagaacttgactgtttcatcatctacgacaacatgggtttgaaaaccctaagtatggagtgtactttcgcaagtcttacccatcaaaggaaaagactctcaaggatatgctggcctttgggaatcaaagtaaagctcatccaaaattcaaagactctgtttgcagaaaagcttactatgagtggatccttaaaaattcatttttattatcaggaggttctggtctactccacagatgtcaaagtagaagttattctcggctggaggtttcttagctaa

SEQ ID NO: 16827 - DNA, 306 bp, Zea mays
  Peptide Sequence Number=SeqID_60202
atgacgctcgcccacgcgcccagctccctttttagagccccaccagtgccccgcacacaccccttgcctcatttcgcacaacttcaccctctctcacgctctgcccacgccgctagccgccgccggagacccgcgcccgtgttccctgccatccagctcgccggagaccgcgccaagcctccccgagctccgccccgagacaacaagcagtccgagtttcctgagtgtgttgttggagaccttcctgagcaacaacctggtgaaggcaagtgtcatctgacccattatgtcctacatactttatga

SEQ ID NO: 16828 - DNA, 366 bp, Zea mays
  Peptide Sequence Number=SeqID_60203
atggggagcctggcccatcactcctcatgctcctcctctgccaagtacaatggatcaagcagtctcattagctgcgagaagcagacgattcgaatcaagtttttatccttgcaagtgaccacacttgtacccaccataaccggaatgggagactacgtctcaggtcgcgtgaggagtaaagtctgcgggcaggttcactcaggtatccacacgttaatccttattccaatctcatctcatagaccatgcatccccatggatccatgtccacagaccatcatcattccgttatcaaaatggatacaatcaattcctgacctcacgcgagtgctagaaaaatcactcgacttctaccgagatccctaa

SEQ ID NO: 16829 - DNA, 288 bp, Zea mays
  Peptide Sequence Number=SeqID_60204
atgctgctcctggtcctgctcctactcctggtgtcggcactcctgctcctcatgcaggcgaggatgcagtctctccagcatcacctcctgagcactgagtacagtggggacaacctggggtgggggtggtttgtaaagcaaggaggttgcacactttacccacaagtcgtgatctctttatgcctctggtcgatcaaaccctcaaacattgccaaggtccttacggagaggtactcagggaaaatggcccgagcccccaaaaatatcacaatatcatcatccggataa

SEQ ID NO: 16830 - DNA, 336 bp, Zea mays
  Peptide Sequence Number=SeqID_60205
atggccgcggaggaagaaaggggcggaggggcttaccggcgacgagactgctccggtgaggtggtcgagtatgtaggggaggtcatgagggtcacggcgatgtgtgggtcgccgtcggggatgggagcttcaccagagatcaaggaagacatgtgtgcaaggaatcggagaaagactcaccagattgctcggtctacgcgcgcaggcgggcaaccgaagtccggcgaggacgatcttgggtcttcggtgaggttctgccaggtccaagcgcttggaaagcttcacaggccactggcgaagctaaccgaggggcaggcgcggcttggacgtaactga

SEQ ID NO: 16831 - DNA, 648 bp, Zea mays
  Peptide Sequence Number=SeqID_60206
atggaggaagaaaggggcggaggggcttaccgacggcgagactgctctggtgaggtggtcgaggatgtaggggaggtcctgagggtcacgacgatgtgcgggtcgccgtcggggatggtcggagtcagccggtccacgtgctcaggagggggagctcttcggcggcgaggagtccggcctaaccagggcgcgattggtcaatcaaatgggtcagggagcttcaccagagatcaaggaagacatgtgtgcaaggaatcggagaaagactcaccggattgctcggtctacgcgcgcaggcgggcgaccgaagtccgacgaggacgatcttgggtcttcagtgaggttctgccgggtccgagcgctaggaaagcttcacaggccactagcgaagctaaccgaggggcaggcgcggcttggacgagactggagcgggctggtcgcggtggtcaaggcttcggcggtggtggagggcggaggaaaagctcgccggagctatggaggggcgtctggccagcgagggattttgcctactggtttcaaagatttggagctctgaagtctggtatgtctccgagcccgagcccaaggcaaatccttggttttgtcatgtctggggctcgcgtcccaatgccatcttctggcaagtga

SEQ ID NO: 16832 - DNA, 459 bp, Zea mays
  Peptide Sequence Number=SeqID_60207
atgaagactttgacgactttctatggctaccatcccttggagatggtgatgcaccccttgggactcttccctgctgagaagaaggatgacccaatatggtgtaaccacgtgagccatgtgaaagatgtgtgggcaatgtatcctgacttggctgggagggttactgttcagtgcatgagtgcgttgtaccgcctccaggccctgcagagcgacgctatggcacatctcgctaacatcgctcaaaccaccaagcttaccctcgacacccgagaagattttgtggtcgatttatcctccgagttggtggagaaggatctgcaggagatggaggccaatgaggccggaagcgagggagaagaggctcccgaggagttaggaccagcccctggtgccaatgggactacctctgtgatgcctccttcacccgcatccagtgtcgcttccaccgctcagggttga

SEQ ID NO: 16833 - DNA, 762 bp, Zea mays
  Peptide Sequence Number=SeqID_60208
atggagaagttgcttcagaagatggatgaatacatccgggctgacagtgacttccgccaaagaagggaggaagcatacagagtgatgacagaggaagtcaacagcagaggccgcagtattcttcgcaagcttcgaggcagcaacaaaggtctttctggccgccagctccaagaggcagaggcgccaggggcttcggagaaagatatggggaccagcccaggaagatctactgcttattttgtggtgaagacaaaggccacaatacaagaacgtgtcaaatcaccatccaaaagcaaaaagagattgcagaagccgaagcccaataaagtcaaccgaagcaagtcctacacactgcttcgtgtcattcaccctacataccagaatatgtgggtaatcatcccgcagcttctgttgcttcgactagtcagccgcaagtttcttggccacagcttccacctccgccaccactacagcatgcctactctcgaggccagtagccagaagggagtcaacagacccatcagcagcgagatttcagggaggggtccgaagctcgcacagttaatagcattgtgccagaatcaaaacacatatactgacacatatcctacctttggcacagtttttacattcattgtcatttttctttttaataaggaacaatcaatccagctgtttccgaaggtcttcaatttcacttttctgggcttcagcttgggctttggaagtagcctcgtcttcttttattttgctcaccaatga

SEQ ID NO: 16834 - DNA, 510 bp, Zea mays
  Peptide Sequence Number=SeqID_60209
atgccatggttaggtggggctagcctacatccacgatcggggccatcagagagaactccttcttggccgagtcgatggtgtggctcctggcagttccggtcctacgtccgtgacacggtgcaggactccctttcggtcaacaatgctagagagggattcaaagtgcaaaacctctccagtgtcaaagacgatcatggtgttgaagatgattgctatggagctgtcgtgaatcgacgtagcaccccctacttggtgcgccagctgttgatgtttggtcccgactgcgcactacagggtagctcatgcagtgcttttgggaggacgacgacgtcgatcgctgctcgaggcattcctattcctttggtgtttggttttcttctccgtgttatcctccgactaattcggtgttttgctgtgcacaagacgcgtcttcagactccaggcggttatttcgcacaacatttgcgcgacgagtttgcttgtgcactatacagcgttccatcactttaa

SEQ ID NO: 16835 - DNA, 1167 bp, Zea mays
  Peptide Sequence Number=SeqID_60210
atggcgagagtagcgtgtaccctccgtggcaagaggctggacgatggtgtatctgtgctctcggttggcgtgaacttggtctgcatacccttgagagtcttttctttagtcgggttacgagtcactttgattgtgattggtgttaagcgctgtggtttatccgaggtcctcgggacactcagacggatcctgttaagttatgtggtgcacatgcatagccatctgaggtctgtgagacaaggacagagatatggaacatacaaggaaaacaacacgcaaatctactggaccttttggcgtgcctcatcatcggttagccccccagacatgaagggagtagtagtggcagcaatgacccaattggagacctgtaagccaaggtggaacaacttcgatcagagctacgtcaccggaatagggcatgggcgcaagacagccagcatgccatcacggactcgtgcacatgatggtgcggggacttcccgcgatcgggaggatactcctaatcctccaccagtaccaccgactttggccgaggctatcgctgccctggtcgatgccaccgcgaataatacacactttttgcgcgaaatggcgggcaatcagttccaacagcacagaggcagagctcctccgcaaggaccacgtgaaactacatacttggaattctctgagactcgacccccgcttttcatcaaagcagaagaacccctacaagccaatgagtggtatgccattgaccaagtgaatacagatctgaagaaaaagaattgttttatgagaggactcaatgacaggcttcagcagaaaatggcaacctgcttggaccttacttacagtagggctgtcagtacggcactggcagtagaagccaaaaatgcaggacatggaaaatcaaaggggtttggaggtgaaaggtcaaatcaagggcatgagaagagaaccaggttggtgatccgaccttttaatcaaaatcgttcttcgcctcgcccaccttcctatcccttcaagcagcctgtttttattcgtcccactagtgcccccgctcctaccaatcagtcaagtgcccctggtactcgtttccctgctctccctagttcttccactggttgcttcaattgtggaaagtccggacacttcatcaaggactgcccatacccgaagtaa

SEQ ID NO: 16836 - DNA, 708 bp, Zea mays
  Peptide Sequence Number=SeqID_60211
atggcgagagtagcgtgtaccctccgtggcaagaggctggacggtggtgtatctgtgctctcggttggcgtgaactcggtgaggaaacagcagagttttgctgtttctactcaagggtggtacccaaggaagagccccagcaatgaagttggtcacgggaggatgtttgcctcccactttgaaatcaataaacttctagcccctagacatgaagggagtagtagtggcagcaatgacccaattggagacctggaaaccaaggtggaacaacttcggtcagagctacgtcaccgaaatagggcatgggcgcatgacaaccagcatatagctgaattgtcagctgacgtcagccgcttgcaatatgagatctcagaacgggattcggccattgattgggccgtcaactcgcgttcgatcgcttgggaccgcgaagcaaaagctcgagctcgtgtggcagagcttagtgcggccctcgacaacctgcaagtgtactgtaatactttacatgaagaagtacatgtactatatgctcgactgcactcgaatgtgccttctgacattgctgcagtgggagccagaccatcgggaacagcaaatgaaggacctgatgaggagttggacctttttaggccccctccttccatgaaccttgctgacgaacggtctcctgcagtagaaaatgaagcaaccaaggatgacgaagactag

SEQ ID NO: 16837 - DNA, 1029 bp, Zea mays
  Peptide Sequence Number=SeqID_60212
atgtacgcctcggtgaagctccccgagcaaggaatcggaccttgcttcgccgaagaagctagtccacggtcgccggacttcgcccgaccgccggtgaacccggaacacccgccgccgacgagatcacccgcctgcgcacgtggaccggatgattccggccacctccaccgtcgagccgtacaccgctgtgaccgccaggacctcccggagccaaccccgcccctcgccggacctctctcgccgccggaggtacttcagggggccggttacacgacgcctcctcagtacgcggtgcagcagttcgagaagcacggagtgccccgctgtagggtgaggatgaccctggagcctcatcccctgcatccaggctggcgttcgctagactctgagtcctttggataccgggctgaggatacaatcgaggcgatcgctcttcacggactgaccaccttctgcggattccaccccttggagctgtccactcaccccattggcttgttcctcgctgagagggaggacgacccaatgtggaaggaccgagtggagcatgccaaggacatctgggctatctacccaggtcagactgctcacttgacagtacggtgcatgaatgccctgtaccgtctgcaagtgatgcgtggtgaggcaatgtcccatctgatggcactgttggaggcaactaagatcaccttggataaccgagaggagcttgtggttgacttgtccactgagatggtggaaaaggacttacaggtggagcaactgtcaaatgagatccaagagcttgaggaactagtgggaaccagggagaacaccatcgaggttctcgaggatcagcttatcaacactcagcagcagcttgcggaggctaacgagcacctgaatatgcatcaccaggagatccaggatttggaggccaacgaggatgtcgacatcgagggaggagaggagcctgcctccaacttggacactgctggctcagggagaccaccttcccccgagtcgagtgttgcctcgtttgctcactag

SEQ ID NO: 16838 - DNA, 708 bp, Zea mays
  Peptide Sequence Number=SeqID_60213
atgacgatggtctgtggacatggatccatggggatgcgtggtctacgagatgagattggaataagattaacgtgcggatacctgtgtcaagcgtttgaatgtactaagcacatgccgaaaaatatggtaaatcggttctctggaggacatggttgctggagtgacttggtcgtccatcttgccaccagatcggttgatgtgaggtcgcttaggatgaacatgcatgcatcattttattctaactacttagtaagtggccaagaaagtttaaaagctatgaggcacgatgacttctcacgaatcctcgaatggagggaatgcacattcccacacggacggacttgcgcgagagggttttccccgcattttgtgggaggtgctgcagggagccggttatacgacgcctcccagtatgcagtgcatttgttcgaggagcaccgggtaccccgctgtagggtgaggatgaccttggagactcatcccttgcagccgggctggcgttcattggactctgagtctttcggattcagggctgaagatactatcgagtccattgctctccacggactgacgaccttttgtggctttcaccccttggagctgtccactcgtcccattggcttgttccccaccgaaaaggaggacgacccaatgtggaaggacagagtggagcatgccaaggatgtgtgggctctttacccagggtag

SEQ ID NO: 16839 - DNA, 357 bp, Zea mays
  Peptide Sequence Number=SeqID_60214
atggcgcctcctgttgacgtggccggtctgcgccctaggttaggcgatgtggaagctcctccgaagccgaggtcgagtctgtcttctgtggccgaggtcgagtccaagccctgggtcgggcggagcggaattcaccgtcttccggggcttagcccgagtccgagccctgggtcgggcggagcggagttcgccgtcttccggggcttagcccgagtccgagccctgggtcgggcggagcggaggttgcttcttggcgaagacagggcctcgggcgagccggaaatatgttcgccgctggaggggggcctcaggcaagacggagatcctccggggtcggctgcccttgtccgaggctag

SEQ ID NO: 16840 - DNA, 213 bp, Zea mays
  Peptide Sequence Number=SeqID_60215
atggcgcctcctgttgacgtggccggtctgcaccctaggttaggcgatgtggaagcacctccgaagcccgaggtcgaagttcgccgtcttccagggcttagcccgagtccgagccctgggtcgggcggagcagagttcgccgtcttccggggcttagcccgagtccgagccctgggtcgggcggagcggagttcgccatctttcggggcttag

SEQ ID NO: 16841 - DNA, 504 bp, Zea mays
  Peptide Sequence Number=SeqID_60216
atggggagaggcaagccgggctgtgatcttggtcccgccctcagcctcgagggtgttcgtcatcctcgctggggcggggagcgaggcgagctggggctctacctcccgcgtgggccggcgggccacctcttcttccagcttctggtggtggcaaccatcttccggctctgcggaggagacatcctccagccatgccggggaaggcgaactattgctgcccagctaggacgcaacattccaccctcttcctcgctttcgtggcgaggacgggagcgaggacctgccggtgcgctttggagcggcccgctctttggttttaatagctggttcgcgtcccttgagcgggaacgtgaacgagagccctctggcggccgcatccgtcctgggaccatggctgctgctgcagaggtcgctggcgggtcccccggtgctcgtcgccccgcaggctccccgatgtggaggttgtacatacccgcggggacggaaccggagttccatctgtaa

SEQ ID NO: 16842 - DNA, 813 bp, Zea mays
  Peptide Sequence Number=SeqID_60217
atggctgccatggatgcagggaagggagctccgcgagccggagtagagcagctggagcgcgcgcggggaacaaggcgcgacgcagggggctcggctggtgtccacgcagggagaatccacggcgagagagctcgaggaggggaagccgccatggggacgaaggccgagcagggggagcttgcggctggaggagggagcttcggggaagggagaaaccgcggccaggaagcgggcgtgagcggagggagagagacagggcgtcgagcaggaccgagcgccatgggagagagaagatccgggcgctggaatcctagcaaggggaggcgccatgggagagagcagagggagcgccgtgagggagctaccatggatgaggggagatgtgatggcgcacaggaaaggagaaccgaggagcagaggctgggggcgcgccatgggggaaaccttgaaggatctgcgtgcgtccatggcgaggagctggagacggcgagcccgcgcgcacaaagaagcagagcgcgcagaggagggaggagcggctgggcgcgcggcagggagggccagggaggaacgccggcgagcgcaggggcttcgcgcgcgcaaggaggacgccatggaagggagcttgggggagggagccacggcgtgcagtttgggcgagcagagcgtggcgtgcttgaggagggagggaagcaagggccgagcggcgctggaggaaccgagcagagcgaaggagataagcgcgcaggattttttttcttctcagcgttaagcggcggccgtagaaaattcagggcgtggacggcgtcgggatag

SEQ ID NO: 16843 - DNA, 492 bp, Zea mays
  Peptide Sequence Number=SeqID_60218
atgatgacaaagggggctagtttcagagaccacaacatagctcacagtcttcaggacagcagcaaagctccttcaggccaccagctccaaggggccgaggcgacaggggctttggaggaagatatggggatcaacccaggaaaatctattgcttattttgtggagaagacaagggccacactacaagaacgtgccagattaccattcagaagtagaaggagattgccaaagcagaagcccggcagaactagccgaagcaagttttacatactgcttcgtgctactctccctacataccagaatatgtgggcaatcaacctgcaacttctgtcgcttcggcaagccattcacaagcttcctggccccagcttccactgctaccaccattgccacctgctcttacccaaagccagcagccagaagggcgcccccaacagcaacgcgacttcagggaggagtccgaagctcgtacagtcaacaacactgtactag

SEQ ID NO: 16844 - DNA, 797 bp, Zea mays
  Peptide Sequence Number=SeqID_60219
atggaatttgttaaatccagtgtaaaatactgtttaacactgttcagcaatgtatttgaccctaataattcatggagccgaccccggtggatccattttctggcttcgcctcaaggaacgatcgggatcagctcgtccctgacagcagaacgccgcatcgaggcatacaggacaagcatagagttcttatcgcggcagtcgatgacgagcggcgatcgccggttcacgttgcaccttaggtgctacgtgtctgtgcacatcagcaccggcaacgggcggcccaacctggtgctcatgtaccgccgccaggacgccgacacgagctgccttgcgctcccggacgacgaggacggcgtccgcgacgtgctccacggcttgctgaggtcgacccagccgctgcagcacctgggcctcacggacctcgagtgggagtccctcctgtcccagcaaaatgtgtcctggctcgtggacccagttctgcgggcccgctacgccgtcgtctcggtctggcaggcagtggagctgcacatgtgctacgacgccgtccagatgctcatgatgacgtgcaaggagtccggtgcggtgggaggtgacgtcgaggctgagtgcagcgtctgcttggtcgcgctgcgggagagcgaggccgtggagctaccggcctgcgcgcacgccttccaccgtcgttgcatctccgagtggttcagccacaagtcgacgtgcccgttgtgccgagacgacgtggccaagtatctggagcccgagctgcagcgccatttcgccaatttcgactatgccat

SEQ ID NO: 16845 - DNA, 927 bp, Zea mays
  Peptide Sequence Number=SeqID_60220
atggaatttgttaaatccagtgtaaaatactgtttaacactgttcagcaatgtatttgaccctaataattcatggagccgaccccggtggatccattttctggcttcgcctcaaggaacgatcgggatcagctcgtccctgacagcagaacgccgtgtcgaggcatacaggacaagcatagagttcttatcgcgacagtcgacaacgagcggtgatcgccggttcacgttgcacctcaggtgctacgtgtctgtgcacgtcagcaccggcaacgggcgacccaacctggtgctcatgtaccgccgccaggacgccgacacgagctgccttgcgctcccggacgacgagaacggcgtccgcgacgtgctccacggcttgctgaggtcgacccggccgctgcagcacctgggcctcacggacctcgagtgggagtccctcctgtcccagcaaaatgtgtcttggctcgtggacccggttctgcgggcccgctacgccgtcgtatcggtttggcaggcggtggagctacacgtgtgctacgacgccgtccagatgctcatgatgacgtgcaaggacagcggtgccgtgggaggtgacaccgaggctgagtgcagcgtctgcttggtcgcgctgcgcgagagcgaggccgtggagttgccggcctgcgcgcacgccttccatcgccgctgcatctccgagtggttcggccacaagtcgacgtgcccgctgtgccgagacgacgtggccaagtatctggagcccgagctgcagcgccatttcgccaattttgactatgccgatgaggaggcatgctcgttgctcggggactcggggtgctcgtggccagtgattggcggcaacgctgatccagagacgcgctggtcaaagaacgcacgtgggagtgaaggcgtggagcactgcaggagctag

SEQ ID NO: 16846 - DNA, 1290 bp, Zea mays
  Peptide Sequence Number=SeqID_60221
atggcgcagctgctgctgctcgccgtcgtctcggcgctcagcctcctctcgccgcgcacggcggcggcagcgacatcgacaacgtccggcggcaaacccctggtgacggccatcaccagggacgcggccaccaagctgtacacggcgccgctcaaggacgagctgccgctggtcctggacctctccggcccgctcctctgggccacgtgcgccgcgccgcacccgagctacgagtgccaccatgctgcgtgcgcgcacgcgcacgcgcaccacccgccgggctgcccgcgcacgggccacggcgtggccgacgagttcgacccgttccgctgcaggtgcagggcgcacccctacaacccgttcgcgcgccgggccgggtccggggacctcacgcgggcgcgcgtcacggccaacaccaccgacggcgccaacccgctcgccgccgcctccttcaccgccgtcgcggcctgcgcgccgccgacactgctcgccggcctccccgcgggcgccgtcggcgtcgcgggcctcgcgcgatccaggctcgccctgccggcacaggtcgcacgcaagcagaaggtcgccaggaggttcgcgctctgcctccccggcgaaggcggtggcatgggagtggccatcttcggcggggggcctctgttcctgctcccgccgggccggcccgacgtcacggcgtcgctggcgggcaccacgccgctccgccggaaccccggggtccccgggtacttcgtctcggccacgggcatcgccgtgaaccacgtgcaggtgcaggtgcagcagcagggcccgcttactgtcgcgctatgctcgcgtgtcccctacacggtgctccggccggacgtgtacgcgccgttcgtgagggcgttcgaggccatggccatggccgggaggaagcggatgacgccgccgacgccgccgttcgagctgtgctacgactcgcgggagctcgggtcgacgcggctcggttacgccgtgccgcaggtggacctcatgctcgagagcggcaccaactggacggtgttcggcggcaactccatggtgcaggtcagcgacgacacggcgtgcttcgcgttcctcgagatgaaggaagagaagcagcagggagggcacggctacggcggcggtgcgccggcgccgacggttgtcataggagggttccagatggagaacaacctgctggtgttcgatgaggagaatgggcagctcggcttcagtggcctgctcttcggaaggcagacgacgtgcagtaacttcaatttcactctcgctggctag

SEQ ID NO: 16847 - DNA, 165 bp, Zea mays
  Peptide Sequence Number=SeqID_60222
atggggcaggacctcgtcgagatccacccgcgcgagctccagttcacatgtaggctttgtggtgcgagtggttgtaaaagtccggtggctgctgctgctggtggggcgtgtgtcagcgtgttagggaagcatggaaggacctgcttggatgttggctcttgttaa

SEQ ID NO: 16848 - DNA, 582 bp, Zea mays
  Peptide Sequence Number=SeqID_60223
atgaagaaaaaacatggctccgtgccgagaatacatacatgttcaggcctcgacagccacaatgaacaaaaacaccggcactcaaggtgccattacaaacggaactccggttccgaccccacagcagcagccatgatcctagtacgggcgcggccaccggaaggctttcgttcgcgtccctactcaagggacgcgaaacagacatcaaagccaaagagccgggggccggcccgtaggcggcaccaatggcctcaatggggggggaagcttcctccggctgccaccacatcagcacggacggcggcgtccgcctctccaccaacgccgacgctggacagcaacagttcgccttccccgacatggctgggggacgcctcctccgcaaggctggaggatggtttccaccaccagaagctggaagaggaggtgaccagccggcccgcgcgggaggtggagctccggctcagcccggcctccgccccagcaaggatgacaaacatccttggggctgagggtgggaccaagatcgcagcccggcttgctcctccccaccgagaggctggtggtcaccgtcttgggtga

SEQ ID NO: 16849 - DNA, 240 bp, Zea mays
  Peptide Sequence Number=SeqID_60224
atggcgccccgcacactctgtgacgacggcggctctcggcccccttacggaagcaagaggaccaccttcaataggatcctggatgagactcgtattgtgatcaagtacattacacttggatcttttccagttgaccttatagatgctgtactgcgccatcttaaggtcatcctaaggaaatgtgcttttagtttgttaatattccaagtcattatgagtgttgaacctagatccaggtaa

SEQ ID NO: 16850 - DNA, 390 bp, Zea mays
  Peptide Sequence Number=SeqID_60225
atggaggtagcggtgtcagcacggacggaggtagagttggcttcaaaaaggagctggccgaggcctcggggtggccggccgagccgcctgctcgggccggattctcaaagaagaccctggcggcgatggcccgggtgtggtgctgatgttgtccttcagagtgggggtcctccgaccgcgtcgccgttcgaggctgggtcagaccccaccgaaggtgtagttgatgccgagggtgccgtagcccccttcggctgtcgacgtccgagcctgcaggatcagtatctggactcatttgtcggtaacagaattgtttatgcgggcgagagttgcttttcacggaaggcgatgagtgaggaaaattttgacgcagaggcggttgcccccttctag

SEQ ID NO: 16851 - DNA, 282 bp, Zea mays
  Peptide Sequence Number=SeqID_60226
atggagcaaaatggcacagatagggcaatacggtcgcatggcgtccatcccgtctctctcgaagcttcctctccaaggcagagcgggagggcttcgcactcgagccctgccatccatcccggctctcgaaggctcgcggctcctccaactcccaccgtgaccatgatagggaccgagaacaggagcgtagggatgagggaccgactggagaagatggtggagcgggagtgtcagaaggagctccacagcgtggttgacgacttggaggaagctggccgataa

SEQ ID NO: 16852 - DNA, 216 bp, Zea mays
  Peptide Sequence Number=SeqID_60227
atggtgacctccggcttgatggtgggggaaagcgagccgggctgcggcctctgcccctccctcagcctcaaggattttcatcaccagggctggggaggggagtgcgccgagttgagtccttgcctcacgagttttgtcgtgggcgggggcctcctggcagcagcatccgccctagggtcagtgctgccgctgttcgaccccccggagcagaagtag

SEQ ID NO: 16853 - DNA, 285 bp, Zea mays
  Peptide Sequence Number=SeqID_60228
atgagcaggagcagggcgaggacgacggtgacgagcagccccaggaggttgaacgccggctcgtcgtcttcctggctgcagcacagcttgcccatgctactagctgttgcaaagctcggtgggatggtgaaggaggcgagggagggagagggggcaattcgggggctgccccccggctggtgcactttctctttgcgtccgcaactgactgcgggatggatggaaggaaggtctttcaattctctggtagacatgcctgcagcagttggtccgtctgctggttga

SEQ ID NO: 16854 - DNA, 366 bp, Zea mays
  Peptide Sequence Number=SeqID_60229
atggctcaccggagttactccggcccgcccgagaccttctcaccgccgttctcccttctctgcccgtggattcatggcctcttccccgccattgagttcgccgtgatgccctctccctctctgcccaacttcggcgaccccagagccaccctagctcgcgcctgcctcaactccggcgacctcaccgccgcggagaggagcagcgccgcccgcagctgttcaccccttcccgacaacaagcaatccaaggttcctgagtgtgttgttggagacctccctgagcaacaacctggtgaaggcaagtgtcctcagacctatcatgtcatactttactttataattcactgtcccgcattactttattga

SEQ ID NO: 16855 - DNA, 1176 bp, Zea mays
  Peptide Sequence Number=SeqID_60230
atggtcacccaagatggtgaccaccagttcgatggtggggagaagcaagtcgggctgcggcctctgccccgccctcagcttcaaggatcttcatcatccttgctggggaggagggcgaggcgagccggggcctgccttcgtgtgggctggcatcccgcttcttcctctggcatctgggggtggaaaccatcctccagctctgcggaggaggcgtcctccagccatgcggggaaaggcgaactgctgctgcctggccagggtgcagcattccgtcctctgcccgggcgactgtggccggccgcaccagagggtctcacaacacgtcgtacgccgcgagggtggtactcgtgttctggggacggtcccgttctcattttcgtggcgaggacgggagtgaggacctgcaggtgcgctttggggcggccggcgctcgctggtgcggtgctggtgggcaggtggacgccgccgtcggtgctgaggtggtggcagccggagaaggtttctccgccgacgagatcgttagcgtcacctgcgctccgggcctccggctctttggctttaatggctagttctcgtccctcgcgaggggacacgaacgagagccatccagcggtagcgttcgccctggggccatcgctgctgctgcagaggtcgccggcgagccacccggagtttgtcatcctgcaggccctccgatgtggaggttgttcatacccgcgggagtggaaccagagttccgtttgtaatggcaccttgagtgccggtgtgacgagtgaggtatccgtatcccggaggcgtaggagtccctcagctcggtcggccttgccactcaagacttctcttgctcagttaaggaaccctcggctgctctgcggtgagctggagccagaggcagcggtgtcagcatggacagaggtggagtcggctcgaaaagaggcttcgtcggcccaggagcaggtggcttcccaggccgaggaggtgcagcagcaacggccggagcctggccgggtcatccatgagcgagaccatcttcggagttatgcttccgataccgtgagccgggctgatgtcctcggaggacagctggctgaggctacggagcggccagccgagccgtctgctcgggccgggttcctggaggagaccctggcggcgatggccccggcgcggtgctga

SEQ ID NO: 16856 - DNA, 750 bp, Zea mays
  Peptide Sequence Number=SeqID_60231
atgcaggtggcatgcaactgcaccacggggatgcaccctttcgacttcgacgcatccagcatggaggcccaggcccacacgtcatgtaaccggcgcgccggttactacgtgcgaaaaattgcaccgccacttgcgccaataccgcgccttctcgactgcagaaccggtgccgcgactcgaggcaaccctgcgcatggcccaacagtgccaaccaagcacatcggtcacagggaccgggaaaggggatactccgaaagggatccttctctgcgaaggaagcgggcctcgagccctcctactgatcaggggttcgaaagctggcccctcggaagggaaaacagtgccgcctgcctcgctccgactgctgtgccacccgccagggtgaggctgacaacaactaagtcctgcctcaggcgcaacagacggtctccgcctcgcccgaccccagggctcggcccccgcctcggcctcggaagatggactccgcctcgcccgaccctagggctcggcctcgacctcggcctcggaagatggactccgtcttgcccgaccccagggctcggcctcgacctcgaaaggtggtctccgcatcacccgaccccagggcccggcctcaacctcgacctcgggcggaattgtgtcctcgcccgaccccgacctcgccctcaggaggagtctccgcctcacccgaccttgggctcggaccgaccatgccacaggggggatcatcattaccctacccctagctag

SEQ ID NO: 16857 - DNA, 285 bp, Zea mays
  Peptide Sequence Number=SeqID_60232
atggcacaccggacagttcggtgcgctgtccggggcctagatgctttcaactacgatctcgccatcatgcgcactatcctcgactttgccttctacaagccaaccgacaagctcaaggttttgatatgttgtgggagtctaggactgcgcagtggtgatcgcagcaaggcttgggactggagaagggatctcagtggatatggggatcgggcagcgggggagctgattccgttagctagcgcaaggtgcgccaggatgactaaggaagcttcaccgtccaggtaa

SEQ ID NO: 16858 - DNA, 1377 bp, Zea mays
  Peptide Sequence Number=SeqID_60233
atgccgcgcacgaagaatgtgtcggctcttgggggaggagatgatgaggatcctcctcgccccttcaggcaggtcaaggggaagaaggtctacttagagcagcaggaaggccgtaagaagtggcggttggatagagcagcccgagcagctttagcagcagcagtcgctgagcaggcagagagaggtgatcagctgcagatttcctcatatcagattgcttatcgcgttcgacgtctcgcctctcggcctcgctcctccgcacctaccactcccactactgctaccactccaccacccacttcgcccgctccagtcactcctgcgccatccaccacctcagccatacctaccacctccactactccagctaccactgctcctcctctcgctcccctttccgctccacctattcctcctgcctgcttctgggagcgagatgagactgatgtgcgaccactagctgcggatcctaggttgtttgatcttcagcgtgctatagtggcacggatgtctgcccagattgctctgcgagtgcaccgacttttggatcttcctgcgtttctgctagccgccggtgctgactctgaggtacacctctcttatctgcttggacttctcactcttttgactaccagtggcagatatgttgaggaatgggtccaagttttctatgcttctgtatggatcaaccctgatcaccagtggatgagattccgttttgagcgagaggatgttacacttcatgcgagtcagattcgccagctgtttggattcaacgagtcatcgactcgtcttcacggcttgtgctacggcacctctgatcctcctcatcaccctcacggcggagttgctcctggtacagctcatgtcgtggctttgttccgaccgcccttctcagatgggtcgcgacgttctccggtagacttcactacaatgaccaagtttttatatcagctcatgagacagatgcttctgccgcggatgggttacagggaggctgctactcatatccagctttggctacttggtgcctggtctctcactcagagtttgatgttgtggacttccttatttggcactcttgaggcctctcgcctcctctttggctcctaccgtccagcccctgaggaccctgtgccgacacctgctccagtgactgatactcaggccgaggataccacttttcatcagttcgagactcaggctgcggcagtccatgatgatgattatgatgatgacgatgatgatgactttggggttcctcctccgcctccccgctctcatgatcatgaggccgggagttccagtgttgttctcgctgctgctcctgcggttgaccctgctctggctgctatccttcagactcttacgcagtag

SEQ ID NO: 16859 - DNA, 687 bp, Zea mays
  Peptide Sequence Number=SeqID_60234
atgccaagtctaccgcatgcgcaacgacacccgaaattcgggcggttccccttgatccaaagcctgcgcagggaccccggcggcttaatctcctgcgctctccttatccctacaggtccgccgcgccatggcggggtgcttgcatgccccgtggtggactccgcgccgccactggatccatccgactggcgtgcgccaacggaggtgagagagagacgtagagcgccacgtgaccgtgaggatcttcttcgtatgctgacggctcggattctgctggcgtcaaccaccaccgcattgaactccggcatcacggaccccaactcgatccgtctcgtcgtcgaccgcgcgacctccgcgctcgaatccaccttcttcgtcgcgctcagccgcacccgtggcgcgcttcgtttcgccatcctggatacacctggtgcaggcctgggtgttgcgacttgccgccgtggggagcttcattacggccaccatatctggtatggattgcgctccccagttcaccaatccgtccgcttcgggtgggatctgttgatgccaagaatcacgcgccagggagaatcatcgcgtgcgccgacgatggcgccgtcgcgatgcgcttgtgccgctgcgctcctgcggaaagggaagaagaagttgcgtgcgccgttggatttaatgaacggtcccgattag

SEQ ID NO: 16860 - DNA, 123 bp, Zea mays
  Peptide Sequence Number=SeqID_60235
atggagaagcggcctcaggaactcttcagcttcgggaaaagccaacggctcgtccgctataattcaccggacatgtccgtgcaacggctatcccgcgccaacggctacctgcagaggcattaa

SEQ ID NO: 16861 - DNA, 330 bp, Zea mays
  Peptide Sequence Number=SeqID_60236
atgtctcaagacaagaagattgctgctgagacgaagctgactaaagaggagaagctttttgaggagaagaaggctgtgaatccttatattgctggatttgttgagtcgatggcaaaaacaaatacagagaagattactaaggagatactggaaggcccgtctgaagatactgagagattaacgaaggctggagtgaagggtagcgacttcgccttcgccccaacatttgccctccgagggaccagtttgactaagtcatctggtgctgaagacgtcgctagatgttggagacgctgccctcgctcgaagtggttccgcgagggtttttga

SEQ ID NO: 16862 - DNA, 405 bp, Zea mays
  Peptide Sequence Number=SeqID_60237
atggagcttatcttcgggctcttgcatttgcttgaaagctttgacaaatatgatatctgcgacactgcctgtgttgaccagaacattatcgactatgaaacctttgattacataggacataaccatggcatctctgagcgaattatatttaagacgaagatcatccagagagaagggcgtctcccctacttcccctgcctccgcgcggcggccgaggaggagtgcccataccacgggcacgactacctctccctccctcgatgctataaggagggcgtccgcaggatgcctcgcgatcctcgcccctgcccccactatcccttccatcggcgcctaatccatgcacagcgccccatccgtgccgctactggcacgatggggttcatggatctagcaacgccatag

SEQ ID NO: 16863 - DNA, 696 bp, Zea mays
  Peptide Sequence Number=SeqID_60238
atggctgatgaggctaaatctgggagaagaactactgcaggtttaataaggaccagaatgattgagatagtgtcccatgggcttgcaaacttggagtcagtcatattcttcatcctcgctgtcgcgagctgcggaggagcttgggaccagcatcagctggcggaagaagaggatgtcgacccacttccagagcatcagctggcggaagaagaggatgtcgaccggcttccagagatgccaaccattaggcatgattcaattctagaagatcctgatggtgacatctcacaaccacaacacatcttggactactaccatatctctcaaacaccaatttatcgttgtacttcaaaacgtttcatgaacattctcattaatgccgtaattactgaaatcaatgaaaatattggtactactggtgtagtcagccaggagtgcaaggctattgtttctcaatgcggacaacagatcctagatcttttgctagctgagttgcttttgaagtactcaagcaagaggcagcccttccgatcttatgatatcaagatattttctggtcctaaacccatgaaggggtcttcttctgaaatagagttgagaagagtcgactatttcagcagcaaggaattgccacaagtattggaaaggataatgaggaagaagcttcgctttttgtcatactgtatttgcttctga

SEQ ID NO: 16864 - DNA, 192 bp, Zea mays
  Peptide Sequence Number=SeqID_60239
atgggagaccatgactcatgtcgcgtgaggaggtcaatccacgggcaggttcactcaggtaccttcggacttatatcaaagagggagaacctcaaaagatacgaaggttggcagtgccgaagatgtgaagcaggaaagcttcggcatgttcgcagaaaagggaaccgacttaaagatgaaaaggccatttag

SEQ ID NO: 16865 - DNA, 651 bp, Zea mays
  Peptide Sequence Number=SeqID_60240
atgacttcacctaccccagccaatggaggagacactcgtttcagttctgatttcctgtctcatgatggttttccttccatcttgtgggaagtgctcaactccgccgacgacaccaccgaagcgatagctttgaagaccctgatgactttctatggctaccatcccctggagatggtgatacaccccttaggactgttccccgctaagaagagggatgaccccatgtggtgcaaccgtgtgagccatgtgaaggacaccaccaagctcaccctcgatagccaagaagacttcatggtcgacttatcctcagagttggtggagaaggacctacagctctacgatgtgcagcaggagctcgaggaagctaatgactacctggacatgcaacacctggaaatggaggccaatgaggccggaagcgagggagaagaggctcccgaggagttaggaccagcccctggtaccaatgcgactgcctccgagatgcccccttcacccatggcagctaggcaacatcatgggcagaatgagcaagttcccccgccacctcctctagctctcacggtgcaggagctgatggctcagcagaacgaaattctgctcttgcagcgccagccccaccctcagcagcacggtggaggcgagccatag

SEQ ID NO: 16866 - DNA, 282 bp, Zea mays
  Peptide Sequence Number=SeqID_60241
atggggctcggtgtatgcggctcgctctgccaaggtggcaatgataatgattattttggtattgactttggtaatggtaagtggtattctttccgttcggaaaggaaagctagtccaccacagcaaagcaggacatttgctaagtatgttgatgtgtactcacccttgctctacacaccaaacctccccctcccaggttgtccgcattgcaaccactgctcaggagaagatgaagccatggatgaagacttccaggagttccaagattatgatgagttttag

SEQ ID NO: 16867 - DNA, 159 bp, Zea mays
  Peptide Sequence Number=SeqID_60242
atgtcgaaggaaaccatcactaactctaacgaaggtgatttggtccgtgttgggggccttcggcttccgaaggtatcttcggaatcgggttatgagtatacaagagtatggtcaggacgaagcctgagcgagacgaaaggcgattatgacgaaggataa

SEQ ID NO: 16868 - DNA, 255 bp, Zea mays
  Peptide Sequence Number=SeqID_60243
atggccatgagcgccgaggcggacagggccgccgccgggacgggcgcgagggagagggagccgggcccgaccggacggtgccatggccggggaagggaaggaagggggaaggaagagaggagggagggagcttatcgcgcgtttactaacatttttccttcgggtgcactgatggtcttccttgatctcaagggtcacttgaagataccatactttgttgcaaactgggcactgataaaagaatgttttgtatga

SEQ ID NO: 16869 - DNA, 180 bp, Zea mays
  Peptide Sequence Number=SeqID_60244
atgccgaaccttgcatttcttttgattgctttgaaagtgcaaatgcattcaggtgacaatgagattgatggttctgattacgattatggtattggttgtcagcattgcaaccactgctcagtcgaagatgaagctgtggaaggagacttccaggagttccaagactacgacgagttctag

SEQ ID NO: 16870 - DNA, 1089 bp, Zea mays
  Peptide Sequence Number=SeqID_60245
atggagagtcatgatctccgggcagaaagggaatcacagcttgtgggtaaagtggcgatgagaatgatggttttggtattgactttggtaatgcaggagatagagtctgtgaggagctgctcccctatgctcccactggaggcgccccctgcaccaccactaagcgccccagccgctggagtagctgctggaggagacccagacggcggaggtggcaacaacagctcgagccacaacaccaacctttcagccgaccaggagccgaaaggatgggttgctcgacccatcactcgtgacgctgctcgcgggtgtcacttccatgacgcgctcgacaccctgctacgccaggcactcgaccggcgtacttggtccatcgagtatccctgtgtggtcttccagcacagtcgtgaggtttacccggaccgctggggaggcgacctgcttggtgcgccgttcggagaacagtctctgggcggggtagccaatggtctcaaactgaagtattacccccgccgtccatctggcagcacaggaggcgtgattgtctcacctgttggtgaggacaatcctaggttgagcagcatagtcaacctagccgtcgtgctaaacacagagctggaccatgcattagacgagctgagtagggctcgtgctgagattgcccagctacgggctgagcgcgtggagcatcgtcacctggaggatggctcccccgctcctgttgggactcagcactcatgtcagaaaacatgcgcagaggaggaaggcgtgctcagcaggagcaggcagccccacaggacgaggcaccccgtcagcagctgccaccccccaatgtccgtcaaacagatgttcctaatgcagactcaggcagttcaagccattggtcagactctggccgccattcagcagcagcaaccaccacctcaccctcagatgcctcagatgcctagggacaagcgtgctgaattcatgagaggtcatcccccagtggagaaagttctgtatggtccccgtatgttgagaggagcagctcagtcttggtgggagtcttatcttgccacccatgacaactccgacgccatcacctag

SEQ ID NO: 16871 - DNA, 372 bp, Zea mays
  Peptide Sequence Number=SeqID_60246
atgcgcagaaggaactcaatggacaaagagaggcggcgatcgagtatacctgacatcaccagtgtagacaatggagatgcacagggtccaatcacaggccaaacgaatggccaggctgcaaatcctgggaaaccaccctctaagcaacccccatgtccagcaaatacacctctaggcgtcgatgcttatggcacaacaattggacaaccagttggcggcccccttgtctcagttgttgggactcctgtttctgctccatcccatctagcctatggcatgcatgttccggttccaggagtggtagtgcttgatgctgtagtaaatcttgctccgatgccttatccaatgccacccccatcatctcatgcgtga

SEQ ID NO: 16872 - DNA, 936 bp, Zea mays
  Peptide Sequence Number=SeqID_60247
atggagccgaataggctgcgcgaggccgaggcggcggctggggagctgaagaggctgcgcgaggccgggcagtctcagtacatgtaccggtctatcgccgacgccagggttgtcggcggccgggtctgcctcttcgccgtcgtctccgagatcggcgctaccgtccacagccgtggcacggatttcactgttacgttgagggtaatagatgaatcatacaagtctggaatatctgtaactttttttgctgacagcactgcactattgccttgtgtgaagtcgtgtggagatgtgatcagtctccataacgtcgtgataaagaaatatagagatttctttgtgcaatttgacaaaaagtactcttcattcgcgctgtttgaaggcaaaacgtatactgaatgcagtccatatcagacttctataagatatcatgacagcgaacacgacaaagattttttaaatcagatgagaacgtggctccctcaaggtctgaaggatttcacttcaaataattccgaattgtatttaatgaatttgaagtccgattctacttttgatctagtatgcaaggtttttcatgtacatgtggagaacaacaattcaatattttatgtttgggatggaactgatacccctgcagctgagtttccagcaattttggatgctgaggcagccaaatcactctctctacatgaaggcccccctctatccagggagattttatgtacaatgccagatttcggaactgtcctaaggattttttcagatagatttgtcaataaagtatcatatatgcaaaagaacatatattgggccaggttctggaacattacttgcaaacaaaactttggcatttggaaaggtactttctcggactccggtggagttcgcctattatcaaacaaagatgatagcgttgttgatcgtctaaagtaa

SEQ ID NO: 16873 - DNA, 660 bp, Zea mays
  Peptide Sequence Number=SeqID_60248
atggccatgctggttcaccctgatcattaccagaccgaggaggcgctcaactcggtgcgccacatgctcagatggggctcgcctgcgttcgccgggaggatccgggccgatactactcccctcggtgatctcgccacgggggagtttgtgctcttcgtctcctacctcttctgcgggtctaggaaggacaaagaccaccttggggcctactacttccagacaaggtcagatccaatagtgacctacatcgcctcccttggcggcgcgaggtgggagaactggcggcacgactgggtgattgccactgttgaggtcagcgactgccttgcccttccgagtgacgggcccggactcgaccggaagcagtggagggaaaaaccatgcctcgtgccggagttcgagcccgtcctagacaggattaaggaactggcgggcatttcgccgctctgcgacaaacccgggttgcggtcagcggtgctggcccgattgccaacccttgatgagagtggggtggcggtctgccagatcggcggctgggacccccaccgggggatccatattctcggtgcatcagatgggggccccagcctgctgatgtggcccccagagtccccctgcgggccccagttcctcggacaagggaaaggggcccgcatgtag

SEQ ID NO: 16874 - DNA, 201 bp, Zea mays
  Peptide Sequence Number=SeqID_60249
atggagcctggcagagggacagctgtcggagcggttgagtccttgctgacgtcctcttgcttccgtaagggggctgagagccaccgccgtcatagggttgggcgatgtggaagctcctccgaggccgaggtcgagtctgtcttccgtggtcgaggtcgagtccgagcccctggttcaggcgaggcggagaccgtcggctga

SEQ ID NO: 16875 - DNA, 399 bp, Zea mays
  Peptide Sequence Number=SeqID_60250
atgggagcacctgccccgctgctcatcgagctccccaccgccccctttttggacgaactttccatggcctttttcggccgtccagatgacgtgatggaggagcctgggccgctctccccgctgcttcgtgatgggtctctctctgtgggagtgtcggtcgcctcttacttgattctggttacgtcttcgtctgaaaacgggcctggtagaacacgtaaatggccatcttcagctgaacgaacgcgcgccacgcaggtcgcagtcgggcagatgggcgacaggcagcagcagcggccggccgtcgatgtctggcaggcaggccggcagggcaagggaggggaggagacgtgcgtgacggcgacggcagtgagggttgccctcggcggtatggcggcgtag

SEQ ID NO: 16876 - DNA, 1410 bp, Zea mays
  Peptide Sequence Number=SeqID_60251
atgtcatcttccaccgcactcgcgtggcgacgcaccctccgcaacgccctacttcgcggcttcccgcggcgcggcgcggcgcccgagcggtacgccagcacggcctccgcgtccggcgcggccgccgatgctgcagctgcagccgcgccgaagaaggtgcccccgtcaccccgcaagggaaggcttttaactggggccatgatagcgttggccattggtggaggtgcttatgtgagtactacagatgaaggaaagttttgcggatggttattcaagtcaacagaacttgtgaacccactctttgcactgttggatgcagagtttgctcatagtttagctgttaaagcggctgcccatggatttgttccaagagaaaagagacctgatccatcagttcttggggttgaggtttggggaaggaagttttcaaacccaatcggtcttgctgctggctttgataaaaatgctgaggcagttgaaggtctcttaggcctgggatttggctttgtggaagttggctctgtgacacctcttcctcaagagggaaatcccaagcctcgaattttcagattaaaggagcatggtgctgtaatcaaccgatgcggattcaacagtgaaggaattgtagttgttgctaagcgtcttggggcacaacatggcaagaggaagatggaagaaacttcaagctccacgcttccctcaaccagcgacataaagcaaggaggaaaagcaggacctggaatcttgggagtcaatcttggcaagaacaagactagtgaagatgctgctgctgattatgtgcaaggggttcatacattgtcacaatatgctgattacttggtcataaatatttcttccccaaatactcctggtcttcgcaaattacaaggtagaaaacaactgaaagatcttgtgaagaaggtgcaagctgcacgggatgagatgcagtgggctgaagatggacctccaccattgctcgtgaagattgcaccagacttgtctaagcaggatcttgaggatattgctgcggttgctcttgctcttaggttggatggcctgattatatcaaacaccacagtttccagaccatcacctgcagataaacatccattggctcaggaaactggtggattaagtgggaagcctttgttggacttatctactaacattctcagggacatgtatatgcttacacggggcaagattcccctcataggctgtggtggcgtgagtagcggtgaggatgcatacaagaagatccgttccggagctacacttgttcaactttatactgctcttgcatatggtggtccagctcttatacccagaataaaggctgagctagcagaatgtttggaaagagacggtttcaaatctgtgcaggaagcagtcggcgctgatttccgatga

SEQ ID NO: 16877 - DNA, 171 bp, Zea mays
  Peptide Sequence Number=SeqID_60252
atgatgagtgcctacagcctcgctgccgtgaaagatggcaggcaaccagcaccgcctgccataccagaacaccagtcccagatcgaccatgtagtggtcctcgcggggctgaacaccaaacttgtcctgcgttgcgaacgtgtaggcatgactccgtccagcatcatctga

SEQ ID NO: 16878 - DNA, 2088 bp, Zea mays
  Peptide Sequence Number=SeqID_60253
atgtcgaggaggagagcgcaggaggaggaggaagacgacgaggatgtggtggagtcggtagagcgggtgttcgaggggcgggaggtgccggggtggcgggagcaggtgacggcgcgggcgctggcggtgagcgcgctcctgggcgccatgttcagcgtcatcgtcatgaagctgaacctcaccacggggatcatcccctcgctcaacgtctctgcgggtctcctcggcttcttcctcctcacctcctggaccaagctcctcgccaaggccgggctcaccggcgtcaggcccttcacccgccaggagaacaccgtcgtccagacctgcgtcgtcgcctgctctggcatcgcgttcagcggagggttcgggagctacatgttcgcgatgagtgagaggattagcgagcaatcgggggagacatgggatgcgcacaacatcaagaaccccggtctgggctggatgatcggtttcctcttcatcgtcagcttcctcggcctcttctccgtcgtgcctctcaggaagataatgatcatcgactacaagctcatctacccgagcggcaccgcgactgcccacctcatcaacagcttccacactccccagggcgccaagcttgccaagagacaggtgaagacgctggggaagttcttcgccggcagcttcacctggggcttcttccagtggttctacaccgccggcgagggctgcggcttcatgtccttccccacgctgggcctcgaggcctacaggcagaagttctttttcgacttctcggcgacgtacgtcggcgtcggtatgatctgcccttatctcgtcaacgcctccgttctccttggaggagtggtctcgtggggcatcatgtggccgctcatcgagcagaagaagggcgactggtacccggccgacctcaaacccagcagcctccgtggcatcgtcggctaccgggtcttcgtctccatcgcgctgatcctgggcgacggcctctacaacttcctcaaggttatgacgaggaccgtgaccgcactggtggtgcaggtgcgcagaatgatgtcggagccgacgctccccatctctggcggcggcggggaaggcggaggtatcccgctgccggcgccggaggagacgttcgacgacaggcgtcgcacggagctgttcctcaaggaccagatccccaacacgctggcgctgggcgcgtacctggtgatcgccgtggtgtccatcgtcacggtgccgcacatcttccaccagctgcggtggtaccacgtggcggcgtcctacgtggtcgcgcccgttctggccttctgcaacgcgtacggctgcgggctcacggactggtccctggccacgacgtacggcaagctggccatcttcacggtaggcgcctgggcggcggccaccgacgacagcggcggcggcggcgggggcatcatcgcgggtctggcggcgtgcggcgtgatgatcggcatcgtgtcgacggcgtcggacctgacgcaggacttcaagaccgggtacatgacgctggcgtcgccgcggtccatgttcgtgagccaggtgatcggcacggccatgggctgcgtggtggcgccgtccgtgttctggctcttctacaacgcgttccgcgacatcggcatgccggggtccgagtacccgtccccgaacgcgctggtgtaccgcaacatggccatcctgggggtccagggcctgggctccctgccccgccactgcctcgacctctgcatcgccttcttcgccgccgccatcgccatcaacctggcacgcgacctcgcgggcgcccgcgccgccgcctacatcccgctgcccatggccatggccatccccttctacctcggcccctacttcggtatcgacatgtgcatcggcagcctggtgcgcctcgtgtgggaccgcctggacccggccagggccaaggcgttcgcgccccccgtcgcgtcgggcctcatctgcggcgacggcatctggacgctgccgcagtccgtgctggccctcgccggcgtcaagccgcccatctgcatgaagttcctgtcccgcagcaccaacgtcaaggtcgacgctttcctccgcagctag

SEQ ID NO: 16879 - DNA, 1830 bp, Zea mays
  Peptide Sequence Number=SeqID_60254
atgccgcggttgatgaagacgtcgaccaagacgccggccaccttggctgtagccgcgtcgttcctcctcctcctcgccacggcggcgggaggcgcctcaacgccggcaccgttcgactacgccggcgcgttcgacaagtgcctgcagttcttcgaggcgcagcggtccgggaagctccccgccgaccgccgcgtgcactggcgcggcgactccgccctcaccgacggcttctcccagggggtggacttggtgggcgggtactacgactcgggcgaccacgtcaagttcgggttccccatggcgtacgcggtgacgatgctcgcgtggggggtgctcgagttcgagaaggagatggtggccgccaacaaccaccagcgcgcgctcgatgccatccgctggggcaccaactacttcgtcaaggcccacaccgagcccaacagcctctgggtccaggtgggcgacggggacagcgaccacctgtgctgggagcgcgccgaggacatgtccacgccgcggacggcgttcaagatcaacatgacccacccggggtccgaggtcgccggcgagactgccgccgcgctggccgccgcgtccaaggccttccgcccgtacgactccatgtacgccgacctcctgctgctgcacgcaaagcagctcttcacgttcgccgacacgttcagaggcaggtacgatgactccctgcagagcaccaagaagttctacccttccggttctggctaccaggacgagctgctctgggcggccgcgtggctgcacgaggccaccggcgacgaggagtacctgcagtacgtgtcccggaacgccgaggagttcggcgggatcggctggtccgtgctcgagttctcctgggacaacaagtacgccggcctgcaggtgctcctctccaaggcgctcctcgccggcggcggcggcgagcacgccgacacgctgaggcagtaccaggcgaaggcggagttcttcctgtgcgcctgcctgcagaagaacggcgggcacaacatgaagctcaccccgggcgggctcctgcacacggacgagtggaacaacatgcagtacgtcagctccgccaccttcctcctggccgtctacgccgactacctcgcggcgtcgcgcggcgcgctcaggtgccccgacggcgaggtggcgcccggcgagatggtccggttcgccaggtcccaggcggactacgtcctggggaagaaccccaggggcatgagctacatggtcggctacggcagctacttcccgacgcacgtgcaccaccgcggcgcctccatcccgtccgtctacgccatggactccagggtcgggtgcatggacggcttcgacaggtactacaacagcaagggcgccgaccccaacgtcctccacggcgccgtcgtcggcgggcccgacgcggccgacggcttcgtcgacgaccgttgcaactaccagcaggccgagcccaccctcgcagggaacgcgccgatctgcggcgtcttcgctcgcctcgcctccgagccggccgacgcctccgggtctcctctggagttcgtgcacacggtgagcaactcgtggacgacgaatggggtggagtactaccggcacgtggtgacggcgaagaacacgtgcgggcaccccatcacgtacctgaagctgcacgtcaaggggctgtcgggccccatctacggcgtgtcggccgccaaggagaaggacacgtacgagctccccacgtggctcaccagcctcgcggccggcgagcagttcaccatcgtgtacatccagggcggccccgcagccaggttctccgtggccagctacaagactgcttga

SEQ ID NO: 16880 - DNA, 438 bp, Zea mays
  Peptide Sequence Number=SeqID_60255
atgggcaagaacaacaagcgcaagcgtgagccaactcctccatcggaggattttggtgactcggagtactcagaggaggagttctcctctgagtctgaggggtcttcggctcccatccccctgcgtgagtcgtctgacgactcagacgactcccaggggctcgcggcggaggtctggacgtacatccgggccatcgagcgctccgggctcgagggctcggatgagtcggagtactcctcggatgaggaggactcgtccgaggaggacggcggcggcgacggcgaggatgacgataacgacgacgacgacgaaggcggtggcagcggtgacggtgacggtggcggcaggggcggcagcaagggcgacggcgacggcagcagcaggggcggcagcagcaagggcagcaacaggggcggcagcagcagggccagtggctag

SEQ ID NO: 16881 - DNA, 675 bp, Zea mays
  Peptide Sequence Number=SeqID_60256
atgggggccccgacgctggtctacgcgtgtgtcgacggtgcgatgcggcaccgcggcggaggagcgctggcggaaaccggtggtcgaaagggtggaccaccacgcgacaggcatccaactacaccgcaactgtgtgccccttcggctccgtccacatccggtggaccagcgcaaaggaagcgggcccgcatgtcatgtaaccggtgccccggttacgacgtgcgagaagctacaccgccactcacgccaatgctgcgcctcctcgactgcggaaccagtaccgcgactcgaggtagccctgcgcatgacccaacagtgccaattaaaggcgacggccatgggtcagtcagccgcggggtaggcacgacggttggcatggtcaaaagtgggccggcagtaactgcagcggccgacgagcggaagcagtggtcaaatcgcctacaggctcgtgtcccctcccgaagcgacgggagagccctctcccacggcgtgaagacaacgcgctcgtgccccgttcctcgaacggcttgcacgcgcaacgggcgccacgtgaatcggtcgtcccatcgcattaactccccgacggagcaggcgacacctctgggactgggactggggacgtggtggaaaggatccttctcggtggaggaagcgggccccgagccttcctactga

SEQ ID NO: 16882 - DNA, 240 bp, Zea mays
  Peptide Sequence Number=SeqID_60257
atgcggggggaaggcgaatcgctgctgcccggtcagggcgcagcggtccgtcctccacctgggcaacggtcgtgccgtacatcggtggctgctgtcaccgccctcacggagagggcggacttcgacaacgtgggttcggtggaggtccttttgcctgggtcgccgtccgaggccgggcctggttccgtcgagggtggaatcaacaccgagggtgctgttgctccccctgccgatgcctga

SEQ ID NO: 16883 - DNA, 252 bp, Zea mays
  Peptide Sequence Number=SeqID_60258
atgtcggttcctggagcttcatcgggcctcgtggtggatgtgtgcgtgcttgatttgggcggggtggaccgtgactatggcaatttgtcgccggaattggcactccgccgtgttgccgcacgtcgtcgtggccggttgtccctgcttcgccgtcgtcagcaaactacgctctggtgcgcatttgggtgcggctccagcgaacccgccaccgccctgggcgctcggtgtagaagacagggcttcgaccgttga

SEQ ID NO: 16884 - DNA, 252 bp, Zea mays
  Peptide Sequence Number=SeqID_60259
atggcggctccgtcgagggggaagaaacgcctggtggtcgacgtcgatgtcgagttggacagtgaggccgaagtagcttcagctttcagtcgtctgtctgtgtcgatcgttgccaagccttcaggcgagtacgttcgcgccaaggagcactcctccccgagcgtgaactgcgcggccacatcaggtactgggtacacccagcagcagaccccttctgtcgcgaaacagtgctctgaaccacgttcagtgtcg

SEQ ID NO: 16885 - DNA, 1314 bp, Zea mays
  Peptide Sequence Number=SeqID_60260
atggcggagacggccggcgcggctccagcacagcagcccgctagagtagctacgacgacgacgaacagcgatgtctccacgtgggcgtggctgcagcaggtcctcgcgctgctgttcccgtccagcctcgccgcgaaggccgcgctgtttgcgctcgtggtggcgctgctgccgctgctgccgtcggggcaggcgcccaggatctgggagctgccgcacctcctcctgctcggcatcatcatctcctacggcgtcttcggccagaagaacgccgacgccgaggtggccaccgctgcctacgccacgcccgtcgacgtggaggcgtcggtggaggcctacgtctcgcagatgatgcagggctcgcttgtcttcgacgaaaacgacggcaacgatggcgccaacaaggatggcagcgtccaacagcaggcgtggagctctcggtaccttccagacgacccgctcgtggtcgtcgcggacacttcagcgccagggaccaacagcggcaacggcgacaccgacacgggtgggaaagggaaaccactcctgctgccggtgaggaagctcaagccagcggcggcggcaccaacaggggatatgatgagcgacgtcagcggcattgaggacgagggggaggaggaggaagaagaagagttactcctagctcccaaatcgggaacgggatacggcgtcgtgcgcgagcacgccttcccttcgccgtcctctgtcctcgacgccgacctgaccctctcaccgtcctcgccgcctctgctcccgcctcctccaccgccgccgccgtttctcggccgcgggcgaagcggcctcctgaaggccaaggcgaggagcttcaacgagttcgggttcggggtccttagtagcgaccggagcccgaacggaagtttgggttcgcactcgcacagcgcggcgggcagcagcaggaagttccggcccaggtacgcggtgcaagcgacgaggagcagcaccttcggccgctacgatcctgtagtgcccatccacgacgacgaagcaggcgacgagacgttgggtgagatggttgcaacgtcggacagctcgtttagcagtgatctcgacgatgacaccatcaaggaggaaaacagctgcgaagatgatggggtgagtgaggacgacggcgtcaactcgtgcaacgaggagctctttgagctggcgacgagaccgggactggagggggaaacggagacggaggtggagggcgaggtggacaggaaggccgacgagttcatagccaagttcagggagcagattaggatgcagaaggtcgagcaggccaggagatga

SEQ ID NO: 16886 - DNA, 129 bp, Zea mays
  Peptide Sequence Number=SeqID_60261
atgtcagtttgtcccttcgagttgtggttcactggttgtggttgtggggcagaagcggaccacgagcgggcctccgagaacgtctggaatgggccaggattcttttttgggttttttttttctgaatga

SEQ ID NO: 16887 - DNA, 1161 bp, Zea mays
  Peptide Sequence Number=SeqID_60262
atgcgcgccgcccgtcgtcttcgcttctacggcactgaacctggatggataatggattgtgcgcgggcggaacactttgagccccccgcggttgctttcggcattccgaaagaatccacccccggccgatcgacggacgatccagcaggcgaaatgcgcccctcatccgaccggcggcacagactagctagtcggccaaccgtggacgcagatggagatgacgacagccacatcagtcctacgctccagctcgccgcgctgctccatgcgcggggcctcgccgtgacggtcctccacaccggcttgaacgcccccgacgcctcgcgccacccggagctcaccttcgtcctcatccacgagtcgtcgttccccgacgaggtcacgtcccccggcaccgacatcgtcacgcagctcctggccctgaacgtcgcctgcgaggcgcccttccgggaggccctcgcgtcgtactccgtgtgctactcggcgctgcgcgcggcacaccggctgggcgtcccggcgctcccgctgcggacagacagcgccgccacgttccgcagcatgctcgacggtagcgacacggacgcgctgtgcggcttcgtcggccacgtcgccgacgccgtgcgggcctcggcgtccggcgtcgtcatcaacacgttcgagaggatggaggcgtcggagctggccaagatccagcgcgagctgtcccgtccggcgttcgcggtggggcctctgcacttgctgtccccggcaccgacggagcagagcctgcacgcgcccgaccgcggctgcctggcttggctggacgaccacccgctgcgctccgtgctgtacgtgagcttaggaagtgtggcctgcgtcgaccgcggcgcgttcgtggagatggcgtgggggctggcccgcagcggggtgtcgttcctctgggttggccggccgggcttggtcggcggcgtggcgagagcagggccgacgcaaactgggcgggcgggcggccggagctcgagcagggcctgctgcggcggtccggggccggcgggcggggccggcagcggcggtgcggggctgaacgtcgggtgggcgggcagccggagctcgagcagggccgacggcggtgttgggccgaacagcgaggagccgacggtcacggcggtcgatggctgttga

SEQ ID NO: 16888 - DNA, 1251 bp, Zea mays
  Peptide Sequence Number=SeqID_60263
atgggcgtcgccggcggcgggaggacggaggcgatcatgcgggagatcgcgaggctgcgcgcccagagggacgagcttgacagccgcatacgcttcttcgagtcccagctccgcgtcggcgccgcgccggccacgcttcctcccagcctgtccaccaagctcgacgccatggggttgcatgcggccgcccgagggggcagcggcctcagccccgacgcggtcagacggtacagccgccagctcctcctccccgacttcggcgtgcaaggttctctaggagttgttgatggagacgacgttgaacttggcaacctccatcgtcaggtcatacacgtagaagcatacgttgggcaacctaaggtgaaatctgcagcagctgcttgccgggcatatgacatagttgttgatgcaaccaacagtcctgctagtcggtacatgcttagtgattgctgtgtccttctcaacaagcctctcatatccggttcaacaattggtctagaaggacagttgatggtttataaccataatggaagtccatgttaccggtgtcattttccaaacccaacgacgacatgccagactgctagttctgctaattatactcttggggttgttccaggagtgaatggctgcctacaagctcttgaaactataaaggttgcaactcgtgttggtgaacccctttgtggaagaatgctactcttcgacgcattatcctcccgttttaagactgttaataagatacataaaaggtcatcaacttgcacagtctgtggagataatcctgatttaactcaagacagctttgttacgtttgattatgatagcttgacgcagtctacaaagtctagcaagccgatggcaatccagacgccgctcccaaagagcgcccggaccagctgcagagaatacaagcgggtggtcgacagcggcaggacgcacctgctgttggacgtgcggccggtgcaccacttccagatcgcctccatagccaactcggtgaacatcccgctgcacgagctgcgggagaggcttccccggctcagggacgccctgaccgaagtggcaggcgtgtcgcactcgcacggcaagcactattgccctctgtacttcgtctgccagaatggcgacgactccgaggcggccgtcggcgtcctccgggagagcggcttcccttacgccggcgctatagccggcggccttgagtgttgggcgcgagaagttgatcccggtttccctgtgtactggtga

SEQ ID NO: 16889 - DNA, 681 bp, Zea mays
  Peptide Sequence Number=SeqID_60264
atggagagggtcgaggacttagggctcagcctcagcctcagctcgtccctcgcgtctcctcgcactcaccatgtcgccaccatgctgctacgcgctccagagaagaggttcctggagatgccactgctgctgcccgcgaagcggacgaccgaggtcaccggcgaggatggcctgcgaggcggcagcgatgaggaggacggcggctgcggcatcgacggctccaggaagaagctccggctgtccaaggaccagtccgcggtgctcgaggatagcttccgggagcacccaactctcaaccctcggcagaaggcagccttggcgcagcagctaggcctgcggccccgccaggtggaggtgtggttccagaacaggcgcgccaggacgaagctgaagcagacggaggtggactgcgagtacctgaagcgctgctgcgagacgctgacggaggagaaccggcggctgcagaaggaggtgcaggagctccgcgcgctcaagctcgtgtcgccgcacctctacatgcacatgtccccgcccaccaccctcaccatgtgcccctcctgcgagcgcgtctcctcgtccaacggcaactccgcagctgccacggcggccgcgcgcgcgcgcgccggcgccggcgccggcgccatcgtctgccacccgatcgaccgagccactagtacgtag

SEQ ID NO: 16890 - DNA, 330 bp, Zea mays
  Peptide Sequence Number=SeqID_60265
atgccgtcacgtcaagtgggcctgctgatacaacccctcgacagtacttttggggtcctgggcctgtggctgtggtggagagaggtcaggagtggagcgaggtcggaggaggtcaccacaccagcagcggcgacgacgatgctgatcctggacctggcgatctggatcatcccggtgacgctcgtcctcgtgccgttccggcggctggtggtcctggtggccaggctgcaggagctggaggagtgcatcatgcggccgcggccgccgctcatggactcgtgggcgtggggccgcgtcggcggcctgcacaccatgagcatcatgatgtga

SEQ ID NO: 16891 - DNA, 1446 bp, Zea mays
  Peptide Sequence Number=SeqID_60266
atgaacaaaaacaccggcactcaaggtgccaatacacacggaactccggttctgtccccacggcagcagcgatggcctcagggcgggagccgctgcaaccttgccctcgcccgcgccgacgctcgaggggcgaggacaagtacaaagagccggaggcccggagcacggatggtggcggtgatcccgtcggcgacggggacttccagggccgcatccacctcggcaccttcgagtggagcatcggcccatcggcagatccccactcggatcctcccggacgagcggagcaccgacctcctcgcggaggccccgtaccgttgcaaaggcaggacagccctagaacacgaacgccgctctagcggcgcgcgatgtcttgggcggtccacccgtgcgcacgacgcgacaaccgccctcgcggcaggagggggcaccgggagccaagccagcgagcccaacgtgctggagctggcgacaaccgccgtcgaccggccccgcattgttgaagtctgccccgctcgcagggctattgagcgccctctcccttggatgctaaaggggaggctgacccacgaacccgcgcgggaggtagagctccggctcagcccggccttcgccccagcaaggatgatgaacatccttgaagctgagggcggagccaggatcgcagcccagcttgcttctccccgtcaagaagctggaggtcaccgtcttgggggagaagaagccaagccgctgcgcgcggtgcatgcaaccgcccaacggttacaagcagttctccacttttgcccagaccagcgggcgaaagggtgggcagccatgcaggcggcatgcaaccgcgccaagtgggcgcacctcttcgacttccaacaagcccagcatggaggtccaggcccacgcgtcatgcaaccggcgcgccggttgctacgtgtgagcaactgcaccgccactcacgccactaccgcgcctcctcgactgcggagtcaataccgcgactcgaggcaaccctgcagtgccagccaagcgcgacggtcaaatgcggtcaaaattgggccggcagtaatggcggtgacaggcgggcagaagcagcggtcacgtcgtcagccaagctcacgtcccatccaggggcagcgggggagccctctctcacggcgtgaagatggcgcgcccggaccaggaaagggggataccccgaaaaggacccttctccgtgaaggaaacaggcttcgagcctccctactgatcagaggttcgaaggccggcccctcggaggggttcaacggccgcctcagatcgattgggttctgcgcccactactggtcagaggttcgatggccggcccctcgaagggttcaacggtcgcctcaggccactcggggctccgcgcccactactgatcaagggttcgtaggctggccctcgaagggttcacagtcgcctcagacatag

SEQ ID NO: 16892 - DNA, 609 bp, Zea mays
  Peptide Sequence Number=SeqID_60267
atgactggtcagtctagctacttggagaggttgcaccaccacctgcacaaggagcaggagcgtcgacgacaggagctggagcagcagggttcttctttctcgctccagcaggagatagagtctgtgaggagctgctcccctgtgctcccactggaggcgccccctgcaccaccactgagcgccctagcccctggagtagctgctggaggagacctagacgatggaggtggcaacgatagctcgagtcacagcaccgacctttctgccgaccacgagccggaaggatgggttgctcgacccatcactcgtgacgctgctcgcggcacaggaggcgtgattgtctcacctgttggtgaggacaatcctaggttgagcagcatagtcaacctagccgccgtgctaaacacggagctggaccatgcgctagacgagctgagtagggctcgtgctgagatcgcccagctgcgggctaagcgcgcggagcatcgtcacctagaggatggctcccccactcccgtcgggactcatcacccgtatcgctcaccttggcgtggacaccagtcttatggcaaccccgactgcaggaccaagataaatttagaaccatag

SEQ ID NO: 16893 - DNA, 474 bp, Zea mays
  Peptide Sequence Number=SeqID_60268
atgggcaagagcaaaaaaggtgggagttcctcgcaccattccggtgataaacagaaacgcaagccaactcctccctcggaggactttggtgactcagagtactcggaggaggagttctcttccgggaccgagggatcgccgacccctacctctctcctgatgtcgtctgatgactcagacgactcccagaggatcgccgcggaggtgtggtcctacatccgggccgtcgagcgcgccgagctcgagggctcggatgagtcggaggtctcctcggatgaggagaactcctcggactcattcgaggagggcggcggtggtggcgatggcgagggcgacgacgacagcgggggcgacggcaatggcgacggcgaaggtgacggcaagggcaagggcgacggaggcaacggcagcgacagcggcaagggcgacggcggcgatggcagcggcagcgacagcaacaaggccagtggctaa

SEQ ID NO: 16894 - DNA, 348 bp, Zea mays
  Peptide Sequence Number=SeqID_60269
atgctctgcttccgccttgaactgatgctgcttgactgctctgctggtttgctagggcaggaagacgaggtgcctgctgattctgcctttggaactggcctcctcctaactgattgttctggtgattttgatgctggtgctgagggtactgcctctaaaactactgatgctgaggtgctggaatgttgggaaggtatgattcatcagctgatactgcagagggtcgaccaagcctctcaggaaacgatactgtcgcttggtgtcggtgttgacatcttcagtagcatagcgagacagttgcagaaacctgtttcagtactcactaacaggacattgacccttgcttaa

SEQ ID NO: 16895 - DNA, 390 bp, Zea mays
  Peptide Sequence Number=SeqID_60270
atgcatgtatctcactcattgcattcattatattgtaatctcgctgacggagagtacgtgctcatccctgagcaaggagctgtccacgaggaagaccaggagcaagctcccgagactgccatcgaggatctccccgcaaccccagcaattgaaggcaagccccgctatggtggggacaagtgtggccactgcacggcggcagccggggtcagtggagcattgtatgccaaggcggtttaccttgcaaggataaaactcgattcgaatcgtctgcttctcgcaggtacgcttcaggatatggttgatggtgtgacttggcctaccaccctgccacagggttggatggtcgagtgggatgctgctccgacaggagaggagcaggaggagtag

SEQ ID NO: 16896 - DNA, 804 bp, Zea mays
  Peptide Sequence Number=SeqID_60271
atggctcgacttagacacactgcacgaaagtcagtcatccccttcttaccctcccgccttgctgagcgtccgcttcgccgtcccgtggccggacagtccagccacttggagagactacaccaccgcctgcgtgaggagcaggagcgtcgacgacaggagcagcagagctcttccttctcgctccaccaggagatagagtctgtgaggagctgctctcctgtgcttcctctggagccgccccctgcaccaccactgggcgccccagcttctggagtagctgctggaggagacccagacgacggagatggcgacgacagctcgagccacgacaccgacttctctgctaaccctgagccggaaggatgggttgctcgacccatcactcgcgacgctgctcgcgggtgtcacttccacgatgcgctcgacaccctgctacgtcgggcatttgaccggcatacttggtccgtcgagtatcgttgtgtggtctaccagcacagtcgcggggtctacccggaccgctgggaggcgacttgcttggtgcgctgccctgaggacagtctccagggtgcggaggcctgttcagagcactattctatctctgaacgggactcagctgaggcagccatgcaagaggctcgtgctgagatcgccctgttgcgggctgagcgcgcggaacgtcgttatttggatggtggttcccccgctcgtgctgagattgatggttttggttacgattatggtattggcgaagatgaagctgtggaaggagacttccaggagttccaagactacgacgagttctag

SEQ ID NO: 16897 - DNA, 173 bp, Zea mays
  Peptide Sequence Number=SeqID_60272
atcacttgtcaagcttcggctcactgttcctcaacttcgttatcctgtacatatcaaagcggtatgagaaaagtgcaaatttcgaggagaagggcacagaaatcgccgtgtccatctataacttcatcaagagcatcaacttcgccctcaatgtgttcgaaggtccctggcag

SEQ ID NO: 16898 - DNA, 591 bp, Zea mays
  Peptide Sequence Number=SeqID_60273
atgaagaacgtagcaaaatgcgatacctggtgtgaattgcagaatcccgcgaaccatcgagtttttgaacgcaagttgcgcccgaagccttctggcggagggcacgtctgcctgggcgtcacgccaaaagacactcccaacacccccccgcggggcgagggacgtggcgtctggccccccgcgccgcagggcgaggtgggccgaagcaggggctgccggcgaaccgcgccgggcgcagcacgtgaggcgtcctcagcgacggaccgggcccaagttctctggaaagggacgcctgggagggtgagagccccgtccggcccggaccctgtcgcaccacgaggcgccgtcaacgagtcgggttgtttgggaatgcagcccaaatcgggcgggttcgagttggagcacgcctgtcgggacccgaaagatggtgaactatgcctgagcggggcgaagccagaggaaactctggtggaggctcgaagcgatactgacgatagctggagcccacacgagttctatcgggtaaagccaatgattagaggcatcgggggcgcaacgccctcgacctattctcaaactttaaataggtag

SEQ ID NO: 16899 - DNA, 468 bp, Zea mays
  Peptide Sequence Number=SeqID_60274
atgggcaagaacaacaagcgcaagcgtgagccaactcctccatcggaggattttggtgactcggagtactcagaggaggagttctcctctgagtctgaggggtctccgactcccatccccctgcgtgagtcgtctgacgactcagacgactcccaggggctcgcggcggaggtctggacgtacatccgggccgttgagcgctccgggctcgagggctcggatgagtcggagtactcctcggatgaggaggactcggacggtggcggcgaggacgaggacgacgacgacgacaacgatgacgacgacgacgaaggcggtggcggcggtgacggcagcggcaggggcagtggcagcggcagcaaggacggtgacggcggcggcagcaggggcggcagcggcggtggcggcagcagcagaggcagcaacaggggcggcagcggcggcggcaccaacagggccagaggctag

SEQ ID NO: 16900 - DNA, 930 bp, Zea mays
  Peptide Sequence Number=SeqID_60275
atggcgaggcactccgtccccacacacatcaaccgtccccatcgattccccgtcaacagatcagggctcaccgccttggcgtacaatgcctcactgaccccgactgccgtcgtgcagcagatcctcgatggcaggttctggtgctggatcctgggctacctcctgagcaactccttgctccggcacgaggatgcggcggaggtcgtcggcggcacctgctccagccaaatcacggcggtagggttcaatcaagttgcacgtggagctccactgggtgatgtagaggctatgcgcgcaaggaatcgagaaatggttcagtggattacccggtccacgtgctccggcggggtcacgaactccggcgagcgtgatctcactgttccggtggggctggtcctcggctcaagcttgggaaagcttcacggcctcccgaggaagctatccacgggctcggatcgagcggatgtgggcgagaatggtttggccacggcaggcggctctggcgggtcgcggggagcatcatcgcaggctatacccggaccagtgggaggctacttggttggtgtgccgttcggacgatggtctccgggcggggtagctgacagccttgacctgaagtactaccctcgtcgttcgacagacagtgctggaggtgtgattgtctcgccagtaggtgagggcaatcctaggctgaacagcatggtcaacttggtcgccgtgctcaacacagagttggactatgcccttgacgagttgggcaaggtttgggcggaggttgcggaattgcgtgttgagtgcgcagcacaccactatctagatggtggttctcccgcccctgtcgggattcagcacccttaccgtttaccgccccgtggttgcttcgactatggtaccccagactgcaggacccggatagatttggatccctag

SEQ ID NO: 16901 - DNA, 504 bp, Zea mays
  Peptide Sequence Number=SeqID_60276
atgacgcccgcccacgcgcccagctccctttttagagccctgccagtgcctcgcgcacacccctcacctcatttcacacaccctcgccctctctcgcgctctgctctcgtcgccagacgccgccggagatccgcgcccgcgttcccgaccatccagctcgccggagaccgcgccaagcctccccgagctccgcctcgagacaacgagcagtccgaggttcctgagtgtgttgttggagacctccctgagcaacaacctggtgaaggcaagagggccgtcaatgggggccgaggcgtagtgctcgctctaccaaggttggggtgcagaggttctttcgatttggttttgttagtcacccaccttggggaggtctgtacaacccaggctggaaagggatcacgacttgtgggtacagtgtacaatctctgcagagtgttaaaaactggaggtgatgctggcaacatggatgacttcgaggagttccaggaatataacgggttctag

SEQ ID NO: 16902 - DNA, 309 bp, Zea mays
  Peptide Sequence Number=SeqID_60277
atgttactcctggtcctgctcctgctcctggcgtcagcgctcctgctcctcgtgcaggcgacaatgcagtctctccagcctgggttgtacagacctgatcttcactaccaaggtgaatggttagggatacactacgtagcctttacaaagactcccctggtgcatagctgctcgttaggttttgctagtcgtacaaacgcagtatacctccccaaggtccttacggagaggtactcaggaaaaaggcctgagccccctaaggtaccacaaaatcatccacataatcaggataacaatatcgtatcataa

SEQ ID NO: 16903 - DNA, 378 bp, Zea mays
  Peptide Sequence Number=SeqID_60278
atggcttctcacgtatccacggaaggagggaacgcacattcccacacagacgggcttgcacgagagggttttccccgcattttctgggaggtactgcagggagccggttatgctacgcctccccagtacgcggtacagttgttcgaggagcaccgggtaccccgctgtagggatactattgagtccacggctctgcacgtgctgacaaccttctgcggctttcaccccttggagctatcaacacaccccattggcttgttcccctctgagaaggaggatgacccaatgtggaaggatcgggttgagcatgccaaggatgtgtgggctctctaccctggacataccgctcacctgacggttcggtgccttgcgaggtga

SEQ ID NO: 16904 - DNA, 306 bp, Zea mays
  Peptide Sequence Number=SeqID_60279
atgcaggagctgatggctcagcagaatgagattctgcgacagctagcccagcatcagccaccgcctcagcactatgggggtggtgatcataatcagcgtcccccagcagcggccacctatcaggagtttctcagtactcagccgccattgttcactcgggcagaagacccacttgatgctgatcttcatgggcccgtgcggacacggtgggaccatttcctcgctatgcagctggttgactacatgtttgagtggggagagtcaaggcagcattacagagacatcacatacccacaggcatcatga

SEQ ID NO: 16905 - DNA, 165 bp, Zea mays
  Peptide Sequence Number=SeqID_60280
atggccatgatgggttcaacatcagaaaagatgtacctctctcaggatccactattagtaagcatttctgcaaacaaagtcttgattaagccttaccttgtctcccaaaaagacagcatatcattgagagtcttttattttgacgggacttcctctatgtcataa

SEQ ID NO: 16906 - DNA, 507 bp, Zea mays
  Peptide Sequence Number=SeqID_60281
atgaggatccaaagtcatcctcaccctacagcggggtacccggtgctcctcgaacaactgtaccgcgtactggggaggcgtagcataaccggctccctgcagtacctcccagaaaatgcggggaaaaccctctcgtgcaagcccgtctgtgtgggaatgcaggtcctcagtagcaggctcgggtgctggctcctagactacctcttgagtaactccttgctccggaatgaggacgcggtcgggctcgtcggcagcgtgtgctttggcctgctcacggcggtagggttcaatcaaatggcacagggagcttcactggatgctaaggatgctataggtacaaggaatcgacgaatggcttatcgtggggcttggtctacgtgcgacggcggccggttgaagtctggcgacgttgatccggtgtctccggtgaggcgtgtgcgcgaggttgacacggcgcggggctgcgcgcacgggctgagtgccgagggcgtgctctggcgttgctag

SEQ ID NO: 16907 - DNA, 252 bp, Zea mays
  Peptide Sequence Number=SeqID_60282
atgaagatccgcagcaccggtcgttctctatctctcttgcctcggtctctctcggcggggatatggctggcgccgagcgcagaccggttcttcggtcgcggcgaaccgaagcccacacacggtggctccattcctgctcaccctctcacggccttctctctatatcggcgaggtgctcacggcccacagttcctgcggttcgctcggctccagatgggttatgcgatcgggagggtgtttctcaacatatag

SEQ ID NO: 16908 - DNA, 567 bp, Zea mays
  Peptide Sequence Number=SeqID_60283
atgactgggtttaaacggcatgtggctacatttgctgaatttgcagcggctaaaagtctggattatgccattatctctcagggagtagatctttacactgaggaccagtttgaagattttgctcagtattatgaacctgccaggctgggtatacctaggtgtttcggcgagactccaggcctgcggcatcatcttgccgtcatcaagaaaattgctagagtcactattattccaaagagtggggacaaaagggaggtcatgagtgttgttctctttatgatgcatcagttaaatgatctgaagatggacaagaaccaaaatctagcatatgctccatatattatggctctgattaaaaccaaaactagattcaaagggtggtgtgaaactgctcacactccattcaggccattcaagaatgaaattggttttctcactaggcctctcacaccgtttgctaatgatgagggagctcagggagatgcttttcctgctcaacctgaagctcatcccgctcaacaaatgccaccacctccacctccaccgcaacaaggacaatactggtag

SEQ ID NO: 16909 - DNA, 117 bp, Zea mays
  Peptide Sequence Number=SeqID_60284
atgagggtggaatggggtggttatgagattgatggttccggttatgactatggtgctggagaagatgaagctgtggaaggagacttccaggagttccaagattacgacgagttctag

SEQ ID NO: 16910 - DNA, 1311 bp, Zea mays
  Peptide Sequence Number=SeqID_60285
atggggctcggtgtatgcggctcgctctgccaaggtggttatgagattgatggttccggttatgactatggtgctggtaagtggtattctttccgtttggaaagggttgtcagcattgcaaccactgctcaggagaagatgaagctgtggaaggagacttccaggagttccaagattacgacgagttctaggtgtgggttagcggcaacccccagtcggctgcctgtgaaggccgcgttatctacgtttcttttccgcactttgatttattgtaagaactatatgggcgtctcagacatggctcgacttagacacactgcacgaaagtcagtcatccccttcttaccttcccgccttgctgagcgtccgcttcgccgtcccgtggccggacagtccagccacttggagagactacaccaccgcctgcgtgaggagcaggaacgtcgacgacaggagcagcagggctcttctttctcgctccaccaggagatagagtctgtgaggagctgctcccctgtgcttcctctggagccgccccctgcaccacccctgggcgccccagcttctggagtagctgctggaggagacccagacgacggagatggcgacgacagctcgagccacgacaccgacttctctgctaaccctgagccggaaggatgggttgctcgacccatcactcgcgacgctgctcgcgggtgtcacttccacgatgcgctcgacaccctgctacgtcgggcatttgaccggcatacttggtccgtcgagtatcgctgtgtggtctaccagcatagtcgcggggtctacccggaccgctgggaggcgacttgcttggtgcgctgcccggaggacagtctccagggtgcagaggcctgttcagagcactattctatctctgagcgggactcagctgaggcagccatgcaagatgctgcacggcgtgcgctttcgcactactgctcggttttcggtggggcagctgacggtctcgacctgaagtattacccccgccgttcatctggcagcacaggaggcgtgattgtctcacctgtcggtgagggcaatcctaggttgagcagcacagtcaacctagccgccgtgctaaacacggagctggaccatgcactagacgagctgagtagggctcgtgctgagatcgccctgctgcgggctgagcgcgcggaacgtcgttttctggacggtggttcccccgctcccgttgggactcagcacccgtaccgctcacctcagcgtggacaccagtcttatggcaatcccgcctgcaagaccaagataaacctagaaccatag

SEQ ID NO: 16911 - DNA, 771 bp, Zea mays
  Peptide Sequence Number=SeqID_60286
atggagcaccagaccggtggggaagacgagtcggtcgcgcccctaggtggtggacgcactggccaccggctttgtccgcctcgtcgagccgcccgatgcgacaccacgcgtgaaccacgaaacgaaggagagcgacgaatccttaccgattggatggtccctccctgtcctctgttctggacctacctcaacctgttcctccgccggcgcgcccgccgcctactcaacgtcgtggacccctacgtgaccatcgacatctcggagcccggcggcgaggtgcgctactcacgctacggccccgtctccgacaacgacagcacctacgaggaggtgaaggcgtacctgagcggcgccgtgcgctcgcaggacgcgcgcgagctccgcgtcgagggtgcccgggagggcaacggcctcgtcgtcagcatgcgcgacggccaggacgtggccgacgagttccgcggcgtcccgctctggtggtcctcggtggtcgcagcggagcgagaggaggtggcgtgggaatggagcaggctgttgaggagcgcagtgggacgccaccgaggggggagtcagcggagaatgcgacggaggtggtacgaggcgtccgcaacgccgtcgcggcggcccacggcggcaatcggcgaaggtgaattttggaggcgagaacgagatgccgggagcctgcgggttacggcatgggcagatccagaatcggagacggagagggagggggcaaggggcggacgcaactcgattgttctgctgctggattga

SEQ ID NO: 16912 - DNA, 423 bp, Zea mays
  Peptide Sequence Number=SeqID_60287
atggccgcgggacggatgccgctgcaacaacgccctcgcccacggctacgctcgaggggcgaggacaagtgcaaagagccggaggcccggagcgcggatggtggtggtgatcccgtcggcgacggggacttctccagccatcgctacctcggcaccggcgacaggagccggctccccactcggatcctcacggacgagcggagcaccgacctccgcgcggagacgcgtaccggggcaaaggcaggacagccccagaacacgaacgccgccctagcagcgcgcgatgtcttgggcggtcctccaccatcgtgggctgagtcttctccgacacgctccaaggtcctccccctacgacacgggggctgggccccacgcgtcatgcaagctggtccagggcagaaggagccaaaccgccgcgcgtag

SEQ ID NO: 16913 - DNA, 1422 bp, Zea mays
  Peptide Sequence Number=SeqID_60288
atggcccatcttgcaccaacacagcaatttcagcagcaacatccagcaatgcttagaactgagtcacctgctgctgggcactctattgggcagggtcctttagatcttgaaaaacatacttcaaaatcagggaagttggataatgcaactattgctgctgtcggtgaaaataaaaatagtggtcctgagtcagttgtcatgagacctacaaagtcacaattgggtgatgaaaacatgaacagcgaacacaatggttttgttggtgttagaaaagatgcagtgcaaactggcattgtatcacacaatttagatggttcaattaggagggatgggaatactgaccaggcaggcaattcacatggcccacttgtgcagggaggcaaagatcacaaggcttcagatgcatctactgatcatgagaaaggacgactgtttcaacaggcatcactgcaaaatgcaggggcaccgggctcttatgtgcccccaggtgtggtaccacatccatctggaccagataaaatgcttcctcagcatatgacgaatcatggtcatatgcatggtttctctgaaaatatccgtcctccgctgcaacaaccatatggtgtgtttcattctggaacgataacaaggccatttggagagaaccagattcagatgccaatgccacagcctgggggtatcagacctggtgatggaatgttgaacagcaatgactttggtggtgaggggttcaacgcttcagggggtgcagcgtatcctgaaagacatgataataccgaagacagtcggaaacattttccagcaccagcccctctagatgatcagggcttgcgaagggaccctagacattttgagagagctttaggtagacctgatggtttccttgattcagtacctggaaggcctccatttgcaaaccacagaagtgcaggtttgcatgaggattttccaagaaagcaaaatgcaactgccagtcaccctgacttcctgtcacatggagcagaatttgatcatcacagggctattggaatgcctaatttcagaaatccaggcccatttgctcaagggacaagtggcggtcctggtggccctcctaaacaccagcttggctctggtaaccttcctgggaatttacattcttttgagggtctggacttccctccagctcctttcaaccttggtgattcttttccttgcactagcctacatggtcagtgtggagaaccccatggtgacatgcatccaggtgaccctcatcttgtcgctgaatatgctcagcatggatttcctaaaactgcagcacactttggtttggctcatgctttttctaatggcgacctaataatagaccatgctggaacttttacaaagagacttgtaattgtgtcatcagacatccataacatgttttgcatagtttaa

SEQ ID NO: 16914 - DNA, 844 bp, Zea mays
  Peptide Sequence Number=SeqID_60289
atgaaggactgcagggacagcccttactgtgcgacggcagtaccggtccttgctgggcgacgcaagcaatatctatgcagcgaagagcggatcgacaacgacggtggatggggcgacgacgaggaggtggacggatggggcgacgacgaggaggtggacggatggggctgtggcgacgaggatggggcggtggatgcggcggcgaggtggacggatggcgcggtggatgcggttggaggcggtggatgcagcagtgaggtggacgatggggctgtggcgacgaggatggggcggtggatgcggcggcgaggtggacggatggcgtggtggatgcggttggttgtagaatttcttttaggtttagagttaaaggcgatgccgactgtctgcgccgtcttccccagcgctcgactgctctctctgcccggcgctcgtcgagctcgtctgggctccccgacggtcttccccggcgctctccctcccgagcgctctccacgcccgtgcaggagctcgtatgcgctcgtctgcgcccgtgcaggagctcgtctccaccctcgtctgcgctcgtctgccccggcgctctccctccaggcgctccaaggtatcctcgcgagtgcccctttctcttcactggcgctcctctccctggtggtcggccgtgtagccgtaaatcttgagcagctcgtcgtaggttccttccccgcggccatggagaaatctccaagatccattcctatcggatctggacctgctagggccgacacacgcaaagatgtcgcagaagctgcagatgggagtaggcgcacaggcatcgtcgacacgagcaacattgattatggctcta

SEQ ID NO: 16915 - DNA, 57 bp, Zea mays
  Peptide Sequence Number=SeqID_60290
atgaagacaatgcgaccaacatcaaccaacaaggaaattggaaaaagaaaaggatga

SEQ ID NO: 16916 - DNA, 159 bp, Zea mays
  Peptide Sequence Number=SeqID_60291
atggttggtttacaggtggtgatgaggaagatggttttttattatgattatggtaatggtaaagaaagagaagaaggcgtcgaggcggatctccaggagttccaggacttcgacgagtcgaggattaggctagcgacctcccctagtcagctacctgtg

SEQ ID NO: 16917 - DNA, 317 bp, Zea mays
  Peptide Sequence Number=SeqID_60292
ggcgaacccgcctctacttcgccgtgcgcggcctccacgccgccccaatgtcgtaccccccatcctcgcccttggccctcgacgtgccgcagcatgccctccgccgctgccgctgcgacaaccctgatggatgcggcctcgcctccgcagccccattcgccacgcgctccgttgctgaagcccccgcccgcatcatccaggaggtagctgatggagggtcatgttcggtagtttggctcaagaatgtcacgtctggacatggggacacccatggcctcctggcgatatgtatgggatctggaataacaggagcctga

SEQ ID NO: 16918 - DNA, 249 bp, Zea mays
  Peptide Sequence Number=SeqID_60293
atggctcgcgcacgcgcaacggccgccccgccaaccactcgccccgtcgcattaactccgcggcgggacaggcggcgcttctggcaggagcagcgggcaacgcttcgccttcgccgtaataacagcgccaaaaaagccgcctcagatcgcgtgggccctacacccactactggtcagaggttcaaaggccggccccccgaagggttcaacggccgcctcaggctacttgggctccgcgcccattactga

SEQ ID NO: 16919 - DNA, 1584 bp, Zea mays
  Peptide Sequence Number=SeqID_60294
atgaacaaaaacactggcattcaaagtgccattacaaacggaactccggttccccctccgcaggtacgaacaaccccactccatgggggagggcctgcggagcaacagaagaccgacgaacggcgcgccgtcgcctgctccagcagcagcgacgacgacgacttctgctccggggggccgaacagcggcagcgctgacctcagggcgggtgctgctgtcaggaggcccccgcccatgcccaaacttgtgaggcaaggacgggcagaaggctgtagagttggaggtcgatccgtgggcggccctggctatctcgtcggcggaagaacctcttccagctgccgtggcagatgccggcgccgcgagcggctccgaagccactcgcgcccgagagccaggcacggtgcagctgccggcgccacggacgacgactgcccttccctccgatcactgagtgaaggagcgggccaccgcccacgcaggggccgaccccaactcggcacactcccctccccagccctggtgatggaaatccttgaggctgagggaggggcagaggctgcagcccggctcgctttcccccaccatcaagctggaggtcaccatcttgggcccacgcgtcatgcaaccggcgcgccgactgcttcgtgcatgcaactgcaccgccacttgcgccaccaccgcgcctcctcgattgcggaaccaataccgcgactcgaggcgacccagcgcacgacccagcagcgccagcctggcgcggcggtcaatgcagccaaaaatgggctggcagtaatgacggtggcaggcgggcgggagcagcggtcacgtcgtcagccaagctcatgtcccatccgggggcagcaagggaaccccctctcacggcgtgaagacaacgcgcccgtaatccgttcctcgaacggctcgcgcacgcgcaacggccgccccgccaaccactcgcctcgtcgcataactccgtggcgggacaggcggcgcctctggcaggagaagcgggcgacgcttcgccttcgccataatgaccgcgtcagtaaagggaccgggaaagggggataccccgaaaaggatccttccccaggaaggaaccaggctccgagcctccctactgatcagaggttcgaaggctggccccccgaagggttcgacagccgcctcagatcgcgtgggccctacacccactactggtcagagaggctcgggggctgctctcgcaaacccggctccggccgaaccattgacagcgtcaacataccagcccgagaacttgggatccgaccgtacacccgggctacggccagctcgcatgagggaacaaccaggccagccgaagcattacgcgaggcattaagacctcgaaggagtgaaaccactcctccgaggcctcgggggctacacccggcgggtgcgctcgcgcgcacccaccggaacaaaatgcaaccgagaaaggctggtccccttgcaaaaaagtgcgacaaaagcctccaagcgagtgctaacactcccttcgaggctcgggggctactgtcggggaccaaaattaggggtaccctcaagtctcctaattctcagctg

SEQ ID NO: 16920 - DNA, 303 bp, Zea mays
  Peptide Sequence Number=SeqID_60295
atggcgacgcacatactatgtgacgacggcggctctcagccccgttatgcagcaagaggacatcagcaaggagtcaaccgctccaacagctgtctctacaccagacttcattgctcctcctacgtccacgacatcacaccagctgggtgccaaaatctctccggctgccacatcggcatgcaattgaaaatgagaattgatcttttttatgggcgaagtgttgaagatggctttggtgaaggaaatgtcttgttagcatcaagtaagtggcgacatcacaacccctacaagcttgtgccttaa

SEQ ID NO: 16921 - DNA, 1191 bp, Zea mays
  Peptide Sequence Number=SeqID_60296
atggcgagcggcgatccgaaatgcacagtacaaccaagtgctcagggcgctactacccagcggtttgtgcatagtagggagcccgggatcccgggacctggtcctaaggcgaatcccaaaccgagaagggctccacaaactcccctccagttgggaaggacccttcaaggtgacggaaattccagatgttattatcttttatctaacccacccatacagtctgccacccttgctggtatgatgacatccgaattgagtagccaggtccaggtcccagccgaggctacctcctggggccgggacaccaactctttcttaggtatgctggtatctagcctcgacacgacgagcctacatcccagggggccaagtaccaggagaggagttgataaaaccacacacagcaagaacaagcaccatacagataagagttgtttaattgaaagttcccaaaagtatcttacaaaaacaaaagttattgcattcgccttcaagcggagccctagcctcatttctacaggccggtcactcaccctaaacacggtggcagccactgggaacagcgacgctggcggcaacccggtgctgcagcttgccagcggcggtggcctccccaatacgtgcgccaaggcgaaggagccctcatcattggaggtggcgtcgaagccattaaagccaaagagatggaggcgcgaaagatggagctgcagctcagctcgccttccacctcatggagttggagctagaccagttcatggaggtgcaccacgggatgctggtgaagctcatgcgaaagatggagccgcagctcagcttgctttccacccccggaaggtcgctgcacaacacccttccgttcaaatgctggcggaagaagcgtcgcccccacagacatctcgcggagagaagtcgaaccgccgcttgcgccagtaccgcgtctcctcggggccgcaacagaagacagagaaggtgaattttcaaaaccaatgcagtggtatcgaggcaccccgcgcgtggcccagcaaaaccatcaagtgcgaaggccacgggtcagtcagccgcggggataggcgtggcagttggcgtgaccgaaggcggactggcagtgattacgtcagcaaacgcacgaaagcggcgcgccaatcgccagtcaagctttggccccacctgcaggctcgtatcctcccctaa

SEQ ID NO: 16922 - DNA, 459 bp, Zea mays
  Peptide Sequence Number=SeqID_60297
atgccccctgcaccaccacagggcatcatggtagctggaggagaccctgatagagacaacgacaacgccgaggccttcttagagcactattctatcattgagagggatactgccgagtactgctcgttgttcagcgaggtagctgacggcctcgacctgaaatactaccctcgctattcgaccggcagtgttggaggtgtgattgtcttgactgttggtgagggcaatcctaggctgaacaacatggtcaacctggtcgtcatgctcaacgttgagttggaccacacccttgacgagttgggcaaggttcgagcggaggttgtggaattgtgtgttgagcgcgcagcgcgccactatcaagatggtggttctcccgctcctgtcgggattcagcacccttaccgctcgccgcctcatggtcgctttgattacgacaccttgactgcaggacccagatag

SEQ ID NO: 16923 - DNA, 276 bp, Zea mays
  Peptide Sequence Number=SeqID_60298
atgggggtttggccggaatcgcgcggagcccacggcggcggatttgccgcggttctgttgggatccgaaggggacgctgaagctgacaaggtggggtccatgcgtcggtgtcagaaccgtccggttgtgcggaggagcggaggtcttacagacccccaggtcgatcccgtcatgaaagaagcgctggatgtaatgagcgtcgctaattccatcgtcgacgaagtcatcgacaggctgctgaatgaggccgcggagaaaattctgaaagaagattag

SEQ ID NO: 16924 - DNA, 228 bp, Zea mays
  Peptide Sequence Number=SeqID_60299
atgcaggagaaggatccaaagcggaatacctccccagcattgaaggtgaccggagtgttcaagatgatagccatggagtcgacgtggatcaacgccgcacccccatctggcgcgccagatgtcagtgtttatgatccgactgcaccacggggttccccacgtgatgcttttgagtcggacgatgtcgttgactgcgactcgatggggtaccccctcagcattatatag

SEQ ID NO: 16925 - DNA, 660 bp, Zea mays
  Peptide Sequence Number=SeqID_60300
atgggtgctactggggcattggagctggttgttgctgagctgctttctttgggcaatgattcgcccagtggccttgttccccatagtggaaacatgcatggtctcctccttgcactggagctgcttggttgttctctggttggttgctggggcgggaaggcgaggtgcctggttgttctaccgctggtacggatttcctccttgcgggttgttctgacggtactactgctgctactgaggaaactgcctctggaactgctcctgctggtgctgacgctgatgttggtgctgggtcggcatgggtggcgaggtaagactcccaccaagactgtgctgctccccttagcagacagggaccgatctacagaatgggcaaagacagagggatggcccctcatgaactctgcctcttgtctctgggcacctgtggcatctgaacttgcacctgaggttgaggtgggggttgctactgctccacctgctgcactgctgctaaagtctgaccaattggttggactgcttgggtttgcatcaggaacatctgttcaatggtcatcaggggtggcggtggcaactgctgttgagctgcctcctcctagggtgcctgctgctcctgctgagcacgtctccacctctgcgtctgttctcagacatatgtaa

SEQ ID NO: 16926 - DNA, 828 bp, Zea mays
  Peptide Sequence Number=SeqID_60301
atggaactgtccaagaaaggattcttacctatgtcacatggtatacaccttagtcagaagcagtgtgctgcgacggcttatgagcaggagcacatgagtaaggagattgtgattgattctacaacaaaagccgagtacattgtagcttctgaatctgcgaaggtagatgtttggataaagaagttcctcatcgagcttgcgaccgagggcgaggaagcggacagaccggttgggtctagtgctagggacataggcggccgacagatgggtccaagcgttgggcgtgcatgcgagaagcggtatccggagatttgggccatgcgatcgggatcgaacggtggagatcaacgccgggggggttacagctacgggcggtggcgctcctgctcctcgatggtgaagccgccagagctggggcgggtgtgggctacaagggttccgaggtcgccgggcttggccaggatcggcgaggagaacccgatgaacacactagtgggattctggccacgagaccagggccagagatgggagaacggcggaggtagagcttcgggcggatcggggttaactccggtgaggaatcccggccgcggggagaggcaatcgagtgcgatagggctcggtctagctctagtggcggtaggggagtgctatgggctaacaccggggcacgggacggggctgagttggctggacaccgtgcggggcacagcgagcaagcgcagtcgaactccggggagagagagcgggtgtgggctgtgctcaaaagggagctggggtgcatggccaggcgacgtggccaaggttctcggcgtgcgtgcgtcctag

SEQ ID NO: 16927 - DNA, 162 bp, Zea mays
  Peptide Sequence Number=SeqID_60302
atggttaaaaattttggcagcaaaacagtgcaaatagcaatgaatgctgtggtaacttcacacctactcgtctgtttatatagtgttgcaggtaaagaaagagaagaaggcgtcgaggcggatctccaggagttccaggacatcgacgagttcgaggattag

SEQ ID NO: 16928 - DNA, 306 bp, Zea mays
  Peptide Sequence Number=SeqID_60303
atgggcacaccggatatccggtgtgctaacggacactcactgttcagtgtcagtcattatctcatccttttttgcaaacttctcatgctcaaccaaattaacagcttctttggctatggagaaggtggataccttgatggctgtggagaaggtcacggagaggatgagtatggggtggagaaggtgttggagcccttaatgacgatgcttgtggcggtcatcttaactctggccatctggcagttgtcaaagctcaaggttccaaaggtcatagaaagcaggagtatgaaggagcttcagagttag

SEQ ID NO: 16929 - DNA, 99 bp, Zea mays
  Peptide Sequence Number=SeqID_60304
atgatgggcgacggtactgttgggggccttcttctccgccgaaggttctctaagcaaaaacaccttcggcaagatgacatgcaagcaggcgtgacatga

SEQ ID NO: 16930 - DNA, 2589 bp, Zea mays
  Peptide Sequence Number=SeqID_60305
atgaccgacgccgaagcggacacggaggccgtccgcgccgcggcctgggaggtgctgcgcctcgatcacgacggccacacccacgaggcgctcacccgcgcccgcgacctcatgctcgcgcatcaggacatggcgatcacgcaccgcctcctgggcgacctctcctacggtgccgccgcccgcgcgtgcctcgaagaaggcactcggaaggccgggttggccgcggcagcgccgcacctccacgtcgcccgcgaagcgtttgccgcggcgcgccgcctcgcccccgactgcatcgacattgccgacgcgctcggcgacgccttcgcggcctcctggatgttcagggaggccgagtgcgagtacaagcgcgcgcagcacaccccgcagcctaccgacccggcactccacaacgcggcctacggcatgtgcatgtccgggggccacgagcatgaccgcgacccggacttcatgagcgtgagggtggaggaggtcagggcgcgggcccgcgcctcctacagccgcatgaagacggagcagctccttccgatcgcgatccaccgggtgctcgaagccggcatgcagctcggcgcggcggaggggcgcaagcaggccaagggcatcgccgaggtgttccccgacctggggcgcgcgcagtacctcgcggcgtacatggacctggagttcgtgcgcagcctcgacgcggccatcgacaagcgcctgttcctgcgccgcaccctcgtcatcaccgagcgagtggcgcgggactaccccaaatcgcccgtgttcgcctccttccacgccaagctcctcttcgtcctgggtgagtacgacgcagccgagacggagtgccgccgcgcgctggaaatggtggagcccaatgacccgcaagacgactgcatcccggttgggtcaatcagcggggaaaaccgtggcgtcaggctggtttcggtggcctgcgagttccacgagctgatcaacaagatcgtgatgctggccagcgattactgggactccatgagcagtgagaggcagcgtcacagcttcctacaggtcaggctcgatgtgctgcagcatgagtacaacaaggttgatccgtcgcatgcgttcgctatgtctgatgtgcggagctttgtcaaggagcacgagtcttggaggttctggatttgccccctttgtcattgcaagaagttcatgtacactggtttgctattgtcacacatgtgcaccaggcacccaagggcagtcctgccacgacttcagtcagtattggatcagaaactcagtgatgaagcattggagagtgacgattctctgcatgcggtgacattttgtgaagattcagaacagcaagacgtgacgatttgcttcaacaagagcagcgaggtattcaaatggttgttctatgcaccttcaagtggagtacggccaaagccattccttgaaatacgacaaatgaagtgtgataaaggacgtatgctgcttgaaagcataaaggacaaaatgaagactctacctgcagatagatctagtactgagttcgccaaggctattcctgaaatcgaggagcagtggcagaattttctcaaatgttctgtgttggactacagagaagtcattctccaacttgcaagatcattcctatggagagatttaaagaaatgcatgactgaggatccagaacttgctgctaagccgattagtgccgctgatattgatgccatattcactaaagaagttgttaatcctgccagcaatgctgtagagtcttctcaaacagtgggggctcaaatggtcagtggaaattgtcaagaaagtgttcacgacgaaggggacagctctgacaaccatggaaagaatacagaatcgtcagatcagacaactgatatggtggaacgtgagactggccttgctgcaaaactggataagttggagaatggtccaaagatcagtgagagtaatccggaaggtaatgttcacgacaaatgggagagttctaacaaccacggaaagattacagaatcatcacatcaggcaatcggtatggtggaaagtgagactgaccttgctgcaaaatcagtaatgacattctgtaatgttcacgacgaagaggagagttgtgacaaccagggaaagaatacagaatcatcagatcaggccatttgtatggtggaaagtgagaccgaccttgctacaaaactgaataagttggagattgatccaaagatcagtgagagtaaccaggaaagtaatgttcacgacaatggggagagttctggcaaccagggaaagaatacaaaatcactagatcaggcaatcggtatggcggaaagtgagaccgaccttgcgggaaaactagataagttggggactgatccaaagatcagtgagagtaaccaggaaagtgagttacacgctgaacatgagagttctgattccccagtaagcaggagtgacgtggcactaagctcgaaggggacttctgaggccacggttaccgacacaaagttgccacggttacctaccaacacgatggagggagtgagtgactttgacacaaacctcttggcatatacgcttggctccatctag

SEQ ID NO: 16931 - DNA, 717 bp, Zea mays
  Peptide Sequence Number=SeqID_60306
atgaagctccctgtgttggggccttcggtcttggtcatcctgagtaaggggacgcatttctttggcagcttcgtcgatctttctctaaaagtcggcgagccaagtcatcttttccctcttcctttgcacctgttggtgaatagcctccaagtccccaatctcctgatccagctcctcctcctgagggcagcccctagcgctattgtcttcttcggcggcatggtgaaggtggatgcttgccgaaggtgttcgtttgagttcaccggagcgggggcgtccacacctaggcatcaccgtgcccccgcctgtctccccacgcgcggcttcctccccccacatgctgctttcaacgccggcgaccgcaccccaaattcctccccatgtgctgctttctccccaccaacggcgcccttccccaacggctgccgagatgcacacgctgcggctgccaccctcgccccaaatcctcgcccgccttcaacaccgacagccgcaccacaaattcctccccacgcgttgttttctccccaccaatggcgcccttccccaacggctgtgaacgccttccccaacggctgcgaacgcccttccccaatggctgctattgtgtctgctggactcccatcatcaagcttcacattaagaagagcaacggagcctatgaagaaaccctattttctgctcctgtttgccaactctaagcagatcgctcgctga

SEQ ID NO: 16932 - DNA, 180 bp, Zea mays
  Peptide Sequence Number=SeqID_60307
atgacaagaccaaagacccaatcgtacaaggataagggcgctaagcctactaatgatgagaacaaattctttgtggattcatttttcttggagctccaagctcctagacggctaggcgtcacctttgagtctccaaagcttgtggaagaccgcaataagcttgtattaccgctcttttga

SEQ ID NO: 16933 - DNA, 1056 bp, Zea mays
  Peptide Sequence Number=SeqID_60308
atggatatagtggtggaggaaggaaataccgatgttggcaatactgttgaaccatcgtatgaggttgtggctagaagtggttgttcagcacaattgtcaactaatgacactaatgaacatgaattggagagcgaggatagtaaggtcagtgttggtaatgctgcaaaacaatcacacgatgttgtgggagtaggcattgactgtattttcaatcatgtaaaagtgtcaactgaagccgatcttgggacacaaccggatgtgatacacctgacatctttggatgttccaaatgaatcaagtcaaataagttctgagcagaacaaacaagatgctttggacacacttattagaatatcacaacataagaaaccaaagaaattgaatgtagctcgagttgtctctgaagattataagtgcaccccagaagatgttcagcttattgaatacattaaaacattaccggggaaacaagttgtggtggacatcgacagcgcatggttaaatagaaatgatatggaatgtctttttcatggtgacatccaagtgtctggcgaagccctcagtgcatatatacactgtattaggaatgaagagcatttacttcatagagaaggtggaaagagcttcctaggcagcttcgttgccaggcaaggatgtcatccccaggtgcccaaaatcggatgcctggagacgcccacagtgcctgtcaaagctgcctgggagcaaagaaaacaggtcaatcaaggttgtttcgagatgcctgccaacattgattgttctgaagatttattccaaagccatgaagatctgcagaaccaatcaagaacttctaacttggacaatgaacattttccaagggatgcatcaaaccacgctaatgttgaagcaactggacctccatatgatctctcaaatgcagacgagcgcactatctcaggtcaagaaggggactacgaacaagcacctgctgtagcttctggctgccctttacgaaacgtgcaatacacagcaagaacagattcaaacatttcagaagcagcttgcagttgcgactga

SEQ ID NO: 16934 - DNA, 879 bp, Zea mays
  Peptide Sequence Number=SeqID_60309
atggcgctggcgcctttcggagcagagtcactggcggcgccgctgttgctgctgctgtgcgacgcctccaagcgccacaggttgcctctggccaccaccgagctctccacaccgcttgtcctgttgtcgtatgttgccaacaggtggcggaagacgtcgcccactactgcagcccaggcgtcccccggcgccgagcacggcggtggccacgccggagagcatagagctgctgcttcggcgcaggtggagggagcgggatggggcggaggtgttgaagcattgccatctatgctgcatcggaactattcattaatgcgagagttggataaaagtttgcatggtgtgcaactagaaaatgagcagcgctgtcaacaagaaatagaggacattaagcatggacttgaatctggaagtattacatatgacccagcaaaattgaaattttccgaagaagcaatggaggagcagaaacattgtgttagaattgctgacgagaaggtggctttagccactcagacttatgacttagtaatcacgatagatgttgagactggactgaaactcctcaaacaccgacgtagggaggcccttggtgaagatatcgacgaactgagaaatggtcgggacatgaagaacccgcacatccccgacggcgacacgctcacgaacgaagtggaggtcgagctggacatgcttcgtgtgctgatgctggacggggttagtggagaggtacatggcgctgacgttgtcacaatagacaagggtgctccgcgtcagcggactgtgcggctcctgaagcagctgacgaagccacgccgcctcagcgacgtcgttagccacaactcggcctcgacgctggagcgggagacaactggctga

SEQ ID NO: 16935 - DNA, 432 bp, Zea mays
  Peptide Sequence Number=SeqID_60310
atggtggtcatcgcctcagttaccgccacatcgttcgtcgtcctgcttcttttctctctcccctcatgcatccgcctccgcaccaccccattctcggcagagggcgtgggatcaggcgcctcatccccgtattcgtccaacaccagcttcaacaccgacccacgcagtggctattgcacgtccacgaggatgtttcacggtatgcgcacaccattgttttcaccgtcgtcggacgtcccattcatcttcccagcatttgtcctgttcttcctccccaacctactgcccctgcccacggtcgcagccacgagccgaccaatgctcttcgacgcgtacggggcgagtcaaccttacttctggcctttcttcgtgcatgccaccgaggaggaggacatggtggcgcctgccacacttagtttatcttggcgatga

SEQ ID NO: 16936 - DNA, 420 bp, Zea mays
  Peptide Sequence Number=SeqID_60311
atggagaggaacaagggcaacgcgctccatccggcaccaacctcatcaggctgtgggctgtggcttctcgtcatctacttccatctcgccgtgctccgcgccacggcccacacccggccattccccccacataagctgacagatataaagaactatccctccttcaatctgagaaaagaaggtgtgagagtggaagtattggaatggatagcagagctagatcctctggaagagctacaggaagcctggttacagatcaagggtatccctctccacgatgatgccattggaaagcttttcgacatggatcacaagctgtttttagtctcctttatggtagagatggacgagaaggaagttgattggctgattgagcagacctccaaaagtctaaatgggaggaattcaggaaaacagtga

SEQ ID NO: 16937 - DNA, 3648 bp, Zea mays
  Peptide Sequence Number=SeqID_60312
atggatcatacagatgttgtcgtccgcaagctgctcgatgcaatggcactgatggagaagcgcttgacagctgcgttggctggcagtcatggtgagcaaactgctcgcggatgcactgccttcttcgacgacggtcgcatcgatgaactcgatgtgtgggacgaggacgccacgagcgtcgacgcagatgactctgtctccgcctccatggtagatcgggaactgcgcttcgacgagttcaccttcaacgacaaatctgcgcagtatcacctctcgtccacccacgaggccctcttctccgacggcgccaaccccttcttcgacgaggcgtgctatgcactcacagtgttcgatcaaatgcccagcccatgcttcgatggagagcctattttcgacgaggtgcccaacgactccatcaccgagtacgaattgtcgttcatggaggttccccacttcgcgttacgctgcgagaagattcagcagcacgtcgacgttgctgctctccggggcgaggagcacctagtctccctcgagacaatgaagtcgaaggtcgaggcggggaacaccatggcggcgatggccgcggccgcctcgccactcccgtccctactcgctgtggggaatctgacgccgtcctccatcgcgcaaccgcatccgcaagctggggcggtggggtcgtccgagtcggagcttgcggcgccttcctccgtccacgacgactctgtcgcgctgatcgccgtctccggcagatgcgactacgcacgcgccaacgagatgaccagcgcccagatcgacgccatggcacaggacgagacagacgagattgccaacaccgtggagcagctgacgggcctgggcgtggagaaggtggtggcaactgcgctacccccgattggctgcacgccatggctatcgaggtccaacaactacggctcctgcagcaccctcgacaccctgtttcaggtggttgccgtgtacaaatttagggacccaaagacctccgaccaggagatgctcgagagcatctgcggcgtgctcatgcccttgaagctccaagctaaggtatccaggcccatggacatcatcatcaattcactctacaacaacaaggatatcttcgtgtgggagtccatatctaatgtttctgatgcgttggagaggattaggatcctttcccttactgataaggaggttctggttgaaggggacactgagaaacttgagattcagttggacaaagagaagaagatgctctccatgcaggataagagtattggtatgaccataattgctaatggcgttcaagtcagacctctgccatggccatctttctactattatgcagcttgggtgaggtggatgaaatcactggtcatggcgctctgctgggacttgtttggcgccggaacagagaccacattggtcacaactgaatgggccccgtcgcttctgctgaaccacccggaggccctgaagaaggcacaggcagagctcgacgcgttggtgggcagctcacatctgatcaccaccgatgacatgtgctacctcggctacctgcactgcatcatcaacgagaccctgcacatgtactcggccgccatgctgctcctgccgcacgagtcgatggtggactgcaaggtcgacggctacgacggtaccctctccaaggacgatggcctggtcgatggactcagaaaatgtgagcaatggaagtggcaggacatatttgcatcgaaagaaacaaaaacaagttcatggttccacgaattcattgggcgagcaaagaaaccagaaatgggatgccctccatttggctgtggttgtggttgggatgtcgtgccgtacaagcaaccatggccaccacccatgcaatttatgctacttggtgatggtgttcaaatcgtgcactgctgtagctatacattccacaccatgaaacggagcgcagccaacacgatcgtacaactggtgaggcatattcttcgtttcccgccgtccaatccaatcttgcctaaactttcttcctcgtggagtttttgctgcttcacgctggccaaatctgcgcgcaaagccggcggcggtgctcggtcgcgtcgggccgtcggggtcgaggcggccgcggcgaaggtgctgccgcggctgcggatcctcgccgtcctcgccgtggtagcgtggaccttcttcctctactacgtgcatttcaccgtgatcagcagcagcacggtggaggtgggcaacggggacgaagacggcggtgcggccgacccgtgccgggggcggtacgtctacatgcacgacctgccgccccgtttcaacgccgacatcgtccgcgactgccgcaagaccgaggaccactggggcgacatgtgcggcttcgtgagcaacgccggcctcgggcgccccctcgccgccgacgacgacggcgtcatcacgggcgaggccgggtggtacggcacgcaccagttcgcgctggacgccatcttccacaaccggatgaagcagtacgagtgcctgaccaaccactccgccgtggcgtccgccgtgttcgtgccgttctacgcgggcttcgacttcgcccgctaccactggggctacgacaacgccacccgggacgcggcgtcggcggacctgatggagtggctcatggcgcggccccagtggcggcgcaagtggggccacgaccacttcctcgtcgccgggaggacggggtgggacttccggaggagcagcaacgtgaacccggactggggcaccgacctgctcgacatgccggccggccggaacatgacggtgctggtgctggagtccacgctcaagtacaccagcgacttctccgtgccgtacccgacctacttccaccccaggtcggacgccgacgtgctccggtggcaggaccgggtgcgcgggcggcgccggacgtggctcatggcgttcgtgggcgcgccgcggccggacgtcccgatgagcatccggatccgggaccacgtcatcgcgcagtgcagggcgtcgagcgcctgcgccatgctggggtgcgcccgcaccctcggcagcacgcagtgccacacccccgccagcatcatgcggctgttccagaagtccgtcttctgcctgcagccgccgggcgactcgtgcacgcgccgctcggtgttcgactccatggtggcgggctgcatcccggtgttcttccacacggggtcggcgtacgagcagtacccgtggcatctcccccgggacgacggccacctcaggtactcggtcttcatcccggacgccgacgtgaggcggcgcaacgtgagcgtcgaggccgtgctccgggcgatccctccgcccacggtggagcggatgcgccaggaggtgatcaggctcatcccgactttgttgtacgccgaccccaggtccaagctggagactctgaaggacgcggtcgacgtcgctattgacgggatactcgacacgatggcggggaccaaggatactccgagccttttcgccgccattttctcaagctcgaaggggccattgtgggcgcggatcaggaacgatgaggacgacgacagcggcgggcgggtcaccgaggaccctccggaccttttcgcctccacggagtccagattcagattccggccggtgcaagccgatcatccatag

SEQ ID NO: 16938 - DNA, 138 bp, Zea mays
  Peptide Sequence Number=SeqID_60313
atggacgatggaggcctgcgcgcatgtgggctagcgaagcggcgggaactgaagttaacgtttagtctggagaaggatccatcgtcggtgtatcatgttcatgttcgccagcagccaggtgaggttgggtccaattaa

SEQ ID NO: 16939 - DNA, 675 bp, Zea mays
  Peptide Sequence Number=SeqID_60314
atggcggggtgcggggcggcggcggacgagaacccggcggcggaggagctcgcgagcggcgcggacgccagcttgaatgccttctttgaccacgcggggttggagctggcggcggcagccggaggcgggcagggggcggacgacgacgaggaggaggagctggagtggctctctaatatggacgcgttcccttcggtggagaccatgtcggcggaggtggaggctgcgccgtcggctgcgccgccggcgcgcctggagccgctgccccacgcgtcgcacgcggtggggccgaggaccaagggcttgcggcggcggcggcgggtgacggcgccgtggagcgtcccgccggtcctgccgccgcccgcgggcagcggcgcgccgcggcgccggtgcacgcactgcgcgtcggaggagacgccgcagtggcggcagggcccagcggggcccagcacgctgtgcaacgcgtgcggcgtgcgcttcaagtccgggcgcctgttccccgagtaccgccccatcctcagccccaccttctccccgctgctgcactccaactcgcaccgccgcgtcatggagatgcgccgccacgtggaggcggaggaaggccgccccccgcggtcggccgcgccggcgccagagttccgccgcggccaggcgcgtcgcgcgcgcgcgcgctaa

SEQ ID NO: 16940 - DNA, 486 bp, Zea mays
  Peptide Sequence Number=SeqID_60315
atgaacaaagatggagatttgcagaatggaattggggttcatatgggtcagattcaagtggtagaaatcgaggataccgcggaaaaagggagaaataggaagagcaaggccatggaggagaaatggaatgtagacgacagactcatgagtgtcttctgttggaatagtgaccccacagcagatccgctaggaacagagttctttcggaggaagaactccgatggacacgagatggaaaaggtttttcgcttgggcgccatctcaacctcgccggcgagcggagcggatgcagaatcgcaaaggggcagagaaggcctggatgcaggaaagcaggaactagggcacggagcgtggagtcgcgctacagtgcagtacatatggggttttcccgggccagatgccgtttccaaaaagcgcccagtcatcacccggcggttacttctaaaacgctggcgtgccatgtcagcacccgacggttacttctaa

SEQ ID NO: 16941 - DNA, 207 bp, Zea mays
  Peptide Sequence Number=SeqID_60316
atggggaccctccctggcgggctctttgccgagtgtcccaagtggcactcggcaaagaaggcggctttgccgagtgctgccaggaggacactcggcaaagatatcttcgttgccgagtgcttcgccgagtgcttccggcactcggcgaagaggttgattccggtagtggttgggggtagtgtggatgcgactgatgcactcctctaa

SEQ ID NO: 16942 - DNA, 207 bp, Zea mays
  Peptide Sequence Number=SeqID_60317
atggcggattttgatacccatgggtattttattgggtcatttgttatgcccatcgggtatggtgggcttgatgacaacagtaaccactggcctattgaccgcaagatcttaactaaacctaattttgatttggttagctttgtcagacttcggcacaatggcactgaacaaagccagttctcagctggatcctatgctttgaggtga

SEQ ID NO: 16943 - DNA, 57 bp, Zea mays
  Peptide Sequence Number=SeqID_60318
atggcgatgggcctgactccttccggtataaccgttaagaaaaaggagatcgggtaa

SEQ ID NO: 16944 - DNA, 492 bp, Zea mays
  Peptide Sequence Number=SeqID_60319
atgggagcacgcggggtgccatcattacttgtttactgggacgagccagatgggacgctggccgagccctggggtcgggcgaggcggagaccgtcttccaaggtcgaggttgaggccgagccctggggtcgggcgaggcggagaccgtcttccgaggtcgaggttaaggccgagccttggggtcgggcgaggcggagaccaccttccgagaccaaggcgggggccgagctccggggtcgggcgaggcggagcttcctatggcgcctgaggttggactcggctgctgtcagcctcaccctggcgggtggcacagcagtcggagcagggcaggcgacgctgttttcctgtcaggtgatccttgcatcgaatgctcctgcgatacagtcggttggcgaggcgatctggccaaggttgcttcactgcgaagcctgcccgagctgggcctcgggcgagtcgaagcttgtgctgatggtgattaccagccgagtttag

SEQ ID NO: 16945 - DNA, 594 bp, Zea mays
  Peptide Sequence Number=SeqID_60320
atgcaggtggcatgcaactgcaccacggagacgcaccccttcaacttcgacgcatccagcgtggaggcccaggcccacacgtcatgctcacgtcccctcctggagcagcaggggagccctctcccacggcgtgaagacgacgcacccgtgttccgtccctcgaacggctcgcacaacggctgccccgcgaaccacccgtcccgtcgcattaacttcgcggcaggccaggtgacacctttggcagggaccgggaaaggggatactccggaagggatccttctccatgaaggaagcgggccccgagccctcctactgatcagggttcgaagtctagcccctcggaagggccactcgggctccgcgcccactactgatcaggggttcgaaggctggccccccgaagggttcgacagccgccccagaacgcgcagagcgagggatgactctgggtacgtccgatacatggccgagactcgggctacgctcccaagaggctcgggggctgctctcgcaaacccagctccgcccaaaccgttgacagcgtcaacataccagcccgagaactcgaaacctgaccatgcacccgagctatga

SEQ ID NO: 16946 - DNA, 291 bp, Zea mays
  Peptide Sequence Number=SeqID_60321
atggccatcctccacctgctccagctgccggggctcggggataacccatgccacctccgtcgcctcctctcacccgacaacaaagctaaactgaccctcgagaatgcttacagctctgagcttcaactcatgcacagcccaaacagtggaaccagcaattgggagcacaacatgtggggcgcggcaccagaatcagcaagaactgtggtgacgaggcaggtatgggagcgggtgtgtgacatcgtcaagtttgggggcctagcgccgtatggaggagtccatggaaaatga

SEQ ID NO: 16947 - DNA, 1512 bp, Zea mays
  Peptide Sequence Number=SeqID_60322
atgacgctagttggagacgggcggatcccaggaggacaggtcttgcacggacggagtgatgctgtgcggacgacaaagggtgaacgacgcagaacacaggcgtccaggcggatccgacgcgacaggatccacgcggacggacccggcgtgcagatggcggacgatggcgcggatccagggcagaagacgacgacgtcgaatggtctaggcggatccggcgcggaaaggcgcatgacgtcgcggatccagcgaaagggtagtatttgtttcaaggaatcagaacataatgtaattgaaaagtttctggttaaaaatgggaacaagaggctacttcttgtactgtacattatagtttgcttaccattgtataggctagtggaaccttcccataagaagatgcttgttgaagccttgcaagcacataatgaagtggttgctatgactggagatggtgtcaatgatgcacctgctctaaagaaagcggatataggaatagcaatgggatcaggaactgcagttgctaagagtgcttcagacatggttttggcggatgacaactttgccacgattgttgcagctgttgcggagggaagggccatatataataacaccaagcagtttatccgatacatgatctcatcaaatattggggaggtggtttgtatttttgtggcggcagtgcttgggatgcctgacacacttatacctgtccagctactctgggtgaaccttgttactgatggattacctgcaactgcaattggtttcaataagcctgatggcaacatcatgtcagtcaagcctcgaaaggcatgtgatttcaagaacattgagcgcagtaagaagatatactggaatggcagagagcacagccttgacaagggtgattctcctagacagattcaaaaggttaatgaagctgtggttagtggatggctctttttccgttatttggtcattggagcttatgttggtcttgctactatagcgggttttgtttggtggttcgtttattctgataatggccctaaattaccatattctgaattgtgtgtatttactggaactattgttccatggcctgctgtcaactttgattcatgttctacaaggcagacttcatattcttgcagtatatttgaggatcgtcatccatcaactgtttcaatgactgtgcttgttgtcgttgagatgtttaatgccttgaataacctaagtgaaaaccaatctctgcttgtcattcatccatggagtaacctgtggcttgttgggtctattattctgaccatgcttcttcatgtagcagtcctgtacattgaaccactatcagcccttttctctgtctctccattgtcgtgggttgagtggaaaattgttctttatctatccttccctgtaattttgattgatgaggttttgaaattcttctcaaggagaagcccacgaggtcgaagattccctttaaggttgtggagacgtgagatacttccaaaagagtcgagagacaattga

SEQ ID NO: 16948 - DNA, 51 bp, Zea mays
  Peptide Sequence Number=SeqID_60323
atggccccgcctcgcccaagccagccctcgaacaagattcatagtttataa

SEQ ID NO: 16949 - DNA, 740 bp, Zea mays
  Peptide Sequence Number=SeqID_60324
gccaaaccaagaccccaaggtcacaacatgccgtgccagacagcctcgtgagttcagtcacgcgcaaccaacgagaacgagacgggcatcggtcagaactcagagccccagctactggagatcggaggttcggattcggagtgtaccacttccaggtgccacactgccacccacctcgctcccgagagcagagctacgacgtgcaagacagcgagaagcaacccgtacgtacgtttgatccctcgaggccagcagaccgtaccatggcggcggcggtgacggcgagcagggggacgcgcgcgctggccatcttagggcggtgcgtgcgcgcgccgttccgcgccctggtccgcgcgcgggacctgtacgtgagccggatggcggcctgcgcggggggcggcggcggccggggaggcctggcccccgtggggctggtggcgatgccgcggtgccagagccacgggttctaccgctcggcggcgggcggtggcaccgacgaggacgtgcgggagctcatcagggcggcctcccgtgccggcccgcccagggcccccgccggcgtcgggccgcggagccagagcgtggccatcggccggatcgacgaggaccggccgtgcgagttcgggctgggcgaggaggagaaggcgcaggcgctgatggggcccaggagcaagagctgcgccgtggggccgtcgtccaggacggcggctcgtagggctggcgtcgccgtcgcggcttag

SEQ ID NO: 16950 - DNA, 330 bp, Zea mays
  Peptide Sequence Number=SeqID_60325
atggcggcccggcgtcccgccaagacgcgagcgcccccgcccctcaccttggcgtggccggacatggcggcgcggcgtgccccaccccgtccgcgcgcgctcgcccgcccggcgttccgccctgcccgcgcggcttcgaccccgtcccggccatggcggcccgccgtggtgcatggcgttctcgccccgcccggcgagccccctgccccgactccggcgccctgcgcgcgcgctcgtagcgccccgatcccggccatggcagcccggcctcgccagctatggcgcgtggccatggcgcgcccgccccggcgtgtcctgctcgcgtcgtga

SEQ ID NO: 16951 - DNA, 225 bp, Zea mays
  Peptide Sequence Number=SeqID_60326
atggcccaagggcacatttccctttcaaccaagaaggagcataaactcctggcctctctgcaagagtgcatcgaagaggcggtccccgccgccttcgaccatcctgacgaactccaagttgtaggaggtgggagatggctgcgagccactaggacggcgatcaccgccaaggcatcgcgtagtcaaggcgggaaggcaccagagctgctgttaaacccatcgtag

SEQ ID NO: 16952 - DNA, 1638 bp, Zea mays
  Peptide Sequence Number=SeqID_60327
atgatcaagtgggggctcagcagcggcacgcccgcggattcctactacgaggtccggtcagattgcacggacggtgtgcccaagagcaagttcaagattaaggctggcaaaacattaagtgctcggaaatggcaggctgcatttagtcctgatggctgtcttgatattgcctcagtcctaagcaggatacagagaggaggtgtccatccaacagtcagaggagaggtttgggaattcttacttggctgttttgatcccagaagtacctttgatgaaagggaagagatcaggcaaatacggaggatacagtatgccagatggaaggaagattgtcgacagatggattctcatgttggtagtggtaaagttatcacagcaccacttatcactgaggatggcagacctattaaggatcctctggttttacttgaggctacttctgacacgaacacttcaggagatgctccaactaccagcataaatggaaatgaagttgatgaatctgcagaacgcattaccgataagcaaattatcgagtggaagctgacattacatcaaattgggcttgacgtcctacggactgatcgcaccatggtattctatgagaacaaagaaaacctttccaaattatgggatattctagccgtgtatgcatggattgacaaagatgttggttactgccaaggaatgagtgatttgtgctcaccaatgatagttctactaaacgatgaagcagatgcattttggtgctttgagaaattgatgcgtagattgcgaggaaatttcagatgcacagatcaatctgtgggagttgccaaccaacttcaacaccttgcgtctattattcaggttcttgaccccaagctacatgaccacctagaaactcttggtggaggtgactacctttttgcgttccgtatgttcatggtgctttttaggcgtgaagtatcatttggagactccttatacctctgggagatgatgtgggctctggaatacgaccctgacattttcttcgcagcgtgtgaagaacaaggtgcagtaaataaaaacaaagtttctaaatccaaactgaaaggactgcgccattttggcaagtgggataataaggataaggacaaggataaggaagatgctaaaaatggggctgaggatggtgaagacggtcctgttccaatttcagttttcatggttgcaagtgtccttaaggaaaagagagaaaagctgttacaagaagctagaggactggacgatcttatcaggatattgaacgatgtaaatgggaacttagatgccaagaaagcttgtgctggagcattgaaacttcacaagaaatacctgaaaaagaggacaaaatctctgcagcagtcttttgctgtagtggggcagcaacacgcactgcaacagtgcagtgcacaacagcagcagtgcagtctttttgactgcactatggcagcagcaggcaagcagtacagtgtaacaggcagtgcagtgcacagtagcaacagtgcagtctttttgactgcgctgtggcagcagcagacaggcagttcagtgcagtctgttgactgcactttatcatctaaaggacagcacatatgtgctgcagtgtgtggtgtagtgtgtagtgtattctag

SEQ ID NO: 16953 - DNA, 339 bp, Zea mays
  Peptide Sequence Number=SeqID_60328
atgaagaacacacagtttggaaaagtttttgtacctgcatcaattagaggcatgttgaggaatgagtgtgctgtagagaacagcaggcgaacaggaaatcttcaagcccacggattgaagacgggacacaacacggtgaggctcaccactgttgctctcgtcgacgtggaccgccaaacttctcatgttgctccctatccttggcgcgagggctcactggaagaagcgcatggcgtggggaggagatcttggggatggagcggagtatgtgagaagagcatggggcacggactgctaccagggtcgccgtcgtttacagagaaggcagaagggtcctga

SEQ ID NO: 16954 - DNA, 306 bp, Zea mays
  Peptide Sequence Number=SeqID_60329
atgggatcttcttctttctcgccttccctttcagcggccagtttctccctgtgcagcttctctgctgcctgcatcgctgcacgttgcaaggacaaagggatacaaacgtttatttcggcagatcagaagaagttacaactgttttggcttaggttacctctgaagaagtttgaaccaaaggataatgatcttgataaacacttgatatttggaagtatccatagttttagtttatcgaaagatttgctactttttaccaggagcacactgccaccaataaactacagtgatttggggagcttgtag

SEQ ID NO: 16955 - DNA, 651 bp, Zea mays
  Peptide Sequence Number=SeqID_60330
atgggcaccgccaaggcgaagcggaggcccgtcctgatctgctgcggggtgctggtggccgcgatcgccgtcctggccgtcgtgttcgtggcgctctacttcaccgtgttccggccgcggtcgcccaaggtggtggcgacggcggtggtagcggacctgctccccaagggcgacggcggcggcgggcaggacctgaacctcaccgtgcacgtggacgtgaccgtgaacaaccccaactacgcggcgttccggtacggcgacgtggtgacgctggtgcggtaccacgggagcgacgtgggcatgtcggtggtgccggcgggggagatcggcgcgcgcgagacgctgaccgtcgccgccgcggtcgaggtggacacgctcaaggtggccgccaccccgtacttctacgtggagttccccacgggcaagctgccgttcgagacggccacggcggtggccggcgaggccgtggtgctgggcgcgttcaagatcagcgccagctcgcaggtggcgtgccaggtcaccgtgcacctgctgcctcccaacgccacgtcggagtgcacctccacggtccatataggccggccatacctctacccacaaaatctttcaccatctgcacaacttgctctgtcgttctctgttgacccttga

SEQ ID NO: 16956 - DNA, 663 bp, Zea mays
  Peptide Sequence Number=SeqID_60331
atgagtgatgataacaataacaagggcagcagcaaggcgaggcggagggcgcaccgcctggcgtgctgcgtggcgctgggcgtgctggtgatcctgggcgcgctggcgctggccttctacctgcggtaccgtccgcggccgccgcgcgtggtggcgacgccggtggacgtgggcatcgaggagttccggctgctgccgcacccggcgctgaagctgtcggtgggcgtgcacgtggtggtgagcaacccgagcaacgcgccgttccggtacggcgcggcgctgagcgcggtgacgtaccacggcgcgccggtcggggagacgctggtgccggcgggcgaggtcgggggcggggccacggcgcgggtcgagccggccacggtggtggacggggtgaaggtggccgagagcccccacttcgcgtcggacgccgtcgcgggcgtgctgccgttcgtggccgtggcgagggtggtgggcaaggcgctcgtgctgcgcgccttcgaggtgcccgtctccgtcgaggtggtgtgcctcgtccggatatacgtgttccacggggagagcagctcgcggtgcgtggccaccgtccgcacggggtccggcgctggctctggctctggcgcggggttcccagagggtgcagggcgtgcgcaggagcatgactag

SEQ ID NO: 16957 - DNA, 435 bp, Zea mays
  Peptide Sequence Number=SeqID_60332
atggcgccccgcgtgctccgtgacgacgacgactctcagccccttacggaagcaaggagacggctctcgtacgagaaggttggccgcgcgggggcgagaacgagacaggcgctctcttgggtccgctcgcttccctcacccgcgtggacgcttgtaaccccctactgcaagcgcacccgacctaggcgcgggacgaacacgaaggccgcgggatttccacctctctcacgcccgtctctggccacctcgcttccccccttcgcgctcgcccacgcgctcgacccatctgggctggggcacgcggcacattcactcgtcggcttagggaccccccggtctcgaaacgccgacagttggcgcgccagcgcctctacggggggcgcgtcgggcgtcgacctcgcgtttgagacgaaggcaagcgccgtccacccgtga

SEQ ID NO: 16958 - DNA, 1893 bp, Zea mays
  Peptide Sequence Number=SeqID_60333
atgatgaggatcctcgtcgccccttcaggcaggtcaagggcaagacagtttagttggagcagcaggaaggccgcaagaagcggcgtacggacacagcagcacgtgcagcggcagcagcagcagcagccgctgcgcaggccgagcttggagatcagccgcagactccgtcagatcagattgcataccgtgttcgtcgtctcgcctcccgacctcgctcctccactcactccactgcttccactccaccacccactccacctgctcccgtcacccctgttgcgccatccaccaccacagccatacccgctacctccactacgccagcttccactgctcctcctcccgctcccgcttcagctcctcctgtccctccacctcgattccgggagcgcaatgagactgaggttcgaccccttgctgcggatcctagactatttgaccttcagcgtgctacagcggcacggagctcagatgtctgcccagatagctctgcgagtgcaccggcttttggatcttccagcctttctgcttgcagccggtgctgactctgaggcgcacctcacatatctgcctggccttctgacccttttgactaccagcgaccgattcgccagctctttggatttcccgagtcgacgactcgacttcacagcctctgctacggcacctctgaccctccttgacgccctcacggcggtgtggctccgggtacagctcccgtcgcggctctgttccgcccgcccttctctgatgggtcgcgacgttcaccagcagatttttactacagtagccaagtacttatttgagcttatcagacggactcttctaccgaggatgggatacagggaggctaccacacatatccagctctggctccttggtgccctggtctctcactctgagtttgacatcgtggatttccttatttgtgagatcgaggacatcgttttggatgggattcgtgctcgtcgacagttgtcatatgctcactacttgtgccacatttttgtgcagctgattcagtctcctcggtttcagggcacacttgaggcctcacgcctcgtttttggatcctaccgtcctgcgcctgaggctcctgtgccagcttctgctcctgtttttgactctcaggctgaggacgctgctcttcgtcagttcgacactcaagatacagcagctgatgatgatgatgatgatgatgattttggggttcctcctccgcctccgcctcctatgcctcctcgctcccatgatcatgaggctgggagttctagtgttgcccctgctgcccctccggctatggaccctgctcttgcttcgattctccagtctatcactcagcagcaggctcacctgtcagccaagcaggcccggttatccgagaggatgctctcaatgtttcagaacatgcaggacaggcaggattcgcttcagcagcagcttctccaggatcgggctgagagcagggcattcatggcgcttatgctacagcagtctggtatctcagttcctccggttcagtctgctccatctcctccggttcacgctcctgttgtgccagcgattcagtcaggaccccctgttcccactgttggtccttctccgctccggccggtcactctggcgttcacgtccccggttctcagctctatctgccctcagccgcaagtgccaccagcatctgctgttaccactactgatgtggcagtatctgtgacctcttctgttccggcagctcctgcagcgcggcctcagtccgagtcagtaccagctccagcttctacagcagatcctggatccgagactgactctgaccccccgccggcgttcgctctgctgcctcgaccgcgaccggatgcgcccccgccacctcctcccgcttctgatgtttag

SEQ ID NO: 16959 - DNA, 1467 bp, Zea mays
  Peptide Sequence Number=SeqID_60334
atgtacatgcagaaaaacgacaaagaagaatcatcttccaaaagaaaggatttggctctcaaagcaaatcatgacagaaaaggaaaagcaaaaatacaaattgaggaagaatcctcaagtgatgatgaccttgatgcaaacattgccttgatggtaaggaagaccaccaagatgttgaagaagctaaatagagaaggcatcaaatttgattcaagaaagaagaaattcttttccaacaaaagaaagcccatttctgagatggactgctacaattgtggtgagctcggtcatcttgctcatcaatgtaacaagcccaagaagaataagttcaagggcaagaaagaagatgacagcgatgatgaaaagaaggaaaagaaattcttcaagaggaaggatgggaagcaaaagaggttccacaagaagaagaatggaaaggcatatattgttggtgactggctcaccgacattgaatcatcaagtggatcttcttcaagtgaagaagagaatgatgaaaaagttgccgccatcgccggggacttctcttcaccaccaccatcgccatcatcgacttctcacctatgcctcatggctaggggtgaacggaaggtacaaaatgatattaatattgctgatgatagtgatagtgatagtgatgaggaatttgcttcaccttcatatgatgagctagctgacttgcttaaagaatatactcaaatcattagaaagtcaaaagctaaatgtgataggttgaaaaatgaaaatgaatctttaaatgccaaatatgacatagttataaaggctagtgatgaaataaaagaagaaaataaaactatgtcatcaactgtaaatgagctcacaaactccctaaaagatgctaaggaagaatgtgacaaattaaatgaagctaatagggagttgcaaaatagactagctattaaccctgttgttaagattgatgtagcaaccttgtgtgatgatttgagtcaagaagagcaaactagtctacatgctgaattgactgaaaaagttgaagtcctgactttagacaaccaaaaattgaagaattacttgactaatgcaactactagaggaaaggttgctattgagaacaatgatttcaacaatgagttggcagtggataatcaaaggcttaaaaatgaggtcaagaaactaaaaagtgaaaatgaacatcttgcaacaagtgtgcaaaagttcaacaagggtcaatacctccaaaatgagctgcttatgaacactgtcatgaaaaacaacaagagtggtattggatacaatgcttttgtgcaaaagaaagctaccactcaatacaagccaaagcagactcacaggcctatcaaatgctttgagtgtggaaatgaaggtcattttgcccacaactgcaaagccaaaccaccaactcccttgcctaagcactcaagaccattgctttcaatgctcattatgttctaa

SEQ ID NO: 16960 - DNA, 462 bp, Zea mays
  Peptide Sequence Number=SeqID_60335
atgccgatgacaatcgcaagtgtcccccaagtactccctcggaggattttggtgactcagagtattcggaggaagcttcctccgagtatgatcgatcgcctgctcctgcatcgaacgtggcatcgtccgaggactcggatgactccatgggattgtccactacggcccgagcataatggcgctccattgagcgtgccaggctcgagcggcggtgagggtgatggcagcgaggacgacggcagcagcagcaacgacgacggcaagggcggtggcggcagcgatgacgaaggtggcaacggagagggcgatggcgacaacaaaggcgacggcaagggcaacagtggtgacggcaagggcgatggtgacggcggtgacggcaagggcgacgacgactgcgacggtaagggcgacggcgaccgcaaaggcgacgacaaggccgatggcataatgctgttggtttag

SEQ ID NO: 16961 - DNA, 714 bp, Zea mays
  Peptide Sequence Number=SeqID_60336
atggcactaacggtctcgtcggcggaggcaaccgcttctggagggggaagcctcacctatggcgaccaccacctcagcaccgacgacagtggccacctgcgcgccaacgccacaccggcgaatggcggctgccccagtgcgcaccagcaggtcctcactcccgtcctcggcacaggagcgagggcgagactgtcccagagcacgaacaccgccctcgcggcgtacgacgtgttgtgcgaccccctggtgcagccgacggcgcgggaaggacctggacgtggccggcccgcgcacggcgcgaccgacacccgtgcggcggacgggcagccatgcttcgccccagcggtaggaggcggcaccgaaagcagcaccagagccacccaggccggggagccagacacgcggcagctgacagcgccacggacggcgaacgccctcctcccccgaacactgagggaaggagcgggccgctgcccacgcggaggcgggacccaactcggcacaccctcctccccagcacggatgatgaacatccttgaagctaagggtagggggaggccacggcccggctcgctcttccccaccacgaggcctacagtcatcatcctggtggacctgggggatatctgtcccccacaagcccccgatctttgggttgattttgagataatcggcccaaagatcctaggtccagcttgcggtcttcgtttatga

SEQ ID NO: 16962 - DNA, 345 bp, Zea mays
  Peptide Sequence Number=SeqID_60337
atgatgagtagcgcctccggtgtcgaggggaacgaggaccgaccgaccaccatagctttgttgacaatcttggtaggacaagacgccgcgcatgccccacttgaccgaatcctcactgaaaggacgcgtggtgatcgaggcgtagaggaccccgagtcgaaacgcagtggcccccaattcttgaatgcggccggagacgagcaccattcggggagtatgggtgaacacttcccccggatgcaaaaccccaaggtggtcgaatatgaggtcgaaggtcgtggacaaattggagcgctcagcgctaaggactcggaggcactcctccgcacgcgcaagctcctctag

SEQ ID NO: 16963 - DNA, 219 bp, Zea mays
  Peptide Sequence Number=SeqID_60338
atgacgaatatgatgagcattcccatcgggttggactccacagagaaacacaaaggcatagcaagtcagatcgagattgagaatccaaacctggtgaaaactaagaatgtaaaggtcaaggacattgatactgcttattggcttattgctcttctcaagttcatggaaccatatcccagaggcgttgcaggagcaatttatcacgaatacgaccagtga

SEQ ID NO: 16964 - DNA, 384 bp, Zea mays
  Peptide Sequence Number=SeqID_60339
atgcagatgataaatatatgtagggaaagcctcatatataccttccaagttcgggtgcaagaaccacctactgggttgctcggtggtgcagttggcggcatggaggacaactacctggtaattttcatggcatgggaaaaagatacagatatcgattttgctcaagatgcaattgatgaatataagctgtttggtagtctagattatatagatgtagattataatttacttattgtaattatcacttgtcttgcagacaggcaattgaaaatgagaattgatcttttttatgggcgaagtgttgaagatggctttggtgaaggaaatgtcttgttagcatcaagtaagtggcgacatcacaacccctacaagcttgtgccttaa

SEQ ID NO: 16965 - DNA, 159 bp, Zea mays
  Peptide Sequence Number=SeqID_60340
atggggaagcctgtcccatcactcctcatgctcctcctcagccgagaggacagcgccgcgtgcgccgcaccgactgttgagccactcgacagagtgaggctgacagcagtcaagtccggccctaggcaccatgggaaactccgcttcgcccgaccctag

SEQ ID NO: 16966 - DNA, 429 bp, Zea mays
  Peptide Sequence Number=SeqID_60341
atgggggggcctgcagagcaacagaagaccgacgaacagcgcgccgtcgcccgctccggcagcggcaacgacgacgacttctgctccggggggccgaacagcggcagcgatgacctcagggcggatgccgctgccaggaggcccccgcccgtgcccaaactcgtgaggcaaggacgggcagaaggccatagagttggaggcgggcaggagcagcggccccgtcgtcagccaagctcacgtcccatccgggggcagcaagagaaccctctctcacggcgtgaagacaacgcgcccatgctccgtttctcgaacggctcgcgcacgcgcaacggccgccccgccaaccactcgccccgtcgcattaactccgcggcgggacaggcggcgcctctggcgggagaagcgggcgacgcttcaccttcgccataa

SEQ ID NO: 16967 - DNA, 216 bp, Zea mays
  Peptide Sequence Number=SeqID_60342
atggagtacaatggatcaagcagtctcattagctgcgagaagcagacgattcgaatcgagtttttatccttgcaagtgaccgcacttgtacccaccataaccggaatgggagaccacgtctcaggtcgcgtgaggagggcaatctgcgggcaggttcactcaggtactaggcttaccgatttaccatatttctcggatttaataacattatgctaa

SEQ ID NO: 16968 - DNA, 363 bp, Zea mays
  Peptide Sequence Number=SeqID_60343
atggcgcagtggcttacccggtctatgctcgccggcggtcggagggagtccggcgaccgtggactggcctctccggcgaagcagacttcgattcctcgctcggggagcttcaccgaggtgtgctcagtcttctccgagggtcggacggggttgggaaaggctgggttggctggtctacggcggcaggggctcaggtggccgcggacacgccgtgcacgagcaactgacggtgagtttgagctccggtgtgccctagccatggtaacacctgaggtgttacacgatcttcggatgaaggtcatgaaggacgcaccttcatcatctcagtatgtgttaatgaaggacgaagcatatgaaacatga

SEQ ID NO: 16969 - DNA, 1014 bp, Zea mays
  Peptide Sequence Number=SeqID_60344
atggcctaccgccggaagcctcagccccatccccagccccagcccacgccctcgttggagcaccactacccgtcgtccgtgggccccgcctcacccgactccctcgccgcgcaggccatgcgcgcctccgccgcacaccgcgatgcctcctccctcacctccgcctactccgcctcagcctcgctggcggcctctcgccggagccaccacgagccctccgtgtccacaccgtccctggatagttcaggctatgaatacacgtccatgaagaacctcaacgaggccaagtatggattctggggcacacttgcgcggaaggcaaagtcatttcttgacgaggactgctccccggagcagtacaaatcgccaagagatgatgtgcatgttggtgtccagcttccacattcaaaacaattgccaggagagacgtggaaacctgagacacctccatctcagaagagatctgagtctataacttcctcccttacctatattggaggcacaataaaaaatgcacttgaagaaggtcggaccattgtagagaataaaacggctgacattattcaggagacgcgtaaactgaacataagaagaaaaggagctggtctaaatacacaaggagaagctggccacaaaattgctcaaagacaccttcctcaaaatccacttgaccatgaaactcagttgaaggcatctcgcgacgttgcaaatgccatggctgcaaaagcaaagttgctattgcgggagctgaaaactgtgaaggcagatttagcttttgcaaaggaacgatgtgctcagcttgaagaagagaataaaatgttgcgtgagagttatgacaagggtgataatccagaagatgatgatctgctaagtcgcagtacacagtcggcagtcctgtgccagtggcatcccgttagctctgttataactcctttcagagctcctgctgggcctatctttcctccagttatgtgctacagatatgttatggccttcagcttgccacctgcctaa

SEQ ID NO: 16970 - DNA, 612 bp, Zea mays
  Peptide Sequence Number=SeqID_60345
atgtctgaaagtgacgagcacggctcgctcctagacaagatcaacgagaagatccacgagtacaagcactcatcgtcgtcttcctcgtcagactcagatgatgacaagaagtccaaaaagtctaagaagaagaagaagctctttgggaggaaacatccattgcatcacgttcttggaggaggcaaagccgccgatcttgtgctgtggaggaacaaacaggcatccgggagcatcttggcaggggtgactgtgatctggctgctgtttgagggcatcggctaccacctcctcaccttcctctgccacgcactgattgtgtttctcaccgtctggttcgtctggtctaatgttgcgtcctttgtcaacaggtctcctccaaagtttccagaggtgattctatctgaagcccaatgcctgaaggtagctcatattgcaaggaaagaaatcaacgaggctttctatacattgcgcaatgtcgcttctggaaaagatttgaaaacgtatctgatgtcaattgcagtgctttggttcatttcgataattggaagctgcttcagcttcttgactgtgtcttacactagtaaatttcttgtctacatcatgatacattaa

SEQ ID NO: 16971 - DNA, 325 bp, Zea mays
  Peptide Sequence Number=SeqID_60346
atggaaaaagagccacttgacatggttgagagctcagttcgagtcatcgagacacatgttgacatcattcgcagtctagtgactgatggggttgtggatactagtgaaccggaatcagtgtacacacttaagaccactttgtttcaaattggagataatggcatcggcggaatgcctgaatcggcggaccccaagaagagattaagtcctgtagtctaccacctcccgttatttgtgggcttcaccgatggctggaaacatttggtgatagcaaacgaccttcgggttgaagacgtctgcgagcttgttaaggggccagacgatg

SEQ ID NO: 16972 - DNA, 234 bp, Zea mays
  Peptide Sequence Number=SeqID_60347
atggagacggcgacgctcgggctcggagatggggacggggacggcggagttgggctcggggacgacggagttgggctcggggacggcgcggcctggcgggcgctcagctcggagacggtggcgcttgggctcgggctcggcgacggcgtggcgggcgctcacagctcggagacggggacgggaacggcggcgcagcagcctagcggcgtagtatcagctccgggcgaaacctaa

SEQ ID NO: 16973 - DNA, 675 bp, Zea mays
  Peptide Sequence Number=SeqID_60348
atggccgtccggccggcagagagggtggcggcgaggctctcttcttcgcgttggtggcgcgctccgcagcaggccggcaagccatccctcgcgcggctgcgtagagttgtttggatggctactgcggctgtggcggcgccagctggtgcccgcgcaggtgcaggggacggcggctggggtcgctggcccgtggcccaggcggtcgactccggtgctcgggggccagatctagaccctgtcgaccggatctgcctcaacagctggcagttggtgcggttgcggtggcggttgcggtggcggttgcggtggcggcagttggttggggcttgtgcagggttttcttgggtgaaagccttggcgacagcggcgcccctaggcgtcgcttcccctgttgagggtgtcgtgcttcccagcactgtcttacatgggcgaaagccccgtccattttggaccggcgacggtggcgtcctcgacgtcactctcttcctgaaggcgtcgctactgctggcgggagcaggacagaggttcaaagttttggaagtctcgctgccttgtgctgcctatcttggagagtcggagctgctcgtcacttatgttgagctcggcaacgatgactcaggatgtgtattgtgtggggggttgctgttgtctgggttgtttatatgccctgtgtag

SEQ ID NO: 16974 - DNA, 558 bp, Zea mays
  Peptide Sequence Number=SeqID_60349
atggcgtccgccaactccaagcaagtgctgcttctcctggccgccgtcgcgtgcctcgcgtcgctggcctccgccacgcagtggacggtcggagacgtaggcggctggagggccaagttcaacgagaccggctggaccgacggcaagacgttcacggtcggcgacaccctgctgttcgtgtaccccaaggagaaccacacggtggtgaaggtcggcaaggacgccttcgcggcgtgcgacctgagcgccaacctgcaactggggaactggaccagcggcagcgacgtcgtgccgctggaccagcccggcatggtgtggttcatctgcaacaagcccaaccactgcctcaacggcatgaatctcgccatcaacgtggtcgatgccgccaccccaggtgccccgatggccccgatgaccccaggtgccccgatggccccgatgaccccggccccgtccccagcagcatcgtcgccgccgtctgcagccgtgaggtgcccggtcggcggcgcggtggccgccgcggcagccgtcgtggtcgcggccgcgctcgcgttctag

SEQ ID NO: 16975 - DNA, 1641 bp, Zea mays
  Peptide Sequence Number=SeqID_60350
atggcgtcgctgctgcgcctcccctcgctgctgtccccgtccaagcccctgctccggcgccggctgccggcggcgaggctcgcggcatccgccgcatccaggggtcaagcctcggcgaccgcgggcgcggcggcgccggcggccgcggagacccgcggcggggacagggaggggcaggtcacgccgcggtccgcggacttcaacgcctggtacacggacgtcatcgccgctgccgagctcgcggactacgggcccgtgcgagggaccatggtcattcgcccctacggatacgccatctgggaggccatccaggattatttgaatgtcaaattcaaggagacagggcacagcaacatgtacttccctcagttcattccatactcatttatagagaaggaagctagtcatgttgaagggtttagcccggagcttgcattggtcaccattggaggaggaaaagaactagaggaaaagcttgtggtaagaccaacaagtgagaccattgtaaaccacatgttcaccaaatggattcagagctatcgtgatcttcctctcatgataaaccagtgggctaacgtgacaagatgggaaatgcggactaaaccattcatccgaactcttgaatttttatggcaagaaggccatacagcccatgccacccttgaggaggcagagaaggaggcgatgcagatgattgatgtatataccaaatttgcctttgagcatgctgcaataccagttattccaggtagaaaatcaagagtagaaacatttgcgggtgccaatcggacctacactatagaagctatgatgggtgacaagaaggccttacaagctggaactagtcacaaccttggccaaaacttttcacgagcttttggaacacagtttatggatgaaaatggtcaaatcgaacacgtctggcagacctcttgggctattagtactcggtttgttggtgggattatcatgacccatggcgatgatgccggtctaatgcttcctccaaggattgcacccattcaggtcataatagtaccaatatggaaaaagggtgatgagaaggctgttgttgtggaagctgtagattcagttcaaaaaatactcaaagaagcaggaattagagttaaagtggacgactcagagctgcgaactcctggatggaaattcaatcactatgagatgaaaggggttcctgtaagaatagagataggtccacgtgatgtcacaaataagagtgttgtggtttctaggcgtgatgtccctggaaagcaaggaaaggagtttggagtgtctatggagccttcgatattggtgaaccatataaagggtcgtctagatgacatacaagcatcccttttacagaaggccataacattccgtgatagtagagatggtattcttgacctgcggcataacattgtcgacgtaagctcatatggcgagctgaaggaagctatttctgaaggaaagtgggctagaggtccttggtcagctagcgatgctgatgagctgaaagtgaaagaagagaccagcgccaccatcagatgctacccattcgagcagcctgagggcaccaagaaatgcttcatgactggcaaccccgcagaggaagtcgcaattttcgcaaagtcatactag

SEQ ID NO: 16976 - DNA, 3213 bp, Zea mays
  Peptide Sequence Number=SeqID_60351
atggcggcgacggcgaggaagctgatcgtggaggtggtggaggcgcggaacctggtgcccaaggacggcaccggcacgtccagcccctacgcgcgagctgacttcgacggacagcgacgcaagacgcgcaccgtggccagagacctcaacccggcgtggaacgaggcgctcgagttcgacttcccgcccgccggcgtcgaccccgtcgccggggagccgctcgaggtcaccgtgctgcatgacctccgcatcgggcctactcgccggaacaacttcctcggccgcgtccgcctcgacgcgcgccagttcgtgcgcaagggcgaggaggcgctcatctacttcccgcttgagaagaacaagggcctcttcaacttcaactgggtccgcggcgacattggcctcaaggtgtactacgtcgacgtcccgctcgcgccaccagagccggagccggaggcatccgtcgctcctcctgatgcgacggtggcggaagcagcagcgccgccgccgccgccgcctgatgctactgctacggcttccgcggatgagcctcccaaggccgaggagctggtggacgcagctccggcgccgcaaccggagccggcagaggcatcagccggtgacggagctaccacggagaagccatcggaggctgattctgaaccggcaacgctggcgccggaagacgcacaagtaatgacggcagaggcggtggcagcatcggaggagaagccgccggaagaggagcctgtgttgagcccgccaccactgccgacgccgactctgatgccacggcaggtatcgatgcctgtacgccagttggagccgacgccgactctgatgccacggcaggtatcgatgcctgtacgccagttggcgccgccgccgccccaactggaggagccgatggtgcagagcaagcacgatctggtggacaggatgccatacttgttcgtccgggtggtgcgcgcgcgggggctgcccgccggcgcgcacccccacgtgcgcgtggccgccggcggccaccatgcgtccacgcgggaggcacgccgcggcgccttcttcgagtgggaccagaccttcgcgttcgtgcgcgatccggccaccgactcgccgggcccgacgctggaggtctccgtctgggacctgccgcccgacgccgacgtgtccatcgccgacgatcgacacttccttggcggcctctgcttcgacaccgccgacgtgcacgcgcgggacccgccggacgggcctctcgcgacgcagtggtacaggctcgagggcgggcgccgcctcggtggcgccgacctcatggtcgccacgtgggccggcacgcaggccgacgaggccttcgccgacgcgtggaaggcagactccccagcggcgaccacggccacggccgcggccgccgccacgtcgcgcgccaaggtttacgtgtcgcctaagctctggctccttcgcctcaccgtcatcgaggcgcaggacacgctcacggcgccgcctccccgcgacgccggcatcgctgtgcgcgctacgctgggctcccaggcgctcaagacgcgcaccacgccggtggcgcgcaacggagggcctgcgtggaacgaggaccttctcttcgtcgccgccgagccgttcaccgacgacgactgcctcgtcatctccctcgaagtgcgccacggcaaagaggccttccctgtcggctcggcgagcatatcgctggctaccgttgagaggcgcgtcgacgaccggaaggtggcgtccaagtggctcgacctcctcccgtccgacgaagccgcgatgagagtcggcaagagagcggctatgcacatgcacggaggccggctgcacgtgcgcgtgtgcctcgacggcggctacaacgtcgccgacgagccgtcctacgcgtgcagcgacttccggccgtcggcgcggcagctgtggtccccgccccttggcgtcgtggagctaggcatcattggatgcaagggcctccttccgatgcgcgccgccgacggcaagggctgcacggacgcgtacgcggtggccaagtacggacccaagtgggcgcgcacgcgcaccatcgccgacagctacgacccggcctggaacgagcagtacacgtggccggtgtacgacccctgcaccgtgcttaccgtcggcgtgttcgacgacccactgccgttgcagccgtcagaaggcggcggcaaggatgccgccgccgtcgcgtgctcgcggccgatgggtaaggtgaggatacggttgtccacgctggagcgaggccgcgcgtaccgtggcctgtacccgctcatcatgatgctgcccaccggcgcaaagcgaatgggcgacgtcgagctggccatccgcttctccacgtccgggtcgatgctggacgtgctgcacgcgtacggccgaccattgctcccggcgatgcaccaccagcggcccatcccactggtgaaccgcgaggctctgcggctggcggcagtgcgcatctccgcggcgcacctggcgcggtccgcggagccgccgctgcggcgcgaggtgtcgacgtggatgctggacgccgcggagcctcgcgggttcagcatgcgcaagttccgcgccaactggaaccgcgccgtggccgcgctctcctgggtcaccgacgcggcgcgctgggtggaggacacccggtcgtggcgcaacccgacggcgaccgcgatggcgcacgccgtgctggtcctcctcgcgtggcacccggacctcgtcgtgccgacgctgacgctccacgccgccgcggtgggcgtgtggaagtaccggcggaggccgcgcgcgccggcggcgcacccgtgcgtgcgcgcgtccatggcagaggcgcccgacagggaggagctggacgaggagttcgacacgatcccgagcgcgaggccgcccgatgtggtgcgggcgcgctacgaccgcgccaggatggtgggcgtgcggctgcagcagacggtcggcgacgtcgcgacgcaggcggagaggctgcaggcgctcgtgtcctggcgcgacccgcgtgccaccgggctgttcgtcgcgctgtgcgtcctcgtggccatggtgctgtacatggtgcccatgaagatggtggccgtggtcgccgggttctactacctgcgccacccgatgttccggaatcggatgccagcaccggtgatcaacttcttccggcggctgccttccatgtctgaacgaatcatgtag

SEQ ID NO: 16977 - DNA, 195 bp, Zea mays
  Peptide Sequence Number=SeqID_60352
atggcgtgccaggaccgtagatcccttaatagacggccctggtgcgatgatgggagaagggtgtttagaactgttggatgccctctgatcggctacgatggaaccctggggtacgagcaagccactgtggaatctgaggttcagcaagtagaagtagctgagcaggagctcattgaagtcaagttgtgcccttga

SEQ ID NO: 16978 - DNA, 747 bp, Zea mays
  Peptide Sequence Number=SeqID_60353
atgaagtggtggctccgcctactcagatggattgctctatgggtcatcctcatgcgtggggatgactccaacggtcagcgtcgagtcaatgaagtggtggcaatgacacttcccctcaccgagatcgggtatatgtgtagggacgaggaggccataatgattggtgtagacttgtcagcacgagaatactacattcctggtccttctggctcttacctaaactatggggctgctgctagtgaggtagagattgatcttctcactggagcctccacaattgttcgaagtgatcttatatatgactgtggccagagcttaaaccctgctgtggacttgggacaggttgaaggggcgtttgttcaaggaatcggctatttcatgagtgaggaatatgtcaccaactcagatggattgcttatctctgacgggacttggacatacaagatcccaactgtggacaccatcccaaagcagttcaatgtgaagttacttaacagtggattccacaagaaacgcgtgctctcttcaaaagcatctggggagccaccgttgcttcttgcagcttcagtgcactgcgcaacaagagaggcaattagagctgcaaggaacgaacagcactgctctggatccaaaccttcaccatcccattttgatctggaagttcctgccatcatgcccgtggtgaaggagctgtgcggcctggacaacgtagagaggtacttggagagcctgctgagctccgaatga

SEQ ID NO: 16979 - DNA, 465 bp, Zea mays
  Peptide Sequence Number=SeqID_60354
atggctagttcggagttgtacggtcctggagcaccggacactgtccggtggcacaccggacagtccgccggagagatctgggcaccctgctggcgtgatgtcgtggctgtcggaggtgcggcggagcctggtggagggacagctgttggagcggtcgagtccctgctgacgtcgtcctgcttccggcgacgtgggggttcctccgaagccgaggttgagtttgcctttcgttgccgtggccgagcccgagccaaggggtcgggcgaggcggaagtcgttcggccgaggccagggcggagtccgagccctgggggtcgggcgaagcggagtttcgtcgtcttccgggtgttagcccgagtccgagccctggggtcgggcggagcggagttcgccgtcttccgggtcttagcccgagtccgagccctggggtcgggcggagcggagttcgccgtcttcgggtcttag

SEQ ID NO: 16980 - DNA, 147 bp, Zea mays
  Peptide Sequence Number=SeqID_60355
atggggctttccttaccagcaaaagaaacaagccggattgctggatctgaagagcctgcagagccattgcaaaagcctgaacggaccaaaccgattgtaactaatgaagatcagcatcatgacttgtgcagtgacagtcttggctaa

SEQ ID NO: 16981 - DNA, 1035 bp, Zea mays
  Peptide Sequence Number=SeqID_60356
atgaggccgatcttgatgaagggccacgagcgcccgctcacgttcctgcgctacaaccgcgacggggacctcctcttctcctgcgccaaggaccacacccccacggtctggtacgccgacaacggcgaccgcctcggcacctaccgcggccacaacggcgctgtctggacctgcgacgtctcccgcgactcggcgcgcctcatcaccggatccgccgaccagaccgccaagctctgggatgtcagcacggggaaggagctcttcagcttccgcttcgacgcgcccgccaggtccgtcgagttcgccatcggggacgcgctcgccgtcgtcaccaccgacaacttcatggaccacgtccccaccgtccaggtcaagcgcatcgccgaggacatcgacgaccagacggaggagtctgcactcgtcatcaccggcatcaagggaaggatcaacagggccgtttgggggccgctcaacaggaccatcatcactgccggagaggatgccaccgttcgcatttgggattcagagactggacaacttctgaaagagtctgacaaggaatccggacatcagaagaccatttcatcattgtcaaaatccctagattggtcacattttattactggctccttggataaatctgccaagctatgggatacaagaacgctgaccctgatcaagacatatgtcacagagagacctgttaatgctgttgacatctctcccactcatgatactgtggttctaggaggtggtcaggatgcaatgaatgtgactatgactgaccgccgtgctggtaaatttgaggctaaattctaccacaagattttgcaagaggaaattggtggtgttaaagggcattttgggccaattaatgctttggcatttaatcctgatgggcggagctcagtgattgtagccaattacattggcaatatacgctatgctgacctcagtttgatgaacatttttactgagagctgcattctgcccacaatagctttaccagtaatctgggatctgatggctcaatga

SEQ ID NO: 16982 - DNA, 100 bp, Zea mays
  Peptide Sequence Number=SeqID_60357
atggcggcggccaaggcgctagcggcaaggggaaaggggagggggggaatgagtatggatgagacgggcatggggctcaccggcgacgggcacgggtctg

SEQ ID NO: 16983 - DNA, 354 bp, Zea mays
  Peptide Sequence Number=SeqID_60358
atggccccacaaagttattattttccatatgcgtgccaaacgaaagacattgttaggggttggattttgtgtataagactcagacacataggaaggagagtcttccaagaagatgggctagaagggcgatttgagatagacttacccgaagctatcggaatggaagtagatattgaaatggttgttgatgaggaggatgatgaggtgcaaagtgagaatgacttagaaatacttgaaggcaatgacattaatgacgaacttgcaccttcagatggtgttgactatgaaatgattgatagtgatgatgagacttatgatccggctaaccccgacacatatgaagattatttttaa

SEQ ID NO: 16984 - DNA, 312 bp, Zea mays
  Peptide Sequence Number=SeqID_60359
atgggacgagacaaggcgcgcccgcgggaggagggtgggacggagctcggccgtcggccaccaacaccatcgttgtggcctccaagcttggtggcgcctcatggcgagcggagcggcagaaccgagggaggcgagctggatccggtgaaaggcgcgggttcgagagagggggcagcggaggacgctggcgccgatgtgggaggggaggacgcggcgagagagaggcaacgatggatgggagaagagatggtgtcgggtggaggagagcagagcagtggagtggctactagagaaagattaatggaaggatag

SEQ ID NO: 16985 - DNA, 204 bp, Zea mays
  Peptide Sequence Number=SeqID_60360
atgacggcgatgctggcggagggcgacctcgcggcgctgtcgtgggaccgggcggccgacgcggtgcgcatggcggcccaccaccagctggcagcccaggcgggtgcgcggcggtccatgcagccagggaggcccagccagggaggcccagccgggcgtggcccaatgcaatcgtgggaacgcggagcccagaaggctgtgtag

SEQ ID NO: 16986 - DNA, 1245 bp, Zea mays
  Peptide Sequence Number=SeqID_60361
atgactccttgggaattggccgccacaccagtctgcgcacaggagcggccacaggagcggtcaggttcgtctgaagagcgaccagatcaactggaacgggtctgggttctggctggggagggcgacgagccaagcggcggtcgcgacgactctggacagtctcccagccgccaccagcactctccaccgctaaccgagaaacagggcgctgtgaggaaaccagcgcatccctgtaggagcggcgattccgagacggggcacccgcgcccgccgggacagcacccacgctcgccgcgcccgccgcgcctgctgcgccatcctcacaccaccgctgcgccttggaacgaccaccgcatgcagagggccccgccgacgccggggaagaggagaggtgattggccgccgggatcggagtggtctccggcgtggggctggtggaggaagttggtcatgacttgtgacttggcctggttacgtcctaattgtgactggttgcaacaatatgaaggtgcaggcatccatactaggtctgccctgtccttggacttctttgttactgtgtctttgtttaagaaaggtgtacatttggtggagttgcaaggaagcggtgaattatttgcaatgaaggcaatggacaaatcagtgatgttgaaccgcaacaaggttcatcgagcttgtatggaaagagaaatatactcactattggatcatccttttctcccaacattatatacttcattccagacaccaacacatgtttgtctcataacagacttttgtcctggaggagaattatttgcactactcgatatgcaaccaatgaaacttttcagagaagaatctgcaaggttttatgctgcagaggttgtaattggcctggagtatctccattgccttggaataatataccgtgacctaaagccagaaaacattttgctccaagaggatggccacatcgttctgactgattttgacctctcttttttgacttcctcaaaacctcatgtgataaagcattctacatcaaggcgaagaagatctaaggagtatctgcccccaagttttgtttcagatcctgccactccatcaaattcttttgttggaactgaagagtacatagctccagaggtcatcactggtgtaccacatacaagtgccattgattggtgggctcttggatatgaactatcacctgaaagatgtaggcaggtgaaacgttgtaggatcaactcagtatctgaataa

SEQ ID NO: 16987 - DNA, 579 bp, Zea mays
  Peptide Sequence Number=SeqID_60362
atgaacagtggatatgccgccgcaaccgagacgacggcgcgagcaggagatctgatgcgcagcagatctgggcgcgcagaagtgggcgcagatggctgcccggacagcgagagctcgcagacgtggcagacgtcgcggacggcgacggagaagaagtcagcgacgtccctggggacggcgcagcgaacacgcagacagctgcgcgcggtccctgacgaggtagaggacccctggcgacgactctggggagccaaaagacgacgcagcggatgcgcagacagctgcgcgcagacagccgcgacaccggcggcgtccctggtgaggcagaggatcctccctggcgagtctgacgcgcagacagcgccgaacgctgatggcggggcggacgaggcggacggcggcgcgcagatccggcggacgaccgtggacggcgcgcagatccaacggatggccgcggacggcgcgcagacggcggcagacgaggcggacgacggcgcgcagatccggcggacgacccagcggatggccgaggacggcgcgcgggacggcgcgcaaacggcggcggacgaggcggactga

SEQ ID NO: 16988 - DNA, 732 bp, Zea mays
  Peptide Sequence Number=SeqID_60363
atggtttgggaggtgaaggtctcaacgattatcgagttgtacaactatgagactctcaccatggatgagctattcagcaagctcaagtctactgagattgacaacaagacccaggccaagatcgagaaccctagtgcacccaccatgaccctggtctctagagattccagaactggtggcatggcaggtcaaaggatgtatgatgtaactgtggtaaccccgaccacttcaacgctagttgcactaagaaagggcaagcaggaggttggcccacgcgaccaccactctggtcggcgcaagggcaagcgggagtacacctacggcaagtacaagtccaagggaggattcaacaatggggcggacatcagctacgactctacatctaatgtatcacatttcaccgatgatctctccgttgaggtagaagagctcatgtctactttagctagtcaggataagttgcttaggcttgctgctcgtgagagaaaagatttcaagagcaagtacgagagcatacatagggatcttgagtctgctagagtttctttcatggtgtctgacgagactgaatgtgatgggtgcgccctacacatgtcgaacatcaccacattgcagaccaagtatgccaccgtgataggtgagcacgagaagttgagaactaggtctagcattttgggtgtatgtactgttagtcctggcttgcagattgagccagcgaagagaaacatttag

SEQ ID NO: 16989 - DNA, 504 bp, Zea mays
  Peptide Sequence Number=SeqID_60364
atggagggattgattgctaagtttcagtcatgtggattatatgagtttatgagacaacgaactgacttcaatgaactgattgtcaagcagtttcttgctactgttgaggttaatattcaagatcagttgattgtctggatgactaggttcaagcgctatgtggctacctttactgagtttgccactgccaacagtctgtattatgacatgatctctcagggggtagatctttacgctgaggaccagtttgaagagtatgctcaatattatgaacctgctaggctgggtattcctaggcattttggcgagactccaggcctgagacatcatcctgcagtaatcaacaaaattgacagggtcacctttcttcccaagagtggggacaaaagcagaatcagggataaattctggaatatcattgatcatgtaatgcagggggaggtgatgaatgttgttctctttatgatgaggcaactaaatgatctcaagatggacaaaaactag

SEQ ID NO: 16990 - DNA, 651 bp, Zea mays
  Peptide Sequence Number=SeqID_60365
atggctgcagcggtgacaccttcagcggatgtagttgccgaagagaaaggttcctccaaacctgttccaacgaaggataaagatgatacaccgcttagggaatgcccttttgaccaagatttaggtggtcgaaggtacaaggttcatcatgctgcgaagaaagttatgggtgcaaagcaattggctaaagctatcagttttgctaaacaacttggatacccttccaggtccaccatcgtttggggagggccagacaattacttgtattgttgcccggataatatggaaactgaagtatgccgctacatgacggataatattggtttcacgaagctagaggccatgctctcaaccatgtcctctcaagacttctatgattgcttggcttacacacatctaaaggcattatttttgagtaaagctctaaaaaataaaagaaatgttgagggcgaagctacccgaaaagagatagttaagctcagatccaaagtggtaattgaagtaaagcatactgaagccgaagctaaggatgctactatcgaagccgaagcaatagctgacatggctgcgaagaaagccacagatgacattgtcctcaaaatttatgagcaaatctatgacgaggttatgcagggcaataaagggaattga

SEQ ID NO: 16991 - DNA, 756 bp, Zea mays
  Peptide Sequence Number=SeqID_60366
atgtcgtggggactaagaaacgaaagtgcttctaagctcgaaaaagttgaggttgccttgacttcatcttttcttgcagatgttgatcctagggcaatagatcttgccatgagaatcaccgaaaggatgttcctcaaaatgaaggaagatgaggcgaagaacaaaattgaagaagaaaatgatcgatggagaccaaacgacgaatccacctcttcacaaggttcgtctttcaaatccacttctcatatgtgctttattgctaatgggagtgacagtgaaagcgaaagtgaggatgaggaggagcaagaaagtgatagtgaagatgaggatgatcttcaacaattcatcgctcagctatgcaagaaacatcggatgagcttgctcaaactcatgaaaagaccggaagaacaaaaagaaatgcttcataagcaagaagacttcctcatcagaaaaattgaagacttagagaagttgaccaaagagcatgagaagctaaagtgctctcatgatgatttggtccaaaggtatcttcggactcaagtcgatatcacagtaggagaagcccaaataatacgaaggttgatacagcgccgaagatgtgagcaggaaagcttcggcgtggtagcagaaaaggaaaccgacttaaagatgaaaaggctattcagacctcggtggattactatagaattactaccaaatgtaaagggcatggatgtaattttatatgggctgtgtcccgtgcctataaataggtga

SEQ ID NO: 16992 - DNA, 435 bp, Zea mays
  Peptide Sequence Number=SeqID_60367
atgggcaagagcaagaaaggtgggagttcctcacaccattccagcgataagcggaaacgtgagccgactcctcccttggaggacttcggcgactcggagtactcggaggaggagttctcctctgagtcagagggctcgccggtccctgcctctcccccggtgtcgtctgatgattcagacgactcccaggggatcgccgcagagggctcggatgagtcggaggtctcctcagacgagaagaactcctcggactcatccgaggagggcggcagtgacggcgatggcgggggcgacagcgatgacggaggcggcggcgatggcgacggcggcgaaggtggcggcgacggcggcaaaggtggcggcaggggcggcagcggtgatggcagggacggcagcaagggcaacagcaagggcagcaacaaggccagtggctag

SEQ ID NO: 16993 - DNA, 315 bp, Zea mays
  Peptide Sequence Number=SeqID_60368
atgcgaggtggtgctcgggtgcggagtggtgatgatggagcaggtgacacgaggcaacaggtgcgatggagagggggcggtgttgctggcggtgatggtggcggcgagtgtgctgcaaagggggtggacggcggtggtagtgcgctgcagaggggggtgtgggtggtggtagtgcgcatggaggagggcacgcgtgcgggggcacggcttattccaggcttcaagggtaagcttcctgatatcttcttgggtaagggctctagccaaagtgaagaaaaacttcactacccaatgcatgcagaggactgggcataa

SEQ ID NO: 16994 - DNA, 324 bp, Zea mays
  Peptide Sequence Number=SeqID_60369
atggggatcagcccaggaaaacctattgcttattctatggtgagaacaagggccacgctacaagaacgtgtcagatcaccattcagaagcaaaaagagattgctgaagcagaagcccggcaaaatcagccgaagcaggtcctacatactgcttcatgccactctccctacataccagagtatgtgggcaatcaacctgcagcttctattgcttcgacaagccattcacaagcttcctggcctcagctcccaccaccaccaccactgcaacctacttatacctgaagccagcagccagaagggcgccaacattgagagcacctag

SEQ ID NO: 16995 - DNA, 234 bp, Zea mays
  Peptide Sequence Number=SeqID_60370
atggtgcttcaagtgggatgggatgttttcaaaataaaacttgatggtggatccatcatggccgtgatgggttcaacatcgaaaaagatgtacctctgtcagactaataccaagaataagataacacgcaatgggagtggagagatggcgagagtagcgtgtaccctccatggcaagaggctggacggtggtgtatctatgctctcggttggcatgaacctgatctggtcttaa

SEQ ID NO: 16996 - DNA, 325 bp, Zea mays
  Peptide Sequence Number=SeqID_60371
atggcgcctcctgttgacgtggctggtctgcgccctaggttgggcgatgtggaagcccctccgaagccgaggtcgagtctgtcttccgtggccgaggtcgagtccgagcccccgggcggcgctgtccttctgtcaggccggtcagtggagcggcgaagtgacggcggtcactttggctctgccggctggggggcgcgcatcaggataaagggcctcgggcaagccggaaatatgttcgccgctggaggggggcctcgggcgagacagaaatcccccgggctttatgctgatgggggttaccagctgagaattaggagccttgagg

SEQ ID NO: 16997 - DNA, 291 bp, Zea mays
  Peptide Sequence Number=SeqID_60372
atggccgagcggctgtcaccggtgtgttcgccattcaccatgagggagccacgccttaggaagtttatcgcgtcgataaactttaaatattatttagaagccatagaaaacgaggaagaaatagaagttgaagaagcaagagctacaccaccaccacctgaagacccacctgccgagaactacttttattttgacatctgtggagcagagcctgactcacctataacacaaggcaagccccggtgcattagccacctccttgctattttaaaatctttctcacttgcttga

SEQ ID NO: 16998 - DNA, 126 bp, Zea mays
  Peptide Sequence Number=SeqID_60373
atggcccgccagagcaccacgccgcaaagctccagagactacgtcaactaccaagtgcaaaatgaaattggaatatgggcggaacggcgcaggtactccataccggtgatgcagtacccaaagtaa

SEQ ID NO: 16999 - DNA, 633 bp, Zea mays
  Peptide Sequence Number=SeqID_60374
atgggtctcccggttgccttcctcaatccgagcaaggatctgagacatcgggtcatctcctttcggtggcgccatctcttctcccttggtctgcaacctcgtccggattttactccgatcagggttcaacacaggcgtatgaggatccggacaggcaacaagccagccgccgccaacagcctggtcgtcgatctccagtggcactgtcttctgggccttggtgacattcaaactcttcctctgcagctcatcgaggacttctttccctccacacagcgaggggcaacgttgtggcgcttggtccagtgctgcgctgcgctgcgctgcgcttggctcgtcacggtgcggcaaggatgctctcgtcaccgtgcagcaaagatccaagctgcgctcggcccaaccagcaaggagtggagtagtgttcgtcggactgcaatggagccttcctcgaaagcgatcggccagaaaccacggttcagacaagggtcgaggcgacgaagtcgtcttcacgtgctggacgacggccgggagtcgaagggcgacttcgaagatagagacctcgtgcatgtctgcacagacaacgcaggcctcgacaacatgggggttgtgccaacctatagaggttttccttga

SEQ ID NO: 17000 - DNA, 435 bp, Zea mays
  Peptide Sequence Number=SeqID_60375
atggcggtggaggtggagatgccggagctgcaagaggtgaggctgcagagcagcgaggttgtggagatagaaacagaggcccatgggcgtaaggacgatggctcaacggtcgtcgttggagaagaagcagcaacacctgagggagaagacgagcttgcaaccagcatgacagaagagaagatcgtcgaggagatccagcgagcagaggcaactgagaactcggggcggggctggtgtactgacgaagagagggggaggcgtgaggatgagagaggttgggcaaaacgttcctatcgtccgctcccgctcgctcctcgccgccgaccagatctagttgctgttgtgacctacctcccctcccgcttgctggctgtcgccgatcgggtggccatgcccggcgtggaggaagacgacgcaggggatgacatgttgtag

SEQ ID NO: 17001 - DNA, 1044 bp, Zea mays
  Peptide Sequence Number=SeqID_60376
atggggcgcaccggcgtcgccctgctcttgctgttgttggaggagcgcggcctcgtggagattggtgctcttcagccatcgctcggcttcaagaattttcgtcatgcagcccggctgcattccctcaccaatggtcagtttggtggggagaagcaagccgggctgcgacctctgccccgccctcagcttcaaggatcttcgtcatctgggctgaggcggaggagcgcaccaagtggggggccgcctctgcgtgggtcggtgacccttttcttccccagcgttcgggggagaagggcatcctccagtcctgtggaggcgtcctccagccatgcgggggaaggcgaactgctgctccttggccagggtgcagctttccatcctccatccgggcggtggtcgtgccgcgcgcgggccggccacgtccaggccctccttgccccgtcggccgtgttggggggtcactcagcacgtcgtacgccacgagggcgatactcgtgttctgggacggcctcggcgaggacgggagtgaggacctgccggtgcgctttggggcggccgctgttcgccggcgcggtgttggtgggtgggtggccgctgtcgtcggtgctaaggtggtggcagccagaggaggttgtctccaccgacgagatcgtcagcgccacccgcggccagacctccgactcttcggcctcaacggcttgtcctcgcctctcgtgtggggacgggggcgagggccttttcacagcagcgtctgtcctgatgtcgtcgctgctgctgtttagccgcccgaggtggaggtcattgtctctgctgctgcagaggtcgctggcgagccgcttggagtttgttatcccgtgggccccctggtgtggaggttgttcatacccgtgggattggaatcggagtcccaaccttcggccgctctgcgatgagccaaagccgaaggcagcggtggcgtggacagaggcgatgtcgactcgaacagaggctttctcgatgcgggggcaggtggtttcccaagccgaggaggcgcagcagcggtag

SEQ ID NO: 17002 - DNA, 513 bp, Zea mays
  Peptide Sequence Number=SeqID_60377
atgacgttggtggttctcaagccccttacggaagcaaggagacgtcagcaggatccatacagcaccgacagctgtactgctacagggctcaaggcacttctccgacggccacgatactacctctacaggactcgagacatccccccgacggccacgttgttatctgtacagggctcagggcacttccctgccagccacattagctcccagctacaccccattgggcacgcagcgacaaatttactcatcggtccagggacccctcgggtccgaaaccccgacagcgaactcgtcgctctccggaagaggatcagcggtgtacggctaaaattcaccggactgtccggatcacctattcacccccctctaggtgctctcaccgagtctaccactggcacgtggggtcagtctgtcaggcgagtcgtcccttccgtggatctggtctcaacagaacgcgacgtgggtgggggatctgcggggatctcgctcgggtggttactgaaagttgcctag

SEQ ID NO: 17003 - DNA, 522 bp, Zea mays
  Peptide Sequence Number=SeqID_60378
atggccgagcctcaggctatctcccgaggtaccctaggacatttccgagaccagcgggaacgactcgtaatggaatcccaccggagggaggcatcgagccctcagaccctgtcgaaaaggggccaggtccagcgaatcacctgcagttggcaaggtcgaagtgaccgcagtcacttcaccctttcactgaccgatctgacaggaaaacagtgccgtctgccccgctccggctgctgtgccaaccacccgggcgaaaccgacaacagtcaagataagcctcgggcgcaacaggaagctccgcctcgcccgaccccggggctcggcctcggcctcgggaggagatctctgcctcgcccgaccccagggctcggcctcgacctcggcctcgggaaagagtcacatcctcgcccgaccctgggcctcggccccagcctcggcctcggaggagccgccgcctcgaccgacctcaggctgggatcaaccgcgccacaagggatgcatcattaccctactcctagctag

SEQ ID NO: 17004 - DNA, 954 bp, Zea mays
  Peptide Sequence Number=SeqID_60379
atggcgaggttcgagggtaaaatggggcatccatttaagcgccatcattggtggcaagttgttcgccacgagcccaagtggtcagcaaagcatggtcttggtagtggatctgattcgactgcgaataagagaacccgactcggagtctctggtgaatatagttctggaggcactgaagacaccgaggaggaagctatggcgccgaggtgcgtgctacgctggcccaacctgaacgacgtggcgccaacgtggtaccgagctcggcgccaagatctatggcgccgagctcgaatatgtaacagcaaactcggcgccaagatctatggcgccgagctcggttccgtgtcggtgccacgtcggtgccacgacgtccgtttgtgccagcgtaacacgcacctcggcgccatagcctatggcgccgagctgtgttacctcggcgccattggctatggcgccgagcaaaggggtgcctctcgcgtcgaagggtcatcgtgcgaaggtgtccttttccttgtgaaggggaagggaagtgaggatgccctcctactcgaagggggcatggacccgacacacgcttcccgctcgacgggtcgctcggggtctagcggctccctctttatgtcgtctgccgtcttgaggatcacgcttgccttcttcacagttgggaccttctcaccgacggcccagagctcatccgatagctatggagcgaggtctaccaagacccatgccgtcgttcgaggcagagtagagggcggcgatcctgctaccctcgtcctccatgagtactttggtcagtcgtgccataccatcgagggggtcgacgcccaacttatgcacctgggtttctttggtggtcctcgagatgaaagcaccgataacgtcggcgtctacaaggttgatcaactggttgcattgtcgagaaaagcgctggatgtagtccctcagggcctc

SEQ ID NO: 17005 - DNA, 204 bp, Zea mays
  Peptide Sequence Number=SeqID_60380
atgtatgaaaatgtgtttgcaagacttgcatctttgataaaggctggaaagttgaaggctgttgaaactatgattgaatcaggaattgacaagaaacttcttatgcttctagataatgatgacaaagatggagcagatgaagtgcaaggtgatggtgttcaagttcctttggtgcctggagaagcagcagcattagatggttag

SEQ ID NO: 17006 - DNA, 357 bp, Zea mays
  Peptide Sequence Number=SeqID_60381
atggagacggtattcgacagcagcaggctggggatcgagccctactccagggaggtcacccagagtggtgaactactcgtcatggactccatgaacagcaacatctacaggatggcgctgtcgctgtcccgatcagataatttgagccacataagatttatctcatcctctgaaattgggctgaataatgtcgatagcaggccaaagcttgttgctggttcgcctgaaggatttccgggtcatattgatgggaagctattacgaactgaacttaaatcaggcattcaatattggtctctaaagaggaagctctgccaagcattactaagaactgatcaggctagatttcagcattag

SEQ ID NO: 17007 - DNA, 591 bp, Zea mays
  Peptide Sequence Number=SeqID_60382
atggtggcgcccgtcgagcagctgctggaccggttgtccctggagcagaagccggacgccatcgtggccgacaccttcctggcttggggcattggggttggatctgcgtgggggataccagtgtgctcactgtggacgcaaccagccacgttcttcttggcgctttggcacctggaccgatggccgccggtggatggtcaggtcgtccgcctcgccaccatccccaacgtcatcccctccgagagggtccgcagcaccgacttcgcagtcttcatcgaggtcgtgcatatcaagatggtggcgcccatcgagcggctgctggaccggttgtccctggagcagaagtcggacgccatcgtgacatgtgatgtatgtgagtacctaggaagcagccgaggcatgctcaccgcggcggtggagagtctggtatctggaattcagtctcgaatacaacatgtcccctgctcgctggcttcgatggaaggcgtaccatcggtggtgagcgggttcttctccaatgcagtgtcggctgtggtggagcggctgtggtcgctctcgctcaaatccaccaccaagataggtgattattga

SEQ ID NO: 17008 - DNA, 474 bp, Zea mays
  Peptide Sequence Number=SeqID_60383
atggaagtgctgatggtccgcgaccgcccacgcaatcaacgccatggtggatggcaggatcggcttgaggtcgacgcgggatttggacgaggcactgctgcattgggagcacaaccaaaaactagcggaagcgtcgtcatcagcaattcagcatcggcgccacttctggccgccgcgggggtgcccgatacgctcctcgaccgcgtccgcctcgccactatccccaacgtcatccccttcgagagggtccgcgacgccgacttcgcaggcttcgtcgaggccgtgcatatcaagatggtggcgcccgtcgagcggttgctggaccggttgtccctggagcggaagccgtacgccattgtggctgacaccttcctggcttggggcattggggttggatctgcgcgggggataccggtgtgctcgctgtggacgcaaccgaccacgttcttcttggcgctctggcacctagactga

SEQ ID NO: 17009 - DNA, 1290 bp, Zea mays
  Peptide Sequence Number=SeqID_60384
atggaggcgatcggcaacaccatgctagccctcgggatcctggcggactacgacgtgacgttgcgaccaccgttagtgagcacggcgacagaggccgtggagggcaggtgggaggcgaatgccacactgcgttgcacgagtgcacataggcccgccccgattccttctccggtttcgacattcagcgtgcgcccaacagcgacgaggatcgccgttcgtaagatgggcgaggtggcaccgctgatcccagccacccggaggaggacgatgtctcgcaaggccgcggcggcagtggaggcggaccgacccgctgaagatgtatctggggagaagacattgaagattacgatagctttgaatcaggaagctgaggcggtggcaattgcatcaaaggaggagaaggggctgcaagacgaaccgaaaggtgagaaggaagacaagaagactcttgtagaatggtacatcgtgaaggaaacccagaaggaggagcagacattgaggccgccactggtgatcacggcgccagaggccgtggagggcgtgtgggaggcgaacgccgtgctgcgctgcacgagtgcacataggcttgcttctctgctgaggctgtcattcagctccttggctccattgtttttgtacttcatccaatggctggacttcggctgttgttatgcccttcccagctatttaggactatttcacattctcatatgcaaggtttatgctgatggagattgtcggcgtttcgaacccggggggtccctggaccgacgaggtaatgatggcgcctcctgtgacgtggtcggtccgagccctgggttgggcgaggtggaggctcctccgaggtcgaggtcgagtctgtcttccaaggccgaggtcaagtccgagcccctgggtcgggcgaggcggagaccgttggctgaggccagggctgagtccgagccctggggtcgggcgaagcggagttcgtcgtccttcggggctgagcccgagtccgagccctggggtcgggcgaagcggagttcatcgtcttccggggttgagcccgagtccgagccctggggtcgggcgaagcggagttcgtcgtcttccggggctgagcccgagtccgagccctggggtcgggcgaagcggagttcgtcgtcttctggggctgagcccgagtccgagcccaagggtcaggcgaagcggagttcgtcgtcttccggggctgagcccgagtccgagccctggggtcgggcgaagcggagttcgtcgtcttccggggctgagcccgagttcgagccctag

SEQ ID NO: 17010 - DNA, 495 bp, Zea mays
  Peptide Sequence Number=SeqID_60385
atggcgcctgaggccggacttggctgctgtcagcctcactctgtcgagtggcacagcagtcagatcggcgcaggcggcgctgtcctcttgtcaggccggtcagtggagcggcggagtgactgcggtcacttcggctctgtcaactggagggcgcgtgtcaggataaagcagcttgagagtagtttgatcgagagggacctgaaagggaagggccgatgcaaggatatagtgagtaggaggaggatggaggattggaaaaagcttgctgacattggttggcctaggaagaggtgccaacaatgtggtgctagacggctactggtcgccaccgatgctgtattctggaggatggtcgtccatggcgatgggagattgaatggcatcaacttcgaaacgaggctgccgcgagtgaacagaaggagaggtatggagatgggaggtcacagagagatctatggagaggggagcaaggtcacgaaggttaagatcatgtaa

SEQ ID NO: 17011 - DNA, 147 bp, Zea mays
  Peptide Sequence Number=SeqID_60386
atgctgctcctatcgtcgatgttcctgctcctcatgcatgcggtggtgcagccgctccaagtgactggactgaccggccacgggacggcgaagcggacgctccgcgagacgagagggttagcggtcctacagtcagcacggctttga

SEQ ID NO: 17012 - DNA, 540 bp, Zea mays
  Peptide Sequence Number=SeqID_60387
atgaagccgtggaaggagaccatcaggagttccaagattatgatgagttctaggcatggatggctcgtcttagacacaccgcacggaagtctgtcatccccttcttaccctctcgtctcgcggagcgtccgcttcgccgtcccgtggccggagatagagtctatgaggagctgctcccctgtgcttcccctagagacgccccctgcaccaccactggacgccccaacccctggagtagctgctggaggagacccagacgacggaggtggcgacgacagctcgagccacgacaccgacttttctgctgaccaggagccggaaggatgggttgctcgacccatcactcgcgacgctgctcgcgggtgtcacttccatgatgcgctcgacaccctgctacgtcgggcacttgaccggcgtacttggtctatcgagtatcgctgtgtggtctaccatcatagtcgcggggtctacccggaccgctgggaggcgacctgcttggtgcgtcgtccggagaatagtctccggggtgcagaggtctaa

SEQ ID NO: 17013 - DNA, 1377 bp, Zea mays
  Peptide Sequence Number=SeqID_60388
atggacaaggatcgccaaggggcggcgcaaaaacgccaggcgactgtcaggattcacgaagctcagccgaaaaggcagcggggaactgcgaaggctgtggcctccggcggagggtcggacgagggccagcttgctatggttgcgcctggcgcggagatcgcgtcggcggccatagtgccgaaggcgaggggcgaggcccttgacgccggaggcgaggtgtcggccctcgccgtggtcaggggcgaggcgggcgcagcgacccgccggctgaagggagtgacggaggcgctgagtcaggcgacggaggcgctgagtcaggtggctgacttcgccagccgtactgcgtcgggggccctcacggcggctgtgtctgccgaagtcgagagacttcggacacaacatgctgacgctgtccgtgagaagtcggcctccgacagcaagtgccgtaagctgacggacagggtggccgccctggagagggagaaggctgacctccggcgccaactggcggcggagaggagggaagctaacgaggccgtcgccaaggggcaggctgcgcaggcggaggccaagctggcgcgggcggagagcaatcttgccaaggagctcgccgaacatctgcaagagcggctcaccgccctggagagccgcgctaaggaggccgaggccgcagtgcatgcggaagccgaacggacgcgcgcgcagcttatggatacatatcgtgagctgggtgcgcggaccggtgacttcgaagtgccggaccgagagcccggccttcgctgtctgcagtgggtgcaggaggagctgctggaacttccagccgtcgtgggggggtcgatgtcgtacgcctccctggtcacctgcgagggggcgatgaacgcgctctctcgcgaagggtgccggcactttgaggccctcgaccaggtagatgaagattttgggcgagatatctatgaggtcgaagaccccgtggtgaaggaatccgccggggccctctatgaccgaatgtggggtctgtacggtcgtgaggtggtcagggaacgggccgaggctgcgagggctcaggcggagcgtggcgagcgggtggacgacttcggggcactaaacagcgcgctgcctggcccggagccgacccctgcggaggccgcgactggagtcgccctggaaacaaccccggagcctgcggaagacgcgccgagcgtgcccacctctgctgtggccggcgaagacctgcccccaaaggtggccgaaggcgcgcctgacgcccccgcagctgctgcgccgagcgctgaagattccgcggcggtggtggcggaaacagcggcggaggagacagcggaggctcccgcagcggcagggccttcgcaggtggcgtag

SEQ ID NO: 17014 - DNA, 244 bp, Zea mays
  Peptide Sequence Number=SeqID_60389
atggccggttctaaagatcacgctaatatctccaaagacaatatcgtgaagccggttattaaaagtctcatggaaaatgagcaacaacaatatgaggactacatgcgtcaagcgaaggacaaattcttgtcacaatacacggttgtcgggtaccggcctcgtctgccgagggacgcgacctcatccgtgcccatcctcgggctggaacggaagtccccggacgggattcacgtctcgcccgatg

SEQ ID NO: 17015 - DNA, 386 bp, Zea mays
  Peptide Sequence Number=SeqID_60390
atgggcgacgagtgggatggggacgccagccgccacgctgagcgggggcaggtgcgggcggccgggccgggcgtctacggtattttgcggaccgacgagtccgcgcggcaccatggtttcgagatgcgtctgatcgatccatgtctgccggcattattggcacctgacagctcagatcagctggagctggtcattctcgtgcatggcagatggatactcctacaccaggtcgccgccggcaccaccaccaccaccaaggctgcacggttaaaccaagtggatgacaaatgggagaactttctttaccagagtgctttctgcttgggagctaacgaaagtttcacctcaagtcaagtcgtctggtggagttctcgcctttgggagag

SEQ ID NO: 17016 - DNA, 447 bp, Zea mays
  Peptide Sequence Number=SeqID_60391
atgcaacagaagatgggcgccatcaagaagaaatgcaccttggaccttgatgatctcctgggcagctaccgctcgatcaccttgaagtgggtcttgaaggcgtctctccctgctagctacagggcagaggccctaaacactgccactcatctcctcaaccgcctcccctcgaaggtgccccctcctacgaccacctccatgtgttcggttgcgcctgctatcccaacacttccgccactgctccccagaagctatctcactgttccactcgttgtgtcttcctcggctactcccctaaggcggaatagcgatgagaagagaagtggaagaccgaagttaacacgagaagaggcactaaaagggtatttgaaaggatgggatatactcaaggatttagccttgaatatgagtgcatggaaaacagctatgcatgtgcctgaaacttga

SEQ ID NO: 17017 - DNA, 480 bp, Zea mays
  Peptide Sequence Number=SeqID_60392
atggagttcaagatacaagattggggaaaacgatccactaagaaagccaagagagccttgcagattattgatgagaatgatgggatcagccgacaagctctggatgactatgccaagctttttaaacacccgctttcccatagtcatgtacaggctcttgctgctctgtttgggtggtccattccagacaatttagactatgtggatgatgttggagaaaagctgcttatttggaatgttagaggactcaactccatggctcgtcaaaattcagtttgtgatttactcaactcatgttgtgcagatgtgattgcatggagttcgatacctgccagccattgcccctatctaacccttgacttgaaattcaaggcgacaggagggatgtctcctttctacagccgagaggtggctgttgatcagactgaaaaagcatttgctggctttagcttcactcaagcgcactattgcccgccttag

SEQ ID NO: 17018 - DNA, 585 bp, Zea mays
  Peptide Sequence Number=SeqID_60393
atggagttagaacgctgcgcggatggacaaggatcttcaccagcttttgatcagtctgtactaccacctccaccaccggcgagtggccgtcgttctgttctggatcgtcttggtcctttaggtgaaagcaatgatcacacaaaacgcagtttggttcaaggcttggcccataattctaatgggctagcctgtgagatttcacatcccagggaagccacccacggagctagggatgcgcttgtggcgccaattgtgattaagaacatttcttttagcacagctgagaagccagtcaatgacgccgcgcccatgactaaggagatgaggattatgaaagtttacttccaaaggaaatacaaggaaaatctaccgcagggacagggaatggtgtcctctgggattcttcctttgtctccaggaggttcgacccttcctttggaatctgccgatgccacgggagcagcttcaaaggcgatggatctgccagaagacggagtacctcttcctaccccctcgattcagtattcatctgcgaacgtggcagctgctcccgtgactccgtctgaactgtcttggacgttgtag

SEQ ID NO: 17019 - DNA, 147 bp, Zea mays
  Peptide Sequence Number=SeqID_60394
atggcgagcgccggcaacagcggcagcggggacgacgatgcaggagggaagctcctggcggatcgctaccagaagggcgaggtcctcggcgagggcacgtatggagtcgtcttcaaggccatcgacaccaagctgcgcgttgattga

SEQ ID NO: 17020 - DNA, 625 bp, Zea mays
  Peptide Sequence Number=SeqID_60395
atgccttcccgtggtggggtgctggtgcggagtcccgccttcacactggatttgcatggccgagatcccgccgcattcgtgcgtgaggcggaggatggggcggtgcgaattgttggtcgctacgtgccaaagacggaggcccagcggagttgggatatacgtggatccaacaatcgcctgaatagggtcttcgagttgaattgtttgtcgtatggcggttatcccgggcaatatgttatcgaccgccgcgggaaaaaatcggcggctgagactgaagacgaccccgcgccggaggccgccccatccactaagaagaggaagctaggtactacgatgggagaactgggggtctccgatagttttgctatggagttgatggggacatgcgcggcccccgggggaaggatgtcttcgtccgagctccgggagtcttcggcgcggatgctggaggttaccgggggtcgatggcctaagaacgttcctatcccccgcgcggccgacgaagacttttttacgtctcgcatggctcgtgacttgagagtgtttcttacggacggatatactgctgttgtgtcagcagtgatgaacaaggatcgccaagaagctgcgcagaaaacgtcggggg

SEQ ID NO: 17021 - DNA, 981 bp, Zea mays
  Peptide Sequence Number=SeqID_60396
atgccgcagtggcggcgagatccgcggacgcatgcccccgccagcgattcccctccccgcgcccgcggccccaccgccgtcctcgcgaccgcagacgaggacagccgcctcgcccgcacacggttcctttcaatgtcctcgcgtcctccattgtggccgagttcccgcgtgagctggaagatccgcgcggcgcagagcgtgggcatccagatccgtcggcccctgccgtcgaccttggtgtgccggtccttgttggagctccgcttgggcgcgagcgcctgctgcctcctctccccgggctgcgccaccacctgcagctgctgctgctccttctacaaatgcaagctacagtatggaggaggaattgctcgaccgccgggctccaccgacctgctgtactgggacgaggccttctacgacaacctacataaccgcatcggcggagggaagcccaagatgcggtggtactttggggaaaatgggtggccttcttcaaagatctttgagacaccaccttcgactgactctgataaggagaagctggttgatatagttcaggaatggggaggggtgcccggcccctgtggcgggcgcggggacctggtgcacatcgccatggcgctcgacgcacactacctcaggggctccatggcagccatctactcgctgctcaagcacgcctcctgcccggagtcgctcttcttccacttcctcgctgcggcggagggtagcggcgcgccagcggccgccgagctccgggccgtcgtggcggcctccttcctgtccctgcgcttcgagatctacccgtttcgcgccgacgcggtcgccgggctcatctccgcgtccatgtgcgccacgctcgaggcgccgctcaactacgcgcggaacaacctcgtcggacatcaggcataccttctcatgatgcatgtttgcttgtatgtattttgctggctgaacattatatatatacaaactggttag

SEQ ID NO: 17022 - DNA, 666 bp, Zea mays
  Peptide Sequence Number=SeqID_60397
atggttctcacatttgaaaatggaaacattatattttatgttcaggagggttctagtgacattgatcaacttgggaagattttcgcagcacttgggaccccaaaatcttctcaatggcctgacatggtttatcttcctgattatgttgaataccaatatgttgctgcacctccactacgtacgttgtttccaatggccagcgatgatgctttggatcttctgtcaaaaatgcttacctatgatccaaaagcaagaatcagtgctcagcaggctctagaacacaggtacttttcatcgttacctgcaccaacaagaccatcgcagcttccaaggccacgtcggaaaggagatcaagggaataacaagattcctgatctcaacctgcaggatggccctatggtgctctccccgccaagaaagttacgtagggtgacagcgcatgaagggatggaaggtatgcacaggacagataaagtggacgaacatccttctgggatgaggcacaccgatgacatgcccagtcagagttctagaattccaatgtcagttgatgttggggctgtgtttggcacacgacctgcacctaggccaacattgaacagtgcggacaagtctcgtttaaaacggaaacttgatatggatccagagtttggatacgcggagtag

SEQ ID NO: 17023 - DNA, 862 bp, Zea mays
  Peptide Sequence Number=SeqID_60398
tcactatgaggtcttcgaccaatctgatgaagattttgggcgcgacatttataaagtcgaagaccctgtggtgaaggactccgcgggggccctcttcgaccggatgtggggcccctacggtcgggaggtgatggtgcgtgctgaggatgtggaggacttcggacccctgaacagcgcgcaacccgaagcggaggccaacccggttgaggccgaggctgaagtcgacccggcaccacccccggaaaccggtgaaggctcccttgctgcccctgtggctgccatgtccggtagaggctcgtcgtcagccactgtgccgatggtggagaatcccgcgaaggcggcgacggagccggcagcggaggatcccacggcggcggctgggtcttcgcaggttcaggattttgggcctgcgcacgcaaccgctactgctaattttgtggtggcttcgaccgtggtcgctagaaatgaaatggatgagtctgcgtttaagttttttgattttgatgactctgggagttcggttgagtggacggaagagtcttcggatgaggacttggattactttgcggccttggatgtggctgcgacggaggcttctccgcatgtgacggatgctgaagttttgcctggtccgagtgctgggcgtaggcggcgaagggcggtggcgaagcgtagagtgagtgaagtggatggcggtcggcttcgtgtgggcagggttggcaagcgggaattgttgtcctcgccggttggggcgagtgtaggtgagggggagttgcgaagtctttttgagggtgaggagcttaggataatgctatttaactatagggagatgggaatcattccgaaggttgaacctatgtaa

SEQ ID NO: 17024 - DNA, 603 bp, Zea mays
  Peptide Sequence Number=SeqID_60399
atgaccctgggtatgtccgttacatggccgaggctcgggctacgctcccgagaggctcaggggctgctctcgcaccgggctacggccgaactgttgaccacgtcaacaaaccagcgtgaaaactctaagcctgaccgtgcacccgggctacggccaggccgcatgagggaacaacaaggccgaccgaggcatcgcaaaaaattaagacctcagaggagtcaaaccactcctccgaggcctcgggggctacacccggcgggaaaaaagcgtcgttcaccccgctccggctactgtgccaaccaccagggtaaaactgagtcgcgatctcccacgagtcaggcctcgggcgcaacagggagctccgcctcgcccgacctcaggcttcggcctcgggaagagtcacaacctcgcccgagcccagcctcggcctcggaagaagatctccgcctcgcccggccccaagcctcggcctcggcctcggcctcgggaagagtcacaacctcgcccgagcccagcctcggcctcaggagaagtctccgtcatgcccgacctgggcttcagaccgactacgctacaggggatacatcattaccctactcctag

SEQ ID NO: 17025 - DNA, 405 bp, Zea mays
  Peptide Sequence Number=SeqID_60400
atgagctatgcagtcaggcaaccgatgagcgtctggtattctatgtttaccagtatgatcgattcgacggagttgtggtctcgtgggggctcttcgttgcaggcgggttgtggtagcagccgtagtcaccgtagtcagctctcgagcatggaggagactatgagggagcaacaagaaaggtttcgtgaagagatgtggcagcaacaaatggcaatcatccaacaactatcagagtacatggctgcttacaacacacaggcgcaacaagcaatgaagatgagtgccatttttattctcaacacgggaccgggggttatgggcaacaacacaccaccaccggtgataccagcaccagaaggagcttctggaggggaggaagctactacaaaagagactccaaactag

SEQ ID NO: 17026 - DNA, 501 bp, Zea mays
  Peptide Sequence Number=SeqID_60401
atgttgaagaagatgcaagaatcatgtcctgttaagctactgggtgcatctgcatggttgtctaaggtccttgggacaaggacagatgaagaggaggaggaggtgcagcgccacgaggaagaggttgcaaccacagatgccggggtgcagggccacaaagaggagggccactttgtcctccctctgtcagcgcatgcacaatcagaagctcagttactgatcatcccagttggtgatagccaatgggatgacatgcctttcgatggccgaggtcaccaaagacaggttaatcaagtcttagaaagacgctatcgtgtggaacttaaggctcaggagcatatagaccgagtattagagaaaaatgagaagaaggtgtgcaaggatgcaatttccaacgctcatctacatgttgtgaacgcgtacatgaaacatcgagggcattctatcaacaactttcgacaatattcgaatgtctacttgactgttgaccagtacatggag

SEQ ID NO: 17027 - DNA, 273 bp, Zea mays
  Peptide Sequence Number=SeqID_60402
atggcgggtggtggcgcgtcgtgctcaggggaaagtccggcgaactcgggcttgggcagaactgagggtgtgcgggggagtacgatggaggccttgggtgaatttataggcacaggcgcgggtgagggcgtggggtcgggcgtcgctcggcgcgggcgcgcggggtcgggtgctcgggcgtgctctggcgcgccaggcaaaggtcgaacacatggaggtgtctctttcattattagagctacgagtgataatggtcgcaagttggggtactag

SEQ ID NO: 17028 - DNA, 153 bp, Zea mays
  Peptide Sequence Number=SeqID_60403
atgccgaagctcccctgcgcacagctttggctctacgccaaccttcgtattctttgtacttcttcagattgtggttctgatccgagtccgaaggtgcttgttgctcatcaagggaagtgggaagtggcagcacatccacctccactctcataa

SEQ ID NO: 17029 - DNA, 630 bp, Zea mays
  Peptide Sequence Number=SeqID_60404
atgcctcggctcaagcttgggaaagcttcacagcctctcggggaagctgtccgggggctagggcacggctgggggtcaacgggaagggctggccacagcggccgtgctcgggcagtgatggcgggcgatggcgcgtcgtgctcagggcaaagtctggcgaactcgggattgggcggaactgagggcgtgcgggggagtacggtcgaggccttgggcggctttataggcgcgggcgtgggtgagggcgaggggtcgggcgttgctcggtgcgggcgcgcggggtcggatgccccaacgtgctttagcgcgccaggcaaaggtcaaacatgtggagtgcaatcaacatattatctcaagaaacctcatttcacttcttactcgatgcagtacaaggggtcaagcagtctcattagctgcgagaagcagacgattcaaatcaagtttgaaccttgccagatcagggctcacgaccttggcatacaatgctccattgacccaggcccccaccgtccaatggtcgcacttgtactcaccatagctagcatgggaggctccatctcaaatccaatgaggaggaaagtctgtgggcaggttcaatcagtggtacaacagtggttaagtgactactaa

SEQ ID NO: 17030 - DNA, 579 bp, Zea mays
  Peptide Sequence Number=SeqID_60405
atgacttcatccacccccaccaacggaggagacactcgtttcagttccgattacctttcccacgagggcttcccttccatcttatgggaggtgctcagctccgctggttacccaacaccccctctatacacggtgcagttgtacgaggagcatcgggtgccctgttgccgagtctggctgactctagaggctcaccctctacagccgggttggcgttcccttgattctgagactattggattcagggcggacgacaccactaaggccgtagctatgaagaccctgacgactttctgcggataccatcccttggagatggtaatgcacccactaggactcttccccgctgagaagagggatgaccccatgtggtgcaaccaaagcgacaccatggcacacctcactaaccttgctcagaccactaagctcaccctcgactgtcgaaaggacttcgtggtcgacttgtcttcagaattggtggaaaaggacctacaggtggaacagttgagccagcgcatcgcaaccctagagcagcacgtggagatccagaataacaccattgatgtcctggagatctag

SEQ ID NO: 17031 - DNA, 273 bp, Zea mays
  Peptide Sequence Number=SeqID_60406
atggaagagtgggtccgccagttccaggcggagctggcggcgcaggcagcatcgggcccccacgcggtggaggcgatgaagaaaacgtttgaagatctccgggcggagcatcgcgtcggggtccagcgcatcgccgcatgggccggtgaggcgagcacgacactggtgccgctaggggtgagtcccatcctggtgtcggagctgccgacgtccatctccgacgcgctcccggtgctggactccgccgccgaccgcctccgacgcctagactag

SEQ ID NO: 17032 - DNA, 364 bp, Zea mays
  Peptide Sequence Number=SeqID_60407
atgggcactgagggcccagcttcgacttcaacacgagttgtagcagcttcggtggcctcctttgcagaggcaggagttggtgcccttgttgactccaagatagtgtctagcatgctagccatcctcctcctcttaggagttaatgcaggaactttggatagcttcggcaactccggttctggctcaggatttttggcagccctgccgactcctccagttatggagcagggtgttccagcccagcggcggaagaggtccccttggcaccggcaggagcagggccccaagcaattcatcactaattgcctcaacacagttcaaccagtcatcgtttggctcatcaaattgatctctatatctgaag

SEQ ID NO: 17033 - DNA, 741 bp, Zea mays
  Peptide Sequence Number=SeqID_60408
atgacgaagccagaaacaatattgaattacaaatgtaccttcggcttgacagaaggtcggttcctttttccgctatttagccgaaactcccttgcgcgtagcttcggagcaactcaaaccttcgtcacgatcaagctttttacatcgtatatgcttttcccccgagtccgaaggtacctgttcatatgtcacacttggaagatattgttaaattacgtttttgaggaccttcggaggacgaaggcctccaacagagaggtcggctgggatcagcctcaaaaaaatcaggatgctgaacgcgacatcgcaatcggaatcccttcggagacgatgtcagcatcttcatgggagcgagagttacaatcagcgacaccgtcctaccaaaaagcaccacgagggtacccctgggtgtgcggtcggatactaaacattgacaggggaggcgatgcacggacggggatcgaagaaacaaaaaagcttcatgggcaacaatggaggaagggctcaccggagaagaaaacctcatcggagccgaggagacaaacactgattggggatgaaacgtcagtcgaatcgatgaatcgaaagcaccaggacgaacctctctgtgagacaaacacaacggtacactcggattccaccgacgacgcacggatcgaaattaattgctcaccagagtttgtcatcggagttggaaccgtcccgaacttcggcgagcaaatccaggagtttcggatctag

SEQ ID NO: 17034 - DNA, 471 bp, Zea mays
  Peptide Sequence Number=SeqID_60409
atgggcaagaacaacaagcgcaagcgtgagccgactcctccatcggaggagtttggtgactcagaatactcggaggaggagttctcctccgagcccgaggggtctccggctcccgtctctcccccggcgtcgtccgatgactcggacgactcccaggggatagccgcggaggtctggacatatatccgggccgtcgagcgcgccgggctcgaaggctcggatgagtcggagtactcctcggatgaggaggactcggacggcggcgacgagggtgaagacgacgacgacgacgacgacgacgacgacggcgacggcagtggcaggggcagcggcgacggcagcagggacagcaccaagggcagcagcaggggcagcaccaagggcggcggcggggacagcaccaagggcagcagcaggggcagcaccaagggcggcggcggcggcaggggcaggggcagggccagtggctag

SEQ ID NO: 17035 - DNA, 675 bp, Zea mays
  Peptide Sequence Number=SeqID_60410
atgcggcagcacgccaagataagcttcgcaaaggtgaacgaaaatagagatttggagaatggagttagggttcaattgggacagtggtcccgtggcaagaacgccaagaacagagttcccgtggagggagaaccccgatggaaacaaggcggagaagctcaacttcagaaatcacagacatatggttacctgcgaaaggaggttaacgagttacaaaccaactctttacgagttggtacttccctaattctacactcggaggagtttggtgactcagaatactcggaggaggagttctcctccgagcccgaggggtctccggctcccgtctctcccccggcgtcgtccgatgactcggacgactcccaggggatagccgcggaggtctggacatatatccgggccgtcgagcgcgccgggctcgaaggctcggatgagtcggagtactcctcggatgaggaggactcggacggcggcgacgagggtgaagacgacgacgacgacgacgacggcgacggcagtggcaggggcggcggcgacggcagcagggacagcaccaagggcagcagcaggggcagcaccaagggcggcggcggggacagcaccaagggcagcagcaggggcagcaccaagggcggcggcggcggcaggggcaggggcagggctagtggctag

SEQ ID NO: 17036 - DNA, 80 bp, Zea mays
  Peptide Sequence Number=SeqID_60411
atggcgcccaagaggaaaaccgcgaacttgtttgctgcagtgatccccgccatcgaccccaacagtcaggtcccaatcag

SEQ ID NO: 17037 - DNA, 513 bp, Zea mays
  Peptide Sequence Number=SeqID_60412
atggcttcaaggcggtcatcaatggcattcacggagcttgaatggagggagagaaacagacgagttgattctccaataactcaaatacgaacggtcagcagggtcgcgcagcgtcggtcgggtcgcgcgctgggcgtgcaggctcggtcgcggctgcggggcactacgcggtcgacatcgggcttggcttggcgcgcgtcgtggagtcggctcgagcgtcgcggcaatcgggcgcgtgcgcagagcgcggtcgggcgcctgggcctcggtcctggtcatcggtcggggacgtggcagcgcgtcgaggtggctccacgggcgttgcgcgggggtggccgggttccagggcgggcgctcggccggctcggtggctgcgggcgcgtcaggcagagaggcagggaggaggagagagaagcgggagagggaagaaaatggtcctggcggcggcggccagggggagaggaaaccagggcggcggctaggagatgggacaagtgggccggtttagtttag

SEQ ID NO: 17038 - DNA, 465 bp, Zea mays
  Peptide Sequence Number=SeqID_60413
atgggcaagaacaacaagcgcaagcgtgagccgactcctccatcggaggagtttggtgactcagaatactcggaggaggagttctcctccgagcccgaggggtctccggctcccgtctctcccccggcgtcgtccgatgactcggacgactcccaggggatagccgcggaggtctggacatatatccgggccgtcgagcgcgccgggctcgaaggctcggatgagtcggagtactcctcggatgaggaggactcggacggcggcgacgagggtgaagacgacgacgacgacgacgacgacggcgacggcagtggcaggggcggcggcgacggcagcagggacagcaccaagggcagcagcaggggcagcaccaagggcggcggcggggacaactccaagggcagcagcaggggcagcaccaagggcggcggcggcggcaggggcaggggcagggccagtggctag

SEQ ID NO: 17039 - DNA, 288 bp, Zea mays
  Peptide Sequence Number=SeqID_60414
atggcgttggacatcagcatccagaattctccgcctgcatgtcgaaagagagggggccgcactgtcgtcattgtgtcggagttgccgaccggcagcgctgcgaacaccgccgccgtgccgtgggcagagcaagcctgcatgatgcatgctggactgctggaggaaccacttgttgaagccgaacctggtgctagcgtcgctaaagtagaccgtgccatcgaaggcctcgattgccgtgtccgcgaacctggcggcggaacggtcggcgtgctggcgtcgctaaagtag

SEQ ID NO: 17040 - DNA, 177 bp, Zea mays
  Peptide Sequence Number=SeqID_60415
atggggaagcttgtcccatcactcctcatgctcctcctgagccgagtgaccgcacttgtacccaccataaccggaatgggagaccacatctcaggtcgcgtgaggggcaaagtctgctgccaggttcaatcaggtctgaggttttgcttagagggggggtttgatctacaacagtga

SEQ ID NO: 17041 - DNA, 1074 bp, Zea mays
  Peptide Sequence Number=SeqID_60416
atggttgtctttgtcatgcaacaagctgtttggaatgttgacactaataatgaggcagttcaaggtttcaggagatctttacatgatgaggctgctcaacatgaggaatctgaagttatggatggtgaggatgacgatgatgaagacgatgatgacgaggatgatgatgattatgatacaaagaagaacaagggaactgctggaggggaagggcaacagggaaaacgacctacaaagtgcaagcagcaatactgtgttcttatgcttggggtgaagatggttgccactctggtcttgcattatctgttgtttcacaatgaggagacattggccttcagtgcgctacgccacatggagccactggtagtcactcttgtgcatatttttgttggcaaaaaatctacttcatgtccggtgtacaagaggttcatgagcttcaagaagaagcatagggggagggaggtcactgtcatcgactgcacgtcgccgccagcggcatgtgcagcggcggtgtgctctttgcaaagccttggagctgcctctcctacaaagtctgaacttgcagagatagtcccacaagagaaatcaccaaaaggtaatgcttcatttttcagcttccattcaaccaatgccgccgagtccaaggtcttctacctcaagatgaagggcgactaccacaggaaggatgctgcggggagcaccatgaattcctacaaagttgctcaggtttcctctgactgttcaccattattggaagcaggacaggcagagagccttggaaccgaactcttggagatggtgcctagcagggaagaggagattaagttgaaagaatacagggaggatgctgtgtcgacttttgtagttgatgattatgtgagacttgagtttaagggctcaactttttccggttcttggaagtcatttagtagccctaagatttcatcaacattcttggtagtaattgctatagtatcaaatgagattgtgatgtttgagaggaggattggtcgtcttagtacattgttcctggccatggaggaaggcttcctcgcgctcgtgtcaagcctgtga

SEQ ID NO: 17042 - DNA, 1395 bp, Zea mays
  Peptide Sequence Number=SeqID_60417
atgtcttctttctcccttaagcgtcgtgtcttcccatcttccaagcccccggatgggcggtatccgccgcctttccgcctcctcgttggaggaacgcaactccatgggagttggtacctctcagccatcgttcggcttcaaggattttcatcagccggcccggccgtacccccatgccgacgatcacccaggatggtgaccgccggtttctgggtggggaagagcaagtcgggctgcgatcttggtcccaccctcagcttcaaggatgttcatcatcctcgctggggcgggagccacgctgagccggcgctctaccttccgcgcgggtccgcgggtcgccctttctcgcggcgtttgggggtggaggcgctcgctggccctgtggacggcgcggacttagacaacgtggggctgatcgacggcgggcgtcgtcacctccagcgtgtcggagtcgtcggccgggcttccggcggcccctcccgccggagggtgaccgccgcatcaggccggcgccccactcgtctgggaggatttgagtggggatctgccggggggctggtgtcccctgccatcggcgccgaggcggaggcggctcgagaagtcctcgtcaccgacgggatcactgccaccacccgcgccccgggccaccgcgccggcgtgcttgtcctcgcccctcgagcgtcggcgggggcgagggcaagatcgcagcagcgccggcccactgtcgccgtagtcaggatgggcggcggcgagccggccgtcggtcttctgttgctccgcaggccttccccatggagtggggtcgttcgtacctgcggaggggggaaccggagttccgttcgtaatggcacttcgaatgccagtgttttttgttcattgtggctgtcggggcctgaacatccgacgccaaagtcgatcagtcgaggcctcaggtcgggctggcgcccttggaagccggttgaccgaggccccaggggtaaccggtcgagccgcctgctcgggccggattcccggaggagtccctggaccgcgtcgccgcccgaggctgggtcggactttgctgaagatgtcgtcgatgccgagggtgctacgactcccttcagcgtgaagacccgagcctgcaggatcagatcatcttgtagcgtgtgctttctgcggccgccgaggccagaaaaacacaccctcgccgcgcttgcgaagctacgtcttttttcctcttgtttcgagcatctggactctgtcggtaacagggatgtttgtgtgagcgagagttgcttttcgcggaagggacgagtgaggtatccgtatcccagaggcgtgggaatccctcggctcggtcggccttgccgcttacgcgtactttcacccgtccatgaggccctgtccccgacttag

SEQ ID NO: 17043 - DNA, 1197 bp, Zea mays
  Peptide Sequence Number=SeqID_60418
atggtccggggcaatggccgcctcctgcccttgtcccttctcttgctcgctgccgccgatttcacaacggtgcatggccaggggcagcagcctgaagggccgtactactcgcgaagcttcaacccatccatggccatcgtcatcgtcgtgctcatcgccgccttcttcttcctcggcttcttctccgtctacgtccgccactgctacggcgacggctctagcggctactccgcgagcccggcccccggcggtgccgccgcgcgatcgcggcgccagcagcgcgggctcgactcggcggtgctggagtccttcccgaccatggcgtacgccgacgtgaaggcgcacaaggccggcaagggcgcgctcgagtgcgccgtctgcctcagcgagttcgacgacgacgagacgctgcgcctgctgcccaagtgctcccacgtcttccacccggactgcatcgacacgtggctcgcctcgcacgtcacctgccccgtctgccgcaccaacctcgccctcggccccgacgccaacgccccgccgcccgacgacgacacgcctgagctgctgccggctccagaagcgcaggagctaccgtcgcccacgtccgcaccgcctccttctgctgcggtggtcatcgacgtggaggagacagaggaggagaggatcatcagagcggaggccgacgagctgatgcgcatcggcagcgtgaagcgcgcgctgcgctccaagtccggccgcgcgcccgcacggttcccgcgatcgcactcgacagggcactcgctcgcagcgtctgcctgtgccaccaccggcaccgaaaggttcacgctgcgtctgcccgaccacgtgctccgagacctcaccgcggcggggaagctccagcgcaccacgagcttagtcgcgttccgctccagccgcgggggcagcacgcgccgtggcgtcagcgtcaggacaggcgggggaggcggcgaaggcaccagccgtgccgggaggagcatccggctgggccagtcaggacggtggccgtcgttcctggcgcggacgttatccgcgaggcttcccgcctggggatcgcggtcgacgcggaggagcgtccagactgacgggtcgagcaagggcggtaggacagttggcgacgccggcgcaggcgccaagtcttctgaacatgacgaccaggcgtgcgcgcctggacagcgtgtttga

SEQ ID NO: 17044 - DNA, 906 bp, Zea mays
  Peptide Sequence Number=SeqID_60419
atggcggagggcattgcgcggcgggaagggaggagaggaagtagcgacaaggtcgccaagaccacctggtgcgatgtctcctaccagatcaccaagatcaacatgtacaaggatggtcggcatgtacaagatatgcttaagggatttgccattggttcaggtgctcttgttgtccctggtgctgtttggtgccttcgttggcagagctggagtgaaggttgtcgatgttctctcccgaaggttttcattggtttgattgttggagccatgttttcgtactggttctctgccatgaccatgaagagtgttggaagtgtcgccctaaagatggtggaggaggttcgcaggcagttcaacaccattcttgggttgatggagggaacaggcaagcccgactatgcaacctatgtgaagatttgcactgatgcttccatcaatgagatgattcctcggggtgctctggtcatgctgactccctcattgttggaacctctttggcatcgagactctctctggcgttcttgctggtgccctgatttttggagtgtagatgtcaccgagccgcttcttgtggaagttgaccaaatctatcaccttgcttgccctgcttcaccaatcttctacaagcacaactctgttaagaccatcaagacaaatgttattggtaccctgaacatgctaggacttgcaaagagagttggagctaggattttgttgacatcaacctctgaagtttatggtgatccacttgagcatcctcaaattgaggcctactggggcaatgtgttaggagttgttatgatgaggaaatccggattgccaggatttttaacacctatgggcctaaggatgaacattgatgatggccgtgttgttagcaacttcattgctcaggctgtgcggtaa

SEQ ID NO: 17045 - DNA, 243 bp, Zea mays
  Peptide Sequence Number=SeqID_60420
atgatgcatgggctcaggaggatgttcatgtcacagaagggcaagatccaggttatagaggatatgaagcagtttatttttgtctattatgaacttggtaacttctaccaaaaccataggagccttgttgataacaataatttatctgggcctcttccaccagaattagtagatacacttccaccagaattagtagatacacgtagtcttcttgctatcttggctcctatggctgccaaatag

SEQ ID NO: 17046 - DNA, 594 bp, Zea mays
  Peptide Sequence Number=SeqID_60421
atggcgccaagcctagaaaaggctcagaaacgccatgccccatggggacgacaacctcagataaaaccattgtctgtgccaacccttgttagacaaggaaaggggaatcaagatatactcacgcgaccttccagtgcaaaggcggatactggcgcacccgactggccacacctccattatttttcgctcctcctttcgcaacagctcgatgcagaaaaaagtatagccataaggctagattgggctcgatgcccagatcaggttctggaaggccacagacaaagcaccctgaggaaccaccatcagagcacaaagatcgaccccagtgtggagcaaagcgacggtaaaagcaacggtggccccacggtgaatgttgtggaccacgacttcctagagacaactggggatgtcaagccagcgctagaggcgggttaccctgcgggcatggacactctgagtcgctgcatcgatctcctgacgaagccctgccagctcagcttcctgcctagcttagaaacaaaaaatggagatttgaacatccttgggaaacagggagacatgaagagcagggtgaatggcttactcgatgcatga

SEQ ID NO: 17047 - DNA, 324 bp, Zea mays
  Peptide Sequence Number=SeqID_60422
atgtcgtcctcctcgcatcgcctcaccctcctcgcatcgcccgcccgtaactcgccgaacgagaataccgccaccgatgcccccgtgcggccggtgatgcagccggcgagcttgtctgcgatgagagccgtcctcggggggacacgctcctctatccatggcaactcgtccaacaccatcatcctctggcctgggcggtgctccctccctctccggctctccctccgcccccaagcccaaatcaccgcgccccgccccacagcaccggttgcgtgggaggaaggagaaaggaaggagaggggaggcggctgtcgggcgagatga

SEQ ID NO: 17048 - DNA, 183 bp, Zea mays
  Peptide Sequence Number=SeqID_60423
atggagcaggtgccacgtggtagcaggtgcgacaaggggaagggggatggtgttgctggcggtaatggcggtgggtgcgctgcaaagggggcgtggggcggtggttggaggcagggcacgcgtgcggggggcacggagaaaacctttcttaacaagaaagaaaacacagaagctcagcaatga

SEQ ID NO: 17049 - DNA, 369 bp, Zea mays
  Peptide Sequence Number=SeqID_60424
atgacggactccgcctcgcccgaccctatggctcggacacagccttggcctcggaagacggtctctgcctcgcccgacccagggctcgaactcaacctcgacctcggaagacggactccacctcacccgaccccagggctcggacacagcctcggcctcggaagatggtctccgcctcgcccgacccagggctcggactcaacctcgacctcggaagacggactccgcctcgcccgaccccagggctcagactcagcctcgacctcggaggacggactcaacctcgaactcagaggaatcgccacctcgcccaaactcaggctcggaccgaccacgtcgccaggggggccatcattaccctactcctag

SEQ ID NO: 17050 - DNA, 708 bp, Zea mays
  Peptide Sequence Number=SeqID_60425
atgggtccacaggtcctagtggggggcaatccccaaaaatccttcacaaaccgccgcgaagatggctgcttgcgggatggagttgggactgagattgtgcagctccaccccgtagacgtgcagaatcgctcgcataaaatgacttgccggcactccgaacccccgctcgtgaaaagagacgaagctcagcacataccctggcggcggggacggggcggctccgctcggaggggccatccactccggctgcgagtcaccggagagaggacgaagcaaaccatcagcaacaagggcctccagatcatccgctgtgacggtggagaaaggccacgggtcgcgcggcgaaacaacggtcacccggtcggccatcaccaagcagaagaggtggcggtggagaggacaaggacaggcggcacctttggcaggcaaagcaggcgacgcttcacctccgccatgatgaccgcgtcaaaaaaggagcgccacggaccgggaaaggggatactccgaaaggggtccttctccgcgaaggaagcgggccccgagccccctactgatcagaggttcgaaggctggcccctcggaagggttcaacagccgcctcagagcactcgggctccgcgcccactactgatcagaggtttgaaggctggcccctcagaagtgttcaacgaccgcctcaggccactcgggctccgcgcccactactga

SEQ ID NO: 17051 - DNA, 903 bp, Zea mays
  Peptide Sequence Number=SeqID_60426
atgtcagctgaatctgcttactcgggttggcttgtatcaaggaacctacctgatgtgtttgctgtacaggacaagcctcagccgccacctgagggccgtcttcctgatgccaccaagggttctaaccacctgaggcaagtctttggcaagcagatgggtttgagtgatcaggacatcgttgccctctctggtggccacaccttgggaaggtgccacaaagagcggtctggttttgagggggcctggactacgaaccctttggtctttgacaactcttacttcaaggaacttctgagtggtgacaaggagggccttcttcagctcccaagtgacaaagccctgctgagcgaccctgtcttccgccctcttgtggagaaatatgctgcagatgagaaggcattctttgatgactacaaagaggcccacctcaagctctccgaactgggcattctcactgggcttctgtccttcatgatggacgatgcactgacaactggaagcatcaagacatcagatgcagaaaagaggcgtttagcaaaagcttcccttgcctacaattgtgagagcaaaaactgtccgcacttcaggaaacttttcccagagtatgttgagaagtacaatcaacagctacaattggagaacactgctgcagagccggtgcctcaggagaatcctgcacctgctccatcccctgctgcccagcaagccccgaccgtggccaatagggcacaaccactggcggaggcgcgccgtgacaagaaccagaagaaggcggtgcccttctggatggtgctgtgttggcgtgctgcttcttttctgaaatacactgagttgaatcgtcgagaatcacttgcccttgcttcagatggattgaattatgaatgcaatgaggctccatcatag

SEQ ID NO: 17052 - DNA, 1026 bp, Zea mays
  Peptide Sequence Number=SeqID_60427
atgggtggcctcaagctccggcggctggcatccaccttcctctccccaggccccgcatccccgggctccgcggccgacgcgcaccactcggtgtggcgcgcgacggctcaccaccctagcacggcgccgccgtccgcgcagcacatggacgcgctcctggccttcgggcggggctcgcgcctctccgccgcgtcgctcgccgcggcgctcgtggaccgcctgcgcgccgcggcttcggggcagggcgacgccgccgtggctctcaagtgcctcgtggcgctcagggtcctcctggcgcggggcgcgttcatcctccgcgaccagctcctcgccgcgctcgcccggcacccggcctccgggcgcaacccgctcgcgctgtcgtcgttcccgctcggccggtcctccttcgccgccgcgtcgtgggtccggttctccgcgcggctcctggagctcctcctcctgctcccggacgcctccgcctccgccgacgccgacgccgagtacctcaccgcgctccccaacccgcacctggtcgccgagctcgccgccttcgtgtccgtcgcggacgccgtccgccaggccccgccgcccccgccctcgggcccacagcccaacgcgctcatctgggaggccgtccgcctcgccgacgaggaccgcgtcgcggcggagcggagcatcgtcgcgcgggtccaggagatgggggagcgcctcgacacgctctccctggccgacgccgtggagctggtgtgcgtgctgcggcgggtggaggacggcaccgcgtcggattgcaagtgggcggggctggacgagggcgtcgcgcgcgcggctcggggcctccgcgagcgcgccgaggatgtggtgctgcggaggacggtggaggaacggcgcctggtgcggagggacgccgcgggcagcgcgtccgcgcgcaccatcctgccgatccgcgccgctgctggcgacggcggcgccgtccggttcgggtccacaaggtgggctggcacagtttctgcgccgcgtagacggtag

SEQ ID NO: 17053 - DNA, 489 bp, Zea mays
  Peptide Sequence Number=SeqID_60428
atggccgaggctcaacgactcttcggccgcgtcgattcgtccaccccggtggtccaccccactcccggtctcgacgtcgccaccatcactgctcttcacgctcaggcggccgaggttcacaatatacggtctctggtccccgtagtgttggatccggcgtcaccccacttcgcccgcttgcgcgatgaggtgctcctcacgctccagcgctacgccctcaccgaccacaacatcatccgcaagcagggggcaccactcgccaggcctaggtcgccctcgaagctcagttcctcgccttgctacaaccacctgaaggatctcaacaagaggacagtgtcttttccctccttcggcaacgtccgcaacaagcttctcctcgagaagctcaccatggaggctgagtcctccacccctgccatgtctctctacgcctcccccccccccaccgacggggacccctatgcgccctacgaccgcttccaccactag

SEQ ID NO: 17054 - DNA, 903 bp, Zea mays
  Peptide Sequence Number=SeqID_60429
atggagagtacaggggggaagagttcaggatgcttggacaatgcgggagcagctggaacactttatgaagcagtacctaagagtattactgttagcaacaataacttgagcacacaaacggatacagtttttctagaccccccatatgagccactctggacaaatgtttttgtcagaaattgtgccaaagtttctcttcccttacggtggagccgtattcaggctcaaggacagattcttttatctggtgctactctaacttttggcctgacacattatccatattcagaatttgagctgttggctgaggaacttcttatgagtgattccacaatcaaggtctttggcgctttacgaatgtcggtaaagatgctccttatgtggaactcaagaatgactattgatggtggccgagaactaggtgtgggaacttcattactagaaggtagcaatttgatagtgctgaaggaagcatctgtcatacattcaaatgctaatctagggattcatggtcaaggagttctaaatttatctgatgttgagacgggattgaaactcaatgaatacactcgacgacaaccccttgttgaagacgccaacgaattgcgaggtggtcgggacttggagaacgcgaacatcaccgacggcgacgcgctcgcggacaaagtgaaggtcgagttccacgtgcttcgtgtgctgatgctgcacatggttggagaggtagaccatgctaacattgttgcagcagacaagggtggagcgcttgaggggctgtggagctctgaaggagctagcggagccaagatgcctcggtcacaccgttggccacaacgcgatactcggcctcagcgctggagcgggagacgacatgcttttgctttgaggcccaagggacgaggttga

SEQ ID NO: 17055 - DNA, 528 bp, Zea mays
  Peptide Sequence Number=SeqID_60430
atggcaatcatttttgttaacaacatcaagtcaatcaccagcgatatgttccactttggatctatctcgtcgatcgtcgatcagaacgacgacttgcaccgcatctacgacgtggtggaggaaacacgaggttgggcgaggtggaggctcctccgaggtcgaggtcgaggtcgagtctgtcttccaaggtcgaggtcgagtcccgaccccccgggtcggacgaggcggagaccgtcggctgaggccagggctaagtccgagttcgagccctggggtcgggcgaagcggagttcgtcgtctttcggggctgagcccgtgtccgagccctggggtcgggcgatgcggagttcgtcgtcttccggggctgagcccgtgtccgagccctggggtcgggcgaggcggagttcgtcgtcttccggggctgagccagtgtccgagccctggggtcgggcgaagcggagttcgtcgtcttccggggctgagcccgtgtccgagccctggggtcgggcgaggcagagtttcctatga

SEQ ID NO: 17056 - DNA, 939 bp, Zea mays
  Peptide Sequence Number=SeqID_60431
ccgcgctgtgcttcggccattacctggggagctctaggtgctctcggaccaggagaactgccgcccgaaagaccggaattcctcaccgtacctggagctccgccgcggatccgcaccacgccgtggacagcttcagcggctccgccattcctgggcgcgaggatctccggggccggtcatggcgccgtcgcattgctctgagcgccgcccggttcggcgccgcctgcgccgctccgactgctgagccacccgacagagtgaggctgacagcagccaagaccggcctcgggcgtcataggaaactctgcctcgcccgaccccagggctcggacacgggctcagccccggaagacgacgaactccgcttcgcccgaccccagggctcggacactggctcagccccggaagacgacgaactccgcctcgcccgaccccagggctcggacacgggctcagccccggaagacgacgaactccgcatcgcccgaccccagggctcggacacgggctcagccccgaaagacgacgaactccgcttcgcccgaccccagggctcgaactcggacttagccctggcctcagccgacggtctccgcctcgtccgacccggggggtcgggactcgacctcgaccttggaagacagactcgacctcgacctcgacctcggaggagcctccacctcgcccaacctagggcacggaccgaccacgtcaacaggaagctccagcgctcctccgacgggcacgacaccacgcgaactgggtgccaagacctctccggctgccacgatgacatggccctcttacaggaggttggccacgcggggaatgacgggacggcgctcgcgcaaggccactcgctccctcccgcgtggacgcttgtaaccccctactgcaagcgcacccgacctaggcgcggggctaacacgaaggccgcgg

SEQ ID NO: 17057 - DNA, 306 bp, Zea mays
  Peptide Sequence Number=SeqID_60432
atggagaagcatcatcatatagaaagtcatcacatgagtagtcctcgtgctgaatatcgtcttggttgtggccccgttgccgaagatcatcatggttatggccttcatgccaaatatcctttgatgatgcttcatcaatttgcttctggggttgagaaagttgaagcattttttatttgtgttctcaatttactaatggatagtctcgaggttacagatctactgatcgagttcatcatcttgtgggttcaatgtagtagatctgagaagggcacttctcaaaatccacacaccaaaaagatataa

SEQ ID NO: 17058 - DNA, 708 bp, Zea mays
  Peptide Sequence Number=SeqID_60433
atgtcttcacgctcccttatgcatcgtgtctttccaccttccaagcccccggatgggggagatccgccgtctttccgcctcgtcgttgggggaacacaactccgtgggagttggcacctttcagccatcgttcggcttcaaggattttcatcacacagcccggttgcacctctccgctggtggtcacccaagacggtgacctccagcccctggacggggagaggcaagccgggctgcgatcttggacccgccctcagcctcgagggtgttcgtcatcctcgctggggcggggagcgaggcgagccggggctctacctcccgcgcgggccggcaggccacctcttctcccagcttctggtggtggcaaacaccctccagttctgcggaggagacgtcctccagccatgccggggaaggcgtactgttgctgcccagctaggatgcaacattccgccctcttccttgcattcgaggcaaggacgacagcgaggacctgccggcgcgcttgggagcggcccgctctttggctttaatagctggttcgcgtcccttgagcgggaacgcgaacgagagccctccggcggccgcgtccgtcctgggaccatggctgctgctgcagaggtcgctggcgggtcccctggtgttcgtcgccccgtaggcccgagggtgttcgtacccgcggggacggaaccagagttccgtttgtaa

SEQ ID NO: 17059 - DNA, 900 bp, Zea mays
  Peptide Sequence Number=SeqID_60434
atggaggcccaggcccacgcgtcatgcaaccggtgcgccggttgctacgtgagaagcgagcgacgcttcgccttcgccgtaatgaccgcgtcaaaaaaagggaccgggaaagggggataccccgaaaaggatccttccccgagaaggaaccaggctccgagcccccctactgatcagaggttcgaaggctggcccccagaagggttcgacagccgcctcagatcgcgtgggccctacacccactactggtcagaggttcgaaggccggcccctcgaaagggttccacggccgcctcaggctactcgggctccgcgcccattactgatcaggggttcgaaggctggcccccgaaggaatcccatcagagggaggcatcgagccctcggaccccgtcaccaggggaccgggtctggcagatcacccgcggctcatcggagacaccatgttcggcgcccatcgagggcaacaaggcgctttcccccccccccccctcctccttgcggaaaggcgacgtaggggccgtcaacataccagcccgagaacttgggacccgaccgtacacctgggctacggccagctcgcatgagggaacgaccagaccagccgaagcactacgcaaggcattaagacctcgaaggagtgaaaccactcctccgaggcctcgggggctacacccggcgggtgcgctcgcgcgcacccaccggaacaaaacgcaaccgaggaaggctggtccccttgcaaaaaagtgcgacgaaagcctccaagcgagtgcaaacactcccttcgaggctcgggggctactgtcggggactataattaggggtaccctcaaggctcctaattctcagctggtaacccccatcagcacgaagctgcaaaggcctgatgggtgcgattaa

SEQ ID NO: 17060 - DNA, 474 bp, Zea mays
  Peptide Sequence Number=SeqID_60435
atgcagacacacacctccataaccaaagtctatacaagaagaaaacagaacccccttcaggatcaagatgtggatgttggcttgacaggaggaagatgcaatgacttgggcaagaatcttagcgtggactttgccctggattctcaaactcataccaatcaggaccaagcttcagactgctgcatcgatagtggcattgatgcttttatctgcaagatcagcaggaagacggcagggcttctcccagctcccaagccttccctgaagactgcatcatctcaggtgattaatgctcccaggcgcagcagaagagttgccggcattagtgtggaatttgaaatgtatgattgcagaagcaggacttccagaaaagctatgagggtcttgcaaatcatcacagaaagtgaagatatgaataaggaagccttgcagaaatatggtgttctttttaaccaccctcttaaccagatctag

SEQ ID NO: 17061 - DNA, 264 bp, Zea mays
  Peptide Sequence Number=SeqID_60436
atgaagacgggcaactggccaataggaggcaccagcaaggcggctaaggactccggcgaaggaagcacaacgttcgacggcgagcagacgtggcgcaagtcagagcaggaaaaacagaggtctctaattggggaagaaatggctaggaaagaaaccgtcacgactgggtgtgggcatgcgaggctaggcatggcgacgatggtggtctccactgggaacgcggacgggcaggcaggcaattgggagcttgagcgacggggctga

SEQ ID NO: 17062 - DNA, 264 bp, Zea mays
  Peptide Sequence Number=SeqID_60437
atgaggacgggcaactggccaataggaggcaccagcaaggcggctaaggactccggcgaaggaagcacaacgttcgacggcgagcagacgtggcgcaagtcagagcaggaaaaacagaggtctctaattggggaagaaatggctaggaaagaaaccgtcacgactgggtgtgggcatgcgaggctaggcatggcgacgatggtggtctccactgggaacgcggacgggcaggcaggcaattgggagcttgagcgacggggctga

SEQ ID NO: 17063 - DNA, 1815 bp, Zea mays
  Peptide Sequence Number=SeqID_60438
atgcccaaacctggtgattgcagcagcagcggcgttggtgggccgagcgccggggacgccaaggacttgccccaacttttcctcagagtgggcgcggccgtcacgctctccgtagccgagtcggatgatgcttgcagcatgaaggccagaacagggctcaaggagcttaggatcctaaaaaatgaggataccaaggcaaaaattatcagtgggaactctgtgcacacgaccactaccactacgacaattaccaccaccgcattagtaccattggcccctaaatgcagaagccttgctgatgatgaaggctatctccttccggagttcaatgacatggttctcagagaatttggccaagatatagatagcattccatccacacctgcagcgagagtaagggaagatgtatcgaatgaccatgaagtccacaaacttagagatttggtgagatcactgcaagaaagggagaagactctggagctacagcttctggagtgttacggtttgcaggagcaagatgctgcggtgagggagcttgagaatcagctgaagattaacaacgttgaatcaaagttgtacttgctgaagattgaatctttacagactgaaaaccagaggctgcaaacacagctctcagagaactcaaaaatattctctgagcttgaggcgacaagaacaaaatgcaagtttctgaagaagaagtttatatcggatgcagaacaggcaaaggagcaaatcatttctcttcagaaaatggtcgactcattgcagaacaaacagactgatgaggagaaaaaatttattgagtttgaaaataaactgaagagactagaggagctggaaaaagaggcaacagagctaagagcggcaaattcaaggctgcagcaggagaatgcacatcttattaggcgactggaggttacacgcctaccccctgtacccaagcccaaaactagtatggaggtaaaagcattggaggaggctgatcggttgaagcaagaaactgataggttggctaaagaggttgaacaacttcagagtggcaggtttgcagatgtcgaagaattggtatatctgaaatggataaatgcctgcctacggtatgagctgagaaacaaggatgccccatcagggaagactgttgcacgagatcttagcaagaccctgagccccaagtctgaattgaaggccaaacagctgataatggaatatgccaatgtgggtgcggaggacagtcacttggggcatgtcgaattcggttcagagtgctcttcctcacgggcttcgtcaggtgaaccggatgatgtgtcaattgatattgcttccatgacaaagcatactaataaaaaccccaaaaagaagaagttcttctctaagcttcggaaactggtgctgggaaaagggaaagagaaccgtgaaatttctactctggagaggagagtgtctatttcaagttgttccttcgatgacttcactggaagggattcacatgatagctattcttcgttcatggcagaaccaaacatgcctgatagtcgacggcatggtgatcatggctttggtacacattcttctttggacagcgcaaaatctagtcctcttggcacagaaattgtaggtgaaagaagtgaccattctgtggtgaagagtgtatcttctagagaggaaaaggtaaatgcattcggtcccagcattggccttgatagtagcaaggccatacctgaggatgttgagatccataaatttgctgatgcgctgatcacatcaaggtcaggttccatgtcatcaagaagatcggcatccttccgacactga

SEQ ID NO: 17064 - DNA, 2340 bp, Zea mays
  Peptide Sequence Number=SeqID_60439
atggatcagtacaagaagacccccattacggtccctttcctcctcggttctcttgatggcttcattaaggcagggagaaaggccgtcaaaaacacaggcgtttcggtgtggggttgtccaactctagcaggctgccgaggtggcattggaagaggaaaaatgttaagcagtgggtttagtggtgggggtgggcatggtggtaaaggcggtgatggcatttataatggtggtcatgtagagggtggatctgcgtatggtcatgctgatttaccatgtgaacttggcagtggcagcggtaatgtcagtggatcttcaactgctggtggtggtataatagtgatgggttctttggaacaatctctgccgaacctctccctttctggctcgattgaggcaaatggtggtaattttactggtttgatgtctcatgccacaattggaggacctggtggcggttctggtggtacaattcttctttttgtgcggacattactcttgaagaaggactctgtactttctagtgttgggggagttggtggcaatggcagtggtggaggtggagggggtcggattcacttccactggtttgatattcccactggagatgattatattccttttgcaaccattaaaggaacaatacttgcaagaggaggagtcagtgaagggcaaggtttctctggtgagaatggaaccatcacaggaaaggattgcccaaaaggtctttatggaacattttgcaaggaatgtccctcaggaacatacaagaatattactggatcatctaagtccatgtgctcaccatgccctccaaatgagctacctcgccgtgctgtatacataagcgtccgaggaggtgttgctgaacccccatgcccatacaaatgcgtgtctgatagatatagcatgcctcactgttttactgcccttgaagagctgatatacacgtttggtggaccttggttgtttggtctgcttctgtctggccttcttgttttattagctcttgttttgagtattgctcggatgaagtttgttggtactgatgagttgcctggaccagcaccaactcaacagagctcccaaattgatcactcttttcccttccttgaatcactgaatgaggtattggaaacaaacagggcagaagaatctcactgtcatgtgcacaggatgtatttcatgggcccaaacaccttcagtgaaccttggcatctcccacacaccccgccagagcagatttcagagattgtgtacgaagatgcatttaacaaatttgttgatgagatcaatgctcttgcagcctatcagtgtttcatggttggattatctggggcaaagtcggtagctgctactccagatttaatgctgggttatttagatttcttccttggtggggatgagaaaaggactgatcttcctcctcggcttcatcaaaggtttccaatgtccctgatctttggaggtgatggaagctatatggctccattttcacttcatagcgacagagtggtcacaactcttataagtcaggctgtgccatcatctatatggcatcgtcttgtagctggattgaatgcccagttgcgtttggttcgccgtggaaatctaaacacatcacttctccctgtgctcaaatggctagaaagtcatgcaaatcctgaattgaacacgtaccgtgtgcgtgttgaccttgcatggtttcaaactacagcattaggttaccttcagtttggtcttgtccttcatgctgtcgggggagtggtggctgctgaactccaggatggctgtacaagtaaaaccgatcagcattcagtaaaccagaatacatgcactgactctcaaatgggccactcaaggaccaatgatgttctgcgtaaaaggataactggcaccattctcaatgttgacaacttaaggatgcttggtggcaggagaggtttcttttaccttctctctcttatcttgcacaatacaaaaccagttggacatcaggaccttgtcggcttagtcatctcaatactgcttcttgcagatttcagcttagtcttgcttactttcctccaactatattcatattctatggtcgatgttctgttagtcttgttcattcttcctcttgggatactagcaccatttccagctgggataaatgctctttttagtcatgaacagcggcggtcagctggtcttgctcgtgtctatgccttgtggaatattacatcactggttaatgttgttgtggcttttgtatgtggatttctgcattacaagtcatcaagcaaaaaacatccaagcatgcagccgtggagttttggtggatattgggccattttttga

SEQ ID NO: 17065 - DNA, 888 bp, Zea mays
  Peptide Sequence Number=SeqID_60440
atggaccccaatggcttggtggattcacagagatttcttcggcttaagaagaagcgaagaagatcaaaaggaggcaagacaggagttggcgcgtctaggattgtttcccccggctcagctgatggtgttgatgctattcttcctatgcctcggctggtcgagcttggggatagtcgtccacccctagttgagtctcgggtattggctttctatgatgagctggcgcgagaagaaatcaagttacgtcgggccttgttcgttaccattgtggagacgaggcctgaggttcatggatcggatgttctggaagaggtggctcgcagttttgaagtcaatgtgagagatatgtcaattcatcaagcgaatcctgaagattttctactatttttgcctggtgaagatacggcaacacgcgtgctcaatggtggaagattttttgttgaccctcgtttcaacttgcttttcaagagctggtcgcgtttctcgcatgcttcctcatcggtcatgtatcaattggtggacgtcgtggtcagaggtcttccggagcatgcatggttccgctctacggcggaggtcattcttgaagactcatgcttcattgaggaggttcatttggatatagttcacaaaagggatttctcttcctttgctgttaggactcgatgttttgatccagagaggttgcagcggaatatgattctacatatctcggagccagggccacaatccaatgaagcaaggtttttgtcatacaatattagtgttcaagctatcccggtaaatgccaatgaagcttcaatgcgccctccggctgatccttcgacgaggacgggtggggatgatcggtctagtgcatcgaatgatgatgtctcagacccttcaccttga

SEQ ID NO: 17066 - DNA, 456 bp, Zea mays
  Peptide Sequence Number=SeqID_60441
atgggcgtgattaaggaaaacagcgccgcctgcgctgctccgactgctgtgccactcgacagagtgaggctgacagcagctaagtccagcctcgggcgccatgagaagctccgcctcgcccgacccaggtctcggactcaacctcgaccccggaagacggtctccgcctcgcccgacccagggctcggattcggcctcggcctcggaagacggtctctgtcggcgtttcgagacaggggggtccctaagccgacgagtgagtgtgctgcgtgccccagcccagatgggtcgagcgcgtgggcgagcgcgaaggggggagaggcgaggtggccggagccgagcgtgagagaggtggaaatccctccggccttcgtgttcgtcccgcgcccaggtcatgtgcacttgcagaagggggttacaagctccccgcgggtgagggaaacgagcgttccttaa

SEQ ID NO: 17067 - DNA, 535 bp, Zea mays
  Peptide Sequence Number=SeqID_60442
ggcggagtccgagccctggggtcgggggaggcggagtttcgtcgtcttccgggtcttagccagagtccgagccctggggtcgggcggagcggagttcgccgtcttccgggtcttagcccgagtccgagccctggggtcgggcggagcggagttcgccgtcttccgggtcttagcccgagtccgagccctggggtcgggcggagcggagttcaccgtcttccgggtcttatcccgagtccgagccctggggtcgagcggagcggagttcgccgtggcgcctttggcaaggcctgactgcctgtcagactcactctgtcgagtggcaccgcagtcggagtggcgcaggcggcgctgtccttcgtcagactggccagtggagcggaggagtgacggcggtcacttcggatctgccgggggcgcgtggctcggactcagcctcgacccaggaagacggactccgcctcgtccaaccccagggctcggactcagccttggcctcggaggagcctccgcctcgcccgacctcgggctctaa

SEQ ID NO: 17068 - DNA, 720 bp, Zea mays
  Peptide Sequence Number=SeqID_60443
atggagtgcccgactgcccgaggggatcctgttcctgaggcaagggcactgaaagtaacaaacaacccatgtgatgtgagggagccttttcagctcccagcttcccctgtgtctctctcccaacttccccagggaggagcagtaaaccagaggagagaaaagaaaagatcgagggggaagaccggaagaagaagaagccaagaactcggaagaactctccaagaaatcgaccgagcctggaggaaagccggtggcaaaggcaaatcacggccggatcgatcgcggcatcacgatacccggatccgcttcttgggggacagcgaccggaagacggtggagaggtcgcgcgggacggcgacgaacacccgcacgggcgcgggcggcggcttccgcttggcgggcagccgcggggccggcggcttgcgcggcgccggcgggcacacggcgggcgaccgcagcctgctcccctccgacgtcggcgtcgacggctcgcgatcctcttcctccgcggccttcgcgctgtccaccgccgacgacgccggcgacggagaggacgaggccgaggccgaggccgaggacgtggccgtggcggacgacggcaccgggggcggcagaggtgtagtcttgatgggcggcaacccggggagatcctcgtcgacgggtgacgccattatctctccccgctcgaattaccgacggacttattcaacggcgctgtaa

SEQ ID NO: 17069 - DNA, 85 bp, Zea mays
  Peptide Sequence Number=SeqID_60444
atggcctttaagggggctcgagcggtttctcgagtgcctctccgtgacaatgagactgatggttttggttatgactatggtgctg

SEQ ID NO: 17070 - DNA, 573 bp, Zea mays
  Peptide Sequence Number=SeqID_60445
atgaacgaactcactggcattcgaagtgccattacaaacggaactccggttccccctccgcaggtacgaacaaccccactccgagggggaaggcctgcggagcaacggaaggccgacaaatggtgcgccgtcacccgctccagcagcggcgacgacgacgccttctgctccgagggaccaagcagcggcaacgccgacctcaggctcgatgccgctgccaggaggcccccgcccgtgccaaaacttgtgaggcaaggacgggcagaaggccatagagttggagggaccgggaaagggggataccccgaaagggatccttctccgcgaaggaaccgggctccgagccccccattactgatcaggggttcgaaggctggccccccgagggttcaacagtcgcctcagatcgcgcgggcccgacacccagtactggtcaggggttcgaaggccagccccccgaagggctccatggccgcctcaggctactcgggctccgcgcccattactgatcaggggttcgaaggctggcccccgaagggttcacagtcgcctcagacaccgagcgagggatga

SEQ ID NO: 17071 - DNA, 747 bp, Zea mays
  Peptide Sequence Number=SeqID_60446
atgatgaccgcctcaaaaaagcgaaggaaacggaccccaagccctcctactgatcaggggttcgaggttgcgccttgcggggttcggcaaccgccccagagcacccgggctccgagccctttactgatcaggggatcgaaggctggcccctcggaagggttcgacagccgccctagagcatgcagagtcagggatgaccctgggtatgtccgttacatggccgaggctcgggctacgctcccgaggtaccctaggacatttccgagaccagcgggaacgatttgtaatggaatcccaccggagggaggcaccgagcccttggaccctatcaaatgggtccgggtccagcaaatcacctgcagttacttcgcccctttactgatcgttctgacaggaaaacagcactattcaccctgttccgactactgtgccaaccaccagggtaaaactaacaacagtaagtcacgacctcccctgagttcagcctcgggcgcaacagggagctccgcctcgcccgacctcaggcctcagcctcagctttggcctcgggagaaggtctccgcctcgcccgaccccaggcctcgacctcagcctcggcctcgggagaaggtctccacctcgctcgacctcgggcctcggcctcagcctcggcctcgagaggagtcacaacctcgcccgacctcagcctcggcctcaggagaagtctccgcctcacccgacctcggcctcggaccgactactccatag

SEQ ID NO: 17072 - DNA, 123 bp, Zea mays
  Peptide Sequence Number=SeqID_60447
atgcaggcggcatgcaaccgcaccaagggggcgcaccccttcgacttcgacgcgtccagcatgggggcccaggcccacacggactgggaaaggggatactccgaaagggatccttctccgtga

SEQ ID NO: 17073 - DNA, 228 bp, Zea mays
  Peptide Sequence Number=SeqID_60448
atggcccaccatgcctcgccacccgtcttcggcgccctcgcctcaccctctttctccccacgccgccgctactggctacccctgcccacaacaccgccatcttcttcctcgctcgtgcccaccgctgtggggagagcaaaggagacgggagtgatggaggccaccgaccataggagattacgacatgagggtggatcgaagatatggcttgatttcaggtgcacgtaa

SEQ ID NO: 17074 - DNA, 243 bp, Zea mays
  Peptide Sequence Number=SeqID_60449
atgaagaaactgaggcttggtgcagagttcaatgttgtgagcatgaggattgtggcgctggccctggtggccctgctggtggtggcggcggcggcgcccgtggccaccgcgtacggctgctacgacgactgctacgagcgctgcgccaacggcaagaaagaccccgcctgcaccaagatgtgcaaccaggcgtgcggctccacggatcagggcgccggtgccgccggcgccgcgccggcttga

SEQ ID NO: 17075 - DNA, 744 bp, Zea mays
  Peptide Sequence Number=SeqID_60450
atgatcaactgtgcctgtggggaggtctctcgaacctcgacccccgaagccgaagggtcaagtatcccctcggtctgcccccgctcttcggaccgggaccccgacgtcccggccccggaaaccgacggcgccagcccgctcgggggctggcttgacaactcctggccgagcctcagatccgggctaatgccaaggcgagcagccatatcgtcgtcctcgtcatcgtcttcatcgtcgtcgtcgtcaggcctttccggcgacggctccctcgggagcccatccctctcctgccgacgacggagcctttccaaggcgtcccgagcccgcatccgctcatgggcccgagccttcttcgcgtcctttttctccttcctcttctccgcggcaaccctctgcgcggctcggtccaccgcgtcctccgggaccgggggccgggaaggcttgtgccaccctacctcctggggacagacggaaagtctcggctgtgagaaccaagggcaatccgacgtaaggagaaagaaggagcggacactcaccagggacacacacccgcggtcgggacgcatcaagggctgggaaagggcgccggcgtccggttttcccaacgcggcggctacccgcccatggaggtcgccgacggaaagggtatccgaggacatccgcgaaccctccaagtcagcctccggcgtcatctcccaaagcggcaaccgccgctccgtcaagggaagcaccctccgacgatga

SEQ ID NO: 17076 - DNA, 570 bp, Zea mays
  Peptide Sequence Number=SeqID_60451
atggagatgacggtgcggggcgctagtctacgattgcgaggtccgcggagctgcggcatggaaggaggcaagggcgcccggggttttatcgctgtggtcaaacggttcgccgccgagaagcccggcggcagctgcgccagccgttcgcgagtgatggagacgatctgggcgccgcggagtatgacacctgggacccacgcggcttcctccccctctactcccaaggcgcgcctcctccgccagataccagctgggggacctgcgcccgctcccgacatcgggggtgacctaggaggcgcgtccagcgccgtccctccgcctgccccggaggagctggaggtgatctttgggcggcggctccggtcaggtgccgagccagacgtggcgccaatccctcttccccgagtgctgtctcgcgcccaccaagtcctcaatgaaaccgaggcagccatccggcgggaatgggaggcactggaatccaagcaccagcgcctcagtgactggcgcacccagcaggaggagcgcactaaggcagcgtcccgctacgggtccaacaagtggaaaccatag

SEQ ID NO: 17077 - DNA, 60 bp, Zea mays
  Peptide Sequence Number=SeqID_60452
atggctgggaaaaagggctctgacaaaaagtacccacgaaggggtatcaacggtttctga

SEQ ID NO: 17078 - DNA, 567 bp, Zea mays
  Peptide Sequence Number=SeqID_60453
atgcatgtggtcggcgacatcctgaagcgccgggtcatgccgctgcagaggaggtcgcgcctgtgctggtggttcactagcccgaatgatatcggcaggatccagcgtgggccggataccgatctgtcctcggaggagctggaactcctagtgaaggggattactgggctgcgaacgacggtcctggccacgctaccaaccctcgacgagagcggcgtggcggttcatcagactagcggtccggaccccctccatgggatccagatccctggtgtaccagctcggggtctccagaccgccggtccggccccttgtgttggccctgccgcggccctcagccccttggacaagggcaaaggggctgcaagcagcgcctccggcccaggtagctctagggagtcggaggaggagaggcgacagaggctgcgtcgcgtcgatgggttgcttgcctcggaccccccagaagcgccaaagaactgctggtggggccaaggaatccggctcccaagctcagggcgcgtagaggcgtgccaatcctccgatgccactgccatcgccaccctctaa

SEQ ID NO: 17079 - DNA, 1044 bp, Zea mays
  Peptide Sequence Number=SeqID_60454
atgggggggcctgcggagcaacagaagaccgacgaacggcacgccgtcacccgctccagcagcggcgacgacgacgacttctgctccggggggccgaacagcggcaacgatgacctcagggcggatgctgctgccaggaggcccccgcccatgcccaaactcgtgaggcaaggacgggcagaaggtcgtagagttggaggtcggtccgtaggcggccccggctatctcgtcggcgaaagaacctcttccagctgccgtggcggaagccggctccgaagccactcgggtctgagagccaggcacgaggcagctgccagcgccacggacagcaaccgcccttccccccgatcactgagggaaggagcaggccaccacccacgcaggggccgaccccaactcgacactctcccctccccagcactggtgatgaaaatccttgaggctgagggaggggcagaggccgcagcctggcttgctttcccccgccatcgaactggaggtcaccatcttggcacgctccaaggttctccccctacggtgcgggggctgggccccacgcgtcatgcaagccggcccagggcggaagaagccaaaccgccgcgcgcggtgcatgcaaccgcccagcggttacaagcaattccccactttcgcccagaccaacgggcgaaagggcgggcagccatgcaggcggcatgcaaccgcgccaagtgggcgcacctctccgacttccaacgcgcccagcatggaagcccacgcccacgcgtcatgcaaccagcgcgccggtcgctacgtgcaagcaactgcaccgccacctgcgccactgccacgcctcctcgactgcggaaccagtaccgcgactcgaggcaaccctacgcacgacccagcagcgccagcctggcgcgacggaaaggcggcgcctctggcagtggaagcgagcggcgcttcaccttcgccataatgaccgcgtcaaaagaggctccgagcctccctactgatcagaggttcgaaggctggtcccttggaagggttcaacagccgccttag

SEQ ID NO: 17080 - DNA, 75 bp, Zea mays
  Peptide Sequence Number=SeqID_60455
atgcgcgtcagggaaaaagatacagatatcgattttgctcaagatgcaattgatgaatataagacaggcaattga

SEQ ID NO: 17081 - DNA, 177 bp, Zea mays
  Peptide Sequence Number=SeqID_60456
atggccgaatccggcgacctcatgcgggagaaggagggcacgggacggtggcggttggctaggggacctcggcatgacggcgcggtgccggtaaagatcaaggaagagatgcaaactctcgtggatgacgctggtatttttaccgaggtatctggaaccatgcaagtttctgactaa

SEQ ID NO: 17082 - DNA, 210 bp, Zea mays
  Peptide Sequence Number=SeqID_60457
atggcggttgaaggaatggggaaactagcaggcggggcccgcagggcggtggcacaggcgcacgggcgcgcaacgggtagaggcgttgatgggtggggccactgggcagagaacgcgtggatgcgcggacgagcgagggagagcgctgacagggcgggttcgtcggtcagcgggagagggcgcgcgggcggactgggcctagtggcctga

SEQ ID NO: 17083 - DNA, 210 bp, Zea mays
  Peptide Sequence Number=SeqID_60458
atgcaggcggcatgcaactgcaccaagggggcgcaccctttcgacttcgacgcgtccagcttggaggtccaggcccacacgtcatgtaaccggcgcgccggttactacgtgcgagaagctgcaccgccacctacgccaggactgggaaagaggatactccgaaagggatccttctccgcgaaggaaacgggccccgagccctcctactga

SEQ ID NO: 17084 - DNA, 456 bp, Zea mays
  Peptide Sequence Number=SeqID_60459
atgggcaagagtaacaaacgcaagcgtgagccgactcctccgtcggaggacttcggcgactcggaatactcggaggaggagttctcctccgagtccgaggggtctccggctcccgtctctcccccggcgtcgtctgatgattcagacgactcccaggggattgccgcggaagtctggacgtacatccgggccgtcgagcgctccgggctcgagggctcggatgagtcggagttctcctcggaggaggaggactcggacggcggcgagggcgaggaggacgacgacgacgacgacagtggcgacggcgatggcgacggcagcggcagcggcgggggcagcggcggcaagggcagcaccagaggcggcagcagcacgggcagcaccagaggcggcagcagcaagggcagcaccaagggtggcggcggcaagggcagcagcagcaaggccagtggctaa

SEQ ID NO: 17085 - DNA, 351 bp, Zea mays
  Peptide Sequence Number=SeqID_60460
ccaataaaaagatcaagttttggattcaacaaaggagcaaagaggcaaccgaaggcacctctggtctgggggcaccggacagtgtccggtgcaccagaggactccaacttgaactcgccaccttcgggaatttccagaggcactcgcgctataattcaccggactgtccggtgtacaccggacagtgtccggtgctccaaggaagagccgcccccggaactcgcctgcctcgggaattcacttcagccgctccgctataattcaccggactgtccggtgtacaccggactgtccggtgtaaccgcggagcaacggctatttcggcgccaacggctacctgcgatgcattaa

SEQ ID NO: 17086 - DNA, 354 bp, Zea mays
  Peptide Sequence Number=SeqID_60461
atggaggccgccggagatggaggccgccggagagcagtggcgacggcgggcgctgggaaccgccaagaacagagaagccagagcgcagccaggaaagaaaagaggcctctggcctggctcgggctggaggctgtttttttaaaacgcgatatgggcacaccggacagtctacagtggctgtccggtgcacaccggacagcgcacagtagatgtccggtgaaccaccggacagcgcacaggaaaagaggaacttcgcgcgcggctgccggtgcaccggacattgcacagtgcagtgtccggtgcacaccggactgtccggttagacaagccctagatgcaatacaaggaatttaa

SEQ ID NO: 17087 - DNA, 363 bp, Zea mays
  Peptide Sequence Number=SeqID_60462
atgcaggcggtgggcatccggcgtggtctgaccatcgacccggccggggaggaggaggcccccgcggcgcgcgtgtggcggctggtccgcgagagccccgtggtgatcttcgcccggcgcggctgctgcatggcgcacgtgatgaggcggctgctggcggcggtgggcgcgcacgccaccgtgatcgagctggacgccggcgccgcggaggagcaggagctggcggcggcggtcgagggcggcggcgtcccggcgctcttcgtgggcggcgaccccgtcggtggcctcgagggcctcatggggctccacctcagcggccgcctcgtgccccggctcagggagctcggcgccctctgcgcctag

SEQ ID NO: 17088 - DNA, 1770 bp, Zea mays
  Peptide Sequence Number=SeqID_60463
atggagcccatggacagccagctcacggctctcgcgctctccgactccgacagcgcctccgtcgagggcgccgcagctgacgcggcggacgccgacctgcaggcgctccgccgcctctccgacaacctcgcggcggcgttccgctccccagacgacttcgccttcctcgccgacgcgcgcatcgtggttcccggcgcgcccgacctccgcgtgcaccgctgcgtgctctgcgcgcgcagccccttcctgcgcgacgcctttgcgcgccgcgccgccagcgccggcgaggaggagaaggacaaggacagttacatgtgcaaggtggagctccgggatctcctcggagacgaggtcgaggtcgggtacgacgcgctgcggctggtgctcgactacctctacagcggccgcgtcgccgccctgcccaaggcggcctgcctctgcgtcgacgaggacgcctgcgcgcacgtcggctgccgccccgccgtcgccttcatggcgcaggtcctcttcgccgcgtccaccttcgacgtcgccgagctcaccaatctcttccagcggcggctccttgatgtccttgataaggttgaagtggacaacctcccattggtcttatctgttgccaacttatgtagcaaatcttgtgtgaaactgcttgagaggtgccttgatgtagtagttcgttcaaatcttgatatgattgctcttgaaaaaaagttgcctccagatgttgtcaaagaaattgttgatgcaagggtaagccttggattagtttcaccggaagacaagggcttccctaacatacatgtaagaagaatacacagagcactggattctgatgacgtggagctagtccggatgctactcaaggaaggaaaaactaatcttgatgatgcatatgcattacactatgccgtcgaacattgcgactcaaagatcacaacagaacttctggatctcgcgcttgcagatgtcaatcataggaacccaagaggttatacggtccttcacattgctgctatgagaagggaacctaaaatcattgtctctcttttgaccaagggagctcggccatcagacctcacatttgatgacagaaaagcagtgcagatctctaaacgacttacaaagcatggggattactttgggcctactgaggacggaaagccttctcctaaagatagattatgtattgaggtactagagcaagctgaaagaagggacccgcaacttggagaagcatcagtttctcttgcgatagaaggagactctgcgcgtgggaggctactctaccttgaaaaccgagttgctctagcaagaatactgtttcctatggaggcaagggtagcaatggacattgctcaagtcgatggaacactggaattcacccttgtttctagtgtgaatctgcctgccgagatacaacggacagttgacctgaacgatactcctttcacaatgaaggaagaacacctggctcggatgagagccctatccaagacagctgaattcggtgtaccagtggaagtcgggaagcgtttcttcccgcggtgttcgaaggtacttgacacgatcatggacgacgaagccgagatggcttccctcgggcgagacacatccgcggagaagaagaggaggttccatgacctgcaagacctggtccagaaggcattcagcgaggacaaggaggagaacgacaggtccgcggcgcggtcaccttcctcctcgtcgacgacgacgacgtcgatcggggccgtccggcctcggaggtga

SEQ ID NO: 17089 - DNA, 354 bp, Zea mays
  Peptide Sequence Number=SeqID_60464
atggcgcaggcctttaccaggctgcagcgtaaaagttgcatggagtgctctcgtctcgatcgcatcaacggcacgggccaacctttcaccctcatcctcttccacaacacggtcctctcactcgacgcactcgctgcgtcctgcgtaccacaccatgctcgccgccgcccgctagcctcgaccgtgtccccttcccccatcgtcgtcaagggttgccgcgcggcggcgcggcttggcgagggctgcggtgcgcacacggccgtgatcaagcttggcctcggcaccgacgtgtacaccgccagcttgatcatcatcgtgctctacgccagtggcggaggcaggctaaaagcctaa

SEQ ID NO: 17090 - DNA, 570 bp, Zea mays
  Peptide Sequence Number=SeqID_60465
atggagagagtgagcccaggaaactctctgcctctggcctctctgctcgctcagctctggccagcggaggagaagaagagagtccccgtgacgaccccatttgcttgctgccgtcgttgcgcgatgagcgcgggtgcagcccggtccgtgctcgtcgtcgtcttcttcgccctgcctcttctcgtctccatgacccacggtgagctgaggcgccctccgtttcgccttaaacgcttcccttgtgtctctgcacctgatgaaagaagcagtgttgccaacctgctatgcaggcggccaccagcagccggcgcatgtcggagcggacccgcgctcaccaccggtaaggcgatcgatggcggcgagcacgcagagcagcggcagcagcttagcaggctgggctccaggccgccgtgctgcgaccgcaagtgcggcgcgtgcgcgccgtgcaaggccgtgcaggtgcgcgccggcgccggcgccgcggcggagcgccgcctccgcccgcgctgcgccaactacgagcccgtcgggtggaagtgcaggtgcggcgccgccgtcttcgacccttga

SEQ ID NO: 17091 - DNA, 1560 bp, Zea mays
  Peptide Sequence Number=SeqID_60466
atgggagggtccgggaagtgggtcaagtcgctgatagggctcaagaagcagcccgagaaggaagactgcaagatgagcaacgtttccgtgcctgcccaggacaagctgcagctcccatcagtccacggcggaggattgcgaggcaagggccgcaggtggaagctgtggcggacctcctccggcgaccagggctccatgtggcgcggctccagaggcggcagccagcgctcggcggcgtcggaggcctcggacgacgcgtcctcggtggccgccgtccccgccgacccgttcacggccgccgtcgccaccgtcgcccgcgccccggccagggacttcatggccgtccgccaggagtgggccgccatccgcgtccagaccgcgttccgcgggttcttggctcggcgggcgctccgggcgctcaaggggctggtgcggctccaggcgatcgtgcgcgggcggcaggtgcggaagcaggcggccgtgacgctgcggtgcatgcaggcgctggtgcgggtgcaggcgcgcatccgggcgcgccgcgtgcgcatgtccaccgagggccaggccgtgcagaagctgctcgaggcgcgccgcacccagatggatatcctcagggaagccgaggaaggatggtgtgacagccagggaacacttgaacaagtgagggtcaagctgcagaagcggcaggagggcgcaatcaagcgtgagcgggctatcgcctatgcatattcgcagcaggccgacggtgctgccaaatgcaatccaccgaagcttacttccaatggactggtgaaccactccggcatgctgctcaagcaccagaacttagacaagggcaacggcaactggagctggctggagaggtggatggcagcgcggccatgggagaacaggctgatggaggagcacaactccagctccccggacttccggtcctccaagaactgcgaggactcctttggtgtgctcggcgacttctctgaaccgaactcagtgaaggtgcgcaagaacaatgtcagcaagcgggtctgcgcaaaacctccagggccaacacacgcccacggacatcatcagcgcctcaaggcccagtcgatctcgtctctgagcactgagctgcacaacgacgagagctccgcgtcctcctcgtcttgctttgcgtctacccctatatcattcacacttgtggcttcggagaagacagaggacagcgtcaggacgagacccaactacatgagcatgacggagtcgatcaaggctaagcagaaggcatgcagcgcccagaggacggtggcgctgaagcaatgtgatgataggaaagccatgagcgccgagctgaaggtcgctcagtggctcggtgctgcattcctgagttgtcctcctgttgctgggtgtctgattgttcaacttcttgttgtcagattgcatctttgttcactcattgtggctgcatctttgttcagccgttgtggctttgtcagtggtagagtctctgttggcccaggatctatgaatgcgctcatgacaggcacacagacacaggatctggagacgcaagtttga

SEQ ID NO: 17092 - DNA, 174 bp, Zea mays
  Peptide Sequence Number=SeqID_60467
atggcgatgtggcaatgctcagagataaagtttagtggagctaacattgatgttgaggaagtgggtggcagtgccgagatagagaagagaggggtgtgggccataaaggttgaggagggaaatggttgtcacggagtgcaccttaatgtggttggtgagacatacgagagctaa

SEQ ID NO: 17093 - DNA, 249 bp, Zea mays
  Peptide Sequence Number=SeqID_60468
atggccaccgccaccgccgctccagcatctgtggcgcgacgacggatctggggacacgctcgcgacggcggatccctgaggcgcgacggcggatctggggacacgctcgcgatggcggattcctgtggcgcgacggcgaatctagggacacgctgcggcatcagatcccgagggcacgcacgcggcggcggccccatgaggtgcgcacgacggcgatgtgccagcggtcgcgacggcggatttccctag

SEQ ID NO: 17094 - DNA, 636 bp, Zea mays
  Peptide Sequence Number=SeqID_60469
gttcctaaatccaagatcaatgctgaatggttagaaagagatatggtttccgtcggcgttgctaaggttggaggggtagatgaagaaggtacgggggggcgggtagatgctcacctgtggcatgggaacacgacagcgagcactgtggagcttcggaagcggcaacttcgggctcctgaggcggtgacggtggcgcagcactcgacacgagggtgggggcgtggctggtgggggagtacggcgactccggcacgcgggcgtaggtccgatgctcggacgtcgacacaacactatgggacagagtacggtggctccgagcaaggtaggacgaggtggagggggcacgacaagcggtggtatcggacaaggagaagggatggtaggggtggggaaatggggcgagcaacaggagttatcgcatgcgtggggggttatgcgcccgcgggcgcgatcaagataggtggcgtgttcgagagaagcgggtggggcggtttgccgtgggagaggggacgccaagtgggccctatttgcaggcgcgacggggtgggcgcgggcgcacactcgggatgggtcgttggtgggacagggaaggcacggcgcttgcgccagcgcgcgacgcgctgggcgcgggactga

SEQ ID NO: 17095 - DNA, 471 bp, Zea mays
  Peptide Sequence Number=SeqID_60470
atggacgagtctgaaaaaggagatcgggtgcacaacatagccaatcagcacccaatcggagagacctcccgtcgtcaggaatacccccccaaggtcgcagcaacggcgcaagaggaagaggccacggacggacataacagccccacatattatattacttgtttcacggcgaagactgcgcgcacccaacaagggattgtccggagaccaaggccaccagggatagaatgtccagagcacaaccagccgacaaccagagggtcgtcgcgcacacataccatcaccagcaaccctaccacaacgagcaaatccagcacctacccaaccatgcttaccaacaccatcaagaggtccaggttctaccaccaccgcctccgcatcacccaaatcctctacaccacaaccaccccccacaagcacccaaacaagaagacttcgctgaaccaccatatcgcggagtcatccacatga

SEQ ID NO: 17096 - DNA, 615 bp, Zea mays
  Peptide Sequence Number=SeqID_60471
atggacaacaaggaggcaatcctggcaagcattcctgaagagcataaggaggagggtgccaagctatatacctcattactcgaagagaagactggtttgcagactctcttgaaatatattaaggagaataaccctgacaaactttctatagcacttgcttcatcacttgacactgttgctgaattggagctgttacaggctcctggtctgtcctttctcctggtctgtcctttctccgtagaggaaagacttgctggctgcaggtaccttgcaccagagtatgcagtccaccgacagcactcgctcgccctaaaccctcacctctcagatcctgcccctcgctcgccgcccaatcaacagctcagacgttgccgccacatccgagcaaaggtggaggcgtctgcctccacacacctcgccctcgccaccgccgtccctagagaagacacggaggtgcagagaagacacggaggagctgttcgtgcccgttcgttgcatatggttcttgaatctgggagggaagaagatttttcctcaatttccgttgaccatttcaatcaacaaccatgctgcatctatgagatatctttcacctgtagtggatacattcaataa

SEQ ID NO: 17097 - DNA, 633 bp, Zea mays
  Peptide Sequence Number=SeqID_60472
atgacttcgccttcaccgccacagaaaactaacatcagccgcagtacaaccatgatgcagacgccaactgatgctggaaactggaagtggaacaagtccctgagttgccaaccatgtgaccaagaaggcgattcgcttccaggcacggagctgaaggaggtcggcgacaagtatcagtacacacaatttgcacacaaaataaacagcttcgacacggcacctaagaagctgttggcatctgattcacggttgaggcctgatagatatgccctcaagaagggtgacatgtctaagtctggggcagagaagagcaggctcgaggaacaacagagagctgagaaacgaactcgagaggccaagggcgagcaatttactcctagatggttcaacctgacagatgtggtctcccctacaccgtggggtgacctggaaatttatgaatacaacggaaaatacacagagcaccgggctgccatagacggctccgatgtcaccgacgagacagatatgaatctaattcgtgtctgccagctgggccatccaaagcgaaaggattatgtcccttggttctatggcttgacacaaacattaaagagcataaggattcaggctacattggacttgttcacgtga

SEQ ID NO: 17098 - DNA, 504 bp, Zea mays
  Peptide Sequence Number=SeqID_60473
atgggctgcaatctattgttggtgcctggtatcagagaggttgacatgggtgcacctgttcacaatcttgaggtgagaatatcgaaactgtctaagagacttctcgagattttcactaaaataacagataacatgtacttgatgcagtttaacatgatcatgttgatgttccattgggagcatttggtagtctggctgaacggctgccccagtggaagagatgaccgtgcagtgcagtgcaacaccgcgttggtggatgatcgatcgtccagttgccctaggttggaggttgtgattgatgagttgggaagggattacttgattggtggtgtacaattcttggacaggatacaagttccagtttttggtccattagttcaggaattgtttcatttacatgtatattcagtacactcgtataatggaaacaggcaaatctctatctcattctttggttatcgtgttattatacggttccgttgcaacgcacgggcaccgacctag

SEQ ID NO: 17099 - DNA, 4806 bp, Zea mays
  Peptide Sequence Number=SeqID_60474
atggaggtggccacgctgacaaccccggatgttatgctaggcgaggactacaaggatattgaggctattgagggtcagaaggattacgagacttgttatggtggaggtggcagtgttatagtggcaaatgagctcgtggggatttctgaagaccccaaccaacccgatattgctactgctgacgagccagaggagggtgctgatgtagaggggcaaactaatgacattagtgctgccgtgtcaacctccaagctggtggatgatcccatggaggttggcatgcaaacagaggttagtgctgctgcagatgatctcatagaggtcggtgctgctctggtatcatctgcagaggattgcacagcggtggctgcttgcctggttaatgatgactgcaatataattttccctggaggtgtgcataggtccgatgaccaaactgatcaggagtttggtggcaattcccttgacgctgatgaggtcgctctcttggtaaatgacatacaagatgacagtgcaaggatggatatggatgtttcagcccatggtgatgtgcatgctcaggatcgggaaagctcacagttggatgtggctacagctctgttaaatgaggtgggaacagagcttgtggaagctggtgaccatgctgtacaggaatgcacaaatatggatatgcggattcaagccggagataacaatgaggcagaacgtgttggcactattgctgacactgccacaaatgaggagcacagacacatgggtgaagttaccatgaccagagatgatagtgagaaacatgatgtggcaggtggtgttgatgtgcctgatgagaggatacaaatgggtaggggtggactgcctggagatgataatgagcaaaaggaagttgcaacagctgatgaagatcgtgtggaagatgaaggcatgcaggtagatgcagtaaacattactggagacatggttgaggaaggcagaattgctgttgaatacattgcaggtgaagctgtaattggcgagggtggtattgatgtccctgaagaaaaggctgctcagatagacagggcgggtaatgacattcccgaagaagagggtctccaaatgggggaagctggcttgattggcagtgataatgggctgaaagaggctgtgattgctgatcatgatggagtggaagtaaatgccataccgacggaggcaactggcacaactaacgatgatgatgaaaacaacacaattgttggtgaagatgttgcagaggctgtcaatgacataactggtgatgatgtccctgacgaagaggctgcacatatggaagatgatgacgacgacgaacctcctcctttagtggaaaagaaaggtggagggcgtcgtaagagaggccgtccatcttccaaggtccagggtgtggtcaagccatctgtaaagaggaaggatgaggaggaggtttgcttcatttgctttgatggtggtgatcttgtgatttgtgatcgggttgccctaaagcctaccatccttcttgtgttaaccgggatgatgacttcttcaagtcaaagggtcggtggaactgtggaggtggattttgatgacaaaggcagctggtggtatttgttcaaggactattggttaaatttgaagacaaacttgtcgttgacagttgaggaaatatcagcagccaaatctcgaaagagtggagagttacctgatactaatgatgaagttaattcagagagttcatcagggcgcaatctagaaagcaatacatcaaaaaagaggggaaggaagcgatctaaacaagctgccatcaatgagggttctgaaggaaaagcgagcactaggaaatctgccaaacgagacctgtcaggcattcatgatgttcagacctcgtcagggaaaaaggttagaaaactatccaggcgttctttgagcagccagcattcatcaaaagactctgaaagtgttgggacatctacatcctcagctgaagaggacagctgggcttctaaggagctcattaactttgtagctcatgtgagaaatggcgataaatctgtgatcagccgatatgacgttcaaccccttttacttgactatatcaaacgcaacaaactgcgtgatcctcgtcggaaaagccagataatttgtgattctttgctccaaagtctcttcgcgaaagaacgtgttgggcattttgagatgcttaagcttcttgaatcacattttttcatgagtgaggtttcaccaattgatgctgatgaaaatcatggtggtgtagtagatcctgatcctagtcaggatgctgatggtaacagtgaagcttcagttgttatgagttcagaaaaaagaagaaaatcacgcaagtatgacctgaggcaccagcctaatcttgatgattatgcggcaatagataaccataacattggcttgatgtacttacgtcgcaacctaatggaagaattgattggcgatgttgacacatttgatgagaaagttgttggatcatttgtgaggataaaaatacctgggactggaagatctgcagaaaaatataaatatgggaaaaggactactgatataactctagagatactaaacttagacaagcgggaggcagtaactattgacataatctcaaaccaagagttcactgaggaggaatgcaaacgcttgcgtcaaagcataaagtatggattcattccaaggctgactgtgggagaggttcaggagaaggcaagggttctccaaactctgaaagtcaatgacaagcttagattgctaagcactcctgaggagcgtgctcgtaggctgaatgaagaacttgaaatacatgctgaccctgcgatggatccatattatgaatctccggaggaacaggagcaggaaattgaaaaaagtagcttcaacaagtccagaggttctttcttgaggaaagatggtaatcctgtgcctccaggtaaaggagatggtagaaatgctgcacagcgagattcaaaaactaattgggaatctaatcgaaatacatgggccgaatcgagttctcatatggaatcaccccttccacggaggtccacattttcttctcaaggtgaaagtgctggttatacaagtaaatcagagagcccaaacactggtgcacaaacagttaaactggaaggcaccacacgcagtgctccacaagggtcacctggtgcctcttctggaattttagctaataacatatgttcaggggcaaaaactgcacctcaatcagccattaacgagtctgagaagatctggctgtacatggatccttctaataaaatccaaggtcctttctcaatcatacagctgcggaaatggaacagcaatggctacttccctcctagtttgaaaatatggaaagctagtgagaagcaggacgattccattctattgactgatgctttggcagggaagtttgagaaagaccttcctccatgggaaccgccacatgttagtttgtttcaaattaacaaaacccctcttgagcaaagcacaatagctggtgaacaaactccaaaatcagtagttgcaaagtctttctcaagtagtaatcaaagacatggttatagttcaacaaaccttggaacaaccatgatccattctggcacacaaggttattatggaatgcaaaattcccatgcagcatacacaagccaacattctcttactggaagttggaatgccacgtcaagtcagtttggggttgcggtaaatcctgtgacacctactcagcctgccatggggagcttttcaggacaaaacatagtgtctgcagaaaatatgggtcatctaactcctggaacggctcctgcagctgcaaatgcagaaatggttaattcagatttgacctcccagaagcaaatatcgtatttaccgcaaacagacggcatattagctgatgacattgaatccaaatcaggagaagatgtttcacatggaaaagtgagctcttcagccaaagcaattggaccactgggtgcacagcttggacaaggacaactgaacactcagcaacatgaagcagacataaaaaaccagatgtcatcaactgatgtctccaactcgacgatgccatcgcagatgatgtcaacaccatccgctgcatcagtacaaccttcattgtcaaccattgctggcagtgataatcaaagcagtgggtgggctgtacctacacaagtggtgaacacatctggccagtctcagataactggaaatctgacctggggaaatacacctcagggtgatgcaagcttaggttggggaatgatgggacagaacaatatgaatatgccttgggtagcatcagctcaaggtgcttcgggctacaacatgggtgcagccatgccaacccagccaaatgcagttccaaacatgggttggttaccaaatccaggaaacaccaacatgaacatgatctgggccgcaactcaaggccaggggattccaaatgcagctgctatgatgggaggtcagatgcaaggagtcgcagtggccccttggggtggtgttgcagcaggaaatgcaaattcttatcctgcctggggaaaccaacaagttggaaacatgaaccaaaacgttcgatggagtgctcctgtgcagggaaacccgagtcaggaaaataacaacatgaactggaatgcaccaaatggtaatcctaataattggaataatcagcagagagagaatgagggcaggcactctggacaccgtggtgcttttagtgctggcgactcaggcagaaagtcatggaagccacgctctggtgccgatggggggtcatgggggacatag

SEQ ID NO: 17100 - DNA, 354 bp, Zea mays
  Peptide Sequence Number=SeqID_60475
atggctgaagggagcagcagcaccctcggcatcgacgacaccttcggtgagggtcttctccgggaatccggcccgagcaggcggctcggctggtcaactccggcgtcggtcccgctaacggacgacccggctaggctccggccaaccaggtttccttttcgagccaacctcgcctctgttcatgctgacaccgctacccctggcctcggctcatcgaagagcggccgaggggttcctttaattaagctagagaagcctcggacaacaaggccggccgagccgagggactcctacgcctccgggatatggatacctcactcgtcacctttacacggggcgactcacgcttggtga

SEQ ID NO: 17101 - DNA, 228 bp, Zea mays
  Peptide Sequence Number=SeqID_60476
atggtcgtcatcgcctacagtggccgcagtggtggtcgacctcgccctgccgccactccatctcgcagtggagcagttctatcgtcggagaaggcaaagatccagccaccaagttctcttcgcgtgattcaaatgatgcgtctagtcgatgccatgcatacggacatggaggttgtgttcgaagtgctgaagagcctagaggacgttgaggagctggaccccgagtag

SEQ ID NO: 17102 - DNA, 540 bp, Zea mays
  Peptide Sequence Number=SeqID_60477
atgatgaaaacaatagcaaattcaatgaaaaagactgatgttttgctggtcgtcaagaaagttcacttcaccccttcactgaccgatctgacaggaaaacagcgccgctcgccccgctccgactgctgtgccaaccgcccgggtaaggctgacgacagccgagttcagactcgggcgcaacaggaagctctgcctcgcccgaccttaggcctcggcctcgggaggaggtctccgcctcgcccgaccccaagactcggcctcagcctcggcctcgggaggaatcgcgtcctcgcccgaccccgggcctcggccttaggagaagtctccgcctcgcctgaccttgggctcgatcccagccgcacggccagctgtgcttctacagggctcaagcacttctctgatggccatgttatcgcgtacacagggctcaagcacttctccgacggccacgttatcgcgtacacaaggctcaagcacttctccgacagccacgttggcatggccttcctgcggggggaggtcgcgcgggggacgagctaa

SEQ ID NO: 17103 - DNA, 903 bp, Zea mays
  Peptide Sequence Number=SeqID_60478
gcgtgccgcgggcacgcgcggggactcctcggcccggccccttgccagcacccgcctgctgccgatcgccccgcctgtctcccgctcgcgcccgcgctgcccgctggctcgcctgtcagccgccgcgctcccgctgcccacccggccccgcctgttcgccgctcaggtcgccgcgagctcgcgcgcccgcccgcggatctcttctgtggcgtccaaaaacgtggcagagggcaatacactggtttggaaggggcgggagaggttctttacctcaaggcgggctccggggactcctcggtggcggcgatgacgcaacggcggcccggggcgacggtggcggacctccgcggctgcacggaggacggcgggggcggggcggttgcgagctccacgcgcgacgtgggcgcggagaaggcggccgcgcgcagctcgggcggcggttacgcgaggacgacggggctgacaggccgggcccgcgagcagaaagagaggggaaagcggggtgttacatcgatgcccgacgcgccccccgttggggcgctgggaccgttgactcgctcgatagtcgacgaggcgctgcctcctgcttggccttggttgccccgcctcttccgtcggcgggggagaagacgggctgccgtcgagggacatgaactcaagactcccgaaatggagcaccgtcccgggttggagaggttgctggagactgcccatctggagcttgacgggaagctgttcgtcaacacgcagcagtcccctacctggcgcgccaactgttggcgtttcgagaccggggggtccctaggccgacgagtgaatgtcgccgcgtgccccagcccagatgggtcgagcgcgaggccgggcgcgaaggggggagagcgaggcggccggagaccggcgtga

SEQ ID NO: 17104 - DNA, 434 bp, Zea mays
  Peptide Sequence Number=SeqID_60479
atgggtcagaggacacttgccttcaccaaactgctgatcagggacttcctctgcaacctcctcgggaaacacagactgctcgttgtctacgcggggcccaacggcagggaggcggggtgtgggggaagcgggcctgggccgctggatctccggcggacggccaggattgggctcggcctaattaaaacggggccgcccgatctgggacggacgacggggatcgggtgggcggccttggcttctcctacggccttggctcctaatctactccggcgaggaattaaacgtggcagaaggcaatacacgggtttggaaggggcgggagaggttctttacctcaaggcgggctccggggactcctcggtggcggcgatgacgcaacggcggcccggggcgacggtggcggacctccgcggctgcacggaggacggcgg

SEQ ID NO: 17105 - DNA, 432 bp, Zea mays
  Peptide Sequence Number=SeqID_60480
atgggcaagggcactaagcgcaagcgcgagccgactcctccgtcggacgagttcggtgactcggaatactcagaggaggagttctcctctgagtccgagggatccccagcccccgtctctcccccggcgtcgtccgatgactcggacgactcccaggggatagccgcggaggtctggacgtacatccgggccgtcgagcgctccgggctcgaaggctcggatgagtcggagtactcctcggatgaggaggactcggacgttggcgacgagggtgaaggcgacgacgacgatgacgacgacgacgatgacggcgacggtgacggcagcggcagtggcaggggcggcggcgacggcagcagggatagcaccaagggtggcagcagcaagggcagcaccaagggcggcggcggcaggggcagggccagtggctag

SEQ ID NO: 17106 - DNA, 471 bp, Zea mays
  Peptide Sequence Number=SeqID_60481
atggcttttaggcccatttccctttcagggagcagggagtgcgatgagtggagggagcagggagtgtggcgagtgagaagagtggcacaaagggagggaggaggcgaccagagcgagcaaggaaggcagcaagcagggagtgtggcgtccacacatttggttctgccaaacccgtacgcaatgtcagtgttgcctccagcaccggcgaaatccacagatgctggcaatcctgacctccaatcacggccggaagccatgccccgcctcgatctcagcatcgccgatccgccccttcctcctcgcctaaccctctgctccgccaccgtctgcggaccctcctgcatcccgcgcgcaggcaacaccggcgagatccgcggacgcggccacctaaatttttgttctcaatcaagccctagaaccccgccgctctccttgggaaggtcctgcaaccccgccgctgagagcacctag

SEQ ID NO: 17107 - DNA, 1740 bp, Zea mays
  Peptide Sequence Number=SeqID_60482
atgccatcctcttcttcttccgccaccgccacgccgccggccgccgcctcgtctgaggagacgttgagtaacgtgatggtggaggagttgcgcgccggcgactctgttgaatttggtgtgtcacggatgacgtcagcccgtattgaagatatgcagcggttgggctactttggcggcggagtcgctcgtgctccggggacggaggaagtccccgagccagagggcgagttggttgttttcgaggcgttcttcgccgtcggactccgcttgcctgcgcaccgggtcttcgaattaaatcaactgccgtacgatggctaccctggtcaggacgaagcagaccgccgcgggaagaaaccggcggtggagactggaggcgaccctgcgctggcggccgccacctcttcgaaaaagagaaaattagtgatggacaaggatcgccaaggggcggcgcgaaaacgccaggcgaccgtgagggttcacgaagcccggccgaaaaggcagcggggaacggcgaaggctgaggcctccggcggaggcaagccgcctctgccggcgaaggtgggcgcctccacgcctggcaaggcgccggaggcgacggtgggcgccggaggccccaagctgtcgaaggtggtgccgtccgtcagcggagtggcggaggctgcgaaggcggcccgatcgttaccgccgtctggcaaacgcgttgccgacttcggcaccgagattaatgtggaggattatcttggggggtcggacgagggcccgcttgctctagttgtgcctggcgcggcgatcgcgacggctgcgccggcgacgagggcgggggcagagacccttggcgctggaggcgaggtgtctgccctcgcgctggtcagagacgaggcgggcgtggcgacccgccggctgaagggagcgacggaggcgctgagtcgcgcgacggaggcgctgagtcaggtggctgacttcaccagccgcactgcgtcgggggcccttacggcagcgttgtctgccgaggtcgagagacttcggacgctcatgcggacgctgtccgtgagaagtcggcctccgacagcaagtgccgcaaactggcgaagaaggtggccgcccttgagaaggagaaggcagacctccggcgcccagctgacggaggagaggagggaggccaacaaagccatcgctaaggagcaggctgcgcaggcggaggccaggctggcgcgggcggaaggcaatatcgctaaggagctcgccggagagctgcagcggcggcttgctgcctttgagagccgcgcggagggggccgaggccgcggcgcgagcggaggccgaacggacgcgcacgcagctcatgacttcatatcgcgagctgggtgtgcggacgggtgacttcgaggtgccggagcgaaaggccggacttcgttgtctggagtgggtgcaggaggaactgcaggagctccccactgtcttggcggggttgatgtcgttcacctccctggtcacctgcgaggcagcgatgaacacgctctctcgcgaaggctgccggcactatgaggccctcgaccaggtggatgaggattttgggcgagatatctttgaggtcgaagaccccgtggtgaaggagtccgccggggccctctatgaccggatgtggggttcatacggtcgtgaggtggtccgggcgcgggccgaggctgcgagggctcaggcgggagcgcggcgagcggggtgggtgactttggggcgctga

SEQ ID NO: 17108 - DNA, 846 bp, Zea mays
  Peptide Sequence Number=SeqID_60483
atgaccgaggaccctttagctggtcacatgcctcgtcatgggatccactttagtaagcatttctgcaaaacagagtctttgattattgagaagccttaccttgactcccttaaccagcatacccttgagagtcttttctttagtcgggtgaggaagctacaaatttttcttgcttctgctctaaggtggtgccaaaagaagaacactaggaatgatgcgggaggacctggtcctccatatcgaacttttaagtatcaactatcgggaggagtttttgcctcccttggtattgtaataatattactctgcactcctaggataactctgctggccccaagacatgataatagtagtagaggaagcaatgatcctataggggatctcgaagctgaagtgagtcggctccaagtggaactccgccgcaggacggctatatgggtcgtagatggcgaccgcataaatgagttgagaagagacgtccgccatctgcgatatcagctcacggaccgggatttggcactcgactgggttgttcaatcccgttcgcttgcatgggacaaggagcaaaaagctcaagttcgagtagtcgagctcaacttggccgttgaagacctgcagacatattgcaataccttacatgaagaagttcatgtattatattcgcaactgcatcccagtgagcctacgaatcctgttgagtcggaagccggaccctcgcatgttgcgggacacgcgcttggtggtgagttagacctttttcagccccctccttctatgaggctggtcgacgaatggtctcccacacccgatgacgaggccgccaaaagcaacgggaagcaggaataa

SEQ ID NO: 17109 - DNA, 168 bp, Zea mays
  Peptide Sequence Number=SeqID_60484
atgacccacctcaagaagaaggcatcgatcaagggggagatgaagttgatcaagaaaaggaggatgaacaagagattcaagatcaaagactacctcacccaagagtccaccaagcaattcaacgagatcaccctgtcaactccatacttggatagaggatgcacttag

SEQ ID NO: 17110 - DNA, 192 bp, Zea mays
  Peptide Sequence Number=SeqID_60485
atgtggggtcaaaagggagcttcacaatcttttgtggaacgtgttgatggttataatcgtgctccagtggacgtgaacctgtggcaattgctcgtggtgctcccctccggcgcgaagccaatggccatcgtggctctagcgagcctcggccgcggtacagggtcgcgccaccgcgagagtgttctggtttga

SEQ ID NO: 17111 - DNA, 363 bp, Zea mays
  Peptide Sequence Number=SeqID_60486
atggctcaccggagtgtccagtccacgcgtgcaggcgggcggccgaagtccggtgaggtcgatcttcgccttccggtgaagttctgccgggtccgagggcttggaaagcttcacgggcctatggcggagctaaccgaagcgctggtgcgacttgggggtgactggagtgggctggccacggtggccgaagctctggcggcaatggcgggcggaaaggagctcgccggagataaagaggggtgtctggccggcgatggttctctggaggacatggttgctggagtgacttggccgtccatcttgccaccgggttggacagtcttgtgggaccctacctcggctgaggaggagcatgaggagtga

SEQ ID NO: 17112 - DNA, 360 bp, Zea mays
  Peptide Sequence Number=SeqID_60487
atgagtagacagctccaaggggtgaaaaccatagaaggtggtcagcccgtggagagcaatcgcctcgatggtatcctcagcctggtatccgaaagactcggagtccaacgaacgccaaagactcggagtccaacgaacgccagcctggctataagggatgaggctctagggtcatcctcaccctacagcggggcactcggtgcttctcgaacagctgcaccgtgtactgggcaggcgtcgtgtaaccggctccctgaagtacctcccacaagatacggggaaaaccctctcgtgcaagtccgttcgtgtgggactgtgcgttcccttcgttcgaggatccgtgagaagtcatctatgtag

SEQ ID NO: 17113 - DNA, 1497 bp, Zea mays
  Peptide Sequence Number=SeqID_60488
atgaggaaaaaacacggcttcatgccaaaaatacatacatgttcaggccccgacagccacaatgaacaaacaccggcactcaaggtgccattacaaacggaactccggttccgcccccgcgggtatgaacaacctccacaccggagagcctacggggcgacaagctctgggcgactcgccagcgacctcttcagcagcagccatggtcctaggacggacgcagccaccagaaggctctcgttcgcgtccccactcaagggacgcgaaccagacattaaagccaaagagccggaggtcggttcgcaggtggcgctgacggcctcgacggcggagaagctttctccagctgccaccacgtcagcaccgacggcggcgtctgcctgtccaccaacgccgcaccagcgaacgccggtcgctccaaagcgcaccggcagaagctggaagaagaggtggtccgccgaccccgcgcgggagctggagctccggctcgcctcgctctccgccccagcaaggatgatgaagatccttgaagctgaggggcggggcagaggtcgcagcccggcttgcttctcctcaccatcaaactggtggtcaccttcttgggtgaccaccggcgagaggatgcaaccgggctgcctgatgaaaatccttgaagccgaacgatggctgaaagccgtcgcggaccgagccttctccaacacgctccaaggtcctccccctacgacacgggggctgggtcccacgcgtcatgcaagctggcccagggcagaagaagccaaaccgccgcgcgcggtgcgcgtaactgcccagcggttacaagcgctcctccactttcgcccagaccagcgggtgaaagagcggactgccatgcaggcggcatgcaaccgcaccaagggggcgcaccctttcgacttcgacgcgtccagcatggaggcccaggcccacacgtcatgtaaccggcgcgccgattactacgtgcgagaaactgcaccgccactcgcgccagtacagcgccttctagactgcggaaccggtgccgcgactcgaggcaaccttgcgcatgacccgacagtgccaaccgagcacatcgatcacgggtcagtcagccgcgggagaaggcgcggcggtcgatacagccaaaaatgggccggcagtaatggcggtggcaggcgggcggaggcagcagtcaagtcgtcagcaagctcacgtcccctcctgggacagcgagagagccctctcccactgcatgaagacgacgcacccgcgaagcaggcgacgcttcacctccgccatgatgaccacgtcaaaaaagggaccgagaaaggggatactccaaaaaggatccttctccgtgaaggaagcaggccccgagcccccctactgatcagaggttcgaaggctggcccctcggaagggttcaacaaccgcctcagagcactcgggctccgcgcccgctactggtcagaggttcgaaggcaggcccccgaagggttctga

SEQ ID NO: 17114 - DNA, 312 bp, Zea mays
  Peptide Sequence Number=SeqID_60489
atggtgcagagggttacccggtccacgtgctccggcggattcacaaactccggcgagcgcgattacactattccggtggggctggtcctcagctcaagctcgggaaagcttcacggcctcctagggaagctatccgagggctcggatcgagcggaggtgggcgggaaagggtttggccacggtggttaccctcgggcggctctggcgggtcacggggaggtcaccggagctgcgagcgagctcgggagggttaggcgcagtgcggggggaggcaacggggaagatgatcgtgcacgagggtgggctttatag

SEQ ID NO: 17115 - DNA, 699 bp, Zea mays
  Peptide Sequence Number=SeqID_60490
atgggtcaggcgacccatccctccgcctcctgcggctcagaggactcagtgttgtggtctgagccgtcgtcgtcatcgtcgtcgtcaggggggcgcctccagctggggaacaggggagcggcgcctcacggactccacctcctactcaggtggggaggaagagccctgctgctccctctgctgacgctggtgctcctgctcctcacgcaggcggtggtgcagcctctccaggtgactcgactgactggacacggtgcggcgcagaggatgctccgcaaggcgagatggcaggaaagggatcaccgacttacgagcagtgtgtctaagacgagccatctacaaaagacaccgcaggcggaagcagtcgtcacgtcgtcagcaagctcgcgccccctcctgggacaacgagaggaccctctcccacggtgtgaagacgacgcgtccgcgttccgttcctcgaacggctcacgcacgcacaacggccgccccgtgaaccactcgtcccgtcgcattaactctgcggcaggacaggcggcacctttggcaggcgaagtatcgggaaaggggatactccgaaagggatccttctccgcgaaggaagcgggcccagagccccccctactgatcagaggttcgaaggctggcccctcagaagggttcaacagccgcctcagagcactcgggctccgcgcccactaa

SEQ ID NO: 17116 - DNA, 459 bp, Zea mays
  Peptide Sequence Number=SeqID_60491
atggaggctcctccgaggtcgaggtcgagtctgtcttccgaggtcgaggtcgagttcgaaccttgggtcgggcgaggcggagaccgtcgtccgaggccaaggctgagtccgagcctggggtcgggcgaggcacagttcgtcgtcttctggggccgagctcgagtccaagccctggggtcgagagaggcggagttcgtcgtcttccggggccgagcccgagtccgagccctggggtcgggcgaggcggagttcgtcgtcttccggagccgaggccaagtccgagccctagggtcgggcgaggcggagtttcctatggcgcccgaggccggacttggccgctgtcagcctcactctgtcgagtggcacaacagtcggagtgacgcaggcggcgctgtcttcttgtcaggccggtcagtggagcggcgaagtgactgcggtcgcttcggctctgttgactga

SEQ ID NO: 17117 - DNA, 456 bp, Zea mays
  Peptide Sequence Number=SeqID_60492
atggcttccgacatcggcgcggaggtggtggcggctgaagaagtcctcgtcgccgacggggtcaccgccaccatccgcgctccaggcctccggctctttggctttgatagcttgtcctcgcccctcgagtggggacgtgggcgagggcattgttgtagcggcgtccgccctgaggccatcgtcgttgcagtttggccacctggagcggaggttgttgtcgctgctaccggagcgggcggcggtgagccacctggagccatgtcgccccgcgggccccccaatgtgggaggttgttcgtacccgcgggggcggaaccggagttccgtttgtaatggaaccttgaatgccggtgtttgttcattgtggctgtcggggcctgaacatgtatgtatttttggcgtgaagtcgtgtttttccctcattccgagcactaggactcgcctgtcagctaactga

SEQ ID NO: 17118 - DNA, 372 bp, Zea mays
  Peptide Sequence Number=SeqID_60493
atggctgaaaggtaccaactcccacggagttgcgttcctccaacgatgaggcggaaagacggcgggtaccccccatccgggggcttggaagatggaaagacacgacgcataagggaggaagaagacatggtcgccttccgaaagggggaccgggaaagggggataccccgaaaaggatccttccctgtgaaggaaccgggctccgagccccccttactgatcaggggttcgaaggctggcccttcgaggggttcaacagtcgcctcagatcgtgtgggccctacacccactactggtcagaggttcgaaggccggccccccgaagggctccacggccgcctcaggctactcgggctccgcgcccattactga

SEQ ID NO: 17119 - DNA, 291 bp, Zea mays
  Peptide Sequence Number=SeqID_60494
atgcagaacctcacgcagtaccaggccgtggagcgcatgaaccccatgctggtgcccactgaccttgacgtcggcaccatggtcacgttccccgtcttgtgccagtgcccggccgccgccgaaaacgccacgacgctcatcacctacgtcatgcagcctagggacacttgtcgcctcatctgcctccgcctcatctgctgtcgcctcagcctccacctcatcagctaccgcctgatctgcctcgtcatctgccacaacgatagcatcctatgtcgcagtggcttctgctag

SEQ ID NO: 17120 - DNA, 282 bp, Zea mays
  Peptide Sequence Number=SeqID_60495
atgggtctgagagcttcacccgggatcaaggaaggcgggcggccaaagtccggcgaggacgatcttggttctccggtgaagttctgccgggtccgagagcttgggaagcttcacaagctctgggcgaagctaaccgagcggctggcacggcttggaagcgactggagtgggctggccgcggtggccaaggctcgggtggcaatggcgggcgaaaatgagctcgccagagctaaggaggggcgtctagccagcgaaggttttgctgactggatcaagagatag

SEQ ID NO: 17121 - DNA, 411 bp, Zea mays
  Peptide Sequence Number=SeqID_60496
atgaaggatgaactcgatgaggaaggtcggtcaagcagggaacaacgaggtttggacggggttcaggcacgtctctggggagcaggggaatgggcgcggtcgtcggtggacggcgaggggcgtcgcgcctgggctggtcgtcgggtcctagcggggcgcgtcgggcgggtgctcggcatcgcgcgcaggagtagggcgcggctgtcgaggctgctcgatgccgcaggggcttgggcgggcgcggtagcgggtctgggtggctgcacctgtaggggcgcgcgtcaggctccggcttggcgcgtgctacaaataaatgtgtttgctagtgtttgtgcttgtagttcacaggatgctaaagttacttggaccaaggcattgaggaaagcatcacctaaaaagaagacattatga

SEQ ID NO: 17122 - DNA, 384 bp, Zea mays
  Peptide Sequence Number=SeqID_60497
atgcagattattgaaagaaagtgcgaggctcaaaagggtgctaggataaggtctaacctaaattttgatgtggttttgtggactgtaggagaaacaacactcgataaactcaccgatcaacctggaaatctgataccacttgatagagctggagtgcccgatctttcgtcaatgcacatcctcttcgtgccatccttcttctccacaaataacactgatgctgcccacggcgaggaaggcgggctgcctggttgctctgacgctggtattgatttcctccttgctggttattctgacggtactgctgctgctgaggaaactgcctctagtactgctggtggttctaacactgatgctggtgctggtgctggtgaccttgcttga

SEQ ID NO: 17123 - DNA, 249 bp, Zea mays
  Peptide Sequence Number=SeqID_60498
atggtgctgccattggtgcctttctcttcttctctgcccagaactcctggtaggttgccactgccggaggtcgctgatgctggcctccaccatgctgctgagggtggggcaggcgctgcaagagctatcgcagaatctcattctgctgggccatcggctcctgcacggtgggagatggaggatgtgacaccccaggtgtctatttcatgttatgtcgggagattaatcctaatctcggatgctcagtga

SEQ ID NO: 17124 - DNA, 525 bp, Zea mays
  Peptide Sequence Number=SeqID_60499
atgaagctgtggaaggagacttccaggagttccaagactacgacgagttctaggcgtgggttagcggcaacccccagtcggctgcctgtgaaggccgcgtttatctacgtttcgttttcgcactttgatttattcccaaggtcgggcgaggcggtgactcctccgaggtcgaggctgagtccgagccctggggtcgggcgaggcggagaccgtcttccgaggtcgaggcgggggccgagccctggggtcgggcgaggcggagactgtcttcccgaggtcgaggcgggggccgagcccaggggtcgggcgaggcggagaccgtcttcccgaggtcgaggcgggggccaagccccggggtcgggcgaggcggagcttcctatggcgcctgaggctggactgtgccgctgtcagcctcaccctggcgggtggcactgcagtcggagcagggcaggcggcgctgttttcctgtcaggtcagtcagtggaggggcgaagtgactgcggtcacttcggccctaccgactga

SEQ ID NO: 17125 - DNA, 840 bp, Zea mays
  Peptide Sequence Number=SeqID_60500
atggggatatgcggtgatttgtctgctgagagagatcgtttgattgcacgttcgcaccaatatgatttattgcacatgatatatggaaagaatatgtggaattgcgaaacctcggagacacacaatacccgtgcgcaaacatttggagcaaggtcctcaatgcaacatccaaacaaaccacctatctgtttaaaaatgtgtcatttctattgccgacatgagattgtaaatcaacggcaaagaaattctgcattttggttgacccacaccgtcaaggctttaccaaggtctctccttgtctgtctttgcaagccacatccaccttatttgcagcgcccagctcatatattcaaggttgagaatgcccagcccaccatactcaagcgccccctgcacttcgttccacgaaaccagacaattgccaccatttacttgctaaaaaggaaagttaggcagtgcctagatgctaggcagaataggtgtttacctgttctctctgttattttgctctcatatctgattccgaccacaaacacacatgacacaccttcatttaacatgcaaaaggtacaatcaagaaggcttgccttgtcacttagcagcactcagtgcagacagtttaagatccgagctcagaaggtgaaggaggacctggaaagttatgtttcgggggtgtctgtgataatcaaccctcagaagccacgccgtggttgccttgagatacgtgaagaaggcggtgaagtgttcatatcactgctgaacatgccacgccccttcacaccaatgaagaagctcgacatggacaaggttatcaaggacatcgccaagaagatctcctaa

SEQ ID NO: 17126 - DNA, 315 bp, Zea mays
  Peptide Sequence Number=SeqID_60501
atgcagtctctctgcgctcgtgcattgccgttctctcgcgctcgtacccaccatctcactgcgcgtgggacccatgatgtcagcgtcaaccgactgcgtcaacaatgtgccgcgcggaagccgccgcgcgcgcgggagcttcggctgccgttgcggacctcgctgaccaatcgatccgatcattatgttaatggaaacatggagcgaccacctgggaaaacagtgctaccacaagggtataatgggacgcccttggctagtggaggtcttccttacccgaaaggggcaagggcagtaggggagtggtcagtgtag

SEQ ID NO: 17127 - DNA, 1791 bp, Zea mays
  Peptide Sequence Number=SeqID_60502
atgcatcgcatccttccaccttccgagcccccggatggggagcgcccgcgttgccttcgtcttgttgttggaggagcgcaaccttacagaggtgggcacccttcagccatcgctcggcttcaaggattttcatcaggtagcccggctgcattcccccaccgatggtcacccaggatggtgaccaccagttcgattgtggggagaagcaagccaggctgcggcctctgccccgccctcagcttcaaggatcttcatcatccttgctggggaggagggcgaggcgagccggagctctacctcccgtatgggccggcgggccacctcttccttcagcattcaggggagagggcgctcaccggcctagcggagggggcggacttcgacaacgcggggccggtcggccgcaggcgtcgtcagctccaccatgcatggctcgctggctcagctggctctggcgcttcttccggtgccacctcccaccgctggggcagagcatggctatccgtccgtcgtacgggcggctgttgcgccatgcgcaccaggggaccgcccaagacgtcgcacgcccctagggcggtgttcatgttcttgggttgtcttgtcctcactcccggcacgacgcctctgcgcggaggtcggtgctcgcccattatggaggacttgagtggggatctgccggtgggcaggtggctgcctgtcgtcagtgctgaggaggtggcagccggagaaggtttctccgccgacgagaccgtcagcgccacccgtggactgacctccggctctttggctttgatagcttgtcctcgaccctcgagtggggacacgggcgagggccttgtcgcagcagcgtctgccctgaggtcatcgctgctgctgtttagccgcccggagcggaggtcgttgtcgctgctgctgcagtggtcggcggcgagccacccagagagtccctcggctcggtcggccttgccacccaaggcttctcttgctcagttaaagaaccctcggctgctctgcgatgagccggagctggaagcaacggtgtcagcgtggacagaggcggagtcagctcgggaagaagcttcgttggcccgggagcacgtggccttcctggccgaagaggtgcagcggcggcggctggagcttggccaggtcatccgctggcgagaccaaccccggagtcaggctgccgaggccatgagccgggctgatgtccttaggggacagttggctgaggctacggagcggccggtcgagatccttccgcccgcgtcgtcgtccgaggccgggccagattcctccgaaggtggagacgacgccgagggtgctgctgccccctttgttgatgacttgttcgtcggtaacagaatcatttatccgagcaagagttacttttcacggaaggtgacgagtgaggagtccctcggctcggtcggccttgccgcttacgtgtactccgtcgttttcaggatccacctatcgaagcagtcgaaaagcgcgaaagatgttctggcagaaagactttttccgaggaaaattttgacgcagaggggaaaacgagtgtcggggaccataattaggggtaccctcaaggctcctaattctcagctggcagtcaggccctgccgaaggcaccataggaaactccgcttcgcccgacccagggctcggactcgggctaagccccggaagacggcgaactccgctccgcccgacccagggctcgggcacgggctaagtcccggaagatggcgaactccgctccgcccgacccagggctcggacacgggctaa

SEQ ID NO: 17128 - DNA, 231 bp, Zea mays
  Peptide Sequence Number=SeqID_60503
atggttgcccagagcgtgcgcggcggtggacccccagccggtggccgcaactccatgacttcgacgcgcggtggcggaggttcctcgatccagagtagtggcggcggttcccaggtcggtggcggcggcttcccgatccagagggtgagcgacccttgtgcgggcaagcgacggcgtccccgaggccccgaggaggcggcacttccaaggccgagattcgtccaccagtaa

SEQ ID NO: 17129 - DNA, 441 bp, Zea mays
  Peptide Sequence Number=SeqID_60504
atgacggaccgccaagccgacccaactcggcgaggcgggattgctgaccaacccgcccaccggacaaatatagcggagcaacgtagcgaggcggggccgtggaccaacctgcctaccgagcaacccagcgaagcggggccactgaccaacctgcctgccaagcaacccagcgaggcggggctaccgaccaacctgcctgtcgagcaacccagcaacatgatagccagccctcaggcgagcacctctactgaagggaagagctataacaccctaaatttggggtcccgctctcatggccaaaaccccgccactgagttcgtcgggtccccctcattagccctagcttacttcgacgaccccagacccactggaacccatgcccgcctcgtctccggcgacttcaccactgcggatgggagcggcgtcgcccaaagtcgttaa

SEQ ID NO: 17130 - DNA, 657 bp, Zea mays
  Peptide Sequence Number=SeqID_60505
atggccaccacccgcgacgtctccgccgcctccgcggccgccatgttccacgtgtaccagcccatgccgatgccatccacggcggcggcccccgcgaaggcgggcaagaaggagggcggcaaggaccggcacagcaaggtgaacgggcgcgggcggcgcgtgcggatgccgatcgtgtgcgcggcgcgcgtgttccagctgacccgcgagctggggctcaagtcggacgggcagaccatcgagtggctgctccgccaggccgagccctccatcgtggccgccacgggctccggcaccaccccggccgtcttcgtctcctcctccgcgccgtccacgtcctcctcctcccactcccactaccagcagcagcagcagcagcagcaggccaccgtcgtcgtcctgggcaagcgcccgcgcgaggagggcggcgacgccgcggcggcgtccgtgccggcgttctgggcggcggcgccgcggacgacggcagcagcggacgccagctggggcttctcgccgctggaggcccagcaggcggcggcggggtacgtgcccatggcacaggcgcagcagcagcagcaccaccaccaccacctcaacctgctcgccgcgctctccggtgccgcgaggcgcgccgaggcggcggaggagacccgatga

SEQ ID NO: 17131 - DNA, 1095 bp, Zea mays
  Peptide Sequence Number=SeqID_60506
atggagaagggcagggacgatagagaaggggcaacagtgctggagaagggcggctgcgatggagaaggacggctgcgatggagaaggggcatcggtgctggagaagggtgcatgctcgaattcggcctggcatgcggtgggtggtatggtcaccacggttgggggtggtggcagtgcggtgggcggcacgacatggtggctagggaagcttttattggaggctatcctcgtggatccacatttggtttcgggatcagtattagtattattaatccaaaagacaagggaaaggaagcattccggaggtatcatgcatctgctatagatgtgcctgaagaatctacaggtccagaagttacacgcttggctgctatggctgcaaaatataaggttttcttggtcatgggggtgattgaaagggaaggttacaccctttattgttccgtgcttttctttgaccctcttggccgttacctgggtaagcaccggaagctcatgcctacagcattagagagaattatatggggatttggggatggatcgactattccagtttatgatactccacttggaaagattggggcgctcatttgctgggaaaataaaatgccacttttgaggacagcgctgtatggtaaaggtattgagatatactgtgcccccactgctgactccaggcctgtttggcaagcctccatgacacacattgctttggaggggggatgctttgtcttgtcagcaaaccaattctgccgcagaaaggactatcctcccccaccggagtatgagtttgctggtttaggtgaagagccatccgcggacactgttgtttgccctggaggcagcgttatcatttctccatctggagaagtcttggcaggtcccaactatgaaggagaggcactgattacagccgaccttgacctgggagagattgttcgagccaagtttgatttcgacgtggtgggccactattctcgacctgaagtccttagattggtagtgaacgaccaaccgcagctccctgtgtctttcacgtctgccgctgagaggactccagctgccaagagtgatatcgatactaagtcttactga

SEQ ID NO: 17132 - DNA, 468 bp, Zea mays
  Peptide Sequence Number=SeqID_60507
atgtgcatgcaactagatgttgctactgaggtctattcaatgcgtgttggtgacacgttcaacatggttctagctctcactctgaacctggatagatcaacagacactggctactacacacagattcactattatgagaagtatttcaatagtatatatagttcacatgttgccggtgttggcgacctgctctgtgacacttgtggctccggcgacctgctcctctacgaccgcagccaccacaccttctgcctccccccaatcgccaccaaggtgcccatccagtcgcctccccatccggccacaccaccatgctgtcaacggccgcgtgcctcgcagctcgacacctcctcagccttacctctgcatcgaaagccatcagcctctcgcttgcttcgtttccagtcgggcctcttctctgcccaactcatacccccaccattcccccaaactcgattccaggattag

SEQ ID NO: 17133 - DNA, 2058 bp, Zea mays
  Peptide Sequence Number=SeqID_60508
atggacaaggatcgccagggagctgcacaaaagcggcaggcggccgtcaggctcgttgaagccaggccgaagaggcagcggggggctgcgaaggcagcggcccccggcggaggcaagccgccgctgtcggcgaagtcgggcgcccctgcatctagcaaggcgccggaggcaacggcgggcgccggaggctccaaatcgacaaaggtggtgccgcctgccggcggagtggcggaggtcgcgaaggcggcccaagcgttgtcgttgtcaggcaaacgcgtcgccgacttcgccaccaatattagtgtggacgactatcttggtgggtcggacgaaggccaacttgctatagttgcgcctgtcgcggcgaccacgacggctgccgtggtgccgaaggcgaagggcggggctcttagcgccggaggcgaggcgtcggccttcacggctgtcagggatgaggcgggcgctgcgtcccgccggctggaggaggcgacggaggcgctgagtcaggcgtcccgccggctgaagaaggtggctgacttcgccaaccgtacagcgtcgggggccctcacggcggctgtgtctgccgaagtcgagagacttcggacacaacatgccgacgctgtccgtgaaaaatcggccgccgacagcaagtgccgtaagctgacggacaaggtggtcatactggagaaggagaaggctgacctccggcgccaactggcgggggaaaggagggagatcaacgaggccctcgccagggagaaggctgcgcaggctgaggccaaattggcacgggcggagggcaatatttccagggagcgcgccgagcagctgcaggagcggctcactgccttggagagccgcatggagagggccgaggccgtgtcgcgcgcggaggcagagcggacgcgcaaacagctcatggatacataccgtgagctgggcgcggggaccggtgaattcgaagtgccgggccgagaggccggacttcactgcctggagtgggtgcaggaggaattgcaagcgctccccactatcgtggaggggtttatgtcgtatgcctccctggtcacctgcgagggggcgatgaatgcgctctcccgcgaagggtgccggcacttcgaggtcttcgaccaagccgatgaagatttcgagcgagatatctttaaggttgaggaccccgttgtgaaggaatccgccggagccatctacgaccggatgtggggtgcgcacggtcgcgaggtggtcagggagcgggccgagacggcgagggctcaggtggcgcgtggcgagagggtggacgacttcggggcgttgaacagcgcgtcgcctgagccggagccgaccccagcggaggccgtgtctggggccgccctggagccgaccccggagactgcggaagacgcaccggatgcctccgcatccgctgcggccggcgaagacctgcccccagaggtcgccgaaggcgcgcctgatgcccccgcagctgctgcgccgagtgctgaagatcccgtggtggtggcggaaacgacagcggaagcaacggcggagccagcggcggaggctcccgcaacgtcagggccttcgcaggttcaagattttgggcctgcgcacgcaaccgctactactaaatttttggcggcttcgaccgcggaaggtggtaatgaatgtggtggatctgcatctgagtcttttgattttgctgactctgggagctcggttgagtggactgaggagtcgtcggaggaggatttggactactttgcggctttggacgtggctacggcggaggcttcgccgcacgccgcggacgcaggagatgtgccaggccctagcaccgggcgacgacgacgaagggcggttgcgaagcgtagagttagtggggcggagggggctcggcttcgtgtgagtagggctggccggcgggaactgctgtctttgccggctgccgagagtacaggtgaaggggaactgcgaagtctttttgcgggtgaagagcttaggataatattatttaattatagggagatgggaattattcctaaggttgagccgatgtag

SEQ ID NO: 17134 - DNA, 213 bp, Zea mays
  Peptide Sequence Number=SeqID_60509
atgtacaatggatcaagcagtctcattagctgcgagaagcagacgattcgaatcaagtttttatccttgcaagtgaccgcacttgtacccaccataaccggaatgggagaccacgtctcaggtcgcgtgaggggtaaagtctgtgggcaggttcactcaagtactaggcttaccgatttaccatatttctcggatttaataacattacgctaa

SEQ ID NO: 17135 - DNA, 222 bp, Zea mays
  Peptide Sequence Number=SeqID_60510
atggcgataggcggaggcgcgtggagggtgggggccggtcgccattcacgtggtggacccgtgcggccccccctgccaagaacacaattccgttccttccgcctctctcatcctccacggagggagacctggccacctggggcggatcaacctcaatccaatatggaaataaatccatattatgagcgactgttagcaactgttgctactggccttgcctga

SEQ ID NO: 17136 - DNA, 831 bp, Zea mays
  Peptide Sequence Number=SeqID_60511
atgactgtgttgcatcattcccatttgccaactgacacaaaggcaggggcgccggtcaccaagcagaagaagggaagcgagagcacgaagcctgatttggtttgctttttgttgcccagactcggagggagttggtgcctctgtgtctctgtgtgtggagatggaccccaagttcccccacccccaccgctaaacaaaacggagcccaccaccgcgacgaccaccaccacctcgaccgcgcagcagcagcagctggatcctaaggactaccaccagcagcagcagccggcgcagcacctgcaaatccaaatccaccagtcgccgcagcaggacgggggcggcagagggaaggaggaggagcagctgcaggtggtggcgcagcccggggagaggaggcagcagccgctcgcgcccaagcggagctccaacaaggaccgacacaccaaggtcgacggcaggggccggcggatctggatgcccgcgctctgcgccgcgcggatcttccagctcacgcgggaactcgaccacaatggagaacgtgaggatatggaaaggaaccgtgtgcgggcgtggcggctgtcctcgtctgtggtcgcgaggacggcggcgggggctgcgggcgcggggaggggaatcgctggcgggggcatgcgtccgcggatcttgccgcctgcacggtatggaggaggaatcgggatggaggaggaatcgcgcgatggcacagggcggccggtgttcgcggcggggatggcggcaggcggatcgtggcagacgagcgggcggacgggattaggaagcgggggcagtctacagtcctctcttaatagttaa

SEQ ID NO: 17137 - DNA, 366 bp, Zea mays
  Peptide Sequence Number=SeqID_60512
atggcatgctggatgaccggccgccggctggctgtgaaccactctgctagctgctactggctggtggagtggaggtgcagggcgtacgtcgtaggtcctgctgcgggtgtttcatcaggtacgcagcaggccgcgcgcatgcaggggtccagtggcgccggcaaccacgggcaggaacaggagcgagtgtggcttagccgggcgccccggtgcggcgacgggtgcggcgtttcaccttcagcagggttcttgccttctctcttcgcggagcccgaccaccgcgcatgcgtcacctggcagggcgaggttcccggatctcagtttccgcacttccatcagcatcagcactcagcagacacgttttag

SEQ ID NO: 17138 - DNA, 1590 bp, Zea mays
  Peptide Sequence Number=SeqID_60513
atgggcaccgaacatggtgtctccgatgagctgcaagcggggcccacgcgatctgaggcggctgttgaacccttcggggggccagccttcgaacctctgatcagtaaggaggctcggagcctggttccttcacggggaagggtccttttcgggcgaaggcgaagcgtcgcccgcttctcctgccagaagcgccgcctgtcctgccgcggagttaatgcgacggggcgagtgcatccggcgcgccggttgcgtgacgcgtgggcctgggcctccacgctggcgtgtcgggggtcggagaagcgcgtccacttggcgcggttgcatgccgcctgcatggctgcccgcctctttcgcccgttggtttgggcaaaagtggaggcccccacgccgcaggggaggaccttggggtgtgttggagaagactcagcccgtgacggttggaggcgcaagcagggagagtggccattaaaaggagggcgatccctttcggaaggcgaccatgtcttctcccttccttatgcatcgcgtctttccaccttccaagcccccggatgggggatgcccgccgtcttttcgccttatcgttggaggaacgcaactccgtgggagttggtacctttcagccatcgttcggcttcaaggattttcatcatgcagcccgactgcacccctccgccggcggtcacccaagatggtgacctccagcttgatggtgggggaaagcgagccgggctgcggcctctgcccctccctcagcctcaaggattttcatcaccaaggctggggaggggagtgtgccgagttggggtcggcccctgcgtgggcggcggcccgctccttcactcagtgatcggagggaagggcggtcgtcgtccgtggcgccggcagctgcaccgtgcctggctctcggacgcgagtggcttcggagccgctcgcagcgccggcgtctgccacgacagcttgaagaggggcctcctggcagcagcatccgccctgaggtcagtgctgccgctgttcggccccctggggcagaagtcgtcgtcgtcgccactgctggagcagctgggttgtccgtcagcgggaccgacgccggagtcgatcagccgaggcctcggatcggggtggcgcccttggaagatggttggccgaggcctctggggtaaccggccgagccgcctgctcgggccggattctcggagaagtccctggcagcgattgcccgagcgtgatgatgacgtcgtgctccagagcggagatcctcagaccgcgtcgccgtccgaggctaggtcggatctcgccgaaggtgtcgtcgatgccgagggtgctgctgcccccttccagcgccaagacccgagcctgcaggatcagagtgtcttgttgcgtgtgccttctgcggccgccgaggccagaatacacaccctcgctgtgttggatgtttgtacgggtgagagttgcttctcgcggaaggtgacgagtgagaaggtgatgagtgaggtatccgtatcccggaggcgtaggagtccctcggctcggtcagccttggctgcttacgtgtactccgtcgttttcaggatccacttttcgaagtag

SEQ ID NO: 17139 - DNA, 505 bp, Zea mays
  Peptide Sequence Number=SeqID_60514
agagctaaaggcatcccgaaaggctccctggtctggcgcaccggactgtccggtgtgccaccggacagtgtccggtgcaccaggggacttcgcgctgaactcctcagcctcgggaattttcagagccggcgcgctataattcaccggactgtccggtgtacaccagacagtgtccggtgctacaagaggacgcggctctggaacttggcagcctcgggaattcacgacggccgctccgctataattcaccggacatgtccggtgtacaccggactgtccggtgtaactgcggggcaacggctacttcggcaccaacggctacctgcaagagcattaaatgcgcgccagcgcgcgcagaagtcaggcacgcccatgctggcgcaccggacactctacagtacatgtccggtgcgccaccggacatccaagcgggcccagaagatagagctccaacggtcagaacccaacgactttggtgatgtggctggcgcaccggacatgtccg

SEQ ID NO: 17140 - DNA, 600 bp, Zea mays
  Peptide Sequence Number=SeqID_60515
atggcggatggctggttgcctggccaagcgtacgatcgacagcaccgccgtgcggggtgccggggtcgggagacatgtcagatgaagatagagataaagaaagagaaagagatagagtctggttgcactaagagaagagaaacaaagagcggaggggatggtacccgattgaaggagcatctcgcgcatagagggaagaatgtcaagaaatgtcgctctgttcctccagacataaaggcatacttccaacttgacatagataagacaaaggaaaataagagttctaggttcaggcagcagctgagggtagatggaggcagcacgaacccatttttggggacgatgagtatgaggatgaacttaaagcagctctgcatcagtcacgtgttgagcacgaatttagtgagagggctagtgcaaggtatgataggggcgtggtggatcctccagccagagggtatgtcacacccggttttagaaggcaaaccgaatgcgaaccatcccgggcttgcaagacccttattcactcccgaggtgataggccagggattcccctacgaagcctttacaaagattccccccggggctggtagccacccg

SEQ ID NO: 17141 - DNA, 792 bp, Zea mays
  Peptide Sequence Number=SeqID_60516
atggcctctgcacccactccgccgcccctcctcccggtgacaaaccccgcccccggatcgtccccggccgccgccggaggctccgacgcgccgatcgctacgccggcattccggctcttactgagccggctctccgacacggcgcggcgctcgctgtccgatcgccggccgtggggagagctcctcgaccgttcggcgttctcgaagccggactctctctccgacgccacctcccgtctgcgccgcaacctcgcctacttccgcgtcaactacgccgccgtggtcgccttcgcgctgggggcctcgctgctggcgcaccctttctcgctcctcatcctcctgggcctcctcgccgcctggtgcttcctctacctcttccgcgcgtccgaccagcctgtcgccctcttcggccgagccttctccgaccgcgagacgctgctggggctcgtcggcgcgtccttcgtcctgctgttcttcacctccgtcgcgtcgctcatcatctccgggctgctcgtcggcggggccctcgtcgcggcgcacggcgcgttccgcgtgcccgaggacctcttcctcgacgagcccaacgcggcccccggcaacagcgcggcccaagggctgctttcattccttggcgcacccggatctggggaggcgctagcgttggcatcattcatcgacgacgagaagaagcttggcgaccgccagttcgacctctggaagcagtactacgtggccacatgcgtcgctgtgttcggcaagctccgccgcagccgtcgcttggacgcggtctag

SEQ ID NO: 17142 - DNA, 465 bp, Zea mays
  Peptide Sequence Number=SeqID_60517
atgggtggcccagacaacacgcgccacaactaccgcggtgtccggcagcgccggtggggcaagtgggtggccgagatccgcgagcccaaccgcggcaagcgccactggctgggcaccttcgacaatcccgtcgacgcggccgtcgcctacgaccgggcggccgtgtccatccacggcgcccacgcgcacctcaacttcccctgctctgccgccaccactgccgacgcatccctcgagcatgaggcaaagccgatggttgctgctgctgcgcttggcggcggtggcgcagaagccgtaagtcagcggcaggaggacgacgaccctcatgacatcgccatgtacatcgatttcgatgcggtgttcgacatggtgcccttttgtcatggcatcaagagagaggattgccagcatgaggggttcgatggcgacgccgttcactcgccgctgtgggcactgggtgactga

SEQ ID NO: 17143 - DNA, 426 bp, Zea mays
  Peptide Sequence Number=SeqID_60518
atgagagacctgcgatgcccgcaggcgcaccaccgcccgctacacgtctgcgtgactcgctctgacgcgcggcacaaggccgcgatctcggcggtgctgacgctcatgtgtgttcttatctatgttgggaccaacggtgagacattcttcaacacaaccgcacttgttacatgcatacagaacttccccaagagcagaggtcagacagtgactcgaaatatgaccactgcataccagaatgatcagatgctcgacaaagtcatggtggtgatgggagctcctcaaggccaacaaaatggtttcaaggaggcagccaactcggtggagttcctaggtagggagatgctgggaatgcaactgagggctgccaagcctgataccgatgatttatatgttctgatatttcttttcctgtggcaagagtaa

SEQ ID NO: 17144 - DNA, 1977 bp, Zea mays
  Peptide Sequence Number=SeqID_60519
atgggtcgagttgagctcgacttccagtcgacatgcacatcgagggcgcggtcagatcaccatggtcgtggctgctacatcagcggtgtagagtgtgaggcttgtctgaggtggtctgaaggcttattggatctgctagctcgtggtgaagagtccatagttgataaggaaaccaagcgagttgccgatccagacatccatgatgagttacctcatgttaatagcactcagtttgctttagagcttcacgtgaatgctgcttctatggtgcctcttgaaaatgagatggtagagaacaaagatgcagagaaatttcgtgagaaaatgcctttcgataacatcgtatgggatgaggaactagcatcagatggcaacacacatgatggcttattgcagcagctagctgaggtggaggaccagacccagtacaagaaggtctgcacagtgttgtctgagagcgaggcacaggtgtatgatgaaatacttggcaaggttgtatgggacgaggaaatgtcatccgagcttgacatggacaatgacttattgggactgctggtttctggcggggagtacccagttgatgagcaggttgtggatgactcctcggatttcaaagagtttggattggtcgatgcagaccatgtttttgtggaagggctcgatgaagatagcaaagcagtttgcaaggcaagcatgagtgatgagctaactcttgagataaacactccttttctctttggggttgctatagatcacgtgaatgagatgcctgtcaacatcaatttgcaagatggcctatcacaggagcgagcaagtggtagagagtatgtgtatgatgataagatggaccctattgttgagcctgactttgatctcagttttgctgtcagtattcaagaggagtgggatattcaatcacttgtgagggtgccagaacaagatcttattctgaaaatttgtgagcagtaccatggaggacaacccattgttttgacctgtcaatatatgattcaaactgatcaccattttggtggtacaagaaaaggagacaatgagcagagaggagtatgctttgcaaggactcatgttgcatggggacaagctgtgttgcaaccatgggcaagaaatgctttcagtcctggacaagttgagcagctacatcaaattgattctgctgcacataaggtcgctctggagctgggtatcaatttaccatctgatccatcagttcggatgcaatgggatccgggcatcagtacggccacagcttggggacaagctgtgtttcgaggggccggtaaatgtcatgacccaagtgtggcccagaagaagcccagcctacctgcccatttgccaaggccgaagcccactctatccaacccaattgctgaagccaaagaccacgaggacaaagaggagctgaggcatcgatgcagaggacaggaaattattcagaaagaagaaagaccgaggaacacaggaagctcgtcttcctcctctggctgcgggaggcgcgtcgcggacgggaacggcactgctactactactttgcttcgctcgccttcagctttgtgtcttctcgcgcggcgaggactggggagtgggttttatgagatgggagtatgggacgagctttcgtccaaccaagccccagcgggccagcccactgaaacagttgttatccattggactcatttattcgcggtcgcttccccagtccccaccgccgcttcgctgcggcctccccagtccccggcagccggcgctccacactccgtcgtccgtcctcgccgcttcatctcttctgaccggaggctccaacaaggtggtgggtcctcccaatcaagggcccgaacaatggaacatgcaaagcgggtgaagaaatttggtcagagaggcgaagttcccaggcaaaaccggctaggcctggctaggccgaggtggaaggccagccgtgttgtgcgggccatgcagtaa

SEQ ID NO: 17145 - DNA, 963 bp, Zea mays
  Peptide Sequence Number=SeqID_60520
atggggcagggcgggtcggggctggatcagggcaccgcgcgtcggaacggcgctcgagcaacccgtgcccaggaacaccagcgaagacgaggtggagagcaccgccgccgctgcaacagcaccgctgcaacacccacgccgaggataactggctctgataccactgtaatacccgtggctacaccggcgagatcaatccgggagccaattgggttggatagagtgggcttcggccttggcaaatgggcagccctcgtccccgccgcaggcgccggcgcgtcctcgcgcctctccatccccaacccgtctctcaaggacctccggtcgctgctggcgccggactccgccgccacagccccgccctccgcctccccgtcgccgcgcgtcttgcaccgcatccgcgtcgccgcctccgcgctccgggccctccgcacgctccaccagcccccgtcccggcctccggcggcgcccgttggcaaggacaaggagccggtgccgggcggcgggcgggtggtgctgtacttcacgtccctccgcgtcgtccgcggcacctacgaggactgccgcgcggtgcgcgccatcctgcgcgggctccgcgcggccgtcgacgagcgcgacctctccatggaccccggccacctgcccgagctcgccgcgctcctcccccgcgtggcgctgccccaggtcttcgtcggcggccgccacctcggcggcgccgacgaggtccggcgcctccacgagtccggggagctccgccgcatcgtcgcccccgctcccgggcccgcgttctccggcagctgcgcccgctgcggcggcgagcgctacctgctttgcggcgcctgcgacggcagccacaagcggtacagcctcaagggcggcggcgggttccgcgcctgtgccgagtgcaacgagaacgggctcgtccggtgccccgcctgctgcgtacccgttcccgtcgcctga

SEQ ID NO: 17146 - DNA, 291 bp, Zea mays
  Peptide Sequence Number=SeqID_60521
atggaagtgccgaggaaggcgatggcttccagtctcgtcgtatggctactactcgtgcactcatgccgcctgcaggtgccgtgcgcgctcggagccgacgactgctgggtcctggaccgcgaccgctaccgcttctgcttcaggacggccaagtgcagggcggcgtgcgcggaggaccgcttcgtcgacgggcgctgcaagcacgggttcccctacctgctgcccctctgcgagtgtctgcgcccgcagtgcgcagcgcccggaccgagcagccattcggaactcggatag

SEQ ID NO: 17147 - DNA, 231 bp, Zea mays
  Peptide Sequence Number=SeqID_60522
atggaggcactgtacgtccggcccgccgtgctgccgttccgatcctttttcgcttttgccgtgtggcccagattcgttctgacctcggaacagtcagagtcagtcttctgtagtgcccgtacaattaagcaccggccggatgacagacagacagacacggttgcctacatccgaagaaaccagcgagacagctgcgtgcgagtcgatcgaactgatcacgtacctagctag

SEQ ID NO: 17148 - DNA, 1023 bp, Zea mays
  Peptide Sequence Number=SeqID_60523
atggcgagtgcacaggcagtggggcaaggagaacgaggccacttcgttctgaagagcggacacaccattccggccgttggtctaggcacttggagggccggctcagataccgctcactctgttcggaccgccatcgccgaggctggatataggcacgtggacacagctgcccaatacggagtagagaaagagccctcccaacgtcccaagcagcaggtggtgacagtatgtcgtaaaacatcctgtgtcgaccaggtcggtagaggacttaaagctgcgatggagggcgggatcaacaggaaagatttgtttgtgacgtcgaagctatggtgcaccgagctggctcctgatagggttcggccagcactcgagaaaacactcaaggacttgcagctggattacctggatctctaccttatccactggcccttcaggctgaaagacggggcgcacatgcccccggaagccggggaggtgctggagttcgatatggaaggggtgtggagggagatggaaggcctcgtgaaagacgggctcgtcaaggatataggtgtctgcaattacacggtcgccaagctcaaccgcctgatgcggtcagcgaatgttccaccggcagtgtgccagatggaaatgcaccctgggtggaagaacgacaggatctttgaggcatgcaagaagcatgggatccatgttactgcttactctccgctgggttcgtcagagaagaacctagcgcacgacccgctcgtcgaaaaggtagccaacaaactggacaagaccccggggcaggtgctcctcaggtgggcgctccagagggggacaagcgtcatccctaaatcgaccagggacgaaaggatcaaagagaacatccaggtgttcgggtgggagatccctgaggaggacttcagggccctgtgcggcatcaaagatgagaagcgcgtgctgaccggagaggagctcttcgtcaacaagacccacgggccgtacaagagcgcaaccgaggtgtgggaccacgaggactga

SEQ ID NO: 17149 - DNA, 771 bp, Zea mays
  Peptide Sequence Number=SeqID_60524
atgccgctgaatgtactcacgagacagctggccaacgcagatcatccgcgggtcgcattgtcgtcgcaaaagctacctttcccacccggcgaccaaggcggctgcgcccaaaagcgccgaacgccacagacccccttgccgcgccaccacccgcccaccccgcagcagtcgccgtcagccatcagcgcgagcaaaccaccctgcactcctgcaccactgcgcgcggcgcggcgtgccagtatggggaacagcctccggtgctgcctggcgtgcatgctcccgtgcggcgcgctggacgtggtccgcgtggtgcacctcagcgggcgcgtcgacgagctgggctgcccgctcaccgcggccgacgtgctcgcggcgcaccccagccacgcgctcacggacgcgtggtccgcggccggcgcggcccgcaaggtcgtcgtcctggcgcccgactccgagctcaagcgcggccgcatctacttcctcgtgccctcctccgcgtgctccacgcccgccgccgccgccgccgacgagaggacgaagaagcgcaggagccgcgccagcagcaggaagaagcacggccaccggaagggcggtggcgcctctgtggcgccgtcgctgatgagcgcggcggagcaggacaactacctgcgcgagctcctgtcggagaagcgggaggcgagcctggtgagccaccggcggcggcggagcggcgcccgccccggcgtctggcgcccgcggctggagagcatagctgaggagccgtcagagtag

SEQ ID NO: 17150 - DNA, 1341 bp, Zea mays
  Peptide Sequence Number=SeqID_60525
atggggacggcggagaacgacctaagcggcagcggcgtagaggctgagcagcgccagcagtacaccgactttgcgttccagacggcggcggcggcgacgtccacgattattaccggtgcggcgcacacggcgtccttcccgcagtcgtctgtgctgatgcccccatcgggacgagtaggagactcgtacagcggcgagatgctgcagcagcagccgtggacctaccaggaaccgacggcgcaattcgaggcgccggcggcgcaggctggcaacatgttcggcaccggcggcggctacggcgcggctcccggcttccgcgagcagaggcagagccaccgcccgtcgtcggacgacgggtacaactggcgcaagtacgggcagaagcagatgaaggggagcgagaacccgcgcagctactacaagtgcagcttcccgggctgccccaccaagaagaaggtggagcagtcgccggacggccaggtcacggagatcgtgtacaagggcacgcacaaccacccgaagccgcagagtacgcgccggggcgccagctcggcgccggcgtcgtacgtggtgcagagcgccagcgacgcggtgatgcccgagcattcctggggcgcgctgtccggaacacccgtggtgacgccggagaactcgtccgggtccttcggcggcgacggcgacgaggtcaacggcatgagctcgcggctgggcggtagcttcggcgccgacgatctcgacgacgatgaacccgactccaagagatggaggaaagacggtggcgacgccgacgcagcagggtgctcggtgtcggtggccagcaacaaccggacggtgcgggagccgagggttgtcgtgcagacgatgagcgacatcgacgtcctggacgacggctaccggtggcgcaagtacgggcagaaggtcgtcaagggcaacccgaacccgaggagctactacaagtgcacgggggcagggtgtctggtgaggaagcacgtggagcgcgcgtgccacgacacgtgcgcggtggtcaccacgtacgagggcaagcacaaccacgacgtgcccccggcgcgcggcagcgcctcgctctaccgcgccgcgctggcggcgcagatgccgccacagcaggccgcgagctaccagggcgcgccgatgccggccgcggagagaggcagcttcgccttgtccgggttcggcgacccggtgggcacggcgtactcttattacacgaaccaccaccaggagcaggagcagcagcagcagcagccgaaccaggcgatgcgctacgccaaggacgagccacaagactgcatgtcgtttttcgagcagcaactcctgttctga

SEQ ID NO: 17151 - DNA, 153 bp, Zea mays
  Peptide Sequence Number=SeqID_60526
atggactcactggatcgtcttttcctgtcacagacctcggctcctacggacgactacgacatcagcctgagatctgttttgccaaataaggtcatgcggagtagaccttttgcgccggaactcgtcaaaacctacgaagtcacgcggtgctaa

SEQ ID NO: 17152 - DNA, 369 bp, Zea mays
  Peptide Sequence Number=SeqID_60527
atggaataccgccacagccccgctgcaccaccgaacgccaagggcggttctggttctggctgctgcccggagaacaaggacgtcgccgcgccaaacctcagctcagcagcggaggaggtgtctgccaccgtcgctaccagcgacgacgacggcctctgcaagggcaacaagaacgtggctgctgccagcaaaaaactcaagccgcacatcgtcgcggagcgaaagcgccgggatcggatgagggattacttcggcgagctgctggcgctaatgccccagatccctgcgaaggtaatagaggactctcacatgctaggggttagtggaaatcagcatttccactggcggttattttggaaccgccagtga

SEQ ID NO: 17153 - DNA, 303 bp, Zea mays
  Peptide Sequence Number=SeqID_60528
atggcggtggcaggcgggcgggcgcagcagtcacgtcgccagccaggctcacgtctcatcctgggacaacaagagagcctcctcccacggggttcgaagactggccctccgaagggttcaacagtcgcctcagatcgcgtgggcccgacacccactactggtcaggggttcgaaggccagccccccccgaagggttccatggccgcctcaggctactcgggctctgtgcccattactgatcaggggttcgaaggctggcccccgaagggttcacagtcgcctcagacaccgagcgagggatga

SEQ ID NO: 17154 - DNA, 1011 bp, Zea mays
  Peptide Sequence Number=SeqID_60529
atgggttataagcaagaggtaacgaaagacaaaggagatgatgatgagcaagatgaggagtttgatggcctcgatgagtatattcacaagactgacgctgcctttcaagatactgagatggaagataaatctacaaataataatggtaaccccaagacaacaatgatggcggctgtgcatcatgactatgaagcttctgcagtcttaggggatgcagttttacctcatttggtcaatacacaagaaggacaaaatatcctaggggtttactccaatacagacccagatgctttgtcctgcacagcatcagtaaaaccagacgttttacttcaaggttttgggaccatttcagcgtctaacttggggattgtttctgctagtgtgggctgtcctggtagcacaagtctattaaatatatgtctgccacatgaaattcagcagcatggaccagatgcttttctccatcgatttcctggcattgttgggttccatgaacaattgacagcagggggtgtcgctccctctaagttactaaataaagtgacctctcctaaggcaacaactggtatttcttttactactttagatatgccaaccgatgataattttacttctcttcttcatacaaaaagaaatgattcctctgatcttttgtctgttccagcacgtgtcaaagcacaggagtcaagctgttctgatcatactcaggaattggggccctctagtgttgttccttttgtcgaccctggtgcaggtgtaccttttgttggctccctgcatgtttctcctggtggtaaacatccagcatgtcaggtggttttggctccgaaggatgttttctcttgccagtctgatgcagctgtcttggatgggaacttggctatttcagattcttttactgaggaggcagtcgattctttctctcttactcagagagtaaagaaaaatattgttgaccttgccgagcagaagattagtgccaggagaaccgataagatgaagataccatga

SEQ ID NO: 17155 - DNA, 159 bp, Zea mays
  Peptide Sequence Number=SeqID_60530
atggctcagtcaccagtgttcaccgatgatgagacctttgcgcctgggcactgcatcacgtttggctcccttgacttcctcaccaccgcaaccgggataagccttcgtgatgaggtcactcatgtgtcacgggtgataactgacatagcggtggtgtag

SEQ ID NO: 17156 - DNA, 546 bp, Zea mays
  Peptide Sequence Number=SeqID_60531
atggacgggctggtggcgctggcggaggaggaaaaggccaacaacgcccgcgccgtgcgcgtcggggtccgggccctgttctcgctgtgcctggcgaaggagaaccgcgcgcgcgcggtggcggcgggggccgcggcggcgctggcgcggcgcgtggcggagggcggcgccggggagcccgagcgcgcgctggcggccgtggagcggctgtgccgcgccgagggcgggcgcgacgccgtggtggccggcgcgggcggcgggcccgcggccgtggcggcgctagtgcgcgccatgtccgggcgcggcgcggagcacgcggcgggcgcgctggcggccgtggtggtgggcgcgggcgggtcggaggcgctgcaggcggaggcggtccgggcgggggccatggggcggctgctgctgatggtgcagggcgggtgctcggagcgcgccaagcgcaaggcgcagcacctgctgaagctgctccgctccgcctggccgagcgccgactgcgtcgccaactccgacgacttcctccaacactaccactactga

SEQ ID NO: 17157 - DNA, 450 bp, Zea mays
  Peptide Sequence Number=SeqID_60532
atgcccccgcccatctcactggcacgctggtcccacaaagacacccgcctccacccgcagatgcgtgagcgtgagtcaatcggccaccaacacctcgcctcgcctcccctgcccacggtccgcccgccccgcccctgcctctgtatccatccacgtctgcttccatgccctcgccccggcgcccctcctccttcccggtcccgcacgcgatgccccgccgtgacagccgctgccccatcaacggcctcaccctccttcctccaccgtcccgctcgcacgaatctcgttcgtagcgacgctatcgcgggcctatggtgcaaggagaccgccacgctcgctgtcggggcttccgcgctctcctcctggcatgatggtggtactcgtctaatggggctcgcaccgtcagggcctccgcgctctcctcccggtgatgccatatgccgtcgttaa

SEQ ID NO: 17158 - DNA, 1722 bp, Zea mays
  Peptide Sequence Number=SeqID_60533
atgcagcacctgtcccccgtctggcacgggcggctgcggccggcgctctgggcggcgctggcgctcgccaccgccgcgcgcgcgccgttctaccggcgctggggcgccgaggtccgcgccgccccgcggttcttcgccgccatggcgttcatgctcgccgcgctgctctgcgaggccatctccgtccgcttcgtcagcaccgtcctcggcctgcagtggcaccgtggacatatgtttgttgccgttctaactgctatggcatgggcggaagcgtatgggggatggagctccgttgtgatatggttcctcgtcatccacagcgctcagcgggaggtacgggagcgccaccattacagcgttgactgcgttgtagcaatctacatcgggatcctcttgtggaggatgactgcgttcctgtggtccacgatggaaagcaaccgatccagaaggctttccaagctggatgaggttcagaagaggctattccgcgctgcaaaggattccgacgtcttggagataaggagcctgctaaatgaagttgagctggctgagttaatgaaggaccgcatatacgatcagagagtgaatagaagactcgccacttgcgagcgaccaagaagccgcatatcaagctacgcgcgccgctcgtcggaggacgacccgccgcccgcgccgctactgccggcctccatgtcggccggaagaggtttcgagctgatcgcaatttgcatagaagaaaaactagcaaaggagcttcttttcgccaagaaaggtgaggaatttttctcaaagttacatagacggctggtgactccgcagccgtcatcggcctccgtttgctgggaggatcttcgagcgtctttcctggcggccggcgaccctgaggccgaatgggcgttcttccgacagacacacaaatctaattctcattcaaagtcggatcctacacttccgccttttccaaaatttactcagtttgaattgacacaattacggaaggggcttaaccggaatgggccgggctatcattctatgggccctctttctaaaacatggcctgctcgtaacccggggatgagctacgcccaagctctcatggatggtagaggtgcagtgagagatggcaaggccatggcttggaaggaggttgatcgccgccgacatcccagaatcgaggtgaagacagagcagcaacatctcggaggtcatcgcctatctcgtggtcgtggtccaagtgaggatcgcggtcgcaggacatggcacagccggggtggtcgatacggaggaaggccattccatggagcattcagagctccacaggacttcgctgaatccagtgaagggggcggatcccgggttagagaggaagcagagaagaagcgtgcggctgttgatggtcctgctgctgatgatcaaggaaataaacgcaaagaaaagttgtgctgcgaactttgtgaaatggatcacactccacaggtttgtccgacattcaatggccctaaaccacacgcacttctatgtggttttgcaggaggtgattcgggtttcttccaaatccccacaagtggagccaagggcatggcacccaaaaaggataatgcaaccacttttattactgcaatggaaggaaacattaccacagatttggtgaaagcagaattggcacgtcttattcctgtgaattggacttggtctgtccagcagcatgccgatggatttgag

SEQ ID NO: 17159 - DNA, 240 bp, Zea mays
  Peptide Sequence Number=SeqID_60534
atgcagtttaatcaacaattgagaaccaaatatgtaccttatggatacttcagcaaaggtgaggtttctattgtctcaaggatggtacctacacctgtcaacataaaagctcgctacctattttatttagacacaattaagatatgccctgaacaacaaatccacgaaccagttagaggatatatcaaatggacccaaggggatgaatggatgtcaatatacattcagagttcctattag

SEQ ID NO: 17160 - DNA, 2148 bp, Zea mays
  Peptide Sequence Number=SeqID_60535
atgccgcacacgaagaatgtgtcggcgccagggggaggcgatgatgaggatcctcgtcgccccttcaggcaggtcaagggcaagacagtatatttggagcagcaagaaggccgcaagaagcggcgtacggacagagcagcccgtgcagcagcagcagcagcagccgctgcgcaggccgagcttggagatcagccacagactccgtcagatcagattgcgtaccgtgttcgtcgcctcgcctcccggtctcgctcctccactcacaccactgcttccactccaccacccactctgcctgctcccgtcacccctgttgcaccatccaccaccacagccatacccgctacctccactacaccagcttccactgctcctcctaccgctcccgcttcagctcctcctatccctccacctcgattccgggagcgcgatgagactgaggtacaaccacttgctgcggatcccagactttttgaccttcagcgtgctacagcggcacaggtacgtaggttcagatacgtacccatggagtcttggttaccggctcagagggaccctgctgcagttgatcttttcagcacccgtattcaggagtccttttttagagctcagatgtctgcacagattgctctgcatgcgcacaggcttttggatcttccagcttttctacgtgccgccggtgctgactctgaggtgcacctcacatatctgcctgaccttctgactcttttgactaccagcggcaggtatgttgaggaatgggtccgagtattctacgcaactgtatggatcgaccctgaccatcactggatgaggtttcgttttgagcgagaggatgtcactattactgccagccagattcgccagctctttggatttcacgagtcgtcgactcgacttcacagcttatgctacggcacctctgaccctcctcgtcgccctcacggcggtgtggctccgggtacagctcacgtcgcggctctattccgcccgcccttctcagatgggtcgcgatgctcaccgacagatttcactacagcagttaagttcctatttgagcttatgagacggacacttctgccgcggatgggatacagggaggctaccacacatatccagctctggctccttggtgccctggtctctcactccgagtttgacgtcgtggatttccttatttgtgagatcgaggacaccgttttggatggtatgcgtgctcgacgtcagctaccgtatgctcactatctgtgccacattttcacacagctgattcaacctccacagtttcagggcacacttgaggcctcacgcctcggctttgggtcctaccgtccggcgcctgaggatcctgtgccagcttctgctccactttttagcactcaggccgaggatgctgctcaccatcagttcgcagctcaggatgcggcagttaatgatgatgatgatgatgacgatgattttgggattccgcctcctcctcctatgcctccacgctcacatgatcatgaggctgggagttctagtgctacccctgctgcccctctggctattgaccctgctattgcttcgattctccagtctctcactcagcagcaggctcacttggccgccgagcaatcccggttatccgagaggatgctctcgatgtttcagaccatgcaagacaggcaggattctcttcagcagcagcttctccaggatcgggctgagagcagggcattcatggctcttatgctacagcattctggtgtctcggttccccaggttcagtctgcaccacctcctccgcttcaggctcctgttgtgccagcacttcagtcaggaccccctcttacttctgttggtccttcttcctctccgcttcggccggtcaccctggctttcacgtcaccggttctcagctctgtctgccctcagccgccagtgccaccagcttctgctgtcaccactcctactgtggcagtatctgtgaccacttcagttccggcagcttctgcagcacggcctcagtccgagtcagtaccagctccagcttctaccgcagatcctagattcgagactgactctgaccccccgccggcgttcgctctgctgcctcgaccgcgaccggatgcgcccccgccgcctcctcccgcttcagatatttag

SEQ ID NO: 17161 - DNA, 423 bp, Zea mays
  Peptide Sequence Number=SeqID_60536
atggtgtggctggtggtggcggtgggggcggatggcagatgtgagactgtggtgggtgacttctcccggagtcggagtggagggagagtaatgtggagtaatgaaggcgtgttatctgccagaggtcccccacctacaatgtactgcatcgtgcaattagctgtccctctcagtggcatagatcagatgctcgcaccaataaaatacaaaggacaagctcgtaaggaacagatttattgctactcggtcgacaaagttcaaggacccgtttttcctggttttctaagtttagggcctaacacaacgtgtaatgttcaaaagttaattggtaaagtagcgtttagcatccacaacaatttgtctttcaaagatgaccctacatccggcaggatgattgcaagcttgcagccacagcgctactag

SEQ ID NO: 17162 - DNA, 3132 bp, Zea mays
  Peptide Sequence Number=SeqID_60537
atggcagtagagttcaattggtcggttcggggtgctttaccaggtgacgcagaagctgtgcgcacgaggaatttgagaattgtgcagcggcttacccggtccacactctccggtgggcggaggaagtccggcgaggggcttgggaagcttcacgagtctctagtgaagctatccgagcagctggcgtgggtgaggggtggctggggtgagctggccacggtggccagagctcgggtggctcggcgggcggtgagctctcggttcacggtcagggctccagtgattgagcgcgaattcctgacgaatttctcgtggattccgtggagaaaaagtgtgacctttccgatgcagtacaaccaccgcagccgcttgccgccgccgccgctgccgttcggccgcggagggcatcctcgcggccccaagcagccatgctacgctccgcttcctccgccaccgtttcctccggcgccgccgccgccgccgccgtcgctagagcgcaagtacgaggtgcttatggaggccggtcgcctcgccaccgagtatctggtcgcccagggcgtgctccccccggccgctctgcagcgcggcgccggcatctctggcgcgtggcctgatcatcctcttcctccgccaccgcagctgcaacagcaggaaccccgggggggccgtggcagctacaatggaagagggaagatgaagtatgggaaatacaggagggggtatttggattcagggagggacagggagaaggagaggagaaggccatttccaaatggccggcgctacgaggaggataaggatgaagatggggcacctgggtttcggagggagcgacacggcaatcgggggagtgatgaggtgaggcctcatgatacagaggcactgagggaagggacaccattgacagcgaaggctgtagaagggttctgcatggaggatgcaacgtcaaagattatgagctctttcaaagatactattaaggattctaatgatgcgccaaaggtgccggaggagactgaggaaggcgaggtggaggatgacagggagacgcagaattcagaaactgaggtagtgaagcaagggatagataccgatgtaaatcatgcttcttgttatgttattacagagtcaaatcccaaccagttatcagatggtaagattcaagatgagattcctgacgaggaagctgaagatgacaaaaaagttatggatgaggctactttggatcacaacacttgtgatggtgaggtgacaaatatggaagttgagatgcacgttggtaaggagagtttgattgactattgtaacttcacgagaaccccaacaaggcctaggtcagcacgtgcacacagaaatgcagcatctatcccaggagaacctgcagtagttgaaacatttgatttagtttcttctggtcaagcttcacatatggtaagcgctgaatctgctgagagattttttactaaaattgtgtcagaaaacacagaagataaattttgccaagaaaacactagctctggtgatgtccgtgctccaccaaaggagctgatgcttcttcaagaaaatggaataacagttgtgactgaaaacatggcagaagataatgttgatgcagaaccacatgtggtcgtccagcaatataaggaagaaactaacctatctccgttaacagatgccctcgagaagagcttgaggcaggaaatcacattatctccatttgcagcttctcacaaggatagcttgatgcaagagggtggcttgatgcaagaagttgatttatctccgttgacagctaatcacagggagagcttcactgaagaaaccgaattgccaccatcaacagcttctcacaaggacagcttgattgagggaactgacttaactcagacaatatcttcttataataataacttgaaattgcaatttaaggaaggaacacaggtatgcgatattgatatgctgccacaagatgtgaacctcattgagttgcccgatcaaaggaaaatcattggtcgtgatgttggtgctaaagctgtcaccggaatggaagaaggaaagctggatcaatctagctcactaaatctatcggatgttgacctagttggtggtacagaggttgccgctatacacaataatccagtgttggtccagctgtctgcagctggatcttccacagagtcaaataataaacagcaacaagatcctgaaacttttacaggtgccaatgccagtcctacagatgatttatgccagcttccattagataataaggatgttcaggtagttaatatagaatgtggcacaccagttgaagttggtggatttggtttgtcaaaatcaatacacaataatccagtgttggtccagatgtctgtagctggatcttctgcagagttaattaataaacagcaagaagatcctgaaacttttacaggtgccaatgctaatcctacagatgatttatgccagcttccattagacaataaggatgttcaagtaattgacatagaatgtggcacaccagttgaagttggtggatttgatttgtcaaagtcaaattctgatataccatgctacccgtcaatgcaatcagatcttcatgctggaataagtgccaacgactcagaggtgagacgggaggcttcctgctcggcctccggccgtgcttcacggcgcatctggcacctcctcagctccttggaccctcctcaccacaaccgccgccgcctcaaatgctgccccagtgaggctagcaaaggcggcgaggctgctacagctgcgtctacaccgtcgtcatcgtctaactgcacgctcccctccaaccccaacgacgggggcaagctgctcgtccacgcctactactccaccgcctcctgcctgtacgagtgctgtttcggtttcactacctctccctgtcctcttctaccgccagacgcgtgccaccaagctcacttgccccaggtggagcagcagatgctccgccatgcctgcgcctgcagccggacggtttgtcagcagcaccagcgagctgttgtgtctctggccgcgatagaagagaagccaaggaaccgagaggaaatgggcctgcagaccaagactagaattgaggacgacttaatacgtgctgaatga

SEQ ID NO: 17163 - DNA, 660 bp, Zea mays
  Peptide Sequence Number=SeqID_60538
atggccgccccgccaaccactcgccccatcgcattaactccgcggcgggacaggcggcacctctggcaggagaagcgggcgacgcttcaccttcgccgaaataaccgcgccaaaaaaggctggccccccgaagggttcgacagccgcctcagatcgcgtgggccctacacccactactggtcagaggttcgaaggccggccccccgaagggttccacggccgcctcaggctactcgggctccgcgcccattactgatcaagggttcgaaggctggcccccgaagggttcacagccgcctcagacgccgagcgagggatgaccatgggtacgttcaatacataaccgaggctcgagctgcgctcccgagctcaccggagacaccatgttcggcgcccatcgagggcaacatggcgctttcccccctcctccttgcggaaaggcgacgcaggggcgtaagtaaaaaagccgagtctgtccctgatcgccctctcgccctgtgcagaggctcgggggctgctcgcgcaaacccggctccggccgaaccgttgatagcgtcaacataccagcccgagaacttgggccccgaccgtacacccgggctacggccagctcgcatgagggaacaaccagaccagccgaagcattacgcaaggcattaa

SEQ ID NO: 17164 - DNA, 684 bp, Zea mays
  Peptide Sequence Number=SeqID_60539
atggcgccccgcatactccgtgacgacggcggctctcagcccccttacggaagcaagaggaccactctgctacacccccattgtacacctggatcctctccttacgcctataaaaggaaggaccaaggccctcttagagagggttggtcgcgcggggacgaggacgagacatgcgctctctcggggccgctcgtttccctctcccgcgtggacgcttgtaaccccctactgcaagcgcacccgacctgggcgcgggacgaacacgaaggccacgggattcccacctctctcacgccggtctccggccgcctcgcttctccccccttcgcgctcgccctcgcgctcgacccatctgggctggggcacgcggcgacactcactcgtcggccccaagggaccccccggtctcggaacgccgacaatgatcaagaaaacgtgcatcgtgtaaatccgtgtggatcttgctacaccaaagaaacacgatctgtctgtcgtgaattctttcacaagatcacggggctcaccatcaccgacgccactctacgcaataaggaggtcctcgcctatctactggcggggctcccgatcgactatgacccattcatcacctccatgatgaccaagatcgagccactctccatcgactgtgtgttcgcacatctggatgcatttgaggctagctaa

SEQ ID NO: 17165 - DNA, 819 bp, Zea mays
  Peptide Sequence Number=SeqID_60540
atggaacagcggccgcggaggaagaaaggggcggaggggcttaccggcggcgagactgctctgggagcttcaccagagatcaaggaagatgtgtgtgcaaggaatttgagaatgactcaccggattgctcggtccacgtgcggccgcgggcgaccgaagtccggcgaagatgatctcgggtctccggtgaggttctgtcgggtccgagagcttggaaagctccacgagccactggcgaagctaaccgaagggcagacgcaacttggacatggctggagtgagctggacgcggtggccgaggctcgggcggtgatggtgggcggaggaaagctcgccggagctaaggaggggcgtctggctagcgagggtgagcacggggtgaggaaccataactctctcccggagctgatactgcgctgccaggctgatactgcccaacgccgtcctccccgaggcccaacgccgccgtctccgagctgggcgcccgccacgccgccgtccctgagcccaacgccgccgtacccgagcccaacgccgccgtacccgaggcccaacactgtcgtctttgagctgggcgcccaccatgccgccgtccacgagcccaacaccgtcgtccccgagcccaatcccgacagcatggatcaagcagtctcattaactgcgagaattagacgattcgaatcgagtttcaaccttgcaaggcagatcctcgatggcaggctctggtgctggatccggggctaccttctgagcaactccttgctccagcacgaggatgtactctccgtcagcgaggttgcaatctatcgaatgcaatga

SEQ ID NO: 17166 - DNA, 330 bp, Zea mays
  Peptide Sequence Number=SeqID_60541
atggataggctggagcacacgctgccgacgagctcgcccgcctgcgcacgtggaccggccgatttcggccatcaccatcgtcgagccgcacctcgttgtgaccgcaaggacctcccgaagccaaccccacccttcgtcggacctccctcgccgccggtaagccgtgccgccgtttttcctttcgcggattgcaacctcgctgacggagagtacatcctcgtgctggagcaaggagttgctcagaaggtagccccggatccagcaccagagcctgccatcgaggatctgcctgccccagctttggaaggcaagccccggttttatgcataa

SEQ ID NO: 17167 - DNA, 459 bp, Zea mays
  Peptide Sequence Number=SeqID_60542
atgggcaagaacaacaagcgcaagcatgagccaactcctccatcgaaggagtttggtgactcggagtactcagaggaggagttctcctctgagtctgaggggtctccggcccccatctccctgcgtgagtcgtctgatgactcagacgactcccaggggcttgcggcggaggtctggacgtacatccgggccgtcgagcgctccgggctcgagggctcggatgagtcggagtactcctcggatgaggaggactcggacggcagcggcgaggacgaggacgacgacgacgacgacgacgacagtgacggcagcggcaggggcggcagcggcggtagcaaggacggcgacggcagcggcagggacggcgacggcggcggcagcaggggcaggaaccgaggcggcagcaacaggggcagcaccaggggcggcagcggcggcagtaacagggccagtggctag

SEQ ID NO: 17168 - DNA, 1092 bp, Zea mays
  Peptide Sequence Number=SeqID_60543
atggagtcgcccagcccagccgcgtctgctccgtcgcgcccaactcatgcgtgccgcatgcggtcctcttcaagctcgcctgcgcgcgccctctgccccaccgtcttcagctcgcccaggacggcgttccggtccctgctcaactgcggccctggtttcagcacggctctgcgcgcccaggattttcctgctcagactgcgcctctccagcgcggcgcccatgccgagctccttgcgcgcagccgcgcttccttctccagccacgcaatccacctggtcgccgtctccgtccattctaacgtgccttacagggcgggcccactgcaaaattacactgcagccgcatctcctcttcctcccaacgcccgactccaactctccctctctctggttcgcctagcagcctgcttctcgcatctacggacgcggcgcggcgcctggccgacagatcggcggcgcggcaggaggcttcttcaccgcaagacctgctgctgtttcgtgcctccgaccacaggctgcttcgtgggggcgctctgccgggagggaagaagccagccgccgccgggagggaataagccagccgccgagcagttcaccggcgctgcgacctgcgtcttcaacggcttggcagcagccacgtcgaggggagctccaagccgaatccctccaatcccgagctccaattccaccgcgagctgcttcgtgggggcgccctgccgggagggaagaagccaggacctgctgctgccccgtgctccaattccaccgcgaggacctgctgctgccccgtgctccaattccaccgcgaggacctgctgctgccccgtgcctccggccataggctgcttcgtgggggcgccctgccgggagggaagaagccagctgccgccgggagggaggaatccgcgagcagttggaggcgaccaggagggagggaggaagtcagccgcggggagggaggaatccgcgagcagtggaggcgaccggatccagaggccctgctcgcgctccagagcacctgctcgcgctcaaattcttgacagcagcaacagtctcctccaggcaaggagcataaccctctactctctataa

SEQ ID NO: 17169 - DNA, 366 bp, Zea mays
  Peptide Sequence Number=SeqID_60544
atggccggaggcacggggcagcagcaggtcctcgcggtggaattggagcacggggcagcagcaggtcctcgcggtggaattggagcacggggcagcagcaggtcctggcttcttccctcccggcagggcgcccccacgaagcagctcgcggtggaattggagctcgggattggagggattcggcttggagctcccctcgacgtggctgctgccaagccgttgaagacgcaggtcgcagcgccggtgaactgctcggcggctggcttattccctcccggcggcggctggcttcttccctcccggcagagcgcccccacgaagcagcctgtggtcggaggcacgaaacagcagcaggtcttgcggtga

SEQ ID NO: 17170 - DNA, 675 bp, Zea mays
  Peptide Sequence Number=SeqID_60545
atggtcacctgcgagagggcgatgaacgcgctctcccgcgaagggcggcgcgtggcgagcgggtggacgactttgggggcgctgaacagcgtgctgcctgacccggagccgacccccgcggaggccgtgtctggggtcgccctggagccaaccccggaggctgcggaagacgcaccggaagcccccgcatccgctgcggccggcgaagacctgcccccaaaggtggccgaaggcgcgcctgatgcccccgcagctgctgcgccgagtgctgaaggtcccgcggcggaggcggcggaaacaacagcgggagcaacggcggagccatcggcggaggctcccgcaacgtccgggccttcgcaggttcaagattttgggcctgcgcacgcaaccgctactactaaatttttggcagcttcgaccgcggaaggtggtaatgaatgtggtggatctgcatctgagttttttgattttgctgactctgggagctcggttgagtggactgaggagtcgttgtcggaggacttggactactttgcggccttggatgtggctgcggcggaggcttcgccacacgccgcggacgcacaagatgtgccaggtcctagcaccgggcgccgacgacgaagggcggttgcgaagcgtagggttagtggggaggagggggctcggcttcat

SEQ ID NO: 17171 - DNA, 198 bp, Zea mays
  Peptide Sequence Number=SeqID_60546
atggccaaaagtatggcatttccgaagctcgaagttggcctctctgccatgtcgaaggatgaactcgcggacaaccttgcatgcaacagtctgaagccgaaattgaagaccttcggaaagaacttgccaaagccaatgagaactttgctgttgcaaaagctagtcaagaaattagtgaatggtcgaaaactaggctag

SEQ ID NO: 17172 - DNA, 435 bp, Zea mays
  Peptide Sequence Number=SeqID_60547
atggagctcgacgccgcggctacgcagaccgagccaacgcaggggcgcgagggagctgcgacggccatggagacggaggtgcggccctgggctccgacgggagctgggcatctccagcgcccatgggagtttcattggggtgtcgagcgcccaagcaaggccaccaaacaccatggattcaaggaggagaggaggtcggacgctggacgagcaggacacgccatggcgagaaggggagagcaggggcgtcagcgtgtgctgcgggagatggccggctggagcagaggggcgagagaagcccgtctgtgccaaggaagggagcagggagcgccagggttgggtgctcggctactcgagcctcgccggtgtcatgggaggaagggagccgagctccctgtgcgctggggaagaaggcagggaggctatggcggctga

SEQ ID NO: 17173 - DNA, 270 bp, Zea mays
  Peptide Sequence Number=SeqID_60548
atgctgccagccctgaacctggcgggcgacgtggtggtgatggatagggtcagcatgaggctcggccgggtcacgccgagggacatcgtgttgatgatctcccccgaggacccgcgcaagtggctcgtcaagcgcgtcgtcgggatgcaggggactccgtcacctaccttgtcgaccccgacaacagcgactcctcctccagaaccgtcgtggtcaaaggtcagttttgtggacaagatcatgtaccacatgtcgacagcaaggaaataa

SEQ ID NO: 17174 - DNA, 987 bp, Zea mays
  Peptide Sequence Number=SeqID_60549
atgtcaatcgcaaagagggccatacctgaggctacaccaatcgaagaggccagccaaatcatccgcgacaactggctgaatgtaattgaggagcatcatctgaagtactcggggaactctcaggtaaacgacatcctggacattggctgctctattggagtaagcaccagatacctcaccgagaagttcccatcagctcaagctgttgggctcgacctatcatcgtactttcttgctgtggtggcacaaagggaagaaaaactgtcccggccaaagcctattcgctgggttcatgccaatggtgaggcgaccgggctgtcttcaaattcatttgaccttgtctcccttgcttatgtgtgccatgagtgcccagcacgagcgataaccggattggtgaaggaagcattcaaggtccttcgcccaggaggaacaatcgccttaacagacaattcgccgaagtccaaagtacttcagttcgttgttggagcatctccaacaaccttcaaaactattttatcaaagcatgctcaagaggagagtaaggctcttacccgcaagactcgcatcctggatgtggtctataattcatcaaacaatgagcttgtgaggactcagactcttgtgaatagcgccattgtacaagttgatgctgcaccattcaagcagtggtacctcactcactgtggagtggacatcggtaggaagaagaagatgcatgtcgctaagaaggatgcgactgaggaacaagacggtgaggctatagtcgaggaaacaaagaagagtaaccatgtgcagaagaagattgagaagcgtcagcaggatcgagcagtcgacactcatattgaagagcaatttggcagtgggagattgttggcctgcatttctgctcgtcctgggcagtgtggccgagctaatggctacatccttgagggtaaagagctcgagttcgacatgaagaagctccagagtatcacccacagaaagtag

SEQ ID NO: 17175 - DNA, 285 bp, Zea mays
  Peptide Sequence Number=SeqID_60550
atggctttgttcagccagagtcagctctgtctgggtgcaccggactgtccggtgcgccaggctagctcaggcgaacttgctgctctcgggaagaaattaacggtgtacgactataattcaccggactgtccgtgtaagggcgagaggctccaagttgtggagattcctcgcaaacgggatatagaaaagcaaagcaaaacaccgtggtattcaagtgggtctttggaccgcttgagaggggttgattgcaaccctcgtccgttgggacgccacaacgtggactag

SEQ ID NO: 17176 - DNA, 480 bp, Zea mays
  Peptide Sequence Number=SeqID_60551
atgggcaagaacaacaagcgcaagcgtgagccgactcctccatcggaggagtttggtgactcagaatactcggaggaggagttctcctccgagcctgaggggtctccggctcccgcctctcccccggcgtcgtccgatgactcggacgactcccaggggatagccgcggaggtctggacatatatccgggccgtcgagcgcgccgggctcgaaggctcagatgagtcggagtgctcctcggatgaggaggactcggacggcggcgacgagggtgaagacgacgacgacgacgacgacgacgacgacgacgacgacgacggctggggtggcggcgacggcagcagggacaacaccaagggcagcagcaggggcagcaccaagggcggcggcggtggcagcagggacagcaccaagggcagcagcaggggcagcaccaaaggcggcggcggcggcaggggcagaggcagggccagtggctag

SEQ ID NO: 17177 - DNA, 552 bp, Zea mays
  Peptide Sequence Number=SeqID_60552
atgggccatgccgtcaccgacgataaggtgtcatgcatgatggaggaggtcgacgccgacggcgaaggctgcatcaacctgcccgtgttcgccgcgctcatggagtctgcgtccgctgccgccgccgtcgaggatgacgtggaccacgccttcatggtcttctacaccgacgacaacgacctcatcacgctcgctgagctcgcgtgtgtcctgcgtagccttgggggagcctgccaccgtcgcccacatcttacacccagcaccactcctcttggtacggaaccgtgtaattttgtaatgcctgccatctcctgggttcttgcatctaacatggggagcgcaaatgacgcaaagcatgctgacttgtacacgatgctaaacaagcaaagctccagagggcagaatggcagtggcgtcacagcagaactttacagtggtcgattactcagcagccacgatttcatggccaacgttcagacgggctccgggaagccgatgaccttctacttccccatcaccggcatcgtcatgcagcctgctagaatgccatag

SEQ ID NO: 17178 - DNA, 165 bp, Zea mays
  Peptide Sequence Number=SeqID_60553
atgaacagtacccccgtactgttcacgctgtcttgtattcgctcgcgcgccacgcttggatttttgccttctgtcaagccgaaggcactgcagctggggtttcctcagcagctgcagcaatttcttcctcagccatattcaaaatcatttcatcaatgtcagaaa

SEQ ID NO: 17179 - DNA, 141 bp, Zea mays
  Peptide Sequence Number=SeqID_60554
atggccatgatgggttcaacatcaaaaaagatgtacctctgccaggtgaggaagcggcaaacttttgttgcttttgttcaaaggtggtgcccaaagaagaaaaccaggagtgaagcttcgggaggaagggtcctcagttaa

SEQ ID NO: 17180 - DNA, 483 bp, Zea mays
  Peptide Sequence Number=SeqID_60555
atggcctcagctaatgttggaggtactgggggtggattaggagttgcttccctcccacgggagcttcttatcacttttggtagcttcactatcgggcgtaggagaccattcatcaaccagcttcatagagggaggaggcctgaaaaggtccagttcgccaccaagtgcttctcccgctactccagaaggtccggcttccatcccaacaggatccgcagtgtattacaatacacttgcaagtggtccacaactgtgctaagctcctccacgcgggctcaagctttggcttccttggcccaagcaagtgaacagatgggctttgctccgataccagttgtgacggaacctcccaagtcattaggcccacctacagttgtccttgtccaatggacctcagacaaccctgcaggtgcacctgatcacttgacaagttcggtacccgaatttcttactttgcccaagagcgtttcacccatcacgtag

SEQ ID NO: 17181 - DNA, 513 bp, Zea mays
  Peptide Sequence Number=SeqID_60556
atgagcttgacacaactaaaagggaagtacattgctcaaccttctcaagataaccgtgatcacatggtgaagacgcttgagacgggaacaactgtggcatacactaagtcccttgaagaaaatgtcaaggacttgaggattgtcaagaggaaggaacaaaagataaaaatcaatgcctccttcaaaagcctcaaccacgtctccataaaaggtgccaaaggttcacatcaagccaatacaaagtcaaaagaaagggctcaaaagataggagcaaaggaaaccgaagtgctccctggtctggcgcaccggacagtgtccagtgcaccatcggacagtgtccggtgcaccaaggaggatagacctcaaactcttcaacttcgagtttctcaggcgcagctccgctatcattcaccggactgtccggtggaccaccggactgtccggtgcgccagcggagcaacgacaaactgcgcgcaatggttgactctgacagtgaacagtgcagcacagtga

SEQ ID NO: 17182 - DNA, 801 bp, Zea mays
  Peptide Sequence Number=SeqID_60557
atggctactacccgagagatcgacccctttttaaaggcggctctccccactcgtattcccaagcgccacgggcaaagtctccaccgatgtgcttcagcgccctccccctacgacacgggggttgggtcccacatgtcaggcgggctgacccaaagcagaaggagccaaatcgccgctcgcggagcctgtaaccgccccgcggttataagtgttcccccatcctcgccgaaaccagcgggcaaaaaggcggaccgccacacaggcatgcaactgcaccatggttgcgcatccttttggcttcatcgcattcggagggacagcgtgaaggcctgggcccgcatgtcatgcaaccggcgcgatggttactgcgcgcaaggaaaccgcaccaccactctcgccaatgtcgcgtctcctcgactgcggaaccagtgccgtgactcgagacaaccctgcgcggaccgggaaaggagatatttcagaaagggatccttctccgcgaaggaagcgggcttcgagcccattactgatcaggggttcgaaggctggcccctcggaagggctggccccttggaagggttcgacagccgccccagagcacacagagtgatggatgactctgggtacgtctgttacatggccgaggctcaggctaccctcccgaggaaaacaacgccgctcacctcgagaggaatcacgtcctcgcccgaccccggcctcggcctcaggagaagtctccgcctcgcccaaccttgggctcggaccgaccgcgccacacgggatacatcattaccctacccctag

SEQ ID NO: 17183 - DNA, 816 bp, Zea mays
  Peptide Sequence Number=SeqID_60558
atgtccgatactccagagtttataattaagaacctatatccaatgatatggaaagcatacctaaggaaaacacaatcaacaatttttggtcctaatctgcaattcttgttaattggcacattcactttagccaaacaaccccaggctggttcagctggtattcaaatactggttgagctggttttcaggctggttcagctgctttggtactacatcgagttctttgtggattcattactcttggagcttctagctcctagacgactaggtgtctcttatattgatcctagggcaatagatcttgccatgagaatcgccgaaaggatgttcctcaaaatgaaggaagatgaggcgaagaacaaaattgaagaagaaaatgatcgatggagaccaaacgacaaatccacctcttcacaaggttcgtctttcaaatccacttctcatatgtgctttattgctaatgggagtgacagtgaaagcgaaagtgaggatgaggaggagcaagaaagtgatagtgaagatgaggatgatcttcaacaattcttcgctcaactaagcaagaaacatcggatgagcttgctcaaactcatgaaaagagcagaagaacaaaaagaaatgcttcataagcaagaagacatcctcatcagaaaaatcgaagacttagagaagttgaccagagagcatgagaagctaaagtgctcttatgatgatttggtccaaaggtatgaagacatttcaattgagcaaattaaacttgttaatcattcatcatatattgctcaattagaaaataaaatgctaagttcaagaacatga

SEQ ID NO: 17184 - DNA, 543 bp, Zea mays
  Peptide Sequence Number=SeqID_60559
atgtcttcttcctcccttaagcgtcgtgtcttcccatcttccaagcccccggatggggggtatccgccgcctttccgcctcctcgttggaggaacgcaactccatgggagttggtacctctcagccatcgttcggcttcaaggattttcatcagccggcccggccgtacccccatgccgacgatcacccaggacggtgaccgccggtttctgggtggggaagagcgagccaggctgcgatcttggtcccaccctcagcttcaaggatgttcatcatccccgctggggcgggagccacgctgagccggtgctctaccttccgcgcgggtccgcgggtcgccctttcccgcggcgtttgggggtggaggcgctcgctggccctgcggacggcgcggacttcgataacgtggggctgaacgacggcgggcgtcgtcacctccagcgtatcggagtcgtcggccgggcttccggcggcccctcctgtcggagggtggccgccgcatcgtgtgcacgggaggaccacccaggatcagcgcgccgttag

SEQ ID NO: 17185 - DNA, 315 bp, Zea mays
  Peptide Sequence Number=SeqID_60560
atggcgcggtcggtccgagcccaaggtcgggcaaggcagagacttctcctgaggccgaggccggggtcgggcgaggacgcgattcctcccgaggccgaggttgaggccgagccctggggccagacgaggcggagaccaccttcagaggccgagccttgcccgggtggctggcacagcagtcggagcaaggcgatcctcgcattgaatgcgcctgcgatacggtcggttggagaggcgatctggccaaggttgcttctcgacgaattcccgcccgaggctgggctcgagcgaggcgagatcgcgtcccttgggtag

SEQ ID NO: 17186 - DNA, 1290 bp, Zea mays
  Peptide Sequence Number=SeqID_60561
atgaccgtaggcctcgtggtggggagaagcaagccgggctacggcctctgccccgccctcagcttcaaggatgttcatcatcctcgctgtggtggagggcgagctgagccagggtttcacctcccgcatgggccgacaggccacctcttccttcagcattcagaagagagggcgctcaccggccttgcggagggggcgaacttcgacaacgcgggaccggtcggccgcaagcgtcgtcagctgcagcgtgcctggctcgctagctcagcttgctctggcacggcctccgacgctgcctcctgccgcttggtccgggcgtggccgtccgtccaccgcactggcgaccgtcgtgccgtgcgcaccaggatatcgtacaagacatcgatggggcggccgccgttcgtcggcatggcaccggcgagcaggtggccgctatcatcggtgttttggtggtggccgccagaggaggttgtttctgccgatgagaccgtcggcgccacctgcggtcagacctcccgctctttggctttaatggcttgtcctcacccctcgtgtggggacgtgggcgagggtcttttcacagcagcgtttgccctgaggtcatcactgctgttgtttagccgcccgaggcggaggttgtcgtcgctgctgctggagcgatggtcaccggcgagccacccggagtttgttatcccgcaggccctccggtgtggaggttgttcatactcgcgggaatggaaccagagtcccaaccctcggtcgctctacgatgagctgaagccggaggcagcggcgtcggcgtggacagaggcgaagtcggctcgaaaagaggcttcgtcggcccgggagcatgtggcttcccaggccgaggaggtgcagcagcggcggctagagcttggccaggtcgtccgggagcggggccaatctcggattcacgccgctgaggccgggagccgggctgaggtcctcaggggacagccagctgggcctacggacgcgctagccggggtgtctgctcaggctggaatccttgcggagaacctggtcgtgagggcccaagcgcggtgctggcgtcctccttcgaggtggagatccttccgcccgagtcgccgtctgaggctgggccaggatctgccaagggtggaaacatcaccgagggtgctgctgctcccactgccgatgtctgaacctgctggaacagtttgtctgaatcgaaacgacatgaaagacgttctggcaaaagacttttccgacgaaaattttgacgcggagggggttccccccttctag

SEQ ID NO: 17187 - DNA, 1041 bp, Zea mays
  Peptide Sequence Number=SeqID_60562
atgccaaattcacagagtggcagacaaatgcagctcgctttccaggcgttggctcatagcccacggtatgcaacttcttcggggcctctttgccgcactgcacacactggctggctgcatcagaaaagtaaaagaaaaggttactttgcacagggacatgttccaagtttttctatgtcttgggacattgagagtgatgatgaggaccttgatgatgaggttgatgatggagctgagggtttattagcaacactcaagatggttcgtggtaccctgacagagcagacttatgtgttccttagtgctggggagtcgtatctgatgtacttatgtataaacagtgacacaaggcatacaggaatacagtacctacccctaggcactggtctcaaaagtggaagttcttgcagagtcattgagggtgtgggggtgtgggagtgcaatgtcaatatggtttcatacctcttatacaaatacccaaatcttgcagggatggttgtaacaactgggatgaaaaagtatttagcctcctcatctcgtgttgatgatgtagaggtgattcttctctgcgacggcaacgccaccggcaaactgggaggtgttgcggctcctctgcaactgcacgtaccttgtcctctaatcctgacagcagaagatttcctatacgatgcagtccttgcgcttggtacctggaaactccgctctgaccccattatagtaggctcaggtcccacatcttcattttcccaaccagactatatttgcacgcagggtgatcttgccctcatcgattttattaaggaaattccttgtgaaccaagggtagaagtcgtgcttattgatgatgcgtttgttgaaaggaagtcgatggaatgtttatttcagccgaatgcatatctaggtgacgaggtgtttattccgataaacattcgagagacgcactggtatcttgtcgtgatcaatgcaagaaatatagagatacaagtgttcgattcacttggtacttcacaagaccgcaaagacctcacttactctggatga

SEQ ID NO: 17188 - DNA, 1098 bp, Zea mays
  Peptide Sequence Number=SeqID_60563
atgaagcaccgtcccgggccggagaggttgctggagactgcccatctggagcttgacggggagctgttcgtcagcacgcagcaggcccctacctggcgcgccaactgtcggcgtttcgagacaggggggtccctaagccgacgaggcgacgtgggggttcctccgaagccgaggttgagtctgccttctgttgtcgtggccgagcccgagccaaggggtcgggcgaggcggaagtcgttcggccgaggccagggcggagtccgagccctggggtcgggcgaggcggagttttgtcgtcttccgggtcttagcccgagtccgagccctgggtcgggcggagcggagttcgccgtcttccgggtcttagcccgagtccgagccctggggtcgggcggagcggagttcaccgtcttccgggtcttagcccgagtccgagccctggggtcgggtggagcggagttcaccgtcttccgggtcttagcccgagtccgagccctggggtcgggcggagcggagttcgccgtcttccgggtcttagcccgagtccgagccctggggtcgggcgaggcggagttttgtcgtcttccgggtcttagcccgagtccgagccctgggtcgggcggagcggagttcgccgtcttccgggtcttagcccgagtccgagccctggggtcgggcggagcggagttcaccgtcttccgggtcttagcccgagtccgagccctggggtcgggcggagcggagttcaccgtcttccgggtcttagcccgagtccgagccctggggtcgggcggagcggagttcgccgtcttccgggtcttagcccgagtccgagccctggggtcgggcggagcggagttcgccgtcttccgggtcttagcccgagtccgagccctggggtcgggcggagcggagttcaccgtcttccgggtcttagcccgagtccgagccctggggtcgggcggagcggagttcgctgtggcgcctttggcaaggcctgactgcctgtcagactcattctgtcgagtggcactgcagtcggagtggcgcaggcggcgctgtccttctgtcagtctggccagtggagcggtggagtga

SEQ ID NO: 17189 - DNA, 678 bp, Zea mays
  Peptide Sequence Number=SeqID_60564
atgggcatttgggattccattctccccggcggcggccggcgcttcatcaagcgcaaggacagcgacgccggtgaggcaggtgctgtcatgtctttctccactgggcttgccaatatcagcttaaagcataacagtgtaggtttttatcagatggctaagatagctgtaactccaaccatagtggtagcagaatttattcttttcaagaaaaaggtttcccttcgaaaggttagcacgctggttgttgtctcatttggtgtggccgttgcaaccgttactgatttggagttcaatttctttggtgcttgtgtagcactagcttggattattcctagtgctgtaaacaaaatcctgtggtcaaatttacaacagagtggaaattggacagctcttgcggcaacctcggctctcgcacatgttgtgctgggtcagttcaagacgattgttataatgctctctggttatctggtatttaaatctgatcctggattcaccagcctctgtggagctgttattgccctcgcagggatgtcagtgtacacttacctggggatgaaagagtcagccgccaacgctaggagaaattccttaaattcaaggcaaaattctcatttgaagaaggccaaggctattgtagatggagaaaatccagaaacaaagcctatggattctgtgtaa

SEQ ID NO: 17190 - DNA, 573 bp, Zea mays
  Peptide Sequence Number=SeqID_60565
atgcagtcagcatgcaaccgcgccaagtgggcgcacccctccgactccaacgcgcccagcatggaggcccaggcccacacgtcatgcaaccggcgcgccggttgctacatgcgagcaactgcaccgccactcgcgccactaccgcgcctcctcgactgcggaaccagtaccgcgactcgaggcaaccctgcgtgtgacccaacagtgccagccaggcgcgacggtcaatacgaccaaaaatgggccggcagtaatgacggtggcaggcgggcggaagcagcgggaccaggaaagggggataccccgaaagggatccttctccgcgaaggaaacaggccccgagcctccctactgatcagaggttcaaaggctggcccctcggaggggttcaacagccgcctcagagcgcttgggctccgcgcccactactggtcagaggttcgaaggccggcccctcggaagggttcaacggccgcctcaggccactcgggctccgcgcccactactgatcaggggttcgtaggctggccctcgaagggttcacagccgcctcagacacagagcgagggatga

SEQ ID NO: 17191 - DNA, 1989 bp, Zea mays
  Peptide Sequence Number=SeqID_60566
atgggtcggcgtgagaaggagcgcgaaggggggaagaagccggagggagacaggcgtgagaggcgtaaggaaaggatacagggtaatgatggcgcctcctgtgatgtggtcggtccgagccctaggttgggtgaggtggaggctcctccgaggtcgaggtcgagtctgtcttccgaggtcgagtccgagcccctgggtcgggcgaggcggagaccgtcggctgaggccagggctgagtccgagccctggggtcgggcgaagcggagttcgtcgtcttccggggctgagcccgagtccgagccctggggtcgggcgatgcggagttcgtcgtcttccggggctgagcccgagtccgagccctggggtcgggcgaagcggagttcgtcgtctcccggggctcagcccgagtccgagccctggggtcgggcgaagcggagttcgtcgtctttcggggctgagcccgagtccgagccctggggtcgggcgatgcggagttcgtcgtcttccggggctgagcccgagtccgagccctggggtcgggtgaagcggagtttgtcgtcttccggggctgagcccgagtccgagccctggggtcgggcgaagcggagttcgtcgtcttccggggctgatcccgagtccgagccctggagtcggacgatgcggagttcgtcgtcttccggggctgagcccgagtccgagccctggggtcgggcgaagcggagtttcctatggtgcctgaggccgggcttggttgctctcagcctcactctgtcgagtggcacggcagtcggagcggcgcaggcggcgctgtcctcttgtcaggcctgtcagtggagcggcgaagccacctttgcattaaatgcccctgcgatttggtcggttggcgtggcgatttggccaaggttgcttcttggtgaagactggtcctcgggcgagtcgaagctttgtgctgatgggggttaccagctgagatttaggagccttgagggccggacatgcgctgtcaaggccgcctatataataagcagcagcgttgcatggatcgtcgtccatggcgaggatgaggagagcgatcgagagtacgtagctaacctaaaactagaagctagccaggatctcaaagttccacagagaaaaataaggatggcaaacgtcaacgtcaacgtcgcacaagaaagtgcccagcttccagcagcaacgagcaatgataataacagtagtaaagacgagggatccaaccagctgaagcagacgacgccgacaagcagtaacatcaatataggtggtgtcaccaatgtcattgcaggtgatagtggtggcatcgatgggaaatccaggaaggcgaacgtggccgccgagaaggtcctatcggtgtcggcgaacctggcgaagctgctgccgtcgggcgcggtgctggtgttccagacgctgtcggcgaacttcaccaaccagggctcctgcaacaccgccaacaggtggctcagcggcttgctcgtcgccttcctcaccgccgcctgcatcttcctcaccttcaccgacagcatcctccacaaaggcaagatctactacggcgtggcgctcccggagcgcctcaacgtgttcggcctcaccaagaaggaggagcgccagctgctcaaggagatcgggcccgacctcagggagcgtaggctcaagacgctggactgggtccatgccttcttcaccgccatcgtcttcatctccatcgccatgggcgacgtcggcctccagcagtgcttcgtcccgaacctggacagtcccgatatggttaacgtcaaggagctgctgaggaacgcgccgctggggctggcgctcctctccagctttgtcttcatgatcttcccaaccagaagacgcggcgttggcttcgacaatggcgaacgcggcgatgtcgatacatcgtccgcggaagcaaacaagacggcggcgcctaaccagccacagacaaaggacgctttatcaaacgtttag

SEQ ID NO: 17192 - DNA, 591 bp, Zea mays
  Peptide Sequence Number=SeqID_60567
atgaacaagacaccggcattcaaggtgccattacaaacggaactccgattccacctccgcgggtacgaacaaccccccacgactggggggcctgcggagcaacagaaggccgacggatggctcgccgtcgacgacgacgacttctgctcccgggggccgaacagtagcagcaatgacctcagggcggatgctgctgccataaggccctcgcccatgccctcactcgagaggcaaggacgagcagaaggccgtagagttggaggtcagtccgtgggcggcaccggctatctagtcggcggagaaacctcttctggctgccgtggcggaaggcggcgccggaagcggctccgaagccactcgggtcagagagccgggcacgcggcagctgccagcgccacgaacggcgaacgcccttccccccgatcactgagggaaggagcgggtcgccgcccacgcagggaccgaccccaactcggtgcactcccctccccagcactgacgatgaaaatccttgaggctgagggaggggcagagatcacagcccggctcgcttctccccatccgggggctagtggtcaccgtcttgggtga

SEQ ID NO: 17193 - DNA, 3576 bp, Zea mays
  Peptide Sequence Number=SeqID_60568
atggccagcaccgctgccactccggaagcaggcagcaatcacagtgaagacggcaccacagtggagcttcccatcgtcgtcaccggcagcaccagccaagaatccattgatactccatccaccaggtacttgttagcccctagccatgtatccagctccagcttcaccgcagacattgagctcctgtggagactgcggaagtacctgctgcttcttggcatcttagctgttggtgttacatacaatgctggattgaccccacctggagggttctggtcgaagaacacacaagggcaatctggacatgaagcgggtgaccctgtcctccgggctctcttcttcccacggcacgaggtattcttctactgcaatgcaacagcctttgcagcgtctcttgtcctcatcatcttgcttctgagtaaaaacgtggcaaggcagaggctatggctccgctcaatgcaactcaccatggttctggacctgttcagcctgatgggggcctatgctgctggaagctgcagggcagtgaagtcctccatctacatctgggttctggtgctctctgttttcacatatattatgatccacatcctagtgttcatgaaagttgttccaagatttgtgtccgagaaaagatttgttccaaaacggctgaaagatgtggcgcggtctgtggagcgctggatcctatcccggtgtggtgttcacaggagtgaaaagaacagctctcacgagaaagatctagaggaagctcgcaagttcactctggtgcttgtgactttcgctgcaactgtggcataccaagcagggttgagtccaccgggtggtttttgggctgaaaatgatgagaacaaaactccagctacatctatgcttcgctctggaaaccttcctcgatataatacttttgttgtttgcaactcgacttccttcgttgcgtctttggtcacaatcatactgcttctaagcccagaactgagtcggcatggcatcagatccagagcggtgaccgtgtgtgttgttgtcgacatattgggccttgttggagcatatgctgcaggaagctgtaggagtgtggtcacatctgtctctgctgttttagtggctgttctagtatggatctgctttgcagttttagctgggatctttgttaacagatctgtagcagagtggtttgggaagaagatcaagccagatattatgaggtgcatcgacagatttggccgggtcttttcgtcgaaccatggcagaaagagatcaagaaatccggagggagagaattctattgcaagtcatcagcaaactgaagagagcataaaaggtgaagcagaagcagaaactgctagagtgccagaataccagcttccataccatcagctagctccagatattgaagagggtgaatgccctggggagcagcagagtccaggcaaacaacaacctacaaacattgaggttgtgtccatctcagagcatgcatctgtaaatgagaagcaagcagaaaatagcagcagtgtcatgtgcaagctgggaagtcagtctacagacccaaattcagctgcaaacgaggctatgactgaaactgaaacagaaaacatacaagatgcaaatatggaggaacaacaatcttccttggtggatggtcttaaaactcccactactgtggctgatcaagaatccacaaccgtggagtgcttgtccgacattgcacccaataaccataatggagccaccaacagtttcaaggaagagaaagaagcttcggagcagcatttgcaagccaatgagattgagagtttcagaaccaataatgtggccagacctgttgaaaatggcaacgttggcatgtatgaagtaactcccagacaagacgacggtgatgtaaatgctggtgccaatccaactgatgaacatctgaagaagtcccggacatacctccttcttctagccattcttgcagtatccctggcgtatcaatcaggtttaaatccaccaggtggtttctggacacaaagaggtaccaacaattcacctaagagcacccatcatcgtccctatcatttaccgggtgatcccatccttgaggatactcgccatcgacgctatattgcattcttctatttaaacgccatcgcctttgtggcatcccttgtcatgatcatcatgctcctgaaccggaggatgagctacaagggcataaaacgatatgcgctgcagatggctatgatagttgatcttcttgctctaacagggtcttacattatggggagtagtagggggacgaagagctccatatacatatggctgttggtatgccttgtgctggtttatgttgctgttcatgttctgatagcaacacatgtaatccctgaagggtgcaagaaggtcgtggcacagaagattgagaatttctcctgcagatacatatggacaaaggcttcgtttcggaaccggggaattgatggtaatggtagtgattgtgaggctgggcaaagccagaggagtgatgccgatgacaagacctgggagcggaggcgcaatctactgttgatgcttgctgttctagctgcaacagtcacgtaccaagctggcatcaaccctccaggaggtgtatggtctgatgatagctcagccagtggtaaaccaggagacccaatccttcagcacaacaattccaagcgctatgatgttttctactactcaaactcactctcattcgtggcatctgtagttatcacaatactgcttgtgaacaaggaatcctgcgagcatggtatcaagtcctatgcgctaagagtgtgtttggtggtgggcttggtgagcctcttgattgcctactctgcaggaagctctaggaaagcaagagaatctatctatctcatcgtcattgctgttgcagttctgattgctcttgtgattcaagtgcttcttctctcctgtacgcaagacagtctcagaggaccaactggacagtttatagaacgtctgctccagctgctttttgggacggacaaggcctggcatggagacacttctaaacagaaagaaagctcaggtcgtcccgagaaaaaagttcggaagaggcacaagtatttgatgctgcttgcagttttagctgcctccatcacgtatcaagctggtctcaacccacccggtggtttctggtccgacgacaatgaaggccatgtggaaggcaatcctggcctgaaaccacctggtgccttgtggtctgataacaaaggtcatttggcaggcaatcctgttctccttgatattaatcctcggcgctacgaaatattcttctgcttcaactctatctcgttcatggcatctattgtcgtagtcatgttcctgttgaacaaatctgcccggaagaaggccgtgccacttgaagtactgcacttgatcatgatactggacctgctggccctcatgactgcttttgctgctggaagctgcagaaaattcaggacttcagtctatgtgtatggtctagtgctcggtgtcgtgcaagcacaaggatacttggagaccatgcttgatggttccattcctttggtaatagtactagtttaa

SEQ ID NO: 17194 - DNA, 165 bp, Zea mays
  Peptide Sequence Number=SeqID_60569
atggacatgtgcgcttggctaagcgaatggaagtcaaatccggtcgtacgccctgtggaggtgtatatgcaagggcataggggttttgatcctcagaatcctgatgttttatgcactcagacagccaccgactgtctagcttcgtatgggcaggagatggtttag

SEQ ID NO: 17195 - DNA, 678 bp, Zea mays
  Peptide Sequence Number=SeqID_60570
atgccgacatatgggatgccgcctccggaatttgtactgtcgatgccaatgctgtcgcctccacctccgcctccgccacaattccctatgagattggagctcgttggtgttacttacattggtgatatccggtgtgggtcggagcaaagccggatcagtcgcccgttgccgaacgaccttgttgttcctatccacgttgaagttggccaagaattttgccttcgcttcttggatcagctgctccttgtgctcctcgaactggagttgttcgtcagccggcaagatctcccaagtcggctctataatattgctggggagatgtcagatctatcccttgaattggccattgagggccgatttgacgagtctatatgtgttgtccccagtggaatcgccaaaaagggtgttggtgcctttttggggcgccaatcactctgtgagaaccggcggcggtgctcgctgcacagacggccggacggtccgcgactaggggctggacggtccgcgacctgggacagggctaaggatttcctgcctgacggccggacggtccgcgcgtgcgcaggggcggcggaagtcaccggtggcgccaggatctcgctcccgggagggaccccgtcggggagcagagatcctaggtgttgtctaggctcggcaggccaacctagactcgtctaa

SEQ ID NO: 17196 - DNA, 456 bp, Zea mays
  Peptide Sequence Number=SeqID_60571
atgggcaagaacaacaagcgcaagcgcgagccgactcctccatcggatgatttcggtgactcggaatactcggaggaggagttctcctccgagtccgaggggtctccggctcccgtctctcccccggcgtcgtccgatgactcggacgactcccaggggatagccgcggaggtttggacgtacatccgggctgtcgagcgctccgggctcgagggctcggatgagtcggagtactcctcggatgaggaggactcggacggcggcgacgaggatgaggacgacgacgacgacgacgacgacgacgacggcgacggtgacggcagcggcagtggcaggggcggcggcgacggcagcaggggcagcaccaagggcgacagcagcaagggcagcaccaagggcggcagcagcagtggcaggggcggcggcgacggcagcaggggcagggccagtggctag

SEQ ID NO: 17197 - DNA, 1629 bp, Zea mays
  Peptide Sequence Number=SeqID_60572
atgagcgtcggcgattggggactggacacgccggcgggtggaaggcacgccggccaatgggtagcggggatcatcgtgcagcttcggcccatcggcaaccaatggacgcggctggcgagtggggagcactgctcgccgtgcgggttggagctgtcggcatgtggggacacgctctgtgttgggagggaggcggccggcgggtggaggagccgaccagctgggcacgatgaagaaaatgtttcacatgatgtatatcatgaggccgttgaagtcacgcttttggttatttgggagcggagaggatgcagcttcccaccagtcttttatgctggagaagtgagcaggggtaatgatggcgcctcctgtgacgtggtcggtccgagccctaggttgggcgaggtggaggctcctccgaggttgaggtcgagtctgtcttccgaggccgaggtcgagtccgagcccctaggtcgggcgaggcgaagaccgtcggctgaggccagggctgagtccgagccctggggtcgggcgaagcggagttcgtcgtcttccggggctgagcccgagtccgagccctggggtcgggtgatgcggagttcgtcgtctgccggggctgagcccgagtccgagccctggggtcgggcgaagcggagttcgtcgtctcccggggctcagcccgagtccaagccctggggtcgggcgaagcggagttcgtcgtcttccggggctgagcccgagtccgagccctggggtcgggcgatgcggagttcgtcgtcttccggggctgagcccgagtccgagccctggggtcgggcgaagcggagttcgtcgtcttccggggctgagcccgagtccgagccctggggtcgggcgatgcggagttcgtcgtcttccggggctgagcccgagtccgagccctggggtcgggcgaagcggagttcgtcgtcttccggggctgagcccgagtccgagccctggggtcgggcgaagcggagttcgtcgtcttccggggctaagcctgattccgagcccttgggtcgggcgaagcgaagtttcctatggcgcctgaggccgggcttggctgctgtcagcctcactctgtcgagtggcacgacagtcggagcggcgcaggcggcgctgtcctcttgtcaggcctgtcagtggagcggcgaagccacctttgcattaaatgcccctgcgatttggtcggttggcgtggcgatttggccaaggttgcttcttggtgaagactgggcctcgggcgagccgaagctttgtgctgatgggggttaccagctgagatttaggagccttgaggcccgggtgcacggtcgggtcccaagttctcgggctggtattttgacgctgtcaacggtttggccggagccgggttgcgagagcagcccccgagcctccacacagggcgagaggacggtcaaggacaaactcgacttttttacatacgcccatgcgtcgcctttccgcaaggaggaggggggaaagtgccatgttgcccttggagggcgccgaacatggtgtctccagcgagctgctgacggggtcatccctcgctctgtgtctgaggcggctgtgaacccttcgagggccagcctacgaacccctgatcagtag

SEQ ID NO: 17198 - DNA, 897 bp, Zea mays
  Peptide Sequence Number=SeqID_60573
atgaagatccttgatgctgagggcggggcagaggccgcagcccggcttgcttctccccaccatcgaactggtggtcaccgtcttgggacagaagaagccaaactgccgcgcgtggagcgtgtaaccgcccagcggttacaagcactcctccatcttcgcctaaaccagcgggtgaaagggcggaccgccatgcaggcagcatgcaaccacgccacggggatgcactttttcgacttcaacgcgtccagcatggagtcccaggcccacacgtcatgtaaccggcgcgccggttattacgtgcgaaaaactgcaccgccacttgcgccagtgtcgcgccttctcgactatggaaccggtgccgcgattcgaggcaaccctgcgcatggaccaacagtgccagccaagcacgccggtcacgggtcagtcagccgcgggagaaggcgcgacggtcgatatggccagaagtgggccgacagtaatggcggcagcaggcgagcgaaaacggcggtcaaatcgtgtgcaggctcacgtcccctcctggagcagcagaagagccctctcccacgacgtgaagacgacgcgcccgtgttccgttcctcgaacggctcgcgcatgcacaatgtctgccccgcgaaccactcgtcccgttgcattaactccgcggtaggggaccgggaaaggggatacttcgaaagggatccttctctgcgaaggaagcgagccctaagccctcctactgatcagaggctggcccctcggaagggttcgacagccgcctcaggccactcgggctccgcgcccactactgatcaggggttcgtaggctggcccctcgaagggttcgacagccgcctcagaacacgcagagcgagggatgactctgggtacgtccgatag

SEQ ID NO: 17199 - DNA, 633 bp, Zea mays
  Peptide Sequence Number=SeqID_60574
atggcccgcgcccgcgcctataaagcccccagggaccttgaccgtacccctccgcacgcgctcgacctcaccggagctcaaacccaccggcgtttgcccgtgcacggcgtgtccgcggccgcccgatccccctgccaccgtagaccggccaacaaaacccttcccaaccccgtccgaccctcggagaagactgagcacacctcggtgaagctccccgagcgaggaatcggagtttgcttcgccggagaggccagtccacggtcgccggactccacccgaccgccggcgagcgtagaccgggacctcccggagccaaccctgcccctcgctggacctctctcaccgccgttccgccacaaaaacagcgccgcctgcgctgctccgactgctgtgccacccaccagggtgaggctgacagccgccaagtccggcctcaggcgccataggaagctctgcctcgcccgaccccagggctcggactcaacctcgacctcagaagacggtctccgcctcgcccgaccccagggctcggactcaacctcgaccccggaagacggtctctacctcgcccgaccccagggctcggactcaacctcgacctcggaagatagtctccgcctcgcccgaccctag

SEQ ID NO: 17200 - DNA, 780 bp, Zea mays
  Peptide Sequence Number=SeqID_60575
atgggcgcgcctgccttctgcgcgcgcagagcgtgcattaaatgcgctgcaggtgccaaaggttcacaacaagccaataaaaagaccaagaaaaggattcaaacaatagagcaaaagacaacctggaaggcaccctggtatggcgcaccggactgtccggtgtgccaccggacagtgtccggtgcaccaccggatagtgtccggtgcaccagggcggtcgaagccaaactcgctaccttcgggaatttccaagggcgctccgctataattcaccggactgtccgggtgcagcattccgtcttccgtccgggcgacggtggccagccgcaccggggggtctcacaacacgtcgtacgccgcgagggcggcactcgtgttctgggacggtcccattctcgttttcgtggcgaggacgggagtgaggacctgtcggtgcgctttggggcggccggcgcccgctggcgcggtgttggtgggcaggtggacgtcgccgctggtgctgaggtggtggcagctggagaaagcttctccgccgacgagaccatcagcgccacccgcggacctacctccgcctctttggctttaatgtctggttctcatccctcgagtggggacacgaacgagagccttctagcggtagcgtctaccctgggaccatcgctgctgctgcagaggtcgctggcgagtcacccagagtttgtcgtcccgcaggtctccgatgtggaggttgttcatacccgcgggagtggaaccggagttccgtttgtaatggcatcttga

SEQ ID NO: 17201 - DNA, 435 bp, Zea mays
  Peptide Sequence Number=SeqID_60576
atggagcagcgtcccaggctgaagaggttgctggagactacccatctggaactcgactggaagttgttcgtcaacacgcagcaggcccatacctggcacgccaactgtcggcgtttcgaccctggggggtccctggaccgacgacaatatgctaacgtgtccggcagagaggagccagagccctatgtacatgccaacgtggctgtcggagaggtgctaaagccttgtgtacgcggtgtcgtggccgtcggaggagtgtttgagccctgtagaagcatagctgtcggggctgtcgggaccttgctgacatctccttgcttccgtaaggggctgagagccaccgtcgtcatggacgcacgcggggagccatcattacttgttaccggggcgagcatggatgggacgccggtcttgttcccccgtagcctgagctag

SEQ ID NO: 17202 - DNA, 288 bp, Zea mays
  Peptide Sequence Number=SeqID_60577
atggcttcctccttggaatccattggtagggtcgtgtcagatggtagcctcgagctcatggcattcggggcatctaccgatcgtctcctccaagcattgcctttgactatcgccaaggcagaaagggctactgcttacccttcgagtctaaaggctaatagtggctctagcagggcaggaggagtgtcgacaaccgctacgcctacatcagccaagcgactatcgcctccaactgagcctagtcctcgaccatcactagggaagcacaggatcatgcttaccttttga

SEQ ID NO: 17203 - DNA, 549 bp, Zea mays
  Peptide Sequence Number=SeqID_60578
atggccggctcggccgccccctgcccctgcgccccgccggttcggccgcccccccccccccgccagctcggccgcccccgcccctgcccaggccggttcaaccgccccctggccggtggttatgagattgatggttttggttatgactatggtgctgattccgctgggattctttaccgattcaatgcctatctgatcgcttccccgggattctcggaggccggttcggccgtggatagtataaaatgggtgcgcgaccttcgccatcaatcggaatccaggacgcttcctcgtcgcggtactgcccgggactgggaacgcggtgggagagagaagaagtttgtcgccgccatgaagtccagctctaactcctcgccccttcccatcgtcgattccgcgcatcttcctgtcgtctccgactcacttctagtccctggtcaggatcacgtggtgaagcattcaaccatgtgctccgttgctcctgccattgtcaccatcatcggaggcggaatatccggctctaggtgtgcgtcactcctcgtcgcgtga

SEQ ID NO: 17204 - DNA, 195 bp, Zea mays
  Peptide Sequence Number=SeqID_60579
atggagttatcccaagttcaggaaggatgggctgctgactttgatgaatatagaattgatgaccttatgacgaaaataaagcctatagcagctgatatagagttggatagagatttgcttagcagggacttgatcgttcgcccccgcctcacagactttcttgatggggactttgttgttcaccccacctcgtag

SEQ ID NO: 17205 - DNA, 162 bp, Zea mays
  Peptide Sequence Number=SeqID_60580
atggtgggtacaagtgcggtcactgcacggcggcagccggggtcagtggagcattgtaccatgcaggatgtagtcgatggtgtgacttggcctaccaccctaccaccgggttggacggtcgagtgggatattgctccggcaggagaggagtatgaggagtag

SEQ ID NO: 17206 - DNA, 372 bp, Zea mays
  Peptide Sequence Number=SeqID_60581
atgggtacgggtaagaggggcaggggcttgccccgccgtgctgatggcaagcacaagcgtgccccaagtcctccttcggaggattttggtgactcggagtactcgaatgaagcttcccccgagctcggtggatcgaatgactcggaggaggtctcctcggaagaggtggactcctctgactcttctgaggagtggagcggcagcgaaggtgatggcggcgagaacgatggcagcagcggcgacgacgacggcgagggtggtggcggcggcgacggtgagggcgatggtgatggcgacgtcgagggcgacgacaacagcaacgacgagggcgacggcgacggcaaggccagtggcataatgttgctggtttag

SEQ ID NO: 17207 - DNA, 138 bp, Zea mays
  Peptide Sequence Number=SeqID_60582
atggggtccaggcaaagtgcttgctctgccgaggctgagtgccgaggttgcctttggtgcaatctatgctcaagtaaaggagaaagcgtcgaggcggatctccaggagttccaggacttcgacgagttcgaggattag

SEQ ID NO: 17208 - DNA, 108 bp, Zea mays
  Peptide Sequence Number=SeqID_60583
atggcggcgaggctgctgttgcacacacgactgggcggatcgactgacgaaaaaggagaaggaaaacaaagaaaagaaagagtaacacctgaatttgatggatattag

SEQ ID NO: 17209 - DNA, 138 bp, Zea mays
  Peptide Sequence Number=SeqID_60584
atggggtccaggcacagtgcttgctctgccgaggctgagtgccgaggttgcctttggtgcaatctatgctcaagtaaaggagaaagcgtcgaggcggatctccaggagttccaggacttcgacgagttcgaggattag

SEQ ID NO: 17210 - DNA, 2058 bp, Zea mays
  Peptide Sequence Number=SeqID_60585
atggcgtcttccgcagccttctcacacgcaggaattagtcaccctcgttttctccatgccaagcctgcatgtcctcccaaaccagtccccgcgcagcgtccatcccgcccggagctcatcagcgccgcctccaccccccgcacgtcccaggctgagctccgtccggactccaagaacgcctccgcgctgtccgctgaactccgccgcctcgcgcgcgcggggcggctcccgtccgcgctctccctcctcgaccacctctcccaccgtggcgtcccggctaccgcctctgcattcgccacgctcctctcggcctgtcgctccctcctccacgcgcgccagatccacgcgcatctccgcatccatgggctggacaccaatgagttcctcctcgccaggcttgtcgagctgtacatcacgctcggcgccactgacgacgcgcgcggggtgctcgacgggatgcagcagcacggggcgaccgcctactcgtggaacgcgctgctgcacgggcacgtccgctggggacgcggggaggcagcgggccccgtcgccgacgcgtttgccgagatgcgcgccgcgggggccaacgccaacgagtacacgtatggctgcgtgctcaagtccatctccgggagcgtcaggccgtcgatgaccatggccaccgccacgcacgcgacgctcgtcaagaacgctttcgcaggcgcgcccgggatgctgatgactgggctcatggacgtctacttcaagtgcgggaaggtgaagctcgctgtgcgagtgtttgaggaaatgcctgagagggacgtggtcgcgtggggggcagccattgctgggttcgcacacaaggggatgaagcgcgaggccctggaacattttcggtggatggtggaggatggggtcaaggtgaattgtgtggtgctctcgtcaattgtgccagtcattggagagctgcgggcgcgcaacttgggtagagaggttcatggatttgtcttgaagaaattcggaaatcgtaaagatgttgcaaaggtccaggcggggttggttgacatgtactgcaaatgcggtgatatgatctcaggtaggcgagtgttctataacagcaagaagaggaatgctgtgtcgtggacagctttgatgtctgggtatgcatccaatagtagaccagaccaggcgctgaggtgcatagcttggatgcagcaagaaggaatcaggccagacctcattgctgtgggaacagttctcccagtctgcacaaagttgaaagcgctaagggagggaaagcagctccatgcatatgctttaaggaggtggttcttgcccaacgtttccttatgcacgtcactgatcaccatgtacggtacatgtgaccacttggaatactctcaccgagtattccatgatatggacaagaagactgtacaagcttggactgcattggttgatgccaacctcaagaatggagacccatttactgctatggatttgttcagatctatgctgctgacaaaccgcaggcctgatgctgttgccatcaccaggatgttgagtgcctgcactgatattggagcattacgagtcggcaaggaagtgcaccgtcaagtgctacagttgcggatggaacaactccctttggttgcagcagaagttgtaaacatgtatggtaggtgtggagacctcaaagcagcacagagggtttttaatcgaacagagtccaagggatccatgacctgcactgcgataatagaagcttatgcggtcaaccaacgccataaggatgcgctgcatctctttacttggatgctgtcaaataaatttgttcctaccaaggccacattcgatgtggttctgaaaatctgcgaagctgcagggttgcatgatgaagcccttggaatttttaactctatggtgcaagaatacaaactagaaacatcccaagagaattttgactgcatcatccgcctccttactgatgctggcagaatttctgaagcacaacgctttgctgacctgaaatctacactgtttaatttaccaactccgcttttgaactctgaacaggaatag

SEQ ID NO: 17211 - DNA, 754 bp, Zea mays
  Peptide Sequence Number=SeqID_60586
acaaccaaaattgagagtggcaaaatcacaaatttctctcaacggtcctagcaatcgcgtcaccgtcttctccatcgccggtgctcccttactctcgatggcatcctcggccgccgctcgccgccttctcctcctccgccaccgccatgggaaccttctccccaaacgccacttctcttcctcatccgctcccgacggcctcgacgacggcggtggccgcgtcaagatcttcgaccgcgacctgaagcgccggcaccgggaccgcgcggcgtgggtgatgcgtgagaccgatgggctcgtggatgcggtcgctgagaatctcctagaccgcctcgaggactgcaggaaagccttcccctccgcactctgccttgggggctccgccggcgccgtccgccgcttgctccgtggccgcggtgggattgagaggctgatcatgatggacatgtcagccgatatggtgaagaagtggcgagagtcagagaatgccactggtgatgggcctgagacccactttgttatcggcgatgaggagtttcttccaatcaaagagaggctggcgttgcaacctgatggcctttttctggcagcaattcttggtggagaaacactgaaggagcttagaattgcatgcacagttgctcaaatggaacgcgaagggggcatcagtcctcgaatgtcccctttagcgcaaaccgagaaaaccctcgaacccctgccccacccatacacagcggcatcgaagcccatgtga

SEQ ID NO: 17212 - DNA, 618 bp, Zea mays
  Peptide Sequence Number=SeqID_60587
atggatactgccgaggcagcaacgcaagatgcagcacgacgtgcactttcgcagtattgctcgttgttcagcggggtagccgatggccttgacctgaagtactacccacgccgtttgactggtagtgctggaggtgtgattgtctcgctcgttggtgagggcaatcctaggctgaacaacatggtcaacttggtcgccgtgctcaacatcgagctggaccacacccttgacaagttgggcaaggttcgggcggaggttgcagaattgcgtgctgaaaccactcctctctccctctcctcgcgcactgcccctcgccatggacggtacgcgcggctggcgctacccgagggcgtcaacagggacgacccggtcagcgggtccgagggcgcccgagctggaggtcgacgacgccatcggttctcgctccctttgttcctcgaccggaagtcacgccccatcatcaccgttgcgctcatcaacatcgttgggcccaaagctacctgcgtcgagcccatctcacgccgaggtgagaacgttgtctacccgtcgtcgtctacccctagacgtctaccagctcccgcgcctcgcctccgcggtatgccatcgcatgaaatctga

SEQ ID NO: 17213 - DNA, 168 bp, Zea mays
  Peptide Sequence Number=SeqID_60588
atggagaatggctctttctgggcagaatgggaatcacggcttgtgggtaaagtgtgtgacctctgcaaagtgttagaaactggtatatcagccatgcttatgtgctcaggaggagatgctggcaacttgaaggactttgaggagttcctggactatgatgagttctag

SEQ ID NO: 17214 - DNA, 384 bp, Zea mays
  Peptide Sequence Number=SeqID_60589
atgttggtagactacacaacggtactcgatggaccaagtgtgtcggtcgaaggcctgacgcaacaaggtgtcgagagcgtcgtggaaatggcacccatgagcggtgtcggtctcctccagcagctgggatgccctatggtggtgcaaggggcatctctggctgaggtgcaggggaagactacctcccagactccacctcttgctaaggtgagggggaagagtcctgctgctcctgctactggagtcggtgctcctgctcctcgtgcaggcgacgatgcagtctctccaggtgactggactgacctatcactgtgcggcgtagtgggcgctccgccaggcgagagggcaaaaaggggatcactgacttacgtgcaatgcatctaa

SEQ ID NO: 17215 - DNA, 426 bp, Zea mays
  Peptide Sequence Number=SeqID_60590
atgagtctcggttcagacgattcattgaacacctacgtgcaaaacggcgacgggataagcagcagggcagggtcaacgaccgacaacggacatggcaggttcgagacggcaatcggcgctcgcaagagagttcgcgtgcgcagggatgaaccttggctaggcgcgcacacaagggagctccgcggcgagcgcaggggcgagctagggagcaggagcagagggtgggcgagctgcaagggaggagcacgccatggacgcggccatggagacgcccgcatagaggacctcggctggggtcatggcgaggccatggcgagcaaggatctgggcacggtgcacatggagaccagagagaagcgaccgagcgctagggaggaagaggaggagcgcgcaggagataaacatcgcgagcagggaaagagatag

SEQ ID NO: 17216 - DNA, 717 bp, Zea mays
  Peptide Sequence Number=SeqID_60591
atgggtggagcaagaagccgggcgcagcaatggacaccagctgagatgcgcgcggtaagggtcaagctcggcagggcaccggacttgggaacaggaaaggcgccgagcgcaggatggaacgcgcgcacagggaagaagatttgggcacacaagggagcactgctgggcacggcgagcaacatagcagcacaccggcgagcagagcagggaggcgggcgctgggagcatgaggccaagcgccataggaatgacgccgagaagggagatgaaggagctccggccatggagcagcggcgcacggcgagggagatccacgagctgggcaccaggagaaactcggtagggagcgccgctgcgcgcaggggggcgagcagagcacggcgcgtgcacatgatggcgcgcgcggggaggagaccgagcagagagagcaggagggcgcgtggcacgcagagaggaacatctaagggagctcggctgcgcggcatggcgagggaggagcgctggcgaggagatgtgctcggcgcggcggccatggaggagagcagggggatgggcgcgccgtcatgggagagcgcccgagagctgcgcggtccgagcaccatgggacgaggcggagttcggggaggagctcgacggtggtgcgtgcgcagggagttgggcgcgggctggctggggttggggctcggcagggaaggaagaagccgcgacgggcagtga

SEQ ID NO: 17217 - DNA, 147 bp, Zea mays
  Peptide Sequence Number=SeqID_60592
atgggcagagggatctcgcgggcgaaatttccgcgggtggggggcgaggtcggggtggtggatgtcgcgggcgtgggcgcggcagcggagattgcgggtgaggcgaggtcgggggaatcggacgcggaagcagaacatggtgcataa

SEQ ID NO: 17218 - DNA, 549 bp, Zea mays
  Peptide Sequence Number=SeqID_60593
atgagggaggtggtggctgctggcggaaggctcctccaatggcagatgggtggcattgcagtccatgtcctcagcggcagagtggacttgcgagcagcccccaatataaagtttttggaaacaatttttaagcagtctgttggagttgctcttaagcgtggtgatgtcgagcgtgtccaggtggtgtgcaaacctggtagtctgaagacatacaaaaagttcgaggcggaaatatatgtcctcacaaaggatgaaggtggctggcacactgcctttgtcacaaattacagcccccaattctacttcaggacaactgatgtcactggaagagttgagttgcttggggagatgaagatggttttgcccggtgataatgtaactacgaattttgagttgatatcacttgttcctcttgaacctggtaacgactgcattctcaatttctttcgacagtatagaactatagatcaggtttctgaaagccaggaagttcgattccaacaagacaatgcaaatgtggtcagagatgttgaaagccaggaagtttga

SEQ ID NO: 17219 - DNA, 216 bp, Zea mays
  Peptide Sequence Number=SeqID_60594
atgggtttcagcggcggtggtctgatgggccgtttttgttcaccctttgcaacaaataacatctacttgacctatactaagggtctgtttggttgggctgtggctgtggaaaaagttgctgtgggctggggcaaaagccaaagccaaaagccaaaccaaacacaccctaaggctatccgcagtggaggttaccctatatcactatttatagtctag

SEQ ID NO: 17220 - DNA, 906 bp, Zea mays
  Peptide Sequence Number=SeqID_60595
atgggggggcctgcggagcaacggaagaccgatgaacggcgcgccgtcgcccgctccggcagcggcgacgacgacgacttctgctctggggggccgaacaacggtagcgatgacctcagggcggatgctgctgccaggaggcccccgcccatgcccaaactcgtgaggcaaggacgggcagaaggccgtagagttggaggtcggtccgtgggcggccctggctatctcgtcggcggaagaacctcttccagctgccgtggcggaagctggcgccgagagcggctccgaagccgctcgggtccgagagccaggcacgcggcagctgccagcgccacggacgacaaccgcccttccccccgatcactgagggaaggagcgggccaccgcccacacaggggtcgaccccgactcggcacactcccctccccagccctggtgatgaaaatccttgaggctgagggaggggcagaggccgcggcctggcccacgcgtcatgcaaccggcgcgccggatgcttcgtgcaagcaactgcaccaccacttgcgccactaccgcgcctcctcgactgcggaaccgataccgcgactcgaggcgacccagcgcacgacccagcagcgccagcctggcgcgacgatcaatgcggccaaaaatgggtcggcagtaatggcggtggcaggcgggcaggagcagcggtcacgtcgtcagccaagcttatgtcccatccggggacagcgagagaaccctctctcacggcgtgaaggcgacgcgcccgtgttctgttcctcgaacggcccgcgcacgcgcaacggccgccccgcgaaccgcacgccccgtcgcattaactccgcggcgggaaaggcggcgcctctggcaggagaagcgagcggcgcttcgccttcgccataa

SEQ ID NO: 17221 - DNA, 885 bp, Zea mays
  Peptide Sequence Number=SeqID_60596
atgctgggtcccccgaacaagctccaggctcccccagtaaggtccggatcttggcaaggtcccgggatgacgaggaccccgacatgggccgagcctgatgcaaagtccatacagccatacaaccttcgcctttattgcggaggggatgcgccgtctgccaccacgctgaccggcgacgtgccctctcgggatttaatgcgacctgttccatccgctggcaggcggtgtcagacccatccagcagacaacacgtctgatcagtctactggcaaacagtgcgcccgtgccgagcggcgcgctgtactcatcttcccttctacaagaagcttcccctgcacaccgaggatatggagatctcgggcgtcagggtacaagaagattgcctcgacaacagacattagtggctccaagcgctatattctttatgtccctgggcccacctgtcggggcccagcacctttgtgcatgccccccttcagctataaaaggggagattctgcctattcacccccctctaggcgactttcactctccatggattctgcttcctcagcacaaatcgacgcaatccctgctctctctcctcgccctagcctctccaaccgtgtccgcgccatgctctccatggattcggcttcctcagcacaaatcgatgcaatccatggagtctcctcgccccagcctctccatgtattgcaaatcctccatccggtggtgaaaatcgaaaacatgtacgtgatgaacaacgccgacgaggctgccctgaagcgggaagtgcacaagaagccggtgtccatgctcatcgacgccagaggcatcaactactacatcgagggcgtcttcacggggccgcgcactaagaagaggtctctcacgaatccttag

SEQ ID NO: 17222 - DNA, 99 bp, Zea mays
  Peptide Sequence Number=SeqID_60597
atggcacacacgagaacacgggatgatcaaatagtgttcagctcagcgctcaacatgacgctagggcaaaagtcgaaagaaactgcatctacttcttaa

SEQ ID NO: 17223 - DNA, 420 bp, Zea mays
  Peptide Sequence Number=SeqID_60598
atgtacaattctgaatcgagttacctacaaactctccagactgaagaatttctggcaacagctgatgaatctaatgaagagcctgtttcaaaacattcgcccaagtctggagaaattctctgcaaacacaagggtaaaggttttgagcattttgctcatggactttgtgaaaaatgctacaataagactagactacatttgcttttgacaattcgtctgattgcccagttcactaaactgtcgggtggactagaaggtggttctgaccctccagcattccaacgagctgaaaagaaaagacttgaagctgctaaaagggctgaagaagctgcagcagctaaggaggcagcgctggaagaatgtctttgcgacgcacaaaattctgaggttgagagtgccatgactcctagaaaggtttag

SEQ ID NO: 17224 - DNA, 279 bp, Zea mays
  Peptide Sequence Number=SeqID_60599
atggcgaaccaggagatacgatccttaccgaccaagtgggtgacgatgatgctgtccaagggaagcagcggttgcgcgtgcgacagtagccttgcttcgtcgagaaattcatggctatctgatccaccaagcacccaccgacctaagttcacacgcttcatgcccctggttcctcttccggaccacacaacagggacgccggagttccaccacctcgttcggattaccactttcatccctaatcgtaacaattcttgggctttgcgggaaatcagttag

SEQ ID NO: 17225 - DNA, 375 bp, Zea mays
  Peptide Sequence Number=SeqID_60600
atgatgccagccaaagatgaactgatagttgttggagatggtcattcaggaaccatatatgttcatgcagctgaaaatacctacgggatcaatctctttcagttaggaatcgacagatccaagtggccttgtattgcacttttcaaggtccacgatgcagaaaaccttttgacaagggcaggcttcaccactccaggagttgatgttgatcattataccgttagaatttcctgttacatttatcagataacaggtcccactattgtagcatggcatcttatgggttctagtgatatgattatgcagtttgagctagccctaagaagtggagagccagatgtaattactcgtaggacatctgactatttcctgtga

SEQ ID NO: 17226 - DNA, 186 bp, Zea mays
  Peptide Sequence Number=SeqID_60601
atggcgcctgcggccgggcctgactgcctgtcagcctcactctgtcaagtggcaccgcagtcggagcggcgcaggcggcgctgtctttctgttaggccgaaagtgataccggatgtctatgtgcttagtgcagctgtattcaacgggattatccgctatgcggattacactctcattatcacatag

SEQ ID NO: 17227 - DNA, 285 bp, Zea mays
  Peptide Sequence Number=SeqID_60602
atgggcgtgctgacgtggcgcacatcggacagtgaacagtacatgtccggtgtgccaccggactgtccgatattgcacccaaagtggtatgccggagatataatcctagccatccattcagatctgacggtacacgacaccatccccatcctgcggtcagagcacggcagtggcggcgtccgcaccatggcgaaccaagagatacgatccttaccgaccatgagggtgatgatgacgctgtccatgggaagcagcggttgcgcggcagtcgccttgctccattga

SEQ ID NO: 17228 - DNA, 681 bp, Zea mays
  Peptide Sequence Number=SeqID_60603
atgactaccagccttgtggtggagagaagcgagccgggctgtggcctcctcctgccctcagcttcaaggatgttcatcatccgcgctggggaggagggcgagccgagcgggagcttcgccttccgcgtgggctggcagtccgcttcttcctctagcattcgggggagaagggtgttcgccagccttgcggaggaggcgaacttcgggtacgtggagccggccgtctgtggcgctgtcagctgccgcgtgcctggctccccgtcctgggtggctctggtgccgcctccggggctgcctcctgccgctggggtggagcgtggctgcccgtccaccgcacgggcgacggtcgcgccgtgcgtgggttggccacatccacggcttttatcgcgccaccggccgcaccgggaggtcgtacaagacgtcgtatgccgtgggggcggcgatggcgttcttggatggtcttgtcctcactctcgtagtgaggatgggagcgaggacctcttcgtgggtgctggggctgtcgtggtcgcctccgctgatgaggctgcccactgcagaggtggttgcctacgctggcgagaccgccagtgccacccgccgccagacctccggctctttggctttaatggccttgttgtcgtcccccgtaggaggatggaggcgaagacctattcgcagtag

SEQ ID NO: 17229 - DNA, 993 bp, Zea mays
  Peptide Sequence Number=SeqID_60604
atggctaccgcctgggggatcgatccctttttaaaggcggctctccctcaagcgtcgcgggctaagtcttcatcaacgtgctccagggtcctccccctacgacacgggggctgggtcccacacgtcatgcaagctggcccggaacggaagaagccaaagccgccgtacgcggagcgtgtaaccgccccgcggttacaagcactcctccatcctcgccgaaaccagcgattgaaagggcggaccgccatgcaggtggcgtgcaaccgcaccacggggacgcaccccttcgacttcaacgcatccagcatggaggctcaggcccacacgtcattgccgcgatttgaggcaaccctgcgcatggcccaacagtgccagtcgagcacatcggtcacgggtcagtcagccgcgggaagaggcgcgacggtcgatattgccaaaagtggaccgacagtaatggcggtagcaaacgagcggaagcagcagtcaaatcgtctgcgggctcacgtcccctcctggagcagcaggggagccttctcccacggtgtgaagacgacacacccgtgttccattcctcgaacggctcgtgtacgcggccgccccgcgaaccacccgtcccgtcgcatcaactccgcggcagggcaagcaacacctttggcaagcgaagcagcgttgtttcacctccaccatgatgaccgtgtcaaaaaaggtgcaccacaccatttaaatttgtatccttttcctcttcccctttctctctcttgccacagggaccgggaaaggggatatttcgaaagggatccttctccgcgaaggaagcgggcctcgagccctcctactgatcaggggttcgaaggctggcccctcggaagggttcgacagccgccccagagcactcgggcttcaggctcattactgatcagaggttcgaaggctgacccctcagaagggttcgacagccgcctcagagcactcgggctctgcgcccactactga

SEQ ID NO: 17230 - DNA, 723 bp, Zea mays
  Peptide Sequence Number=SeqID_60605
atgctctgtttccaacctgagctggtgctgcctgactgttctgctgggctgctggggcaggaagacgaggcgcctgttgattctgcctctgaaactgacctcctgactgattgctctgacggatctggtattgatgctgaggatactgccttttggaactgcttgatgctgctgagagggtcaaccaagcctctaaggaaacggtactgcccgcttggcgtcggtgttgacatcttcaggagcatagcgagacaactgcagaaacctgtcccggtactcactgacagacaatggcccttgcttgagggccaggaactcctccttcttcactgtcatcagacctgcaggaacatggtactgacgaaagcttcctctgaactcttcccaggtgatggtgtcggggtgggcatggttggcgagcacgcttgtctctgggcatctgaggcatctgaggctaaggtggtgcttgctgctgttgctgctgaatggcggccagagtctgacagatggcttgaactgcctgagtctgcatcagaaacatctgctcgatcgacatcgggggcgggggcggcaggtgctgttgctggggcacctcctcctgttgagcggctcgctcctgctgagcacgccttcctcctctacgcctgttctctgacatctgcagaatgcaaccacacatcagaactgatctggcaaatcttgcagcataagaaaagagtatag

SEQ ID NO: 17231 - DNA, 1326 bp, Zea mays
  Peptide Sequence Number=SeqID_60606
atggagagtcatgatctccgggcagaaagggaatcacagcttgtgggtggctatgagatcgatggttctggttatgactatggtgctggtaagtggtattctttccgtttggaaagggttgtcagcattgcaaccactgctcaggagaagatgaagccgtggaaggatacttccaggagttccaagactacgacgagttctaggcgtgggttagcggcaacccccagtcggctgcctgtgaaggccgtgtttatctacgtttcttttccgcactttgatttttattgtaaggactatgtggacgtctcagacatggctcgacttagacacactgcacgaaagtccgtcatccccttcttaccctcccgccttgctgatcgtccgcttcgccgtctcgtggtcggacagtccagtcacttggagagactgcaccaccgcctgcatgaggagcagggacgtcgacgagaggaacagcagggctcttccttctcgctccaacaggagatagagtccgtgaggagctgctctcctgtgcttcccctggaggcgccccctgcaccaccactgggcgccccagcctctggagtagctgctggaggagacccagatgacagaggtggcgacgacagctcgagccacgacaccgacttctctactaaccaggagccggaaggatgggttgctcgacccatcactcgtgacgctgctcgcgggtgtcacttccacgatgcgctcgataccctgctacatcgggcacttaaccggcgtacttggtccatcgagtatcgctgtgtggtctaccagcatagtcgtggggtctacccggaccactgggaggcgacctgtttggtgcgccgtccggagaacagtctccagggtgtggaggcctgctcagagcactattctatctctgagcgggactcagctgaggcagccatgcaagatgctgcacggcgtgcgctttcgcactactgctcggttctcggtggggtagctgacggtctcgacctgaagtattacccccgccatccatctggcagcacaggaggcgtgattgtctcacccgtcgatgagggcaatcctaggttgagcagcacagtcaacctagccgccgtgctaaacatggagctggaccatgcattagacgagctgagtagggctcgtgatgagatcgccctgctgcgggctgagcgcgcggaatgtcgtcacctggacgatggttcccccgctcccgtcgggactcagcacccgtaccgctcacctcggcgtggacaccagccttatggcaatcccgactgcaagaccaagataaatctagaaccatag

SEQ ID NO: 17232 - DNA, 354 bp, Zea mays
  Peptide Sequence Number=SeqID_60607
atggcgcccgaggctggacttagctgctgtcagcctcactctgtcgagtggtacagaagtcggagcggcgcaggcggcgctgttttcctgtcaggtcggtcagtggagcggcgaagtgactgcggtcactttggctctgtcgacagaagagcgcgcgtcaggataaggtgtcaggcgatccttgcattaaatgctcctgcgatacggtcggttggcgtggcgatctggccaaggttgcttctccgtgaagactgggcctcgggcgagccgaagctttgtgctgatgggggttaccagctaagattaggagtcttgggggtacccttaattatggtccccgacagtagcccctga

SEQ ID NO: 17233 - DNA, 402 bp, Zea mays
  Peptide Sequence Number=SeqID_60608
atgggggtgcaccctttcgactccgacgcatctagcatggaggcccaggcccacacgtcatgcggcacctttggcaggcgaagcaggcgacgcttcaccttcgccataatgactgcgtcaaaaaagccgcctcagagcactcaagctccgcgcctactactgatcagaggttcgaaggctggcccctcggaagggttcgacagccgcctcagagcactcgggctccgcgcccactactggctggcccccgaagggttcgacaaccgcctcagagcacgcagagcgagggatgactctggaatcccatcagagggaggcatcgagccctcggaccctatcaaacgggaccgggtccggcaaatcacctgtaggtacttttggagcgcgcctctgggccactag

SEQ ID NO: 17234 - DNA, 1716 bp, Zea mays
  Peptide Sequence Number=SeqID_60609
atgattataggtttttgtctcctgtggatggaatctaaagaggaaaatgttgcacttacaatcatccaaagagataatacattatctatagatgaatctctactaatgtccttgtctcataacaagccaaaaaaatcggtgactactacaataattccgaaagattatatttgcacgcagggtgatcttgcactcatcgattggattaaagaaatcccttgtgaaccaagggtagaagtcgtgcttattgatgatgcttttgtggaaaggaagtggatggaatgcctatttcaaccggacgcatatctaggtgatgaggtgatagactgttacataaatttaataaaagctcaagagcatctaaaatgccgatctggaggtcgtgtacacatagaaaatgcttttcagttcaactttctaaagcgagacggtgatgttgaaactaaaacagatgagttatatccaagtaaagacatgtcacaaatatctagcgctgaaagaagggttttactttatctagaccatgacatggacggcatgtcacactttaggaaaaaattggctgctatattactatcttcagatataaacaagagaaaggggtgtccgttatacaagtatgacaaagaagtcgatgctggatgctcctctgatgttcagatattagatagtcccacaaatcctaagaagaggaaactactttgtgtatctgaagaaaacgaagtattgatggaagatgatgatggccccatcactcaagcagacttagaaaggtggttcgttcatgattgggataaaagaactcctataaaaatcccgaccgatgagtgcactaatgagtttttactgagtggcctttccacaaaggacatgccagtgaccaaagccgatttaatagatgttctatgtgattacatcatgacaatccaagatgatacgacattagagatgacatgggtgcgaagtttcaacccttttaagatagaaatatctgtcaaagacctgcaaaacgtattaagggtaaatctagatatgactctaaaatgttttgacatggctgttcgattgttggccattaaagagtcacatatgtcgaaagatgaaatgataaaggataaaaaacattatatggacatgcgcttctggagaatggttggttttggtaaacttccaaagtaccatcaggatcctatagcagaagagttagccaaaacactcgactgttggccttcattgaactattatatcactggttgtaaatatgttcttatgccatggaaattcaacggatgctacgcacttttcataatcgatcatggtaaaaagcacgtaacttttatagactttacacccactcaagattggtgtaaacacatgccatacaagaggtttgcagaagcaattatcatggcctccaagaaatataagattgcctacaataagaaacgttctggatgggcagatgatatttttaagtgggaacatacaattcggtctggtcttccattggacttaaaaggggttaatacaagctacttcgttctacaagctatggtcatgtgggggagtggtagacgaatggaatttaatagggatacaaagattcttcgaaggaactttataattgatctattaagttacgaggagaattcatgccgctatgctatccctccaaacatacaacaacgatttatcagtatcgctaaaaaagattag

SEQ ID NO: 17235 - DNA, 1650 bp, Zea mays
  Peptide Sequence Number=SeqID_60610
atgccgctacacctcgccgccatgcaaggccgccccgcctacatgcaggctcctgtctcgtgtccggaatgcgattgtgattgctcgctgtgctgctgggttcggttgatccgccccgaggcggacgggccactccctcgtgacttcagctctgtcccttttcgattagtaggtattatggtcatgaagatggagcacgaggacaatggtgccatcggaggaactgatggcacgtggacagaggacgaccgagctctcggcgctgctgtgcttggagcagatgcctttgcatatctaacgaaaggaggtggtgccatatccgagggccttgttgccacatctttgccgggtgacttgcagaacaaactccaggagcttgttgaatccgagagccccggtaccagttggaactatgctatcttctggcagctctcacgcacaaagtctggtgatctcgtccttggatggggggatggctggtgcggtgaaccccgcgatggagagctgggagctgctgcttctgcaggcagcgacgatagcaagcagaggatgcgcaaacgtgtgctgcagcggttgcacatcgcatttggagttgctgacgaggaggattattcccctggtattgatcaggtcacagatactgagatgttcttcctggcatctatgtactttgcgtttccccgtcacgctggtggccctggccaagcatttgcagcaggcatcccatctgggttcccaataagacacgaggctgaaaggtcacccggtttggcgaagatctttgggaaggatttgaaccttggtcggccttcagtcgggctggcggtcggtttatctaattctaaggtggatgagaggacatgggagcagaggagtgctgttggtgggacctcattgctaccgagtgtccagaaaggtttgcagaatttcagttggagtcaggctcgtgggctgaattcccatcagcagaagtttggcaatggtgtgttgattgtgagcaataatgagggtgcacaccgcaacaacggagcagtggacagccctagcgcagcgcagttccagcttcgaaaggcgcctcagcttcagaaactgtcggttgttcagaaaacgcctcagctagtgaaccagcagccaatgcaggcacatgtacctaggcaaattgactttagcgccgggagcagttccaagcctggtgtgttggttacaagggcaggtgtcctggatggggagagtgcagaggtggatggcttgtgcaaagaggaagggccaccacctgttatggaggaccgatggccaaggaagaggggaagaaaaccagcaaatgggagggaagaaccacttaaccacgtcgaggcggagcaccagaggagggagaagctcaaccagcggttctatgcgcttagagctgttgtgccaaacatatcgaaaatggacaaggcgtccctgctgggcgatgcgataacgtacatccctgacgagcgcgttgctctcccaccgctgccgagccgacgcccgtgtaggagcggcggcgctcatttgcacggcctcgtcgtcgagctcctcctctcaccgagcgctcctcctgaagctaaatctgttagcttcgtcgagctccttgctctccccgacatggaaatgggcagttgctag

SEQ ID NO: 17236 - DNA, 1581 bp, Zea mays
  Peptide Sequence Number=SeqID_60611
atgcatcgcgcccttccaccttccgagcccccggatggggagcgctcgtggttcttccgtcttgtcgtcgttggaggaacacaacttcgcggaagttggtacctttcagccatcgctcggcttcaaggattttcatcaggcagcccggctgcatcccctcgccggtggtcacccaagatagtgaccaccagttcgatggtcgggagaagcgagccgggctgcggcctccgcccctccctcagcttcaaggatgttcatcatcctggctggggcggaggccgggctgagccagagctctacctcccacgcgggttcgtgggtcaccttctccctcagcattcaggggagagggcgctcaccggcctagcgggagggtcagacttcgacaacgcggggccagtcggccgtgagcgtcgtcagcttcagcgtgttgggctcgctggctcagctggctctggctcggcgcccggtgccccctcccgccgcgagagcggttgtcgcgccgcgcgcaccggaggaccgcccaagatgtcgcgcgctgctagggcggcgttcgtgttcttaggttgtcctgcctttgctccgatggcttccgtcgtcggcgttgaggtggtggcggctgaagaagtcctcgtcgccgatgggatcactgccaccatccacgctccgggcctccggctctttggctttgatagcttgtcctcgcccctcgagtggggacgtgggcgaggggctcgttgcagcagcgtccgccctgaggccatcgctgctgctgtttggccacccggagcggaggtcgttgtcgctgctgccggagcgggcgtcggcgagccaactagggtttcatcgccccgcaggccctccaatgtggggggttgttcgtacctgcaggggcggaaccggagttccatttgtaatggcaccttgagtgccggtgtctgttcatcgtggctatcggggcctgaacatgagtccctcggctcggtcggccttgccgcccgaggcttctcttgcttagttaaaggaaccttcggccgctctgcgatgagctggagccagaggcagcggtgccagcacggacagaggcagagatggctcgaaaagaagcttcgtcagccggagcctggccgggtcatccactggcgggatcgacaccggagttgggttgccgaggccacgagccggctgatgtcctcgggggacagctggctgaggctacggagcggtcggtcgggccgtctgctcgggccgggttcccggaggagaccccggcgacgatggcccaagcgtggtgccaataggttccttcgaggtggagatcctccgaccgtgttgccgttcgaggccgggtcggattccgccaaaggtggagttgacgccgagggtgctgctgctcccccactgatgtctgatcctgcaggaacagtttatcttgtaaaggtgatgagtgaggtatccgtatcccagaggcgtaggagtccctcggcttggtcggccttggctgcttacatagggggttcgccccttctagcccctgagggagggtcgggctttgccgaggcaaggctgacccttccttga

SEQ ID NO: 17237 - DNA, 528 bp, Zea mays
  Peptide Sequence Number=SeqID_60612
atggcgagcacagggagtgagcaggtacggctgggctgggcgaccatggcgagggagctcgggagaaaagctacggcgcaggaagctgggcggccgaacgcgtgggagatccagggcgcgcagtacagagagctccagcggcgagcgcaggggcgcggtgcagcgaccatggccgagttggagccagggacggcgccgagcaaagaaggaagctgcgaaaaagaaaaaaacgggtacccgaattccgggtacccgtatccgacccgattatccgggtatttatcgggtagtactcgctccgtatccgacccgaatccgaagctgtactattcaggtattacccgtatccgtcccgaatataaaaatactcgtatccgtatccgaaaaatggtcccgaatcagtaccgtatccggtacccgtttcgggtaccctgcccgttttcacccctagatggcacatccgctcgaggaggcagggaagcgatgcagccagggaacttcgacgacacacaaggagatgaaggctaa

SEQ ID NO: 17238 - DNA, 708 bp, Zea mays
  Peptide Sequence Number=SeqID_60613
atgtcgtggccgtcggaggagcgcttgggccctgtggaaggacagctgtcggggctgtcaggctcctccaaggtcgaggctgagtccgagccctggggttgggcgaggcggagtccgtcttccgaggtcgaggctgagtccgagccctggggtcgggcgaggcggagtccgtcttccgaggtcgaggctgagtccgagccctggggtcgggcgaggcggagtccgtcttccggggtcgaggtcggtcagtggagcggtgaagtgactgcggtcacttcggctctgtcgactgaagagcgcgctttcatggataagcgtccactgcgtcgcatggtgccaggtcagtctagtcacctggagagactgcatcatcgcctgcacgaggagcaggagtgccgatgccaagagcaggagcagcaggactcctccccctctcctcagcaggaggtggagtctaagaggccgccttcccctgcacctcagccagagatgccccttgcaccaccacagggcatcccggctgctggaggagaccctgatggagacggagatgacgatgatgccggtggcagttcaagccacggtacggagctctccgaggagccggagccagagggatggatcactagacccatcattcgtgacgccactcgcgggtgtcacttccacgacgctctcgacaccctgctgcgtcgggccttcgactga

SEQ ID NO: 17239 - DNA, 348 bp, Zea mays
  Peptide Sequence Number=SeqID_60614
atggcgcgcgggcgcgggcgggcgagcgctgaaaggcgggccaggggcgtcgggcgtgcgtgcgcgaagcagtatccgcgatctgggccgtgcgatcaagatcggacgagggagatcagaccagggagggatgaacggctgcgggaggcgctgctcctctccgcggcgatgatgtcaccgaagttaaggcaggcacatgctagggtggttctggggtcgccgggattgggtagagagggagaggatgccacggcaaacttagtggcggggaaaaggccacgaatccgaggacagagaggggagaacggcggggagaaggcctcgggcggaccggaggagctccggtga

SEQ ID NO: 17240 - DNA, 714 bp, Zea mays
  Peptide Sequence Number=SeqID_60615
atgacctctcatgaattcggcacgcttatccctgggcatctgaggcatctgaggttgaggtggtggctgttgctgctgctgctgaatggcggccagagtctaaccgatggcttgaactgcctgagtctgcatcaggaacatctgctcgatggacatcgggggcgggggcggcagctgctgttgctgggtcgggattgccataagactggtgaccacgccgaggtgagcggtactcagccctactcagctccgcacgagcccgcagtccgcagtagggcaatctcagcacgagccctactcagctcgtctagtgcatggtccaactccgtgtttagcacggcggctaggttgactgtgctgctcaacctaggattgtcctcaccgacaggcctccgcaccctagagactgttctccggacggcgcaccaagcaggtcgcctcccagcggtccgggtagaccccacgaccatgctggtagaccacacagcgatactcgatggaccaagtacgtcggtcaagtgcccgacgcagcagggtgtcgagcgcatcgtggaagtgacacccgcgagcagcgttgcgagtgatgggtcgagcaaccctgctgctcctaccgtcgacgttcctgctcctcatgcaggcggtggtgcagcctctccaagtgactggactgaccggccacgggacgacgaagcggacgctccgcgagacgagagg

SEQ ID NO: 17241 - DNA, 249 bp, Zea mays
  Peptide Sequence Number=SeqID_60616
atgacgtggctggcgcaccggacatgtccggtgtgcaccggactgtccggactcttggtcgcaaacttgaaggctaagaaaccaaaagagcccaagaagaataatttcaagggaaagaaagataatgctattgaagatgacaagaaaaataagaacatcttcaagaaggatggaaagataaggcaattgagaaatggtgaaaagcttatattattggtgattggctcaccgacattgactatatggtga

SEQ ID NO: 17242 - DNA, 872 bp, Zea mays
  Peptide Sequence Number=SeqID_60617
atgcaggaatcccttgcaggaccgccatcacagcaaaatcctcccgagggcctccccaggaatcccttgcaggaccgccatcacagcaaaatcctcccgagggccttcccaggaatcccttgcaggaccgccatcacagcaaaatcctcccgagggcctccctacactgaccactcccctactgcccttgcccctttcggttaccagggtgattcttcagatcctcgtgacctcactgctagtcgtagcaatacaaacaaacatggttcttcgtgcaagcagttgctttctccctccgtctttcttctacctccgatcaatgagcagccatggttgggggagaagggaagaggggtcggccaggatgctcgaccacacaggccagccctgcacagggtggggctgcgccggagggggggctgggttgccggggagccgggcgctagacatgcgagcagggggcacatcggagcagcggagctgcggcggcgcgcaatcagcaggctgcgggcgacacacaagctccactgttttgtagccatagcgtacgttgcaaaactgtgcagagaaacaaagagggaaggagatctcaccttcaatgaagcagactggctgacgacggcgcgcaggtccgcgttgaggtgccggttctatggtggacaggggcaagctctagtcgaacggttccatggagcgcccgaacggcgacgaacacagaaatccgtggcggcgccccgcgaggatcaccagacggatgaggggggttcccgatggcccgcgatttatacccaggcggtagatggagcacctggcgcctgggcctatgatgccagtgacagggcacagtgcaggcgcgtggcactgcagtctag

SEQ ID NO: 17243 - DNA, 129 bp, Zea mays
  Peptide Sequence Number=SeqID_60618
atggcccgcgatttatacccaggcggtaagtccgagggggatggaggtaggggcgagatcctcggccggaatcgcgcaacagaacagagtctgttggggtgtttcgtaatggcagtctgcaaagcctaa

SEQ ID NO: 17244 - DNA, 561 bp, Zea mays
  Peptide Sequence Number=SeqID_60619
atgacttctcacggatcctcggacgaaggaaatgcacagtcccacactgacgaacttgcacgagagggtttccctcgtaccttgtgggaggtacttcagggagctggttacacgacgcctacccagtacgcggtgcagctgttcgagaagcaccgagtgcctcgctgtaggccaggctggcgttcactggactctgagtcttttggatacagggctgaggatactatcgaggcgattgctcttcatggactgaccaccttctatggtttccaccccttggagctgtccactcaccccattggtttgttccccgtggagaagggggacgacccaatgtggaaggaccgagtggagcacgccaaggatatatgggctatctacccaggtcagactgctcacttgatggtgcggtgcatgaatgccctgtatcgtctgcaagtgatgcgaggagaggcaatgtctcatctgatggcattgttggaggctaccaagatcaccttggataacagagaggaacttgtggtagacttgtccactgagatggtggaaaaagacttatga

SEQ ID NO: 17245 - DNA, 1923 bp, Zea mays
  Peptide Sequence Number=SeqID_60620
atggctctggtgcagaagtttggtaaaccagacatatttcttaccatgacatgtaaccctcactgggatgagataaggagggagcttctccctgagcagacaccgcaagatcatccggatcttgtagtgcgtgtctttcatgcaaagctacaagagttaaagcataggctgactaaacatgattttcttggtaaggttcgagcctacgtctatgtcgtggagtttcagaagcggggtttgtcgcatacccattttctactgataaagcagaggaagtacaagctcacatgtcctgagcagtacgaccttttgatctcagccgagatccctagcaacaagtaccctgaactacgaaagatggttatcaagcatatgatgcatggcccgtgtgggtcggtccgagggtgcgaactggacaatagatgggttgtcccttataacccatacctccttcgtctcttcaactgtcacatcaatgtcgaggcatgtgggagcatcaaggctgttaaatacctgttcaagtacatatacaaaggccatgatcgtgcgtctgttgttatgagagatgcgagcaaggcagatgatgatgttgatgagatcaagcagtatagagatgcaaggtgggtgactcctccagaagccttgtggaggtcatatggctttgagcttagtcagatatctccacctgtgatgcagctacaactccatcttccaaacatgcacatggtggcgtttcacgagcggcaaatggtcgagcgagtcaccaaccatccagtggatctaaagacagttgatgatgtcaccctaccgactttttgtgaggcagcagagagaaggggactgcttgagtcggacaacacactggatgagtgtctcactgaacgtgctcttttccagatgccatcggtgctgctacggctttttgccacaatactggtgtactgcgagccaagcgatgtggttgtactctggcagaaacacaaagattctatgtccgaggactatcaacacaggagtcaaaacaaaactcaggttgagcagatggtattgattgacattaggaacatgctgcagtcaatggtaaaggacataaacacattccctctacctcctatcatcgacgcatatgacgatgctattggtaatgctagggaggtttacgaggaggaaagtatcaaaccgacagagggagatgtggctctcaaagactctcttaacaaggaacaaagggccgcctataataagattatgtctgtcgttgacaccgatcagggcggattgttctttgtggatggacctggtggcaccaggaagacttatctatacagagtgttgcttgtgacgctacgcaaccagggcaagattgcagtggcaacatctacatatggcgttgcggcttccataatgcctggaggaagaaccgcccattcacacttcaagataccactcactattgacgatggcgttgtatgtagcttcacgaagcagagtggaacaacagagttgctacagaaagcatatctcattatctgggatgaggcttctttgactaagagacaagtcgtggaggcactggacaatagcatgcgcgatataatgggtcgccctagactgccatttggtggtaaaaccattgtcttcggtggagatttcagacatgtctcgcctgttgttcgtaaaggtgggagtggcagcgatcttgacaacctaatagacttctctttcccaaatctcaacgaaaatatgtctgattccacctacatcacttcaagggcgatactgtcaacacggaacgactgggtggatatgataaatgttaagatgattgatcattttcaaggggagcatatggtgtaccatagtttcaacagcgccatggatgatccccataactactacccacctgagttcctaaacacatag

SEQ ID NO: 17246 - DNA, 1749 bp, Zea mays
  Peptide Sequence Number=SeqID_60621
atgtcgaagcagttcaaggtcctgcttcctacttccttccacaagcttgtaagcacagccttcctcgatcgccggtcgatatcagttgccgacgtttcactgagctcacgaaacccactgattccacagcgcatctccgacgagctcgccggttgcttcgacgccggcgagggcgaaggggcgcccgagccgacggccctcgtggtcagtccgttcgggaaggtgtggcgtgtggaggtggtccgggacggccacggtgcgtcgctcgggcgcgggtgggcggagttcttggccgcgcacggcgtcggcatcggctggttcgtcgtgctccgttatgagggcggcggcgcgctcaccgtcaaggtgttcgacaccagcttgtgcattaaggagttcggcgctccggctgcagttatgccatccaaaagctgcaaaagtattttctgtaagccacaattcatcaggatttttcattcgaatctctcggaaaagatgatgttgcctgctaggtttgtgaaagattacgtcagtgaagagtgcctaaacagccggatagccatcattttcagccccattgccaaattttggcgtgttgagcttaagaacgatcaatcaggcatcttcttcacaggtggctggtcacagtttctagacttccatggaataaagaatggtgaagttttgctcttgaaatacgaagggaacatggttttcaaattcaaagcatttggacttagtggatgccagaaagatttcaagaaccagaatgctgggattcaactaaatactaaaaaacaacaggaaacacctcccatcaggaaacgtaaaagcaatgatgagaagtcaagcagtgaagaaaacaagaggctaaaaactccagtgacttctccatcaccttctgatccgtcactggaaaaaccctatcagattgggacatcatcttggataaagaaaaggatcaacacctatgcacttgagcaatttcttgcgttatcagtgaagttctgcaactcgattgggttccggatggcttgcacaatcacccttaagacagcaacgaacagcaccagatcatggcaggtgcgtggtactgcatacaagtggcatcgctacatcatcggagtgggctggaagagcttctgccaggataacagactcaaggcaggcgacctgtgcaccttcaacatcatcgagaccacgctgtggcatgttactatcacgcgctcagcattagcagcagatacttttaataagcaaaaaaagccaccttgttcatccagtagggacaagaagggcagttcaagcagagaaggagcaaagaggccgaaaccttccatggcacatttcagcaaggttcaggttccgccatcgtacgcaagacgatgtgcctacgacgttggaccgccgccctggatacggaagcagatgaatgccagcacaataagaaatcgtcttgtaaggatggtcattctcgcgtttgattctaggaagttagtgatagggtgtctggcaccggccttctgcaatcagattgagttgcggcgacgctgcgagatcgtgctcaagacctcgatcaacagcaatcattcttggcgggttggtggtctctcgcagaagaagggtagttacattattgggcccggttggaaaaaattctgcacggagaacagagttaaggttggtgatgtctgcaccttcaatgtcatcgaaacccagctgtggcatgtcgtcatcacacgccgttgctaa

SEQ ID NO: 17247 - DNA, 456 bp, Zea mays
  Peptide Sequence Number=SeqID_60622
atggctgctatattactatcttcagacctgaataagagaagggggtgtctattatataaatatgaaaaagaagttgactctggaagcctatcagatgttgagatattagaaaacccaacaaattttaagaagaggaaactaccccacatgcttgatgatagcgaagtagtgtttgaagatgaggaaggccctattactcaagcagacttgcaaaggtggtttgttgatgattgggataaaagaactcctgtaaaagtgtctaccgatgggtgcactaatgactttttaatggttggtctttccacaaaggacatgctagtgaccaaatccgattcaatagatgttttatgtgattatatcatggcaatagaagacgatacaacactagaatatgatgcaaagattcttcgaagaaactttgtgattgatctgttaagttatgagaacaattcgtga

SEQ ID NO: 17248 - DNA, 510 bp, Zea mays
  Peptide Sequence Number=SeqID_60623
atggagtgcgcgatgggacaaacagtggtgggcccatccgtgatccggcaaagcagtggttgcacgactgagaacagagctgaggatggggttaggctcgacgccgccatccgtgcactcgaggtggaggccagggatgccaagatgaggctggttgtgaccgcccagctcccacgaagaacccggaggatgttggggttttgccgtggtggcttgctggatttgccgcatctccgtcttgctagatgtgccgcctctccatcttgctggatctgccgcctctccgtctcgttctcttcatctgccggaatcttacacaaatttttaatcaatcctgctactgtacaggttcttagagaaaacatttattgtgcaataaatgatggaattatcaaccttattgacaagatgccaaagcatgaagcactaaaagcccttgacgtttacaagagggctatccagcaggctaggatcctatctgacttttatgaaagttgtcaaggtttatag

SEQ ID NO: 17249 - DNA, 315 bp, Zea mays
  Peptide Sequence Number=SeqID_60624
atgaagggtccttgcaccccaacatgttgtacccttctctatgcttctttcttctgcctcttgttagctggttcagaagttgaaccgcctgtgattgggagcactagcttcgtagctgaaggcgcggaacgcagcccagacacaattacatttatgtccctatcatttacatgtacttacaatgaacattattgggtaaagaaaagtgatcaagggcacaacttgtctgggactcgagattcaaggtaccaggatgatcttcagattctcataacctcgctgctaatcgtagcaatacaaacaaacatggcatag

SEQ ID NO: 17250 - DNA, 387 bp, Zea mays
  Peptide Sequence Number=SeqID_60625
atggcgggagcagtgatcgcagtggtggagaggcgaagttcctcgagaagcagattgttcttggcctccgtaaaagtgggaaacggcttcatgcaggtaaggatgggcgtcacgcgatcgaagcgagggctcaagccgcaaaggaggttgagcacgaggctctcatcggtgatggggccccgagggtgcggagagtgtcagccatcgtcttcatctgacgacagtactcgtccacagagagatcgccctgagcaagctggcggaaagcggtctcaaggtacagaatccgagtccagcggttgccgagaaactgagcctcaagggcaccccagatccggtgagcagtatcgtccgacactcgaaccatgtcctgaagttcggccgtga

SEQ ID NO: 17251 - DNA, 303 bp, Zea mays
  Peptide Sequence Number=SeqID_60626
atggggaaaacccgacgccaacaactgggtgcgaagcagggcggcatccggcagggagagcacgctggagggggagaggactgtggcggcaggcagggaaacaacaggggccgaccgagacccgtcggggccagggacgaccgcgagggaggcagatggggtcggcgcggatctggcggacagaggggcggccggcgcgggtcgggtgggggagggaaggccggcgcggccgtatccggcgttggcgcgggcgaaggaggcgcgtcttgcagaggaggcgcgacagcggcgacgaagacgtga

SEQ ID NO: 17252 - DNA, 150 bp, Zea mays
  Peptide Sequence Number=SeqID_60627
atggttggtttacaggtggtgacaaggatgatgtttatgactatggtaatggttgcctttggtgcaatctatgctcaggtaaagaagaaggagaacggtgtcgaggcggatctccaggagttctgggacttcgacgagttcgaggattag

SEQ ID NO: 17253 - DNA, 366 bp, Zea mays
  Peptide Sequence Number=SeqID_60628
atgaaggccgcgagatttccacctctctcacgcccgtctccggccacctcgcttccccccttcgcgctcgcccacgcgctcgacccatctgggctggggcacgcggcacactcactcgtcggcctgagggaccccccgaatccgaagagcctccacaagcacaagatcaaccatcatcttccatgcaagcatctccaccaactcaagatgaggacaaggctcaggaagaagaagaagaagaagatgaagatcaagatcaagacgatcagccacctcaagaggaggacattgatcaagggggagataaagatgatcaagactaggaagatgatcaagaaattagggatcaaagaccgccacacctaa

SEQ ID NO: 17254 - DNA, 186 bp, Zea mays
  Peptide Sequence Number=SeqID_60629
atggtcaacggtgaaccggctgttattgggaaaagagaaaggcgacatggctataattcaccggactgtctggtgatgcaccagactgtccgtaggtcggagcgatacctggtcagtctcccattgtcggacgactttctgatgcctgtccaccttgaaattggccagccgatagtctctccatag

SEQ ID NO: 17255 - DNA, 561 bp, Zea mays
  Peptide Sequence Number=SeqID_60630
atgaatctgcatggggacaggagtcaatcagtatgcaccgaattgaccgcaagcagcaaaggcagcagccctgattcgccgcttgggcgctcctctattgaagtacacctcctcaagtccatttcactgccggtcatccacacctgtgacccgctaccgtcagccacccgcactgcagttgtcctcgtgcttcaaatcgccgtcgccatccacaagcgcataaggttcaacacaaaccaagaaagaaattcagttgggggcacaatcaaatttggagcaagacaagagagtgtgctgccaagtggtgcaccggccactatcgggtattcacgaggcgcgctccactataattcaccggactgtttggtgagcctgcggagcaacgactccctgcgctccaacggtcaactacagaagtgtacagtgataaacagtgccacgcagaaatcagagcagcgaagtcagaggtcaccgaacatgtctggtgtgccaccagactgttcggtgtcgtttgaagacaaaagatgccaacagtcaactgctccaaaccctaacggatag

SEQ ID NO: 17256 - DNA, 1395 bp, Zea mays
  Peptide Sequence Number=SeqID_60631
cgtcgtgatggtgcgaatgttgcggctggagtagagaccgttgtgtgctccaagaagacgatagcccctagatgccgaggtagccgaagtcgaggtggtcgcggtcggaagacgcgcagcaaaagcctgctcttcgggaggggtcgacgttcgagcgtcaatgatcggcagggcgacacagcaaaaggacaccggcaggccgaccttcctgcttcttcgatcgtccgggcatcaaggagccccgccagggaggccgacagcagcgcacgcgtctacgccggtcatggtgtccgcgcccgcggcggaatagaaggggaaacggcagatccggccgggaaggccacgacagcgacggatccagccgggaagccgcgatccagccaaaggggacggcggatcgagccagaaaggtcgcagcaacgtggatccggccgggaaggccgcgacagcgacggatccagcgaaggcgatgaaggggtggtcggcggggcgtgtccagccgggcaggggcctgcgccggacctggcaaagggtgttgacggcaccggcgacgggagaagctcgaagggcgaagttgcactaggcccgacgatgaaagcattgcggtggctgcacagcacgcgcgaggaggagaaggcctgcgcgtgggagagatgtcgcactgaggaaaggacgatgactgttggggaagggagcgcccgtgaggtcgtggcggctgctgctcccctgcgtcccgcggcagctgctgcacatgctcccacgtggccgcagcgggcagggggcgagttggggggcaccgccaggcctagatgtgaccgtccagaggagaggggcgacggtcgggaagggcgccgccagagcggccacctggggcagccagtgcagggtccgcgccagcagagcaggggagaggtggacgacgcgacatggagggaggcgccggcttcctcaacgccggcgaggacatgccgcgccgtggccggggaagggggctcgcggccgcgcgacggcggtggctcgggcccgcgcgtcggtccggtggaacgggcggccgacgtcgctgggggaagggaggggaagggccgcctgaggcgagatgaccggcgcgtcggggagctcgcacgtggcccggacgggggagaggtggccgcgcggggaggggcagaggctcggcgtggcggcgggcggatcccgcgcctgcgcccatggcagcggcgtccgcgccctgggctgcgaggcggcggcagcgtctgcgcgctcccgtggcgacgaggcccctgcggctgtgcgccagcacgccctcggcatgcggcgttgacgagcagagaaggggagcgacttgttaaaagtgctgatttagatctcttaacaaacctcgtgcatgaacagttctga

SEQ ID NO: 17257 - DNA, 1890 bp, Zea mays
  Peptide Sequence Number=SeqID_60632
atgggttcctgtacctccaagtccgcgcttgatcacaggaggccggcgaggtactacaccagggggcggcgagtccacagccgccggtccatcatgccggaggcgccccagtcgcagcagctgggcgatgccagcagaggccgcatgaccggcttctccatgagcgagatcgtgcacgtggagacggccaaccggggcaagtcggagcactccaagacgttccacctcacgcagatggaatggcaccacagccagagggactctaaagggtgcagcaacgaagacgcctggttcgattctgtcagcatcctcgaagatgattctgacgacgaattcaagagcgtcgatggagacagcgacgaagacgaagagcaggcggagaagcagcaatacgcgagcgtgtccagcttcgccgacgcgctctctcgcatcggagacatatgccgcggcgtgcctttacccgacatccttgcgctgaaaggcgacggacgtcggagccagcagagcatgccgtcctccttcggcctcaaggcggtcctcatcaaggacaagagcgacgccgcagacgacgacgacgacgacggcgacggcggtggcggcaaggagacctccacgccgtcccgcctgcgcaagctgctgcagtccatcagcttcaacgagagggtgcagcagctgacgggcggcagccccgcgaagaagaagtccaccgtcattcgcctctcgtacaagacgacgtcgtcgtgcggcggggacgactacgaggacggcggcggcggcggaggcggcgaatgcggtagatctaagaaagacaagaagaaatgcgcggctccaaactacgctgcctactatccgataggcgttgacctgtttgcctgccccaagaaggtccatcacatcgcccagcacctggaccttccgcagatcaagacgcaccccaagatcccgtcgctcctcatcgtgaacatccagatgcctacctaccccgctgctatgttcctcggcgacagcgacggggaaggcttgagcctggtcctgtacttcagggtgtccgaatgctacgacaaggaggtttccgaacatttcaaggagtctatgatgaggtttttcgaggacgaaaccgagaaggtgaaagggttcacgtcagaatccactgtgagctacagagatcggctgaagatcatggccggcctggtcaacccggacgacctccagctgggctctacggagagaaagctcgtccaggcgtacaacgagaagccagtcctctcgcggccccagcacagcttctacgagggagaggactaccttgaggtggaccttgacatccaccggttcagctacattgctaggaaggggctggactcgttcagggcacgcctcaagaacggcatcctcgatctggggttaacgatccaggcccagaagcagtcggagctccctgagcagatgcagaaagacattgaacctgacaatattcaaatgcccatgcatcagacggacatgtacatccataataggattttgacagaaattgcggcgggtgcgcctgttgtgaaagttgtcatctactatagttctccaggggaacgactgttggcatttacaaccaatggccttaatgacaacataatatacgccacgcagccagcagggtgcatagaagaagctgaggatgtgttttgtaagtctgccattctgcgactactggatgctgaactctggaccctgtgtgctacgctggtggaacatgacccattggcattggcagcggcatggctactgttcctggctgctggaacatcatggctgtgcttcccttcgtacgttgttatgatggcatttgggtcttgggatgatctttcaatatgcttcttcacatcgcacccttga

SEQ ID NO: 17258 - DNA, 411 bp, Zea mays
  Peptide Sequence Number=SeqID_60633
atggcggcccgcgaggcctccgccccggccccgtcgacgccccacgctggagacggggtgagccgcccgccgcggcctacgctcgccctgcccccgcgctccgtcatcgagtccctcttcgccgccggcgccgccgagacaagccccggcccgctcaccctcgccgccgcgctcttccccgacgcgccctccccggccttccacggctccttcacccagctcctcgtcggcgccataggctccccggccgtaccctcgtcgccctccccgttcgctgtcccgccgaggctcagccctgccacgctcttgggctcccccggcttcttctctcccacggcattccctcaactccgtttacgaattggaccaccagatgccctcatcactgcaccagtaccactgtaccagtag

SEQ ID NO: 17259 - DNA, 129 bp, Zea mays
  Peptide Sequence Number=SeqID_60634
atggagcgtcggcgctacgaggaagatgaacatgggagacaaagaaacggcgacaacgcctatgttaccttcgctggagcagtgaaaatgttagggtttgccgttaaatgtggggtcacaataggttag

SEQ ID NO: 17260 - DNA, 465 bp, Zea mays
  Peptide Sequence Number=SeqID_60635
atggaagactcctttgtcattaggacatcctacagctcagaggtggaaggattccctcatcttttatggagctgcgcgcttcgcatggggatccgcaagaagccggacaacaaaaatacccctacttggaggaaacgacttcaggccttgtcagggagagatcctaatgaggatgaccccaccatagtctacatggtcggatatctccacacccttgataaccactatgacgaccttttctcccactgcacccacctaaattcccgggtggaaagcctagagcaacaaatcaaggaattaaaaaaggaaaaggtgtccctccaagaaagtctcgaaatagcagaaggtgaaaaagccaacactcgtgaagcctaccgaactctgaagatgaactacgataagaagttaaagaagctcgcccccactaagaagatctggaagcggaccaagagccaaggatgctag

SEQ ID NO: 17261 - DNA, 1224 bp, Zea mays
  Peptide Sequence Number=SeqID_60636
atggtcacccaggatggtgaccaccagttcgatggtggggagaagcaagccgggctgcggcctctgccccgccctcagcttcaaggatcttcatcatccttgctggggaggagggcgagctctgcgaaggaggcgtcctccagccatgcgggggaaggcgaactgctgctgcctagccagggtgcagcatttcgtcctccgtccgggcgactgtggccggctgcaccgggggtcgcacaacacgtcgtacgccgcgagggcggtactcgtgttctgagacggtcccgttctcgttcttgcggcgaggacgtgagtgaggacctgccggtgcgctttggggcggccggtgctcgctggtgcggtgttggtgggcaggtggctgccgtcgtcggtgctgaggtggtggcagccagagaaggtttctccgccgacgagatcgtcggcgccacctgcggtcggacctccggctcttcggccttggcggcttgtcctcgcccctcgtgtggggacgtgggcgagggacctccagcagcagcgtttgccctgaggtcgtcgctgcagctgtcttgccgtccgagacggaggtcgttgacgctgctgcagtggttggcggcgagccacccggagtttgtcgtcctgcaggccctccgatgtggaggttgttcatacccgcgggagtggaaccggagttccgtttgtaatggcaccttgagtgccgcgtggacagaggcggagtcggctcgagaagaagcttcgtcggcccgggagcacgtggcctccctggccgaggaggtgcagcagcgacgactggagcttggccaggtggagatcctttcgcccgtgtcgccgtccaaggccgggccagattccgccgaaggtggagacgacgccgagggtgttgctgctccttctgttgatgacttgttcgtcggtagcagaatcgtttatccgagcgagagttacttttcacggaaggtgatgagtgataaggtgatgagtgaggtatccgtatctcggaggcgtaggagtccctcggtcggccttgccgcttacgtgtactccgtcgttttcaggatcctgctatcgaagcagtcgaaaagcgcgaaagatgttctggcagaaagactttttccgaggaaaattttgacgcagagggggttccccccccttctagcccccgagggagggtcgggcttcgccgaggcaaggctgacccttccttga

SEQ ID NO: 17262 - DNA, 270 bp, Zea mays
  Peptide Sequence Number=SeqID_60637
atgtccggtgcgccagaggactccgacttcaaactcgtcaccttcgggaaattccagaggcgactccgctataattcaccggactgtccggtgtacaccggatatgtctggtgctccaaggaagtgcggccttcggaactcgccagcctcgggatttcactccagccgctccgctataattcaccggactgtccggtgtacaccggactgtccggtgtaacagcggggcaacggctatttcggcgccaacggctacctgcgacgcattaa

SEQ ID NO: 17263 - DNA, 519 bp, Zea mays
  Peptide Sequence Number=SeqID_60638
atgcaggcggcatgcaaccgcgccaagtggacgcgcttctccgactcccgacacgcccagcatggaggcccaggcccacgcgtcacgcaaccggcgcgccggatgcttcgtgcaagcaactacaccgccacttgcgccaccacctcgcctcctcgattgcggaaccaataccacgactcgaggcgacccagcgcacgacccagctacgccagcctggcgcggcggacagacggcgcttctggcaggagcagcgggcgacgcttcgccttcgtcgtaataaccgcgccaaaaaagggaccgggaaagggggataccccgaaaaggatccttccccgtgaaggaaccagactccgagcctccttactgatcagaggttcgaaggctggccccccgaagggttcgacagccgcctcagatcgcgtgggccctacacccactactggtcagaggttcgaaggccggccccccgaagggttccacggccgcctcaagctactcgggctccgcgcccattactga

SEQ ID NO: 17264 - DNA, 414 bp, Zea mays
  Peptide Sequence Number=SeqID_60639
atgggcaagaaacgcaagcgcgaaccaactcctccgtctgaggatttcggtgactcggagtattcagaggaggagttctcctctgaatccgaggggtctccggctcccatccccctgcgtgagtcgtctgacgactcagacgactcccaggggctcgcggcggaggtctggacgtacatccgggccgtcgagcgctgtgggctcgagggctcggatgaggaggactcggacggtggcggcgaggacgaggacggcgatgacgacaacgatgacgacgacgaaggcggtggcggtggtgacgatgacggcagtggcaggggcggcagcgaggacggcgacggcgacggcagcaggagcggcgacggcagcggcaggggcggcagcggtggcagcaacaacagggccagtggctag

SEQ ID NO: 17265 - DNA, 1067 bp, Zea mays
  Peptide Sequence Number=SeqID_60640
atgcacattgggctccttgcagcagcagctcatgctgctgcaacaaacagccgtttcacaattttctttaatcctagggcaagtccatcagaatttgttatacccctttcgaaatacatcaaggcagtttttcacacgcggatatcagttgggatgcgattcaggatgttgtttgagacagaggaatctagtgtccgcagcaatgctttgatgtggctgagaggagttgctggtgaagggggctttcagtctttaaacttccagtcacctggtgtaggttcctggggacaacagagactccatccatccttacttagcaatgaccatgatcagtatcaagcagtggttgctgccgcagctgcttcccagtcggatggttatctgaagcagcaattcctacaccttcaacaacctatgcagtccccacaggaacagtgcaatctcaatccgctgttgcagcagcaaatactacagcaagggagccaacagcagatggttagtcctgatgctcaaaatatccagtccgtgctcaacccaaatgctattcagcagcagctccaacaattccagcagatgcagcatgctcataatgaccagaagcagaagattcaaccagatcagccgtaccaagttcctagcagtgcggttctctcgagtccaacatcattaccaagccatttgcgggaaaaatttggcttttctgatcctaatgtcaactcttccagcttcatcagctctagcagcaacgagaatatgctggaatcaaacttccttcagggaagctcaaaatctgtggatttgtctagattcaaccaacctgtaaaccagaccctttttagccctcaagttgactcttcctccctactgtacaatatggtttacaagtcaggatcggtggggagatccttggacatcacccggttctctaattatgctgaacttcgagaggaactgggtcagatgttcggcattaagggtcagttggatgaccctgatagatcaggctggcagcttgtatttgtcgacagggagaacgatgtgcttctccttggagacgacccgtggga

SEQ ID NO: 17266 - DNA, 531 bp, Zea mays
  Peptide Sequence Number=SeqID_60641
atgggcgaagctaagccaaactgcaggggaaacccacatgttggctacagtcattacaaagattcaaatccagcacaagttcatcataacaagcagcttctccgtcttcgcgtaaccgccgccgtgcgtgccgcggtctccgcgcccacgtcgcgcgtggggctcgccccacctcgccctcggccacttgagccccgagccttgctcgccatctccccctccctcatttgcgcaccaacgggcccccctcttccacctctccctcgctgtgcgcacgccaagaccgccgccgtaaaccccgccgttccgagctcggttcccggccgccgttggagctccgccgtgtccattgccacggtgagcttcgccccgacgtccgcaacccggaacgcgcaccgatttccccttcccctccctatttcgctctgcccgcgctcacccgccgtcctccgtgcagccgccaccgtcgccccgggccgccgtcgcgtctccgtcgccaccgaggagtccccggaggccgctttgaggtaa

SEQ ID NO: 17267 - DNA, 675 bp, Zea mays
  Peptide Sequence Number=SeqID_60642
atgtccaggccttcctcgcgccgacagccgcatcagtgggtcgcccagcacgtcgtgtgccgcgagggcggcgctcatgttctgggcggctccggcgagggcgaggacctgccggtgcgctttgaggcgtctggcgcccgctggtgcggtgctgaggtggtggcagccggagaaggcttctctgtcaatgagattgccaactccggccgcacccctgggcctccgtcttccggcctgaatggctggttctcgtcctcggtgaacgagagcccccgtgccgtagcgcccgcccggaagccgctgctgaagctgcttcgccgcccggggcggaggtcatcgttgctgctgccggaacgggcgacggcgagccacccgtcggccttctgttgctccgcaggccccccaatcgcgtggggttgctcgtacctgcggaggtggaaccggagttccgtttgtaatggcaccttggatgccaactcgcctgttggttgtctgaaccgcttcaccaagcgtgagtcgccccgtgtaaaggtgacgagtgagagtggagatcttcggaccgcgtcgccgtccgaggctaggtcggacctcgccgaaggtgtcgtcgatgccgagggtgctgctgctcccttcagccgtcaagatccgagcctacaggatcggattgtcttgtag

SEQ ID NO: 17268 - DNA, 243 bp, Zea mays
  Peptide Sequence Number=SeqID_60643
atggctggagctcggctgagccgacccggatgccccgttcttctccgtcccatcgttccgtcggtcgagtaccccagcccagccgtcgtctcgccggttggcccctgcgcagtgctcgtgcgcgcgctcgcgcttgcttgcgcgcagtgcgtcgacgggactccgtctacgttcgcctacccttcgtctacccctagacgactctcgtctacccccgtctacccccgtctacccctcgcctaa

SEQ ID NO: 17269 - DNA, 435 bp, Zea mays
  Peptide Sequence Number=SeqID_60644
atgatcaaaggtatactcatgagctatgtgtgcaaattagcaaaagaaatttctcgaatcaagaatattgagctcatgcctaagtttggtaaaagattgttcatcaagtggcttggtgctcaaggttcacacttagccaataaaaagaccaagtattgggttcaacaaaggagcaagggacaaccgaaggcacctctggtctggcgcaccggactgtccggtgtgccaccggacatgtccggtgcgccagaggactccgacttcaaactcgtcaccttcgggaaattccagagacgactccgctataattcaccggactgtccggtgtacaccggacatgtccggtgctccaaggaagtgcggccttcggaactcgccagcctcgggatttcactccagccgctccgctataattcaccggactgtccggtgtaa

SEQ ID NO: 17270 - DNA, 429 bp, Zea mays
  Peptide Sequence Number=SeqID_60645
atggccaagaataacaaacgcaagcgcgagccgactcctccatcggaggacttcggcgattcggagtactcggaggaggagttctcctccgagtccgaggggtctccggctcccgtctctcctccggcgtcgtccgatgactcggacgactctcaggggttagctgcggaggtctggacatacatccgagccgtcgagcgctccgggctcgagggctcggatgagtcggagtactcctcggatgaggaggactcggacggcggcggcgaggatgaggacgacgacgacgacggcgatgacgacgacggtggtgacggcgacggcagcggcagtggcaggggcagcggcgacggcaacagcagcaggggcagcaccaagggcagcaccaagggcggtggcggcggcagcagcggcaaggccagtggctag

SEQ ID NO: 17271 - DNA, 348 bp, Zea mays
  Peptide Sequence Number=SeqID_60646
atggctggagctcggctgagccgacccggatgccctgttcttctccgtcccattgttccgtcggtcgagtaccccagcccagccgtcgtctcgccggttggcccctgcgcagtgctcgtgcgcgcgctcgcgcttgcttgcgcgcagtgcgtcgacgggactccgtctacgttcgcctacccttcgtctacccctatacgactctcgtctaccccccgtctacccccgtctacccctcgcctaaccccgtatgcattcgtgtcgtttgccatcgcccgcgcgtcgcgcaataagtcgtcgcgtgatgttcgcacgcgttgtgcgtgctgttcacacgtgtcacgctaa

SEQ ID NO: 17272 - DNA, 711 bp, Zea mays
  Peptide Sequence Number=SeqID_60647
atggccgcctcaatacatgcgccattgcgaagaggtcctctcccccgtcctcctacggggggcggcaacgaggccattaaagccaaagagttagaggctcggcggcaagtggcgctggtggtctcgccagcggaggcaaccacctctgcagtgggcagcctcaccagcggcggcgaccacctcagcaccgacgatagcagccacctccgcaccggtggcttaccggcgacggcggccgcctcaccgcgcatgaagaggtcctcgctcccgccctcctacggagtgaggacaataccatccaagaacgcggccgccacctccacggtgtacgacgtcttgtacgacccaccggacggtgtcagaacagtgcggttggcggcacgggagatgccacggatatggcagacctgcgcacggcgcgatcgtcgcccgtgtggtagacagacggccacaccccggtcggcggcgggaggcagcgttggaggcggcaccaaagccatccaggccaaggagccagacacgcgacagctaacgacgcctacagccgaccggctccgcgtagctgaagttcgcctcctccgcaaggctggtgaacatccttctcctccaaatgctagaggaagaagcgggtcaccagcccatgcggaaggcgggaccccaactcggctcgcctttcaccccagcgaggatgatgaacatccttggagctga

SEQ ID NO: 17273 - DNA, 126 bp, Zea mays
  Peptide Sequence Number=SeqID_60648
atggcgtcggccaaggtggagggagagtggggagacaggaagaggagagggccgtggcagtttaacatggggaggcgagcaggcggagaagctggtcggccagggagactaaagtccattatatga

SEQ ID NO: 17274 - DNA, 1053 bp, Zea mays
  Peptide Sequence Number=SeqID_60649
atgcccccctcctgcggcgccagtggcatccgagaggagactggagggaccgaccaggagttgtctgttgatgactacctggtaggaggcgtcaccatgtttggcgcccagacggggctaccgcctgctaagaagtcgccgccgcatctgcggccgaaggggtggcggcggttgttgcacgatagctatgttatggcgctagtgaatgttgcgacctcgcagctgcgttccgagaggagacgggtggagggcaaaatagagcgccttcagatgcaacacaccaaagctgtcaaagacaagttagcagctgagaacaggagtcgaaaccttcttggtaaggtgactacacttgaaaacgagaatgaagatctcggtcgtcagctcaatgatgagaagaaagccaccgctgaggcgaagacggagggcaaaagtgcccgcgcggaggcccaagctgcccgcaagcgtgttggcgagcttgagctcgagttggagctggagtctctcctgtccatcgtgacgagcttgatgtcctacgcgtcgctcgtgtcctgcgaaggggttgtgaatgccttagcccgcgagggctgcatgcacttcgaggcctttgctcggagtaacaaggacttcaacgctggtgtgttccaggttgaagatgacacgacgagggacaaagaagttgaggacctcgctggcctggagagctcggtagctcgaaaagatgtcgaagttgaggcgggagctgaagagcaatcttcactcgcaaaagtcgacgttgaagaccctacagcggttctggtgcctgggcctacgcagacagattttgatgacattggaaatgacaaatcgtcgatgtgccaaagtttgatagttcttagtagtggggaatctcatgttgatctgtggtcattggaaagtgaggagttactgagcccgtttgctaggatggacgatgagtcttcagaggatgacttaggttattttatggcattagatttgtatgtggtggagtcttcacctacggttgcccccgacagcggcgtagtctttgtctag

SEQ ID NO: 17275 - DNA, 360 bp, Zea mays
  Peptide Sequence Number=SeqID_60650
atggttgtatccgttcttgtgtcagttctagtgccagctctagctccagtgctagcaccaacttcacaggctcagcagtcagtttcttccgagttcgtcagtgctccagcatctgagtcagcaccagagtatatggtcctcattagtgcaagtgagagccacctagagtacacaccacatgcattaggcttctcttggtcaagtgaaagtctatggcttattacttttggtgatcggcatcacctagatggcttagtggcatttggagcagtgatcacccctgaggatttgttggtgacccgactcaagtttgttcgtggtcgtgaggcatcacgccggagagctaatctagttaagtag

SEQ ID NO: 17276 - DNA, 1269 bp, Zea mays
  Peptide Sequence Number=SeqID_60651
atgagatatggttttggcactactacatatgaggaaggaaatgttagaggtcaagtagtgcctaggaaggacacttttaagtatttaggatcaataccacagagcacagagagacgagatattgatgaagaatgttggcctacaaaaagacgacatgttctgatacgtgccgagttatattcggtactagggtggcccgatcttcacggcagtaggttgataaataggatgattggctataaaggtaacgagaataacaagatcgagtcgaagtctactcggtttcgatgtttctctcctcgtcgcttggtcacatctgaccttgatcagctacggaacctagtgtgggcaaccacgaaacatgatgtttatacaatgcatgatcaatcagtgacacactggtcctcactggagcagacaagcactgagctaatcaatgccgatgattgcatcgtcccaaaacagaggggccatggttcacagtcagtggcaatggttcaggtcacaacaatggccgtggatagtaatttattggtagttggtggctttcaaggggagattatatgcaagcgtttggatgatgagggggttgtttacagcacaagggttacagatgatgaaaatgcaatcactaactctttagagatgtatcaggatccgagcggatctagaaggttggtggctgctaacaatgactgctccatcaggatttttgacaccgagtactttgacctcctcaagcactatgtcttcccttggtccgtgaatagtgtttctgtgagcccgaatgggaaactctttgctgtcctgggagatcatgaggatggttgtgtggtggatcccaagtgtggcaaggcaattggctctctcaggggtcacttggattactcatttgcatctgcatggcatcctgatggcaatatcgtggcaactgggagtcaagacactacatgcaggctatgggacatcaggaacctatcccaatcagtagctgtgcttggtggaaggatgggctcaattcggtgtgtgaagttctcttcagacgggcgcttccttgcaacagcagagcccgtagattttgtccacatgtacgatgcttatgcggactacagcagatctcacgagattgacttgtttggcgagattggaggtttagcattcagccctgacaccgaggccttctatgtgggccttgcggaccagacgtacggaggcatgatcgagttcagcaagaggcaccaacatcattacttgaactccttgtggtga

SEQ ID NO: 17277 - DNA, 1041 bp, Zea mays
  Peptide Sequence Number=SeqID_60652
atggcgcccatcaggcctctgcagctttatgctgatgagggttaccagctgagaattaggcgtcttgaggcacaaaccaccagcgtgtttctttaccctaaacaccacccccgtttcttcgtctcccattttcctccacggcaccgcgccgccatcatcttcctccgttcgctgatgggcaccatgcctccgccgtcgcctccgagccccactccccgatccagacaaccaccctgcccagatccggatccacctagtgcagcacggtcgtggctaccggatctcacagtctccgcggatgctgcgccgtcgccacccccactgaagttcgaccagcgcctcgtcgaggtcttcacccccttcctcgagaagcacataagcctacgtcgagctccgttccggcacccaggcctgagacgacccccctgcaggcgctccaacaccgatccagtggggctccaggcgttctgcaagcggcacggcctctctgccaggggctccaacgccgatctcattgcccgtcttgacgtcgcgctcgggagggctgctggtgcggaggaggaggtggctggagtggcagcgatgaagggttactgtgaactgaggttccaagccacctgttcgcctgttgttgccaagacaagggggaagtctgctcaagccggttctgtagaggtgggcgcagttgtccctttgaggcgttccaggagaaattcactgagagctgctgaatctgaagaagtacaagtggctgtttttgttgacaggaagcgcaagtgcaagaaccaggagaatgataagggtgttgctctcagcgctcaggttggagcttcgtctagagttacaagaagaccaagcttggcggtggctgctgctgtgttgcctcctcttgttggaccgaagagagggaggggagaagcagctggcgtgcaaacttctactcaggtggaagtaccggctaggatgacaaaatctcgctcaatagatatatgcattatcatttcaagtggtcttttattctttatggggcttctaggataa

SEQ ID NO: 17278 - DNA, 612 bp, Zea mays
  Peptide Sequence Number=SeqID_60653
atggtcccactacaagccttgttaagcatgcaatggctagggaccactgttagtgtgctgaaaaggcatacccctgatgttggaggaggaggtgcaggagcgaccgccgaccgtccgcgtttcaccatccccttctccgatctcaaggtaaccttctccggtgttgaaaccatccgtggccacctggcgagctggtgcccgcaagaggtggtgctgaggcatgaggcggtgggcgtgttcctgacacactgcgggtggaactcaaccatggagagcttgtgcgtcggggtgccgatgctgtgctggcccttcttcgtggagcagcagaccaactgccggtacacgtgcatgaagtggggcgtggccatggagatcggccaggacgttcggcaggaggcggtggaggagaagatccgagaggcgatgggcggggagaagggaatggagatgcagcgccgcgcgggagagtggcagcagactggtctccgcgcgacgcggcccggagggcgctcatacgccaacctcgacaagctggtcgccgacgtgctcctctcgggtggcggcaagagttctcaggagggtttcagttcgcacaccgccactgtccaatga

SEQ ID NO: 17279 - DNA, 501 bp, Zea mays
  Peptide Sequence Number=SeqID_60654
atggaggaccatgaaaatcttgtggttcttagagatcatggagctgacaatcagcatttacaatctctcacgctttcttttgcatgtgaagacagttcaaccatcgatgatcatagagtcgatgaccagcagaaaatgcaggcaccgcacacagcatcactggctatatgtgagaatgctcaaaacgatggcaatagaatccctgaatcaatggtgtatcaggatgttaataaacatggcccaactatgaatgttcctgaagttggaatgtcttttgaatccggagaaaatgcatatgagatgtacaacacatatgccgggcctggcgtctctactcgcaagtcgcaaaggcagagcggcaaagcggcggccgttgaattgaatggaatgaatatgtttgtccacatcatgggcgaaggccccatgggttcgttcttcgttgctcggaagctctttagcgtccaactggtcggaggccatattaaatgtgggctttgctaa

SEQ ID NO: 17280 - DNA, 1266 bp, Zea mays
  Peptide Sequence Number=SeqID_60655
atggtcgccttacaagggggtcaccctccttttaaaggcgactctccctacctgtgtccccagccgtcgtgggctgagtcttctccaacacgctccaaggtcctccccctacggcgtgggggctgggtcccacacgtcatgcaaacgggcccagagcagaagaagccaaaccgccacgcgcggtgcatgcaaccacccagcggttacgagcgttcctccactttcgcccagaccagcgggcgaaagggcgggcagccatgcaggcggcatgcaaccgcgccaagtgggtgcgcccctccgacttccaacgcacccagcatgggggcccacgcccacacgtcacgcaaccggcgcgccggttgcaacgtgcgagcaactgcaccgcagctcgcaccactgccacgcctcctcgactgcggaaccagtaccgcgactcgaggcaaccctgcgtacaacccagcagtgctagccaggcgcgacggtcaatacggccaaaatgggccggcagtgatgacggtggcaggcgggcgggagcagcggaaaggcggcgcctctggcaggggaagcgagcgacgcttcgccttcgccataatgaccgcgtcaaaaaaaggaaacaggctccgagcctccctactgatcaggggttcgaaggctggcccctcggaggggttcgacagccgcctcagagcgcgtgggctccacacccactactggttggccctcgaagggttcacagccgcctcagacacagcgagggatgaccatgggtacgttcaatacataaccaaggctcgggctacgctcccgagtcactccgccactccactgaccggcctgacggaaggacagcgccgcctgcgccgctccgactgctgtgccactcgacagagtgaggctgacaggcagtcaggcccggcctcaggcaccataggaaactccgctccgcccgacccagggctcggactcgggctcagccccggaagacggcgaactctgctccgcccgacccagggctcagactcgggctcagccccggaagacggcgaactccgctccgcccgacccagggctcggactcaggctcagccccggaagacgacgaactccgctccgcccgacccagggctcgaactcgggcttagccccagaagacgacaaactctgcttcgcctgatcctagggctcggactcagccctggcctcagccaacggtcttcgcctcgcccgacccaggggctcggactcgacctcggcctcagaagatag

SEQ ID NO: 17281 - DNA, 228 bp, Zea mays
  Peptide Sequence Number=SeqID_60656
atggccactgccgtcgtgccccactctcgtccgcgccgccgcgccccaccctcgcccgcgctcgaggctctcccgtgccgccgcgcctcggtctcgttcgtgccattgcaggctcggcaccgccccatcttcgaccccggcccgccccgtgaatttagtgactttattgaatttcatattataataagtgtgtttagtcattttagttgtggaaacctccacgtgtag

SEQ ID NO: 17282 - DNA, 486 bp, Zea mays
  Peptide Sequence Number=SeqID_60657
atgacggtggcaggcgggcaggagcagcggtcacgtcgtcagccaagctcacgtcccatccgggggcagcgagagaaccctctctcacggcgtgaagacaacgcgcccgtgttccgtcctcgaacggctcgcgcatgcgcaacggccgccccgccaaccactcgccccgtcgcattaacttcgcggcgggacaggcggcgcctctggcaggagaagcgggcgacgcttcgccttcgccataatgaccgcatcagtaaagggaccgggaaagggggataccccgaaaaggatccttccccgggaaggaaccaggctccgagcctccctactgatcagaggttcgaaggctggccccccggaagggttcgacagccgcctcagatcgcgtgggccctacacccactactggtcagaggttcgaaggtcggcccctcggaaggattccacggccgcctcaggctattcgggctccgcgcccattactga

SEQ ID NO: 17283 - DNA, 204 bp, Zea mays
  Peptide Sequence Number=SeqID_60658
atggagcctgacggagggacagctatcggagcggttgagtccttgctgacgtcctcttgcttccgtaagggggctgagagccgccgccgtcacagggttgggcgatgtggaagctcctctgaggccgaggtcgagtctgtcttccgtggtcgaggtcgagtccgagcccctaggtcaggcgaggcggagttcgtcgtcttctag

SEQ ID NO: 17284 - DNA, 710 bp, Zea mays
  Peptide Sequence Number=SeqID_60659
gcgttgtcgtatcaaccgcacttcggaagttctgcgcggacgccgagaaaatcggcgacggggcgaagggagctcgtgtgaaggacgtccgggccggagccatcgcggacacgccagtgagcaccaagccggccatgtcctcgccgccgcgggcggggcctcaccgtggatggggtcctgggcacgtcttcggcttcgcggagaagcaaccttggccagatcgcctcgccagccgaccagatcgcaggagcattcaatgcaaggatcgcctgacaccttatcctgacgcacgctcctcagtcgacaaggctgaagaagctccgcctcgcccgaccccagggctcggactccacctcgacaccggaagacggtctctgcctcgcccgaccctagggctcggactcaacctcgacaccggaagacggtctccgcctcacccgaccccagggctcggactccacctcgacctcggaagacggtctccacctcgcccgaccccagggctcggactctaccttgacctcggaagacggtctccgcctcgcccgaccccagggctcggactcagccttgacctcggacgacggtctccgcctcacccgaccccagggctcggactcagcctcgacctcggaggaatcaccgcctcgcccgaccttgggctcggaccgaccacgctacaggggggcccatcattaccctacccctag

SEQ ID NO: 17285 - DNA, 267 bp, Zea mays
  Peptide Sequence Number=SeqID_60660
atggagcctagtggagggatagctgtcggagcggttgagtccttgctgacgtcctcttgcttccgtaagggggctgagagccgccgccgtcacagggttgggcgatgtggaagctcctccgaggccgaggtcgagtctatcttccatggtcgaggtcgagtccgagcccctgggtcgggcgaggcggagttcgccgtcttccgggacttagcccgagtccgagccctgggtcgggcggagcggagttcgccgtcttccgggacttag

SEQ ID NO: 17286 - DNA, 462 bp, Zea mays
  Peptide Sequence Number=SeqID_60661
atggagcagcgtcccgggctggagaggttgctggagactacccatctggagcttgacgggaagctgttcgtcaacacacagcaggcccctacctggcgcgccaactgtcggcatttcgaccccggggggtccctggaccgacgagtaaattgtcgctgcatgtcccagcccagatgggtcggcacgagacggaacacaaagggggaaacaggcggatgcgcttgcagtagggggttacaagcattcgcgagggagagagagagcctgtgcgtcagcccgtcctcccgcgcggccaccttctcgtacgagggccctggaccttctagcagagaggagccagagtcctatgtacatgccaacgtgggtgttggagagcacaaggctcttaaccttgtggtcgtgggttcgagccccacggtgggcgccaatgttggagacttgttctcaaatgctatgagttaa

SEQ ID NO: 17287 - DNA, 441 bp, Zea mays
  Peptide Sequence Number=SeqID_60662
atgtctgaactacgccatggaaatagggagcgtgcgcgagatagccaatgcattgctgagctgtcaacggaggttaatcgcttgcagcaggaaatcgtggaacgagacacagctatcgactgggccgtaaattcgtgctctttcgcctgggattgggaggcaaatgctctagcacgagtagcggaagtaagcacatccctggagaatctgcaagcatattgtaacactctacatgaggaagtgcacttgttatacgatcgactgcatccaaatatgccatcggaagttgcagcaacaggagctggaacatctggagcagctagtggaggacctgagggcgagttggatctttttggagcccctccttccatgaacctcgcagatgaacgttctctcgaagctggcagtggagcgggaacaaccaaggacgaagataattag

SEQ ID NO: 17288 - DNA, 696 bp, Zea mays
  Peptide Sequence Number=SeqID_60663
atgggtcgggcagagcggagttcgccgtcttccggggctgagcccgagtccgagccctgggtcgggcggagcagagtttcctatggccggtcagtggagcggcggagtgactgcggtcacttcggctctgtcgactggaggacgtgcgtcaggataaagctttgtgctgatgggggttaccagttgagaattaggagtcttgaggctctcggcccattaggtaccactatgcgtgacccagtacgcccagaagcagggtttggcgccgacacgtggcccccacctgtccgcctcccttgcgtggtcggcgattatctaggcaccaacgtggtggccccgctggtcagtagttcgtcctcaaccaccaagccaaactccatggacaccatcgcaatgttcgtggccgtgggcgttgacccgccccgaagcccatcaccacacacttataaaaggaccgagtcgcaaccttctctcctcccgcaaccactcacccatatacgtttgcgccgggtccctcaccgcgaacctcaccctcagctggcggccgccaatgtcgaactgccctaccaccaccgcttgaggacaattggtcaccgtcgcgccttgtcggacgtgccctgggcgccgccgggtgccgtgaccagggttgggggaatagccctcgccgtggatcgtcgcatggacgaccatgattag

SEQ ID NO: 17289 - DNA, 823 bp, Zea mays
  Peptide Sequence Number=SeqID_60664
ccacttggagagactgcaccaccgcctgcatgaggagcaggaacgtcgacgacaggagcagcagggctcttctttctcgctccaccaggagatagagtctgtgaggagctgctcccctgtgcttcctctggagccgccccctgcaccaccactgggcgtcccagcttctggagtagctgctggaggagacccagacgacggaggaggcgacgacagctcaagccacgacaccgacttctctgctaaccttgagccggaaggatgggttgctcgacccatcactcgcgacgctgctcgcgggtgtcacttccacgatgcgctcgataccctgctacgtcgggcatttaaccggcatacttggtccatcgagtatcgctgtgtggtctaccagcatagtcgcggggtctacccggaccgctgggaggcgatttgcttggtgcgccgtccggagaacagtctccagggtgctgaggtctgctcagagcactattctatctctgagcgggactcagctgaggcagccatgcaagatgctgcacggcgaggcgtgattgtttcacctgtcggtgagggcaatcctaggttgagcagcacagtcaacctagccgccgtgctaaacacggagctggaccatgcattagacgagctgagtagggctcgtgctgagatcgccctgctgcgggctgagcgcgcggaacatcgtcacctggatggtggttcccccgctcccgtcgggactcagcacccgtaccgctcacctcagcgtggacaccagtcttatggcaatcccgactgcaagaccaagataactctagaaccatag

SEQ ID NO: 17290 - DNA, 1113 bp, Zea mays
  Peptide Sequence Number=SeqID_60665
atggcgagagtagcgtgtaccctctgtggcaagaggttggacagtggtgtatttgtgttctcggttggcgtgaacccattctgcgtcagcgcactgcaggctctgcagcagctccagctcgggcgctcggctgcgggctactccgctgttgcctgctcgcttgctgatgctgcctgctcccgcctggccatctccctgctgcttgctctcgtgcttcgctactcagtgctcgctctccagcctccagctcaagtgctcggcgattttctaatttctaaaaagcaatattggatagaaacaagacacgctaaggacaaactaagaaaagcacttgctgaacctgtggagtctctatttgatgttgcagaccaaacaacctggcaatcattaagaaacatttacaaacgtgagacagaggccatcctaccagagtttctgaataacctttgtcagtttgaaatggaatacgctccagcagaagaaatggtatccaaattaaaggattatgcccagagtgttgtggaaagtaaagctaaagaggaatctagcaaaggggattctgacactgtttcctctgttgccaggttcacaacagtgtttagccatgacaaggattcaaatccaagggtctggacaggaaaggaagatgttcgtgcaatagcaaaggaagctcgatctgcggctctcaaacttctgtctgtaatggcggccattcgttgggatgacgagccagataggattgaaagcatcctcacttcaacacttctggaaggctctgttatatcaaagattgcaagtgctgcttctgctgatccacttgcttctaccacttgggaagagcaagctcataggcgtggtaatagtaaactgcctcctccttgggcaatcatggccattgctattcttggtttcaatgagatcatggtgcttattaggaatcccatttatctgttcttgctatttgtgggctacttgatggtcaaagctttggagatgcagctagatgtcagcagagaattccagaatggagtggttcctgggataatctctgtgtcggtgaagctcctaccaacgatacagaacctgctttctaagttaagttattttgtttaa

SEQ ID NO: 17291 - DNA, 359 bp, Zea mays
  Peptide Sequence Number=SeqID_60666
aggcctttgcagctaaagagatcacaatcttctcaagtcagtatttatcacacactaacaacgtgaatgctcagtcaacacggtatcatactgaagaagaaggtccttcgaccgaccttagtgtttttctatggaaggggaaaggggtcgaggcttctactgcacattatgttgacataagagagcgtaatttcaccatgctctacttgtacaccaacatggaggaacttgatccatactttgaaatgtttgattccatatatttagctggccacaaacctacaccaaaggaactggataatctacgtatgaaagggatgaatggaggtccatgtttcgttgaatggttccacgagcat

SEQ ID NO: 17292 - DNA, 546 bp, Zea mays
  Peptide Sequence Number=SeqID_60667
atggccgattcaaaagatagctctaacgtctcttacaacaaaatcattgagccgactatggaaactctgtcggctgaagaccagcaggagttcgaaggacataaggagcagtggatcaaggaagcacagctaccccccaaggtaagcgagacaaaagaaattcaatatgttagagcttacatggatgagcagcgagaccaaatgcaacagatcattggcgtggtagtagaggaagttccagtgggtctccctcacattcgaggggagcatggagtcatcctggaggatagctcggaggaacttctgccgacgcccacctcgttggcagagtcactggccttcgcatctaggtcatcaacctcagcaccgcctgcaccagccgttcaagctcctgcacccggaggcgatgacccagacgactcaagggacgatgatgaggatgacgacaacgacgaagatgacgaggaacacgtcaacgaggaggccaactatgcccagcaggactacttcatggggtttgggcctgtcactgaacattacacataa

SEQ ID NO: 17293 - DNA, 1503 bp, Zea mays
  Peptide Sequence Number=SeqID_60668
atgcattttgtctacagaggaagcaaatatcagcaaaacgcaaagcatagtcacacttttctaactaatgttcataaaggttatctagtaaaacataatgttcatacaaccttacttaagtatgggagcattggtccagtgttaatcaacaattatggtgaagcagatgatgcttttcaagaaaatgatcaaagcatttgtggccagaaggatgaagaacctgtcaagggtacactatatgagagagaagtcaatagactattggacactttgggccctcgatttgttgattggtggtgggacacaccattacctgttgatgctgatctcctcccagagtttgttccaggctttaagactccatataggctgtgccctcctggggtgagaccaacactagctgatgaggagctgacatacttgcgcaagcttgcacgccttttgccaacacattttgcccttggtagaaacacaagattgcagggtttggctgctgctatactgaagctttgggagaaaagccttatagcaaaaattgcagtgaaaataggtatccagaatacaaacaatgaacaaatggcatggaacctcaaggcaagtactattcctgatgaagtgaaggaagaggaagcccgactgaaagcagttgactcacttcagatggttggtgaattatctgaagaaagttctttaggaactttcagggagtaccagggtttccatgctaagtttgtgcatgaaaatactgaaaactctaacaccatgattgaactagaggctgagaagtatagattggaaaaggaactgaaagaccatgagtggaagctttccgttctcaacaagaagattgaaagatctaaccaggcactggcaaagcttcacagttcttggagcccttcagagcagtctgctgatagagaacacttgacagaagaggaaaaaataatgttccgccggattggccgcaaaatggatgggcttgttctcctaggaaggcgtggtatctttgatggtgtaattgaagagattcatcagcactggaaacataaagaggttgtgaaagtaattacaaaacagaatcaaactcgacagatcatgtacgccgcgagtctgctcgaggttgagacaggtgggatattaatagcagtagaaaagctcacaaccagccatgccataatactttaccgtggaaaaaactatcgccgcccagcaaaatcatcatttagtaatctcctaacaaaaagagaagcgctccgaagatcaatcgaggtccaacgacgagggtcaatgaaatactttgttcgggagagacagaagtccattttggaattgaaaaggaaactggtcgaggtatgtgacaaggcaaatcaggtatcgaaccccatgatcatgaagagtttggatagcatggtgggtcacacctatcatgagcatcttcttcctcctgctcctgatggcacatctaaatttaaggacaaatttatatgcgtctcaaatttgtga

SEQ ID NO: 17294 - DNA, 177 bp, Zea mays
  Peptide Sequence Number=SeqID_60669
atggggatatcctacacatccaatggggccttggggacggcccccatggccaacacagccacttccatcaccagtgttctagattggttttatcgtctagctttagtcacttttagagaggggccacagtgcaccattttcctagtgatttctgttggtaaccactcagttccttaa

SEQ ID NO: 17295 - DNA, 702 bp, Zea mays
  Peptide Sequence Number=SeqID_60670
atgggagggagcttgctgccggagaagaggggcgccctgctgcagccgtggagaggaagggagagctgctgcgcaagggagaagaagacagggaaatcggctggagaagagagaaggcgccataggaaactccgcttcgcccgaccccagggctcagactcgggctcagccccggaagacgacgaactccgcatcgcccgaccccagggctcggactcgggctcagccccggaagacgatgaactccgcatcgcccgaccccagggctcggactcgggctcagccccggaagacgacgaactccgcttcgcccgaccccagggctcggactcgggctcagccccggaagacgacgaactccgcatcgcccgaccccagggctcggactcgggctcagccccggaagacgacgaactccgcttcgcccgaccccagggcttggactcgggctcagccccagaagacgacgaactccgcgtcgcccgaccccagggcttggactcaggctcagccccggaagacgacgaaccccgcttcgtccgaccccagggctcggactcagccctggcctcagccgacggtctccgcctcacccgacccatgggctcggactcgacctcggaggagcctccacctcgcccaacccagggctcagaccgaccacatcacaggaggcgccatcattaccctaccccaagctaa

SEQ ID NO: 17296 - DNA, 342 bp, Zea mays
  Peptide Sequence Number=SeqID_60671
atggctcagtggattacccggtccacgcactccggcggggttgtgaactccggcgaccgtggactggcttctccggcgaagcagacttcgattcctcgctcggggagcttctccgaggtgtgctcactcgtctccgagggttggacggggtcgggaaaggctgggttggccggtctacggcggcaggggctcgggtggccgcggacacgccgcgcacgggcaagcgacgctcacccaagtcgcaaacgtgcgaatcttggcaaaaatccggcgcgagtcttttcctggcacctagggctgtctctcatccgtgagttgccatggcagatatggcctaggtag

SEQ ID NO: 17297 - DNA, 993 bp, Zea mays
  Peptide Sequence Number=SeqID_60672
atggctcagtggattacccggtccacgcactccggcggggttgcgaactccggcgaccgtggactggcttctccagcgaagcagacttcgattcctcgctcggggagcttctccgaggtgtgctcactcgtctccgagggttggacggggtcgagaaaggctgggctggccgatgaacacctccacgtgttcgacgcgttctgcgcgcgccagagcacgcccgcgcccgacctcgcgtgccccgcgtcgtgccaaagaccagctgacgccatggcccgcgcccgcgcctataaaacccccagggacttcggccgtacccctccgcgcacgctcgacctcaccggagcccaaactcaccggcgtttgcccgtgcacggcgtgtccgcggctgcccgacctccctgccaccgtagaccggccaaccaagcccttaccaaccccgtccgaccctcggagaggactgagcacacctcggtgaagctccccgagcaaggaatcggagtttgcttcgccggagaggccagtccatggtcgtcggactccacccgaccgccggcgagcgtagaccgggtaatcctctgcaccattcttcgattccttgtgcacatggcctctacgtcacctcgtgaagctcaccgcgccattggattgaaccaggtcgccgtggtttggccggcacacccgtcgccgacgagagcacccgcctgcgcacgtggatcgagcgattccggccacccctgccgtcaagtcgtacaccgttgtgaccgccagagcctccccgagccaaccccgcccctcgccggacctctctcgccgccgataagccgcgccaccctttcctttcgcacagactgtaacctcgctgacggagagtacgtcctcgtgccagagcaaggagctgctcaggaggtagccccggatccagcaccagagcctgcaccagaggatctgcctgccacagctttggaaggcaagccccggttttatgcataa

SEQ ID NO: 17298 - DNA, 372 bp, Zea mays
  Peptide Sequence Number=SeqID_60673
atggagcccggcggagggacagctgtcggagcggttgtgtccttgctgacgtcctcctgcttccgtaagagagctgagagccgccgtcgtcacagggcatacggggcgccatcattgtctatctggtggagacagccagatgggacaccggtcttgttctctgcggcccgagtcagctcgggggactggcttcctgtcagcatcactctgtcaagtggcgctgcagtcggagtggcgcaggcggcgctgtccttctgtcagaccggttctttggaggacatggttgctggagtgacttggccgtccatcttgccaccgggttggactgtcgagtgggaccctgcctcggctgcggaggagcatgaggagtga

SEQ ID NO: 17299 - DNA, 1047 bp, Zea mays
  Peptide Sequence Number=SeqID_60674
atgtcttctcgctcccttatgcgtcgcgtctttccgccttccaagcccccggatggggggaacccgccgtctttttgcctcgtcgttggagggacgcaactccgtgggagttggtacctttcagccatcattcggcttcaaggattttcatcatgcagcccggctgcacccctccaccagcggccacccaagatggtgacctccagcttgatggtgggggaaagcgagccgggctgcggcctctgcccctccctcagcctcaaggattttcatcaccggggctggggaggagaggaacagcggtcgtcgtccgtggcgccggcagctgcaccgtgcctggctctcggacgcgagtggcttcagagccgctcgctgcgccggcgtctgccacggcagctggaagaggttcttccgccggcgctgatagccaaggccggccacaggctgacctccaactctacggccttctgcccgtccttgcctcacgagtttgggcgtgggcgggggcctcctagcagcagcatccgccctgaggtcggtgctgccgctgttcggccccccggagcagaagtcgtcgtcgtcgccgctgctggagcgggtgacggcgcgccgttcgtcggtcttccgttgctccgcaggcccacccctatcgagtggggctactcgtctgttgattatctgaaccgcttcaccaagcatgagtcgccccgtgtcaaggtgacgagtgagccgggttgtccgttggcgggaccgacgtcggagttgatcagccgaggcctcaggtcgggctggcgccctcgggagatggtcggccgaggccccaggggcgaccggccgagccgcctgctcgggccggattcccggagaagtccctggcagcgattgcccgggcgtggtgatgacgtcgtccttcagagcggagatcctcggaccgcgtcgtcgtccgaggctaggtcgggcctcgccgaaggtgtcgtcgatgccgagggtgttgctgcccccttccagcgtcaagacccgagcctgcagggtcagagtgtcttatag

SEQ ID NO: 17300 - DNA, 612 bp, Zea mays
  Peptide Sequence Number=SeqID_60675
atggaggcccaggcccacgcgtcacgcaactggcgcgcgggatgctgcatgcagataactgcaccgccacttgcgccaccatcgcgcctcttcggttgcggaaccaataccgcgactcgaggcgacccagcgcacgacccagcggcgccagcctggcgcgacggtcaaggcggccgaaagagcagcgggcgacgcttcgccttcgccgcaataaccgtgccaaaaaagcgggagcgatcttgcaacggaatcccatcggagggaggcatcgagccctcggaccccgtcgccaagggaccgggtccggcagatcacccgcagctcatcggagacaccatgttcggcgcccatcgaggtaacatggcgctctccgccctcctccttgcggaaaggcgacgcaggggcgtatgtaaaaaagccgagtctgtccctgatcgcactcttgccctgtgcagaggctcgggggctgctctcgcaaacccggctccggccaaaccgttgacagcgtcaacataccagcccgagaacttgggccccgaccgtacacccgggctacggccagctcgcatgagggaacaaccagaccagccgaagcattacacaaggcattaa

SEQ ID NO: 17301 - DNA, 654 bp, Zea mays
  Peptide Sequence Number=SeqID_60676
atggcgcttcctgttgacgtggctggccagcgccctaggttgggcgacgtggaggctcctccgaagccgaggtcgagtctgtcttccatggccgaggccgagtccgagcccctgggtcgggcgaggcggaagtcgtcggcagaggccagggcgcccgagtccgagccctgggtcgggcggagcagagtttgccgtcttccgggtcttagcccgagtccgagccctgggtcgggcggagcggagttcgccgtcttccggcccgagtccgagccctgggtcgggcggagcggagttcgccgtcttccgggtcttagcccgagtccgagccctgggtcgggcggagcttcctatggtgcctttggcagggactggcttcctgtcagcatcactctgtcaagtggcgctgcagtcggagtggcgcaggcggcgctgtccttctgtcagaccggtcagtggagcggcgaagtgacggcggtcacttcggctctgccggagggcgcgtgtcaggataaaggtggcctcgggcgagccaaagatatgtccgccgttggaggggggcctcgggcgagacggaaatcttccgggctttatgctgatgggggttaccagctgagaattaggagtcttgagggtacccctaattatggtccctga

SEQ ID NO: 17302 - DNA, 264 bp, Zea mays
  Peptide Sequence Number=SeqID_60677
atgcccccgctcgccccctcccccgcgggcgtgttcgaagcccccgcccctgttctctgcgctctgccgcactcccccactcccgagattatcatcgaatctaccgtccccgcccgcttgtcccacctggacgaaattgaagagcgaggggtcggccaaggagtagggggtggccacggcgagcagcggcatggcctcggcgagctcgggcactcgtcgacgagggcgaagggctccggtgcggcggcgacgagcttcggctga

SEQ ID NO: 17303 - DNA, 201 bp, Zea mays
  Peptide Sequence Number=SeqID_60678
atggggaagactgggagcacgcacgtagggatcgaaggtgatcgaagggagcaggaatactgtaacctcgctgacggagagtacgtcctcgtgccggagcaaggagctgctcaggaggtagccccggatccagcaccagagcctgcaccagaggatctgcctgccacagctttggaaggcaagccccggttttatgcataa

SEQ ID NO: 17304 - DNA, 210 bp, Zea mays
  Peptide Sequence Number=SeqID_60679
atgcacgagtggaggcaaaggaggctgaagaagctgctgaacgcattgattatagccggcccttcgccaccaccggagccatacaatcctgaggcgggtccaataatgaaagaggctttagatgtaatgaaaattgctaacgaagttgttgacgaagtcgtcgacaaacttttacatgaagccaccgagaggatactaaaggaaaactaa

SEQ ID NO: 17305 - DNA, 714 bp, Zea mays
  Peptide Sequence Number=SeqID_60680
atggagacccctcgtgcacccaccatggccctggcctctagaggtggatctgcttctaacccatcacctgctttgtttgctctatcttctttgttgtctatcatagaggagcaggtggagagccttggggatgaggagttggcacttatggccagtcggttcacactccacaacaaccaatttgaaccagcggcatggcggtttcccaagaagggcaagcaagaggttggctcgtgcgaccaccactctggtcggtgcaagggcaagcaggagcacacctctggcaagcacaagtccaggggaaggtttgataaggaggtgctcaagaagtacctccagaaggctaagatcaaagagtgtgccttcctcacctccttgagtgacctcaaccatgactctgacgagtcaacttcttcttcgagcgacacggagcttgagaggcacgttgagaacaagcccaacggactatgcttcatcgccgaccccgtgggaggccattgcaccatggcccttggtgatgatgcagtgggcaacgacgtcaaggacattagtggtaactctgcttctgaggtatctcattctactgatgatctcgccgctgaagtagaggagttgacggctgctttggctagtcaggataagttactttggcttgttgctcatgagaggaaatattttaaatccaagtatgagagcatgcttagggagctttag

SEQ ID NO: 17306 - DNA, 600 bp, Zea mays
  Peptide Sequence Number=SeqID_60681
atggccttgcgaaatatttgggcccaaagcctttcgcgaggccttttagccttccagtggacccaggggatatctgtcccccacaactgcagagaaacgaagaccgagctaagctcgacgcctgacgaagcactgcgcagtacccggcacgacgttcagctgcgcatgcacaaggggcgcggggcgagctgcagcaaggagggcgcggactggacaagccttgggcacaaggagagaagcagagaaacaggcgccgagcgccggatccgagccagggcgagctcgcgcggcaacagagctggagcagagagatggacgcacagggcgagcttggctgcgcgcggcatgggcgagcgcgccaaagagctccggccggcgagcatgcgcaggaagcaagcgcgtgccagggaaccgctcggctggaggagggagctagaagggaagggaggctaccatgggaaaggaagcagagctgggcgcgacgctaggagatccggccgggcgccggagctggaagaggaaggagcgcgggggagagacctcggctgcgcgcggggagaagaagaccgcgcgactgaagaaggagacgcgtgcagataa

SEQ ID NO: 17307 - DNA, 1320 bp, Zea mays
  Peptide Sequence Number=SeqID_60682
atgatgcttgatggcgtgaagcctgagcgggaaacgttccacacactcatagtcggtaccatgaaaggcagccggctacaagatgcgctttacttccgtgatcagatgaaagaaatgggtttgaagcctgatgttaacctttacaacttcttgatctccacttgtggaaaatgcaagaactcagatgcagcaatcatgcttttagaagaaatgaaggcacatgatgttaagttgaaaggagaaacctacatttgtctactgaatgcacttgcatcaacagggcaaactgatcaagtttatgccatagttagtgatatgagtgctgctggacttggattaaacaagttttgttatgctggattgataactgcattcaagaacaagacaccaaccgctgaggaaactatggcgaagattcttgacttcgtcgggcagtcgaaaggttggcaatatgttgaaagagtatcaaaggacattgctgagaatataatgatgaatgtgtcagaggaagaactgtacaacctcccaacagcagaatatgtaaataggcgaggaggatttgtctttaaacaacatacagtttatcatgttgctctccaagcttgtgcagaattgcgaagcaaagagacacttgaagcacttctggaaatgttcaataaggataatagagatggatctacttatgatgcctacatggtgatgcaagctatgaggtgttacctacgatgtggagatattgattctgctgttaagatgtttgaagagtattcaagctcgaggtccccacccgctgagttgtatgcgacacttgctgagggagctatgattgggtacactccaagaggaatgcaacttgctcaagaaactatagagaagatgacttcaagaaattttttcttgaatgccaagatgggaactgatctcctacttgcagctgccggtgaaacggctggtggatatacgactgcaaattatgtctgggatctcctgcaaagccgtaaaatcactccaacacttcctgctgttgaggcataccacaagggtctgacggtttctggatgcgaaggcatgtttacagtccgaaaaaccaaggaagttcatcaggatgacgtaaagcagaaccaccaggcatttgaggggcatggcaggtgtgggaatcaaggtccggaaacggaagccagttgtttccagggttttctcgagaaatcttcacctgccaagcctgaagacctgaactcggatgcactgggttttgatttgaaatttaatgtatcctatgttgcctaccattgtttgacaaccatttatccgaacttttga

SEQ ID NO: 17308 - DNA, 372 bp, Zea mays
  Peptide Sequence Number=SeqID_60683
atgtccggtggggatggacctcctcccattttttatggtgacgattttccttattggaaaattcgtatggaagcatatttagaggctatagacattggtgtctataaagccgccacacaaggattccccgaacctagagatcccataaatcttgtaggtgatgagttcaattatgagaaatggaatgctaaggccaaaaacaccctttttagaggcctttgcaaagatgtgttcaatagagtcatggaattaccactagacgcgcagagcagcggaagacgtctcgatgtagacaaacgcgtcgagcagtgccgtgcagtcgccggcgtccttcacgtcctcgcacggttcgcccaagtgctccagatgtag

SEQ ID NO: 17309 - DNA, 251 bp, Zea mays
  Peptide Sequence Number=SeqID_60684
atgtggcgcctgcggatcgcggaggggggcggggacccctggctccgcacgaagaacgcccacgtcggccgccaggtctgggagttcgacgcctccgccgaccccgaccccgccgtcgacgccgcgcgccgcgccttcgccggcagcaggggccacctcaagcacagcgccgacctcctcatgcgcatccaggtgggccgccgcatccttgcctgcggcaccgccctccccctcccccttctcggttacgg

SEQ ID NO: 17310 - DNA, 507 bp, Zea mays
  Peptide Sequence Number=SeqID_60685
atggcgggcggcgacctcacgcctcctcctcctcctcccgaagagacgccgccggcagcggcggccgaggacctgatcgagatcgtggaggaagggtcggggcggctggacatcgcgcggtacgtggaccacgtgcgcgacctgtcggcgggcgccatcgcgacgttcgagggcacgacgcgggaccacttcgcggggcggcgcgtggtggagctccggtacgaggcgtacgcggccatggcgcggcgccgcctggcggccatactgcgggaggcccggtcgcggcacgcgctgcggcggctggccgtggcgcaccgcctgggcgccgtccccgccggcgagaacagcgtgttcgtggccgcctccgccacgcaccgcgccgacgccatggaggcctgcccgctacgtcatagacgagctcaaggcgtccgtgcccatctggaagaaggagttgtttccccccccccagcaatatggaaggtgaaccgcgaaaaactttttttttaa

SEQ ID NO: 17311 - DNA, 2529 bp, Zea mays
  Peptide Sequence Number=SeqID_60686
atgtgttctgcccatctggctgggtgctcagtggccgccggccttccggtgttacacggcctgtgtatagcagaggattactcccattgtgaattcttgctcagactccccggatactgccctatgcctgctttccgtgatgtcattgatgttcctctggtggtcagaagattgcacagatctagaactgaggtgagaaaggaactagggatcgcaaatgatgttaaggtggtcattttcaactttggaggacagcctgccggatgggaactgaagaaagagtggttgcctgacggttggctatgtttggtatgtggtgcatctgatactcaagagctccctctaaatttcattaagcttgcaaaggatgcctacacacctgatttgatggcggcatctgactgcatgcttgggaaaatcggatatggcactgtgagtgaggctttggcttacaatctgccatttgtatttgttcgaagagattatttcaatgaggaaccatttttgcggaatatgcttgagcattatcaatgtggcattgagatgatacggagggatttacttactggccattggaaaccttatcttcaacgtgctatcacacttcaaccctgctatgatggtcccataaatggtggcaaggtagctgcacatatcctccaagatactgctgttgggaagaagtatatttctggaaagttgagcggagcaagacggttgcgtgatgccattgtgcttggctatcagcttcaaagggctcctgggagagatgtaggaattccttactggtattctcactctgagaaagaaattagtgttggcccagcgcccacatctcatgatatgaatggaagtgatgagtcatcgttcgaggactttgagatactccatggtgacatgcaaggcttaactgatactatgtcctttttgaagagtttatcagggcttgttggaaatgacttaagaagccctgagaagcaaactcgagagagggctgctgcttctgtgctctttgactgggaggaggaaatatatgttgcaagagcacctgggcgattagacgttatgggtggtatcgcagattactctggaagtcttgtattgcagatgcccatccgagaggcatgccatgttgctgttcagagaagtgaccctaccaaacagaagcaatggaagcatacacaggctagacaactagcaaatggaggagcagtaccagtgttacaaattgtatcctttggttctgaattaagtaatcgtgcacctacgtttgacatggacctttctgattttatggatggcgacaaaccaatatcttatgataatgtgaaggaatacttttctcgggatccatcccaaaaatgggctgcctatgttgctggaactatttttgtattgatggctgaactaggggtgcgctttaaagacagcatgagcattttggtttcttcatctgtccctgaaggcaaaggtgtctcctcttctgcatctgtggaggttgcttctatgtctgctatcgccgctgcctatggtttaaacattgctccaagggatcttgctttgctctgtcaaaaggttgagaatcgtgtcgtcggagctccttgtggagtaatggaccaaatgacatctgcttgtggagaagctaacaaactcctagcaatggtttgccagcctgcagaagtgaaggagttggttaacattccaactcatataagattttggggtcttgactctgggatacgtcatagtgttggtgggactgattatgggtctgtaagagtaggcacttacatgggccgcaagatgatcaagtgtgctgcatccaacctactttcagaattgttgctctcgtgtacgtctacgcaaccaggcgactcaagtcccgacgaatatgaaggacatggcgtcgacctcctgaaatctgaagcgtcaatggagtatctatgcaacttaccaccacataggtatgaagctgttttcgcgaaagaaattccggagacgatcactggcgatgcgtttttagagaagtatggagaccacaacgatgcggtaacagaagttgacccaaagcggtcttactgtgtcaaggctcctactagacatcccatatacgagaacttccgagtcgaggccttcaaagcgttgctaacagctgccaaaacagacgagcagctctcagcccttggagagctgatgttccagtgccactacagctacaacgcttgcgggctcggctctgacggcacagacaggctagtgaatctagttcaagaaatccggcacaggaagagctcgcgcgccggagggcccagcctgttcggcgcgaagatcaccggcggagggtccggcggctcggtctgcgtgatggggaagaactgcctgaaaagcagcgaggagatcctcgagatccagaagaggtacaaagcggcgactgggtacctcccgactgttttcgacggctcgtctcccggcgccggcaagtttgggtacctgaagattcggcgccggtccacgtcgccgtctgattga

SEQ ID NO: 17312 - DNA, 423 bp, Zea mays
  Peptide Sequence Number=SeqID_60687
atggggcgggatccggatctggggcagacgggggtgggggcgctgcggatggggcggtcgggcgacatcggtagcatagcttgcgtgattgatggagcgcggtatcatgctgccatactcttcagaaaccttcgtggcagttcggttctgctcctgcgtagaatcaacacggagacgggagggcaacgctgttcttgctggggcgaagagtgtggtgtggctacgcaaatgcgcaacggggccagggccaccgagagcactacgagcgaggccagggacgtacagacagacaggcaggcagacagttcagatctgatgagcctgcactgcaccttgaatgaccaggaacaggccgggaggcacccagatctcgtggcgcccgagtttacagggtcgcagccctttgctgaaccgttaaattaa

SEQ ID NO: 17313 - DNA, 369 bp, Zea mays
  Peptide Sequence Number=SeqID_60688
atggagcttcttgagatctgtgtaccctgttcctctcttcgtctcctctccgctcagcctggaaaccacagcatcgccaagtcgtcaacagcaactccgggcctccggcggcatcgtggcagcagctcttccacggcggcgaccggcagagcgagcagtggggaaggcaaaccagcgcagcgcctctcagaaacccaaaaggcgaggcagagcggcgaggaaaggggagcagatgaggaagacaagactcccccaattatcgacacagcagtacatggctggctgctggctctgggctctggctgcgggctgcctcctccgcagccacaaccaccatggcatggcagaaaggcacatggccgtccctga

SEQ ID NO: 17314 - DNA, 1449 bp, Zea mays
  Peptide Sequence Number=SeqID_60689
atgggctcgtttgggatggacatggactggaaccagaaggcctccgtgctgctgtgggactgggagaacctgccgcccgcagccgcaaacgggagcgagagccacaggacgaccgctgccgcgcctcagttcgcgggccttgaggccacagggcatgaaccggcgccttcttccgtatcctcgtcaatccattctctgcccagtgccaaggggaacaagaacaagaacaacatggagctcatcagtttcgcacctgccaaagcgcccgacaaggacactggttcggtgctcagcagcggagagccggtggtgctaggcctgaagcttggcaagagaacgtatttcgaagatggttgtggactagggcagagcggcaagagttcggcggcgttaggcactgccagtgcagcgacccctccgggtcctgcgaagaaggcgaaggcggcggcggcggctccaaccgcgcagcagcagaaatcgtactgccaggttgaaggctgcaggaccgatctgtcctctgctaaagactatcatcgcaagcacagagtctgcgagccccattccaaggcgcccaaggtggtcgtcgctggcctggagcggcgcttctgccagcagtgcagccggttccatggactggccgagttcgaccagaagaagaagagctgccgcaggcgactcaacgaccacaacgcgcgcaggcggaagccccagcccgaagcgctccctttcggctcatcgaggctgtcggcgatgttctatgacacgaggcgccaggcgagcctcctgtttggtgaaggtccctacggtcagatgagaagctgtgcgagttcttggtgggatagcccaggagcaggaggaggaggcttcaaattcgcggagacgagaggagctccttggttgaagccggcgagagctgctgctgatgggctgctgcctttgtcaggtcagcagcagcagcaggtgtggaatgactcgattccgcatgttgcccatcaggaggatttcgatgggttcacggtcacggcgttcaaaggaatcagtccaaagacccttgatcatcaaggcgcaggcgttgaagcctgtgcggccgtctccagcccggacggcgccccggaccttcagcgtgctctctctcttctgtcaaacagtccggccggtggcggcggcaccaacaccaaccacccgccgccgccgccggcggctgagctgcaccaccaccgcgctgccccgagcagctgcctcgccgccggctccgtctccgtgctgcaggaggcctcgtcgccggggctgtggcaggacggcggcggcagcgcggccctgggccaccacgcgcacgcgcggctccaggctctcgacgccgccatggcgacggcgcaggagctcctccagctccccaggccgccgccatcgtacggcggctcctcgtcccactacgacctgatgcgctga

SEQ ID NO: 17315 - DNA, 375 bp, Zea mays
  Peptide Sequence Number=SeqID_60690
atggcccctgttgtgctgctcgtgtccggtctagggttggctagcccgggcctcactgctgccagcctccatgtcatcggtgtggcctcgagtggcctggacactgctatcgcctttggcatcactccctccatctcaggtgcctactgtgcacctccgccgacaaccctcccacaatccaatgttgccacgactcaatccaccctcgttgcggccctcaggctgccaaggccgttgtggctactgctcgggagcgcgaacgcatcgctgctcttgcctgggagcatgaacgcactgttgtcgataccctcgccaagaagcttgttgaggttgagtgccatctgcgtggctctccctaccttgagcctctcctag

SEQ ID NO: 17316 - DNA, 465 bp, Zea mays
  Peptide Sequence Number=SeqID_60691
atggctgctgtagttgtaacaggaggcatcagtagcgcattaggtggaaagactaacaaagttgctgacaaagctatgatgctaagaggggagagatttccaagaattatcttccatctcatcattatgtatctctgcaaagctggcttagaaaacgcatccaaatgtgttcagcaatttatatcactgctccctaatattatctctgaagatgatcagtgcaaaaatagactgcatttcttgatttggtccttactaagggtaagatcccagtatgggcaacttgatgatggtgcacgtttccatgtcatgtcacacttgattcttgaaactgtgatctatggaaagtctatgcttacaactaatatagtaggcagagatgattctactgaagcaaataacagtaaggaggctgggttcattcttaatcttgtacagaaggaccgggttctcactgcgctgtag

SEQ ID NO: 17317 - DNA, 282 bp, Zea mays
  Peptide Sequence Number=SeqID_60692
atggtgctggtcgtcgaaaggaccacaccagaaggccaggagcctgaggactcgggaccagctgcaggggtccggaccgttcagaggccggtctactacgtcagtgaggtcctccatgaggcgaaaaccagaggtgtcggcggtgtctgtgttgccgctcctgcatcctcgtcggtggccgtcgcgtaccaccagcccgacgaggtcatctgcgctccatcttgcctcctcccaaacgagtttgattctggcgagacggctaaagcttgccccgataaatga

SEQ ID NO: 17318 - DNA, 501 bp, Zea mays
  Peptide Sequence Number=SeqID_60693
atgggctgggacctgtggggggctttacaaggtgtagggttccttgctttccatggccatgttgcgctgtgcttccaaagcatatggcacattggcacctcgctcgccttcccgtcttggccgaggcgtagccgccaattgcatgccgctggaatacgcatcccttgtggcttgtggttcgtggatgtccatgcatgcaaggttcttctgtcattctgtgccgtcgtccctgcactgcaggctaaggcgtcgtacgccgtggcaaacgaggctctggacctcgaggaagacgacctcgcggacgaggccggcgacgacgccctgttcttcttcttcgccttcgtcttcctcttcttcgccttcctcggccccctcggcatgccgggcctgtcgttgtcctggaagatctcgatgggcactagcatgcttcttggctgctcaaagtctgcgcgacgaattgaaaattttagtacattcagctcgggaaggatctgcgcgtag

SEQ ID NO: 17319 - DNA, 546 bp, Zea mays
  Peptide Sequence Number=SeqID_60694
gatcagcttgattcgttcgccacccccgccgctcggccgcccgtccccgtccccggagagttccccctccccctctcctccctcccccatctcccctccccctttcccctcgccgctcggccgcccgccgcccagctcggctgccatggccggctcggccgcccccgcgcgccctgccccgtgcccgcccggctcggccgcccctgtggtcgcccggcctcggccgccccggccccggctcaaccgcccgccgcccctgcgcgccctgccctgcccccggacggctcggccgcccctgcgcgccagctcggccgccccctggccggctcggccgccccctgccccgcgccccccgccggtttggccgcccttgcccagccgcccctgcgcgccgccggctcggccgccccccgcccctgccccaggccgagatactttggtacaggtggttatgagatcgatgattctggttatgactatgatgctgtcgaagatgaagctgtggaaggagacttccaggagttccaagattacgacgagttctag

SEQ ID NO: 17320 - DNA, 435 bp, Zea mays
  Peptide Sequence Number=SeqID_60695
atggtctatttcatgtaccacaatttgtgctctaaatgttgttttgttattccagaagtaaaagatgcaattacttccttaaacgctaagaagactatcaataagcagaaaaatacacggagtcggcgtcagaagaaactgaaagcatatgacctctcagcactgtccgagtccctcccagaaccaggtgcaccaaagcagaagcctgaagcaaagctgaactgcaaattacgggaggctgctcatctcaaggctgtgctgggaaagatgcagttccagcttgacccatttgctgcgatccatcagcacctgctagcaacgcagccacctgcagctgcaaaggacgatgccgtgaagcaggggaaggactccaagaacaagaaaaggaggaggaagaagggcacatcatcgagctctcaagcaatggatatatga

SEQ ID NO: 17321 - DNA, 666 bp, Zea mays
  Peptide Sequence Number=SeqID_60696
atggtggtggctcggctgggaggaggtagcggtagcgcggcggcctcaatctggatgcgatgttgcgaagggagagtgaactttgctccaaagattcagaagcgaaagctgctagtcggagctgcacaactgagagaacagttccagaggagctctctctcttcctgtcgaagggtttcaccagtaatggcgaaaaagatgaaggggatcttcaaaggactgaagataatctctcaaatgttcgtgcacaaggagcacgagatggagatcgggtaccctaaggatgtgaagcatgtggcacacataggtctgggcaccagtgacacatccccaagctggacggctgaattcaaggggacagatgattcatcagcaggctctgtgaggagcacggctgcgcagtcacggcagacttcttgggcctctgcagactttgagcagccaagaagcatgctagtgcccatcgagatcttccaggacaacgacaggcccggcatgccgagggggccgaggaaggcgaagaagaggaagacgaaggcgaagaagaagaacagggcgtcgtcgccggcctcgtccgcgaggtcgtcttcctcgaggtccagagcctcgtttgccacggcgtacgacgccttctgcgagtcccggagagggttccgggtcgcctga

SEQ ID NO: 17322 - DNA, 591 bp, Zea mays
  Peptide Sequence Number=SeqID_60697
atgggggctgggtcccacacgtcatgcaagctggcccggacagaagaagctaaaccgccgcacacggagcgtgtaaccgcccagcggttacaagcactcctccaccttcgcctaaaccagcgggtgaaagggcggaccgccatgcaggcgacatgcaactgcaccacagggacacaccctttcgacgcgtccagcatggaggcccaggcccacacgtcatgtaaccggcgtgccggttactacgtgcgaaaaactgcaccgccacttacgccaatgccgcgccttctcgactgcggagccggtgccgcgactcgaggcaaccctgcgcatggcccaacagtgccaaccaagcgcatcggtcacggggaccgggaaaggggatactccgaaagggatccttctccgcaaaggaagcgggccccaagccctcctactgatcaggggttcgaaggctggcccctcagaagggttcgacagccgcctcagagcactcgggctccgcgcccactactgatcagaggttcgaaggctggcccctcggaagggttcgacagccgcctcagagcactcgggctccgcgcccactactga

SEQ ID NO: 17323 - DNA, 438 bp, Zea mays
  Peptide Sequence Number=SeqID_60698
atgcccggattcgcgccctgctcgcccagatccgaccgtgactttgatttcccaaccgacgcaggagcggtgggtctgaccggccgcgacctatcttctcatgggcgcttgctggctaagcccacaaagagtgcgaatgggcaggtctgccagatttgtgttgactctatatgtgtttcagccactggcgatgtctttgttgcctgcaatgagtgtgccttccctgtctgccgcccatgctatgagtatgagcgcgagggggaccaatgctgcccccagtacaagactagatacaagagacaaaaatgttggtttcctggcaacttctttgagtgggactacaaggacaaggatggtgtcaagggcctgtgcgtcgtgggcgccatcaacaactatacctcccagctccccacctatgggagatcttctcccccataa

SEQ ID NO: 17324 - DNA, 207 bp, Zea mays
  Peptide Sequence Number=SeqID_60699
atgggtgaggaagaaaggggaggggacctcaccggggacggggacgtgcggccgagcggcgggggcggcgctagggcaggggcggcgctagggcagggggcggcgtttggggcgcgcgggggggggcggctgggtccggctgtgctcggccagggccggccctacggcgcgggagagagaaaaagggaggggatagagtatgactga

SEQ ID NO: 17325 - DNA, 2844 bp, Zea mays
  Peptide Sequence Number=SeqID_60700
atgaagctggtccaggaactccattctaaacttgatgaacgctcaattcaagacgttgaacaactgcaaagttttgaggatgatgtacagtttgccaagactgctgctatagctgcggacgacagtagaaaagcagctttccagctagcatttgacgaggatcagcaaattgttgcagacaagtggattcatattctccgtgctctgagtgatgagagggggccatggtctgctgctccttttccaaataatattgtgacatactggaaacttgacaaaactgaagataaatggcggcgccgactgaagctcaagcggaactataagtttgatgagtgcctttgtcatccatcatccatcaaatctagtaacgataatgctgccccaactgttgacccatctgctaatgccaagataacagaaaaaatgaagcacttacttttgaaaggagtgcgtggaattacaggggatatcagttctgaatcatgtgaggatagcaacgacatgattgatcctccccagaatgtcccgccagagaaccacactgttagtgatacttctgattctgcagattcctcagattatcctgctattgttcaaaatagaaaagaaagttcatcaaccagtagtgataatgattatatcgaggtgctatcatcagttcactgtgttcttgtaacccccaaaagaaaactagctgggcaattgactatcacacgaaatgccctacatttttcttttgaatttctagttgaagggactgggggatcatctgttttcgacagatttcatgataaaaaagattcagactccaagaatgagatgggaggtgtggaaaaactgaagggcaatcttgatggaggacgaggcaatgctgctgaatctagcgacactcaaattaaaaatcaatctggtaaaatcaaacaccatagaaggtggaaaataactaggataaaagcagttcattggacacggtacctactacaatatactgccacagagatattctttgatgatgcaaacgcaccagtatttcttaacttttcatcccaaaatgatgctaaaagtgttgggtctcttttagtttccctgaggaatgatgctttgttccccaaaggaacaaccagagacaagaatagtttaatttcctttgttgacagaaaggttgcccttgaaatgtctgagagtgctagggaaagttggagaagaagagaaataagcaactttgagtaccttatgattctcaacactcttgctggacgatcttacaacgatttaactcaatatcctatatttccttggatattggctgactactcttcagaaaagcttgattttaacaaatcatctacattcagggacctttcaaaaccagtaggtgccttggatgcaaagcgctttaaggcttttgaagatagatatcttaattttgttgatccggatataccaagtttttactatggatcccactactctagcatgggaattgttctttattaccttctaaggcttgagccttttactgcgctgcaccgcaatcttcagggtggtaagtttgaccatgcagatcgtctatttcagagcattgaaagcacatacagcaactgcctatcaaatacaagtgatgtcaaagagcttatacctgaattcttttacatgcctgagtttcttgagaattcaaattcatatcaccttggcataaagcaggatggtgaaccattaggtgatgttggtctccctccatgggcaaagggttccccagaagaatttattcatatcagtcgagaagcccttgaaagtgaatatgtaagctctaatctacatcattggattgatctcatatttggttacaagcagcgaggcaagcctgcagttgaggcagcaaacatattttattatctgacatatgagggtgccgttgatttggagaacatggatgatatgttacaaaagtccgctattgaggaccaaattgcaaattttggacaaacaccaattcaaatttttcggaagaaacacccaaggagaggtcctcctataccaattgtgcatccactatattttgcgccacaatcgataacagtgacttctgttgtcccgaccatagtcacccctttatctgtattattcattggtttgttggactcaaacgttgtcatgatgaatgaggggctcatactctctgtaaagctttggctaacaacacagttgcagtctggtggaaacttcacattttctggatcactggaacctttcttcggaattggttctgatgttatttctccgaggaaaattggcacttctttggctgaaaatgttgagtttggaagacaatgcttagcaactgttcaaattcgtggtgacaattacttaattttgtgtggtaattgggagaatagtttccagatcatatctctaagtgatggaaaaattgtgcagagcatccggcagcataaagatgtagttagttgtgtggcagtttcatctgacggaagtgtgattgcaacgggaagctatgacacaactgttatgatctgcacggaattagacattgttatcagtgggtcaaaggacgggacttgtatgttccatacactgcgtgaggggacatatgttcgatcgattcgacatccgtcaggtgctggtttgtcaaaaatggtaacatcacagcatggcaggtacgagggagctgggaaaacaataacttccttagttgtgactcctgaggagtgcttcttggcgggaaccaaggatggtagcttgattgttttttcaatagaaaaccctttgcttcgtaaaaacgccatgcaacggcacaaggcaaaaccttccattggtggttag

SEQ ID NO: 17326 - DNA, 288 bp, Zea mays
  Peptide Sequence Number=SeqID_60701
atggcgggcggaaaagagctcgccggagctaaggaggggtggctagccggtgatggatttgagttagggatcaaggtgaacaggcttgatctttggctcaagccttccccccttaaaggaatctcgtcccgagattcgagccagagtcctcccggggtgaagcgaaggattcgaagggcaggaggaggggttgggtgtgattacgtaccagcttccttaggtaggcaatcagggaagttggatctcaagaattcctcagtttcccaagtagcttcttcctctgagtga

SEQ ID NO: 17327 - DNA, 153 bp, Zea mays
  Peptide Sequence Number=SeqID_60702
atggcgggcggaaaagagctcgccggagctaaggaggggtggctggccggtgatgtgttgaacctttgttcattgatcatttatacactattcaagtatgttcatcatactgaatttcctgttcaacacttagcaaacttgttagacctttaa

SEQ ID NO: 17328 - DNA, 240 bp, Zea mays
  Peptide Sequence Number=SeqID_60703
atggctaagttgaacttcacttcaaccggggtccagggcaagttcaaccggggtccagagaggttcaaccggggtccagggaaagttcaaccggggtttttcctcggacctcactggtcaataccagttgaaccggtcctaggggtggttcaaccggtgtcagggtcacctgaccggcctgacctcctgactggcagactgactgtcaatctggccaccaggcagttgaatcagccctag

SEQ ID NO: 17329 - DNA, 3075 bp, Zea mays
  Peptide Sequence Number=SeqID_60704
atgcagaggaagtacaagctaacgtgccctgagcagtatgaccttttgatctcagccgagatcccacacaacaagtaccctgaactacgaaagatggttatcaagcatatgatgcatggcccgtgtgggtcgttaaaccctaactgcccatgcactaagggccatgtatcatgcaagaatcattacccccggcctttcagtgacacaaccttgcaagggaaggactcatacccgatttacagacgtcgtgatgatgggcgtaaggaaaaggttcgagggtgcgaattggacaatagatgggttgtcccttacaacccttacctccttcgtctcttcaactgtcacatcaatgttgaggcgtgcgggagcatcaaggctgttaaataccttttcaagtacatatacaaaggccatgatcgtgcgtctgttgttatgagagatgcgagcaaggcagatgatgatgtagatgagatcaagcagtacagagatgcaaggtgggtgactcctccagaagcgttatggaggatatacggctttgagcttagtcagaactctccacctgtgatgcaattgcaactccatcttccaaacatgcacatggtggcgtttcacgaacgacaaatggtcgagcgagtcgtcaaccgtccaggtgctgataggtcaatgctcacggcatattttgaagcgaataggctacatgagggggctcgtggcatcctatatcgtgacttccctgagtggtacacttggcaaagtggtaagggcaaagtatggcaacggaggaagcgtgatacgggtggacaagtcggtagaatagtctctgctcatcccgctgagggggagcgctactatctccgtgttctcctaaaccatgtgacttgtgccacctcctatgtggatctaaggacagtagatggtgtcccgctaccaacttttcgtgaggcagcagagagaaggggactgcttgagtcggacaacacactggatgactgtctcactgaacgtgctcttttccagatgccatcggcgctgcgacgactttttgccacaatactggtgtactgtgagccaagcgacgtggcggtactctggcagaatcacctagatgttatgtcagaggactatcaacacaggagtcagggtaaaactcatgttgagcagatggtattgattgacattaggaacatgctgcagtcaatgggaaaggacataaagacattccctcttcctcctatcatcgacgcatatgacgatgctattggtactgctagggaggtctacgaggaggaaagtatcgaaccagcagtgggagatgtggctctcaaagactctcttaacgaggaacagagggtcgcctatgataagattctatctgccgtggacactgataagggcggattgttctttgtggatggacctggtggcaccgggaagacttatctatatagagtgctgctcgcgacgctacgcagccagggcaagattgcagtggcaacagctacatctggcgttgcggcttccataatgcctggaggaagaaccgcccattcacgcttcaaaatacctctcactattgacgatggcgctgtatgtagcttcacgaagcagagtggaaccgcagagttgctacggaaagcatctctcattatctgggacgaggcttctatgaccaagagacaagccgttgaggcactggacaatagcatgcgcgatataatgggtcggcccgaactaccattcggtggtaaaaccattgtcttcggtggggatttcagacaagtcttgcctgttgttcgtaaagggtcaagggctcaagtggtcgcttcttcgctacggatgtcttacctatgggagtccatgtcccacttaaagcttgttagcaatatgagggcaaaaaatgacccttggtttgcggagtatttgctgcgcgtaggcggtggaactgaggacacaaatagtgacggcgacatctgtcttcctgacgaggtatgtgtgccttatagtgggagtgacaacgatcttgacaacctaatagacttcgttttcccaaatctcaacgaaaatatgtctgattcgacctacatcacttcaagggcgatactgtcaacgcggaacgactgggtggatatgataaatgctaagatgatcgatcgttttcaaggggagcatatgttgtaccatagtttcgatagcgccatggatgatcctcataactactaccctcctgagttcctaaacacactgacgcctaatgggctgccaccacatgttttgaagctcaagattggatgccctattatattgcttcggaatatagaccctgcgaatggactttgcaatggcaccagactggtcattcgtggtttccaaagaaatagcattgacgcagaaattgtactgggtcagcacgctggaaaacggattttcttgccgcgtatacctctgtgtccctccgatgaagagatgttccctttccagttcaaaagaaagcagtttcctgtacggcttagctttgcaatgactgttaacaaagcacagggtcagactattcccaatgttggtgtgtacttgcccgaaccagtgttctctcatggccaactatatgttgctctatctagagcgatagcccgatcgaacataaagatccttgccatcccaaccgtcgatgggaagaagagcttcaacacatctaaagatgaatcctctaaaaccgtcgatgggagcagagaagcagatgtacgtggtgtaagaccatttggagtatcgctgttgattgctgggtatgatgacaatggcccacagttgtatcaggttgatccctcaggatcatacttctcctggaaggcatcagccatgggaaaaaatgtgtcaaatgcaaagacatttcttggaaagagatacacagaggatatagagcttgatgatgccatccacactgcaattttgactttgaaagaaggatatgaggggcaaatttcctccaacaacattgaaatcggaattattcgagctgaccgtgagttcaaagttctaagcccatcagagatcaaggatttcttggaagaggtggagtaa

SEQ ID NO: 17330 - DNA, 321 bp, Zea mays
  Peptide Sequence Number=SeqID_60705
atggaccctttagacatgtcaaaatcgctgtatgaagaaacacaaggagaacgaaggatggaacagagccgaagctgtgaacagtactcccgtactgttcacgctgactggccatttgcttttgcgtcacgcttgtacttttgctttctttcaagccaaaggtattttcggattcagaattatggatatggagcacgaccaggacgaaggctgagccaggcgaaggttgaaggcagccgaagctgtacgcagggaagcttcggcgcgatagcacaagggggaaccgacttaaagataaaaagacttcggggtcctcaatag

SEQ ID NO: 17331 - DNA, 81 bp, Zea mays
  Peptide Sequence Number=SeqID_60706
atggacgggcttgctacacaggttcactgcgacgtgctaagcttccaagacgcgtggcgcatgatcgctctacaaatttga

SEQ ID NO: 17332 - DNA, 210 bp, Zea mays
  Peptide Sequence Number=SeqID_60707
atggcggaaaacagattttggagaactgagcgatccagtgactctggtgaacaattggaggcaaatgctggtgctatgaatggatcccttgagtggtggccagtgaatttgagcttgcacggtgacggtcggagagaaggaggtgcactggcgcaagcgtttggtggcagttaccgtggcaagctcaccggcgatcaccggatcggctaa

SEQ ID NO: 17333 - DNA, 252 bp, Zea mays
  Peptide Sequence Number=SeqID_60708
atggccatgatgggttcaccatcaaaaaagatgtacctctgccagttttcccctttatggagatatgccgccgcgtacgaggaaaaccgcatgtttactgcaatacattacatgaggaagttcatgaattttattcgtgactgcaccccgacgtacctgccgaccctgtcggaatgggagctggaccttctggaacaacaggtgaagcacttggtggggaaatggatcttttcaagccccgtccttctatga

SEQ ID NO: 17334 - DNA, 306 bp, Zea mays
  Peptide Sequence Number=SeqID_60709
atgtcggggggactaagaaatgaaagtgcttctaagcttgaaaaagttgaggttgcctcgacttcatcttttggtgcagatgttgatcctagggcaatagaccttccgatgagaatcaccgaaaggatgttcctcaaaatgaaggaagatgaggcaaagaacaagattgaagaagaagaaaatgatcaatggagaccaaacgacgaatccacctcttcacaagctaagcaagaaaaatcggatgagcttgctcaaactcattgctgggggccttcatctatcgaaggtcctcaaaaacatgattaa

SEQ ID NO: 17335 - DNA, 270 bp, Zea mays
  Peptide Sequence Number=SeqID_60710
atgatgccatctcgaactcgtgcacatgacgatgcgggaacatcccgcggtcaagaagatacacccaatccaccaccgcaacaaggcgggagggcttatccacaaggaccccgtgaaactttgtacttggatttcgcggaaacccgtcccccactattcgtgaaagccgaagatcccctcgaagctgacgaatggattcaggtcattgagcagaaatttggactcatccgatgcatggagacccagaagccattgtttgcggctcagtag

SEQ ID NO: 17336 - DNA, 603 bp, Zea mays
  Peptide Sequence Number=SeqID_60711
atggccatgatgggttcaacatcggacaagatgtacctctgccagactaataccagaaaggccaacacacaatgggagtggagagatggcgatagtagcgtgtaccctccatggcaagaggctggacggtggtgtatctgtgctctcggttggcgtgaacccagtctggtcttaagaaacccggtggttctcttcttgaaagaccaggacagtcagcgcatagctgaattatcagctgacgtcaaacgcttgcaagatgagcttgctgaacgagatttggcggttaattgggcggtcaactcacgttcggttgcttgggaccgcgaagcaaaagctcgagctcatgtgactgagcttagtgcggccctcgacagcctgcaagtatattgcaatactttacatgaggaagtacatgtactgtatgctcgactgcacccggacgtaccttccgacactgctgcaatgggagacggaccatcgggaatagcaaacaaaggacctgatgaggagttggatctttttaagcctcctccttccatgaaccttgctgatgaacgatctcctgcggctggaaatggagcgacaaaggatgatgaagactag

SEQ ID NO: 17337 - DNA, 324 bp, Zea mays
  Peptide Sequence Number=SeqID_60712
atggtgatagggcaatcccggcggtgcaggccgccattctcgaacgccaaggccgccacgcacccagcagataccagagaatcacctggagggtcttcgagggtgcgaccgcgatggattacagaatccctccacggctgcgccagtcttcccccgaccaatttctttcacctgtgtgcggattggatgaagggaccgagggagtacgtcaacgcgcctggtgtatatgtagatgcagttgtggacattactccacaacccatcacactgaaacaaagatccaaatcagacaagtatcataagaacaaacattcaagcatataa

SEQ ID NO: 17338 - DNA, 549 bp, Zea mays
  Peptide Sequence Number=SeqID_60713
atgaacgactgtgacaccaatcggcctcccccgagcaccactgtcaaattgaacggagctacacggtgtgcgcggcatcacggtcacaatggatgtattcttaccgacattaaggtacggacgaagcttggccacggcgcacggcggatgacgaccagttccgatggtgatagggcaatcccggtggtgcaggccgccattctcgaacgccaaggccgccacgcaccgaacagataccagagaatcacctggagggtcttcgagggtgcgaccgcgatggattacagaatccctccacggctgcgccagtctttcctcgaccaatttctttcacctgtgtgcggattggatgaagggaccgagggagtacgtcaacgcgccagaactcgggtcatccggtgtagggaggtgaacctgacaaaacgggcccgcatgccggtgactgaggagttcgcgcaggaggaagagtggcggaccgcgtggggtccacatgtcagcgcgcagaattgggtggactggcgtgtgcggtttgtggaagaagtgggctga

SEQ ID NO: 17339 - DNA, 570 bp, Zea mays
  Peptide Sequence Number=SeqID_60714
atggaggtcgccggcgcccgcgagcccggtagcggaggaggaggaggtggcggcggtggcggaccagccccgttcctgctgaagacgtacgagatggtggacgacccgtcgagcgacgcggtggtgtcatggagcgacgcatccgacgggagcttcgtcgtctggaaccagcccgagttcgccgcgcggatgctgcctacctacttcaagcacaacaacttctccagcttcatccgccagctcaacacatacgtgcgtaacaacggctccacctccctgctctgcgctgtctggctcttagcgccgaccgccgagcgcgtgacggctcgccgcgcgcgaaccctagttcgccacttcgccggctcgccgcgcgccgcgccccgtccgaccgtccccgtcctccgcgcgccacacctcgtccccgtccgccgcagcccagcctccaggtccgccgaggccgagcgctcgcccagcggccagcgcggcagcggcctagccggcagcccagacgcccagtccgcgtccgccgagcgccgagccggcgcccaccagccagccgcacgcgcctag

SEQ ID NO: 17340 - DNA, 522 bp, Zea mays
  Peptide Sequence Number=SeqID_60715
atgtcgaaggtcacttgctcagtcatcgcattaggggttgtgccaagggataacaatagctctatcttgcctaatggaaacgttcttttgcttctgaagccatacaaggggttatcagttggctggagcagactatggttccatcctgctatattacagtttataaccagcgcgtttgcatggggcgcgctgcgaaggtccacgtctattgcatcaaagaggggggtggaagtggcaatatttcttggtgttgcagttgtgggtgatgagggaatctttggttgcagttttgctgttattgggggtggtgtgggtgttcgttttcatagtggtgatattgagagtggtgtctgctctatagttgtgtggccatggtgtagcttggagctgtgcgaagagggggttgcgctcgtaaagttgtctgattctaacttgcttgttggttctttgcctcttggctacgaggacctccctttgcctctgaagatggccccatctaatgcaaaggccgcacaattttag

SEQ ID NO: 17341 - DNA, 90 bp, Zea mays
  Peptide Sequence Number=SeqID_60716
atggcgctctcagctatggcttgggtaccgaggaaaggcataggtcttataggaggcgggaccgagagctcggagttcacggcgcgctga

SEQ ID NO: 17342 - DNA, 114 bp, Zea mays
  Peptide Sequence Number=SeqID_60717
atggcgctctcagctatggcttgggtaccgaggaaaggcataggtcttataggaggcgggaccgaggttaacaacaataaagtaaacttaccatttggaacattaatatcataa

SEQ ID NO: 17343 - DNA, 342 bp, Zea mays
  Peptide Sequence Number=SeqID_60718
atggctgacaaggcgatcgtcattccgccgcgcgacccgtggcctttctccaccgtttctgtggaggatctggaggcccttgtcaccgatggtttgctctgtccttgctcctgggggccgaaccatagttaccctaaaatcacttatccgagcgtgagctacctttcgcggaaggtgatgagtaaggcgaccgctcgggccgggacccttgcggagagcctggttgtggctgtcgggtctgcccggtctacccaagccatggcctcacagcagcgtgcccaggcggaagggctcgagacggctcttgacgagtccgtcaagaactataaggcgcttgcctag

SEQ ID NO: 17344 - DNA, 639 bp, Zea mays
  Peptide Sequence Number=SeqID_60719
atgggaggaattttgtttgagcttgtgggcccaattcatatcagtcgcgaccctgggactatcccacgtcctgcggcgagcttgcagcgctgctgcgcctcggatacgcggacaagtcactacttgggactatttacacccctaaaagggaaacacacagatgaagttgctaaatccaaacaatcaattgtctccacaaaaacaaagaagaaacttcagagattgccagatgggtgccatcctgattttgataatgatcatctgtgttctgtaaataatcatgacctgcttcctgaaataagtactccaagtgttgaccttcatctacttcctgagacaggagtggaaaacatgaggacacctaaaagtcttcacgccgaacttaagcatgagctgttaaagctaaatacggtgttaaagctaccagataatgtactctttctggccaaccagttccttgaatatcttttaaataatcatttagttgtgcgggagccacggagcatactgcatgcgttcaacatagccttgtgttggcgtgctgcttcttttctgaaatacactgagttgaatcgtcgagaatcacttgcccttgcttcagatggattgaattatgaatgcaatgaggctccatcatag

SEQ ID NO: 17345 - DNA, 276 bp, Zea mays
  Peptide Sequence Number=SeqID_60720
atggccgcgctcgtcgtacccaccgccacgccagacgttcccctgcctctctcccgcggatgtcgcccagcaccgaccagcctcatccatccaggagctgccctcgaatccgcgcccctaatcagtgctctgtgttccccttccctcctctcccgcacgttgcgctccttccatcttcgccagcacaccacaattactattaaagagtgggaaatgggtgccataggcgatgtcgtcacccaccgcgcggacaatggaggtcacaacatcgcctaa

SEQ ID NO: 17346 - DNA, 390 bp, Zea mays
  Peptide Sequence Number=SeqID_60721
atgggtgccaccggtctcccagccactgacgggctctcagccatttcaagcgtggatggcaccgccaccgacggggtgggtgccaccacctcaggggtggccagcacaacagtatccgtggatgcattcacagcctcctcatcactatggatcacagggttcagcgtcacatgctcagggatcggagggtgctgtcaacgtccaagacttcttcgtccatggttctggaggcagtggccaaaactcccacaacccgcaggagccgacgaaaatactgcccagctattttcgtcggccaccaccgggaccgacgaaaatatgacccagctattttcgtcggccaccatcggggccgacgaaaatcaggctcctattttcgtcggccactga

SEQ ID NO: 17347 - DNA, 2449 bp, Zea mays
  Peptide Sequence Number=SeqID_60722
gagggagcgcacggctggaacatcaaatcaaactcgggcagaagggctcaccgctcacgcacggctgctcgcctgctcgggctgtcggacactcggcggctgtccggctcggtctcggcgggcggcggctccaggcgactaggcgaggtgcggcagtgggccagcgggcagtgggcgtgcggcggccggcggcggtgctccgggcgtcgggtcggggcgtggacgcgtggagccgtcagccgtgggcgcctgggcggtggcgcagacgcgcacgcacggtgccggcatgcagcgtgccgcggtgggcagtggccggtagacggtggccgtgtgcgcccgtgcgtgcctgctgctacggctctggctctcctcgacgcggcggcggctggacggctgaagcggaaggccttcaacggccgcggcccgcggggacgaatcggccaggcgaataggcacgcgcgaggcgacaggtggtggcgtactgcgtgcccgccaccgccagtcccgagcttcggcccgccagtggccccaacctcggtgcgagctgaaaaacacgtgccgggcttgccggctggccgtggcctcgccctggcggtgaaatgcatcgaacgcgcaacgcgcgccagggagatccctacgactgcacgagtggagggtccaccaggcagtgagaggcgcggctccggcgggcggaagaggagggagaggcaggcggcggcccccggcagttcctccgtccgcggagcccagagggaggagggggaggcctgggtatgtggttggtctgcgttcgccttccgctctcctgcgtgccgaaatgtgggtcgtgttgcggggagcctcgcggggttcgccgagggccacaaaggctacaacgaagactttgctctgtgggaagcagacctgttgatacggccgattaggaccttgtccgctcggtccatcgaagaccctaaagactacgacgaggcctttgttcgaacgacaaggcgagggaaggccctgagaggtgggcttcacttatctgtgtcgaggacacagagcctgattgaatgtggcggtcgtactaccgaggactttgccaatccaaggacatcccagaagcccaaggagatcgcaagggatagcgtcgaggctactgcacaaatgtggggtccccttagttggagggaggctcagctagtcaggaacatgcgcaaactagtgctggtgcgggtggaatcttccattgagctgggtactgcagaagtgaaccctgtaccatctgaaaagttatctgctaactcacaagctgttagagatgatgctggagcagttgaaggtattgacatgaatggaaaacctgtccaaaaacctaagaggaaaaaacataggccaaaggtcattaaagaaggacaatcagcaaagttgcagaagcctaaaactccaaagcctcccaaagaaaatgggaatcagcctactggaaagagaaagtatgtcaggaagaagggactaagcacaccagccaaacaaattccatcagaaggtgctgatacacacactagagctaaaccaggaatagcccaaagatgtttggactttgatgtggaggaccaacatggacatttggatctggtatcacaaacccaggaaacggagatacagactggtcctggggacacacagccatcaatatctggagttgaaagaagtaatgcccaggagggccataaccacagcactgctgctactaatgagcatatcagaactacaagtgaggaagttgttagatcctttacccaacgagcaagtgaaccaaccacacatgggaactacaatctcaactcttctagagtaactgcagaagcaaactccactgagaagccaagaaaaaggggccgtccaagaaaagtagtaaaacccaatggggagccaaaagaaagaggtactaaagggaaacaaaatgttagtcatgaaaaacctacatcgcaaaaaggttcacatactgacattttgaaaactaatggtatttcttatgcttctgaaccttccactggaattactcctaggatggctattgtggagtcgaaaagctctgatcaagataaggaaattcatggaggtgtcattcctcaagctacagcaatatcagttgatcttttagatggcataattcaaaagattaagctcttaagcataagcagaccagacaatgttgtggcagagataccaaaagatgctcttgttccttatgaaggtgaatttggtgcactggttgcatttgaggggaagacaaagaaaaaccgttctcgggccaaagtgaacatcgatccagtcaccactatgatgtggaacttattaatgggaccagatatgggtgatggtgctgaagggttagacaaggataaagagaagtggcttgatgaagaaagaaaagtgttcagaggacgtgttgattcattcattgctc

SEQ ID NO: 17348 - DNA, 2271 bp, Zea mays
  Peptide Sequence Number=SeqID_60723
atgagggggttgctggcctcagtgatctccttggactttttcctgctgtcgagcaagctaaaatctgtgtgcgcggctatgacttcccagaggcatagccgatcacaggagaggtcaaaatcaaaggggttgacctgcaggagagttgcagtccatctgctgttctttttcatggttggcattttcattgggttcatgcctttgttctctgtcgatgtttacaagaaaatagtatccgaaaacgagaggcttccgttccatgatggtgtgattgaggtggaaatgatgggcaccaaagttaaggagttggagacagttgtagtagagaaagaggtcgaactgattgacgagcctcaggttcaagagagccctccagttcctgcaatgttggatgatgaggcagattttgctgaatcttcacctgcattacctgctattgaagaatctgacattcctgtgaagaagctgctgataatcgtgacgatcacttctgttcggccacaacaggcatattacttgaatcggctagcccatgttttgaaagctgtacaggcacctcttttatggttggtggtggaatggcctgaacagtcctatgaaacagcagaaattctgaggtcttctggggttatgtacaggcatcttatatgtagaaagaataccacgagtgtacgaaagattgctgtatgtcaaaggaataatgcaatctatcatgtcaaaaggcatcaccttgatggtataatgcattttgctgatgaagagcggtcatactcagctgatgtatttgaagaaatgcagaagatcagccaatctacaccgtccatctatatgcgtcaaatcatcaccgtccgtccgtcgcctccgcttcaagcctccgacaccgtcgtcgcgcctggctccccctcctcctcgccccactccccctggacgcacgccacggtgtccctgccccgctcgcgatgcatcccccgaaaccctaggccttccgcgatgaggagtcgcctcctcctccctccgtcgtggcgttctcgggcgccgcctccgcgtcaacgccatcgccgagatcgacctctaccgcctcgagccccacatgcgcagccgccgccgcgggagaggtgccccacgcctcggccttcaacgacgaggagctcgtctcctcctatctccgtcaccgcattctcggctgtcgcctccgcgtcgacgccatcgccgagatcgacctctaccatctcgagccctaggacctcccctccctcttccacatccgcagtcacaacgccaatgggtagttcttcgcccatgcggtcgaggcggtcccagcaacaggaccaaccacgcacactcgcatctcgctccttgatggaccacgacgtccgcgccgacgcgcacctctacaacgcgctaatgaaggcgaacgtcgcggcggacgaccccggtgccgtcctcagggtgttccggcaggtttcagttactggtacattcttggtgaataaagaacatgtggaaagtcacaggtggtcatgtatgtttggggatgttgaagtaccagctgaggttttgaccgatggcacgctacgctgctatgcaccagcacaccaatcaggaagagttccattttatgtgacctgttcaaacatggtggcttgtagtgaagtgcgagaatttgagtatcgtgattctgaagctcattacatggagacttctcgttcccaagccaatggtgtaaatgaaatgcatctacacattcgtcttgagaagctactcactttggggccagatgaccatcaaatgcttgctataaattccttaatgcttgatgggaaatggtcaaatcaagaatcttctgtcaaggaagtagtttccactgctagggtccaaagtttaaagaaactggtgaaagagaagctgcatcaatggctcatctgcaaagtaaacgatgatggaaagggtcccaatgttctgtgcaaggaaggacagggtgtgattcatttagtagcagcactgggttatgattgggctataagaccgataataattgctggtgtcaatgtgaacttccgggatgctcatggatggactacactccactgggttgcgtctttgggaagcaaatggacacaagatcccgatgcggcagtggcggacagcaacgggcgctcaacgccatcgcgcctcctgcgaacccatggtgagatgtgtggtctcgatctagagtcgaaggacttccccaacaccctttcctccatcggcgcgacatcggccagctcataa

SEQ ID NO: 17349 - DNA, 660 bp, Zea mays
  Peptide Sequence Number=SeqID_60724
atggggcaagtgaacagggagaggctggcggagtttctcggcgagctgcaacggaaagaggacacgaacgacaggtacgtggccgcgctgaggggggagaccctgaccaggaagcgctacgagcgcatccagcccttgcctgccgccaacgcgcaagcgagccaggagactgccggagccagcgcggaggaggagaggcccaaggcaaagcgtattccgacagaccgtacaaaagctgatgatgagcatcagattcgtgggctcttgctttgcctttggtggttgaacgagcctgcctttggcgtggcgagatctgcttttgcctcgccttgggtgagcctgcctttggcgtgcctcgcgtgcgaggtgctggacgcatcaactgcccgggccgatcgaggccagatgtcacacccggattttagggatccaaaacccgggcgcgaatataatcaccaggaccgccatcacagcaaaatcctcccgagggccttcccaggaatcccttgcaggaccgccatcacagcaaaatcctcccgagggccttcccaggaatcccttgcacgaccgccatcacagcaaaatcctcccgagggcctccctacactgaccactcccctactgcccttgcccctttcgggtaaggtagtcctccactag

SEQ ID NO: 17350 - DNA, 363 bp, Zea mays
  Peptide Sequence Number=SeqID_60725
atggcccacatgtcggcgcgcgtcagcgtaaggaaggcgggagttgggccgcgtggatgggaaacgagagagtgggccgaaatggatttctgcggcccatgtgtcggtgagcaagtggagcgcgacctcgagctacccgagaagggcgacatactgtggcaggtccccagcgacgaccatgcagtagagcagtggcggctcgaggttgtgcacaacgtcgaacaccttaacacgacagtcaccgagccctcgcggtctatgttgggtctctgctgcgatagatgctcctacgtaaattacgtggagtctgttaggcagttcgtgcgtgtagccatagagacatgcaaaggcatgaccgcatga

SEQ ID NO: 17351 - DNA, 587 bp, Zea mays
  Peptide Sequence Number=SeqID_60726
atgagggctgtcagccagcgcctggtggcgcaccggacattgatgtccggtgtgcaccggactgtccgcaaagggaggattagggttgaaagagacccggctctttgtgggcgcctcaacgaggaagtagggcaccttggtgatgttgatcctagggcaatagaccttgccatgagaatcaccgaaaggatgttcctcaaaatgaaggaagatgaggcgaagaacaagattgaagaagaaaatgatcgatggagaccaaacgatgaatccccctcctcacaaggttcgtctttcaaatctacttctcatatgtgctttattgctaatgggagtgacagtgaaagcaaaagtgaggatgaggaggagcaagaaagtgatagtgaagatgaggatgatcttcaacaattcttcgctcagctaagcaagaaacatcggatgagcttgctcaaactcatgaaaagagcggaagaacaaaaagaaatgcttcataagcaagaagacttcctcatcagaaaaatcgaagacttagagaagttgaccaaagagcatgagaagctaaagtgctctcatgatgatttggtccaaag

SEQ ID NO: 17352 - DNA, 888 bp, Zea mays
  Peptide Sequence Number=SeqID_60727
gcggcggtgacaatggacgacctgctctccccgtgctcctccttttccccgccctcgccaccacccttcttctcccacgccggcaacccagtgatcgagttcgcatcctgcgaggtccccgagcaatggctgctcgacgacgtcgtcttggacaagaacgagggccgctacgacgacgtggacgacctgtggcccgtggcggggaggtcgctctccccggactccgagctctccgagcagccgcttcctactcagccggtgccgctgccaccgccgcagcagcagcagcaggagttgacgagcgtcacggccgcccctgcgcagcagcagcgcccgggcgggaagcggcgggggcggaagcccggcccccgcccggacggtcccacggtcagccacgtggaggccgagcgtcagcgccgggagaagctgaaccggcggttctgcgacctccgcgccgccgtgcccaccgtgtcccgcatggacaaggcctccctcctcgcggacgccgccgcctacatcgcggagctgcgcggccgtatcgcgcggctcgaggccgactccaggcgggccgccgccgcgaggtgggtcgaccccgtagcagccgcagcctcatgcggcgccgacgaggctgtggaggtgcgcatgctggggccagacgtggccgcggtgcgcgcgacgagcgcggctccgcacgcgcccgcgcggctgatgagcgcgctccggtctctggagctgcacgtgcagcacgcctgcgtaacccgcgtgaacggcatgacggttcaggacgtcgtggttgacgtggcgagcccgctgcaagtgcaagacgacgaccacgacggcctccgcgccgcgctgctgcagaggatgcaggacagcgcggctacctag

SEQ ID NO: 17353 - DNA, 207 bp, Zea mays
  Peptide Sequence Number=SeqID_60728
atggggcagcaggagaaccctctcccacggcgtgaagacgacgcgcccgtgttccgttcctcgaacggctcgcgcacgcacaacggctgccccgcgaaccactcgtcccgtcgcattaactccgcggcagggcagggaccgggaaaggggatactccgaaaaggatccttctccatgaaggaagcgggccccgagcccccctactga

SEQ ID NO: 17354 - DNA, 162 bp, Zea mays
  Peptide Sequence Number=SeqID_60729
atggccgccccgcgaaccgcatgccacgtcgcattaactccgcagcgagacaggcggcgcctctggcaggagaagcaagcgacgcttcgccttcgccataatgaccgcgtcaaaagagggaccgggaaagggggataccccgaaaaggatccttctccgtga

SEQ ID NO: 17355 - DNA, 270 bp, Zea mays
  Peptide Sequence Number=SeqID_60730
atgaggggttttaacaatgtccttatcaagttatctagtttaactggtactgattactctaggcttccatttgatgtttgtactaagctaaccaaggtatttcagttgtatgagaccaaatttggtgacacacgcatgtgcggcgcccaccaaccatcatctcacctatctgacatagacataaacatctttgaattacaaatgtaccttcaactggaaggagatgatagtacaagtgtgacgcaaaaagcgaatgccaagtcagcgtga

SEQ ID NO: 17356 - DNA, 810 bp, Zea mays
  Peptide Sequence Number=SeqID_60731
atggtccaagtagatatttatacatctgatgatcacaagctcttcacgacattgctttgcattgatgcaagcttcgtgatgatgtccatgtgccaccccaatgactggctgtccgagtcgtgcctcaaaccgttgccaccggagccgaagaagggtagcgaggtcgacgacgccgcggtgcggcagttcaaggagaaggccgttttgatcataaaggagtacttcttgaccgacgacatcatcgagatacggcggcccgcgtgctttggcccggcccggcaagataaatgggtcggcccgatggcggcccacgtatccccaaccgccgaccccgagtccccaaccctggtggcctggctcgacgccctctctgctctcggtctggcggcagcggcgccgttttctctctgccctccctgctcgtcggtcgtgctcgccctgctcgtcagtcgtgctcggctgctcgccctgctcgttgcctcatcggtcgtgctcgaactgctcgcctctgcgccctgctcgtcggtcgtgctcgccctgctcgtcagtcgtgctcggctgctcgcctctgcgccctgctgtcgattggggatctcgcgttctcttgtccatcgtgcggcacaccacagaccacacgtcgtctctggtgctccggctatgaaagagcttacgcttggggccatgaatgttttgaggattaggaaccttggagaggaccagcaaggacttgggaaaggcctaggtattgaggaggagcagcaagggcgtccacaacaggaaggagatcaagttcgagtcagctgtgactag

SEQ ID NO: 17357 - DNA, 387 bp, Zea mays
  Peptide Sequence Number=SeqID_60732
atggagcgcggagaagttgtgctcgctggtgacagaaaagggggaaaatggcgccgcgacggttctgggtggaattgggaggtgagattggggctacacggccgtggagatgtgaatacctcgccgtggtccatggcgctatttatagccacggcggtccggctaacgatcaacgaccgcggaaggctttgctcacgcatggcaaccacatatagaagaggtagagtaagggaggagcaaggcatggatgacaccgcggtggaattgaccgagccacggcggccacaggtgaataactccggacatgcccggctgaactcgcgagatggtgccacgttcgaagctatcctcccccagatcgattcccccactggaatttttgcctag

SEQ ID NO: 17358 - DNA, 375 bp, Zea mays
  Peptide Sequence Number=SeqID_60733
atgacgagcactgatgcacagttggcgcagcagcaaccactacaccaggggaagaagctccagcggagaccattcatagagttggtagagtgggtgaagccacaaatcctgacccaagggctttctttagatgggaaacgtgctgttgagcatagaaaacgtattcgcggacggtccggcctccggaccgtccacgatggtggcgcggatggtcctcaaatggtcggttctaaagatcacaccgatatcttcccagacaatatcctgaagccgattgttgaaagtctggcggccgatgagcaacaacaatacgaggactacatgcgtcaagcgaaggagaaattattgtcacaatacacggtggatcgccactag

SEQ ID NO: 17359 - DNA, 432 bp, Zea mays
  Peptide Sequence Number=SeqID_60734
atggccacgacgcgctggacgtcggtcaccccgcggctcgtactggccatgaccggcggcgactgtcaaattagctacgggaaaagggggaaaatggcgtcgcgacggttctgggtggaattgggaggtggagatgtgaatacctcgccgtggtccatggcactatttatagccacggcggtccagctaacgatcaacgaccgcggaaggctttgctcacgcatggcaaccacatacagaagaggtatagtaagggaggagcaaggcatggatgacaccacggtggaattgaccaagccacagcggccaccggtgaataactccggccacgcctggctgaactcacgagatgatgccacgttcgaagctatcgtcccccggatcgatcccccactggatcactcgagctcatctgattcaacagtgttgtag

SEQ ID NO: 17360 - DNA, 291 bp, Zea mays
  Peptide Sequence Number=SeqID_60735
atggagcacaaaaaccgtagctctcaagctcactcaaagattcctctccaaagatttgaaatgggagaggcaagagatgtgtgtgagggagagggaggtgtttcttgggttagaaatggagttcaaatcgtgctcactgctgtggggggggcggttgaaccgcccctgacagctcctggcgacctgtttgccagtctgactggcagactgcagatcagaggtcagaggggtcagagaccagctgaactgcccctcaggaccagttcaactggtcttgaccagagagtttag

SEQ ID NO: 17361 - DNA, 1092 bp, Zea mays
  Peptide Sequence Number=SeqID_60736
atgtcttctcctggtgcaaaccctcaccatagtcctcctagattcactagggctagtgcagccatgtcttctcctggtgcaaaccctcaccatagtcctcctagattcactagggctagtgcagccatgtcttctcctagtgcaaaccctcaccataatactcttgcagccactgctatcgtatctcatcaacctagtcccacaactattgttaacaaaacagttcctacggacaactcaccaggtgggcacagctctaggcaaagcaatgccatcattgagtcagctgagcaatttgatgctgctacttcagagggtaatccgaatgaaggagaactagttggtgacttagttccagcccttttagcgcccaaaaagaatgtccgcaagaaaaccatgggtcatggcttagagaagatgcttaataggggaaatcggttggctatccacgtggctgaagggaagaaaagaccggaggtcccacttcaagcagcgaagctggcatcggaaactggtgttgcccttagagacaacctacctatctacaaatcttggaagctttatgacaatgtcgtggggcaggcagaatcaaggttggatgtcgatgttaagaatgagggaccaagcaaagatgcatgcacatatatcataaagaggggagtgaggcagacgaggtataacctgaaaaggaagtacttcgacgagtcacttacaaaagaacagttgttggccatgcaacctccacctaaaatgaataaagaggattggactgggctggtagagtattggtgtgacccaaagaatcaggaaaaatctgctaagaacaaagcaaaccgagccaacgtgcagcttcaccaaaggactggagctaggtcctatatagcccatcgttacagcctgaggactaagtacaacaacatggagccagatgttgttgatttctttggggaatgtatgaatagtcctcgaaatggtcgtactccgcttgcaaatgagatatatgagcaaatggttgcagagaaggaaagagagctagaagaaggagaagcacaaaagtcaccctccaagattgttgttgatagtctcagctag

SEQ ID NO: 17362 - DNA, 555 bp, Zea mays
  Peptide Sequence Number=SeqID_60737
atgaaggccaccactcgtgcatcgccgcctcccaccaaggcggcggccgctaccgcctatgcttcttccgcgtgctcggcggtggcgacgtcattatcgtcgccttggtggaggacaagggcaaggaagatagcaagtcggagcagctgcaatcgtcggtggtggcaacatcgtcgtccatgccaaggagaatggcgtcgagctacttgtagtagaggaagtggacgaactcttcgtgaactgggatggctggaagagctcagagatggggaagggcgagtggacgagcggtggcaatggcgtcgtccatgccgaggagaacaacatcgagctgctatagtagaggacgcggaggaacttctcacgaactgggatggccggaagagctcagaggtggggacgtacgagtggaggaagaagcctatgcgggcacgcaacgacttgtggcagaggatggtggggagcgcgattttgtttggctctgaccgtttcgtgggcatctgggaaatgggcgaggcatcgctgtggagaaggccggaaacgaggatgaagtga

SEQ ID NO: 17363 - DNA, 2070 bp, Zea mays
  Peptide Sequence Number=SeqID_60738
atgcgagggaagaagcgaatttacaaagatctactccttgcctacaagactctgggcgtcgtattcggtggtcttgtcacctcccctctctacgtctacccttccatgaacctgacaaacccgaccgaagaggactatctgggaatctacagcatcatgttctggaccctgacactgatcggcgtcgtcaagtacatctgcatcgccctcaacgccgacgaccacggcgaaggtggcacatttgccatgtactccctgttgtgccagcacgccaacatcggcatcctcccgtccaagaagatatacaccgaggaggagcagggcctggtcccggctcggcccgtcgcggcccggaggcccagcaaggtgaggaggttcatcgagcggagcattacggcgagaaggttgctgcagctcacggcgatcctgggcatgtgcatgctcattggagacggcatcctcacgccggccatctcaatcctgtcagctgttgatggactaagagggcctttcccgtcggtcagcaaaccgactgttgaggctctgtccgcagggattctgatcggtctgttcctgctgcaaaagtacggcacgtccaaggtgagcttcatgttctcgccgatcatggcggcgtggacgttcaccaccccgatcatcggcatctacagcatctggcgctactaccctggcatcttcaagagcgtgtcgccgtactacgtggtacacttcttcgtgaccaaccggaagaggggctggcagctgctcggcggcaccgtcctgtgcatcacgggcgccgaggccatgttcgccgacctcgggcacttcaacaagcggtccatccagatcgcgttcctctctagcatctacccgtcgctggtgctcacgtacgccggccagacggcctacctgatcaaccacgtgggcgacttcggcgacgggttctacaagttcgtgccgcgccccgtgtactggccaatgttcgtcatcgcgacgctggcggcgatcgtggcgagccagtcgctcatctccgccaccttctccgtggtcaagcagtcggtggcgctggactacttcccgcgcgtccgggtggtgcacacctccaaggacaaggagggggaggtgtactccccggagaccaactacctgctgatgctgctgtgcgtgggcgccatcatcggcttcggcgacggaaaggacatcggcaacgcgttcggcgtggtggtcatcctcgtcatgctcatcactaccatcctgctctccctggtgatgctcatcgtctggggcacgcacgtggtgctggtggcgctctacctcgtgcccttcctcatcctggagggcacttacgtgagcgcggtgtgcaccaagatcatgaagggcggctggttgcccttcgccatctcgctcgttctggcgctcgtcatgttcagctggtactacggccggcagcgcaaggcagagtacgagatggccaacaaggtgaccctggagcggctgagcgagctgctggccgcgcccgacgtgcgccgcgccccggggctctgcctcttctacagcaacatgcaggagtggcggtggctcaccccggtgctggcgcactacatcaagaacatgcggtcgctgcacggggttaccatcttcgtcactctccggtaccaactggtggccaaggtggacgccgagagccgcatggcggtccggcgattcggtccccgcggggtgtacggctgcacgatccagtacgggtacgctggcccactgtacgaggaggaggaggaggacctcgccgggcaggtggtgcgggcggtgcgccagcatatcgagcgggaggcggcggcgtcctccacggcggaggtcgaggaggaggcggcggagctggaggaggcgcgcgcggccggggtggtgcacgtcatgggcaagacgaggttccacgtgggcaggaacacgggcctcttcgaccgcgtgctgctcggcttctatgagttcctgcataccacctgccgctccgcgctgccggcgcttgggatcccgctgcagcagcgcgtcgagatcggcatgctctacaaggcctga

SEQ ID NO: 17364 - DNA, 408 bp, Zea mays
  Peptide Sequence Number=SeqID_60739
atgaaagtgacaaccacgagcggcgtcatgggtgatgggtctggggatccatccttctggctcctgctactcagaaagcgcggtgctatggctcgagctgccaccatcatcgtctccattggggtctcctccagcagcttctcctgcagcagggacgccctgtggtggtgctggggcgcctccagtaagggcacaggggagagacgccttgcagactctgcctcctgctgtggcgggaagaagaatcctgctgctccatctcctatcgccaacgttcctgctcctcaagcaagcggtggtgcagcctctccaagtgactcgactgaccggtcactatgcggtgaagcggacgctccgcaagacaagagggcaggaaaggaatcactgatttgcgaattgtgtgtctaa

SEQ ID NO: 17365 - DNA, 219 bp, Zea mays
  Peptide Sequence Number=SeqID_60740
atgcaggatgctgcacgacatgcaatttcgcagtattgctcgttatacaatggggtggctggcggtcttaacctgaagtattacccccgccactcgactggcagtactggaagtgtgattgtctcacctgtaggtgaaggcaatcctaggttgaacatcacagtcaacctagtcactctgctcaataccgagttggaccacactcgtgacgttgagtag

SEQ ID NO: 17366 - DNA, 417 bp, Zea mays
  Peptide Sequence Number=SeqID_60741
atgaagattgagctagcggagagagacgccatgatagcctttcttgagaaggctagatcagtgagtgcccctacacctatgcagtgtgcactttgtgagggcttggagtctactctcgagtcttgcagatatgacaagaccaggatcgaggaagaaaacacataccttcggaggaagagagatgagtggttggtttctgagttgagtagagggaacatgaaccgccccactcatgctattcatgatcctcctgttcagagacatcctacaaggcctagaggtgctttgcctcttgctgctaggacccaggcagtgagaccgcgtggtggtcatgcccaatggggtgctggtcatgtgtcatatggccaaggaccccatggcagtggctttggtttttacttccccagcggaccataa

SEQ ID NO: 17367 - DNA, 1536 bp, Zea mays
  Peptide Sequence Number=SeqID_60742
atggggcagtgctacgcgaggaacgtgcacggcgtcgacgcggacgacggtggcatggaggcgaccaccatcatggtctcagcggcaggcgggccggaggatgcggggtcagtagggggagggcaaggaggcgaagggaggcggagcgcgcggccgtcgccggccgggaagccgcgcgggggcagggccggggcgactccggagcggttgtcgacggcgggtagcccctggacggggagcccactcgacctccccgacggcatcgcgccgtcgcccgcgacctcggtgtccacgccgcgccggttcttccgccgccccttcgcgccgccttccccggccaagcacatcaaggcgtccctcgcgcgccggctcgaccatcgctcgccgccctccgcgtcgcaggttcccaggccgcctgtcgaggtcccgatcccggagcaaggggccagcggcgctggggaggtggagcgggagcttgacaagagcttcggctacgaccgccacttcgccgccaagtacgagctggggaaggaggtgggccgcggccatttcggccacacctgcctcgcgtgcccctgcaagggagacatgagaggccaggtcatggctgtcaagggtgatcagtttttttttccgatggtattggcattggcattggcatttccccgcaggatgacaacgacaatatctattgaggatgtgcgcaaagaggtgaaaattttgaaggcgttatctggacattccaatcttgtcaagttttatgatgcttgtgaggacgcccttaatgtctacataatcatggagctttgtgaaggtggagaactattggatagaatcttgtccagaggtggaagatacaatgaaggggatgcaaaaattattgttgaacagatattaaaagtagttgccttttgccatcttcagggtgttgttcaccgtgatctgaagccagagggtgatcagggggtaaatgccacacagtggctgcataacgaacctgtacttgttactgtaagtggtgatagcagtgttggaatgtgggacgttactttaggtcaaccttgtgtcagacatatcgttgcccatactcgatgtgctaatgcggttgctgtggcccctaatgacaaatacctctgcacaggaggaagcgatcagaaagttgctgtggcccctaatgacaaatacctctgcataggaggaagcgatcagaaagttgtgagttgcttatttgtccttttagtttcttatgtggcttatgttatgtcgtactggaaaaggagagttgtgtatctttatattatagagagagagaaaagggatataaacctatacaaggcaactggtaacctttatgcctcaactatgagacaacagaagctggtcctctcattgactattggcttgaaaagggataagaacgtgggtacccacgttcttaaagttaagaacgtgggtaccgtcgaacttaatgtgcagcccacgcagacccacgcaggccacataagttcgacggccacgcgtccccgtcgaacttaa

SEQ ID NO: 17368 - DNA, 804 bp, Zea mays
  Peptide Sequence Number=SeqID_60743
atggctcatcttagacacaccgcacagaagttagtcattcctttcttgccttctcgtctcgcggagcgtccgcttcattgtccggtgactggtcagtctagtcatttggagaggctgcaccaccgcctgcacgaggagcaggagcgtcgacgacagatgttggagcagcagggctcttcttcctcgcttcagcaggaggtggagtctgtgaggagctgctctcttatgcccccgctggaggcgccccatgcaccaccactgggtgtcgcggccgctggagtagctgttgcaggagaccctgacgatggaggtgacgacagtagcttgagtcacatcaccgacctttcagaggagcagaagccggagggatgggttgctcgacccatcactcgcgacgccgctcgcgggaccgctgggaggcgacttgcttggtgcgctgtccggagaacagtcttcggggtgcggagggtagccgatggtctcaacctgaggtattacccccaccgtccatctggtagcacaggaggcatggttgtctcgcctattggtgaggacaatcctaggttgagaagcatagtcaacctagccgccgtgctaaacacggagctggaccatgctttagatgagctgagtagggctcatgctgagatcgcccagctgtgggctgagcgcgcggagcatcgtcaccaggaggatggctccctcactcccgtcgggactcagcacccgtaccactcacctccgcgtggacaccatgcttatggcaaccccgactgcaggaccaggataaatttagaaccatag

SEQ ID NO: 17369 - DNA, 252 bp, Zea mays
  Peptide Sequence Number=SeqID_60744
atggttggattgccccttggggaggagtgcgagtgttatgaaattgatatatcagccgtgctcgcggttatgagcggccaagggagctccattgatttgagatacttgatcagagatggttggtttacaggtggcgacgaggatgatggttatgataatggtaatggttgtccatgttgcaaccactactcaggagaagatgaagtcgtggaggaagacttccaggagttccaagagtacgacgagttttag

SEQ ID NO: 17370 - DNA, 3021 bp, Zea mays
  Peptide Sequence Number=SeqID_60745
atgtgctcgcattattactcagcatacccgtcatttgaagtggcggaggaggatgcagacgaagggggcctttggtgcgccgccggcctgagcagcgggcgcgatttggttgaggagtttgtggcgtacggggtatggcctttggcgcatggttgggcgttgggcgaagtatgccctcgccagattccttcccatggtgggaagctggtgcgaagtcccgccttcgcgctggatctgcgtagccgtgatccggtcgcctttgtgcgtgaggcggaggatggggcgatgcggatcgtcggtcggtacgtggcgaagacagagggccagcgtagctgggatattcgcgggtctaatgaccgcttgaacagggttttcgagttgaaccgtccgccgtatggcggttatcccggccaagacgatgtggatcgtcgcgggaagaaaccggtggtagagactggagacgacttcgtaccggcggccgccccatcctctaagaagaggaaactaggtattgctatgggaggactgggggtttctgatggttttgctagggaattgatgaggacatgcgcggccccggggggaaggatgtcttcgcccgagctctgggagtcttcggcgcggatgctgagggttaccgagggttggtggcctaggaatgttcctatcccccacacggccggcgaagacttttttacatctcgcatggttcgtgattggaaagtgtttccttacgggcggaatattgctgctgttgtgtcggcagtgatggacaaggatcgtcagggagctacgcagaagcgccaggcagtcgtcaggcttcaggccaggccgaagaggccgcggggggctgcgaaggctgctgcccctggcggaagccagccgccgctggcggcgaagtcggccgcccctgcatccagcagggcgacggaggctgctgccgccggtggttccaagtctgcgaaggccgcccctgtgtccagcagggtgccggaggctgcgaaggcggcccgagagttgccgccgccgggcaagcgcgtcgccgacttcgccaccgacattagtgtggaagattatcttgttgggtcggacgaaggccaacttgttgttgttccgcctgtcgtggcgaccgcggcggctgccgtggtgcccagggcgaagggcagtgcccttagtgccagcggcgagataccggcactcactgctgtcagggacgaggcgagtgctgtgtctcgccggctgagggagatgaaggaggcactgtcacacccggattttagggtccaaaacccgggcgcgaacataatcaccagaggttgcgcatctttacccacaagtcatgttacccgtctgccaagggatcgcgacttcccatacacctctaccgaggaggcgaggcagggaatcccttgcaggaccgccatcgcagcaaaatcctcccgagggcctccctacactgaccactcccctactgcccttgcccctttcgggtaccaggatgatcttcaggtgactcgtgacctcacgctagtcgtagcaattcaaacaaacatgagatctctggcgccaaataatcgcggaccgacggtggcacagaatcgacggcgacgaaatcctgggattcccggtcaccaccgcgcccgtgagtacctctcccacgttcacgcgatgctcgccaacccaatccgatgcgccggcgtcgcagcagacccaccaacggcgagttgtcgaggcggggtctttcagctcctgcccagagcccagtcgtcgagcacgagggacgggagcgggttgcagacctgtgacgaccgggacgggggtcgtggccgccatataggacgcagggtccgagcgactgcaatggcccggagatcccggccaagccgtttgagccgtgcggattccgcgcaggttccgtatgagctgcgccccgaccgggaggttgttgatagccctgacgcgggcgttgtggcgttgggctggcgggatggtaagtgggccgaggccagattcggcctaggcaccaacacggaccgcgcggcgtcgggggccctcacggcagttgtgtctgccgaagtcgagagacttcggacacaacatgctgacgccgtccgggaaaagtcggccgccgacagtaaatgccgcaagttggcggataaggtggccacgctggagggtgagaagactgacctccggcgccaactggcggaggagaggaaggaggctaatgaggccctcgccaaggcgcagtctgcgcaggcggaggccaatttggcgcgggtggagggcagtcttgccaggcagcgcgccgagcagttggaggagcggctcagcgctctgcaggcccgtgtggagagggccgaggcctcgacgcgctcggaggctgagtggacacgcaaacagcttatggattcataccatgagctgggcgcgcggaccgctgacttcgaagtgccggaccgagagcccggacttcgctgcctcgagtggatacaggaggagttgctggcgcttcctgccatcgtgaaggggtttatgtcctatgcctccctggtcacctgcgagggggcaatgaacgcgctctctcgcgaagggtgccagcactatgaggtcttcgaccaagccgatgaagatttcgagcgcgatatctacaaggttgaagaccctgtggtgaaggaatccgcgggagccctctacgaccggatgtggggcccccacggtcgggaggtggtcagggagcgggccgagacggcgaggggtcaggcggcgcgtggcgagagggtggatgacttcggggctttgaacagcgtgctgcctgacccggagccgaacccggcggtggctgtgtccgaggccgccctgcagctgcccccggaaaccaccgaaggcgttcctgatgcccccgcagccactgcggccggcggaggcccgtcgccaactgccgcgctgagggctgaggatcctatgatggtggcggcggagccgacagcggaggatcccgcgacggctgggtcttcgcag

SEQ ID NO: 17371 - DNA, 369 bp, Zea mays
  Peptide Sequence Number=SeqID_60746
atgggcaagaacaacaagcgcaagcgtgagccaactcctccatcggaggagtttggtgactcggagtactcagaggaggagttctcctctgagtctgaggggtctccggctcccgtccccctgcgctcggatgagtcggagtactcctcgtatgaggaggactcggacggcggcggcgaggacgaggatgacgacgacgacgacgacggcgacgacgatggcgacggtgacggtgacggcagcggcaggggcggtggcgacggcagcaaggacggtgacggcagcggcaagggcagcaaccggggcagcagtagcaggggcagcaccaggggtggcagcggcggcggcagcaacagggccagtggctag

SEQ ID NO: 17372 - DNA, 717 bp, Zea mays
  Peptide Sequence Number=SeqID_60747
atggacaaggttttagtggcatacttggtcattttagaatcaggtatggtcaagtttaagtggtcagattattttagtgttcaactaacttttagtgtcttagtgaaaagtttatcaagatccttggtgaaatcattatggagtaagtttgaactacaacatagcttcaaaaatttccaaaaattctataaaaattacagtggcttctcactggtgtatatatttcattctaaaaaattgaggcttaaaacgtggcatttctgccgacttatcctcgcatggccccagttgcatgggggctccggcgcgggaaagtcggatctctgttgcggtcactcgctcgacattgtgggtcgcccgggtttgcaccaatccggcctcatgtcgatctgctttgctggttatctctccccaggcccacgaaagaatgaccttacgatttattgggcccttgggcctttcgtgaggtcttttactcttttagtggacccgggggatatctatcccccacaatcccccgatctttgggttaatttagagaagttggcacgaagctattcgcattatgctttggaggtcagcattatgtcatcaatattttgcttcagaggtattcactgcgtgccctgcacagatgtgaccgttttgaaaaatatactgataattcctgggcgtcccccccaatgggtgtgggcaagggacggcttggtacgctga

SEQ ID NO: 17373 - DNA, 252 bp, Zea mays
  Peptide Sequence Number=SeqID_60748
atggggaggcaagggggtggcgcggccatctgggtggtggcaggcggtgtcgcgggggtggcggcgcgacatctggctactggcatggggtggcggcacggccatctagctgctggcagcgggtggcgcggacggctgctgggagatggcagcgctcgcagctggaagcaggcggcgtcgcgggcatatggtggaagaacactcgaagtccggctaccacccgagcgcaagaacaccctaggggtagattag

SEQ ID NO: 17374 - DNA, 633 bp, Zea mays
  Peptide Sequence Number=SeqID_60749
atggctaccacccggggggtcgatccttttttaaaggtgactctccccactcgcgtcctctggcgtcacggactaagtcttcccgacgtgctccagggtcctccccctacgacacgggggctgggtcccacacgtcatgcaagctggcacggaacagaagaagccaaaccatcgcgcgtggagcgtgtaaccgcccctcggttacaagcgctcctccatcctcgccaaaaccagcggttgaaagggcggaccgccatgcaggtggcgtgcaaccgcaccatggagacgcaccccttcgacttcaacgcatccagcatggaggcccaggcccacacgtcatgtaaccggcgcgccggttactacgtgcgagaaactgcactgccatttgcgccaatgtcgcgccttctcgactacggaaccggtgtcgcgactcgaggcaaccctgcgcatggcccaacagtgccaaccgagcacatcggtcacggggaccgggaaaggggatatttcaaaagggatccttctcacgaaggaagcgggccccgagccctcctactgatcaagggttcgaaggctggcccctcggaagggttcgacacccgccctagagcactcgggcttcaggctcattactga

SEQ ID NO: 17375 - DNA, 795 bp, Zea mays
  Peptide Sequence Number=SeqID_60750
atggtcacccaggatggtgaccaccagttcgatggtggggagaagcaagccgggctgcgacctctgccccgccctcagcttcaaggatcttcatcatccttgctggggaggagggcgaggcgagccggggcctgccttcacgtgggctggcgacccgcttcttcctctggcatctggggtggaaaccatcctccagctctgcggaggaggcgtcctccagccatgcgggggaaggcgaactgctgttgcctggccagggtgcagcattctgtcctccgtccgggcggccgtggccgactgcaccggggggtcgcacaacacgtcgaacgccgtgagggcggtactcgtgttctgagacggtcccgttctcgttcttgcggcgaggacgggagtgaggacctgccggtgcactttggggcggccggtgctcgctggtgcggtgttggtgggcaggtggctgccgtcatcggtgctgaggtggtggcagccagagaaggtttctccgccgacgagatcgtcggcgccacctgtggtcgaacctccggctcttcggccttgatagcttgtcctcgcccctcgagtggggacgtgggcgagggccttgtcgcagcagcgtctgccctgaggtcatcactgctattgtttagccgcctggagcagaggtcgttgtcgctgctgttgcagtggtcggcggcggagatccttccgcccgtgccaccgtccgaggccgggccagattccaccgaaggtggagacaacgccgagggtgctgttgctccctctgttgatgtctga

SEQ ID NO: 17376 - DNA, 978 bp, Zea mays
  Peptide Sequence Number=SeqID_60751
atgaacgcgctctcccgcgaagggtgccggcacttcgaggtgttcgaccaggcggatgaagattttgatcgagatatctataaggttgaagacctcgtggtgaaggattctgccggggccctctacgaccggatgtggggtccgcacggtcgcgaggtggtcagggagcgggcagagacggcgatggctcaggcgttgcgtggcgagcgggtggacgacctcggggcgttgaacagcgcgctgcctgacccggagccgacccctgcggaggccgtgtccggggtcgccctggagccaacctcggagaccgcggaagacgcaccggatgcccccacatccgcagcggccggcgaagacctgcccccgaaggtggccgaaggcgcacctgatgcccccgcggctgctgcgccgagtgctgaagatcccgcggcggtggcggcggaaacaacaacggaagcagcggcggagccaatgggggaggcttccgcagcgccagggcctttgcaggttcaagattttgggcctgcgcacgcaaccgctactactgaatttttggcggcttcgaccgcggaaggtggtaatgaatatggtggatctgcatctgagttttttgattttactgactctgggagctcgattgagtggactgaggagtcgtcggaggaggacttggactattttgcggccttggacgtggctgcagcggaggcctcgccacatgccgcggacgcgcaagatgtgccaggtcctagcaccgggcgccgacggcgaagggcggttgcaaagcgtagggttagtatggaggaaaggggtcggcttcgtgtgagtagggctggtcggcaggaactgttgtctttgcccgccgccgcgagtacaggggaaggggaactgcggagtctttttgcgggtgaggagcttaggataatgttatttaattatagggagatgggaattattcctaaggttgagccgatgtag

SEQ ID NO: 17377 - DNA, 297 bp, Zea mays
  Peptide Sequence Number=SeqID_60752
atggccggagctggcgactccgcgcgggcaaacaaggcacggggcggccgcggttggcctggagatctcggttcgatgacgcgggaccggtaccgacgatcaccggcgactaatcgatgggatagagaaaatgggggagagagaagagaaggtctggtggggaaattcacctcgggtggggcaggaacgatggcgaggctgggcatgacggtggcggagcacggtcgcggacgatggtcgagctctaccggcgacgaattcgggcgcagggggctagcgacgggggagctccagtga

SEQ ID NO: 17378 - DNA, 606 bp, Zea mays
  Peptide Sequence Number=SeqID_60753
atggctactccggctagagggaagaaacgactcgtcgtcgacgtcgatctcgagctcgacagtgaggtcgaagtggcttccgccttcagccgactgtctttttcagtcgttgccaagcgtacaggcgacggttgcggcttcgagcactccaccggcaaggagcgcaccaccggcaaggagcggaccaccggcaaggaactcacctgcgcggccacatcagagctcacaaccgtcgtcaatcactgctcggcacctcgttcagcgtcgattacccgatttgaaacagttcgtagtgacctcgcccaagccattacaaagatgcgtgtagttgggaaggagttgaaagatttggctggagacgagattatgaattcgccagatacggccaaagaggtgtcagtgaacttcgcaatgtggcgcgtgtatgagcttgctcagtcacttgaggacgaagcacaacatttagaagatctcgaagctggtccgtcgccaccattatctgagtggttcaacaaccaatttgctgaagatgaatatatgggtggtggggaatgggcactggatgatgtcagttctgaagagctttcggatcatcagatgaagtag

SEQ ID NO: 17379 - DNA, 360 bp, Zea mays
  Peptide Sequence Number=SeqID_60754
atggggaaacttgtcccatcactcctcatgctcctcctctgccgaggtaggatccaactcgactatccaacccggtggcaagatgggatggccaagtcactccagcaaccatgtcctccagagaacctggctcaccgccttggcgtacaatgcctcactgaccccgactgccgtcgtgtagtgaccgcacttgtacccaccataaccggaatgggagaccacgtctcaggtcacatgagggataaagtctgcgggcaggttcactcagacaacgcatccccatggatcgttgtccctagaccatcatcattacgatataaaaatggatacaaccaattcctgacctcgcgcgagtgctag

SEQ ID NO: 17380 - DNA, 387 bp, Zea mays
  Peptide Sequence Number=SeqID_60755
atgaagacaaacaatccaggacatgtacaacttcaccaatactgcactgttgtagctagtcttgacagggtgtatggaataagctatctcatgagcttccttgaggatcaactcccgaatagactggacattgggaacacacaaacgaaatccgaggctcaacctgtcaaactctttggccaactcataaggcatcggatgagcgaccatcatattgacttgacttttcctggtcaaggcatctgctaccacattcgctttgcctggatgctcttactgggtgaatatgtacttcagactcttgtggtctgtgtagacatcacacttctgtctatacagataatgcctccatgtcttcagtgcatgaaccacttctgccaactctag

SEQ ID NO: 17381 - DNA, 780 bp, Zea mays
  Peptide Sequence Number=SeqID_60756
atgggccggatcgcacgtgggcctctgagctggacgaggccgcactgtgggatgccttcgtcgccggtcttcgtctggtgccgatcaagcgaaaggggccgccgcccctacgcggccgttgctccccggagaccacgaccccggcgcccgtcctcgccgcgcctagtgccgccgccaggaccaccggcccctgctgcccgacgccctgcacccgcctctcctctcctccctccatcccagccgccggcgcctcctccccctccctccctgcccaaccgccggcgcctcctccctctccctctgcgcaggcacgtcgcccgcgcctcctgctgcctgcgcctcctgcctgcgcgccctgttgggcatcgtgctcgcgcagcatgcacgcccgttcactcctcccccttcaccgccgcccgccagcagccctttgctgccctccgccatgcccttctgaccccatggcggaccctccccccggaagccgcacaccaccggcctggccgcaacccgccccctggcccgcgggccctggggcggcggcccccgcttcccctggctgcccgacatcgccctccctgggcctccctgcctgcgggccagacccaccccatgggccccccggcccgcctccctggcaagatggccgaggctcccttacatcgtcggcctcaggccccttccgcgaacgttctcttcccggccctcgtcgaggctctccacgggtttcctggccttcgcgacccccgaatacgactcaacatcgggacccttcgctaa

SEQ ID NO: 17382 - DNA, 84 bp, Zea mays
  Peptide Sequence Number=SeqID_60757
atggcgcgcggcgtccccaggtgcgacttcccttcccctgttctcggccgacggcgagagcttccctgcgcgtccatgttgtaa

SEQ ID NO: 17383 - DNA, 696 bp, Zea mays
  Peptide Sequence Number=SeqID_60758
atgacttcccacggatcctcagacgacgggaatacactgtcccacactgacgggcttgcacgagagggctttccccgtattttgtgggaggtacttcagggggctgaatacacgacacctcctcagtacgcggtgcagcagttcgagaagcaccgagtgccccgttgtagggtgaggatgaccttggagcctcatcccctgcagccaggctgtcgttcgctggactctgagtcctttggataccgggctgaggacacgatcgaggcgattgctctgcacgggttgaccactttctgcggattccatcccttggagctgtccacccaccccattggcttgtttcccccgcggagagggaggacgacgcaatgtggaaggatcgggtggagcatgccaaggacatctgggctatctacccaggtggagcagctgtccaatgagatccaagagctggaggaattagtggggaccagggagaacaccatcgaggttctcgaggatcagcttatcaacactcagcagcagcttgctgaggctaatgagcacctggatatgcatcaccaggagatccaggacatggaggccaacgaggacgttgacattgagggaggagaggagcctgcctccagcttggacactgctggctcagggagaccaccttcccccgagtcgagtgttgcctcgttcgctcactag

SEQ ID NO: 17384 - DNA, 330 bp, Zea mays
  Peptide Sequence Number=SeqID_60759
atgggcaagagtaacaaacgcaagcgcgagccgactcctccatcagaggacttcggcgactcagaatactcggaggaggagttctcctccgagtctgaggggggagaattgcccaaaaccctaaagcaaacccctttggacaatgggaaccctagatactgtaacctcgctgatggagagtacgtcctcgtgccggagcaaggagctgctcaggaggtagccccggatccagcaccagagcctgcaccacaggatctgcctgccactgctttggaaggcaagccccggtttatgcataacatgttatttatgctattttgccatacttaa

SEQ ID NO: 17385 - DNA, 360 bp, Zea mays
  Peptide Sequence Number=SeqID_60760
atggagagggtgctgctgctcctgcgagggctccctgaagaaaacaactggggcgctggggaggggaatccggccagcagccctgcgcatgagcagagcaggcagcggccaaggggagagcaggggcgccatgggagggagctgctgctcgcctgctgcaagggcgccgagcacatggcgagcaggagctgggctccctgctgcagccgtggggaagaaggtctctctgctgccgaacaccgtggaaaaggggaggaagaaggggagttggctggagcaggcctgaacaagggagaaggagcagggagggcgctcggccttggaggccgctgcccctacgctggcgtgctgctaccgtga

SEQ ID NO: 17386 - DNA, 264 bp, Zea mays
  Peptide Sequence Number=SeqID_60761
atggaggccaactcacaccatcaaccacaacaaggaggtacctgcaaaaattatgccacaagcaaggctgagtatactaatactcagctatacttacccgatcatggatcaagcagtctcattagctgcgagaagcagacgattcgaatcgaatttttaaaccttgcaagtgaccgcacttgtacccaccataaccggaatgggagaccacgtctcaggtcgcgtgaggagggcaatctgcttccaggttcactcaggtactag

SEQ ID NO: 17387 - DNA, 357 bp, Zea mays
  Peptide Sequence Number=SeqID_60762
atggagaaatgcactcgtaccatgctgagaactaagaacacgctacaccatgatgctttgaaggttcaccgtagcatcagcaccaagcatggcatcatcattagcagcaacatcactggagtcatcatcgtcaccctcaccgacggaagcactaatgtagccatcatccgtagcaatgtgctggtgaattctatttcttggcgggtacctgcaaaggaaggttaccaacatgtgcagcaggtgtcgagggagtatgactcgaggcaggtacaaggtgggcagcaaaattctgttctatcgtcgtctcccaatcaagatatccctcagcatcataatgacccaaaaaagatggaatag

SEQ ID NO: 17388 - DNA, 387 bp, Zea mays
  Peptide Sequence Number=SeqID_60763
atggtaggagtaatacatacacttttagcagttccgagatgttttccctctgagttacctccaggacttccttccattcgtgggattgagcaccagattgatttgattcttggagcgagcttgcccaaccgtgctgctggaccatttaaaatttcagatttaaagccatacttgggaaaagaagatgagcttgattcgagggcgactccacttcaagaggtggaggatgatgaggacatggatgtgtttctctctgagatacccctagattaccacctgagttgcctccagattttcgggcaggaattagccctcgtggcgaggtcaatcgcgcagtgcacggttgataaccagaggagaagtggtgctacgattgcggggttctag

SEQ ID NO: 17389 - DNA, 348 bp, Zea mays
  Peptide Sequence Number=SeqID_60764
atggcagaagctgaaggacatgctaatcaccagcttccaagggtttcagacaaagttggtcactgctcaggctttgttctagtgtacgcagaccacgaagaatacctccaggcgaaaccccctcagaccctggagaagcttcttcagaaaatggatgagtatatcccgggccaccagtcccaaggggcaggggtggcagaggcttcggaggaacgtatggggatcagcccagaaagctctattgcttattctgtggtgaagataagggccacactacaagaacatgctaggtcactatttagaagcaaaaggagattgccgaagcagaggcgcgacaaaatcagctga

SEQ ID NO: 17390 - DNA, 333 bp, Zea mays
  Peptide Sequence Number=SeqID_60765
atggaagagctcagtgttcagggtgatttgacttacacagaatacccgatcaagattttggatactttgactcgagttacgaggaataagcccaccaggaacccccacgcgctcggcccgtttctattcttttccctcgaattcactcacgcgcgagcccatcggcgctcggctactgacgactggaccccggattctggtgcctcctttccgtctggcatcgggacccgcaggtcgggtgctggtcgtcttcctcccgcggaattcggcgcgggctgtgccaagatccgcaaagctcggcgtgcaggcggcgtggtagtgaggataggaccg

SEQ ID NO: 17391 - DNA, 174 bp, Zea mays
  Peptide Sequence Number=SeqID_60766
atggagagtcatgatctccgggcagaatgggaatcacggcttgtgggtggctatgagatcgatggtttcggttatgactatggtgctggttgtcagcactgcaaccactgctcaggcgaagatgaagctgtggaaggagacttccaggagttccaagactacgacgagttctag

SEQ ID NO: 17392 - DNA, 669 bp, Zea mays
  Peptide Sequence Number=SeqID_60767
atggaggtagggagcagccagggattgtcaggcgactgcccaagcccgggtggaagagctgagcctgtccttggaaaacatttacacccaaacgtaccacctgaagttgcagagatgggtgttggcgcagcaggagcaggtgaaggaggaccctatggggagctagacatctttggagcccctccttctatgaacatcttggatgttcgccctcctaaatatagtagcatgccgataaggacttgtggtcatgatggggcagggacttctcgggatagtggagaggagaccccaatcccaccacatgtacctccaactctggcagagcaaggcggtgattctaagcagaacaagcataacttccaaatgacttccggaaatacttctcagggaaagggtaatatgacaagcaaccaggcaacaaagggtgaaaagagaattggacagatttattatacccagatgactcaggcaagcaagggtgaaaagagtattggacagatttattatacccaggtggctactacaccagaaggagaatccgtgctaatggatttgcccggattaactcctaagagggatgtggagttcgtgtttgagttaaagcctggcatgactcctatctcaagaagatcgtaccgcacgcctcctaatgaattggcagaatag

SEQ ID NO: 17393 - DNA, 318 bp, Zea mays
  Peptide Sequence Number=SeqID_60768
atgccgctgtcgtggccggcgatatttaccaccatttggagtcctgtgaggggtctgggtgactcatcacatcctggcggaggttcctgtggcgtcatcgggcggattggactccctgatcccactgaatttctcgccggtgccatgatgaccgcggcggaccacgcatcgccacggacggggcacctcgctgttcttactatgatcattaatgttaattggaacgtgccaccacaagggtggaatgggatgcccttggctgacaaattaggaaagctagtggaagactaccttacccgaaaggggcaagggcagtag

SEQ ID NO: 17394 - DNA, 729 bp, Zea mays
  Peptide Sequence Number=SeqID_60769
atgacaccgcgcgccccgcagcttcggcaccacccgccgcacctcctcctcgccgaggccgttgcctcctggcaccccttccacaagaagccctgtcgctcggaccgctccaccgctcccccttcctcggcccgcctccctgatgcggagactccgacgcctgccccctcggggggcgctagcggcggatccttccggtggttcgggctccgcaagcggcgccgccgcggtgcgggctcgcggtccgtgtccggccgcagcagcgaccgccggagatctggcacgtgctccgacttccatttcacgtgcggcggcggtggtggtggtggcggtggcggcggcggcgccactgactccagtggggagatgtgggcgtcagatgtcggggaggtgcggatgagggacgtgtcgatggcgacggagttcggcccggcgcccgttagcggggttggtgtcggaggtggtggggtcggcgctgcagcggaggcagcggccaccgattctgggtacgggagcgaacctgggtaccgtggcgacgtggagctgggatacggagatgaaatggacgaagaagatgaggatgggaggcagcagctgttctgggacggggtgattggagatatgactaaaatgaagatcgacggcgacaataactttggggagcagaagagccatcaccgctgcaggcgcaagaagcatgatgctagggttttggattccttgagttga

SEQ ID NO: 17395 - DNA, 1083 bp, Zea mays
  Peptide Sequence Number=SeqID_60770
atgtcttcgcgctcccttatgcatcgtgtctctccgccttccaagcccccggatgggggcccggctgcacccctccgccggcggtcacccaagacggtgacctccagtttgatggtgggggaaagcgagccgggctgcggcctctgcccctccctcagcctcaaggattttcatcaccagggctggggaggggaggcggttgttgtccgtggcaccggtagctgccgcgtgcctggctctcggacgcgagtggcttcggagccgctctcggcgccggtttctgccatggcagctggaagaggttctcccgccagcgagacagccagggccgcccatggaccgacctccaactctaaggccttctgcccgtccttgcctcacgagtttgggcatgggcgggggcctcctggcagcagcatccgccctgaggtcatcgctgccgctgttcggctcctcgaagcagaagtcgtcgtcgtcgccgctgctggagcgggcgacggcgcgccgttcgtcggtcttctgttgctccgcaggcccccctccatcgagtggggttactcgcctgttggttgtctgaaccgcttcaccaagcgtgagtcgccccgtgcaaaggtgacgagtgaggagtccctcggctcggtcggccttgttgcccgaggcttctcttgctcagttaaaggaacccctcggccgcccttcgatgagccgaggctgggggtagcggtgtcagcgcgaacagaggcagagttggctcggaaagaggacctggtcggccggagcctggccgggtcgtccattagcgggaccgacgccggaattgaccagccgaggcctcgggtcgggctggcgtcctcggaggacagctggccgaggccccggggtgaccggccgagccgcctgctcaggccggattctcggagaagaccctggcggcgatggcccgggcgtggcgatgacgtcgtccttcagagtggagatcttcagaccgtgtcgccgtctgaggctaggtcggacctcgccgaagatgttgtcgacgccgagggtgctgctgctcccttcaagcgtcaggatccgagcctgtag

SEQ ID NO: 17396 - DNA, 837 bp, Zea mays
  Peptide Sequence Number=SeqID_60771
atggaggcccaggcccacgcgtcatgcaaccggcgaaccgagtgcttcgtgcatgcaactacaccgccacttgcgccaccaccgcgcctcctcgactgcggaaccgatactgcgactcgaggcgacccagagcacgacccagcggcgccagcctggcgcgacggtcaatgcggccaaaaatgggccagcagtaatggcggtggcaggcgggcaggagcaacgggaccgggaaagggggataccccgaaaaggatccttccccgtgaaggaaccaggctccgagcctccctactgaccagaggttcgaaggctggcccctcgaaagggttcgacagccgcctcagatcacgtgggccctacacccactactggttagaggttcgaaggccggcccctcggaagggttcaacggccgcctcaggctactcgggctccgcgcccactactgatcaagggttcgaaggctggcccccgaaggggctcggactcgggctaagtcccgaaagacgacgaactccgctccgcccgacccagggctcggactcgggctcagccccagaagacgacgaactccgcttcgctcgaccccagggctcggactacgccctggcctcagccgacggtctccgcctcgcccgacccaggggctcggactcgacctcggccacggaagacagactcgacctcggcttcggaggagcttccacatcgcccaacctagggcgcagaccagccacgtcgacaggaggcgccatcatcaccctaccccgagctgactcgggccacgggggacaagaccggcgtcccatctggctcgctccgccagataggcaatga

SEQ ID NO: 17397 - DNA, 318 bp, Zea mays
  Peptide Sequence Number=SeqID_60772
atggctagtttaaaggatagttccaatgtctctcatagcaacattatcgagccgactatggagattctgtcggctgaggatcagcgaaagtttgaggagcacaaggagcagctgatcaagaaggcccagacgaagctcctggccaccttcaaggataagactagggaaaatacatgtgatccatcgactgcaaattggcatgaccaatcccaaccactttatgagatgtcgatggacacatatcctggacaaccacagcctcctgcacatattggggtaaatcaccgatctgcgcacaaccggaccgtccgtgcttga

SEQ ID NO: 17398 - DNA, 1161 bp, Zea mays
  Peptide Sequence Number=SeqID_60773
atggcggccacgagcgctaggggcctaaatgcaaatatgccgacgccaggggcttggcttgcagtagccgcgtgctgggggactgattccgtcgacgccgttgccgtgcacgagttgtccgtcgttgagccagagttagaggcccaggagcaccaggctgagtaccagcaagactcgcccccaggcctagaagaccccgcgctcgcttcgcagtttttgacaatgtggctggtcagtaaagtggactgtgttttaaatgctttgctacttggtggaactttggaagttaaagaaggtaattggaagtgcagcaaagcattgaaacaacgttacacttcagctggtagagggaaacatgttgatagtattcaaaaagagctgaaggggctgatgggggaagatgacaaagctaacttctgtatttctttcatgctttttgcattagctcactacttagctccaaacacgacccttcaagtcaatcgtgagtttctgaattctcttgaagatgtgagcaaaatcaaggaattcaattggtgcgcttatgttgcccaatatttgatttctggaatcaaggcctaccaaacgtcaaatttggaatatgtatataggtgtgtgcatatcctgcatctcatctattttgattttctacacaagttgaacatatgccaaacaccacggatacactatgttagagacgaggatctccacgatcttcagccacttgatttttcttcaaagaagaccaatgctgatggaacctcagatgattggaagatttttgaagattttactgagtcaaactctgcatgggatcaattggtctatgagcacatgttggtcactaagcagatgtctgaggctctaaaggctaacgaagaatttttatgcaagttaaaacattacaaggtcagctttgatgcaaagctacacaatgttgcacaactggttttaaagaatagaacaaacatgacccaagacaagtcgggtaccactgtcctttctgctagtgagcatacttttggcctaactgatgagctaggctgccctacagatggtgcaccagaattactgcctgacaatgatggccaagagccaacagccaggccgcaggaaggtgcctcacatgctcgacaggacaaacagccagtaccactataa

SEQ ID NO: 17399 - DNA, 519 bp, Zea mays
  Peptide Sequence Number=SeqID_60774
atgactatgcaggcatcacttgcacatgagggaactgtctatggtgaacaaaagaaaaatgagttgtcctcagaaaagtacgcacttattgtggaatttgaaactgagttggatgaaatcttttgtttctgtgatgagttcaagacatcagcggtaatggcatgtagaaccatgtctcctacacaacgcagcagcagcaacacagggtctattcagcccttcaccctccagactcggcggaggagctcagaagttggtacgcctgagtcatcacatcgcatgacccactcaagtgcaatgaaatatcttagacaaaatgatattaaaggcgattctgatcagtatgctatagctaatgaagtacataaagacgaggcaaatttggatgcattcgcctggctgccagacattaaggaaaggatggttttcgtgcttcgaacctggaacgtaaaggtgcatggtagcctgaacgcaggggacatgaactcttcagcgcctgcctgctggccaagcccctag

SEQ ID NO: 17400 - DNA, 567 bp, Zea mays
  Peptide Sequence Number=SeqID_60775
atgacgggtctggatttggaaaaaacggacttggaaaaaaggtttaaaaagttacgaagcttgtggggaaagtacactatgactatggaggcatcacttgcacttgagggaactgtctatggtgaacaaaagaaaaatgagttgtcctcagaaaagtacgcacttattgtggaatttgaaactgagttggatgaaatcttttgtttctgtgacgagttcaagacaccagcgaatgatattaaaggtgaatctgatcagtatgctatagctaatgaagtacttaaagacgaagcaaatttggatgcattcgcctggctgccagacattaaggaaaggatgggtttcgtgcttcgaacctggaacgtaaagctgtatttgttcaaccttactgttctcaaagtaggccaagcccctggcgccggcatatttgcatttaggcccctagcgcgcgtggccgccattgctatgaagctttgcccccatatcttcttccacacctacgacctatgggtggccgccgttgcgtccaatcgtcattcctctccgtcgctgacaacagccgcttga

SEQ ID NO: 17401 - DNA, 495 bp, Zea mays
  Peptide Sequence Number=SeqID_60776
atggcatgtagaaccatgtctcctacaaaacacagcagcaacaacaaagggtctattcagccctttgcccgccagactcggcggaggagctcagaagttggtacgcctgagtcatcacatcgcatgacccactcgagtgcaatgaaatatcttagacagaatgatattaaaggcgattctgatcagtgtgctatagcaaatgaagtacttaaagacgaggcaaatttggatgcattcgcctggctgccagacattaaggaaaggatgagttttgtgcttcaaacctggaacgtaaagctgtatttgttcaaacttactgttctcaaagcaggccaagcccccggcgctggcatatttgcatttaggcccctagcgcgcgtggccgccattgctgtgaagctttgcccccatagcttcttccacacctacgacctatgggtggctgtcgtcgcgtccaatcgccattcctctccgtcgctgacaacagccgcctga

SEQ ID NO: 17402 - DNA, 492 bp, Zea mays
  Peptide Sequence Number=SeqID_60777
atgactatgcaggcatcacttgcacatgaaggaaccgtctatggtgaacaaaagaaaaatcagttgtcctcagaaaagtacgcacttattgtggaatttgaaactgagttggatgaaatcttttgtttctgtgatgagttcaagacaccagcggtaatggcatgtagaaccatgtctcctacaaaacgcatcagcaacaacacagggtctattcagcccttcacccgccagactcggcggaggtgctcagaagttggtacgcctgagtcatcacatcgcatgacccactcgagtgcaatgaaatattttagacagaattattttaaaggcgattctgatcagtatgctatagctaatgaagtacttaaagacgaggcaaattttgatgcatccgcgtggctgccagacattaaggaaaggatgggtttcgtgcttcgaacatggaacataaaggtgcatggtagcctaaacgcagaggacatgaactcttga

SEQ ID NO: 17403 - DNA, 1110 bp, Zea mays
  Peptide Sequence Number=SeqID_60778
atgggtggccgccgttgcgtccaatcgccattcctctccatcgctgacaacaaccgcatgaaacaacctcaattactgccctcaagctctccttcctttttctgcgcattgaagccgaatcttctgcttcttgcgtcgctagtagttcctctacgtggaggtctggcaggcgtcctggttgtgctgctccacagaggcccatctgaggcatctccgctggcgcatcttgctggactcactcgccttattccaggcgcgtgcgcccgccctcaagtggtcgaccttgtcagtcttcacccggtcgattcccaggagtgtggctgttgtccagaagaatcactgttggttttttatggtgatcttaaacaacaaatgtcctcagtgacgggtctggatttggaaaaaaaggacttgggaaaaaggtttaaaaagttacgaagcttgtggggaaagtacactacgactatgcaggcatcacttgcacatgagggaactgtctatggtgaacaaaagaaaaatgagttgtcctcagaaaagtacgcacttattgtggaatttgaaactgaattggatgaaatcttttgtttctgtgatgagttcaagacaccagcggtaatggcatgtagaaccatgtctcctacaaaatgcagcagcagcaacacagggtctattcagcccttcacccgccagactcagcggaggagctcagaagttggtacgcctgagtcatcacatcgcatgacccactcgagtgcaatgaaatatcttagacagaatgatattaaaggcgattctcatcagtgtgcgatagcaaatgaagtacttaaagacgaggcaaatttggatgcattcgcctggctgccagacattaaggaaaggatgagttttgtgcttcaaacctggaacgtaaagctgtatttgttcaaacttactgttctcaaagcaggccaagcccccggcgccggcatatttgcatttaggcccctagcgcgcgtggccgccattgctgtgaagctttgcccccatagcttcttccacacctacgacctatgggtggctgccgtcgcgtccaatcgccattcctctccgtcgctgacaacagccgcctga

SEQ ID NO: 17404 - DNA, 297 bp, Zea mays
  Peptide Sequence Number=SeqID_60779
atgactatgcaggcatcacttgcacatgaaggaaccgtctatggtgaacaaaagaaaaatcagttgtcctcagaaaagtacgcacttattgtggaatttgaaactgagttggatgaaatcttttgtttctgtgatgagttcaagacaccagcggtaatggcatgtagaaccatgtctcctacaaaacgcatcagcaacaacacagggtctattcagcccttcacccgccatgtgacaccccaggtgtctatttcgtgttatgtcgggagatttatccgaatctcggatgctcagtga

SEQ ID NO: 17405 - DNA, 270 bp, Zea mays
  Peptide Sequence Number=SeqID_60780
atgaagatagacagaaacaatattgaattacatttgtaccttcggcttgatagaaggaccttcggcgaagaagcagacccccaacactcacttttcgaggagtcaaacatttttttaactttcaccacctctgtacctacaaaaaaaatgtttctggtgttcaacctgtccatcaacagcaaccaggtgaagactttaagcttgtttgaacatctggactcccagatccagagaaagggttttggaggattcacatttttgaaagtgtag

SEQ ID NO: 17406 - DNA, 855 bp, Zea mays
  Peptide Sequence Number=SeqID_60781
atggtgcttggccctcgcatgggctaccctttgggtgatgcggacattgtaaggaagatcatctccctactaccacaacaaagatatgggagcaacatcaccattcttaataacatggaggacttgagcacaatgacaccaacaattgtcaccataaaaattgtggcatttgagatgtcacgaaagatggatcaagaggagccaacttcttcaaggccatatgcttttgcaagtgatgaaaagaagaaaggtgagaagaaggctcccactccaagctcctcaagtgaagaagaggaagaagaagaaagtgatgatgatgaagatgatcaaccctcaacatcatcctccaaggacgaagaaatagtccgacgcgttggaaaggttgaggatcttctctttaacattgataggaaaaacaaagaaagagaggatgcttctcatgcggggagaagggacacttcagggacaactgtccaaatatggttgaacccacaaaaaggaggagcaaaggcaaggcgcttacaagtgtcaagacatgggatgaatcttcaagtgaagatgaacctccaaggacatgtagccatcgttcctcatcacgctcattacgaaaaatttgaaacatttgcaaattcgaattgtgagctaataactaaaattgagcaattagagtctaatgctccatcctccactatcgatgatagccttgtcaaaaagaatgaaaaacctaaggctaagttagctagctctcaagaagcaattaaaaacttgctagagaaaatggaaattcttagcatacataataatgagctaactactaaggtagaaaacatcggtagcacccaagagcatctttag

SEQ ID NO: 17407 - DNA, 135 bp, Zea mays
  Peptide Sequence Number=SeqID_60782
atggcgccgacgtgccggagctggcgctctgccgctgcctgggtcgggtatgaggagcctgtgactgaggatcctggtgaccagcagatagaagtagttgagcaggagctcattgaaggcaagttgtgcccttaa

SEQ ID NO: 17408 - DNA, 759 bp, Zea mays
  Peptide Sequence Number=SeqID_60783
atgggccggacaaagactacaagtgaaatgggccgatccaagaagcatgaaccgtcgagctacaatcaacaacaccatcctacccaaaagcactacaagggtatccctggacgaagaagggaccctacaccgcatagtagaactacccgagaagaagccttcctcgggaatcctaagggaagccggagcaagactacggatagcacccccactcgcagctcgggggaaaatgatcccttgcggaccgaaattcgggaacactcgggaaaggaaaggtcggtcggtcggagtctcgcttacccaaagaacttcgttgtccacctcgcccacaaaggagtggacacggatcactcagaagaaggaaacaaacgtctcgagtcaggggatgagaacacgccgagccagctttctgatacctccaccctcaaaggaggacgggaagaagagcaccgtcgcgccgactccttttctaccccaacatcctcttcatcttggggagattggagtcagcgcccatctccgacgatgagcctaccatacaaggggaggaacctccccagcgtgaagctcggcgatggagaaatagacgccggaacgtgtggttacatcatgatgccggggaacgggatccggcgcagcccgtatcccgggatgaagcctcagaagtgggagaaactcctgacgaacgagtgcaccaagaaaggcgtaactcccgccgcagcgatcgtcgacaagctcaagatcgagagcgagagctag

SEQ ID NO: 17409 - DNA, 186 bp, Zea mays
  Peptide Sequence Number=SeqID_60784
atggcggcagccggggtcagtggagcattgtatgccaaggcggtgagctttggccgcgaatggggaatcgatggggacggtatgcttcaggatatagttgatggtgtgacttggcctgccaccttgccaccgggttggacggtcgagtgggatgctgctccagcaggagaggagcaggaggagtag

SEQ ID NO: 17410 - DNA, 384 bp, Zea mays
  Peptide Sequence Number=SeqID_60785
atggggttatccgctggattaacggtgaaaccaaagctttcgaagaaattctcaacgacagaggagatttttgttcctttgccggtgtccgagggaaagttctattccgaagtatggctgaagggtggccaagagatagctgatgaagatattagaagaaatgagaaagattctcacgacgccttagaagaggctaagagagctgaagaaactgctgaacgcgccaagcttatagctgagctttctctccttccagagccatatgatcctgaagctgatccatctctgaaaggggcgctcgacataattagaattgctaacgagaccgttgacgaagttgtcaacagattgttgaacgaagttgccgataaagtcttaaaataa

SEQ ID NO: 17411 - DNA, 345 bp, Zea mays
  Peptide Sequence Number=SeqID_60786
atgaccaaggacgaaggccttagcagagagcttcgtcaaaaagtccaatcaatgatgatgaatggtattgatgactttcatcatggtaactttgcttttgattatgcttctcctctagcagcagaatttgcaggctaccccatggccaccatcttacaagccactgcagcttcccatgtacgatgggcattcagatccgaagcaatttctcatgagttacgaagcaaccatatcctcatatggtggcaacatagctgtcatggcgaaatccttcgtcatggcagtcaggagccagtaaaccctaaacccttcgcccggaaacgatcacgtcatggcaaaagctaa

SEQ ID NO: 17412 - DNA, 369 bp, Zea mays
  Peptide Sequence Number=SeqID_60787
atgggagaaaacttccatcctgaagtcgaagctccctgtagtaatccatgttatgctaaaagcagatggttagtcatatttttgaggatcttcggaagagtaagaccccaacaacctcgaaggaagaaaaagccaagaaaaaatgctaccaaaggatggctttctaaagattcgactccagaaaggccaattgatagacgagagcaaatattgcaagaaagtcctggaatagtgacaagaagacctttagctttattgatggaagaaggcaccaccatggaggcttcttcctctcaaattttagagatcactacatcagctccaagaaagttgactccaaagaaggcgaagagaaatttaaatgtctga

SEQ ID NO: 17413 - DNA, 357 bp, Zea mays
  Peptide Sequence Number=SeqID_60788
atggcgacaacaaccccgaggaaaaggaggatggctagtgttttggatgttgttatggagtccctgaaaacggcaactcttgcctccgccaaagcctctagcgagaagattaaagatacaagagaagtggttactgcaagcactgcttctattcacgctgaagcaggatcttcgggggctaggctagcgaagttaatagaagaaagtcttccagagaagcccacgtcacctgctcccgaagcaccttcacagagtgtaggaaacggaaacataaagagcaaagtagagaagcaaactctcgtggatgacgccagtatttttaccgaggtatccggaaccgcgcaaggtcccgactaa

SEQ ID NO: 17414 - DNA, 279 bp, Zea mays
  Peptide Sequence Number=SeqID_60789
atggacgccggcctcgcttccgcggtcaccacgctccggacctgcaccgatgtcgcgcacgtgctcgagcagtttcgtctcgcctggtgcggcaagctcgttcgggacgcccgcaccgtcgttccgtcaaggacctctgcttcgacctcttcatcattaggggtggaaacagagctttcaatgcatgctggagagggtactgaagatgatctaatgctaaagaacgatcacattccagcggagataaggatggaatatgacaaagataatccaagataa

SEQ ID NO: 17415 - DNA, 366 bp, Zea mays
  Peptide Sequence Number=SeqID_60790
atggcttatgagatctattgtttttcgaagggtgctggcagcgcatatgcttttggttcgttaacctccaccaacaggcaggggacatatgttgagcaccaaaaacgtcctcgcagaacggttcgtcaccaagaggaagattggaggagcttcaaaacctggaattgggagaagcagaagcactggacgagcatcaaaacctggaacggagagatggcgtggagggtgcagcgggacgggtgcgggcgcaacaggacaggagtgtatccatggacggggaggccagtcgagacgtattggtctttgaatcaagacattgcaatggagagtcttcagttccatgactacatcaagcacctccactag

SEQ ID NO: 17416 - DNA, 288 bp, Zea mays
  Peptide Sequence Number=SeqID_60791
atgaccgcctcggtcgattcaaccctggggcgactctacagcctcggcatgtggtttggggtgttcgtgagggatacccgaacgtgggctaggcgctctccagtcgactgggcgagccatggccgggaaattcctcgtcgggcatcaactcttgctgtgaacccgcatgtctccgtgggcggcgagtcctgctactcgattcacgaagagcccgtgaccgaggatcctggtgagcagcaggttgaagtagctgagcaggagctcattgaaggcaagttgtgcccttga

SEQ ID NO: 17417 - DNA, 273 bp, Zea mays
  Peptide Sequence Number=SeqID_60792
atggaggatggctaccatagggggagggggcgtccagccaagggggagaaaaagggggtggcggccaagagggggggtgaagggaaaaaaaggggtggccacctaggctcacaaaagatcatagctcaacaagttatggggaataatgtgcatgaactcaccaaaggtgggagcccatgtgaagtaggttgcgcatctttacccataagtcatgttacccatttgccaagggatcacgacttcccgttcatctctaccgaggagacgaggtag

SEQ ID NO: 17418 - DNA, 152 bp, Zea mays
  Peptide Sequence Number=SeqID_60793
atggcgccgtcgtgggagcagtgcttcaccgtggaccgttggatcgtggttaagtggataggattagatcagggcataggagttcagagcagatcaagcctcataaaatcttggtcgttcatttataatccaagggatcccgagccgtaccg

SEQ ID NO: 17419 - DNA, 420 bp, Zea mays
  Peptide Sequence Number=SeqID_60794
atggcccttggagatgatgcggtgggtggcaatggcaaggatctcggcgatgactctacatctgaggtactacgttctgtggatgatcttgctgctgaggtaaaggagatgacaactactttggctagtcaggataagttacttagacacgacaagacccaaaatgaggaagaaaacacataccttcaattgatcttgagctgggtgtctagcattaagccccaactaggcaaggtggtcagtcagttcaagaggggaaatggcgaacagggtataagctttgctttaggtctgggagtgacgctcaattcagaaagagaaaccttcagccactctcaagattatcaaaatcacccacctaagcctatcgcccttgtgagaaatggtgtgattgaggagcttgttagagatcctccttag

SEQ ID NO: 17420 - DNA, 390 bp, Zea mays
  Peptide Sequence Number=SeqID_60795
atggaggcccaggcccacacgtcatgcaaccggcgcgccggttgctacgtgcgagcaactgcaccgccactcgcgccactaccgcgcctcctcgactgcggaaccagtaccgcgactcgagacgaccctgcgtatgacccaacagtgccagccaggcgcgatgggaccgggaaagggggataccccgaaagggatccttctccgcgaaggaaacaggtcccaagcctccctactgatcagaggttcaaaggctggcccctcggaggggttcaacagccgcctcagagcgcttgggctccacgcccactactggtcagaggttcgaaggctggcccctcggaagggttcaacggccgcctcaggccactcgggctccgcgcccactactga

SEQ ID NO: 17421 - DNA, 660 bp, Zea mays
  Peptide Sequence Number=SeqID_60796
atgtctttccgcccccttatgcatcgcgtctttccaccttccgagcccccggatggggaactcccgcaatccttccgccttgtcgttggaggaacgcaacttcgtggaagttggtacctttcagccattgttcggcttcaaggattttcatcatgcagcccggctgcatcccctcgccggtggtcacccaagacggtgaccaccagcccctgggtggggagaagcaagccgggctgcgatcttggtcccgccctcagcttcaaggatgttcatcatcctagctggggcgggggccgggctgagccggagctctacctcccgcgcgggttcgtgggtcaacctctccttcagcattcaagggagagggcgctcactggccctgcgagaggggcggacttcgacaacgcggggctggtcgacggcgggcgtcgtcagcttcagcgcgttgggctcgccggcctgactcccggtgccccctcccgccgcaagggcggttgtcacgccgcgcgcacgggaggaccgcccaagacgtcgcgcgctgctagggcgacgttcgtgttctggggctgtcctgcctttgctccggtacggcgcctccgcgcggaggtcgatgctccgctcttccgggaggatccgagtggggatctgccggtgggctga

SEQ ID NO: 17422 - DNA, 366 bp, Zea mays
  Peptide Sequence Number=SeqID_60797
atgactgaattatatgcgaactacattcgatctcctacagagaatgagatcatagttgagcatcactatagatatgatattttcactagcgcagttgatcaacaagcacatgagataaaccacaggttgattcgtcttgttctaactctacaggtgtcaacgacaatgataaagcgtgccttttctgcgatgaaacttgttaaaataaggcttcgaagtaggatggaagcgcgaacggtccgcgacctggagcagggctcgggttccctgcccgacgagccggacggtccgcgcctagaagccggacggtctgcgcgtgcacaggggcagtggagttcgtcggcggcgcccgaatctcgctcctag

SEQ ID NO: 17423 - DNA, 429 bp, Zea mays
  Peptide Sequence Number=SeqID_60798
atgaccacgaccaccctagaaacaatgatgaccaccaccgaagccgacaaccggaccaggagcgctagaggacgatggggtcacactcggataagagtgcacgccctagaggtagcagagtgtcatcgcggtgtcgatgggggtcgcgaccgtagacatgagttccttgagcaggtgatcattgtggacctagacgatggatggaaatggagtgatccacgtgaggatggtccacaggtgctcgtatcgtggaatgagcctgcacaggaggttgagaacgagagtctcatctgtgaccagtggggaggtcagggtgtctaccatggtcttcatccattgatggtactcattgacatagagatccccgtaaacaacctggcaaaaggtggcattcagatggtggatctagatctagcggttatcgagtaa

SEQ ID NO: 17424 - DNA, 504 bp, Zea mays
  Peptide Sequence Number=SeqID_60799
atggtgtcccccacgttctccctccacgatatcaccgttatctacgtcgaactcttggctccccacttccccttcatgggtgtcgtgactcgtgagtggggcccacgtgatcgcagatggggtcgacacactcccgcatttgacccgcagtgccttcacatcgctaatctacaatcacaatttgggggtcaccgcctcccaacgatctctccactgcccttgccgttgtccatcatcgtgcgcagcaccacccgccagttacaaggtgtctcgggtgatgattctcaccgcgtgcacgacattgatgatgatgacgcccttcccacacctgatgtgtcagtcatcatcagtcttcatgcccaggcgacggggctccacagcatatggaccctcatctctgtcgtcctcaccccggactggcgtgaccaggtcttgctgactctccatcgctacgcccttgatgaccatgttctcattgaagttgccgtgtcaacatgttcctag

SEQ ID NO: 17425 - DNA, 591 bp, Zea mays
  Peptide Sequence Number=SeqID_60800
atgcgccatctcggatcgtcggccctacgcgcagaccgtccagtgcgacgcagggaaggcgtcgctcctgcacccaggtcgcggaccgtccgtgcagccgcagagggcactgccaggcggacggcgccaacacactttttggcgactccgctggggaacaaggttgcagatctacaaaatcaggcttatatgaccgattctaaagatctcaatggtgcttctccaaacagcgatacaaggctcgttaatttgtcggccgctgagcataaaaaattagaacatgacatgaagaaaatggacgaggagatccagcgacaacaagatcaggtgctcaaggtggcagagaagtggtacctctcgcactttagggtacactacaagagctacagtgattttcggcggccaggaaccgccaaaaataaggcctgtgccgccgaaaataagctattttcggcggctttaggcttatttttggcggtttctggccgccagaaaaaattagccgaaaataaagctatattttcggcggccagagtccagccgccgaaaataacttattttcggcggccaccagacggccgtcgaaaataa

SEQ ID NO: 17426 - DNA, 711 bp, Zea mays
  Peptide Sequence Number=SeqID_60801
atggaattggacaggacaaaggctatcacgggtcaccttatctcggcccctgctagctgccccaatatccatgagccaaaggtcactggaggccctaaccctagcgctaagaggaagataagtcagttgcgcataatagaggcaaaagagggccatgttaataacgacggcctgagctcgactgtgaacgccgactcgcgggcggctacacacaacaccactggaaggacaaaactgaacaaaaaaacacgagaggttgctcgagaggtatatagcgccgacgttgtcacattagacaagagtgctctgtttcagcggacggtggagttcttgaagcagctgacgaagccatgctgcctcgataatgttgttagccacaacgtggtacttgcccttggcgctagagcgggaaatgactggtgctgcttcaaggaccatgagacaaggttgtcacgagaaacacattatagcctgaggtgtaccggcgatgtcgggcgaggtgaagacgaggtgctgcagggcctcgacaagacttcagtagctggtgggatcgaccactggggcatcgtcggaggaggccttatcctgagtgtccatcggagtcatacatggcttacaatcggccatgccggcacgctcgaggatgttgattatgtattggcgctggtggagaaacatgccctagtacttgcgctcaacggtgattcctaa

SEQ ID NO: 17427 - DNA, 246 bp, Zea mays
  Peptide Sequence Number=SeqID_60802
atggaggagaacaccaagcaacctttgagcattgttgatcattcacacttcattcttgcacacttgttcgacattcttagcgatttgagctctgttctaggcgagagactccaagttgtggagattcctcgcaaacgggaaaagagtaaagtaaagaagaacatcgtggtattcaagttgatcattggatcacttgagagagttgagtgcaactctcgtccgttgggacgccacaacatggagtag

SEQ ID NO: 17428 - DNA, 941 bp, Zea mays
  Peptide Sequence Number=SeqID_60803
atgcaggcggcatgcaaccgcgccaagtgggcgcaccccttcgactccaacgcgcccagcatggaggcccaggcccacacgtcatgcaaccggcgcgccggttgctacgtgcgagcaactgcaccgccactcgcgccactactgcgcctcctcgactgcagaaccagtaccgcgactcgaggcaaccctgcgtacgacccaacagtgccagccaggcgcgacggtcaattcgaccaaaaatgggctggcagtaatggcggtggcaggcgggcggaagcagcggtcacgtccgggacatgcgacatctttggcaggagaagcgggcgacgcttcgccttcgccataatgaccacgtcaaaaaagcagggaccgggaaagggggataccccgaaagggatccttctccacgaaggaaacgggccccgagcccccctactgatcagacgttcgaaggctggcccctcggaggggttcaacagccgcctcagagcgctcgggctccgcgcccactactggtcagaggttcgagggccggcccctcggaagggttcaacggccgcctcaggccactcgagctccacgcccactactgatcaaggggttcgtaggctggcccacgaagggttcacatccgcctcagacgcagagcgagggatgaccctggccgccaagtctggcctcaggcgccaaaggaaactccgcatcacccgaccccagggctcgggctcggcctcagccctggaagatgatgaactccacttcgcccaacctcagggcccggactcgggctcagccctggaagacgacgaactctgcttctatcgaccccaggcctcggactcgggctcagcctcggatgatgcgaactccgcatcgccgaccccagggctcggactcggtctctgcccagagacgacgaagacccgacgcccgaccctagg

SEQ ID NO: 17429 - DNA, 291 bp, Zea mays
  Peptide Sequence Number=SeqID_60804
atggcgtctatgcgctcaccctcggtgaggggtgcacagaccaacgacctccggacagagctcaaccgcaggcgtgcgggagaggatgcccgggtctctctggagaggacgcgggagcgccgacaaaacttcgagggtcgcaacctcgatcaagactttgttgcggcgggtgtcccattggtcggcgtgggctgcgccgcgctcgtggatcatctccgcgtcgcgacgtggccccccaagttccggccgcacctgccggaaaagtacgacggtgtacgtcactgccattaa

SEQ ID NO: 17430 - DNA, 543 bp, Zea mays
  Peptide Sequence Number=SeqID_60805
atggagcaccgtcccgggctggaaaggttgctggagactgcccatctggagcttgacgggaagctgttcgtgaacacgcagcaggcccctacctggcgcgccaactgtcggcgtttcgaacccggggggtccctgggccgacgattaaattgtcgtcgcgtgccccagcccagatgggtcagcgcgagacggagcgcgaagggggggaagaagccggagggagacaggcgtgagaggcgcaaggaaaggatccagggtaatgatggcgcctcctgcgacgtggtcggtccgagccctgggttgggcgaggtggaggctcctccgaggtcgaggtcgagtctgtcttccggggccgaggtcgagtccgagcccctgggtcgggcgaggcggagaccgtcggctgaggccagggctgagtccgagccctggggtcgggcgaagcggagttcgtcgtcttccggggctgagcccgagtccgagccctggggtcgggcgaagcggagttcgtcgtcttccgaggctgagcccgagtctgagccctag

SEQ ID NO: 17431 - DNA, 426 bp, Zea mays
  Peptide Sequence Number=SeqID_60806
atggagcgggagcaggagttggaccttgagctcaccctcctcccctccgcctgggctacgcaggaagaggcgcccggcttcttcctctgcacgtactgcggccgcaagttctgcacctcccaggcgctcggcggccaccagaacgcgcacaagtacgagcgcgccctagccaagcgccgccgggacatcgccgctgccttgcgtaagcacggtgttcccgtgacgcgcgctggccagttccacgccggggccagccccagcgccagggccactgccggagtcgctggatctgaacgacctgatgctgggagggagaggccagtggcggtggacgagctgcaaggtgctccggcgccctggcaatctggcggcctgctccaccaggtcgagcgcacagaggagctggatttgtccctcggcctgtga

SEQ ID NO: 17432 - DNA, 234 bp, Zea mays
  Peptide Sequence Number=SeqID_60807
atggagcgggagccggagcaggagctggaccttgagctcaccctcctcccctccgcctgggctacgcaggaggaggcgcccggcttcttcctctgcacgtactgcggccgcaagttctgcacctcccaggcgctcggcggccaccagaacgcgcacaagtacgagcgcgccctagccaagcgccgccgggacatcgccgccgccttgcgtacaaagaacgtggtctctgactag

SEQ ID NO: 17433 - DNA, 483 bp, Zea mays
  Peptide Sequence Number=SeqID_60808
atgcgccagggggtgcttgatgaaaagatgctggagaagttggccacgcatgacgtggaaactgtcaccacgctcttcgctctggccgacaagtgtgctaggactgccgagggccgtgcatggcactcggcaccacagaccgggattgcccagacgggtggctcgggtgccgtctctcatggcggcaaaaataaaaagaaaaagaaatgcggctccgagaggccgccgtctgctgctccggtcatcgcagctgtgactgggggccgaaacgagcgcaacaagcgcccacgaccgcagaggggtaacaagcggctcaatgccctgacgttttcaccggagactccaactccggcgatgacaactagtcgggccatcggggagaccccgtccttcctagtctacggggctgaagcctgctttccctcgaaaacctttatgggctcctcatgggcccagtattttaacgagtccatgcaggaatag

SEQ ID NO: 17434 - DNA, 957 bp, Zea mays
  Peptide Sequence Number=SeqID_60809
atgaatggcggcaaccactcccgcagcggtgagccctcctttccgcgactcccccagggccttcagaaggggctggagattcttctgtctgtcgtgtggggtcccgtagcgccagttatcggcggcggcggtcaccactcgctgagaaaacgacgggagcatcccgtcgtcatttcggagatagaaccactagcgctgccaccctttgttcgaggacgcaaggatggcggggatatactatggcgcccgcgactgcctcagctggaggatacagccaccagcccgcactgccgtgcggacccttctctcccccgtcggcaaggcaaaaagctccgcggagaagagatgagtccacaggtcccagtgagggtcaatccccaagtatccttcacaaaccgccgcgaagatggcggcttgcgagatggagttaggactgaggttgtgcagctccaccccgtagacgtgcagaatcgctcgcataaaacggcttgccagcactctgaacccccgctcgtgaaaggagacgaagctcacgacataccccggcggcggggacggggtggctccgctcagggggcatccactccggctgcgggtcactggagagagggcgaagtaaaccctcagcaacgaggacctccagggaccaggaaaggggataccccgaaagggatccttctccgcgaaggaagcgggccccgagcccccctactgatcagaggttcgaaggctggcccctcggaggggttcaacagccgcctcagagcgctcgggctccgcgcccactactggtcagaggttcgaaggccggcccctcggaagggttcaacggccgcctcaggccactcgggctccgcgcccactactgatcaggggttcgtaggctggccctcgaagggttcgacagtcgcctcaaacgcagagcgagggatgaccctgggtacgttcgatacataa

SEQ ID NO: 17435 - DNA, 1143 bp, Zea mays
  Peptide Sequence Number=SeqID_60810
atggcctcgattaagtcctgggtattctttgctttgggataccgggaccctactgtgagcagcccagacccccctgaggggtccgggacccgtctcaggggtctggtttgtacctgtggaggtcttgaacctcgcccagaggtccggactgtgcatccaggggtccgacactttcccgtgggggtccgaacccactatcgccaccttggagtatatcgtctcctctggccacgtggtggccccggagccgtccacgtggaggggtcaggtgctgttcattgtgcgactagagatagccgtgtgggcaccatgccttcatactgtaggtgcctcgataccgctgcattggttttgaaaattcaccttctctgtcttctgcggcggccccgaggaggcgcggaaccggtgcccaaggaggatgactcgtgggcccgggcccccgtgccagagactgggctgtcggtttcggcagaggtgaagaggcgcactaccgcaggcggtggcgtgctcctcacgcggcgagactggtccactgctttcggcggaggtgaagaggcgcactaccacaggcggtggcgtgctcctcacgcggcgattcgccttcttcgcatacggaggctgacgcccaaggagtatgactcgtgggcccaggcccccgtgtcagagactgggtcaccctggcgtgcgtcgggcgagatctttagcggtgtctcggggcatcagtgggggaatctttctttaaaagggattcccccaagcgcggtagccattctcattactcgcagcgccctttcgccctcgagttctccgcgctcttctgccatcgtagccaccatggccttgctagaccctcccgagcacctccagcccgaggtggtactcaacttggtgctcaacctgctcgaatggggtgtgccggcgttcgccggaaagatccgtgtcggtgcctctcctcacggcgatctcgccgccggagagtttgtgctcttcgtctccaacctccccagtgggttggcgctgccgatctcgtctttcttcatgttgctgctggaggagctcggcctccaacctcagcacttcacgccctgcttcatccttcaggcggccatcatcgcctacctccacaagatgtccatggggtga

SEQ ID NO: 17436 - DNA, 663 bp, Zea mays
  Peptide Sequence Number=SeqID_60811
atgccgataaatcctggctcgagcttgtcgttgaacacatacaggacggtaagcagggacacgcggcaaaatcccgagcgggacgcaggggacttcgcgatgggcagcgaggctcgtaaggaagacagggaaggcgcgggccaggagcaccagggacgaccaggcggcacgcgcacatccagctccacagaacgacatgacgaggaagaaactcagtgtcatagggaagatggagtagaggggtgctggcctgctgcaggaaagggagggctccatctatggaagaagctggagccaagcaggaaaggcgaggcactgctgcaggaaagggacatgttggggcgatggccggagcgagctggaggagtagcgcgtcgcgcaatcagaccaaggcacaacatcgtggaagcacgactggggcaaggtccaggcgcgtgttcaggaggtggaagagaacggtcgggtcgacgacactctgatgtgtgtgagacaaggagcagccacggggtggcgtccatgggagcaaggacggtcgcggccgggcgagcagaagatatgaacgcgcgatacaggggaaaatggagcagaggacgccggctatggagggacctcaacagggcactcgcccatggaagatgcagggcgcggtggccatggagatga

SEQ ID NO: 17437 - DNA, 144 bp, Zea mays
  Peptide Sequence Number=SeqID_60812
atggcgagagtggcacgtaccctcctggcaaaggatcgcctaaaaagggtgcatatccttgagagtcttttctttagtcgggttatagtttttgtgctgctgttgatggtgttaagtgccggtgggctcggccttcttatataa

SEQ ID NO: 17438 - DNA, 564 bp, Zea mays
  Peptide Sequence Number=SeqID_60813
atgggcagcgaggctcgtaaggaagacagggaaggcgcgggccgggagcaccagggacgaccaggcggcacgcgcacatccagctccacagaacgacatgacgaggaagaaactcagtgtcatagggaagatggagtagaggggtgctggcctgctgcaggaaagggagggctccatctatggaagaagctggagccaagcaggaaaggggaggcactgctgcaggaaagggacatgttggggcgatggccggagcgagctggaggagtagcgcgtcgcgcaatcagaccaaggcacaacatcgtggaagcacgactggggcaaggtccaggcgcgtgttcaggaggtggaagagaacggccgggtcgacgacactctgatgcgtgtgagacaaggagcagccacggggtggcgtccatgggagcaaggacggccgcggccgggcgagcagaagatatgaacgcgcgatacaggggaaaatggagcagaggacgccggctatggagggacctcaaaagggcactcgcccatggaagatgcagggcgcggtggccatggagatga

SEQ ID NO: 17439 - DNA, 570 bp, Zea mays
  Peptide Sequence Number=SeqID_60814
atgtcggagctgcaagaggtgaggccgcagagcagcgaggtcatggagacagaaacggaggcccatgagcgcacagacgatggctcaccggccatcgttggagaagaagcagcaacacctgagggagaagacgagcttgcaaccagcatggcagaagagatcatcgaggagatccagtgggcagaggcgactgagaactcggggcggggatggtgtactgggcaagagggcggtagatctcaagatgggatccatcacgcgggacaaggtgtagaacaagagacggccaccaaggcggcatcagcggagaaggtgccggccttggtcgacaccttctacaacctcgtgaccgacatctacgagtgggggtggggccagtccttccacttctctccgtccctccctagccactcccaccgcgacgccacgcatgtccatgaggagcgcgtcgctgacctcctcgacgccaggccgggccaccgcctcttggacgtcagctgtggcgtcggcgggcccatgcgcgctattgccgcgcactcgggatcaaccgtcacgggatctaggaggtga

SEQ ID NO: 17440 - DNA, 3780 bp, Zea mays
  Peptide Sequence Number=SeqID_60815
atgctggtgttcgtttctgggattatcaagtatggggagagggtgtgggctctgaagactcgaggattttttgtggggcgaactatgctcctgatgggacaggggcctgcatcaacactatggttttatttaaagacaaagtatcaaggtagagaagagaagctgaagatggtaatgatggtaatgatggagcttggcatgatgttcgatctcctctacaccaaagccaacgtgctccagagaaggattggtgtcctattccggtgtgcttcccaggccttgatggtcgttgccctggttctcttcatgatacgacgtgaggaaggcgcccacaataacaaggttaatgtcgcgattacctacacattattcagtggcgccatttttgtggagacctgttgtgttgctgcggcgattgcgtcgccttggacaagggcacacttgaaggagagcagctgccttcatggcctcagtgactccttgtttgaggctgttcatctgtgcaaatccaccgctaataacatggcacagtttaacttattggatcactgcatctctgtcaactccaaaccaagagttttctcaaaggccctcagtgctattggtctggataagcaatggtacgtccaccacatggataagcaatgctactggtggattatcaaccgtgttttggaacatttggccacattgcccgacgaattctcaggtctagcaactgtacactttacaattaatgcacccactgaacatccagtatggttcaaccagctgagtacatccttcgagcaagtcctctacggcttacacctatacactgacctacatctaagcaggcacttcaacaactgcagcactggtagcgtcgtacaaccacctccacctgagattatgcgacttaaggaagaatgcgagacactatcaaactacatgatgtacctgatggtggtgcatccttccatgttgccagtcaacacggttgcggcaggagatcttgttcaacaacttattggctgggttactaaccaccctggacatggggcgacgacgaccaagctagcaattctgcgagggtactcaaggaccttttacattctggtcatagacgaaccaggccaacacagatcattttattatttgcatcacttacttacgcagatcaaggagatgtgggtgaggcttctcatgtatgctgctggcaaatgcagcggagaggtgcacgcacgccaacttggtgaaggacgtgagctcatcacctttgtctggctactcatgctgcatcatggacttggagacatggcagctgagttcaagcttttaagatctaatgatccaaatgtagccgagcggggggcgtggattgtttcacctccaggaaattatcaagagccgacttgtgccttcaaccacataatgagtgggcaccgaaacagtcatggaaagcgctactctgattatactgaaactggaggcggtaagagaagaaatcctggtgatgatacctatgcccctggtcctgatgacactgtgtatcgctacctctgcgcctctagaaaaattgggagtatcattggcaggggtggagaaattgcaaagcagttgaggactgagacccaagctaagatcaggattggtgagagtgtccctggatgtgaagagcgagttattaccatatttagctcaagtcgaagaactaataccatcgatgatgctgaagataaggtttgccctgctcaggatgccctctttagagttcatgagaggcttgccactgatgagagttttggtaacgaagacagcgaagaaatttcacctcaagttactgttcgcctgcttgtgccatcagaccagattggatgcattcttggaaaaggtgggcacatcatccaaggaatccgcagtgagactggtgcgcaaatacgcgtgcttagtaaggatcatatccctgcatgtgccattagtggcgatgaacttctccagatatctggggacatggtagttgtcaaaaaggctctttgtcaagtgtcatctcgcctccataacaacccatccaagtcacagcatcttcttgcatccagcttgacccaaccgtatccagggggtacccaccttggtggttcctctgctgcacctgttgtagggatcactccagtaattcctccttatggaggctacaaaggtgacgtggcaggagattggccctctttataccaaccccgacgggatgagagctctgcaaaggagtttagcttgcgtttactttgtgctgctgcaaatgtggggggtgtaattgggaagggtggtggaattatcaaacagattaggcaggaatctggggctttaattaaagtggctagctccaattcggatcctgacgatgactgcataattacagtttctgcgaaagagttctttgaagatcctgtatctccaacgattgatgctgcagttcgtttgcagcttagatgcagcgagaaaagtgattcagaattggctgagcagtcatatactacacgcttgctggtgtcaacatcacgtattgggtgcctaattggcaaaggtggctcaatcattactgagatacgaagaacatccagagccaatatacgcattctttcaaaagaaaatgtcccaaaggtagcagcagaagatgaagagatggttcagataagtggaggccttgatgttgcaaggcatgctcttgtgcaaatagctacaaggctgaaagccaatttttttgaaagagagggctcgttatctgcatttccatctgtgatcccttaccatcctttgcctgctggtgtttcggtttcggatgaaccaaaatatctaagcagagacactaagcctgttggacattacctatattcaagtgcttttcgtacatcggatgacatgattccttctgacagctatgcaagttatggtggctcccaggcacctggaggaggatatgcggcttacagcggatacagtgcccgctcctctagtagtggccagttgttcacactgttctttgtaactgataataacttccatcagagtgtagacgtccacactgttggttctgcctctgccttcgtgcgcccctgcacgccgaaatctcgcaccgcgcccctacgccacctcctcctcctctcccctcactgcgccgccacctcctcggttccgcgcgtccgcgcctttggctgcctgactactcatagcaaccgccgtcctctctctcgcccccatccccaacgaatcccacctccgcgatgcctgatatgcgacgagcacgacatcgaccacaccggaaagtacgccagcgactccgacctccagctcgagcgtgcgcttgtctactacaacgaggccagcggcggccgcttcatcccgcgcgccgtcctcatggacctcgagcccgacaccatggactctgtgcgctcgggccccttcggccagatcttccgccccttcggcccgaccgccccatccgcagcgccccacccccgtctgccccagatctggatcccgcccccatcatcgacgcctcctccccgcccgcccgagacccggatcctgccgctccaccgtgatggaacgccgccgaaggggacgacgacatggccgccgccgctgaagccgagcgacgacggcagcggggcgaagcagcgagagatgggaggcgacgacgatggtgctccgtgcccgggcccggtcgtcgggcgggtcctacaagcgccgaagccgagggagttcacgctcgccgagctgcgggccgccacgcgcgggttctag

SEQ ID NO: 17441 - DNA, 336 bp, Zea mays
  Peptide Sequence Number=SeqID_60816
atggacgagtctgcatctccgcatgccgatgtgcctagaccgtcagtctcgcccttgctgttgaaagcatcaccgacgtccgcggataggtgtgtagtatatgtgcgcttaataattatggctagatctgttctcgggtcggggtgtagttgtgctattgtgtggcgaaatgagaaaggaaagacttatgatggtggatccatcacggccgtgatgggttcatcatctgaaaagatgtacctctgccaggatccactcatagtaagcttttctgcaaaagagtctttgaatcttaacaagctttaccttgattcccaaaagctagcatatccttga

SEQ ID NO: 17442 - DNA, 513 bp, Zea mays
  Peptide Sequence Number=SeqID_60817
atgacgacaaactccagttcaaactattcatcacgcactcagcgggtagcggataagaacagggtagcagagttggcaacgagcaccaaggagacaacgacgacgttgttgttgaagatgatagtgatcactgaagttgaagaccgacggacacgacgagaccgcagttgcaagcaaatttttgactacattttaaaacatggcaagcccagcaagcctcatagcgagttgagagtagcgcccgacgacctgaagagaagttgtgtccatggtggtgacgaggacgcacgatgtccatggtcaaggcgtggtcgagcactttggaccgatgaagcgaagttcgacgataagcaccatggaggaatcggcgacgttgctacacacgacgcggagacgaacgacgacaacccacaacagcaccacacatacggcatcaacacactgagcagcggttgtgcttccgtggtgaggagactggagccagggctagacgtcggcgtcatggcgggctaa

SEQ ID NO: 17443 - DNA, 339 bp, Zea mays
  Peptide Sequence Number=SeqID_60818
atggctccacgtgttcgaccgtggctgacacgcctggttcacgccagttcacgcgccctcgccgatccacgaccgcccctgcaccgcgccgtgcctataaagcagcccaaggcctcggccgtacctccccacgcgctctcaatcctgcccgagccaaagttcaccggacttcgcctcgagcacgtcgtgccaccgcccgccaagccacccgagcctcggccaccgcgaccagctccctccagccacttccaagccgcgtcggtcactcagttagcttcgccagtggcccgtgaagctttcgaagtcctcagacccggcagagcctcaccggagacctag

SEQ ID NO: 17444 - DNA, 408 bp, Zea mays
  Peptide Sequence Number=SeqID_60819
atgggcaagaacaacaagcgcaaacgtgagccaactcctccatcggaggagtttggtgactcggagtactcagaggaggagttctcctctgagtctgaggggtctccggctcccgtccccctgcgtgagtcgtctgacgactcagacgactcccaggggcttgcggcggagggctcggatgagtcggagtactcctcggatgaggaggactcggacggcggcggcgaggacgtggacgacgacgacgacgatggcgacggtgacggcagcggcagcggcaggggcagcggcgacggcagcaaggacggtgacggcggcggcagcagcaggggcagcaaccggggcggcagcagcaggggcagcaccaggggcggcggcggcggcggcagcaacagggctagtggctag

SEQ ID NO: 17445 - DNA, 351 bp, Zea mays
  Peptide Sequence Number=SeqID_60820
atggtgctgagggttacccggtccacgcgctccagcggggttacgaactccggcgagcgtgagcgcattgttccgatggggctggtccttggctcaagctcaggaaagcttcacggcctctcgaggaagctatccgaggccttggatcgagcggaggtgggcggaaaagggtttggccacgccgggcgcccacgggcggctgtagctggtcgtggggaggtcgccggagctgcgggcgagctcgggagagttaggcggggtgcagaggggataacggggaagatgtgctcaagtgggtttgacctcgggttggcaagttacgaggaggtgaagttgggtctgtccgactag

SEQ ID NO: 17446 - DNA, 399 bp, Zea mays
  Peptide Sequence Number=SeqID_60821
atggtggagtggcttacccggtccacgtgctccggcgggggtgagagctccggcgagcgtggactggcttctccggcgaaggaaactccgattccttgctcggggagcctcacggaggtgtgcacaagcttctccgagggcaggacggggttggggatggctctgctggccggtctacggtggcagaggggttgggcggccgcgggctcgctgcgcacgggcaaacggcgacgagctaactccgcttctagtgccaaagtggctctagccaaggttggccttttaatcttgtcccacgccttagaagtcggcactatcttggtttggaatgatgatccatggggtgcaccggaggtgcacccaatgggtgtagcccccgaccttcaaatggatttttga

SEQ ID NO: 17447 - DNA, 306 bp, Zea mays
  Peptide Sequence Number=SeqID_60822
atgccgagaaatatggtaaatcgcagattgccctcctcacgcgacctgagacgaggtctcccattccggttatggtgggtacaagtgcggtcactgcacgacggccagtcggggtcagtgaggcattatacgccaaggcgaaactcagctaatgcttttggcaaccaaaccccacagccaaacagctgcatgtctagaggttctctggaggagatggttgctgggataacttggccgaccaccctgccaccgggttggactgtcaagtgggaccctgcctcggctgaggaggagcatgaggagtga

SEQ ID NO: 17448 - DNA, 414 bp, Zea mays
  Peptide Sequence Number=SeqID_60823
atggtgcagagggttacccggtccacgcgcttcggtggggttatgaactccggcgagcgtgagcgcactgttccggtggggctggtcctcggctcaagcttgggaaagcttcacggcctctcgaggaagctatctgagggcttagatcgagcggaggtgggcggaaaagggtttggccatggcgggcgccctcgggtggctctagcgggtcggggggaggtcgccggagctacgggcgagctcgggagagttaggcggggtgcggaggggtgctcaagtgggtttgacctcgggttggcaagttacgaggaggtgaagttgggtctgtctgaccagacttgtctggtggaaactgggcgccaaaacatgtcaaaccaattgggtttgctttcaaatttttctagagtgtcctag

SEQ ID NO: 17449 - DNA, 663 bp, Zea mays
  Peptide Sequence Number=SeqID_60824
atggccctggtcgacgctctgccgggccgtgtctgccttggctaccgcgcccatgccgaactctctctccctcgcgtcttccttccccgcgcgcagctcgccttagctcctgctccttcaggctggctgcgcgcccatccctctgctcgttcttcaggccgccgcccagccgagattctccctcatccccatggcgcgctcctcctggtaccgagctcgcccatggccacgggctgcagctcgccccatctccctagcccccacgcgcgcgcaggcttcctgctcgctcggcttccctcctctcccttcccatggccgagctcttcgctgttgtccgtgcgcgcacgcctgctcctctgtccgcccatggccgctgttccttccctggttgcgggcgtgcggccggcgtcgagtcgtcggactcatccttcccttgctagcccatggaagcgtgccctgctccaactaggtccgaccgtggagctcttctctggtgccaagatgcagtctgtctttctcaacttcgctctagccgtcggagcagtagccatggctttctgtcctcggttttggccgtctcctctgcctccaatctatggcgccatcgcgagctcgccagccgccgttctccttgcctcctcaccggtcgttgaccttgcctag

SEQ ID NO: 17450 - DNA, 498 bp, Zea mays
  Peptide Sequence Number=SeqID_60825
atgtcgtcttcttccttgtttgctgcaaatacaccgccggccggcgcattgtccgaggataccttgagcaacgtggcggtggaggagctacaaccgggtgatacggtggtgttcggcgtttcacggatttcctcggtccgcgtgcaggacatgcagcagcttggatattttggcagcggagtggggcgcgtcccgggggcggaggaggttcccgtgcccgagggagagttggtcgtgtttgaggcgttttcaccgctggccttcgccagcctgcacatcgctttgtggcggagccctcgggtgaaggatgtcttcgaccgagctccgggagtcttcggcgtgaatgctggaggttcaggtgaggggcaactgactgttgtcccgcctccggtggtgaccacttcaccaaaggcggtggtgggggcgaagggtgccgcgcggggacccgtgggccactttctgcgcgagcggcgagattctatcggccgctgccgctaa

SEQ ID NO: 17451 - DNA, 1215 bp, Zea mays
  Peptide Sequence Number=SeqID_60826
atgaatggcggcaaccacccccgcggcggtgagccctcctttctgcagctcctccagggccttcagaaggggctggagattcttctgtctgtcgcgcggggtcccgtagcgccagttatcgacggcggcggtcaccactcgctgagaaaacgacgggagcctcttgtcgtcatttcggagataaaaccaccggcgctgccaccctttgttcgaagacgcgaggatggcagggatgtactgcagcgcccgcgcctgcctcagctggaggatgcagccaccggcccgcactgccttgcggacccttctttcccccgtcggcgaggaaaaaagctccacggagaagagatgggtccacaggtgccagtgagggtcaatccccaagtatccttcacaaaccgccgcgaagatggcggcttgcgagatagagttgggactgaggacaggcggcacctttggcaggcgaagcaggcgacgcttcacctccgccataatgaccacgtcaaaaaagggaccaggaaaggggatactccgaaagggatccctctccgtgaaggaagcgggccccgagcccccctactgatcagaggttcgaaggctggcccctcggaagggttcaacagccgcctcagagcactcgggctccacacccactactggtcagaggttcgaaggctggcccctcggaagggttcaacggccgcctcaggccactcgggctccgcgcccactactgatcaggggttcgtaggctggccccagaagggttcgacaactgcctcagacgcagagcgagggatgaccctggaagacagcgccgcctacgtcgctccgactgctgtgccactcgacagagtgaggctgacagcagccaagtttggcctcgggcgccataggaagctccgcctcgcccgaccccagggctcggcccccggctcggcctcggacgacgaactctgcttcgcccgaccccagggctcagactcggcctcggctccggaagacgacaaactctgcctcgcccgaccccagggctcggactcgacctcggctccggaagacgacgaactccgcctcgcccgaccccagggctcggactcagccctggcctcagacgacggtctccgcctcgcccgacctagggctcggactcgacctcgacctcggaagacagactcgacctcgacttcggaggagcctccgcctcgcccgacctag

SEQ ID NO: 17452 - DNA, 804 bp, Zea mays
  Peptide Sequence Number=SeqID_60827
atgaggaaacaatccgacgcatcggaaaggtcgaggaccttgtctttaacattgacaggaaaaagcaaagaaagagaggatgctttgcatgaagggagaagggtcacttcagggacagttgtccaaatatggccgaacccacaaaggagaggagcaaaggcaaggcgcttacaagtgtcaaaacttgagatgactcttcaagtgaacatgaacctccaaggacacacagccaccaatcctcatcaggtcatcaggcaaatgccttatggcaagagcaccccaggagtatctttggttgaaatgcctaaagttattaagaaagatgtttctacttctcgctttgatttaattgatgaatctaacctctacaatcaagttcttgttaagaatgttgttatagaaacatgttcgaatgagattgcaatggagaatgagaaattaaagcaagaggtggctcgcctttgcaaggctttgtatgacaagaaaggcaaagccaaacaaatccaacctcctcactatgacaccaatgtgggagtaaacaagcctatggagggagaaaatgtgatttgtaggctatgccacaaagaaggccacaagtcttaccaatgcaaggagaagaccggggataagcaaaagcaaaagccaacaagcaaaatctccagcacctacatcaacaaggtggataaaaaggctgttacaccatatttgataaaaaaagaaaaagaatggaaaggtgatagcaatcaaggccaacaagcaagccaacaaaggaaaatgggccaaacgtatttgggtgccaaataa

SEQ ID NO: 17453 - DNA, 69 bp, Zea mays
  Peptide Sequence Number=SeqID_60828
atggggaagcctggcccatcactcctcatgctcctcctctgccgagaaaaagacccactggatatttag

SEQ ID NO: 17454 - DNA, 732 bp, Zea mays
  Peptide Sequence Number=SeqID_60829
atggtttctgtgacacttcgagtgaaaccagagctaactcttccagcaacttcagcccagttggccattactttgctagtgcttcacatgacaggactgctagaatttggtcaattgataaatccagcctttgtgaataatggctggcatctttctgatgttgattgtgtccagtggcacgtaaactgtaactacattgctaccggctctagcgacaaaactgtaagactatgggatgttcagacgggtgaatgtatacggatgtttattggtcataggagtatggttttgtcactagcaatgtcacctgatggacgatacatggcctctggagatgaagatggaacaatcatgatatgggatctctcgactggccgttgtgtttcaccactgctaggacacaactcttgtgtgtggacacttgctttcagttcaccccaagtttctttttatctgaacgcctcttgcatgagcttgcccaaagagcaagtgttcattacagttaaaggaaaacctggcttgataagctgctgtgaaggagcattgcttgaatcggggtcggccgactgtactgttaagctctgggacgtcgctttcagcacaaaagccctgaggacagaggataccaaaggcagctcatcagctaaccgactgagactgcttaaatccctgcctacaaaatcagctcctgtctatagcctgcggtccagcaggaaatgtttgagcgggtga

SEQ ID NO: 17455 - DNA, 576 bp, Zea mays
  Peptide Sequence Number=SeqID_60830
atgtccctgatctcttggtccaactcctcctcctggagtgttggactggtggctttcctcttctggcttcaagcctctcgaagagaaagagtttcctggtttgggtccagtggctgtagtgcagaggtccctgttgctgaagctttcttcagcagcatgacgaaggttagtgcttgccgaaggtggtcgaaagagttcaccgaagcattatttcccttaggatataatgatcttcagacgaaggttatgaaggacataccttcatcaacgttatatatgttaataagagaagaagcatgttggggcgaaggcaaagacgctacccttcgctacagccttcgtctatctcgatgcaccaacaggagcaaaacgaccggcgaggtacacccttcgtcttcagcagaggaacaactacagctgcgggccttgcgtatcaagaaccgtaacctccagaagctgaaagagatcctcgaggccaagcgccaacgtgtctctgtgcaggccaaggtgcgtcagatgatacgagacgaggagcagagggctcaagaactcgagcaagagattgcgctcatgtag

SEQ ID NO: 17456 - DNA, 555 bp, Zea mays
  Peptide Sequence Number=SeqID_60831
atgactctgggtacatctgatacatggccgaggcttgggctatgctcccgaggtaccctaggacatttccgagaccaacaggagcgattctgtaacggaatcccatcagagggaggcatcgagccctcggaccctatcaaacgggaccgggtccggcaaatcacctgcagtcgacagggccaaagtgaccgcagtcacttcgccgctccactgaccgacctgacagaaaacagcgccgcctgccctgctccgactgctgtgccactcgacagagtgaggctgacagcagctaagtccagtctcaggcgccataggaagctccgcctcgcccgatcccagagctcgggctcaacctcgacgccggacgacggactccgcctcgcccaaccccagggctcggactcagcctcgacctcggatgacggactccgcctcgcccgaccccagggctcggactcagcctcgacctcggacaacggactctgcctcgcccgaccccagggctcggactcagcctcgacctcgaacgacggactccacctcgcccgaccctag

SEQ ID NO: 17457 - DNA, 855 bp, Zea mays
  Peptide Sequence Number=SeqID_60832
atggcgttgacgatgaggttgccggcgtcgaagagcgagtttcccaagctgaagatggcccgtgtacaacttcttgctcctagccgtgtcacaggtggcaggccgcgccaccacgcgcaatgggatagtgacggcggcggagacatggggaccggggagaggagtagaggagtctggaagtcttgcgatgttaggagacgccggaagctcgattcaaggtttcaaaccctaaccgcccccagcttgtctggccgccgccacgagcaacagggcctccctgcacgtcctcgggagcagccgccgtctgacatcttgtccgaccaagcccccgcagccacaaccgacggcgcgaggcgcggctgcccgaccacgggacgggcgcttgggcggcgtcccagccccggcacggcagcccccatcctcggcggtgcgaggcgcggctgccctcggccagcgcgggtgcggggtccccagcgcgaggctggatctccgggcggcgcgggcgcggttgggcgggcgctgccccggccgggcgcaagcgcagccgcggcaagggcgcggcctcgcgcgggcgtgacatcgaccgctacgacgcggacgctcgaccatccgcggtgcagacgcctggccgcgtgccttaggatgcgggcgtggctcggagcctccccggtgtgggcacggctcgggctggcccccggcgcggccgatctcgacgccaccgactccggcggctcctcggcgtgggagcctggcaagggcgcgaggtcacgtcatggccggggctggctgcgcgcgctgaagccgcgtcgtggcctcgtatggccggggttgaggatcacgcaagacaacgtttaa

SEQ ID NO: 17458 - DNA, 741 bp, Zea mays
  Peptide Sequence Number=SeqID_60833
atggccgacgaggccctggaccagccgccggacgcgaccccttctccgactccggcgacgccgccggtacccgccaccccgtcccccacggtgctgctccgcccgcggcgggaggcattcgagcacgggctcttgcccatccccaagctcatcttcccggagggtacgctggcgcagaccctcgcccagctcaaggagaagctcgctgcctcggccccggacggacgcgtgcgcgccgcggccctggcggaggcgttgcagatcccgcaggagcaggcggcgctcgccctcgccacgctcgcggctgtgctcccggcagaggaccccgcgctcggcgacggcgccgtggatggttctgccgcggacatccgcgacatgctgctcttcctctacatccagtcttacaaacgtctcgtcccgcggagtgcgcacaaggactcgcccgtcgtggcggacgtctggccgtccacctccgcgttcgatgggtacctctccgcactctccccgatccagcttgttcgcagtaacagccgtcgttttatgccttctcaagctgatgaagaaattcatcagttgtcctatctgcaaaagcatatggcgaatattcttactctcttggcagattctgttgagggtgatggtgatgattcactggcagccatggcgcggggccttggtaggtgtgtggcacggatgcacgtgaggctcaagcatgtggcacaactgcacgtctgcacatag

SEQ ID NO: 17459 - DNA, 876 bp, Zea mays
  Peptide Sequence Number=SeqID_60834
atgtcgggaggatccgccaagagggagatggaaatgaccacaagccacgggaaggctccatcgaaggagtccgacaccaaaggaagggaggaatcacctccccgtgtcaagtcgcatcgaagtggcgacaagaagaagaagatgaagaaagtggtaccatccgtgggagatgaagcatatgattcggatgaggtcgcctgtcggtaccctgaaatagggcaccagaccccaccacgtggatggctccggggccgccacgtggccagagaagacaatatccccaaggtgtcaagagtgggtccggacccccatggaaaagtgctggacccctgtgtatacagaccagacctcagggtaaggtccatgacctccacaggtgcaaaccggacccctaggatggattctggaccccctctgtgtggggtccaggccactcacagtagggccccgggattccgggacaaagaatacccaggccttaatcaaggccaggcgggggtccggagccaacacgtgtctggaccataccgtgtacgcccctgctccccgctcaggcagagccctgatgctgccacgtggcctactacccgtgacgtaagccagcgggcggagcctgacgtaaggtctctgggccgcgcggcctctgcatttattacggataaggcgcgccgcctgtccattccactggcaggtgatgtgtcgcctcagcatttaatgagccccgtccactcctctgacaggcgatgtgccgcttcagcatttaatgcagtacgctcgtgctgcggcgtacactatgctcatcatcactcgcgcgttaccgaggaagcagccgcgacatatcaatatcgtgtgggctacggacattacggagcctag

SEQ ID NO: 17460 - DNA, 399 bp, Zea mays
  Peptide Sequence Number=SeqID_60835
atgaccaacaactgcaagcctagagtaattagcaacctcgactattgttctgagcccccatgggtaggacctagagcttcgcatgggcccatcaggtccctagggagggggtccggaagggctccacgacccaagtataaagatgacctgaaccgtggcgtatccgccgacatttgccgcatgacggagaagcaacgtctcaagaggttcacaatcaacctcagacggtgtctcaataggcacacaaccgccatcaagcggaaggcgatgggagcctcacccacaacaaagaagtctaccgctgccaccttcccaccaatctccataatgcctgaggtcacctctgtctacccccagcctgagttaacaaggcttgaggctcacactatcggccaatag

SEQ ID NO: 17461 - DNA, 114 bp, Zea mays
  Peptide Sequence Number=SeqID_60836
atgggaaccaatgggcatctcgaccttgacacgggaggtaaatccgtcgatcaaaagctcgaaggaaagcaagggtacaagcgtgacgcgaaagcgaatgccaagtcagcgtga

SEQ ID NO: 17462 - DNA, 516 bp, Zea mays
  Peptide Sequence Number=SeqID_60837
atggctgaaaggtaccaacttctacgaagttgcattcctccaacaacaaggcggaaggattgcgggtgttccccatccgggggctcggaaggtggaaagacacgatgcataagggagcgcgaagacatggtcgcccttcaagggggtcaccctccttttaaaggcgactctccctacttgcgtccccagccgtcgtgggctgagtcttctccaacacgctccaagggaccgggaaagggggataccccgaaaaggatccttccccgtgaaggaaacaggccccgagcctccctactgatcagaggttcaaaggctggcccctcggaggggtttaacagccgcctcagagcgcttgggttctgcgcccactactggttagaggttcgaaggccggcccctcggaagggttcaacggccgcctcaggccgctcgggctccgcgcccactactgatcaggggttcgtaggctggccctcgaagggttcacagccgcctcagacacagagcgagggatga

SEQ ID NO: 17463 - DNA, 927 bp, Zea mays
  Peptide Sequence Number=SeqID_60838
atggcgcctcctgttgacgtggtcggtccgcgccctagtttgggcgaggtggaggctcctccgaggtcgaggtcgagtctatcttccaaggtcgaggtcgagtctgagcccccgggtcggacgaggcgtagaccgtcggctgatgccggggctaagtccgagcccttgggtcgggcgaagcggagttcgtcgtccttcggggctgagcctgagtccgagccctggggtcgggcgaagcggagttcgtcgtcttccggggctgagcccgagtccgagccctggggtcgggcggagcggagtttgtcgtcttccggggctgagcccgagtccgagccctggggtcgggcggagcggagtttgtcgtcttccggggctgagcctgagtccgagccctggggtcgggcggagcagagttcgtcgtcttccggggctgagcccgagtccgagccctggggtcgggcgaagcggagttcgtcgtcttccggggctgagcccgagtccgagccctggggtcgggcggagcggagtttcctatggcgcctgaggccggacttggatgctgtcagcctcactctgtcgagtggcacagcagtcggagcggtacaggcggcgctgtccctctgtcagacaggtgtgcaccggacagtgtccggtgcgccaacgactccaaagcgccaacggtcggcttcgccaaagaaggaaagaaatccgcaccggacagtgtccggtggtgcaccggactgtccgatgcgccaggcgacagaaggcaagatttgccttcctggaatgctctcaacggctcctagctgccttggggctataaaagggacccctaggcgcatggaggaggacaccaagcattctctaagcattcctaagcaccaagacttcgattccgcgcatttgattctttgtgatagcaactag

SEQ ID NO: 17464 - DNA, 2484 bp, Zea mays
  Peptide Sequence Number=SeqID_60839
atggcgcgagcgccaagcatgccggcggcgacggcggtagggatcgtggtcgtgatgctgctggccgccggcttccgcggcgcggaaggtaaatcgtgcacgaacgcgttcccgggattgacctcgcacacggagcgcgcggcggcgcagctgcggccagggccgccggcaacggtgctccagcccatcatccaccaccaccgccacggacgcgagcagcacctcaccccgaccgacgagtccacctggatgtcgctcatgccgcgccgggcgctgcggcgcgaggaggcgttcgactggctaatgctctaccgcgagctccggggcggcggtggctccgcgcggcccggggtcgcggctggggcgttcctctccgaggcgtccctgcacgacgtgcggctggagccgggcagcatgtactggcgagcccagcagaccaacctggagtacctgctcctcctcgacgtcgaccgcctcgtctggagcttccgcaagcaggccggcctgacggcgccgggaactccctacggcgggtgggagggccctggcatccagctccggggacacttcgttgggcattacctgagtgctactgcaaagatgtgggctagcacacacaatgacactcttaatgcaaaaatgtcatctgtcgtcgatgccctctacgattgccagaagaagatgggcacagggtacctgtcggccttcccatcggacttcttcgattgccttgaggccatcaagtctgtctgggctccttactacacaatccacaagattatgcaaggtcttcttgatcagtacacagttgctgggaattccatggctcttgacatggtgataaagatggctaattatttcagtgaccgggtgaagaatgtcatacagaattatagcattgagaggcactgggaatctctcaatgaggagactggtgggatgaatgatgttctctatcagctctacacgataacgcacgatatgaagcatttgacactagctcatctcttcgataagccatgctttcttgggttgctggcagttcaggctgacagtatttccggttttcattcaaacacacacattccagttgtcattggtgcgcaaatgaggtatgaagttactggagatcctctttacaaggtttctcgcaacctattcagatggacaaaggaaatagcatatgcagattactatgaaagggcattgataaatggtgttttaagcattcaacgggggacagatcctggtgttatgatttacatgctaccccaggcccctggacactcaaaggctgtgagttatcatggttggggaacaaagtacgattcattctggtgttgttatgggacaggtatagaatccttttcaaaacttggtgattctatttactttgaggagaaaggagatccacctgcactcaatatcattcagtacataccaagcacttacaactggaaagcagctgggcttactgttactcagcaaatcaaaaccctcagctcttctgaccagtatcttcaaatttcattctccatttctgcaaacacaagcggtcagactgccaatataaattttagaattccgtcatggacatttgctgatggtgcaggagcaactttaaatggcaaagatttggggtctatatctccaggatctttcctatcaatcaccaaacagtggaactccgatgatcacttagcgctacactttccaatcaggttaaggacggaagcaattaaagatgacagactggaatatgcatcccttcaagcagtcctgtttgggccatttgttcttgctggcctatccactggtgactgggatgcaaaagctggcaacggcagtgctatttcagattggatcgccgctgtccctccagcacacaactcacagctggtaaccttcacacaagtatccaacggaaaggcatttgtcctctcaagtgcaaatggcaccctgacgatgcaagagcgacctgaagtcgacggcaccgacgccgccatccatgcgacattcagggctcaccctcaggaggactcaacagagctgcatgacatctacagcacaaccttgacgggaacttccattctgctcgaaccattcgacttgccaggaaccgtgatcaccaacaacctcactctatctgcgcagaagagctccgattccctcttcaacatcgtgcccgggctcgatggaaaccctaactcggtctccctcgagctcgggaccaaaccaggatgcttcttggtgacgggcacgaactactccgcagggacgaggattgaagtcaactgcaagagttcccttgagagcattggcgggatactcgagcaggcggcgagcttttcgcaaactgacccattgaggcagtatcacccgatcagctttgtcgcgaagggggtggccaggaacttcctccttgagccattgtacagtttgagggacgaattctacacggtttacttcaacgtcagggtctga

SEQ ID NO: 17465 - DNA, 198 bp, Zea mays
  Peptide Sequence Number=SeqID_60840
atgaagccttgccttgttaaccttgcattttcacccccacttgctaagccccccaccataagtgagctcattgttgcttttttggaccagaagtttgcagatgaagattttgatggtgaactcgatggatggtctagtgatccccccggtcatcttcatgtggaaggttgccatgttctgctgtacttttatgagtaa

SEQ ID NO: 17466 - DNA, 1758 bp, Zea mays
  Peptide Sequence Number=SeqID_60841
atgggaatagaaggcattgcagccacagtcaccgaggaccctgaaccctcaattcctccaggatttggaccttttgctgcctcggcatcatggggaatccaaaacgatgttaaacctgctgatgatcattctagttctgttttagcattacagagcatcgacgacgatgtggaaattttggaatatctatccagttcagtggatcaccagagtgacacaggttgctgtatttctgggagcaatacctgtaggaaatcactgcgtaatagacctccaatagattatagccgctttgatcagattgcagatgaagattctgatgctgaagtagcagacaagggtgtaaatgcagtgaaacacagacaacaattccctaaaggagtacttcgaggatgtccagaatgtgccaattgtcaaaaggttattgcaagatggaatccatctggtgcacgtaggcctgttcttgatgaggctcctgtttactatcctaccgaggaggaatttcaggacacattaaaatacattgagattatccgcccaacagcagaaccatatggaatatgccgtattgttccaccagcttcatggaagcctccatgccttcttaaagagaaaaacatttgggagtgctcaaaattttctactcgggtacagaaggttgacaagctccaaaatcgtaaatcgcccaagaagagcagaagaggtggaatgatgaagaagcgtagaaagatttcggagactgaagaaaacaatcaccatcaaattggaatgcagcaaaaccaagagagatttggatttgaaccaggaccagagttcacactacagatgtttcagaagtatgcagatgacttcagtgatcagtattttatgaaagataaatgcagagattcaccaccatcagtggaagatattgaaggcgagtattggcgcatagttgaaagaccgacagaggagatagagtcacactaccttccaactgaccagaaaattcattctcataaggtaatatatggtgccgatttggagactggaacttttggcagtgggtttccaaagttatgtcctgaaatgaaatctgatgtggaggataaatatgcacaatctgggtggaatctaaataacctgcctagactacaaggttcggttctttcttttgaaggcggtgacatttctggtgttttagtgccttggctttatgtcggcatgtgtttttcatctttctgctggcatgttgaagatcatcatttgtactcactgaactacatgcattggggtgctccaaagatgtggtatggagttccagggaaggatgctgtgaatttggaggctgcaatgaggaaacatcttcctgagttatttgaggagcaacctgatttgcttcacaacttagttactcagttctcaccatcattgcttaaatctgaaggagtaccagtctaccgatgtgttcagcatgagggagagtttgtcctgacgttcccacgggcataccatgctggttttaattgtggcttcaattgtgcagaagctgttaatgtggcacccattgattggttgccggttggacaaaatgctgttgatctttatcgtgaacaagctcggaaaataactatctcccatgataagctgttgcttggggctgcaagagaagcaataagagctcagtgggacatcctatttctcaagaggaattcttctgttaacttgaggtggaaaagcatatgtggacctgatagcacaatatgcaagtcactgaag

SEQ ID NO: 17467 - DNA, 864 bp, Zea mays
  Peptide Sequence Number=SeqID_60842
atggagcttttccaaggcgtctcgagcccgcatccactcgtgggcccgggccttctccgcgtccttctttttcttcttctcctccgcggcaacccgccgcgctgctcggtccaccgcatcctctgggacccgtggcagggaaggcttgtgccaccctacctcctggagacgaatggaaatcccgacagtaagaaccaggggcaacccgacgcaagaagaaggaaggagtggacactcactagagttacgcacccttggtcagggcgcatcaagggctgggaaagggcgctagcatccggtttccccaacgcgacggccacccgcccgtggagaacgtcgacgggaagaggatccgaggacatccgtgagccctccaagtcagcctccggcgtcatctcccaaagcggtaaccgccgctccgccaagggaagcaccctccggcggtggatggcggcaatcacccccgcggcggtgagtccccctttccgcagcgcctccagggccttgagaaggggctcgaggttcttctgtctttcgtgcggggtcccgtggcgccaagcatcggcggcgacggtaaccactcgctgggaagacggcgggagcatctcgccgtcgttccggagccgccggcccgcactgccgcgtggacccttctctcccccgtcggcgaagcaaaaagctccgcagaaaagagatgagtccacaagtcccagtgggggcgatccccaaatacccttcgcacaccgctacgaagatggcggcttgcgagatggagttggggctaaggttgtgcaactccaccccatagttgtgcaggatcgccgcataaagcggctcgccggcacaccgaatccccgctcatga

SEQ ID NO: 17468 - DNA, 282 bp, Zea mays
  Peptide Sequence Number=SeqID_60843
atggcgtacttcttccgtggcttcgtcaatttgcctctgaaggtcggctacatctccatgttcctgatttcttggtccaactcgtcctcttggggtgttggactagtggccttcctcttctggcttcgggcctctcgaagagaaagggtctcctggttcggatccagtggctgcagagcggcagcccctgtcgctgaagctttcttcggtggcatgacgaaggttatgaaggacgaaccttcatcaatacaacatataaataatgaagaaggaatcatatga

SEQ ID NO: 17469 - DNA, 312 bp, Zea mays
  Peptide Sequence Number=SeqID_60844
atggggatgtccgccgtggagcgggcatacatctattccgtcgagcgtgcagggctcggcaagtcggatggcttggagaagaaggtctcctcggaggaggcgaaggactccttggactccgaggaggcaagcgacgatgagggcaacaacggcgagggcgacgacggcagcagcgatggtggcgatgatagcaccgagggcagcgttggcagcggcaagggcagcgacggcggtgatggcggcgacggcggtagcggcgacgacaaaagcagcggcgacggtgacgccggtggcaatgtgccactgacttaa

SEQ ID NO: 17470 - DNA, 693 bp, Zea mays
  Peptide Sequence Number=SeqID_60845
atgggtgcgactaagtcaaggatcggtccattcgagggacgcgatcacgcctcgcccgagcccagcctcgggcaagggcagccgaccccggaggatttacgtctcgcccgaggacccccctccagcaacggacacaccttcggctcgctcgaggcccagtcttcaccaagaagcaaccttggccaaatcgccacgccaaccgatcaaatcgcaggggcatttaatgcaaagggctcggactcgggctcagccccggaagatgacgaactccgcttcgcccgaccccagggctcggactcgggctcagccccggaagatgacgaactccgcttcgcccgaccccagggctcggactcgggctcagccccggaagacgatgaactccgcttcgcccgaccccagggctcggaatcgggctcagccccggaagacgacgaactccgcttcgcccgaccccagggctcggactcagccctggcctcagccgacaatctctgcctcgcccgacccaggggctcggactcgacctcggccttggaagacagactcgacctcgatctcggaggagcctccacctcgcccaacccagggctcggaccgaccacgtcactggagtcgccatcattaccctaccccaagctgactcaggctacggggaacaagaccggcgtcccatctggctcgctccactaa

SEQ ID NO: 17471 - DNA, 924 bp, Zea mays
  Peptide Sequence Number=SeqID_60846
atggccataatctcaaagatttggggccaatccgcgcttgaactcgacctctctctgcgctgcctcgtgctcgacgctgtgccagacgctagagcacgcactggtctttataagccctcggacctggcagaacttcaccggaaggcgaagatcgacctcactggacttcggccgcccgcctgcgcgcgtagactgggcactccgaacctcccctacaccctcgaccacctcatcggagcaatctcgccgccgctccagctcgggcgctcggctgcgggctgctccgctgttgcctgctcgcttgctgatgctggctgctcccgcctggccgtctccctgctgcttgctctcgtgcttcgctactcagtgctcgctctccagcctccagctcaagtgctcggcgaccaaacaacctggcaatcaataagaaacatttacaaacgtgagacagaggccatcctaccagagtttctgaataacctttgtcagtttgaaatggaatacgctccagcagaagaaatggctctcaaacttctgtctgtaatggcggccattcgttgggatgacgagccagataggattgaaagcatcctcacttcaacacttctagaaggctctgttgtatcaaagattgcaagtgctgcttctgctgatccacttgcttctaccacttgggaagagcaagctcataggcgcggtaatagtaaactgcctcctccttgggcaatcgtggccattgctattcttggtttcaatgagatcatggaatcccatttatctgttcttgctatttgtgggctacttgatggtcaaagctttggcgatgcagctagatgtcagcagagaattccagaatggagtggttcctgggataatctctgtgtcggtgaagctcctaccaacgatacagaacctactttctaa

SEQ ID NO: 17472 - DNA, 489 bp, Zea mays
  Peptide Sequence Number=SeqID_60847
atgggcaagaacaagaagggtggaagttcgtcgcaccactccggcaacaagtggaaaagcgagccaagtcttccctcagaggactttggggactccgagtactcggaggaggagttttcctccgagtccgagggggcgccagtctacgcctctcccccggtgtcgtccgatgactcggacgattcccaggggatcgccgccgaggtgtggacgtacatccgggtcgtcgcgcgcttcgggctcgagggctcggatgagtcggaggtctcctcggacgaggagaactcctccgactcgtccgaggaggagagcggcgataacgacgacgacgaaggcgatggaggtgacggcggtgatgacggcgacagcgacggtaagggcgacggaggcaatagcggcaagggcgacgacgacggcggcaagggcgatggcgacgacaagggcagcggtggcagcagcaaggccagtggcaaagcgccactggtttaa

SEQ ID NO: 17473 - DNA, 162 bp, Zea mays
  Peptide Sequence Number=SeqID_60848
atggtgggtacaagtgcggtcactgcacggcggcagccggggtcagtggagcattgtttaccttgcaaggataaaaactcgattcgaatcgtctacttctcgcagctaatgagactgcttgaccccttgtactacatcgagtacgatttaggatatggttga

SEQ ID NO: 17474 - DNA, 573 bp, Zea mays
  Peptide Sequence Number=SeqID_60849
atggagatgaaatacacatgtgcaaatccaatattcttaaaatcaatggaaatcttcagaagttacaattatataggcaaagcctcatcccggtttatagaaacagaacccgggagggcaaccaaatcaatctaccaaatcaatcacacgagattacaggagccaatgatggaaggtgagatctcctttctaacaccccctcgcagtaggaacgtcggtggaacaaacgttcagactggaccgaaactccaaaaatacagaagacgacatgcctttggtgaaaatatcgacgtactgggaagtcgttggaacatggagaacatggacagccccagcagccacacgctcccggacaaaatggagaagctgatgaagccaggaggcttcagcaacaccgttggcaacaacacgatattcagcttcggcactggagcgggagacagtttgttggcgcttgctgttccaagagatgaggttgtcaccgaggaatactgcatagcccgaggtcgaacaacgagtatcgggacatccggcccagtcagcatcagtgtcgacagtgagggcgacgggtga

SEQ ID NO: 17475 - DNA, 432 bp, Zea mays
  Peptide Sequence Number=SeqID_60850
atgcaccgaggagctgcacttgcagcaatgtcatatatgtcgtgttttcttgagactgcccttgctgctgtgctagaatctcctgagtgcatccctaacgggtcacctggtgtggccctaatccaaatcttggcacgctgtggtgaaggtctattatctaatgtgctttatgctttacttggtgtatcagccttgtcaagggtgaaatctttgccttctgagtatctaaagcaaggggaggctgaaataatagttccatcgtggctcaaggtgcttcaggatgcaggctcagactatcttcacagcaggactggtgataatataagaagccatcaaggttacatgcaagggaagggtggtagaactcttaaacgtataatcagagatttcgcagaaagccaccggaatgttccaatccccagtcctacatga

SEQ ID NO: 17476 - DNA, 672 bp, Zea mays
  Peptide Sequence Number=SeqID_60851
atggtcaacagggagccatatcctctggacatcagaggagaactagatgacacaacagccttcaaaaacttcaagaagtggggaggtatagaattccgtctaccttttggaagagtactcagccctacagaaagtttcatccatgaactagatgagaaggtcctcttccatgaacaagttcaggctctggagaagtctggtgattgtttgtctaaccttgctatttacacttctattaaaactgactgcagaggtccactttgggcaacggaggacacagatattgcagttgaactttacaagctcagtgtttccaccctagatctattgaaactagcatccaaagaggaacatggtgcttatgtcagtgcatggtacaatatgcttctgtcctgtgctcaagaattgaagcatggtgtggcactttggcaagagttttatcatgcaaatgtctgcgacagagtagtttctgaaggtggtcactacttgattgctcttagggagatatatagagttgcacagattttatacttatccttgcagtgtttcaagacctgggttcttgcaaatcctggaatgttgagtaaaatgttgtcttgtttggacagctgcacttatatacgtaaaccgaacaagtaccgtgctgattcgagggttgttcttggaagatag

SEQ ID NO: 17477 - DNA, 183 bp, Zea mays
  Peptide Sequence Number=SeqID_60852
atggaggtattgaggttagaactaaggaggagagcaacaagtacctccaatggatgggttgcaatcaaaggagcacatgaatcagacgttgttggcttctcagtagggataaacccaggtacttgtgggttgccaggaaggagttcagagctcgtaactgatgatggcactggcttgccgtag

SEQ ID NO: 17478 - DNA, 1353 bp, Zea mays
  Peptide Sequence Number=SeqID_60853
atggctgcggcggccgggggcggcaggcggccgtgggtggtggacgtggagaagaagctgggcgaggcggacgcgtcggtggaggtgtcgcggtggcagcggcactgcatctaccgcgtcccggcgtgcatcaaggacctgaagcccaaggcgtacaagccgcaggtggtgtcgctgggccctttccaccacggcgacgcggagctggtccccatggaggagcacaagcggcgggcgctgcggcacctcctgcgccgcgccaagaggccgctggaggacttcgtggccgccgtggaggagatcgcggagccgctggagagcgcgtacctggacctcggcgccgagtggcgcggcggcgggagggagcggttcctggaggtgatgatcgtcgacggctgcttcctgctggaggtgatgagagccaccgtcctcgacgggaagaacaccgccgactacgcgcccaacgaccccatcttcagccaccacggggtgctgtacatggtgccgtacatccgccgcgacatgctcatgctcgagaaccagctcccgctcatcctgctcgagaagctcgtcgccgtcgagactggcaagcctacgaacggcgatgccatcaacaggatggtgctgaggttcctgtccccgacaccgcggctaccacccaccggcgtcggcatcgggctccacgcgctggacgtgcaccgccggaacatgctgtacgggcactaccagcaccgcccccggcgcgacgtgccggagacggacatcatccggtccgcggtggagctgtacgaggccgggatccggttcaggaagagcgtctcggacagcctgcacgacatccggttccggcacggcgtgctgagcatgccggcggtgacggtggacgactccaccgagtacatgttcctcaacatgatggcgttcgagcggctgcacgtcggcgccggcaacgacgtgacggcgtacgtcttcttcatggacaacatcatcgactcggccaaggacgtggcgctgctcagctccaggggcgtcatccagaacgccgtgggcagcgacaaggccgtggccaagctcttcaacagcatctccaaggacgtggtgctggagcccgagagcgcgctggacgccgtgcaccgggaggtgaacgcctactgccggaagccctggaacatgtggcgcgccaacctcatccacacctacttccgcagcccctgggcgttcctctccctcgccgccgccgtcttcctgctcgtcatgaccgtcatgcagaccgtctacaccgtcatgcaattctaccagggcggcggcagcggcagtgacggcggatcgtcggcggcgccggcgccggcgtga

SEQ ID NO: 17479 - DNA, 419 bp, Zea mays
  Peptide Sequence Number=SeqID_60854
atggggcataagatcgcgcggacgacgcaggcgtcgacagagtactacctccacgacctgctgtccacctacaatctcatgctcctcgacgtcgacagccgcggccgcttcctcaagtccgtccgctgcaagcacgacgaggggttgctcctcgtcaaggtctactttaagcccgtcggcgagtccatagacctcaaggagcacgacctgaggctagagtggattaggaacgcgttcaaggggatcgaggggtcccacgtttggcccttccagggacgttatgatgtttgttgccctatgatgtctgcttgggatcttcaaaggcttggcctaaagcagaattcaagagactccaccgcgacacgcttcgacgaccatgggtctgcgacatgtatcgcagtgggcctcggcatactgag

SEQ ID NO: 17480 - DNA, 1053 bp, Zea mays
  Peptide Sequence Number=SeqID_60855
atggccgtgcaagcgcagttcggcggcctcgccgccgggtgcctgcttccctacggcggcggcggcggattggccgaagagcagctgcacctgcaggcgctcctatcggccgccgcgggcagcaaggcggcgcagcagcagcgccactgcgcggccggcgtggccagcgccgcgcagagcgagctgacgtgcaacggcgtcgtcggcttgggaggcgtggtggcgtcgcggaagcgcggcagggacggcgagctcgaggagtaccagcagtacgtgccgccctcgtcgaccgcgctgctcccgatcccgggggcgcatcatcagaggccggcagcggggagcgtcccgatggctgcggcgacggcgacgaccagcgggcgcgcgctgctggtggtggtggcggaggcggagctgcggcggcagggcgcggaggtggacgcgctggtgcgcgccgggtgcgagcggctgcgcgcgggcctggagcgggcgcgggggcggcagcgcgaggcggtggcgcgcgccgccgcgcgcgcgctgcgggagaaggaggcggagctggcggcggcccgggcgcgcgcggcggagctggaggagcggctgcggctggcggccgccgaggcgcaggcgtggtgcggcctggcgcgcagcaacgaggccgccgcgtcgggcctgcgcgccacgctcgacgccctgctgctccgctgcgcgggcgccgccggtggtggtgccactggtggtgcggcgacgcggcccgccgccaccgcggccgaggaagtggaggagggcttcggcgagtccggcggcacggacaacgacgccgagtcgtgctgcttcggcggcgacgcggcctcccccgcgaggtgggcgtggtgccgggcgtgcggcgagcggaaggcgtcggtgctcctgctgccgtgccggcacctgtgcctgtgcaaggcgtgcgagccccgcacggacgcctgcccggtctgctccggcgccagaacacggccatccacatcgcgcccaactgatggcgtcggctccggcgatctcgggcagcgccactaa

SEQ ID NO: 17481 - DNA, 585 bp, Zea mays
  Peptide Sequence Number=SeqID_60856
atggcgtcattgctgcaagtgcccccacaatcaactccattgccccctgcctctccctcactgcgcgtccgctccatcctcggcctggtgcaggtgcggctgtcggcgccgtgctacgccaagtacgacaacggtgacctggcctacttcgacaacgtggtccgcggcaacctgagcaatggtgcgctccgcggcgtggagggcctctcccaggaggagctcttcgtctggctccccgtcaagggcatacttgtccaggaggagctcggggtcatcctgttcgacatcggcttcgcccacaagagcctctcgaggtcgctcttcgaggacccgccggactacaagccgtcggccgccagcgggatgagcgccgccgccgccaggtggaagggtaggcaaggtgagattccgacacgccactgtttcaccacgcttcaccacgcccccgccctgacgcctccgctcgtgatgtcgtgcccctcctcgcgtccgccgcgagatccacgcccttcccccccaaaccctgtcctacacctcgtggccccgcctccgctcgcgatgctcctgaccgcctcaccgccgtga

SEQ ID NO: 17482 - DNA, 201 bp, Zea mays
  Peptide Sequence Number=SeqID_60857
atggagcctggcggagggacaactgtcggagctgttgagtccttgctgacgtcctcttgcttccgtaagggggctgagagccgccgtcgtcacagagttgggcgacgtggaagctcctccgaagccgaggttgagtctgtcttccgtggccgaggtcgagtccgagcccccgggtcgggcgaggcggagaccgtcggctga

SEQ ID NO: 17483 - DNA, 612 bp, Zea mays
  Peptide Sequence Number=SeqID_60858
atgaacaaaaacactggcattcaaagtgccattacaaacagaactccggttccccctccgcaggtacgaacaaccccactcgatgggggagggcctgcggagcaacagaagaccgacgaacggcgcgccgtcgcccgctccagcagcagcgacgatgacgacttctgctccggggggccgaacagcggcagcactgacctcagggcggatgctgctgccaagaggcccccgcccatgcccaaactcgtgaggcaaggacaggcagaaggccgtagagttggaggcggcgcctctggcaggagaagcaggcgacgcttcgccctcgccgtaataaccgcgccaaaaaagggaccgggaaagggggataccccgaaaaggatccttccctgtgaaggaaccaggctccgagccaccctactgatcagaggttcgaaggctggccccccggaagggttcgacagccgccttagatcgcgtgggccctacacccactactggtcagaggttcgaaggccagcccctcggaagggttccacggccgcctcaggctactcgggctccgcgcccattactgatcaggggttcgaaggctggcccccgaagggttcatag

SEQ ID NO: 17484 - DNA, 891 bp, Zea mays
  Peptide Sequence Number=SeqID_60859
atggccgtacaagcgcaattcggcggcctcctgctcccaccctacgcggtcgaggaccagatgcgggcgctcaaggactacggcgtgctcctgtccgccgcgcagagcgagctgacgcgcaacgtcgtcgtcggcggcggcggggcggccgccatgcccctgccgtcgcgcaagcgccaccgcagggaggacgagcaccggcactacaacgtggacgtgcctctcccggggatggggtcgctggccgcagacccgacggcggcggcgtcgacgagcggccgggcgcccgccgacgccgaggtggacgcgctggtgcgggccgagtgcgagcagctgcgcgcggggctggaggcggcgcgggcgcggcagcgccgggcgctgctggcgcgcgcggccgcgtccgtccttgcgcggcgggcgcgggaggcggaggcccggctggaggccgcgcggcgacgcgccgcggagctcgacgagtgggtccgcctggccgccgcggaggcgcaggcgtggtgcggcgtcgcgcgggccaacgaggccgtcgccgcgggcatgcgcgccacgctcgacgcgctcctcctccgctcctcggccgccgccgccggccgcgagggcgagggcgactcgtccgagcccgggcccgaggacgcgcagtctcgctgctcctgctgctacgttgaggacgttgaggcgacgggcaccgctgccgccacgccctcgccattgtggaacggcaggtgggcgtgcagggcgtgcggcgagggcgaggcgtccgtgctgctgctgccgtgccggcacatgtgcctgtgcaaggcgtgcgagccccggacggacgcctgcccggtctgctccggcgccaagaacgcgtccatccacatcgcgcccagctga

SEQ ID NO: 17485 - DNA, 675 bp, Zea mays
  Peptide Sequence Number=SeqID_60860
atggcgcctcctgttgacgtggctggcctgcgccctaggttgggtgatgtggaagctcctccgaagccgaggtcgagtctgtcttccgtggccgaggtcgagtccgagcccctgggtcgggcgaggcggaggccgtcggctgaggccagggcggagtccgagccctggggtcgggcgaagcggagttcgtcgtcttctggggctgagcccgagtccgagccctgggtcgggcggagcggagttcgccgtcttccgggacttagcccgagtccgagccctgggtcgggcggagcggagttcgccgtcttccaggacttagcccgagtccgagccctgggtcgggcggagcggagttcgccgtcttccggggctgagcccgagtctgagccctgggtcgggcggagcggagcttcctatggtgccttcggcagggctgactgcctgtcagtctcactctgtcaagtagcaccgcagtcggagtggcgcaggcggcgctgtccttttgtcaggccgggttgcttcttagcgaaggcagggcctcgggcgagccggaaatatgttcgccgttggaggggggcctcgggcgagacggaaatcctccggggtcggctgcccttgtccgaggctgggctcgggcgaggcgtgatcgagtcgcttgaatggactgatccctga

SEQ ID NO: 17486 - DNA, 390 bp, Zea mays
  Peptide Sequence Number=SeqID_60861
atggcctttcccaagtcattgctaatcctctccaaggttcctaagcaacaaaacatcaatgaccgcatgtacctccgcgaccgtcatccgtcgtttggtcgtctgcccgacgccctgaccttcgcttgcgaccgatgttgggttgctcgtacagccgcagtccgcagcccgcagcctgatagccctacctctgcccctccaccaagcgtccttcgcctttggcccttcgccgtggcgcccgaccccctagcgttcaccaccatggtgctgcatctggagcacttggacgaaccgtgcgaggacgtgaaggacgccggcgactgcacggcactgctcgacgcgttcgtctacatcgagacgtcttccgctgctctgcgcgtctggtggtaa

SEQ ID NO: 17487 - DNA, 354 bp, Zea mays
  Peptide Sequence Number=SeqID_60862
atggaattaccaccagacgcgcagagcagcggaagacgtctcgatgtagacgaacgcgtcgagcagtgccgtgcagtcgccggcgtccttcacgtcctcgcacggttcgtccaagtgctccagatgcagcacctccgaggaaccttggagaggattagcaatgacttgggaaaggccatggtgttgaggaggagaagaaagggtgttcggaacaggaaggagatcaaatctaactcacatgcgattccatctcgggtttcaagaccagtctgcattaaaacagacgcccaggacgcatctgaactccgattgggacatgcttgtcatggttgtaaagataaggagataagctaa

SEQ ID NO: 17488 - DNA, 549 bp, Zea mays
  Peptide Sequence Number=SeqID_60863
atgcaggcggcatgcaaccgcgccaagtgggcgaaccccttcgactccaacgcgcccagcatggaggccccaggcccacacgtcatgcaaccggcgcgccggttgctacgtgcgagcaactgcaccgccactcgcgccactaccgggcctcctcgactgcggaaccagtaccgcgactcgaggcaaccctgtgacaggcggcacctttggcaggcgaagcaggcgacgcttcaccttcgccataatgaccgcgtcaaaaaaggtgcgccacgtcattcgatttcgtatccttttccttttcctctttctctctcttacaacagggaccgggaaaggggatacctcgaaagggatccttctccgcgaaggaaacgggccccgagcccccctattgataagaggttcgaaggctggcccctcggaggggttcaacagccgcctcagaacgctcgggctccgcgcccactactagtcagaggttcgaaggccggcccctcggaagggttcaacggccgcctcaggccactcgggctccgcgtccactactga

SEQ ID NO: 17489 - DNA, 1161 bp, Zea mays
  Peptide Sequence Number=SeqID_60864
atggtcacccaagacggtgaccaccagttcgatggtggggagaagcaagccgggctgtggcctctaccccgccctcagcttcaaggatcttcatcatccttgctggggaggagggcgaggcgagccggggcctgccttcgtgtgggctggtgtcccacttcttcctccagcttctgggggtggaaaccatcctccagctctacggaggagccgtcctccagccatgctggggaaggcgaactgctgctgcccagccaaggtgcagcattccgccctctgtccgggcgacggtggtcagccgcaccgggggtctcacaacacgtcgtacgccgcgagggcggcactcgtgttctgggatggtcccattctcgttttcgtggcgaggacgggagtgaggacctgccggtgcgctttggggctggctgcattcgctggtgcggtgatggtgggcaggtggacgccgtcgtcggggatgaggtggtggcagctggagaaagcttctccgctgatgagaccgtcagcgtcacccgcggaccgacctccggctctttggctttaatgtctggttctcatccctcgagtggggacgcgaacaagagccttcccgcggtagcgtccgccccgggaccatcgctgctgctgcagaggtcgccgagtcggcttgagaaggaacttcgtcggcccaggagcaggtggcttcccaggccgaagaggcgtagcagcggcggctggaacctggccaggtcgtccactggcgggaccgatgccggagtcgggctgccgaggccacgagccgggctgatgtcctcgggggacagctggctgaggctatggagcaaccggttaagccgtctgcttgggccgggtttctggaggagaccctatcggcgatggcccaggcgcagtgctgacatcttccttcgaggtggagatccttcgcccgtgtcgccgtctgaggccggctcagattccgccgaaggtggagacgatgccgagggtgctgctgctccccctattgatgacttgtttgtcggtagcagaatcgcttatccgagcgagagttacttatcgcggaaggtgatgagtgaggagtccctcggctcggtctttcttgccgcttacgtgtacttcgtcgtttttaggatcccactatcgaagtag

SEQ ID NO: 17490 - DNA, 264 bp, Zea mays
  Peptide Sequence Number=SeqID_60865
atggcggtggcaggcgggcaggagcagcggtcacgtcgtcggccaagcctacgtcccatccaggggcgacgagagaaccctctctcacggcgtgaagacaacgcgcccgtgttccgttcctcgaacggcccgcgcacgcgcaacggccgccccgtcgcattaactccgcggcgggacaggcggcgcctctgggaccgggaaagggggataccccgaaaaggatccttccccatgaaggaaccaggctccgagcctccctactga

SEQ ID NO: 17491 - DNA, 1101 bp, Zea mays
  Peptide Sequence Number=SeqID_60866
atgtcttcgcgcttccttatgcatcgtgtctttccaccttccaagccccggatgggggatacccgccgtctttctgccttgtcgttgggggaacgcaactccgcgggagttggtacctctcagtcatcgttcggcttcaaggattttcatcagccagcccggctgtacccctacgccggtgcttcaaggatgttcatcatcctcgctggggtggaggtcgggctgagccagagctctacctcccgcgcgggttcgtgggtcggcctctccttcggcgttcgagggagagggcgctcactggccctgcgggcgggttggacttcgacaacgcggggccggtcgacggcgggcgtcgtcagcctcagcgcgtcgggctcgtcggcttggctcccggtgccccctcctgccggaaggcggctgctgcgccgtgtgcacgggaggaccacccaagatatcgtgcgctgccagggcggcgttcgtgttctggggcggtcctgcctttgcaccggtacggcgcctccgtgcggaggtcggtgccccactcgtccgggaggatctgagtggggatctgccggagggctgacggcccctgtcgtcggtgccgaggtggaggcggctcgagaagagtccctcggctcggtcagccttgttgcccgaggcttctcttgctcagttaaaggaacccctcggccgcccttcgatgagccgaggccaggggtagcggcgtcagcgcgaacagaggcggagttggctcgaaaagaaggcctggtctgccggagcctggccgggccgtccgttagcgggaccgacgccggaattgacctgccgaggcctcgggccgggctgatgtccttggaggatagcctgccaaggccccggggtgaccggccgagccgcctgctcgggccggattctcggagaagaccctggcgacgatggcccgggcttggtgatgatgttgtccttcggagcagagacccttggaccgcgtcgccgtccgaggctaggtcgggcctcgccgaaggtgttatcgacgccgagggcgctgctgctccctttagccgtcaggatccgagcctgcaggatcggattatcttgtag

SEQ ID NO: 17492 - DNA, 132 bp, Zea mays
  Peptide Sequence Number=SeqID_60867
atgacgaccgataggccgcttgagctactccacatggatctattcggcccgattgcttacataagcatcggcggaagaaaaatctcaaacccaagagaccttaaagggattcttgagacgggctcaaaatga

SEQ ID NO: 17493 - DNA, 945 bp, Zea mays
  Peptide Sequence Number=SeqID_60868
atggtgaagccccagggcgagcaatcggatcccgagcgacggtgtgatccggtcgacggttgccgcgatcgtcgagccctaaggggactcgagcggtttctcgagtgcctctccgtaaggactggttcgttggatgaccactcgggaaaacagtgcaaccatgagggtgatgatgatgaggatgatggttttgattacaattatggtaatggtttatggtattctttccatttggaaaggatggctcgtcttagacacacagcacggaagtcagtcattcccttcttgccttctcatctcgcggagcgtccgcttcgccgtccggtgactggtcagtctagccattttgagaggctgcaccaccgcatgcatgaggagcaggagcgtcagcgacatgagttggagcagcagggctcttcttcctcgcctcagcaggagcatatttgcgaggcttacccggatcgctgggaggcgacttgtttggttcaccgtccgaaggatagtctccggggtgcagaggtctgctcggagcattattctatctataagcgatactcagctgaggcagccatacaagatgccgcacggcatgcgctttcgcactactgctcactgttcggtggggttaccgatggtcttgacttgaggtattacccccgccgtccacacggcaacacaggaggcgtgattgtctcacctgttggggaggacaatcctaggttgagcagcacagacaacctagccgctgtgctaaacacggatctggaccatgctttagatgagctgagtagggcttgtgttgagatcgcccaattgcgggctgagtgcgcggagcgccgtcacctggaggatggctctcccgccccgtcgggactctgcacccgtatcgctcacctcagcgtggacaccatgcctatggcaaccccgactgcaggaccaggataa

SEQ ID NO: 17494 - DNA, 444 bp, Zea mays
  Peptide Sequence Number=SeqID_60869
atgggcaagagtaagaaaggtagcggttcttctcctcgctctggtgacaagcgcaaacgcgagccgactcctccctcggaggacttcggcgactcggagtactcggaggaggagttctcctccaagtccgagggatctccggctcctatctctcccccggtgtcatctgatgattcagacgactcccaggggattgccgcggaggtctggacctacatccgggccgtcgagcgcgccgggctcgagggctcggatgagttggagtactcctcggacgaggaggaggagggcagcggcggcgatggcggtgatgacgacgacgacgacggaggcgacggtggtggcggcggcgacagcggcaggggcggtgacggcggcagcaagggcggcaatggcagtggtagcaagggcagcagcaagggcagcaacaaggccagtggctag

SEQ ID NO: 17495 - DNA, 459 bp, Zea mays
  Peptide Sequence Number=SeqID_60870
atgggcaagagtaagaaaggtagcggttcttctcctcgctctggtgacaagcgcaaacgcgagccgactcctccctcggaggacttcggcgactcggagtactcggaggaggagttctcctccgagtccgagggatctccggctctcgtctctcccccggcgtcgtctgatgattcagacgactcccaggggattgccgcggaggtctggacctacatccgggtcgtcgagcgtgccgggctcgagggctcggatgagtcggagtactcctcggatgaggaggactcctcggactcgtccgaggagggcagcggcggcgatggcagtgatgacgacgacgacggaggcgacggtggtggcggcggcgacagcggcaggggcggtgatggcggcagcaagggcggcaatggcagcgacagcaagggcagtagcaagggcagcaacaaggccagtggctag

SEQ ID NO: 17496 - DNA, 560 bp, Zea mays
  Peptide Sequence Number=SeqID_60871
gctctcagcgaccgagcgtcatctgcccgcaagcgccatccgcgcagtccgcagccgcatccccgcagttcactacacagtactccgctcttcactgcctcggcgtccagcgcggcagcgctcttgccgacctgccatctgtccgtcgtcggcgcacagcacaggcaaagccgcaaaggcaaagcctaaaagccagccgcacagcgccgcgccaccgcagtgcgctccggcgctccgcgctgcaggcttgcaggttgcagcctatagcagctcggtcctcgatgctcgcctgcgggctgggtgaatgggcgctgctctggcctctggtcgcggtccctgcgtgctccactgctcgctccacagaatatggcaaagaatatggcccaaaaaatcaagcttctagtggaagtggaccaagcactcgcgctagtggagtttgcaatgaacccgaaatacaagttggagttcaagtgaataatagtgaagatgccaatggacttcgtattccaatcgattcttttgctccaatattagagatgatgttagaagggctttcatag

SEQ ID NO: 17497 - DNA, 96 bp, Zea mays
  Peptide Sequence Number=SeqID_60872
atggcggctcagctgcagctcaggctcagctcaactggaggaggcgtttttccgagagctagagatggagacggcagagtgattaataagcgctaa

SEQ ID NO: 17498 - DNA, 99 bp, Zea mays
  Peptide Sequence Number=SeqID_60873
atgacgtgtttggcacaacttttgcatgagccagagccgaagctgaaaaataagccctaccaaaggggccctacttgtacgttctacccctacatttaa

SEQ ID NO: 17499 - DNA, 171 bp, Zea mays
  Peptide Sequence Number=SeqID_60874
atggagacggcgcatgaggtggccatttacatcgaccgcttccacaacctggacctgttccagcaaggatggtaccgcgtgaagattagtgccctgtgggaggatgacgagaatcgagcacccatctcgccggccagggtcacgcaatacgaagaaaatatgtcgccatga

SEQ ID NO: 17500 - DNA, 468 bp, Zea mays
  Peptide Sequence Number=SeqID_60875
atggtggctatgcaaatacaacatcatacattgcaccatacacaggagttcggtaccatcttagtcagtttaggagcatctctcgaagactatgtggagttcaaaaagagccaaactaacaagacacttgatgctcttaaagaactttccatgaggaagtgtatgaaggaaatggaagcaatggatggattcatagatgaggagaagtcatatgctgtggaggtctttgagtccgagattaatagagaggctttcatgtcaacaatgaaccacaatgttcgaagaatgtggctaaaatgcaaaatcaggagtcaaagtatcaatgatcttgatagggtactcagtataagtcagttcatcttgaacactaagttcctccataggcagttactcttctggtaccctgaggcacttcttcaactgggatacatggaagacatcatgtacatccgcaagatggccgggtag

SEQ ID NO: 17501 - DNA, 399 bp, Zea mays
  Peptide Sequence Number=SeqID_60876
atgggagccagaacatctggagaagctagcggaggaccttatggggagttggatctttttggagcccctccttccatgaacctcgcagatgatcattctcccgaagttggcagtggagcgggaatgccatcaagaactcgtgctcaaaacggggcgggaacttcccgtggtggggaggaaactccaaatctgccgcctgtacctcccacgttggctgaggctatcgctgccctagttaatgccactgctgataacactcgttttctgcgagaaatggctaggcatcagtttcatcaacagggaggcagaggtcaaccccaaggccctcgagacaccatgtatttggagttttcagaaactcgtccaccgctttttgttaaagaagaagaacctttgtag

SEQ ID NO: 17502 - DNA, 195 bp, Zea mays
  Peptide Sequence Number=SeqID_60877
atggcgggcggcgcggagctcgccggagtaggggttttgctcgggaaagtgaggcgggtgagggatgaactgccacgcaccggggagggatttataggcgctcttgggcatggctgggtgcaggcgcgggggaggagccgaccgcgtgtggcgcacgcgcagagagcggccaccccacttgagtggcttgtttga

SEQ ID NO: 17503 - DNA, 267 bp, Zea mays
  Peptide Sequence Number=SeqID_60878
atggggtccaggcacagtgcttgctctgccgaggctgagtgccgaggccaaggctccgcccaagggacacgatcccgcctcgcccgagcccgacctcgggcaaagacagccgaccccggaagattcacgcctcgcccgagggccccctcaagcaacggacacaccttcggctctcccgaggcccagtcttcgcagagaagcaaccttggccaaatcgccacatcaatcgaccatatcgcaggagcatttaatgcaaggatcgcctga

SEQ ID NO: 17504 - DNA, 309 bp, Zea mays
  Peptide Sequence Number=SeqID_60879
atgcggcggcagcccgagtcgacggtggcggacctcggcggctgcgcagagagcggcgggtgttacaaacctatcccccctaaaagaatctcgccccgagattcaaggttggtcagcaaagagttcagggtatttggccttcagatcatcttctcgttcccaggttgcttcttcctcggagtggtgaccccatctgactttgcacattctgatggtgttcctccaggtgactctgtctgcaaactccagaatctgcgttggcttctctatgtatgtcagatcctcttggactcccaaaccctccactag

SEQ ID NO: 17505 - DNA, 1164 bp, Zea mays
  Peptide Sequence Number=SeqID_60880
atggatgaaggaactcccctcggtggtctagagtctgagggcaacgccgagccaagccacgggcttcacaccgttctttctagtctatggggccgaggccatcttgcccacagacttagaatacggttccccgaggacgagggcgtacgacgaccaaagcaatcgaatcaaccgagaagactcactggaccagctggaagaggctcggcacgtggccttactgcactcggcgcggtatcagcagtccctacgacgctaccacgcccgaggggttcggtcccgagacctccaggtggggcgacttggtgcttcgactacgacaagacgcccgagggcgacacaagctcacgcctccctaggaagggccgttcgtcatcgccaaggctcacacgtcgatggagggggagcagcagcaccctcggcgtcaactccaccttcggcgaagtccgaccgagcctcggacggcaacacgggcgaaggatctccgctccgaaggacgacgtcagcaccacgcccaggccatcgccgccagggtctcctccaggaacccggcccgagcagacagctcggccggctgccccgaagcctcagccagctgtcccccgaggacaccagcccagctcgtggcctcggcaactcgactccggtgttggtcccgccagtggacgacccggccaggccccggccgacgaagcttcctttttcgagccaactccacctctatccacgctgacaccgctgccctcggccccggctcaccgcagagcggccgaggagcaactcacatttggtcaagcggttcggctagccgacaggcgagttccagtacgaacaaccccccacactggagggcctgcgggacaacaaaacgccgacaggtggctcaccgccgcccgctccggcagcagcgacaacgacctccgctccgggcggcccaacagcagcagcgatgacctcagggtagacgctgctgcgacaaggccctcgcccacgaccccactcgaggggcgaagacaagctaccaaggccgtggagtcggaggtcagtccgtgggtgactccggctatctcgtcggcggagaaacctcttccggatgcctcggtgggaggtggcaccgaaagcagcgctgaagccgctcaggccggagagccagacacgcggtag

SEQ ID NO: 17506 - DNA, 540 bp, Zea mays
  Peptide Sequence Number=SeqID_60881
atggcgattacggaaagggggttctcaccacggttggtagcgcggacagccctggccacgggaacctgcggattctccaacaccggcaaggaatttcgtgagctcccctcttcgattgcgcccacgcccgacttccacgcgaccagcacttccaactcgattgaccctgaccacctagcagacctcggacggcgacgcaacacatggcgacgtgaccccatggcaaatctgctaagaacagagctccttcggaggaagaactccgatggacacgagatggagaaggtcagactcagaaacaacagacatatggttacctgcgaaaggcaactggctgttgggatcgatgggggaatgacagcaacggatgaacttgatgctttccgcttgggcgccatctcaatcttgctggcgagcggagcggaagcagtatcacacgagcgcaaagaaggcttggatacagaaaagcaagaactagggcacggaaagcagaggcgcgtgtggcagaaccacccgaattattccagcttaagtgcctaa

SEQ ID NO: 17507 - DNA, 348 bp, Zea mays
  Peptide Sequence Number=SeqID_60882
atgggatccacacgatctaagatcaacggtcaccatttaatgaatacagagcagacctcggacggcgacgcaatgcacggcgacggtagcgacgcgaatcgctccctcgcggcggtgtctggcggcgggatggtggagagtttggctcggtgcatgcgcgagggagtagcaggggagaacgggtctcgggaaaacttttatgggtgggcgatcgcgtatggagaggatcccgggacgcggccgccatgcgcggagttggttgacacgggtggtggacggagtctgagcgcgtggaaggagctcctggccagtgggcccgaacacccagtgacgcgcgataggaaatag

SEQ ID NO: 17508 - DNA, 255 bp, Zea mays
  Peptide Sequence Number=SeqID_60883
atggaggacggcatcgtcgatctggagcaggcggcgtcgaaccggcggcagagcaggggcacagagtgtatggagaccctgtcggctaaggatcaacaagagttcgaggagcacaagaagcagcagatcaaggaggcccaggcgatgtttttggccaacttcaaggtggaccaaaatcaaaaggtcgtccggcagcgggtgactgatctggtttcgctccgacctattacaactacccccaaacctcctgcatag

SEQ ID NO: 17509 - DNA, 396 bp, Zea mays
  Peptide Sequence Number=SeqID_60884
atggccgccaagaaagcgacttccaaggccaccacctctctggacgacgcagcgaaggcggccctcaccgagaagaaaagcaaggaagccctcatcagcgatgctccccaagatgcacccgaaaacaacgatggagcagtcaatagcaagcatcctcgaatagagaacccacccctgaaggcaccgttcacatgtgcagttctgagggcttcccttagaacccccatcaggtttcacccctcggaggctgatgacatcattgaggacggcgaggtcctaggcattttagttgaaggccagctaaagttactagcacttcacataaaaacaatcacctgtaaaaacagaaggagatcgaggccaagcggcagtgcaccaacatgcaagccaaagtaa

SEQ ID NO: 17510 - DNA, 693 bp, Zea mays
  Peptide Sequence Number=SeqID_60885
atgaatcaacctatacccactggtggcattgattctagtattgtctcccatgtctcaaacaagcctacacttccaccacaaactcatattgaagaattcactaaaaagcaaataacagagctttggggaagagaaatcaaaccaaattcaaagcaattaaacttgcaaggatatttaaacagaggacacaacatggttaaggccacgcttcttgattcacaaaagaggaagataggtgccttgatagctcagcttggttcttgcaccttcacgccgaggaccgagaagacttcagctgaagtggttgagattgttctgtgtgcgaagaataagtgggttttgttgtatggtccctacccggagggggactccacagacgtcggtgacgatcgaggcaagcaagtgaagcctcgggccgacgaaggcacctcaaagggaaaggctccacctgcggccactcggaagaggaaattaggtatgggggacgatgcgactgggccgagggcctccgagattgtttttgaggcgttaatggggatatgtgcggtccccggggaagtgatgtcttcgcccgagctccgggaaacttcttcgtgcatgatgaaggttaccgggggtcgatggcatagtaatgctcctataccccgagccgctggcgattattttttacatcccgtttggctcgtgatgtga

SEQ ID NO: 17511 - DNA, 1992 bp, Zea mays
  Peptide Sequence Number=SeqID_60886
atggacaaggatcgccaaggggcggcgcaaaaacgccaggcaactgtcaggattcacgaagctcggccgacaaagcagcggggaactgcgaaggctgcggcctccggcggaggcaagccgccgctggcggtgaaggcgggcgcctctgcgcctaacaaggcgccggaggcaacggcgggcgccggaggctccaagtcaacgaaggtggcgcccccggccagcggagtggcggaggcttcgaaggcggcccgagcgctgccgttggcgggcaaacgtgttgccgacttcggcaccgacattactgtggatgactatcttggtgggccggacgagggccagcttgctatagttgcgcctggcgcggcgatcgcgacggccgccaaagcgccgaaggcggggggcgaggcgcttggcgctggaggcgaggtgtcggtcctcgcgctggtcagggacgaggcgggcgcggcgacccgccggctgaaggtggtgacggaggcgctgagtcaggcgacggaggcgctgagtcaggtggctgacttcgccagccgtactgcgtcgggggccctcacggcagctgtgtctgccgaagtcgagagacttcggacacaacatgctgacgctgtccgtgagaagtcggcctccgacagcaagtgccgtaagctgacggacagggtggccgccctggagagggagaaggctgacctccggcgccaactggcggcggagaggagggaagctaacgaggtcgtcgccaaggggcaggctgcgcaggcggaggccaaactggcgcgggcggagggcaatcttgccaaggagctcgccgaacatctgcaggagcggctcaccgccctggagagccgcgctaaggaggccgaggccgcaacgcatgcggaggccgaacggacgcgcacgcagcttatggatacatatcgtgagctgggtgcgcggaccggtgacttcgaagtgccggaccgagagtccaggcttcgctgtctgcaacgggtgcaggaggagctgctggaacttcccgccgtcgtgggggggttgatgtcgtacgcctccctggtcaactgcgagggggcaatgaacgcgctctcccgcgaagggtgccggcacttcgaggccttcgaccaggcggatgaagattttgatcgagatatctataaggtcgaagaccccgtggtgaaggaatccgccggggccctctatgaccggatgtggggtctgtacggtcgtgaggtggtcagggagcgggccgaggctgcgagggctcaggcggagcacggcgagcgggtggacgacttcggggccctgaacagcgcgctgccggacccggagctgaccctcgcggaggctgcgactggagtcgccctggaaacaaccctggagactgcggaagacgcgccgggcgtccccacctctgctgtggccggcgaaggcctgcccccaaaggtggccgaaggcgcgcctgacgcccccgcagctgctgcgccgagcgctgaagattccgcggcggtggtggttcaagagtttgggcctgcgcacgcaaccgctactactgagtttttggcggcttcgaccgcggaaggtggaaatgaatatggtgggtctgtatctgagttttttgattttactgactctgggagctcggttgagtggagtgaggagtcgtcggaggaggacttggattatttcgcggccttggacgtggctgcggcggaggcttcgccacacgctgcggacgcgccagacgtgccgggtcctagcaccgggcgccggcgacgaagggcggttgcaaagcgtagggttagcgcggaggaaggggctcggcttcgcgtgagtagggttggtcggcaggaactgttgtctttgccggctgccgcgagcacaggggaaggggaactgcgaagtctttttgcgggtgaggagcttaggataatgttatttaattatagagagatggggattattcctaaggtggagccgatgtag

SEQ ID NO: 17512 - DNA, 858 bp, Zea mays
  Peptide Sequence Number=SeqID_60887
atggctctcctccttgttgcagtgaccgctgctgcggtggccggccttgccgctgccaatttccgggacgactgcgacatcccgtgggagccccagaacgccaggtttacgagcgacggcaacggcctctccatggcgctggtcagcaactcctcaggttgcatgctgaggacaaagaagcagtacgtctatgggaccgtgtcaacactcatccagctcgtcccaggcaactcggccggcactgtcaccacgtactacgcatcctctgttggagacaaccatgatgagatcgacttcgagttcctgggcaacgtgagcgggcaaccatacaccttccacaccaacatctacgccaatggcgtgggcaacaaggagattcagttcaagccctggttcgaccccaccaccggctaccacaattacaccatctcctggagcccctgcatgatcgtgtggtacgttgacagcgtccccatccgcgtgttccgcaactaccagcagagctacggcgtggcgtacccgacgagccgccccatgcacgcatactccagcatctgggcggcggaggactgggccacgcagggcggccgcgtcaagaccgactggtccaaggcgcccttcgtcgccaactaccggaacatccacctcgacatctgcgactgccccggcggctacgcctgcagcaccaactgcgcggcggcggcggcgcccaacagtggggcgtgccagctcagccccgagcagcgggggctcatgcagagcctgcagaaagactacgccatctacgactactgcgtcgactccaagaggtgggtcaacggcgtcaagccaaccgagtgcggcctgccgcagtactga

SEQ ID NO: 17513 - DNA, 588 bp, Zea mays
  Peptide Sequence Number=SeqID_60888
atggcgcgctactccctcaatgctggtacaggttgtctcctccctggcagcgcctccctaagctcctttccccagccatggtgggggcgcgcagatgttccctggcctgccctcgtctccagggatgagcccatgtcggcgccctcctctatctcggcgcccctccctactccattttttcctttttctctctgctctcggtcgctggcagccatggagcccccatggtgccttgaaacggctggcgtcttccacttggccggaaatctcctcatccaaactcgctgcctgtcctcgctggtcgcgtgcagcgagcatccctcgccgacatcctccctcgcctcgccagccaagctccttcttggtcaagctctcctcatgcccgtcgcgcctattcccatccagattctgtgccctttctctagtgcagcagcactgttgtggggtttcctcatcgcactcatcgtcagcctccaaccgggtgtgcgcagcccatccgcgacgctgtcgaaacccatgctagtggtcgacgtcgcgctttgcccgttcaacgaaacgccgagccgtgtggacaacccatgtgactaa

SEQ ID NO: 17514 - DNA, 261 bp, Zea mays
  Peptide Sequence Number=SeqID_60889
atgaaattaacaactcaatatacaaaacgaatcagttgggcaccataccttggtctacaaagcatccgtagctcggcgccaagatctgtggcgccgagctacgaggccgtgtcgccaccacgtcgatgccaggacggaggcttggagaacacgtggctcatggataccggctgttcgtgccacatgaccggaagctcaaaatggttctccagcctcgaccccgtgattggtaaggaatacatcacattcgaggataagtga

SEQ ID NO: 17515 - DNA, 4323 bp, Zea mays
  Peptide Sequence Number=SeqID_60890
atggaggcaaagttgcttgatttggctttgattgcatctacatatttaagtcggccttggcgccttgcactgcagctgcgaagacgctttcgcatcctagccgctggcgacgtcagcgcgtgcatcaacaacactggccggctggctggaggatcggagcagggggaggaggagatggggaagggggcaggagcagcggagccgtcgacggtggtgctggccgtcaacggcaagcgctacgaggcggccggcgtggctccgtccacgtcgctgctggagttcctccgcagccagacgcccgtcagaggccccaagctcggatgcggcgaaggtggctgcggtgcatgcgtggtcctcgtctccaagtacgacccggccacggacgaggtgaccgagttctctgccagctcctgcctgacgctgctccacagcgtggaccgctgctcagtgaccaccagcgagggaatcggcaacaccagggatggctaccaccccgtgcagcagcgcctctccggcttccacgcctcgcagtgcggcttctgcacacccggcatgtgcatgtccatcttctccgcccttgtcaaggccgacaacaagtccgatcgcccggaccctcctgctggcttctccaagatcactacctcggaggcagagaaggctgtctcgggcaacctttgtcgttgcaccggatacagacccattgttgacacctgcaaaagctttgcctctgatgttgacctcgaggacctaggcctcaactgtttctggaagaagggcgaagaacctgcagaagtcagcaggctgccggggtacaacagcggtgccgtctgcacctttccagagtttctcaaatccgaaatcaagtctactatgaagcaggtgaacgatgtccccattgcagcctcaggtgatggctggtaccatcctaagagcattgaagagcttcacaggttgtttgattccagctggtttgatgacagttctgtgaagattgttgcttcaaacactgggtctggagtgtacaaggatcaggacctctacgacaagtacattgacatcaaaggaatcccagagctttcagtcatcaataaaaacgacaaaggaattgagcttggatcagttgtgtccatctctaaagctattgaagtgctgtcagatggaaatttggtcttcagaaagattgctgatcacctcaacaaagtggcttcaccgtttgttcggaacactgcaaccataggaggaaacataatgatggcacaaaggttgccatttgaatcggatgttgcaaccgtgctcctagctgcgggttcgacagtcacagtccaggtggcttccaaaaggctgtgcttcactctggaggaattcttggaacaacctccatgtgattctaggaccctgctgctgagcatatttatcccagaatggggttcagactatgtcacctttgagactttccgagccgccccacgaccatttggaaatgctgtctcttatgtaaactctgctttcttggcaaggacatcaggcagccttctaattgaggatatatgcttggcatttggtgcctacggagtcgatcatgccatcagagctaagaaggttgaagatttcttgaagggaaaatcgctgagctcatttgtgatacttgaagcaattaaactactcaaagataccgtttcaccatcagaaggcactacacatcatgaatacagggtcagcttggctgtcagtttcttgttcagtttcttatcttcccttgccaacagttcgagtgcaccatcaaatattgatactcccaatgggtcatatactcatgaaactggtagcaatgtggactcacctgagaggcatattaaggttgacagcaatgatttgccaattcgttcaagacaagaaatggttttcagcgatgagtacaagcctgttggcaagccgatcaagaaagtcggggcagagatccaagcatcaggggaggctgtgtacgttgatgatatccctgctcccaaggattgcctctatggagcatttatctacagcacacatcctcatgctcatgtgagaagtatcaacttcaaatcatccttggcttcacagaaggtcatcacagttataaccgcaaaggatattccaagcggtggagaaaatattggaagcagcttcctgatgcaaggagaagcactatttgcagatccaatcgctgaatttgctggtcaaaatattggtgtcgtgattgctgaaacacaaagatatgctaatatggctgcaaagcaagctgttgttgagtatagcacagaaaatctgcagccaccaattctgacaatagaagatgccatccaaagaaacagctacatccaaattcccccatttttagctccaaagccagttggtgactacaacaaagggatggctgaagcagaccacaagattctatcagcagaggtaaaacttgaatcccagtactacttctacatggaaactcaagcagcactagcgattcctgatgaagataactgcataacaatctattcctcgacacaaatgcctgagctcacacaaaatttgatagcaaggtgtcttggcattccatttcacaatgtccgtgtcatcagcagaagagtaggaggaggctttggtggaaaggcaatgaaagcaacgcatactgcatgtgcatgtgcccttgctgccttcaagctgcggcgtccagttaggatgtacctcgatcgcaagacggacatgataatggctggagggagacatccaatgaaggcgaagtactctgttgggttcaagtcagatggcaagatcacagccttgcacctagatcttggaatcaatgctggaatatcaccagatgtgagtccattgatgccacgtgctatcataggagctctcaaaaagtacaactggggcactcttgaatttgacaccaaggtctgcaagacaaatgtctcatcaaagtcagcaatgcgagctcctggagatgtgcagggctctttcatcgctgaagccatcatcgagcatgttgcctcagcactcgcactagacactaacaccgtcaggaggaagaaccttcatgattttgaaagccttgaagttttctatggagaaagtgcaggtgaagcttctacatacagcctggtttccatgtttgacaagctggccttgtctccagaataccagcacagggctgcaatgattgagcagttcaatagcagcaacaaatggaagaaacgcggcatttcttgtgtgccagccacttatgaggttaatcttcgaccaactccaggcaaggtgtcaatcatgaatgatggttccatcgctgtcgaggttggaggaattgagataggtcaaggattgtggactaaagtgaagcagatgacggcctttggactgggacagctgtgtcctgatggtggcgaatgccttctggacaaggttcgggttatccaggcagacacattaagcctgatccaaggaggtatgactgctgggagcaccacttctgaaactagctgtgaagcagttcggcaatcgtgtgttgcacttgttgagaggctgaagcctatcaaggagagtctcgaagctaagtccaacacagtggaatggagtgccttgattgctcaggcaagcatggcgagtgtgaacctatcagcacaggcgtactggactcctgatccatctttcaagagctacttgaactacggagctggcaccagtgaggtggaagttgatatcctaacaggagcaaccacaattctgcgaagcgacctggtgtatgactgcgggcagagcctaaaccctgctgtagacttgggccagatcgagggctgctttgtccaaggaatagggttcttcacgaacgaggactacaagacgaattccgacggcttggtcatccacgacggcacatggacgtacaagatccccacggtggataatatcccgaaggagttcaatgttgagatgtttaacagcgcccctgacaagaagcgtgtcctatcttccaaaggcaagtatctcctcacaatgtttcatcccctctccacattctcaacactcatgcggacatcatcaaattctgcgtcgggcgagccgccgctggttctcgcagcctcggtgcactgcgcgatgagggaggccatcagggcggcgaggaaggagttctcggtcagcaccagccccgcgaaatccgccgtcacattccagatggacgtgccggcgacgatgcccgtcgtcaaggagctctgcggcctcgacgtcgtggagaggtacctcgagaacgtgtctgccgccagtgccggcccaaacacagcgaaagcatag

SEQ ID NO: 17516 - DNA, 1419 bp, Zea mays
  Peptide Sequence Number=SeqID_60891
atggagcctggcggagggacagctgtcggggctgttgagtccttgctgacgtcctcccgcttccgtaagggggctgagagccgccatcgtcacagagcggcccaaaccgcgcgccactcccgcccgctgacagcccgaccccgcccgccagcgccccgcccctctctctctcgcgcggacctctctcactggcagcccgaccccacccgtcagctccttctcccccgcccatccctcaccggcgcgatcgccgccgagcgcccctcgcctcgtcgcctcgccatcaatgcccgccagcccccgcgacaaaccccgccactgtgcccgagccgtcccctcatcctcagcctgcccgagccgtctcgtcgccgtttgctccatgcccgccatcatggaagctcgtcggagctcgccgtcccctccatccctctccccctcccgggcgcctataaaagggacagccgagcccgagccctccacaccagccccggccatctcctccacccctccccgagctcaattgagctagcagcgccgccgtgcttcccccccactgctccgatggaaaatccctgggtgattaggacttcctattgcttagaggaggaaggctttcctcaccttctccggagctgcgcgctgcgcttggggatccgcaagaagcccgaatatgtctggaaggagtaccgtgaaaatggaatggaaaagtgctctatggcggtctacttgggagaaagccggaactacccaaaccaccctcctttccaaattaccttcatcgggcaccgcttcccagacacatgccagagcattgctcgaaaagccctcaaacaaatgtgccaaaactatagccgagagacctttgaaactcccctccgatatttcccacccagcaacaaaaataccccaacctggaagaaaagactccaggctctgtcaggaggagatcccatagaagatgatcccactatcgtctacatggccggatacctccacaccctcgacaaccattacgatgagctctcctcccattgtacccacctaaactcccgagtggaaagcctagagcaacaagtcaaagagcttacgcaagagaaggtatccctccaggagagtctcagcatagtggaaggcgaggaagccaacacccgtgaggcctatcggaccttgaagatagactttgacaagaagctaaaggcactcgcccccaaaaagaagatccagaagaagaccactaaccaaggatgccagacagagaagaagaagaagaaggcccctctagccctacctccccccagaatcgatgactggtccgacgaagaagatgtatccctagccagcctcgatgatcttctcaaggcatttggggacaccttagacaaggaactcgctagcacctcgaagaacgccctcgtgtag

SEQ ID NO: 17517 - DNA, 1704 bp, Zea mays
  Peptide Sequence Number=SeqID_60892
atgaacaaaaacactggcattcgaagtgccattacaaacggaactccagttccacctccgcaggtacgaacaaccccactcgatggggggggccctgcggagcaacagaagaccgacgggcggctcgccgtcgcccactccggcagcaacgacgacgacccccgctccgggtggccgaattgcagcagcgagggcctcagggcggatgctgctgcaatcttgccctcgcccacgccgacgctcgaggggcgaggacaagggccgtcagccctccggcagatccccactcagatcctcccggacgagtggggcaccgacctccgcgcggagcgcggcagccgcctccaggcaggagggggcaccgggagccaagccgacgagcccgacgcgctaaggctgacgacgtccgccgtcgaccagccctgcgttgtcgaagtccgacccgcccgtagggcccgtgagcgccctctccctcgaacgccgcaggagaggccgacccacggacccacgcgggaggtagagctccggctcagcccggcctccaccctagcgaggatgatgaacatccttgaagctgagggtgggaccaagatcgcagcccggcttgcttctccccacccaggggctggtggtcaccgtctcggggaccgggaaaggggggataccccaaaaaggatccttccccgtgaaggaactaggctccgagcctccctactgatcagaggttcgaaggctggcccctcggaagggttcgacagtcgcctcagatcgcgtgggctctacacccactactggtcagaggttcgaaggccggcccctcggaagggttccacggccgcctcaggctactcgggctccgcgcccactactgatcagggcgggaacgatcttgtaacggaatcccatcagagggaggcatcgagccctcggaccccgtcgccaggggaccgggtccggcagatcacccgcagctcaccggagacaccatgttcgacgcccatcgagggcaacatggcgctttcccccctcctccttgcggaaaggcgacgcaggggcaggctcgggggctgctctcgcaaacccagctccggccgaaccgttgacagcgtcaacataccagcccgagaacttgggacccgaccatacacccgggctacggccaactcgcatgagggaacgaccagaccagccgaagcattacgcgaggcattaagacctcggaggagtgaaaccactcctccgaggcctcgggggctatacccggcgggtgcgctcgcgcgcacccaccggaacaaaacgcaaccgagaaaggctggtccccttgcaaaaaagtgcgacgaaagcctccaagcgagtgctaacactcccttcgaggctcgggggctactgtcggggaccataattaggggtaccctcaaggctcctaattctcagctgccccagaagacgacgaactccgctctgcccgacccagggctcggacttgggctcagccccagaagacgacgaactccgctccgcccgacccagggctcggacttgggctcagccccagaagacgacgaactccgcttcgcccgaccccagggctcggactccgccctggcctcagccgacggcctccacctcgcccgaaccaggggctcggactcgacctcggccatggaagacagactcgacttcggcttcggaggagcttcctga

SEQ ID NO: 17518 - DNA, 363 bp, Zea mays
  Peptide Sequence Number=SeqID_60893
atgggcaagaacaacaagcgcaagcgtgagccaactcctccatcggaggattttggtgactcggagtactcagaggaggagttctcctctgagtctgaggggtctccggctcccatccccctgcgtgagtcgtctgatgactcagacgactcccaggggctcgcggcggaggtctggacgtacatccgggccgtcgagcgctccgggctcgagggctcggatgaggaggactcggacggtgacggcaaggacgaggacggcgacggcgacgacgacgacgacgaaggcggtggcggcggtgacgaagtagctgccgagcgacttgtagatgatgtcagagttttagagataactgccgagtaa

SEQ ID NO: 17519 - DNA, 1119 bp, Zea mays
  Peptide Sequence Number=SeqID_60894
atggcgtcggagtgggaaatggccgccatgggggtggagctcggcatgggaatgggcggcacgtaccaccacaacgcctccagcatcaccacggcgccgacgagcagccaccacagcggcggcgccgggtactccgcggcgcaccaccaccattactacggcatgccgcccgtgggcggcgacgccacggccatgcgcgtggacgaccttctcgagaatctcgacctctccaccggcgctggcgcccacgagttcttccccaccgcggctgctgccaacaagggacaccaccactcggggggcgccatggtcggtgagccgtcgcccacggccaactcgtcggaccaccagacgtcgctcctctccttcgccgacgagttctacatacccagcgaggaagctgccgagctggagtggctgtccaagttcgtggacgactcctactcggacatgccgaattactcgtcggccacgcacgccgcaatggcagcagcggcagcggcagcggctgcggctgcgaacaccgccggcactagagcaggaggcacctcgggcgggcaggacagctgcgccaccgcggcgcccggccgcggcgcgcgcagcaagcggtcgtcccgcgcggccgccgcggcgtggcactccctcgtgccgcgcccgccatcgcagccgtccccgtcaacgtcctgctcgtcctcggacttcacgccggcgtcgacgaacaacaagccggcacgcccgagcaacggcggcagccgcggcaggaagagcccggggcccgccggggaggtagtggcagtgggcgtggagggcggcgtgcgccggtgcacgcactgcgcgtcggagacgacgccgcagtggcggacggggccgctgggccccaagaccctgtgcaacgcgtgcggcgtgcggttcaagtccgggcggctggtgcccgagtaccgccccgcgtccagccccaccttcgtgctcacgcagcactccaactcgcaccgcaaggtcatggagctgcgccgccagaaggagctcgtcctcatccgcggaacccaccgtgacgcttcggcggcagcggcgggatccgccgggccggagctcatgttccgtgactacggcgtgtgttga

SEQ ID NO: 17520 - DNA, 180 bp, Zea mays
  Peptide Sequence Number=SeqID_60895
atggctcgcgcacgcgcaacggccgccccgccaaccgctcgccccgtcgcattaactccgcggcaggactggcggcgcttccggcaggagcagagggcgacgcttcgccttcgccgtaataaccgcgccaaaaaagggaccgggaaagggggataccccgaaaaggatccttccccgtga

SEQ ID NO: 17521 - DNA, 2271 bp, Zea mays
  Peptide Sequence Number=SeqID_60896
atggggaaggcgccggccgcggtggtggtggccgtgaacgggcagcgttacgaggccaccggtgtggatccgtcgacgacgctgctggagttcctgcgcacccagacgcccgttaggggccccaagctcggctgcggcgaaggtggctgcggtgcgtgcgtggtccttatctccaagtacaacccggccaccgacgaggcgaccgagttctcagcgagctcctgcctgacactgctccgtagcattgaccgctgctcagtgaccacgagcgagggcattggcaacaccaaggatggctaccacgcggtgcagcagcggctcgcaggcttccacgcttcccagtgcggcttctgcacgccgggcatctgcatgtcaatcttctcagcgctggccaaggccgacaaggtggccagccgccctaccccgcccacaggcttctccaagctcaccacctcggaggctgaaaaggccgtgtccggcaacctgtgccggtgcaccggatacaggcccatcgtcgacgcctgcaagagcttcgcggcggacgtggaccttgaggatctgggtctcaactgcttctggaggaagggcgatgaacctgctaccgtcagcaaactacctggctacagtagtgctgcagtctgcaccttccctgagttcctcaagtctgagatcaagtcctctagggagaatgcagatggtgctgcagtagcagtctccagtgatggctggtaccatcctcaaagcattgaagagctccacaggttgtttgattcctactggtttgatgaaagttctgtgaagattgtggctgcaaacaccgggtctggagtgtacaaggatcaggacctctatgacaagtacattgacatcaaaggaataccagagctatcagtcatcaacagcagcgttaagggaattgagcttggatcggttgtgtccatctctacagccattgaggtgttgtcagatggaaatctgatcttcagaaaaattgccgatcacctaagcaaagtggcttcgccatttgttcggaacacagcaaccataggtggcaacataatcatggcgcagaggttgccattcgagtcagacatagcaactgtgctactggctgcaggtacaacagtcacaattcagacagcttccaaaaggttgtgccttactttggaggagttcttgcagcagtctccatgtgattctaggaccctgctgatgagcatattcatcccaaagtgggattcagatggcatcacctttgagacattccgggcagcgcctcggccatttggcaatgctgcttcatatgtcaatgctgctctcttggcaaggacttcaactgatgcagcttcagggaagaacatcatggaggatatatgcttggtgttcggtgcttatggagctgaccatgccatcagagctagcaaggtagaggattttctaaagggaaaatcactgagctcttctgttatacttaaagcagttcagttgcttaaagagacggtttcaccaccagaaggcacaacacatcctgagtatagggtcagcttggctgtcagcttcttgttcaccttcttatcctccttaaccaacagcatgaatgaaacagcaaaggttaatgttatcaatggatcacttactaatagaactacaaatattagcggtgggtactcactgaaggaaaatcttgaggttgacagaaattatttaccaatacactcaagacaagaaatggttttcggtgatgaatacaagccagttggcaagccgatcaagaaagtcggggcagagctccaagcttctggggaggctgtgtacgttgatgatatccctgttcccaagggttgcttgtatggagcatttatctacagcacacgccctcatgctcatgtgaagggcatcaacttcaaatcatctttggcttcacagaaggtcatcacagtcattactgcaaaggatattcccagaggcggacaaaatataggatccagcttcccgatgttaggagaagaagtgctttttgcagatcaagttgttgaatttgctggtcaaaatattggcatcgtgatttctgaaacacaaaggtatgcttatatggctgcaaagcaagctgttgttgagtatagcacagaaaatttgcagccaccaattctgactatacaagatgccatccaacagagcagctacttccagattcccacatttttatctcctaagccagttggtgattacaaccaaggggtttctaaggctgatcacactttgtcagcagag

SEQ ID NO: 17522 - DNA, 498 bp, Zea mays
  Peptide Sequence Number=SeqID_60897
atggatgaacaaagtgcaaatctagagaaaagaaacagaaagaagaagaagaagagaagacttggctgtgtgcagccaaggggctgtttcggtctggtgcaccggacagtgtccggtggtgcaccggacagtgtccggtgcgccaggctgcctcggccgaagaggccgctctcgggtttttctccggcgacttcggctaaaattcaccggactgtccggtgtgcaccggactgtccgctccacatggatggaagacgagaatggcgagcggcgccgtacgtggcgtggccctgggttcgttcgttcgatgccgtggctggacctggacactgcggtccggggcacatcgatcagcttagccagcaaccagaggactcatacgtgtcccgggcggcagttccacgccacttgcttggacgtattagctgcccccgcttggagctttgcgcctacacgggcagtggacactggcccgtgatggccggttacgttgagtga

SEQ ID NO: 17523 - DNA, 588 bp, Zea mays
  Peptide Sequence Number=SeqID_60898
atggacgcaattcaggtcaagggctccgtccactcaagggacgcgatctcgcctcgcccgagcccagcctcggataggaacagtagacccaggtggattcatgcctcgcccgagggcctcctcaagcaacgggcgcaccttcgactcgcccgaggcccagctcgggcaggcttcgccgtgaaacaaccttggccagatcgccacaccaaccgaccgtatcgcagtagcattcaatgcaaggatcgcctgacaccttatcctgacgcgcgttcctcagtcgacagggccgaagtgaccgcagtcatttcgcctccactgactgacctgacaggaaaacagcgccgcctacactgctccgactgctgtgccacccgccaggggctcggactcaacctcgacctcagaagacggtctccgcctcgcctgaccccagggctcggactcaacctcgacctcggaagacggtctccgcctcgcccgaccccagggctcggactcagcctcgacctcgaaggagtcaccgccttgctcgaccttgggctcggaccgaccacgtcgcaggggggtacatcattaccctacacctag

SEQ ID NO: 17524 - DNA, 630 bp, Zea mays
  Peptide Sequence Number=SeqID_60899
atgactcctccgaggtcgaggctgagtccgagccctggggtcgggcgaggcggagaccgtcttccgaggtcgaggttgagtccgagccctggggtcgggcgaggcggagaccgtcttccgaggtcgaggttgagtccgagccctagtgtcgggcgaggcggagcttcctatggcgcccgaggctggacttggctgctgtcagcctcaccttggcgggtggcacaacagtcggagcagtgcagacgacactgttttcctgcgatccttgcattgaatgctcctgcgatacggtcggttggcgtggcgatctggccaaggttgcttcacgacgaagcctgtccgagctgggcctcgggcgagtcgaagctttatgctgatggtgattaccagtcgagtttaggagtcttggggggcgtgcggcaggcggttcgtggcgttgtgatggtcgcggcgcgattcgcggagggatttgcgggcttgaggatcgcgacggtcgaaggtttgcggacaggcgggtatcacagcgaggtggggggcgggaggtttgcgacggacatggctctcacggaggtttgcggaggcggggtttctggaggtcgggcgggcggaggcaggggcagtctacagtaa

SEQ ID NO: 17525 - DNA, 501 bp, Zea mays
  Peptide Sequence Number=SeqID_60900
atggcgaaaagagtagtttctggtgtacagccaacaggatcggttcaccttggaaattatctaggggcaattaagaattgggttgcacttcaggcacatgatgtttcatcgattttgaattttagtgagaattgtacactagaatttttgacgccttacctggatggaatcgtgaataaattacttgttcttcttcagactgcccctgcctccgcccgcccgacctccagaaaccccgcctccgcaaacctccgtgagagccatgtccgtcgcaaacctcccgccccccacctcgctgtgatacccgcctgtccgcaaaccttcgaccgtcgcgatcctcaagcccgcaaatccctccgcgaatcgcgccgcgaccatcacaacgccacgaaccgcctgccgcacgccctgcacgacccgtggaaccccgcagccgcccccgagcaaactctgccgcaatccgttcgccgcgtccccgagcaatcccgagcaagccgttaa

SEQ ID NO: 17526 - DNA, 684 bp, Zea mays
  Peptide Sequence Number=SeqID_60901
atgggcccccacgcaattgtgggccccacatggccagaggcagccgagagccacagcaccggtgccgtgtactacgcctgcactgcttccctcggcgggccggacatgcaacggcaacgcagtgcattcactgtctcaccgacagtgctgactgcccccgccgctaccacatcctcccgctaccacgcgcccagcccccgcaaaaatcgccgcaaccgaacgccgcgattccccgcccgcagatcacgcgcaagcgcaaccgacccctgccgcgattcccctccgcggcgaatcacctgcatccgcaacttccgctggagcaggggccccatctccggcctgctcaagggctacgtcggcctcagcaccgccatcttcatcgacacctgcttcgcgctcttcgccgacgacccggcctcgttcctcgtcatgctcgctgtcgtgccggccgccgtctgcgcgctcgccatggtgttcctccgcgagggcaccgccgctgcggacgaggaggacgacgggcgctgcttcgctcgcaccgctccttcaaggcgggacaggcagcggacggtggagggctcggacgcgcggctaaagtgggcggcggggccgcgccgcgggagatctggaggttggcgagcaccctggagagagcccccaccccggagcctggtggccctggcttga

SEQ ID NO: 17527 - DNA, 579 bp, Zea mays
  Peptide Sequence Number=SeqID_60902
atggagaagccgtttgtgagccactgcgacatggagatggagctcgtgaagatggccatgctcaggcacgaagagaccttcaggcagcaggtccacgagctgcaccggctgtaccgggtgcagaagcagctgatgggcggcctgtccaggccgtcgtcggaactcatcagctgccggcggcgccagaccaggcggcgcaggcagccgcggcgccgcgcgctggacctgcaactgcaccaccacctccccgccgtcgtcatcgcgccaccgccagcggaggacgccgggctggagctgacgctagccatcggcggtggcggccggtgccggaggaggcgccaagacgagattgagactagcacgggcaccgctacgacccccttaggctcgggctcggacatctccggggggagcctgctgacgacggcggcgtcgtccacggacaccggtggtgggtcgccaccgtaccagagggcagtgccggcgtttcgtcgtctccaggaagcggcggcggccaagcagccaccgcggtcgccatggctcgtgcagtgcgtcagcggcggccttgagatggcgtga

SEQ ID NO: 17528 - DNA, 762 bp, Zea mays
  Peptide Sequence Number=SeqID_60903
atgcaggtggcatgcaactgcaccacgaggatgcaccctttcgactttgacgcatccagcatggaggcccaggcccacacgtcatgtaaccggcgcgccggttactacgtgcgaaaaactgcactgtcacttacgccaatactgcgccttctcgactgcggaaccggtgccgtgactcaaggcgaccctgcgcatagcccaacagtgccaaccaggcgcatcggtcacggatcagtcagccgcgggagaaggcgcgacgatcgatatggccaaaagtgggccgacagtaatggcggcagcaggcgagcggaagcggcggtcaaatcgtctgcaggctcacgtcccctcctggggcagcaggagagccctctcccacgggaccgggaaaggggaactccaaaagggatccttctctgtgaaggaagcgggccccgagccctcctactgatcaggggtttgaaggctggcccctcagaagggtttgacagccgcctcagagcactcgggctccgtgcccactactggtcagaggttcgaaggctggcccctcgaaagggttcaacagccgcctcaggccactcgggctccatgcccactacagatcaggggttcgaaggctggccccccgaagggttctacagccgcctcagaacacgcagagcgagggatgactctgggtacgttcgatacatggtcgaggctcgggctacgctcccgaggtaccccgggacatttccgagaccagcaggagcgattctgtaa

SEQ ID NO: 17529 - DNA, 945 bp, Zea mays
  Peptide Sequence Number=SeqID_60904
atggtggggagaagcaagccgggctgcagcctctgccccgccctcagcttcaaggatcttcatcatccttgctggggcggagggcgagctgagccggagctctacctcccgtacgggccagcgggccacctcccccttcagcattcaggggagagggcgctcatcggccttgtggagggggtggacttcgacaacgcagggccgatcggccgcaggcatcgtcagctccagcatgcctggttcgctggctcagctggctctggcacagcttccggtgccacctcccaccgctgggcggagtgtggctatctgcccgccgtacgggcggctattgcgccgcgcgcatcgggggaccgcccaagacgtcgctcgctgctagggcggcgttcgtgttcttgggctgtcctgcccttgctccggcacgacgcctccgtgcggaggccggtgctcgcccgtctaggaggaattgagtggggatctgtcggtgggcaggttgctaccgtcgtcggtgctgaggtggtggcagctggagaagtcttcgtcgccgacgagatcgtcggcgccatctgtggaccgacctccggctctttggctttgatagcttgtcctcgcccctcgagtggggacgtgggcgagggccttgtcgcgacaacgtctgcctcgaggtcatcgctgctgttgtttggccgcccggagcagaggtcgttgtcgctgctgcaggagtgggcggcggcgagccacctggaatttgtcatcccgcatgccctccaatgtggggggttgttcgtacctgcggagtggaactggagttccgtttgtaatggcaccttgagtgccggtgtctgttcattgtggctgtcggggcctgcacatcttggtatcttgggtgtgataccatgtttcttcctcatttcgaacaccaggactcgcctgttggctagctga

SEQ ID NO: 17530 - DNA, 288 bp, Zea mays
  Peptide Sequence Number=SeqID_60905
atggcggcggtctgcgataggtcactggctcgcccggcctggcggtgcttgctggcggggatgctccgcggctctgggccgaacggtccacgacttggcaacagaagcggcttcttccctgcgctgtccgtacggtctgcgctatgggccggacggtccgtgatggcgcagggtcgtcttcttctcctggtaggacctatatcctccttgggggagaccttagggtgctctgggtcagcagataacccggggcgtcccccatatgatgtagagttacctaagggttaa

SEQ ID NO: 17531 - DNA, 579 bp, Zea mays
  Peptide Sequence Number=SeqID_60906
atggagcagcgtcccgggctggagaggttgctggagactactcatctggtgcttgacgggaagctgttcgtcaacacgcagcagtcccctacctggcgcgccaactgtcggcgtttcgaccccggggtgtccctggaccgacgagtaaattgtcgctgcatgtcccagcccagatgggtcggcgcgagacggaacacaagggggaaaacacgtggtcggtccgagcccaaggtcgggcgaggcggtgattcctccgaggtcgaggtggagtccaagccccggggtcgggcgaggcggagaccgtcttccgaggtcgaggtggagtccgagccctggggtcgggcgaggcggagaccgtcttccggtgtcgaggtggaggccgagccctggggtcgggcaaggaggagcttcctatggcgcccgaggctggacttggctgctgtcagtctcaccctggcgggtggcacagcagtcggagcagggcaggcggcgctgttttcctgtcaggtcagtcagtggcggggtgaagtgactgcggtcacttcggccttgtcgactggggagcgcgcgtcaggataa

SEQ ID NO: 17532 - DNA, 801 bp, Zea mays
  Peptide Sequence Number=SeqID_60907
atggagaacaccgacatggtggttatacctacgtttcgagcggtggtgaggtcggaccacggcgccatgagccaccgcggcggagatgtagctccgccgcaacctaaccgccatccggtattcgagctaacccagcaggcgcggcacaagcggagatcatggtggccgtttgttacggaccgcggagaagagaaacagtacgtcggcccacgcgacagttatggaacacagttgcgtccatcggggaagacactggcccatcttccacgacaaatgaaaaccctaatctccagcaccccggcggcctccagcgctcctgctccttgctcgcctccacccgcggccaccaccgccctgcggcccccgccgcttgccagcctccaccgccctgcgcccccgctggtggaccgcccatcgcccaccgacgaggagctcgtctcctactacctccgtcgccgcgtcctcggccatcgcctccgagtcgatgccatcgccgagatcgacctctaccgcctcgagccctgggacctcccctccctctcccgcatccacagccgcgacgcccagtggtacttcttcgcccgtctcgaccgcaaggtcgccggcgctggcgctgggggccggggcggtcccggcaacatgaccaaccgcgctacgccgagggggtactggaagaccacgggcaaggaccgcgaggtgcaccgccgcgacaagcccgtaagacagctggggaacaggctgcttccttggacgaggagcagtaagacaagggatctggagccggagccccgatggcggtga

SEQ ID NO: 17533 - DNA, 81 bp, Zea mays
  Peptide Sequence Number=SeqID_60908
atgctagtggtcgatgtcgcgcttcgcgctggtccattcggcgaaatgtcgagacttgtgtggacaaccccctgtgactag

SEQ ID NO: 17534 - DNA, 804 bp, Zea mays
  Peptide Sequence Number=SeqID_60909
atgatgaccaccagttcggtggtggggagaagcaagccgggctgcagcctctgccccgccctcagcttcaaggatcttcatcatctgagctggagaggagggcggggcaggtcggggcctgcctccgcatgggccggtgacccgcttcttcgtccagaattcgggggagaagggcatcctccagctctatggaggaggcgtcctccagccatgcgggggaaggcgaactactgctgcctagccagggtgcagcattccgtccttcgtccgggcgactgtggccggctgcaccgggggtcacacaacacgtcgtatgccatgagggtgatacttgtgttctgggacggtcccgttctcattctcgtggtgagaacgggagtgaggacctgccggtgcgctttggggcggccgccgctcgctggtgcggtgttggtgggcaggtggccgctgtcgtcggtgctgaggtggtggttgccgctggagaggcttcccatcgcatcggtggctgcttccgccggcgagaccgtcagtgcctcctgcgctccgggcctccggcactttggctttaatggctggttctcgtcccccgtgaggggacgtgaacgagggcctttcagcaacagcgtttgccatgaggccgtcgctgcagctgtcttgccgcccgagacggaggtcgttgccgcgctgttggtgcagcggtcgccggcgagccacccggagtttgttgtcccgaggccctccggtgtagaggttgttcatacccgcgggagtggaaccggagtcccgtttgtaatggcaccctga

SEQ ID NO: 17535 - DNA, 477 bp, Zea mays
  Peptide Sequence Number=SeqID_60910
atgcgctgtcaggttcatttgactgaaactcgtgatggtacagtagcctggattggatcaggctgccagcgcggaactttcaccgccgacgatacctccgccgtgattcatgccgttgccggcccgacttgtgctcgggatgggcagataagggcacacgaacgtgaagaagaaatcgaagtaactgaagaggagacaccaccaccttcggagtctcagaccgggaattgtttctactttgatatctgcagatctgagcctgactcacctgtgaacgaaggcaagccccggcgtgctgaccgaggaccctttaactggtcacatgcctcgtcatggcatacccttgagagtcttttccttagtcgggtgaggaagcgaaaaatttttgttgcttttgctccaaggtggtaccaaatgaggaaaaacaagactgaagtgcgggaggacttggtcctccacataggatcttttgcttaa

SEQ ID NO: 17536 - DNA, 1191 bp, Zea mays
  Peptide Sequence Number=SeqID_60911
atgaaaatccttgaagccgagcgatggcttaagggtgccaacccccgcgaggtcgcgctcctccaacagcagcaagacgaaggcaacgcgggcggctctccccactcgcatcccaagcgtcgcgagcaaagtcttcaccgacgtgctccagggtcctccccctacgacacgggggctgggtcccccacgtcatgcaagctgacccgaaatggaagaagccaaaccaccgcgcacagagcatgtaaccgccccgcggttacaagcactcctccatcctcgccgaaaccagcggtcgaaagggcggaccgccatgcaggaggtgtgcagccgcaccacagttgtgcaccctttcggcttcatcgcttccggtgggtcagcgtgaaggcccgggcccacatgtcatgcaaccggcgcaacggttacagcgtgcaaggaaaccacaccgccactcacgccaatgccgcgtcttctcgactgcggaaccagtaccgcgactcgaggcaaccctgcgcatggctcaacagtgccaatcgagcgcaacgatcacgggcgaagcgggcgtcgttttgcctctgccatgatgaccgcgtcaaaaaagccgccccagagcactcgggctccaagctcattactgatcaggggttcaaaggctggcccctcggaagggttcgacagccgcctcagagcactcgggctctgcgcccactactgatcaggggttcgaaggctggcccctcgaaagggttcgacagctgccccagagcacgcagagcgagggatgaccctgggtacgtctgttacatggccgaggctcgggctacgctccagagtgggcacaccctcggcacgcccgaggcccaactcaagcaggcttcgtcgagaagcaaccttggccaaatcacctctccaaccgatccctcaggcgcaacaggaaactccgcctcgcccggcctcaacctcggcctcggaaggtggtctccgcctcgcccgaccccagggctcggcctcaacctcggcctcggaaggtggtctccgcctcgcccaaccccagggctcggcctcaacctcggcctcgggaggaatcgtgtcctcgccgaccccggcctcggcatcaggaggagtctctgcctcgcccgaccttgggctcggaccaaccgcgccacgggggatacatcattaccctacccatag

SEQ ID NO: 17537 - DNA, 189 bp, Zea mays
  Peptide Sequence Number=SeqID_60912
atggaggaagaagggcaggggacgccatgggaggagctggaaaaattctgggcgccatccatgaaccagaggaaggacggcgtgggctgctgccatgtgggagaagaagacagggagaaaaagaaagtgacggctaggggtggaagtgcaaaacagccaagggcaagggagagggatccgtatttatag

SEQ ID NO: 17538 - DNA, 471 bp, Zea mays
  Peptide Sequence Number=SeqID_60913
atgatggttcttgtctcagttgtcactacctcgttcaccatcctgcttcttttctctcttcccttatgcctccacttctgcaccaccccattctcggcagaggacgtaggagcagacgcctcctcaccgtattcgtccgacaccagcctcgacaccgactcgcgcagtgactattgcatgtccacgaggacgtttcacatcatgcgcgcgccatcgttttcgccgtcgtcggacgtcccgttcatctttccggccttcatcctcttcttcctccccaacctgctgcccccgcccacggctgcagccgcgagccgaccgacactcgtcgacgcgggtacggggcgagtcggtcatgctcctggcctttctctgtgcgtgccgtcgaggaggacatggcggcgcctgccacgcttaggttatcttggcgatgaggagcccaggtctgagatattggacaaccaagacccatag

SEQ ID NO: 17539 - DNA, 1680 bp, Zea mays
  Peptide Sequence Number=SeqID_60914
atggggaagggagatgtggctaccaggtcaaaatctcaaaaatcaccagcaatacagaatgagcagagtacacctgctaacccgcccacagcatatcctgattggtctcagttccaggcatactataatgctgctgggacagctccagtgaccccacctttttttcatccatctgtagctccaagccatcaggggcacccatatatgtggggtccacagaaggccgcgacaacggtcccgaccgagaaatccccgaaccccgtcctcccatcactaacgggcagggtcaaagctgcttactctgcaaaggcccacctaggcctgagggtggcgcacaaccgagctatgatgtctccttatgggacaccaccaccatatgcagcaatgtatgcacaaggtacaccatatcagcaggcaccaatgccaccgggttcacacccatacagtccttatcctatgcagttaccaaacgggacagttcaaactccaacatctggtgctggtggtacagcgacagataaatcaaataaaaataagcggaaggcttccctcaagagatcaaaaggaagcttaggtagtctggatgttgttgcagtaaaaaataacaagtcaccggcaaagccttcaacttcttcctccaatgaaggttcttcacaaagtatgcagatcgagtgcgtgagaggtgcaatttggaacactttgcaactggttctgtctgtgtacatgggttcaagggtgaaggataattctgagcaaggacagggtaatgcgcaaaacattagatacaatagttatgttcttctttctcaccagatgctaggagtaaatgtactcaaagctctgtcgttgagcccacacaaccatcttcaggcaccgacatcagctccttcgtcaaattcacgtgatattgttctcagtgatccgactatacaggatgggagagaactgaagagacaaaaacggaagcaatcaaatagggaatcagctcgacgctcaagattgcgcaagcaggctgaatgggaggaagtagccaatcgtgcagatttgctaaagcaggaaaatagttcacttaaagaagaattgaaacaacttcaggagaagtgtgatggcttgacctcagaaaatacatctctacatgttttggctgatgtcgacgcaaccaagctgcagcgccacatccagcaaccaacttccatggctggagcttggcacaagcggccatgccgcctccgctgtggactacttcagcgcgttgctgaacaaagctcaagtggtcccttcagtggtggtgcaggccactttggcaggggcgtgttcggcaatggctgtgcacaatgggcagagcttgtcatgggggcagtgctcggggggacgaggttgacgctcgaaggggatgaggtcagcgctcggttgggggcggtgctcggccatgggcagcggttctccaccatgctcggggtcagcaaaagagggaagatggggaacggctggagataccggatgggcagagggaccccacctatcattggcacagaggataagggagaggagggccttatggttgggcccaatctgagtctgtccagcgtggtagccaaaaccactgaaaccagcattaaaggggagaagcttaaagcgcttgaggatgagaaatcaaatggaaattggtacaaggattaa

SEQ ID NO: 17540 - DNA, 492 bp, Zea mays
  Peptide Sequence Number=SeqID_60915
atgggcaagggtaccaagcgcaagcgcgagccgactcctccgtcggatgatttcggtgactcggaatactcggaggaggagttctcctccgagtccgagggatctccggctcccgtctctcccctggcgtcgtctgatgattcagacgactcccaggggattgccgcggaggtctggacgtacatccgggtcgtcgagcgctccgggctcgagggctcggatgagtctgagttctcctcggacgaggaggactcggacggcggcgaggacgaagatgacgacgacgacgacggcgacgacgacgacggtggcgacggcgacgacgacgacggtggcgacggcgacggtgacgacagcaacggcggcgggggcagcggcggcaagggcagcaccagaggcggcagcagtacgggcagcaccagaggcgacagcagcaagggcagcaccagggacggcggcggcaagggcagcagcagcaaggccagtggctaa

SEQ ID NO: 17541 - DNA, 1005 bp, Zea mays
  Peptide Sequence Number=SeqID_60916
atggcgtcgccgataccgcgcgagtgggtcgggctgcagcagtttccggcggctacacagaccaagctgcacgaactcctcggcaaactcaaggaggaggatgtgagcacattaacaattctggtgatggggaaaggtggagtgggaaagtcatccactgttaactccatcgttggggagagggttgcctctgtcagcgctttccagtctgagggtctgagaccaatgatgtgctcgcgcacaagggcagggttcactttgaacattatcgacactcctgggcttattgaaggtggatacattaatgagcaggccgttgacatcattaagagatttcttctaggcaagactatcgatgttctcctgtacgtggatcgtttggatgcgtatagaatggatacactggatgaacaggttataagagccatcaccaattcatttggaaaagatatttggcgaagatcattggttgtgttgacccatgcccaactctcaccacctgatggaatcgactataatgatttctttacaagaagatcagaggcacttttgcgatacatccactcaggagcaggaatcaacaaacgagaatatgggttttcagagaagtactaccaggaggatttccccttgccaatagcattggtggagaacagtggaaggtgcaagactaatgagcatggggagaagatacttccggacggaactctgtgggttccaaacctgatgaaagaaattactgttgtcatctcaaacgggagcagtcccactcatgttgatcagaagttaattgatggtccaaaccctaacaatcgccgaaagttgttcataccacttatccttgctgtggagtacttcttggtggtaaaaggaatccggagggcgatccatgcagatatcgcaaacgggaaggtagatgactgggagcagcgttaccgggacctggtgggaagcagggacctcgtagagcagaaaggttctacctcccggaaccgcaaagcctaa

SEQ ID NO: 17542 - DNA, 846 bp, Zea mays
  Peptide Sequence Number=SeqID_60917
atgcaggcgacatgcaaccgtaccaagggggcgcaccctttcgactccgacgcgtccagcatgggggcccaggcccacacgtcatgtaaccagcgtgccggttactacgtgcgagaagctgcaccgccacttgcgccaataccgcgccttctcgactgcggaaccagtgccgcgactcgaggcgaccctgtgcatggcccaacagtgccaaccgagcacatcgatcatggttcagtcagccgcgggagaaggcgcgaacgggaccgggaaaggggatactccgaaagggatccttctccgcgaaggaagcaggccccgagcccccctactgatcagaggttcgaaggatggcccctcggaaggggaaacagcgccgcctaccccactccgactgctgtgccactcgacagagtgaggctgatagcagctaagtccagcctcgggcgccatgggaagctccgcctcgcccgacccagggctcggactcagcctcgaccccggaagacaaactccgcctcgcccgaccccagggctcggactcagcctcggccttggaagacgaactccgcctcgcccgacccagggctcggattcagcctcggcctcggaagacggactccgcctcgcccgaccccagggctcggactcagcctcgacctcgggagacggactccgcctcgcccgaccccagggctcagactcagcctcgacatcggaagacgaactccgcctcgcctggccctagggcccagactcgacctcgacctcggaggagcctccgccttgcccgacctcgggctcggacccgccacgtcacagggaaggccatcattaccctacccctag

SEQ ID NO: 17543 - DNA, 300 bp, Zea mays
  Peptide Sequence Number=SeqID_60918
atgggcaagaacagaaaagcaaaagagatattgttggtcggactctcaccagagggtcggaggccgaggcatgcagggatgagaagccggtcagaggtagtggccaccgggtacacaggttggaggctaccgggtacgcagaccttcgagcgtggtggaaccagcagcggctgcgtgcacaggttggaggctacctcgtcggcggctgcagctaagatcaatccgccagcaccactgccatcacgtgaggcgcagagctccgagtgtggtggaaccagcagcggctgtgtgcggcgataa

SEQ ID NO: 17544 - DNA, 258 bp, Zea mays
  Peptide Sequence Number=SeqID_60919
atggtcgcggcgcgattcgcggagggatttgcgggcttgaggatcgcgacggtcgaaggtttgcggacaggcgggtatcacagcgaggcggggggtgggaggtttgcggcggacatggctctcacggagttgcgccactgcatatcagaattgacagatgcaagcagtcgaatagggtcgaccacatgcttacaacgtgtagtgctcgaaacccatctccataagccacagaagaatctgtttcgatttggtgcttga

SEQ ID NO: 17545 - DNA, 336 bp, Zea mays
  Peptide Sequence Number=SeqID_60920
atggctacgggaagcggggcgcaggggatcccgtgggatcaagaatggctcgtggcctgccaggacgatgatgcaacttcggatgcggcagcgtcgggctcccgagacggtgacagtggtgacagtggtgcatcgctccgattcggtggtgaagcgcaatgggtggatgcgggcggcgactccggtgctcggacgtgggtcaggtgtggggtagacagcagcgggggcgtggacgtgctgcagcggttgtgtgggcgatgcgtaggcggatgcgggtgtggggggagattgaatgtgtgtcggggttcaaaagttcgtgctcgcgccggttgctaa

SEQ ID NO: 17546 - DNA, 564 bp, Zea mays
  Peptide Sequence Number=SeqID_60921
atgttgctgcatgcttttgactctggttctcgtcaatttctttttgcatgtattgtctttatttctttgtgttctaccctgcaagagataacatttctcacactgcaatgggactatgatgaagatggaactctttccttattagaattctcagacttgatgaaagcttttggtaataaattagcagttgcaaagattgaagagcttttccgtcaagcagatacaaatagtgatggcatagttgacatagatgaactggcagccctactagctgctcaacaagaagaagagccacttataagtaactgccatgtccatggtgaagatcttggaaaatatgataacataaatgatatggtacatatgacactttgcttagatgagggaactggtaatcagattatgactggtggatttctaactgacaaacatgcatcttatgggtggatgttcaagctcagtgaatgggcacatttctccacgtatgatgttggtttgtactctggctctacaacttcacatattctggtgtgttcagttactccatatggtacattaacttaa

SEQ ID NO: 17547 - DNA, 699 bp, Zea mays
  Peptide Sequence Number=SeqID_60922
atggtcatgggaataggagttgagaaaacgctaatggaggtcattctgtgcattcgtgaggatatgtacatcatagatcttgaggatgagacaatagatgcagagatattgaacttgatggctgttacaaatgaccatttcaagactgcgcttggaacaagcaacccatctgctctccatgaaactgttgttgaagtcccaaatgtctcttgggaggatattggtgggctggagaatgtcaagagagagctccaggagaattcttctactaggatgactgtaagtcttcttgtagttgctattgtattttacatcaaggataatatttcacatgactctgacttgtatgacatcttaagtatggtgtccttggttggtgtcatgaatatttgcacttatctcgtgtatagaataggagaaccatcagaccttacacaggttacccttgtttccaaactatacagttccctgggagcacttaagtttttaataactaatcatgtattcacaaggtatggactccaaaagttgtttggcctagactgcttggcactcacctcagaccaaaccccaatttaccctgatcttccatctaatatgaaatccagatgttggaggaagtggctgaggagtgagaagtacttggccgagcctaggaacaccaatagaaaaaagctctatacatgcgatagtgtctaa

SEQ ID NO: 17548 - DNA, 375 bp, Zea mays
  Peptide Sequence Number=SeqID_60923
atggccgtgatggattcaacatcggaaaagatgtacctctgccaggaccttgtcgatgtaggcctgctgaccgaggaccctttaactggtcacatgcctcgtcatggccaggttctggccgaccccactggaagccaggggcagccttgccctagcatcgtcggtgatgcggtgctagacgtcctgagccagatgacgtgcttctccggccggtgctcagcctgcccactcctgcccgatattctgccggagctgcacaagttgtcctgcttcctcatcgagcctggcctgcatctcgcggatttgctcgagctgccaaggaggatcgccgtcctctggcataccaagatggttgccttcgtcgagaccccctag

SEQ ID NO: 17549 - DNA, 918 bp, Zea mays
  Peptide Sequence Number=SeqID_60924
atgaagtctcgcatggcactggggttaccgagcccggagaaatcccaaccagagtcgggctcgtcatcttcctcggaacctggggggccgtacaaggctaacgcccagcaagtccttcgcgagcgtgctggcgtcgtccgtctgcttggggttggcgtgttgcggggaaacgacgcccgtcttcgtctcagacgcgaggtcaacgcccgacgtgtcacccgctggggcaccggcgtcgtcgactcgctcgacagccaacgaggtgccacctcctgcttggccatggttgccccgcctcctcctccgtcggcagggaaggtgacgggacagacccggatgctgctcttccgccacgcgaggaagacgtcgtcgattccgccgccggcgggcaggctgaaggctgccattgtcgttgtcgcgcggcggaggaaggagtaccatgtcgtagctgccgtcgagggacatgaactcaagactcccgaaacggagcatcgtcccaggctggagaggttgctggagactacccatctggagcttgatgggaagctgttcgtcaacacgcagcaggcccctacctggcgcgccaactgtcggcgtttcgaccccgggggtggatgcgcttgcagtagggggttacaagcgttcgtgagggagagagagagagagagcctgtccgtcagcccgtcctcccgcgcggccacctcctcgtacgagggccctggaccttccttttatagacgtaaggagaaggcccaggcgatccttgcattgaatgctcctgcgatacagtcggttggagaggcgatctggccaaggttgcttctccgcgaagcctgcccgagctgggcctcgggcgagtcgaagctttgtgctgatggtggttaccagccgagtttaggagtcttggggtacccataa

SEQ ID NO: 17550 - DNA, 852 bp, Zea mays
  Peptide Sequence Number=SeqID_60925
atgcccacacatggatttgctgaggtcactgcttataccgtaccagtcatatggttcatgatgatcgttccagatctttgcaagcttctccaagaaaagcagcaagcagcagcagcagcaacactgcaacagcaagcaggcagagcccagaaccaggcagctagcagaaacatgtctccgcctgttaagatcatcggccatttcaccagcccattctcgcaccgcgtcgaggccgctctgcggctcaagggcgtgccgtacgagctggtccaggaagacctgagcaacaagagcgagctgctgctcgccaaaaaccctgtccacaagaaggtgcccgtgctcctccatggcgatcgcgccatctgcgagtccctcgccatcgtccagtacgtcgacgaggccttcgacgggccgcctctcctccccgccgaccctcatgaccgtgccgtggcccgtttctgggcagacttcatggacaagctcgtcgtgccgttctggatggcacactgggccgagggcgaggcgcagaaggctctggtggaggaggccaagcagaagctggcgcttctggaggtacagctccaagggaagaggttctttggcggcgacaccctcggctacgtcgacatcgccgccggtgtgttgggtccttggctcagcatggtggaggaggtgaccggagtggctgtgcttgacgaagacgagtaccctgctctgcgtcgttggtccgaggagtacaattcctacgaagctctgaggcagtgcgtcccggacagagaccagctcgtcgccttctatactgaaaacaaggacaagtacaaaatgttcgctaaagcatggttgaagcagtaa

SEQ ID NO: 17551 - DNA, 141 bp, Zea mays
  Peptide Sequence Number=SeqID_60926
atggccgtgatgggttcaacatcggaaaagatgtacctctgccaggtgaggaagcaacaaacttttgttgtttctgttccaaggtggttccaaaagaagaaaagcaagagtaaggctgcaggaggaagagttcctccataa

SEQ ID NO: 17552 - DNA, 453 bp, Zea mays
  Peptide Sequence Number=SeqID_60927
atggccggatgctcgacgcccctgtccttcgagctcgagttatcctctgctcggttctcctatcacaccaaccatggtggccgccagatttcctcccatccggattcatgccagcgacgggctctcaggtgttggctcagaacctcaccaggtcaccagggaggcgctcagggtcgtgccaagtcaggaggatggttggttgaagtagaattccttgccagagttactaggcaccgctatggaccacctcgtgtcgttggcagtcctcctgtgctggcgaatctcggtgaggaccccacagctagtctctaccttgtctttatatcatgtagcagttcctacttgaagcttgattactgcgtggatcgggccgaatcgcgactatggcgctccaccgtggggaggtaccgccgccgtcgctgtctgggggagcgccgggcgtgtgtggggtag

SEQ ID NO: 17553 - DNA, 498 bp, Zea mays
  Peptide Sequence Number=SeqID_60928
atggctggatgctcgacgcccctgtccttcgagctcgagttatcctctgctcggttctcctatcacaccaaccatggtggccgccagatttgctcccatccggattcacgccagcgacgggctctcaggtgttggctcagaacctcaccaggtcaccagggaggcgctcagggtcgtgccaagtcaggaggatggctggttgaagtagaattcctcgccagatttactgggcaccgctatggaccacctcgtgtcgttggcagtcctcctgtgctggcgaatctcggtgaggaccccacaactagtctctaccttgtctttatatcatgtagcagttcctacttgaagcttgattactgcgtggatcgggccgaatcgcggctatggcgctccgccgtggggaggtaccgccgccgtcgctgtctggggggagcgccgggcgtgtgtggggtagaggagaaaggactagccgtagatctaagatcatggggtcattag

SEQ ID NO: 17554 - DNA, 438 bp, Zea mays
  Peptide Sequence Number=SeqID_60929
atggctcgtggaagatcccaaaagaacaagaagacaactccgaaggagaacaatgaggattcggcggtggacaagctaatgccatctccgaacgcctcaacctacacccacgggtccaacctccgctccgtctcgtctctccctccgcgctccggcttcggatcctctgccggcgccctcccccacccgctcagcatgggaaacatcgctcaccttgccacggagggcagcagtggcagggaggaagggtttgctatgaagacatgtctgtgccgcgcggcggaggtggagatgcacaagagcaagggaaatctctctggcatcctgcataagggtttcaagcctgacaagtgcaagacgccgttgtggatggcggtggcctggatcaagctgatgcgaaatcgcaaggaggagaatgggttgcttgacctgcaatga

SEQ ID NO: 17555 - DNA, 351 bp, Zea mays
  Peptide Sequence Number=SeqID_60930
tgcctcaagtcgctgtggctggcgctgtggacggagggggaggcgcaggaggcggccatgaagctggcgagggagaacctggcgctcctggaggagcagctgcagctcaatgggaagaagaagaacaacaggttcttgggaggcgattccatcggtctcgcggacatcgccggcgcaggcgtgctggcacactggctcggcgtgctggaggaggtcgccggagtgagcgtcgttggcggtgatggggagtaccctgctgtccgccgctgggggagggagtacctcgccgacgaagccgtcagggcgtgccagccgtcagggaccagctcctggcccacttctacgccatga

SEQ ID NO: 17556 - DNA, 1229 bp, Zea mays
  Peptide Sequence Number=SeqID_60931
atgaactgttcagtgtccggtgcgccggtatgggcgcgcctgccttctgcgcgcgctgcgcgcgcatttaatgcgttgcagagggactctgctgcagttgaccttttcagcacctggattcaggagtccttcttgagggcccagatgtctgcacagattgctctgcgagtgcaccggctcttggaccttccagcttttctgctagccgccggtgctgactctgaggtgcacctctcatatctgcttggccttctgactcttttgactaccagcggcaggtatgttgaggaatgggtccgagttttctacgcgactgtatggatcgaccctgatcatcactggatgaggtttcgttttgagcaagaggatgtcactattcatgccagccagattcgccagctatttggatttcacgagtcgtcgactcgtcttcatagcttgtgctatggcacctatgatcctcctcgtcgccctcacggcggtgtcgctccgggtacagctcacatcgcggctctgttccgaccgcccttctcagatgggtcgcgacgctcaccggtagatttcaccactgcaacaaagtttctatttcagcttatgagacagactcttctgccgcggatggggtacagggaggccaccactcatatccagctctggctccttggtgccctggtctctcactcagagtttgacgttgtggattcccttatttgtgagatcgaggacaccgttctagacgcccaggcgcagcacccgctcccccctctgacctgctcggcctcagtggcccagcagcgccagcggcctagcttccgctgcgggcttgcgcgcgcccagccacctccctgcacggggcccaccagcagcgccagtggcccagcgctcgcccacgcagcacgacccaccgcactagccatcgtcttcaactgctgcctcaatttcctcctgcttcccccggctgcgatgaagccggaaatcgccatcgcctccccggagctgctcgtcgcatcgccggatcggcgtctgctcatcgccgctgcacagcccggccaccggcgagtcgccgcacctgcccaggcacactgctgctggcgccgcggtcttgcccagcctccacagcctggccgcacaccgctctggaatcgaagatccagcttcggcgaccaaatgatccagctcttcgagttctacaaggctgaagatcttgagcatctgtttggtgaaggcaa

SEQ ID NO: 17557 - DNA, 384 bp, Zea mays
  Peptide Sequence Number=SeqID_60932
atgagatttagggtgctacagtttcacatcatgcgcgcaccatcgttttcgccgtcgccggacgtcccgttcgtcttcccgaccttcgtcctgttcttccttcccaacctgctgcccccgctcacggtcgcagccacaagccgaccgacgctcgtcgacgcgggtacggggcgagtcggtcatgctcctggcctttctttgtgcgtgccgtcgaggaggacatggtggcgcctgctacgcttaggttatcttggcgatgaggagtccagcggtatactaccaatgtcgcctccagatgtccaggtcttcgtcatgtccttctctggcaatgaacagtttgtgggtattattgtgagccatcgcaacgcacaggcaaccgactag

SEQ ID NO: 17558 - DNA, 297 bp, Zea mays
  Peptide Sequence Number=SeqID_60933
atggccagccactgcccgctctcatggctgtcatcccggtggctctggcgtgtgggaccgcttgtacggtcgcgctcggaccctctggttttcctctctgcgccaactccattgtgcctgggcgggaagcttcgccgagtccccacagagctactggtcgtctgggcggaaggagaggaccactgggtgaccggaatttcgccgccgcgcaaccggatctgttctgcgccatgggcagactatctcggtgcatcgattgccggtgagaacgccttctccaatctcgccatggcctag

SEQ ID NO: 17559 - DNA, 801 bp, Zea mays
  Peptide Sequence Number=SeqID_60934
atgtggaatgggaaaagggcagtgtttttactaaacgatgttttcaaaaagtgtatgatgaagggtattcaccctcatcacctttcactcaatctgaactcgtacggtccaaaccccaaggttatgaaggctagggagcaccaggaggataaggagggggaaagttttgtctggtttggacatggaggtggcctgactccttccggtataaccgttaagacccttcttttcttctaccagatagaaggctctttggtcattaggacatcctactgctcagaggtggaaggattccctcatcttttgtggagttgcgtgcttcgcatggggatccgcaagaagtcgaagtatgtctggaaagaataccgcgagaatggaactgagaagggctctatgcaacaaaaatacccctgcctggaggaaaatacttcaggcctctcaggaagagatcctactgagtatgaccccaccattgtctacatggccggatatctccacaccctcgataaccactatgacgacctctcctcccactgcacccacctaaactcctgggtggaaagcttagagcaacaggtcaaggaacttaagaaggagaaggcgtccctccaagaaagtctcgaaatggcagaaggtgaagaggccaacactcgtgaagcctaccaaaccctgaagatggattacgataagaagctaaagaagctcgcccccacgaagaaaatccgaaagaagacaagagccaaggatgccagactgagcggaagagggaagcccctccagctctacctccctccaggatag

SEQ ID NO: 17560 - DNA, 1338 bp, Zea mays
  Peptide Sequence Number=SeqID_60935
atgcgcatctctctccgcgtacttatcagtagcgagctcggcacgtcattgtgcactgctgcaccgagcctagcgcgagcctccgtccgaaagtccaaatcttcagctctctccttgacgcatgcccggatcgatcggtccagctctacccaccggaggaggaggcagatcaacgggcagctgactaaggtggatccacggaggaggcatggcaagaggcccctacccgccgacgaggaggaggaagaggaggaggagctgcccccgccgccggcaaagtacgagcagctggatcaggaggagaagcatcacgttgtcgtctcgcagctgcaagcaggagctacctttagcggtggccgagggtcttcgtcgtcttccgtggccggcccttcgccggaggcgtacgcgcagtactactactcggcgcgcgccgaccacgacgcctccgccgtggcctccgcgctagcccatgtcatccgcgcctcgcccgaccaactcccgccgcagcaggccgcctgcttgtacggcgccgccggcgcgccggtcctgcggcagggagagggagaccatccgcaaccgcaagcggctgcgcaccaccatcccggtggccacgtcgccgccgaggaggagcaaggtgcaggtctgaggcggcactaccgaggggtgaggcagcggccgtggggcaagtgggcggcggagatccgggaccccaagaaggcggcgcgggtgtggctcggcaccttcgacacggcggaggacgccgccatcgcctacgacgaggcggcgctgcggttcaagggcaccaaggccaagctcaacttcccggagcgcgtgcagggccgaaccgacctcggcttcgtcgtcacccgcggcatcccggaccaccaccggcacccgcgggcggcggcggtgaacctggcagcaatgccgcaggcgcaggcgcagccgcacttgcagcacggccgcccgaccgtcatgccgtacccgtacccgtaccctgacctcatgcagtacgcgcagctgctgcagggcggccggggcggcggcgaccacgcggcggcggtccagcagcagctcatgatgatgggcgggcggggcggcaacctgcccttctcgttctcgccgccgtcgtcctggagtgcgccgccgcagatactggacttctcggcgcggcagctcatcacccagcccggcccgccgtcgtctccggccgcccccggcggcgcggcgccgtccacgccgtcgtccacgaccacggcgtcgtcgcccagcgccagcgccagcggcagtgcatggccgtacggtggggagcaccacaggaataaaaaggacgcgtga

SEQ ID NO: 17561 - DNA, 456 bp, Zea mays
  Peptide Sequence Number=SeqID_60936
atgcgtagaggcaggaggggtcgcagttggcctcgccgcactgacggcaaacacaagcgtgccctgagtccaccctcagaggactttggggactcagagtactcggaggaggcctcctccgagtcggaccgttcgcctgctccggcttctcccccggcatcatccgaggacttgggtgactccatggggctctccaccatggctcgagcttactggcgctccatcgaacgcgccggacttggtgggtcggatgagtcaggggtctcctcggatgaggcagactcctccgactcttccgaggagtggagcggcgacgatggtgaggacgagggtgacggcagcagtgacgacaacggcgagggtgacggcaacgacggtgacggcgacgacagcgacgacgacggcgacggtggcgacggcggcgacaagggcgacggtggtgacggcagcagctag

SEQ ID NO: 17562 - DNA, 462 bp, Zea mays
  Peptide Sequence Number=SeqID_60937
atgggcaaaaacaacaaacgcaagcgcgagccgactcctccgtcagaggactttggcgactcgaaatactcagaggaggagttctcctctgagtctgaggtgtctccggctcccgtctctcccccagcgtcgtccgatgactcggaggactctcaagggattgccgcggaggtctggacgtacatccgggccgtcgagcgctccgggctcgagggctcggatgagtcagagtactcctcggatgaggaggactcggacgacggcggcgaggacgaggacgacgacgacgacgacgacgacggcggcgccgacgacggtgacggtgacggtgacagcagcggcaggggtggcaacggcggcagcaggggcggcaacggcggcagtggaagcggcaacggcggtagcagcaggggcagcggcggcggcggcagcagcaagggcagcaacaaggccagtggctaa

SEQ ID NO: 17563 - DNA, 480 bp, Zea mays
  Peptide Sequence Number=SeqID_60938
atgcaggcggcatgcaatcgcaccaagggggcgcaccctttcgacttcgacgcgtccagcatggaggcccaggcccacacgtcatgcgggtggaagcagcagtcaagtcgtcagcaagctcacgcctcctcctgggacagcgagagaaccctctcccacggcgtgaagacgacgcgcccgtgttccgttcctcaaacggctcgcgcacgcacaacggctgccccgcgaaccactcgtcccgtcgcattaactctgcggcaggacaggcggcacctttggcaggcgaagcaggcgacgcttcacctccgccataatgaccgcgtcaaaaaagggaccgggaaaggggacactccgaaagggatccttctccgcgaaggaagcgggccccgagccctcctactgatcagaggttcgaaggctggcccatcggaagggttcaacagccgcctcagagcactcaggcttcgcgcctactactga

SEQ ID NO: 17564 - DNA, 948 bp, Zea mays
  Peptide Sequence Number=SeqID_60939
atgtcttcgcactctcctcatgcatcgcgcccttccaccttccgagccctcggatggggagcgctcgcgttgctttcgtcttgtcgtcgttggaggaacgcaacttcgcggaagttggtacctttcagccatcgttcgacttcaaggattttcatcaggcagcccggctgcatcccctcgccggtggtcacccaagacggtgaccaccagttcgagggtggggagaagcaagccgggctgcggcctctgcccctccctcagcttcaaggatgttcatcatcagtgctggggatgggagtgcaccgagttggggcctgtctccgcgcgggcagcggcctgctccttccctcagtgattggggggaagggcgttcgccgttcgtggcgctggcagctgccgcgtgtctggctctccggcctgagcggcttcggcgctgcttccggtgccacctcccaccgaggcagccggaagaggtttctccgccgacaagatagccggagtcacccgcggactgacctccaactctacggccttggtagcttgtcctcgcccctcgagtggggtcgtgggcgagggacttgtcgcagcagcgtctaccctgaggtcatcgctgctgctgtttggccgcccggagcggaggtcgttgtcgctgcaggcctgggcgggcggcggaaccctcgaccgctcttcgatgagccggggccggaggcagcggtgtcagcacagacagaggcagagttggctcgaaaaaggaagcttcgtcggccggggcttggccgggtcgtccactggcgggaccaacgcctgagtcgagttgtcgaggccacgagccgggctggtgtcctcgggggacagctggccgaggcttcggggtggccggccgagccgtctgctcgggccgggttcctggaggagaccctggcggcgatggcccgggcgtggtgctga

SEQ ID NO: 17565 - DNA, 207 bp, Zea mays
  Peptide Sequence Number=SeqID_60940
atgtcgacatatgttctgctcgttcttgaccgttatgttaccaagtgcccgttccctcacctgtacttgtgctgcccggaccaccgccgattggcgatcgacgtggaggggatcgccatgcccatgcgcgcattgaccggccggctagctgcccgggtgtcgtcgctttttttggcacttgtcccaggttatatcagtcatcactga

SEQ ID NO: 17566 - DNA, 327 bp, Zea mays
  Peptide Sequence Number=SeqID_60941
atggataaaaccgttcacgctggacagatcctgatgaggagacccgacgtcgtgggtacagtggtcaccctaaacaacgtgaaagcaagtgtaccatgctggcttaaaggcatcttccgacttaagccgatcgccttgctggtagggcgtagtggtcaacctaagtggagtaatgatgaggacatcacctgtaacatgagtacgactacaccagcagcacctccacatcaagtgccacatcctttattagctgggccaatcacccgggcccgtgccagagatcttaacttcgtcatgctactgaagaatgagggcccagaagaatag

SEQ ID NO: 17567 - DNA, 207 bp, Zea mays
  Peptide Sequence Number=SeqID_60942
atggatgttttgatgattaggtatcttggagaggaccagcaaggacttgggaaaggccaaggaccaaagaatcaaatggacaaggacaaggggcctaagcttaacgacgatgagtgtgtctctcagatggaattgaaggagatgatgcgcgcgatgactgaagcttttaaaaaataccaggactctgtggcaacatcctatgagtag

SEQ ID NO: 17568 - DNA, 120 bp, Zea mays
  Peptide Sequence Number=SeqID_60943
atggtcgtgggcgccgccgtgctgacctcggtgaaggacgagcaagccactgtggaatctgaggttcagcaagtagaagtagctgagcaggagctcattgaaggcaagttgtgcccttga

SEQ ID NO: 17569 - DNA, 531 bp, Zea mays
  Peptide Sequence Number=SeqID_60944
atggttgtattcgcgcagaacactctatcggtggcgagattcaggatgataggggatacgacgagccgaaggtatgagaggaggggggggttgtctatttacccagcggtgacaccaacgctcgagagaatctcgcccaagctacggggattcggcaacgacgcgcagcaaagacgggccagagatgaagatcgagaagcgaccgaggatggcttgtgggacccggtgcacaggaggtttaggcacggaaaactcgggcgagagggcatccgcgatggattcccgtccgggtcctgcgcgagcgacatccacggaggccgttggggaagacgacccgggtgccgactggacgggcccacctggcagagacacatgagaacgcggcgcagccgagctgtggagctggcacgcggggcccgaggagctgtgaaaggaggcgcgtgcggggtgtccgaccgaagggcccggcttgtcagtggttcgtctgagccgtgcacgcggtgctggcggagctggctgcgcagagggtag

SEQ ID NO: 17570 - DNA, 417 bp, Zea mays
  Peptide Sequence Number=SeqID_60945
atgacggagggagagctccgggcgggccggggcaactccggcgaggaatcgcggtcggggagaggggatctggggcacgctaaggctgggactagctacaacagggtctctggcgaggtcgagcagcgagggcagagcgcaagagagcgtgagcttgctcgaaatgggacaggggagagagtgtgggtgtgggtagggctcaaaagggagctagggacgagtcgaggcggggttcagcgagttgcgacggttgacgatgaactcgatggtgccctcgactttgcgaatggtggacgacggcgctcgttccacgcacgtcgacggaaatcgaggaacgacggcatcgatggtggtgctctggtcgtccttcggctcgagaaagaggtgccgagacatgcgcacgagtcggtggagtga

SEQ ID NO: 17571 - DNA, 501 bp, Zea mays
  Peptide Sequence Number=SeqID_60946
atggcccccgttctcctccacggcggcacgaaattccagtggtggaggcgaggtgggtggttaacggcgaaacaggaggcagggatagggctcaagggtcctttatacgccgttgggagcatcaacccggttcctaggtggccgcgcaaggaggtcggtcgagcaagagaagcgagcaggggtcctcgacgtcgggcgggctctggtggggcgagttctggtgaactccggcgaactccgacgacgaacgacgaactccggcaacaacgacaagcgagagagtgcgaggaaatgagagtgagctcgggtaggagaggaagagagaggtttggcgaggcagagacagaaaagggcgtgcgagcgagggcaaccgatgccgacaacccagccccactaggcagagagagggagagagagagcgtgcggggaaagaaatcgccgctgacaggtggaacccacctgtcaggcggcgcaggcgcgcgacctggttgggccgactag

SEQ ID NO: 17572 - DNA, 114 bp, Zea mays
  Peptide Sequence Number=SeqID_60947
atgggcacgaatcgtgacatcggcgtgaatcgcagtgcgaaggtcactggcgacgagctaccaatccagcctgaagatggcacccttcgaggccttgtatgggaggaggtgtag

SEQ ID NO: 17573 - DNA, 585 bp, Zea mays
  Peptide Sequence Number=SeqID_60948
atggcacccagaaattctagcagcctccatggacgacctcccctcctctgcgccagggcgcccctgttcccctgctccatgccgacgccccctgctccttctccctcgcgcagcagcagccgagtcttcttcctcccactgctgtccacggtgtgcagcaaacagggagctcaactccacctctccccatggcacccctatttccccgtcggcagcttggagtccgagcaggcacagcaggagcatagccccatgacgcccagcagcagctcgccccgcctctcctcacaggcgcaaccctctcccatggcgctctgcagcagatgccatggagcatcccctccatgccttgcgactcggcttcctcccagtgtgtgtgctgctgcgcctgcgcagttgatgcttgctatgtgcttgacgaaatgtacaacaagccacgcgtcgtcgattccccaaagcagcaccgttcttcgccttgcgtcgtcgtcaaacttcgctgttgctctcccccatgaccagcacccccacagcagccctcgcccgctcagccctccactccacagcgccaacgttgtccctgcctaa

SEQ ID NO: 17574 - DNA, 432 bp, Zea mays
  Peptide Sequence Number=SeqID_60949
atgtgcgggtcgccgtcggggatggttggagtcggccgatccgcgtgcgcaggcgggggagctcgtcggcggcgaggagtccggcctatccagggcacaattgaccaatcaatcgggtcagagagcttcaccagatatcaaggaaggtccgaggacttggaaaacttcagggccaatggcgaagctaaccgaagtgctggtgtgacttggggtgactggagtgggctggccacggtggccgaggctctggcggcaatggcgggcgaaaagaagctcgccggagctaaggaggggtgtctagccggcgatggcgcgggcgagcacggccgagggcggggctcaggcaagcgctctggcgtctggcacaatgtcgatcacgaggcaacgcagagagaggtcgagttcaagcgcggattggccccaaatctttga

SEQ ID NO: 17575 - DNA, 144 bp, Zea mays
  Peptide Sequence Number=SeqID_60950
atggtcaacttggtcgccatgctcaacacagagttgaaccactcccttgacgagttgggaaagcatccttaccgttcaccgcccagtggtcgcttcgactatggtaccccagactgtaggacccgcatagatttagatccatag

SEQ ID NO: 17576 - DNA, 420 bp, Zea mays
  Peptide Sequence Number=SeqID_60951
atgctggtagactacacaacgatactcgatagaccaggtgtgtcggtcaaaggcccgacgcaacagggtaccaagagagtcgtggaagtgacacctgcgagcggcgtcacaagtgatgtgtctagcgatccacccctctggctccggctccggctcctccgagcgctccgtgccgtggctcgaactgccaccagcatcgtcatcatctctgtctctgtcggggtctcctccagcagccgggatgccctatggttgtgcagggggcatctctggctgaggttcaggggaaggcggcctcttagactccacctcccgctgaggcgagggggaagagtcctgctgctcctgcttctggcgtcggcgctcctactcctcgtgcaggcgacgatgcagtctctccagctggctggactgacctga

SEQ ID NO: 17577 - DNA, 249 bp, Zea mays
  Peptide Sequence Number=SeqID_60952
atggcgatgacgctggtgagggagactggcgcaacagcacagcacgggtacgacgacgtagagcaagcatggcaatcaacccacgagcagaagcaggagtcgaaggagaaggcaccaggaactcgacggctgaccataagcgactgggaagtgtcgaaggcgagggaaatcgacaacgcacgacgagctgggtggatgctcgggcaacgggctgagcataaatggaccggtggtagccaatacgagtag

SEQ ID NO: 17578 - DNA, 666 bp, Zea mays
  Peptide Sequence Number=SeqID_60953
atggacagggagctgggtggccatggaagggagggagctccctgcatgctgccgtgtgggaggaggagcacgggctgctgccatgaggaagaagagacagggaagaaaggcagtcgggctcgtcggcggcgcatgctccggtttgctcatagcggtagagctcaatcaaagtgctcggggagcttcacgggaggtcagcggtgccatcggtgcaaggaattgaagagtggctcaccgtgcaactcggtctacgcgcggcggcggtcggatgaagtccgacgatggcaatctggcacctccggtgaaatggtgttcggtctaagggctcgggaagctttacggggccatgggaatgctagccgaggagttggattggatggaggtgggccggagtggccggtccacggtggtcgggctcgggcggccgcgggcacgccgtgcgcaggaagaactctagcgaactcgtgctcgggcagggctgagagcgagcgggggagtacagtcgtggccttgggcggctatataggcaccggcgcgggcgtggttgcagggtcgggcattgtgcggcgcgggcgcatggggccgagcgccggggcgtgctctggcgtgccagaacaggtcgaacacggcgtgccttgggtatttgggcgcccttttgtcaattag

SEQ ID NO: 17579 - DNA, 539 bp, Zea mays
  Peptide Sequence Number=SeqID_60954
atgtcctcatccttgtccaagaaggctaacttcttcggccatgtgagggatagatcacatggcaagtctgatgttgaaaggatctgcaaggaagtcttcgaggacttgtcgaacaagaacacggggcttttggacatcaactccctccaccccaggcctcggccgtacctcctcgcgcgctctcaagtcctgcccgagccaaagttcaccggacttcgcctcgagcacgccgcgccactgctctccatcaccacccgagcctcggccaccgtggccagctccctccagtcacttccaggccgcgtcagccactcggatagctttgccattatcccgtggaactttccaagctctcggacccggcagaacttcaccggagacccgagatcgtccttgccggacttcggtcgcccatggccgcgcgtaaaccgagcaatacgacctactccgaccaccgcagccgatgatccgtacctcgatgtgatcgctagagactcccggacctcacccgacccctcaccggagcaacctcgacaccg

SEQ ID NO: 17580 - DNA, 216 bp, Zea mays
  Peptide Sequence Number=SeqID_60955
atggtcgatctagcgggcacggcggaggggattgatgaaagtgcacggggcggggttggagatcgcgcgccaggccaggggcgtggtgaggcgggggcgctgtggcggtgtctactggtgcggcctctcggcgcgggtgtcacactcggttttggaagcggaaaggtacttagttacatcaagatttctgagacatccatagagtctattacataa

SEQ ID NO: 17581 - DNA, 261 bp, Zea mays
  Peptide Sequence Number=SeqID_60956
atggcgaactacagagacatgtccttacccgcagttggagaaggatacggctgcccccaaaagatgtccgcacgacggtgcttttgcgagcgtcgatggcgaggccccggtgcccaacgtggtgacgctggggacgacgtccacagtacgaggaacgccgcaggcgccacgcgcgttgaggaacctggacacactccccccggctcccgagctccctctcttgctcacggtagaacgtcggtcaatggtggcggacggtga

SEQ ID NO: 17582 - DNA, 507 bp, Zea mays
  Peptide Sequence Number=SeqID_60957
atgagggcgtgcgacgaccctctggcggaggcgcgtaggctgggtggtcactggggagggtcgcggctggtgttgagtggtgccggcagcgggatctcggcggcggcgggtctccctgaacaaagaggaagcgcagaggatgcgaacgacggccggccggcgactggggacgcggtgcgggaggaggcgagtctcgacaacggtggccgacagtggaggcacgaccgcgagcccgcgcgcaggagagtcccggcggcggcggccatctgcggaggtgtggtcgcgagcccgcacgcgacgtggccgagggaggcacggatgctggagccggccggacctgcgaaggacacggtggctgctgaggagatggagaggaggggcagtggcctagaggggtggaggctgcccagacgcagatctgcttctgggcttgacgtcgccgacgcgcacatcatgggattcactgtccaccatcttcatccgcaaaggcgcacgaatctgttgtga

SEQ ID NO: 17583 - DNA, 750 bp, Zea mays
  Peptide Sequence Number=SeqID_60958
actggatcgaaactcgacgaaaaccctcgacggcagccccttggtgaagatatcagcgaactgcagcgtggtcgagatgctcagaacccgaacgtcatcggcggcgacacgctcgcgaatgaagtccaggtcgatctccacatgcttcgtgcgctgatgatgcatgggattggtggagacgtagactgccctgacgttgtcgcagtagacaagggtggcacgttgaagggggttgtggagctcctgaagaagctggcactagccaggaggcctcggccacgttgttggccacagcgcggtactcgacctccgcactggagcaggagacgacgggctgccacttggcggccaggagacgaggttagcgcccaagaacacgacataaccggaagtggaccagcccgtgttgggacatacaacccagtcagcgtcgatgctccggtaggacgtcgcgtcgacgaccgagggcccgtcgtcctcagagagcttcgcttgagtgtcgacaggtgtggagcagggcttgtagtcagacatgccagcccgctccaggatgtcaatggcgtactggcgctagtggaggaagagaccctgagtccggcgctccgatgtgatgccatggctgaagaggtcggcggatgtcgtgagcacaatgtcgtcgacatagagcaggaggtagatggtgtcgtcgtcgcgccggtagatgaacagggatgtgtccgacttggcctcgtcgaagccgatggaggccaa

SEQ ID NO: 17584 - DNA, 1026 bp, Zea mays
  Peptide Sequence Number=SeqID_60959
atgactactgaacaacgactggagttgcaacagcgtattatggatgttggtgagaaggggaaaattccttttaaagactgtgttagaatagcaagagaactgaatctttctgtagagcaggtacttcgcctttcatatgaaaggcaatctcggctccatgaacagcccagctttacttctaaacaaaagcagcaaagagttggttctggattgactcctgtgagaagaaagagacgtgccgatgggaccagcctgaagcttctgaaacgtacagtacaagcaagtggatctgctgaacaaatattggagcaacctattgttgatgaagaagtaccaatgatcagtcgatatcttgaaaaggaaaggagtttgaaaaggagaagattgtttccccagatttcaaacagaagtcaagaaaacagtttggattcagattgtgagcaattcaattgggatgactttgaagttccagagataaagagtgcacttaatgaagtccttgaattaattcaaacagaaaaaatagatcaggccaagagaattgggcctgttaatcaaaaaaacattaacaatgataatgatgtcacaaaggacacaatatgttctcaggaactgccaaataatcaggctatactaggtgaaaccaaaacgagtgcagtttcagaaagtgggttctgtgatcctgaaaaatcatgcagacattcaaatgcagaaagtgaaaacatggaagtcttctgcaaacctcaagaaaaaatcattaaggatcaccgaaataagattattgaaagaggcatatggaaatcattggctgttgcaaatgccttggagcttctgaagttggttttcctcaacacatctttaggatcaaatgtacaagcttcactagcagcaacactgcagctttattcagagagcgagatttttactgctgtttcctttcttaaagaaaaaaaattcttggttagtgtatctgaacttatgtttcctttggaatatttgcttttcagtatgatgtgcccaacttaa

SEQ ID NO: 17585 - DNA, 1452 bp, Zea mays
  Peptide Sequence Number=SeqID_60960
atgcgacatttcttatccacgtgtgacaactacctctccgacggttccgatgactacaactctgatgatgagggttacgactcgactcgggagtgcttccatgtcaggcacaaggagcacggtgaaggaaaccaacttgtcatgcctcgagaggccaacaccccggcactagccccacacgccggagagcaaatggaacaagtttcatctaaagatttggaatcacctagttcacagagcaaattactcttgcttgaagaagagaaccatgacaaaccaattggacatcatatccagaacaaccgtgatgcttctgctgcagtttcccagttagttgaagaaggttgcaaccaaattgctattaaactcaataaacgggtcagattttttctaggtgttggctttaggccaaagaagaaatttgtactgaaggtggagttacataaatggttagaacggcttgaaaagaaggacgggaaaataatggataggaagacattgactcgcacgttgaataagcttcagcaagagggaagttgtaaatgtatcaaagtcagtgctccattggtgacaaattatgctcgcagtcgtctctttgatgtaatactgcattcttctgttagagacgtgtcaccagaacttgtggagcaatttaggaccagacaaaggaactttgacaccgaatctcgcgcaggtgcagcagctaaagtgaagcaaaatcaacatatgactgccatacctggtctgaggatttcacgcagagttaaagtttacaaaccattactattagaagctatgtatgcaaatggattcataggcgcaaagatgattcgagcaaagttatttcataaatttctgtgggcttatgtcaattctttgccaaattggtgcaatgcatttggttgtaccaaagcagggcagtatgataagagccttaatcaatcatgcctgttattttctatggaagcagctatgaaagaaatgccccttgaactctttctacaaattgttgggtcagcaaagaagattgataacatgataacgttgtgtaggcttggaaaaacactttcagaaatacctacagaggaatacaatcagatcttggatactcatgccaatggccgactctcacgtttagtaaatattttggacaagctcaagctagttcagcttgcaaaagaattcttagaagatgctggtgtatcgtcaaatgccatgtatacacattcgatggagctcaggccttacatcgaagaacccatgccaagaattcttccatcttcccaactgaacaatcatcggaaaattcggcatgattttgtactttcaaagaaagagtttgttgattcttattgggaaacactagagtgctgttatttaacagctggtttggctgacccgttaagtgccttccctggcagttctatcccggaggattatcgcatacgttga

SEQ ID NO: 17586 - DNA, 894 bp, Zea mays
  Peptide Sequence Number=SeqID_60961
atgaacaagatcaaagacctgagcagccccagacgtggaggtggaaaaaggaaggcgagagtgacggccgagctgacaagcatgacagagggaggcaatcacaacacgggggaaggcaagcggtccaggcatgtggtggcccgcctgagggtggagctcgacgcaatcacggagaatagggttcatgcccaatcgaaggccacgaaaatgccccggacaagctggtcgtcgtgtaggaggattcgcatagcgttcccaacggaacttagcagagctaggaaggtggtggcgccggcggtcagggcaaaggcagggtcgaggacgtcaggagccatgggatgggtagggcccccggtgatcggcgtaggcggcgctttggtgagggagtgggccaaggcggggcagttcagtgggggagatggtcagaagggcgtgcgacgccctctggcggaggcgcgtaggctgggtggtcactggggagggtcgcggctggtgttgagtggtgccggcagcgggatctcggcggcggcgggtctccctgaacaaagaggaagcgcagaggatgcgaacgacggccggccggcgactggggacgcggtgcgggaggaggcgagtctcgacaacggtggccgacagtggaggcacggccgcgagcccgcgcgcaggagagtcccggcggcggcggccatctgcggaggtgtggtcgcgagcccgcacgcgacgtggccgagggaggcacggatgctggagccggccggacctgcgaaggacacggtggctgctgaggagatggagaggaggggcagtggcctagaggggtggaggtggtcgtggccaggggcagggagaggctggcagcggctggaggtgggagggaggaagagagaaatctga

SEQ ID NO: 17587 - DNA, 453 bp, Zea mays
  Peptide Sequence Number=SeqID_60962
atggtccacatcgtcgagcaccatgacttcatgcccggggacttcctggtggaggaagaggctgcgtcttccacatcgcgggccaccaaccacccggcgcctggtgctgctgctgtgcactctgcacggcagcacactcctgcgcaggcatccagagcgtctagggctgcgcctggggcgttgtctgcggccagagaattactgcgtcaccctcctagctccacggcctcgtcggaggccatgaagcagtggcgtgacgacgtcgaccgactactcggtatggcacactctggctcaaccaggcccaggcctcggtcatcccggcatcaacacgaggcgtcggcgtcagtgcgctcacgttcggtgagggcagcgtcgactgaggacctgcgggcgaagctcgaccgtagacatgtgggagaggacgctccagcctctctgggggagatctaa

SEQ ID NO: 17588 - DNA, 405 bp, Zea mays
  Peptide Sequence Number=SeqID_60963
atggaaggaagaactaatgcctgtaacgcctgggcgatctccgagcgccataatgtccgtagtgcatatagtattgatatgccgccactgtttccccgaggtcgcgcggccaagagtccttacgtcaggctccgcccactggcttacgtcacgggcagcgtgccacgtggcagcatcggggctccgcctgagcggggagcagaagtgtacgtggaccccgctgtgagtggcccggaccccacacagaggggtctaggacccgtcccaggggtccggttcgtacccgtggaggtcctggaccttgcctggaggtccgattctagagcccgcataatatacaagtcttattcctgtcatggtatcaagtgtcatgtcaccaaatatagtgatgtgtcaccgcattag

SEQ ID NO: 17589 - DNA, 444 bp, Zea mays
  Peptide Sequence Number=SeqID_60964
atgcctggatttgaaatctacgacaacgacattcctcaaccaaccaggcaaccaatcagcaagtgggaagtgaaaaaaagcccagcactggagctccgcccgcattggacccagcccggcaactctgcgcgcggctatagagcggcctcagttgcagatttgcatgggggagtgggcctgcgcaagcggccgcaggtggccaggcggccagcagtccgttccaggctcaaccagcagcagcagcagcagcagcagcagcagcagcagcagcagcagcagcagcagcagcccgctcgatggcgcagcgagcaggaccgcacgccacatccactgtggatgatccacatgaccaataaccatgcacccatcttccgctacccggaattccaggctcaactgatccagagaatgcatggcttcacgtctacgtacttgcccgattga

SEQ ID NO: 17590 - DNA, 1203 bp, Zea mays
  Peptide Sequence Number=SeqID_60965
atggacgtcgccggcgacggcggaggcggccgccgccccaacttccctctgcagctcctggagaagaaagaggagcagccgtgctccatctccgctgcggtgggcgcgtcagcgggaggcaacgggaatggatcgggggccgtcggaggtgagatgcagcaggtgcggaaggcggcacccaagcggagctccaccaaggaccggcacaccaaggtggagggcagggggcgtcgcatccggatgccagcgctgtgcgcggcccgggtgttccagctgacgcgggagctcgggcacaagacggacggcgagaccatcgagtggctgctgcagcaggccgagccggcggtgatcgcggccaccggcaccggcaccatcccggccaacttcacctccctcaacatctccctccgctcctcgggctcctccttctccgccccggcccacctacgcgccgccttgcctgctagccccgccaccgcagcccggttcggccgtgctgacgcgtgggaccgggttgtcggccttgccttcccttcggagggcccggcctcgtcatcttcgtcgccgtcgcctttgttgcttaatttcaactccggcagcgtcggtcttgacgcgcaacagtcgccgtctgccgcggctgcagccgcagccgccgatatgacaaggaagaggcggtgggaacaagaaatgcagcagcagcagcagcagcaagcgcagcaatatcagcagcagatggcggggtacacgcagagccaaatgccgggcaccgtgtggatggtgccgagcagcaacaacacgcagggtggtggtacaccttccagcggcggcagtggcggatgcaccggcgagtctatctggacgttcccgcagatgggcagcgccaccgccgcggctgccgtgtaccgggggagcgtgccgagcgggctacatttcatgaacttccccgcaccggtggcgctgcttccagggcagcagcttgggctcggctccgtgggaggcggcggcggcggcagcggaggcggcagcggaggcgaggggcacatggggatcctcgccgccctcaatgcgtaccggacacaggtggtaacggatcccgcggccagtcagggcgggggaggtggaggcggcgggtctggccagcagcagcagcacggtggcgggcgcggcgaccggcacgagagcatgagcaccagcgactcgtag

SEQ ID NO: 17591 - DNA, 900 bp, Zea mays
  Peptide Sequence Number=SeqID_60966
atgcccctgctcgcctcttctccgccccatccccctgtgtctagcgcgctacccgcccctcccaacgtcgtcctctccgtcccatcctcccatcgtgcgacaaccgatccacgcctcgaggcccaggccgtgccacgccggtggggaagcgaaactcacttacaggacgcggatctccttccaaactcgaaggcgacgatccggcacaggggcaaccttccatggcgaagggcgcacctaaagcattgtggcaagccggtatctgccgcagcggcggtagaggtcttcgaggagcacaaaggtagcgagctgcttatagatacgatggattccgtgcctccattgtacaggactgctgcttgtggggtggggacaatgaggcagcaagactcaaggtccaggatgatgaacaacaacagcggcgtcgacgcaggaggccctggttcaggcatgggtctgggagtgccggatgtgccattgggctgcagggatggaaagagcttcacatacaaaaatagtatcaacattgctatagcagtggccatagatggtgggttgattacatcggttcttcaagatgctggtaagctgattgccggagagattgaaatcaaaggggttgagctgcaggagagttgtagtttgtcgttcttttccatggtaggcattttcattgggatcatacaattattctctgtcgatgtttacaagaaaatagtatctaaaaacaagatgcttctgttccatgagggtgtgattgagactgaaacggtgggtaccagagtgaaggagtcggaggcagttttagtagagaaagaggtcgaactgatcgatgagcctcagattcaagagagccctccagttcctgcattgttggatgatgaggtggattttgcttaa

SEQ ID NO: 17592 - DNA, 981 bp, Zea mays
  Peptide Sequence Number=SeqID_60967
atgagtacaaacgggcagtggggattggtgggttttactgcccattcttgctcttttcatgaatttgagtgccttgacaaatcaccatttagatactttcttggggaactatatggtggcaattcactgggaagcacaattgcagtgggcaatgagaagaagcggcagcgggtgtacaacactatgtttcatgtcccatggagatgtgaacggaacactgaggaaattggctctactgatgagaccgatgaagatcctgatgagaccaatgaggagagttacacctctgatgcagtccaaatgatgcagggaactgggatagctgaagatgcctctactgaagatgatgatttcagtggcgacctaccaccagagtttgaaaatatcatgatattcaatggtgttgaaaccgagagtgacattgctcctccagtgctcgaggaaaacaaggatgctgttgtatctgcaacaaaaactgcaaagtccctggatgggtttgccttaaaaacagggcaggaggaggagggtccggaagaggttgatgctactgaaaaagcaatggaagtggttgataatgttgtgaagtccctggatgaagaggtagaatcaaaggagatgcagaagcagcaaccgcatgattataatagcatgagcctaggggtggtaacggcaagtattagggccatgatccattaccactcctacatgagcctcaggaatcttaaagccacacacaagaaatatctcattgctgcaaaggaagaggaggtcaccgaagggaagaggcttcctctcgaggaggtcctgggtacctcaaattttgtccacattgaaccagtacgaatgacatcttccttgaaagttatagaaatgcttcaaagttcaaatggcattcagcatgttccatgtgcttctatttcagcactcatttcccgtgatggcaatgcaaactggaactggtcattagttagcattgactga

SEQ ID NO: 17593 - DNA, 468 bp, Zea mays
  Peptide Sequence Number=SeqID_60968
atggaaggaagaactaatgtctataatgcctgggcgatctctgagcgccataatgtctgtagtgcatatagtattgatatgccgcagctgtttccccgaggccgcgcggcccagaggccttacgtcaggctccgcccgctggcttacgtcacgggcaacgtgccacatggcagcatcggggctcctcctgagcggggagcagaagtgtacgtggggtccgacactttcccatgggggtccggatccactgttgataccttggaggatattgtcttctctggccacgtggcggccctggagccatccacgtggtggggtcgggtgttgttcaccacgcgactagagatagccgcgcgggcgctgcatcttcatactgtagtaagggataccctgtttcagggtaccgacagtggcccccgagcccaccttaggggaggatacgagcctgcaggtggggccaaagcttga

SEQ ID NO: 17594 - DNA, 576 bp, Zea mays
  Peptide Sequence Number=SeqID_60969
atggaaggccaatcttgccttctgtcgagtggtgcaccggacagtccggtgcaccaccggacagccactgtagcagtccgaagcgccggcgcacgcgtcacctggagcaggtacctgccctcatcgttgtcggtggctcaacaggtggatctagcgtactggcccacgcccgagatcgtcatcgagccccctcccctcgggtcccgtacacccgcccaagattgtagatctgcgcctgatccgttgtgggcctcgccctcatatttcgccaccctcaacgccacatcaccctcttcatcaagccatacctcttcgcctacatctccggcagcagatgagtccaccatctcctcgaatccaaaggccctcggcgacagcgccaccacgtcgccggtgcttctgctggcgtcgctgcttctgctagcgtggaagacgaggatccgctgctttcgcccaaggggctcaactacgaagaatggaatgttcagtcaacggtggacaccgcaatccattattgtcaagcgtggacaccaaatcaaggggaattccttcacgtcgctctcccgggaagactaa

SEQ ID NO: 17595 - DNA, 603 bp, Zea mays
  Peptide Sequence Number=SeqID_60970
atggcctcgctagctcatcccgagcgcttccagcccgaggtggcactcaacttggtgcacaacctgcttggatggggcgcgccggcgttcgctggaaggatccacgtcggtgcctctccccttggcgatctcgccgccggggagtttgtgctcttcgtctcctacctctcctgcgggttgacgctgccgatctcgcccttcttcttgttgctgttggaggagctcggccggtgctcagatgaaagggtgttgcgtagcgaccttccggagatggaaagcgagttgagatgcggctccatctttcgcgtgaacttcaccagcatctcatgcggccaggccgccgagcgctgtgcgctgccgcgcctccatctctttggatttaatggcctcgacgtcgcctccaacgatgagggcaccttcgccttgacgcacgcctcgaggaaaccgccgccattggcaagctgcagcaccgggttgccgctagcgccgctgttcccagtggccgccaccgtgtttagagtcagcggcaggcctgcgcccagtggttgcggcggcagctgcgctatgacggcgctgagggaggatgcccacgggcggtggtag

SEQ ID NO: 17596 - DNA, 456 bp, Zea mays
  Peptide Sequence Number=SeqID_60971
atggccgttggggaactccgctgtcgatgggtgcaccggacagtctggtgcgccactggacactgtccggtagccgttggcgccgaagtatctgttgcttcgatggcacacccggacagtccggtgaattatagcggactagccgttgtgaattcccgaagctggcgagttcctgaggcgccgttccttggagcaccggacactgtccggtgtacaccggacagtccggtgaattatagcggagcgcatctggattttcccgaaggtgacgagtttgactgggagtcctctggtgcaccggatactgtccggtggcacaccggacagtccggtgtgccagaccagaggtgccttcggttgtccctttgctcttttgttgaacccaatactttgtctttttattggctaagtgtgaacctttggcacttgtataacttatacactagagcaaactag

SEQ ID NO: 17597 - DNA, 291 bp, Zea mays
  Peptide Sequence Number=SeqID_60972
atgaagactagcttcgccaatgtgggtgcctattcaaacgaacacaacttcatacgaggcgaccccgagggtgttatcgagtgtatcagcggagaagccaaagcttttgaggaaattctgagtgatcgtgaggatcacagtactgttgactgtgcgagcttcagattcctccctgaaatcccgctgctgatgggtctattggctcccttctggctgctgacccccgtgaataggcaggttgtagtggtggcggaggtggaagctgtcgccaagaagcctgtggctgactag

SEQ ID NO: 17598 - DNA, 927 bp, Zea mays
  Peptide Sequence Number=SeqID_60973
atgagcctgcagattccggtgagatcaggcgccctgcgccgccttctccttctaggtggcgccgagggtctactgcgcacctactccaccggcgaccggcgccggcgggtgatccgcgaggcaaggcaagaggaggaggacgaagcgttcctccgcaccctcaacttcggcgctgaccccgagaacaaccctcttcccccgccgccgaggcatggcagaggattatccgacgcctcagccgggaagcagcagcagcagcccgagcgaagcgcgcagaaggtcgtcggggagacgctgctggagaagcttaagctgggcgatggtccctccgccgccgctgctataggaggcggcgatgagccacggcagtctgaggacgagcctgcgcccgcgcagccggtggacgtggacgagatcttccgaaagatgaaggaaaccgggttgatcccaaacgccgtggcccatgctcgacgggctgtgcaagaacggcctgagaagggagccatcccggaggtggttatctacacagctgtcgtcgaggcattctgcaaggtggctaagctagacgacgccgtgagaattttcaggaagatgcaagggaatggagtcatccccaatgcattcagctattggctcctgatacaggggctgtacaaggggggcaggctggatgatgctgtcgggttctgtgtggagatgtttgaggctgggcttgcaccgaatgcggagacgtttgtaggcttgcttgatgcagtgtgcaagacaaaaggtgtggatgaaggcgagaatcttgtgaggagcttccaggacagaaacttcgctattgatgagaaatcaatcagggatcacctggacaagaaaggcccattctcaccagtagtgtgggaggtgatctttggcaagagaaaatcagaccgaccattctaa

SEQ ID NO: 17599 - DNA, 231 bp, Zea mays
  Peptide Sequence Number=SeqID_60974
atgctcaccactggcttcggcttcaaaggggcgaaggccgccacagtctggcatcagccatggacggctgcaaaagtttttgctcaagcgcgggaatgggcggaagagagtgacgcgtgtgatgaacagtgtggtgacgaggatgatggttatgattatgcctatggtaatggtgaagatgaagtcgtggaggaggacttccaggagttccaagagtatgatgagttctag

SEQ ID NO: 17600 - DNA, 570 bp, Zea mays
  Peptide Sequence Number=SeqID_60975
atgtggacaccccccccagcagggtcaatcgaaacggattttgcggccgtcgcatggttgttacggtcaaaccccggtcgaggtcctcgctgggctataaacgccaaagtcgtagcccctcgtcgactcacaatgcatggtagatgttgcgccccttggattccgcgccccgccgtggctcctagcagtgccgccgcagtcacctctctcgctagtcaccgtggggctattgctcgtgcgttgtcaatcccaaaccaagctgatagcataggagcttcgccggagaacgtggagggttttcaaaggatatgcgcgtgcggtgtgcttcggagttgcagggaattcctcgccgcagttaactcgccgccgcaggttcgcctggtgccgtggacctctctttggtcgctgtctctgccttcggtgagtcccttttctgttttgccgtcgtccgaattgtgcgtgggacctgcgattgatgtcgtgggagcccagaacggccgtgccgcgtggctccggcgggtggtcggccgcggtaggggcggcgccgccgactgcgtgggtggggtgtag

SEQ ID NO: 17601 - DNA, 1281 bp, Zea mays
  Peptide Sequence Number=SeqID_60976
atgacgctgcacggagatgatctgcgagagcggcacagcccacaccggccaaggggacacccgtttgagaccgggtcgttggtctatgcgccccttactgagggcgagcgcatatatgctgacgcctcgtgttggcaccgggatgaccgtgtcctcgacctggtcgaggtagaatgtgccatactgagtagtcgatcgacgtcgtcccgccactgctttatgacccctattgaggccgtggagcttggagggtgccactacaactccctggctgctgacaatgctcccggagtcgccctcgatggagttcgggacgtctgtgcagccgtgtgctgccgtgcggcgtgcacagcagcaatgcctggcacgaggcggttgggaacttgcggggaggcttctcgtagaagggatgatgagcacagtgcgccgctcggcacgggcgcactgtttgtcaacaaactggacaggcgcgccgtctactggggcagggcctggacgcgtgtcagcaccggacccttactcaagcaggggtcctccccgttccgggactttgctaaggcccggaccttactcggagggacctggggcctactcgagagacccggcatgccttcttgggagctccggacttgcgccgatttggcaaagtccaccaaggtttccaagatgggcgccaaatctgaggctaccgtcgcggctggaaaggcgaagaaaccgccggcggccaattcgaccgcggatgccggtgccaagccgaccaaattaggcaagaaggcaccggtgcttgccgacgccaaggcaaaagccaatgcgaccgtcatcggcaaggagcagtcggcggcggaggtggaggttgaggaggacatggtgttgaccaagcaggcagaggaaggcaccaacgacctcatctccaagttccaggacctgcccagtcggctacaggagatgctaatgccggacctggcgtgcctctcgcagcactccaaggcgtacctgtctgcggcgaacgtcgggatcgccgacgtcgtgcgcctgatcctcggcggccggtgggcgacagtggccgcctccgcggcatcagtggcgatgttcctgccgctcttcatgctcactgcgctggtgcggcgcatgggcccgtacctgccgctcctgcaccgcgcactattgctggcgcaagcgtacctcgccatctacttcacgacgctcgcgctcaccgcggccgccacggggctggagccactgcgcttcgtccacgcgacctcccccgccgcctatgcctag

SEQ ID NO: 17602 - DNA, 1401 bp, Zea mays
  Peptide Sequence Number=SeqID_60977
atggcttgtgggatatacttacaattagtcaggctggcaggtgggcctgctttacatgctgggtggcccaaccgacctcggtcgtgcatagtcttctggccctatgtcctgaaggccttcgtcttggggccttcgcgttggcctgcgggtaagggcactgatttggcaaagtccaagttttccaagacgggggccaaatctaaggctgtcgtggtggctgggaaggcaaagaaaccgccggcagctaattcgacgtccccgtaccactacgcctatccctactaccggtaccagcaccctgatccgtcccgcggcgtcgacgggttcttccctgccgccgcagaagccatgctggaggcggtgaaggtggacccctcgtggtccagggtcgagtcttcgaggtcggtctcagttcctgtccgcttcgtcggttccgacccggagccggtgcgcagggcggccaggatgccaccggcggcggtgctgaggaagcgggcgccgtcgtcagaggcggcggtgattaggctgcaggccgcggcgcgcgggttcatggcgaggaagtcggtgcgtgctgttcgtgaggtggagcgtgaggcggcggaggtcggggagaaggttgcgcgtgaggcagaggcgctgcgcggggacgcgagggcgcggatcgccgtcggggaggcgctgatgaagatgatgttgcgactcgatgtggtgcgcgacgcgcgtgaataccggaagagggtcaccaagcgggtcctcgcgctgcaggatgttgttgatgccctcgaaccaaagtcggcgctgtattcggaggtcgtggcggaggagaacgagtctgaggtgacgtccgagatggcggacgacggcgcggaggcggcggagatgccggtcgccgcggagcacagcggcgggattgaggtgaatgcagcggctgagacggttgccaatatggaggtggacgggggtaaagctaacagcgaggcggtgccagaagcggtgaaggaatccgaaaataagcaggacgacatgcacattaatgacgaccagacggaagtctccgatgagggcaaatggaagatggtggcggatgaagcggagcgtacaactgaggcgacgaggtccacggaggcgctcccgcaggcaccgatgacgagcgaggtgacgaggatgacatgggaggccggagctgccgacagcgtcctggacactcggaaggttatggagatggtcgaggccctgtgcgggcagaacacgcagcattgtgcggtgatcggggctctggcggagcgtgtgggcgcgcttgaccgtgccgtgcggctggtggagaacgccgagcgccgtcggcggcggggcaagaagctgaagaaggatgggaaggggaacaacaggtgctacaccaattga

SEQ ID NO: 17603 - DNA, 297 bp, Zea mays
  Peptide Sequence Number=SeqID_60978
atggcgtgcggtgctcggccagcccgcctgcggcgcgctcgtggcagcctgtgcggcttgctcgcggtggcctgtgcggcgcgctcgcagcagcggcccgcggcttgccctgcgcggcagcctacgtggccagcctacgcggcagcctgcccgacgcggtggctctcggccagccaatgcggcgcgtgcggcctagctcccagcccagtgcgcggccagcctgcccgcggcgcgctcgtggcagcctgcgcggcgcggccatcccgccctcggcgcgctcgcagcagcggcctgtag

SEQ ID NO: 17604 - DNA, 390 bp, Zea mays
  Peptide Sequence Number=SeqID_60979
atgcaagatgttgcacggcgtgcgctttcgcagtactgcttgttgttcagcggggtagctaacggcctcgacctgaagtactaccctcaccgctcgaccgacagtgctggaggtttgattgtctcaccagttcgcaagggcaatcccaggctgaacaacatggtcaacctggccaccgtgctcaacaccgagctggaccacgcccttgacgagttgggaaaggctcgggcggagattacggaattgcgtgttgagcgcgcagcgcgccactatctggatggtggtccccccgctcccgtcgggattcagcacccctaccgctcggcgccccgtggtcgttatgcttatggcatctctgactgcaggacccagatagatttggagccatag

SEQ ID NO: 17605 - DNA, 858 bp, Zea mays
  Peptide Sequence Number=SeqID_60980
atgaatacacaattcatcaagtacatgaagaaagctggtgcattcgtcagaccgaatgacataacagggcattgggagctgactgttgctgagctactttctttggccaatgattcgcccagtggcattgttccccacaatggaaacatctgcggcctcctccttgcgctggagctgcttggttgttctggttggttgctggggcagggagacgaggtgcctagtttttctagcgctggtattgatttcctccttgttggttgttctgacggtactactattgctgctgctgctgagggagctacctctgacactgttgctggtgctgacgctgatgctgatgtccttgaggtgaagggggtcaaccaaatctctcagaaaacagtattgcctcttagcatctatattgacatcctcgggcacatgttagcgacgaaagttgtccctgaactcctcccgggtaatggctttagggtctgcatgggtggcaaggcggggaccatacagaaccttctcacgatcattgcactgagcagtgtgcaactcacgctccacggtacgcaggcaatcttcggcgtccatggggcatctgtggcatctgaacttgcatctgaggttgaggtgggggttgctgctgcggcacctgctgcattgctgctaaagtctggccaatttcttggactgtctgggtttgcttcaggaacatatgttcaatgttcatcgcgggtggcggtcgtaactactaccgaggtgcctcctcctgagatgcctgctactcctgttgagcatgccttccacctctacgcctgttttcagacatctatagaaggcacacacatatcagatctgactatgtag

SEQ ID NO: 17606 - DNA, 553 bp, Zea mays
  Peptide Sequence Number=SeqID_60981
caccgtgttgctcgccctcgcctccccggagctgctcgtcgccgccgtgcaggccgcgttttggcgagctaccagagttgcctccttgccggcgtgccccaccgacggcgccgctccctcatgcctgctgcgagccccgctcgtcatctgtcgcgtccaccgtttcgctgagctgtggggcctgcacgtcagcccctccactctcctccccaacaacatgtgcctcgcctcgcagcagcatctcgccgcagcgctcgcacaaccgttcgtgcctcaccatcgctgtgtgctcggtgcgtctatagccgtgcttcacctggcggattgctcgcaatcgcagcgcacgccgtcgtccactgcgtttgtgacctccgtcatgcgtccatgcctcgccgtcgtttcttccggcaagtctttcaccggtgatcccctctcccgtcccctctctttccgttccctgcgcagcgcctaccctccgcagtcggcgtccattgccagcagcgcgcgcctagctcttgctccccggccggtggccgctgcggtcgagcgctag

SEQ ID NO: 17607 - DNA, 147 bp, Zea mays
  Peptide Sequence Number=SeqID_60982
atggagagtcatgatctccgggcagaatgggaatcacggcttgtgggtggtgatgagaatgatggttttgattatgattatggtgctggcgaagatgaagctgtggaaggagacttccaggagttccaagactacgacgagttctag

SEQ ID NO: 17608 - DNA, 366 bp, Zea mays
  Peptide Sequence Number=SeqID_60983
atgaccgcccatcaagattcgacggtggacatcgtatccgcctcgcacgccgcccccttctacgacggcgccgccacgttgccatggcgaaaaagcccgacgagcccccgcctggcgctacggtgccccgaatcacaatggacatgtgtaacacactcttacaaacgcggcgaagcggctgccgcggcggaggagtactacgacgaggaattactcgaccccgaggcaagattcgtcgaattcggtgggcgccaaagcctttccacgcccaacaggccctcaggtttcagcacggaaagtccagtcacgacgccggcgaaggacagtagcgacggcggggtttcactcgctcacagttccctgtga

SEQ ID NO: 17609 - DNA, 174 bp, Zea mays
  Peptide Sequence Number=SeqID_60984
atggagagtcatgaccttcgggcggaaagggaatcacggcttgtgggtggcaatgagactgatggttttggttatgactatggtgctggttgtcagcattgcaaccactgctcaggagaagatgaagctgtggaaggagacttccaggagttccaagactatgacgagttctag

SEQ ID NO: 17610 - DNA, 141 bp, Zea mays
  Peptide Sequence Number=SeqID_60985
atggccgtgatgggttcaacatcggaaaacatgtacctctgccaggtgaagaagcgacaaacttttgttgcttctgttctaaggtggtacccaaagatgaacaccaagactagagttgcgggagggaaggccctccattaa

SEQ ID NO: 17611 - DNA, 507 bp, Zea mays
  Peptide Sequence Number=SeqID_60986
atggatttcacaagcgggtcggagcgcacggatttatatgcccgagctgcggccgatgcacgcggaggttgcgtcgaatctgttgcgaagctcgcggcatggaagacagatctagtgcccctggcccacatggcagtgataccggtgagcgtcggctgcgaggaggtgtcctccagttcgaggatgcagaagacccatggaactactataggaccctttgacgacgtcgcactcatccaaagggagaggtcggagacgtcctgctccgccatcaacaggctcgaacgccctctcctcaaaccctaccagatcttgtcgttcggcgcctcaaaccccagattcggatccgccatcaccatagaggtgggggcagacggcatagcgctcatcaccatcgccaacctgcccgtggtggatgcgccatcgcctgaggcgagccgcggggaaatgagggatccttggaggcagagctggcgtcgcgtcgccggtggacgctggtgctggtga

SEQ ID NO: 17612 - DNA, 387 bp, Zea mays
  Peptide Sequence Number=SeqID_60987
atggcggttgtcttggtctctgattttatttttctatgtttgtgggttgagcatgatcctatggagattatagagactgttaagattgaggaagccaattttttggtacattattttggtgtatctagggcagaaagcttttttatcttcctacttatcaattctagacgtgtcgctatcaacggggagagcaacgtgggtctggaggatgacgatgtttcagtcacgccacgggggaagaagcgtggtcgccggtcggccatggcacagctagggattggcctacttgtagtgcaaaatcttagtggaatcaacggtgtactattttatgcaagtagcatcttcaaagctgcagtgtcctttcaagatgtaggaatagaatcatag

SEQ ID NO: 17613 - DNA, 798 bp, Zea mays
  Peptide Sequence Number=SeqID_60988
atgaagctgtggaaggagacttccaggagttccaagactacgacgagttctaggcgtgggttagcagcaacccccagtcggctgcctatgaaggctgcgtttatctatgtttcttttccgcactttgatttattatggctcgacttagacacactgcacgaaagtccgtcatccccttcttaccctcccgccttgctgagcgtccgcttcgccgtcccgtggccggcacttaaccggcgtacttggtccatcgagtatcgctgtgtggtctaccagcatagtcgcggggtctatccggaccgttgggaggcgacctgcttggtgcgtcgtccggagaacagtctccagggtgctgaggtctgctcagagcactattccatctctgagcgggactcagctgaggtggccatgcaagatgccgcacggagtgcgctttcgcactactgctcggttctcggtggggtagctgacggtctcaacctgaagtactacccccgccatccatctggcagcacaggaggcgtgattgtctcacccgttggtgaggacaatcctaggttgagcagcacagtcaacctagccgccgtgctaaacacggagctggaccatgcattagacgagccgagtagggctcgtgctgagatcgccctgctgcgggctgagcgcgcggaacgtcgtcacctggatgatggttcccccgctcccgtcgggactcagcacccgtaccgctcacctcggcgtggacgccagccttatggcaaccccgactgcaagaccaagataaatctagaaccatag

SEQ ID NO: 17614 - DNA, 363 bp, Zea mays
  Peptide Sequence Number=SeqID_60989
atggatcttgattcggccaccgaggcggcggagcatgcacttgaggatcacaatgagcagatggatgagatggcgttgtttggccataatgtggatgttgttgtcgacatcgacgcggtggagccaacaccaaccatggcctggatagtaactgggtcttcgagcccagctgctactggtagtggtagcacttctcgtgacacccgaacgaggaagagactacccacgtccagggtatggactgacttcgatgaggtaatgaaagggaaatgtgcccttgggccatttctaagtattttggtgattgagtgccaactcaagtgcttaaaatgtgaatttatgcaatggatgaacaaagtgtaa

SEQ ID NO: 17615 - DNA, 687 bp, Zea mays
  Peptide Sequence Number=SeqID_60990
atgggtactgatgagctaacagcgaaccaagaaccaaacaaagagaaaccaaagatctactcacctgcatctctggtcatagcccccggcagtgcccatacgtcgcagggacgcagaatgggaggaagctcgcgcggctctatcctcagaacccattactcatctcagagccccgctgtgggagagttccgagcaatatacttcgtcgctctatctcttgtccttctgtgcgcttatgaagccaacagcaaacaagagaagccgaccacaagtgaaggaaaaaaagctagtgatgagataaacagaaatggccaatattgcattcatccactacagacacgacggtgttccagcggcgtgggggcgatgaggaggcccacagccacacgctcaacgccgccccacgcccacatcgggcgtagatccacgatctcgggcgagcggttcgagccacaggtgatggtcgagctcgtggacctcatcaagcgccccatggaccagtacgccgccggggcgaggggtggcaacggcgacgcccccgactacgtttccctatcacctcgagtcctcgacgcatcagccagcgcccacactccaggaacacccgcctccgccgccgccgccgccatcgccggcgaccactacaggcgcggcatccggagacagtactgcgctaccaacccctag

SEQ ID NO: 17616 - DNA, 375 bp, Zea mays
  Peptide Sequence Number=SeqID_60991
atgcagctcatcagtacccatcattcgcttgtgttcgactcaagctacaaccgtaaacaagttactgaccttttagactggatgtttcagaatcctctccactctgttggagacaaagtggataaccgccacgagttatatagaaggtctctgcttattgacctggagccgagagtgatcaatggaatccagaacagcgagtacaggaacctgtacaaccacgagaacatatttgttgctgagcatggtggtggtgccaggaacaactgggcctgtgggtatcatcaattggttagggcggcgtcatcgacgtacatccgtccaatcaggctgtgtgaccacttcgacaagaaacagtggcatgtgattgactga

SEQ ID NO: 17617 - DNA, 453 bp, Zea mays
  Peptide Sequence Number=SeqID_60992
atggcccaaaggcacatttccctttcagtgatccgggcggaagatgcgaggacgggggttgaagagcaaccagcgccaccgaccggccctggcgaggaccctgggcgggcgctgtgccggcaggttccgatgtctgggcctacgcaagcaacccctactgatgatattaattttgtggcagctgcgaatgcagtgcctgttaatgaaaatttgtctggttctgaaactaggtcttggtcatctgttggggatgagtttgggagcccattttcgtggactgaagagtcttcggatgaggacttggattattttgttgcgttggatgtggccgcggcggagtccgtgccgcgtcttgaagtgcgcgaagagtctgatcccccggttggggcgatgaccgagaggcaccgccggcgaaaggtggtgtcgaagcataacattggcgaggtgtcgtga

SEQ ID NO: 17618 - DNA, 555 bp, Zea mays
  Peptide Sequence Number=SeqID_60993
atgacgaatgcagagaaggaggtagcaacagaaagacggatggactcaccgcctcgatgcgattgtggagaccgtgctgtcatcgatgaagactatgagaagcagttctgttgtccgaacattgattatccatacgggtggcgtaagtgtcgtttcagagagtggttgtatggtcctttgtcccattggccagagccagaggagacgaggaaatgcagttgggagagttacgacgacaaaggagaggtgatgcacacaatagagtccaagagaataatgggacagaagatgcgttgtggatctcggctcgtcgattcgtacattaacgatcgcatacgcgacatgcgtagggaagcaaaatctgccttttatgatagtgtcggcgtttcgagaccgggggtccctaagccgacgagtgagtgtgctgcgtgcccccagcccagatgggtcgagcgcgtgggcgagcgcgaaggggggagaggcgaggtggctggagacgggcgtgagagaggtggagatctcgcggccttcgtgttcgtcccgcgcccaggtcgg

SEQ ID NO: 17619 - DNA, 1299 bp, Zea mays
  Peptide Sequence Number=SeqID_60994
atggcgctccctgttgacgtggcgggcccacgcccgaggccgggcgacgtgggggctcctccgaagctggggtcgaatctgtcttccgttgccgaggccgagcccgagcctctgggtcgggcgaggcggaggtcgtttggcagaggccagggcggagtccgagccctggggtcgggcgaggcggagttcgtcgtcttcgggggccgagcccgagtccgagccctggggtcgggcggagcggagttcgtcgtcttccgagtcttagcccgagtccgagccctggggttgggcggtgcggagttcgccgtcttccgggtcttagcccgagtccgagccctggggtcgggcggtgcggagttcgccgtcttccgggtcttagcccgagtccgagccctggggtcgggcggagcggagtttgccgtcttccgggtcttagcccgagtccgagccctggggtcgggcggagcggagttcgccgtcttccgggtcttagcccgagtccgagccctggggtcgggcggagcggagttcgccgtcttccgggtcttagcccgagtccgagccctggggtcgggcggagcggagttcgccgtcttccgggtcttagcccgagtccgagccctggggtcgggcggagcggagtttcctatggcgcctctggcgaggcctgactgcctgtcagactcactctgtcgagtggcactgaagtcggagtggcgcaggcggcgctgtccttctgtcagaccgcgaagccaaggcctcgggcgagccggagatgtgtccgccgttaaaaggggggcctcgggcgagacagaagtccctcgagatagcccgaagcatgcagagtataggaggttgaaggcggcagatgagaagagagcacaggatgcaagggaatgggaagcggctcaagccgagaaacagatgttggataatcttgctgatcgcctcaagagaaaggcaggattacatgaagaagaggaggacgacacatcaaggttgagtgagctcatcgcactagctgaggcaggattacgtgctcaagaggaagatgatgagtttatgtctcaggccgccgaagaggtagaggcggcttattacaagaagaagtctgatgaggctggggctgaggatgagctattctcccaagctgcagatgaagcagaagccaattattacaagagaactggtgacaagtgtgatgcaggtcaatacagcaagtgtaatgaggttgtcgttgaggattgcgcgacggatgactccgaagatgagttactcatagattgtgattcagactga

SEQ ID NO: 17620 - DNA, 288 bp, Zea mays
  Peptide Sequence Number=SeqID_60995
atgggcaaagacaagagaggtcgaggctcgccccatcgtgccggcgacaagcggaagcgcgatccaagtcctccctcggaggacttcggcgattttgagtactcggaggaggagcgcgccaggctcgaggggtcagatgagtcggaggtctcctcgggtgaggaggactccttcggctcgtccaaggagcggagcggcgacgacagcgacgacgacagcaggggcggtgaaggcgacgacgacgacaacggcggcggtggcggcaaggacgacagtggcggcggctaa

SEQ ID NO: 17621 - DNA, 1194 bp, Zea mays
  Peptide Sequence Number=SeqID_60996
atggccacagccaaagacgaggcctccctcatcaaacgcagatggggactgtcggagaggaaatctccggccgggtggcggagggaagcttctcgtataagggatggtgagcacagtgggccgcatggcacgggcgcactgtttgctgatagattggggcaaggcctggacacgtgtcagcaccggacccttactcatgccggggtcctccccatcctgggaccttgctgtggcccggaccctactcggagggacctggggcccatccgagggaccccgcatgccttcttgggagctccggacttggtaccgacagtggcccccgggcccgccttaggggaggatgcgagcatgcaggtggggccagagtctgattggcggttggcatgctgctcctgcgcgcctgttgatgcaattactgctgacccgcctatggtcacgccgactgccacacctattcccatggctgactggcccgtgaccttcgtacttaatgtcactgttgggccatgcgcggcaaagctgagtgggcgcacaactgcggggcggttgtatacttcctgcgcggcgcggttcgtcttcctgacctctggttgctccgaaaatgaaggggcgcaaaaccgcggggcagttgcacgctccttgtgcggtggttcgccttcttcgtgcttcggaggtgcagccgatcttgtcttcttcttgctgctgttagaggagcacgacctcgtgggggttgtcgctcttctgccatcgcttggcttcaaggattttcatcttgcagcccgaatgatgttcatcatctgcgctggggaggacggagagccgagttggggtcctaccttccgcatgggctggcgacccgcttcttcctccagcattcgggggagaagggcgctcaccagccttgcggaggaggcaaacttcggctacgcggggccggccggctgcaggcgcctgaaagggaaatgtgcctttgggccatttctaagtattttggtgattgagtgcaaacacaagtgcttaaatgtgaaaatgtgcccatggttgaacaaagtgcaaatcacaagtaaagccaaaggctgtttcgggctggggcaccggactgtccggtgtgcaccggacagtgtccggtgcgccagaccagcgcggggcaaactagccgctctcgggtttttctccggcgacttcggctaa

SEQ ID NO: 17622 - DNA, 702 bp, Zea mays
  Peptide Sequence Number=SeqID_60997
atggccgcctcaatgcgtgcgccattgcgaagaggtcctcgcccccgtcctcctacggggggcgacaacgaggccattaaagccaaagagttggaggctcgaaggcaggtggcactgatggtatcgtcagcgaaggcaaccacctctgcagtgggcaacctcaccagcggcggcgaccatctcaacaccgacgacagcagccacctctgcaccgggggcttaccggcaacggcggccgcctcagcgcgcgcgaagaggtcctcgctcctgtcctcctacaggagtgaggacaagaccatccaagaacacggtcgccacccccatggcccacgccccgaccaagcggcaggaggcagcgtcggaggcggcaccgaagccatccaagccaaggagccagacatgcggcagctgacggcgcctgcagccggtcggccccgcgtaaccgaagttcgcctcctccgcaaggctggtgaacgtccttctcccccaaatgctggaggaagaagcagcagtcaggaaaacgaatcaccgtacaaggagcgtgcaactgcccccgcggttatgcgccccttcatcttcgccgaaaccagcggtcgagaaggcgaaccgccacgcaggaagcgtacaactgcctcgcggttaaaaatcgcaccgccgctcgtgccaataccacgtctcctcggggccgtcgcagaagactga

SEQ ID NO: 17623 - DNA, 378 bp, Zea mays
  Peptide Sequence Number=SeqID_60998
atgcccgagccgccggagcgccgccatgcccgagccgctccctcgtcgcgccgctcgagcaccgccacgcccgagctgccgtcctctgctgctggccgcgccgcctccccgcaccgccctctgctcaagagggtatcacgtcgtcttcgtcgtgcagcggctcggtgtggatgccggtctctagcgggcgttgacgtgcagctgcctgtgcctcgtatgcagcaggacgttcagcctcccatttgtgcagttggaccatctacagcaggactaagctcctcgcaatcgacacgagacacgtttgaggacgtggcccacgacgacgacgacgacactggcgctggcgccgtaggtcaggaggagattggaccatcttag

SEQ ID NO: 17624 - DNA, 579 bp, Zea mays
  Peptide Sequence Number=SeqID_60999
atggctcagtccgaccataaaccacatcgtgtcttcgttgggtcgtaccggcccaagctcgacccagtccaaagtccaaacgaggcgctggcgaggagggaatgggatgggatcggccacaggccacaggccacaggccacaggccaaggctaagaaaagggccgccaaggacattgaatacgacggctcgcgagcactccggccaccacagctgcgctgcgctgcactgcactggcaccgcgcggttctcgaccgcgcatgacgatgcgtcgggtactcgggtcgccacgccggccgcggccaggagcccaggaccagggtccagggtatttcggcgtcacttcgcaccagcaacaacaggcaacacgatctgggttcgcccgccgtgtggccggacctacgcggcgtcgcggcacgccgccccccgtcgcgtctggggaaaaagtggagggggaaccggggaacacacggacgcgcaggtgcagggtatatgcactgacgaggtggcacggtaccgggtccggcgcaatgcattaatgctgcgctgggcctgggtcatccatgtcgatcgggagtga

SEQ ID NO: 17625 - DNA, 378 bp, Zea mays
  Peptide Sequence Number=SeqID_61000
atggcgcactggacgcacttcacttgtttcgatttcgagggtttgtgtctcctctgcgtttactctattctggtaaaccttcctgttttcgagcgcttcaagagtcaagactgggacggaaaactgggaagacgcgagccgtgcaaggtgcagcgaaagacaaacgcgcgtcaacccagacgcagaactgatggcatgtccggccggagtccccagaccgatcaaattgcaaatctgccgcaacaacgctattatccagccagccgcctgcactgcaccaccggagggagttattggggcggaacagggtggggtgggggtggggggaaggagaggacggcctcactgtgctcgctgtcgctgtgtgcctgtgtgtga

SEQ ID NO: 17626 - DNA, 918 bp, Zea mays
  Peptide Sequence Number=SeqID_61001
atgaagcggccacgcggcgctactccctccctgtctgcgatgcccaatcatcaggaaggaatccattgttctggccttctctgggggtgggtgatgtcgtggcgggaatgcgtgcggaatgaagatctgagtccttgtgcgtgcgtgttcccagatgacggctacggcgtgctcgggatggaggcggacgtggacgtggacgtggacgaggagatgatggcgttcggcggcggcggcggcggggagaagaagcggcgcctgagcgccgagcaggtgcgcgcgctggagcggagcttcgaggtggagaacaagctggagccggagcgcaaggcgcggctggcgcgcgacctcggcctgcagccccgccaggtcgccgtctggttccagaaccgccgcgcccgctggaagaccaagcagctggagcgcgactacgccgcgctgcgccgctcctacgacgcgcttcggctcgaccacgacgcgctccgccgcgacaaggacgccctcctcgccgagatcagggagctcaaggcgaagctgggggacgacgaggacgcagcggcgagcttcacgtcggtcaaggcggagccggcggcctcggacgggccggcccccgcgggggtggggtcgtccgagatcagtgactccagcgcggtgctgaacgacgcggacccgcccgtggcggaggcgccggcgccggcgcccgaggtgcagggcacccttcttgtcgcgccggctggccccgttgccggcgcagcggcggcgaaccatggcggggtgttcttccacgggagtttcctgaaggtggaggaggacgagacgggccttttagacgacgacgggccgtgcggcgggttcttcgccgtggagcagccgccggcgatggcgtggtggaacgagcccgcggaacactggaactga

SEQ ID NO: 17627 - DNA, 80 bp, Zea mays
  Peptide Sequence Number=SeqID_61002
atgggtcgcatcttcacgacgagtcagatcgagcttgctggatgggccgacgtcacaacaaggacgagcagggtgaggcg

SEQ ID NO: 17628 - DNA, 234 bp, Zea mays
  Peptide Sequence Number=SeqID_61003
atggagtttgctctccacttctcaagtgtttatccagaactgaagctttccaagccctcggacccgacagaacttcaccggaagcccgagatcaccctcgccggacttcgatcgcccgcccccgcgcgtggaccgagctctctgtacctcccctacaccctcggccacctcaccggagcaatctcgccgccggtaagcccctccgccctttcttccgccgcgggtactgtttaa

SEQ ID NO: 17629 - DNA, 663 bp, Zea mays
  Peptide Sequence Number=SeqID_61004
atgaagctcgcgctagcctccaccatccgatccccaccccgcttcgcctcggattccgagaacgtatcggcgccttgccttccccctccggtcgatgctcgaggcggggagagggggttcgagtttgaaatgggggagagcgcaacggccgcgtatattatgggatgggaaatggccaaatgggggacatctgggagcagatgtggggattttgggaaaacgcaacggttactttttgggccgtgccagaaggagaagcccgctcgcgggtttgtcgaggtggatccgatttgggggccagccggccagggcgtaggagcatgcgcctcctccccgtattcgtccgacaccagccccgacatcgactcacgcaatggctattgcacgaccacaaggatgtttcacatcatgtgcgcaccatcgttttcgccatcgtcggacgtcccgttcgtcttcccggccttcgcccggttcttcctccccaacctgctgccccgcccacggtcgcagccgctcgccgacgcgggtatggggcgagtcagtcatgcttctggcctttctccgtgcgtgccgtcgaggaggacatggtggcgcctgccacgcttaggttatcttggcgatgaggagtacaggtctgagatattggacaaccaaggcccgtag

SEQ ID NO: 17630 - DNA, 438 bp, Zea mays
  Peptide Sequence Number=SeqID_61005
atgggtgatctttgtttgcgagcgcaggataaggtcgaggcggctgcaggcgacgccgtcgtctacgggggcagcgtcggcgtcgcggacgcaaggatggaagatgagatggcgcccgtggaacccctgccggagcctcccgacgaaggcgggcccgttgcgtggcccatgccggagttctgccctcttacggtcgatggggcgctgaaggagtcgttcctggagactctgtggaaggacgctgcgccggagatggagcggcctgcgcgagaggcggacgaagcgctcagcccggaatcgcggccgtcgagcagcaagcgccaccgctccggcaccgcctcgccgtcgtccaggagcagcccctaccgcaacatcctgcaggtgttccagcagtgcaggcaggacgtcgtcggggagactctcaccaagaattactga

SEQ ID NO: 17631 - DNA, 306 bp, Zea mays
  Peptide Sequence Number=SeqID_61006
atgcgccgtttcatcctcttgatcacaaagggggcattgaacaggatggtccaaacccctctttgccaagcgatctgcagtccagcacctatctcgagtcgcgagccaaatgacaaagctcatatcactgtcagtgaagatgatgaagaaattgatgtccttggggaaggagtccttgctaatatatacaacatggaggatgttgtgggtacacatgacaatgtgattatgaatacttctcatgatatagttctccagatggaactagtgatgggacagtttgtgagaaatgtcttagagccatga

SEQ ID NO: 17632 - DNA, 1629 bp, Zea mays
  Peptide Sequence Number=SeqID_61007
atgtccgtgtcgtcgctggacctgtccgtgggcgggatgcccgggcagggcctcggcgggccgtcgctggacctcgacctcctcagcggttgctcgtccgggctgccgtaccatatgccggcgcccgtgacggaaatggagcgccccatgatggtggacatggcgacgcgcgccatggacgagctcatccggctcgcgcaggccggcgagcaaatctgggtccagggcatgcccggggacgcgagggaggtgctcgacgtcgccacctacgacagcctcttcgccaagcccggcggcgcgttccgcccaccggaaatcaacgtcgaggggtccagggactcgggcctcgtgttcatgagcgccgtcgcgctcgtcgacgtcttcatggacacgaataagtggatggaattcttccccggcatcgtgtccaaggcgcagaccgtcgatgttctcgtgaacggcttgtgtgggaggagcgagtccttgatcatgatgtacgaggagctgcacatcatgacgccggtcgtcccgactcgcgagctgagcttcctgcgctactgcaagcagatcgaacaggggctgtgggccgtcgccgacgtctccctggacgggcagcgcgacgcccactacggggtgccgtcccgctcccgtcgcatgccgtcggggtgcctcatcgccgacatgtcgaatggctactccaaggtgacctgggtcgaacacttggagatcgagcacatgctcccgatcaacgtcctctaccgcaacctcgtgctgagcggcgccgcgttcggggcgcaccgctggctcgccgcgctgcagcgtgcgtgcgagcggtttgcgtccctggccaccctcggcgtgccgcaccacgacgtcgccggagtgacgccggaggggaagcggagcatgatgaggctgtcgcagcggatggtgagcagcttctgcgcgagcctgagctcgtcgccgctgcagcggtggacgctgctctccggcaccacggacgtgagcgtctgtgtctccacgcaccgcagcacagactccggccagcccaacggcgtcgtcctcagcgccgccacctccatatggctgcccgtccccggcgaccacgtcttcgccttcgtccgcgacgagaacgcgcgctcccagtgggacgtcctgtcgcacggcaatcaggttcaggaggtgtcgcgcatccccaacggctccaaccccggaaactgcatctccctgctgagagggctgaacgcgaaccagaacagcatgctgatcctccaggagagctgcgcggacgcgtccggggcgctggtggtgtactcgccgatcgacatcccggcggcgaacgtggtgatgagcggcgaggacccgtcgggcatccctttgctgccgtcgggcttcgccatcctgccggacgggcggccggggtcgtccggcgcgggcgcgtccagcagcgccgtcccgctcgcggcggcgccgccgcctccgggctgcgtggtcaccgtcgcgttccagatcctcgtcagcaacctgccgtcgtccaggctcaacgccgagtccgtcgccaccgtcaacagcctcatcggcaccaccgtgcagcagatcaaggcggcgctcaactgcgccggcccttga

SEQ ID NO: 17633 - DNA, 612 bp, Zea mays
  Peptide Sequence Number=SeqID_61008
atggcggtcaaatttacccgggagaagattgagcggtcgattgaacttgtgaaggatccaatcttgaaaatgaagaccgacagaaaagtccagggcagagccaaccgggaggcctcccatggcaaggagctaggcacggctggagggtgctcgtcgccggcaaagggtccgacgaagagttgggccgtcggcggtggctcagttgtcgccgcgcgcttccttcttgcgaaggagcttagtctccgtcgccatttgatgacaaccattattctctacttgttatataacacgaatggcgcctctgctgcagcactgggccagcgccacgtgtgcgtgactgagatgcgttgtgaggtggtcctacctccaggactccgatcgtgggctagtgctgtccactgcaactgctacatcgtgtcgtgtattatcctgggctacgagccaaaggcgtcttttaccgctgccggcagcagagggcttgcaaggtcggcacagcggggagcgcggcaggaaaagcgagtgcgcgtcgtccgcttcggcgacaccaaattaaagttgttttggggttttgggcaatcatctatcgtcttatccatcgtctacctcaaatga

SEQ ID NO: 17634 - DNA, 1221 bp, Zea mays
  Peptide Sequence Number=SeqID_61009
atggctgaaaggtaccaactcccacggagttgcgctcctccaacgacgaggcggaaagacggcggatatcccccatccgggggcttggaaggtggaaagacacgatgcataagggagcacgaagacatggtcgccttccaagggggtcaccctccttttaaaggcggctctccctacttgcgtccccagccgtcatgggctgagtcttcttcaacacactccaaggtcctcccctacggcgcgggggctgggtcccacacgtcaagcaagccggctcagagcagaagaagccaaaccgccgtgcgcggtgcgtacaaccgcccagcggttacaagcgactctccacttttgcccagaccaacgggcgaaaggggcgggcagccatgcaggcggcatgcaaccgcgccaagtgggcgcacttctccgactcccaacacgcccaacatggaggcccaggcccacgcgtcatgcaacccggcgcgccgaatgcttcgtgcatgcaacagcaccgccacttgcgccgctaccgcgcctcctcgactgcggaaccaataccgtgactcgaggagacccagcgcacgacccagcagcgccagcctggcgcggcggagaagcgggcgacgcttcgccttcgccataaggaccgcgtcaaaaaagggaccgggaaagggggataccccgaaaaggatcctttcccgtgaaggaaccaggctccgagcctccctactaatcagaggttcgaaggctggcccctcggaagggttcgacagccgcctcagatcgcgtgggctctacacccactactggtcagaggttcgaaggccggcccctcggaagggttcaacggccgcctcaggctactcgggctccgcgcccattactgatcaggggttcgaaggctggcccccgaaggctcaccggagacaccatgttcggcgcccatcgagggcaacatggcgctttccctccctcctccttgcggaaaggcgacgcaggggcgtatgtaaaaaagtcgagtctgtccctgatcgccctctcgccctgtgcagaggctcgggggctgctctcgcaaacccggctccggccgaaccgttgacagcgtcaacataccagctcgagaacttgggacccgaccgtacacccgggctacggccagctcgcatgagggacgaccagaccagccgaagcattacacgaggcattaagacctcggaggagtga

SEQ ID NO: 17635 - DNA, 399 bp, Zea mays
  Peptide Sequence Number=SeqID_61010
atggggtccaggcacagtgcttgctctgccgaggctgagtgccgaggttctttcgttttgctttcgttagtcaccctcctgcggggagaggttgcctttggtgcaatctatgctcagcatgaggtggctaacgatgttgagcacatcagtgataatgtgattgttaatgagtgtccatctgatgtgtggactcaagtgatgatgaatattatacaacaagttcacctggcttggttgatagtatgtgatcatgctagaaggatgatattgattttacagtcccatcaacttcacctcattgctccatgtgacaaggtgacacaaaaggtatcaagttgcaatgcgattgagcatagaattgctagcatgaacatggctttagaaaaacgagatagataa

SEQ ID NO: 17636 - DNA, 204 bp, Zea mays
  Peptide Sequence Number=SeqID_61011
atgagccaggtcggcgggagtctggctccagagatgcgaccaatttgctcgcgcctgcagaacctggtccaacgtgctttaagtatcgtgcgagcctggctccatatctacacgcaggagccgagagcaccggaggagacgggccgggggagggataatgacaactacgagctctacgctgccgcaacagtatggcaaatttaa

SEQ ID NO: 17637 - DNA, 429 bp, Zea mays
  Peptide Sequence Number=SeqID_61012
atggcgggcggaattgagctcgccggagctaagggaaggtggctggccggtgagggaacctatcgagaaacatttaatcagataatggcatatcatgagatgaaagttgcaatcaaccaatcaccagactataacaatactaaccactttgctttttccaccatctacatcaatcttgttagttgtaaccaagctcgacaggccgctgaaaaggctacagatattagacggaactgcaaggcaagaaatccaaaggtgaccattgaagtaaagcataccgaagccgaagctaaggatgctgttattgaagccgaagcggtacctgcctggactgcaaagaaggccacagatgatattgttctcaaaatttgtgaggaatctatgatgaagtggtgtagggtaacaaagaaaattgatgaaatgatgtaa

SEQ ID NO: 17638 - DNA, 129 bp, Zea mays
  Peptide Sequence Number=SeqID_61013
atgacgtcggctgctcccaaccccctacggaagcaaggaaatgtcagcaggatccatgccgcaacatcagccatgcttctacagggctcaaggcacttctccgacggccacagagatcttggtgaatga

SEQ ID NO: 17639 - DNA, 1170 bp, Zea mays
  Peptide Sequence Number=SeqID_61014
atgggcgcacacggggaaccatcattacctgttaccaggagtccttctcccgaggccgaggctgaggccgaggcctggggtcgggcgaggcgaagtccttctcccgaggccgaagctgaggccgaggtcggggtcaatcgaggcagagaccctctcctgaggccgaagctgaggccgaggttggggtcgggcgaggcggagctccctgttgcgcccgaggccaaactcgagggaggtcgtgacttgccgttgtcagcctttccctggtggctggcacagttgccgaagcggggtgaacagcgctgttttcctgtcagaatgctggtaacccccatcagcacaacgctgcaaaggcctgatgggcgcaattcaggtcaaggctccatccactcaagggacacgctgtcggctcacccgagcccagcctcgggcaggaacggaaaacagcgccgcctgcgctgctccgactgccgtgccacctgccaggggctcggactcgacctcgcctccgaaagacagtctccgcctcgcccgaccccagggctcggactcgacctcgcctccggaagacagtctccgcctcgcccaaccccagggctcggactcgacctcgcctccagaagacagtatccgcctcacctgaccccagggctcggactcgacctcggctcagacgacggtctccgcctcgcccgacccccgggctcggactcgacctcgcctccggaagacagtctccgcctcgcccgaccccagggctcagactcgacctcgcctcggacgacggtctccgcctcgcccgacccccgggctcggactcaaccccaacctcggacgacggtctccgcctcgcccgacccccgggcccggactcagcctcgacctcggaggagccaccgcctcgctcgaccttgggctcggatcgaccacgtcacaggggggtacatcattaccctacccctagctagctcaggctacggggaacaagaccggcgtcccatctggcttgccccagtaaaacaagtaatgatggcaccccgcgtgctccatgacgacggcggttctcagccccctacggaagcaaggatacgtcagcaaggatccgacagccccgacagttgtacttctacagggctcaagcgctcctccgatggccacgacgccacatga

SEQ ID NO: 17640 - DNA, 1119 bp, Zea mays
  Peptide Sequence Number=SeqID_61015
atggttgccccgcctcctcctccatcgacggggaaggtgacgggacagactcggatgctgttcttccgccacacggggaagacatcatcaattccgccgtcggcgggcgggctgacggccgccattgtcgttgtcgcgcggcggaggaaggagtatcatgttgtagctgccatcgagggacatgaactcgagactcccaaaacggagcttcgtctcgggttggagaggttgctggagactccccatctggagcttgacaggaagctgttcgtcaacacgcagcagtcccctacctggcgcgccaactgtcggcgtttcgatctcggggggtccctggaccgacgacccaaggtcgagcgaggcggtggctcctccgaggtcgaggctgagtccgggcccgggggtcgggcgaggcggagaccgtcgtccgaggttggggttgagtccgagcccgggggtcgggcgaggcggagaccgtcgtccgaggcgaggtcgagtctgagccctggggtcgggcgaggcggagactgtcttccggaggcgaggtcgagtccgagcccgggggtcgggcgaggcggagaccgtcgtctgagccgaggtcgagtccgagccctggggtcaggtgaggcggatactgtcttctggaggcgaggtcgagtccgagccctggggttgggcgaggcggagactgtcttccggaggcgaggtcgagtccgagccctggggtcgggcgaggcggagactgtctttcggaggcgaggtcgagtccgagccctggggtcgggcgagacggagactgtcttccggaggcgaggtcgagtccgagccctagggtcgggcgaggcggagattcctatggcgcctgaggctggacttggctgctgtcagcctcaccctggcaggtggcacggcagtcggagcagcgcaggcggcgctgttttcctgtcaggtcagtcagtggaggggcgaagtgatagcagtcaattcggccttgtcgacgggagagcgtgcgtcaggataaggtgtcaggcgatccttgcattgaatgctcctgcgattcggtcggtaggcgtggcgatctggccaaggttgcttgttcgggaagccttcccgagatag

SEQ ID NO: 17641 - DNA, 258 bp, Zea mays
  Peptide Sequence Number=SeqID_61016
atgagccgggctggtgtcctcggggaacagttggctgaggctatggagcggccggtccggtcgtctgcttgggccaggttcctggaggagaccctggcggcgatggcccaggcgcgaatcgtttatccgagcgagagttacttttcacggaaggtgatgagtgagcttgtatgtcccaggcttcagaatcttggcgatgatgaacggcccttcctagggaggcatgagcttatggcgccctcgggcgtcttatcgtag

SEQ ID NO: 17642 - DNA, 2046 bp, Zea mays
  Peptide Sequence Number=SeqID_61017
atggtgcgaagtcctgccttcgcgctgaatctgcaaaaccgcgatccggccgcctttgtgcgtgaggcggaggatggggcggtgtggctcgttggccggtacgtgccgaggacagagggccagggtagctgggatatccgcgggtcgaatgaccgtttgaacagggtttttgaattgaatcaactgccgtatggcggctaccccggccaagacgatgtggaccgccgtgggaagaagccggtggtggagaccggagacgaccctgcgccggcggccgccccatcctctaaaaagaggaaattaggtactgctatgggaggacttggggtttccgatggttttgctagagagttgatgaggacatgcgcggccccggagggaaggatgacttcgcccgagctccgggagtcttcggcgcggatgctgagggttactgggggttggtggcctaggaatgttcctatcccccgcgcggtcggcgaagacttttttacatctcgcatggttcgtgaatggaaagtgtttccttacgggcagaatattgctgctattgtgtcggcagtgatggacaaggatcgccagggagctgcacaaaagcgccagacggttgtcaggcttcatgaagccagaccgaagaggcagtggggggctgcgaaggctgtggcccctggcggaggcaagccgccgctggcggcgaagttgggcggccctatacttagcaaggcgccggaggcagaggcaggcgccggtggttccaaatcgacgaaggctgtgccgccgaccagcagggtgtcggaggtcgcgaaggcggcccgagagttgccgtcgtcgggcaagcgcgtcgccgacttcgccaccgatattagtgtggacgactatcttggtgggtcagacaaaggccagcttgctattgttgcgcctgccgcggcggccatgggggctgctgtagtgctgaaggcgaagggcggtgctcttagcgccggaggcgagatgtcggcactcgcggctgtcagggatgaagcgggcgctgtgtcccgccggctgaaggaggtgacggaggcactaagtcaggtggctgacttcgccaaccgcacagcgtcgggggccctcacggcagttgtgtctgccgaagtcgagagacttcggacgcaacatgcggacgccgtccgtgagaaatcggccgccgacagtaagtgccgcaagctggcggacaaggtggccgcgctggagggggagaagactgacctccggcgccaattggcgggggagagaagggagaccaacgaggccctcgccaaggcgcaggctgcgcaggtggaggccaatctggcgcgggcggagggcaatcttgccagggagcgcgccaagcagctgcaggagcggctcatcgccctggagagccgcgtggagagggccgaggccgcgacgcgcgcggaggccgagcggacgcgcaaacagcttatgggctcgtaccataagctgggcgcgcggaccggtgacttcgaagtgccggaccgagagcccggacttcgctgcctggagtgggtacaggaggagttgcaggcgctccctactatcgtggaggggttcatgtcgtatgcctccctggtcacctgcgagagggcaatgaacgcgctctcccgcgaagggtgccggcacttcgaggtcttcgaccaagctgatgaagactttgagcgagatatctacaaggttgaagaccccgtagtgaaggaatccgccggagccatctatgaccgaatgtggggtccgcacggttgcgaggtggtcagggagcgggccgagacggtgagggctcaggcggcgcgtggcgagagggtggatgacttcggggcgttgaacagcgcgctgcctgacccggagccgatcccggcggaagccgtgtccggggccgtcctggaggcgcccccagagcctgcggaaggcgctccggatgcccccgcatctgctgcggccggcggggacctgcccccagagatcgccgaaggttcaagattttgggcctgtgcacgcaaccgccactactaa

SEQ ID NO: 17643 - DNA, 444 bp, Zea mays
  Peptide Sequence Number=SeqID_61018
atgggacacgcacacgtctgggcacaacctcaccctcgtgagaaaactctgcctcgcccgaagaacggcttcagcctcgggagaagacttcgcctcgcccaagctcagcctcggccaacttccctggcagcagccaccaactccccgcgaatcccgcaggacgccactccggcaactgttctaaccacttcctacacgactgcatgccctggtgcaggtccgagcatggcctcaggagaaacctccgtctcgcccgagcatggcctcagcctagataacatcgacaaaaggacgcccgacgccactagccccccttgcgcagagacaactgacatcgggatggctacagaaactgcaagactgatgtcaagtctacttttacaccatacgggacgaattaccatgtgctttgcaccatacttatcactatttcaacaactgtga

SEQ ID NO: 17644 - DNA, 351 bp, Zea mays
  Peptide Sequence Number=SeqID_61019
atggcggcggtaagattggctcggcgatggaagcatcgtggcccggcaccctcgaccgtccgcggactccaaatctgcggtgaaggccagatatgggggcgcgaatccttctctattcggcgacccacgatcctccattgttctctgcgcaccgcgacagctcttcggttcatggtgcaagagatggaggaggaggaggtctcggcttcgactggattttatacccaaggcccgagtccgaccagtgataatcctagcgggggattacggggattcggtcactggcttgtcgcgcgtttgttacgacctgagaagaaagagccgagccaagattttgcggacgggagttga

SEQ ID NO: 17645 - DNA, 435 bp, Zea mays
  Peptide Sequence Number=SeqID_61020
atgggcaagagtaagaaaggtggtagttcttcgcatcgctctggtgacaaacgcaagcgtgagccgactcctccctcggaggacttcggcgactcggagtactcggaggaggagttctcctccgagtccaagggctctccggctcctgcctctcccccggtctggacctacatccggtctgtcgagcgcgccgggctcacgggctcgaatgagttggagtattcctcggacgaggagaactcctcggactcgtccgaggagggcggtggcgacggcgatggcggtgacggcgacggcgacggaggcaacgacagcggtgacggcggcgaaggcgatggcgacgacggcggcaagggtagcggcagcgacagtggcgacggcagcaagggcggcagcaggggcagctacaagggcagcaacatggccagtggctag

SEQ ID NO: 17646 - DNA, 1275 bp, Zea mays
  Peptide Sequence Number=SeqID_61021
atggggatgcaccctttcgacttcgacgcatccagcgtggcggcccaggcccacacgccatgtaaccgacgcgccagttactacgtgcgaaaaactgcaccgccacttacgccaatgccgcgccttctcgactgtggaaccggtgccgcgactcgaggcaaccctgtacatggcccaacagtgccaaccaagcacatcggtcacagggactgggaaaggggatactccgaaagggatccttctccgctaagaaagcgggccccgagccctcctactgatcaggggctggcccctcggaagggttcgatagccgcctcagagcactcgggctccgcgcccactactgatcaagggttcgaaggctggccccccgaagggttcgacagccgcctcagaacacgcagagcgagggatgactctgggtacgtccgatacatggccgaggctcgggctatgctcccgaggaacagtagacccaggtggattcacgccttgcccgagggcctcctcaagcaacgggcaaaccttcgactcgccgaggcccagctcggcctcaggcaccataggaagctccgcctcgcccgaccccggggctcggcccccgcctcgacctcgaaagacggtctccgcctcgcccgaccccagggctcggactcaacctcgacctcggaagatggtctccgcctcgcccgaccccagggatcggactcaacctcgacctcggaagacggtctccgcctcgcccgaccccagggcttggactcaacctcgaccccggaggagtcaccacctcgcccgaccttgggctcggaccgaccacgctacagggggtacatcattaccctacccctagctagctcaggctacggggaacaagaccggcgtcccatctggctcgccccgggctcaagcgctcctccgacggccacgacatcacatgaacagggcactaacacctctccgacagccacgccggcatggccctcgtacgagaaggcggccgcgcgggaggacgggctgacgagcaggctctctctctctccctcgcgaacacttgtaaccccctactgcaagcgcatccgccctgggcgcaggacaacacgagccgcgggaccccccgcggtcgaaacaccgacaatactcatcatgccgcgtaaaatggaaggacctacatttgcaccatattcttgcgatttctgtctcctccccgcagccaaatggtcatcctcttctgtccaccccacgggccgccgctacaagaccgttgcaatctag

SEQ ID NO: 17647 - DNA, 285 bp, Zea mays
  Peptide Sequence Number=SeqID_61022
atggtctttaatttacaaacaacgagccaactatcacagtccagcaacggcaacacggtcttcaacaaaattgaaaggacagagtacacgaaaagtatggtccgggctgctagagactatttcttcaggtcggctgatatgttcaaccaaagacttattcagccactgatatgtacacgtcgccacatgcgctgtggcaggctatataacctcaccatctccatgcccaaagcatcaacaacatacacacaagcaaaacaaaaagctaagaagctccgtagctaa

SEQ ID NO: 17648 - DNA, 99 bp, Zea mays
  Peptide Sequence Number=SeqID_61023
atggggaagcgtggtggcgggttgcggcatccgaccatctgttccggcaagccttggggcaaggggcgtttggggcaggctgcattaattgacacctag

SEQ ID NO: 17649 - DNA, 471 bp, Zea mays
  Peptide Sequence Number=SeqID_61024
atgggtagaggcaggaggggtcgtggctggcctcgtcgtgttgacggcaagcgtaagcgtgccccgagtcccccctcgaaggactttggggactcagagtactcggaggaggcatcctccaagtcagaccgttcacctgctccggcttctcccccggcgtcatccgaggactcagatgactccatggggctttccaccgcagcccgggcgtactggcgctccatcagcacgctgggctcggagtggagcgacagcgatggcgacgacgagggcgacggcagcggcgacgacagcggtgaaggtgacggcgatgacagcagtggcgacggcagcgagggcgacaacggcaagggcagcggcgacgacggcgacagtaagggcgacggtggtgatggcaacggtggtggcggcagcgacggcgacatgggcgacagcggcagcaaggccagtggcatagcgccactggtttaa

SEQ ID NO: 17650 - DNA, 702 bp, Zea mays
  Peptide Sequence Number=SeqID_61025
atgaagggtccttgcaccccaacatgctgtacccttctctgtgcttccttcttctgtttcttgttagctggctctgaggacgagccacctgtgatcgggagtaccagcttcggatccgaagcagctccagcttggtcgttgaacgaagccatcagctcaaaaagtggaagtgagttcaccggaggagatgaaaatacaagtgtgacgcaaaatcaaatgccaagtcaacgtgaacagtacgggggtactgttcacctatttataggcacgagccgcttctcccttgaagaccttcggcgacgaagcatagacccaacagcaccattaggtcagaatcctccacacacacacccacgtgccactgagatcctcactgtgcttgaggggacactctacgtcggatttgtcacctccaaccaagctgatagaagcaacaggctatttgccaaggttctcaacaagggcgatgtgtttgtattcccccaaggactaatccacttccagttcaacccagtacatgacaagccagcagtcgcgctcgctgctctaagtagccagaaccctggagctattactattgccaatgcagtctttggatcaaagccacctatctcggatgatgtcctagctaaggcctttcaagtgcaaaaggggacaattgattggcttcaagctcagttctgggagaacaaccactactga

SEQ ID NO: 17651 - DNA, 480 bp, Zea mays
  Peptide Sequence Number=SeqID_61026
atggccttgcagatgcccaggttggagaatctgaggcgctccacggcagagcgcgccatgagctgggccccgtgcccgtgcccgcgagccgcgcctccagccccctggcgaagcaccgccgggcaccggcgatccattcgcaccctcgccccctccggactcgcccagccgccgacaaccagcgatccatccacgccctcgcccgctccggaccacgcccgcgctgcctccgcgccctacgaacttcccgtcacgggcccgtacaccgtttctgtcttcctcgagaagggcttcctctccatccccgggttcatcctcgccgacgacaacctcatcgccaagtgcccctcctggttctggtgcattctttactcatctcgccctgctcttgtaatttttattcctaaatacgtcttttatgctaatttgaatgtgttattatgctcaattaccagatctcgtgtacgctccgcattataa

SEQ ID NO: 17652 - DNA, 708 bp, Zea mays
  Peptide Sequence Number=SeqID_61027
atggcggtgacgtacacctacaagaattctgatgggttggacgtaccatcatacttttccaacaggggtctgcggtgcaactgcagtgaagtcgtagtcgaggttgcgaccctcgacgttctatcggcgctcacgcgcgctctccagggagatgcgggcatcctcgtctgcacgcctacggttgagttctgcccacaggtcctcagtcgggcggccctcaccgagggcaagtgcatagacgctgacacctcttgttggcgtcgggatgaccgaggcctgggtctggtagagctagagtgcgccatgctgagcaggcagtcgacgtcgtcacgccactgcttcatggcccccggcgaggccgtgaagctaggagggtggcgcaacaattctctggccgcagacagcgccccaggcgtagccctagactccctggatgtctgcgcaggagtgtgctgtcgtgcagagtgcacagcagcagcaccaggcactgggaggaatatagtggatgtaatacttggagttgctggagcaatcttcttgcaccctaacatccgcgatctgcatggtattggcgtgcaggggaagcttccctggcaacgcataagtgatgatggacacagtgcaccttgcagcacgggcgtactgtttggcaatggactggacaggcatgccgcctgcaggatggcctggacgccgcctgccagctga

SEQ ID NO: 17653 - DNA, 378 bp, Zea mays
  Peptide Sequence Number=SeqID_61028
atggccagaacggctcaccagagttgctccgacccgcctgaggctttctcaccgtcgatctcccctctctgcccatggattcatggccccttccccgtcattgagttcgccgtggcgccctcttcctctctgcccaactccggcgaccccggaacccccctagctcacgccttcctcaactccggcgacctcaccaccgcggagaggagcagagccgcccgcagccgttcacccctccccgacaacgagcagctcgtggttcctgagtgtgttgccgaagatccctctgagcaacaacctggtgaaggcaaggggctcaggctctttcctgagtacctctccgtaaggacctgtttggggagtgacaacccgggataa

SEQ ID NO: 17654 - DNA, 984 bp, Zea mays
  Peptide Sequence Number=SeqID_61029
atggaccctacctatcagttgtgcccccctccgcgctcgccgtggaccggcgcgtgcgcactcgcgcaccttcaccctctctcacgccctgcccacgccgccagccgccaccggagaccccgcgcccgtgttctcggccatccagctcaccggagaccgctccaagcctccctgagctccgccccgagtcacctggagagattgcatcgtcgcctgcatgaggagctggagcgccgacgcgaggagcaggagcaggaccaggagcagcaggactcttccccctcgcctcagcgggaggtggcgtatgagaggccaccttcccctgcacctcagccagagatgccccctgcaccaccccagggcatcccggctgctggaggagaccctgacggagacggagacaacgacgacgccggtggcagttcgagccacggcacggagcgttcagaggagccagagctggagggatggatcgcgagacccatcactcgtgacgctgctcgtgggtgtcacttccacgatgctctcgataccttgctatgtcgggccttcaaccaacacacatggtctatcgagtactgttgtgtagtctaccagcatcgtcgcgggctatacccggaccaatgggaggctacttgcttggtgcgtcgtccagacgatgatctctggggtgcagaggccttctcagagcactattctattactgagagggatactgccgaggcagccatgcaagatctgatgggccttgatctgaagtactaccctcgtcgttcgaccggcagtgctagaggtgtgattgctttgccagttggtgagggaaatcccaggctgaacagcatggtcaacttggccgtcgtgctcaacacagagttggaccacgcccttgacgagttgggcaagcacccttaccattcaccgcctcgtggtcgcttcgactatggtaccccagactgcaggacccgcatagatttagatccatag

SEQ ID NO: 17655 - DNA, 714 bp, Zea mays
  Peptide Sequence Number=SeqID_61030
atggggctcggtgtatgcggctcgctctgccaagtttgggttcgccccttggggaggagtgcgagacattatggtacaggtggctatgagatcgatggttttggttatgaatatggtgctggcgggcggaagcagcagtcaaatcgtctgcaggctcacgtcccctcctggggcagcaggggaaccctctcccacggcgtgaagagacacgctcggaccgggaaaggggatactccgaaagggatccttccccgcgaaggaagcgggccccgagccctcctactgatcaaaggttcgaaggctggcccctcggaagggttcgacagccgcctcagagcactcgggctccgcgcccactactggtcagaggttcgaaggctggcccctcagaagggttcgacagccgcctcaagccactcaggctccgcgcccactactgatcaggggttcgaaggctggccccccgaagggttcgacagccgcctcagaacacgcagagcgagggatgactctgggtacgtccgatacatggccgaggctcgggctacgctcccgagaggctcgggggctgctctcgcaaacccggctccggccaaaccgttgacggcgtcaacataccagcccgagaactcggaacctgaccatgcacccgggctacgaccagttcgcatgagggaacaaccagaccggccgaggcgtcatgaaaagcgctaa

SEQ ID NO: 17656 - DNA, 751 bp, Zea mays
  Peptide Sequence Number=SeqID_61031
atgtacgcgcaaggccgcgctgacatgtcgcgaacgagtcacgcacacgccggggccgaactgcgcacgcgctacgcaggggcaccacggccgcgcgagctgaagctgcgccggggcggggccgcgctgcgcaggggcgggacacgccaaatgcgggcggggcccgagccgcccgtggcccgcgagcccgcgggtgcggcgagctcgtcgggggcaccgtgcgtgcacgggccgcgctggggctccgcgcgcaccgtcgtggctacgccggggaccggggctgcgcgggcgggcgaggtcgcgctgcgcaaaggagggcgcgtcgcgatgggcgggggccgaggctgggccgcgcgccacggccgcgccatggccggcgagcgcgccgcgccggcgagccgcgggcgggcagccacggctgtgccgcgctcaagtcggggagggagcggggacgggtggggcaaggccgacgagtccaaaggcggggttcgccgcgggcgagcgagggccgggcctcgccggggtctgagcgccgccgggcgcggggagcgaagcgcgccaggcgggggcaaggtcggggccgcgtctgggacgctgccacggtcgggccgagcgccactgggcggggcgagtgggggagttcgtcgggtcgggcggggcggcatcgggacctccgcgtccatgactgccagcgtcgaggcgggtctcgcccgattgcccggccggctgggaatccctcctcgtgtagaag

SEQ ID NO: 17657 - DNA, 1317 bp, Zea mays
  Peptide Sequence Number=SeqID_61032
atggggcaggacggcgtcggcggaggggtgatcggggccctgctctacgccgcgctggcggtgctggcgctgcgtctggtgctgtcgtacaagtcggcggcgcacgcggtgcggcgggcgtggcggtgggcggacgagtgggcgcaggcgtaccagtactacgaggtgccgcgcctcgccgtcgacggcgcggagaacccgctgttccggaaggcggcggccacctcgagtccgtcgccgacgagatggaggcgcgccgccgcgagctgcgggtccacgccaacgccggcggtggcgcgccgcggtgggcgtccgcgcccttcaccgcacccggccacgctcgacacggtggccatggaccccgacctcaaggcccgcgtccgcgccgacctggagagcttcctcaagggccgcgcgtactaccaccgcctcggccgcgtctggcgcaggagctacctgctgtacggcgctcccggcacgggcaagtccacgttcgccgccgcgatggcgaggttcctggggtacgacgtctacgacgtggacctgtcccgcggcggctgcgacgacctccgcgccctgctcctggacaccgccccgcggtcgctcatcctcgtggaggacctcgaccgctacctgcgcggcggggacggcgagacggcggcggcgaggaccgcgcgcgtgctcggcttcatggacgggctctcctcgtcatgcggcgaggagcgcgtgatggtgttcaccatgagcgggggcaaggacggcgtggacccggccgtgctgcggcccggccggctcgacgtccacatccacttcaccatgtgcgacttcgagggattcaaggctctggcgagcaactacctggggctcaaggaccacaagctgtacccgcaggtggaggaggggttccacgccggcgcccgcctcagccccgccgagctcggcgagatcatgctcgccaaccgcgggtccgcgagccgcgcgctccgcaccgtcatcagcgcgctgcagcacgtggccccgtcaccgcctccgcagcggaccgtcaccgcggcgcggccgccgaggctgacatcgagatggtccgggcacctcgacgaggccagcgtcgcgaccgcgacgtccgaggccagcgcggcggggcagtcgccgcggggcgggggaggtttcgccaaggacgcgccgatcagggagatcaagaagctctacggtctgatcaagtacaggagccgcaaggacgccggcgtcgtgccggtggatgacagcgcggcatcgccggacgggcgggacagcgacgttagccccgagaaggaccggtga

SEQ ID NO: 17658 - DNA, 4809 bp, Zea mays
  Peptide Sequence Number=SeqID_61033
atggggtccacaggcttgggcagcatcttgttcatgtccccagggatctctgggcacaggcacagcagcatgcagtcatcgttccctgcccccttcagatgtttgagctcttcagggatgatcctatgtcattgcagcacttgctctgcagcattggtgtctgttcattgttcgaagggaaacatcagtgtcagctcggaaggacagcccgcagctgtggcatgggcgcatggctataacgaggacgattatcttgggatggagtcagcatcaactcctgtcaaagagaagggagggtcgcctttgggtcttgcaattttccattcagctgcagaaattcttgaagttttggttgtggattcaactgcttcatcgcttgaatcatggattgggtttgctgttgatctgcacaaggctctgcattcatcttctcctggttcaaacaggaaagatgcaccaacaaggttgcttgaatggattgatgctggtgttgtttatcagagaaatggtgctcgtgggcttcttcgttattctgctattcttgcatctggtggagatgctcatctttcttcaggaaatgtgcttgtgtcagattcaatggatgtagaaaatgtagttgcagattcaaacagtagagatggtcaggtcatcgataatcttcttggtaaacttgttgcggataagtattttgacggagttgctctatgcagcacttctgtggtccaattaacaacagctttccgtatcttggcatttatttcggatgataagcctgtggcgtcatccctttttgaagaaggcgccataactgttatatatgttgtcctgatgaactgcaagtctatgcttgagcgtttatcaaatagttatgattaccttgttgatgaaggggctgaactgagttctaccacagaattacttctagatcgaactcatgagaaagctattgttgacctcatgattccctcacttgtcttgttgataaatctccttcatatattacgtgaaacgaaagaacaataccgcaacaaaaaacttcttagttctcttctgcagttgcaccgagaagttagcccgaggctagcagcttgtgctgcagatttgtccttcatgtttcctacttttgctataggttttggtgttgtttgtcatcttatcacgtcagcacttgcttgctggccgttgtataattgggcacctggtctgtttcattgccttcttgaaaataccgaggctactaatgcgtccgtaccattgggcccgaaggctgcttttagtctgctttgtctcctgggtgatctgttcccagatgaaggcatatggctatggaaagttgaacttccttctctcagtgccattagatctttgagtactggagcagtgctagggcctcaagtggagaaaggggtgaactggtacctgcatcctgaacatgtgaccatattacttgtgaggctgatgccacaacttgataggcttgctcgtatcattgataactttgctacttcggtcttgatggtgatacaggacatgcttcgtgttttcattgttcgtgttgccttagaaaagattgagtgtgcagttgttcttctacgccctatatttatgtggttagatgataaagttgacaaaacttccctgtcagagagagacacctttaaggtccatcagttgcttcagtttactgtaaaattgtctgagcatcctactggcaaggcattgctttggaggatggggttcacaaggattcttagcaagttactacagaattgtagccgagcatctttcccgtatgataatcagacttttggaagggcgcactctaagaatgaccttatgctcaaatggaggatccctttgtttaaatctattgcatatatctttagtatcgacccatgtaataatgagaaggctgatgttgaagagtccctgaatgagaagtctgttcatgaatgctcttctgtcatgcatgacctcatgatgttctgccaggttttgcctgttggccgggaaatgttagcatgttcgttggcgttcaaggaattggtttattcttatacctgtagaagtgcagtaactttgatactttcacaaatacatacttccaacaaagatgttcttgaaaaagatgagagtgaccctaaccataactcaccatctctggatggttggaattgcttttcctcattgttcaagtgctggaagaagcttgtaaagtatgttggttctaatgaacgaacagattatttagtagaaactatttattccttgacactaggtgctatcaccctcagccagtatggtgaaaatcttgagggtctgttaatactgaggtatctatttgggctcccttctgatcctagtggttccttggaatcatctggtgagagtccaagtgagattgagttattcatgaagacatatgaagagaagatatgccagggcattgaaaattcagcgactgctgttggaaagactcttttacgcaagctactgaattcgatcaaattactacgctcaattcttgagaattctggtcaatccgcagatacagttcagatggttcttgaagaaggcactgactcactgtctgaaattgctcgctctgttgttatgacagctcatcttatgccatccctagccaatgtgtcagtaaatgatgaatctccttttctcttctctaatatgtggaaggttattgttgattcagaagagcctcttgactgccaagagggtgaatttgcaaagaggctagtttgggagttgcctgattcttctcttgatagacaactagcacctggccaatctgccaggaggaaattagcactgggagagagtgcaagtaggcgtgtaagggataatcaactgcctgaacccactgggcagttctcacgaggtttaaatacatccaatgcttcttcgggacatacacgcagagacactttccgtcagcggaaacctaacacaagtagaccaccttcaatgcatgtagatgactatgttgcaagagagagaaacatagatggtgcaagtagtgcgtcaaatattgtgaactctaccccacgaggaacacttagtggaaggcctccatccattcatgttgatgaatttatggcaaggcagagagaacgtcaaaatcatgcgccagccccaactggagatgcacctcaagctaaaagtcagacaacaagtttagatgacagtcttcgtactaagccagagaacttgcgtcaacccaagactgatctcgatgatgatcaagaaattgaaattgtctttgatgaggaatcaggttcggatgataaacttcctttccctcaaccagatgatagtctccaatctccacctgtcattattggggaaaattctcctggtcctgttattgacgagacagaaaatcaggagaatgaaagagttccctttttccagagggccacatctatcccgaaggacgatgaaaatcttggcattggcatttcttcccagactgcaatgctctcagaagctaacagttctttggaactgaaacattcagtttctagcccagggaagaattcttttcgtgatcatgctgaagagtctaattatgattctattggtgtatctgggagaccatctttacaagcagatcatcaacaattatctcgtagacatgaaaagagaagtccacgaaaattttctgagacttctctgtcaaatggattccatgggcgtgagcatagacattccaataaccatccacctctgccaccaatgccacctccaatttcatccgtgtccatgcaaaatactgattcagttaataggcagtcatcttcgttcagtgctcgagatcgaccaacacctaatccttctggttatcctacacaatcttttgactctagtatgcctagtgctttcacaggccttcagggtcaaactcaatacatgcttgcaggcgctggcagttcatcagcgaatgagttacccaatgtggaggccaagcttctatggaacacatttccagcaaataggatccctctggagaccttcagctcaggtttacctgctcggccgatgccaccccttacaccttattcagctgttgctactcagcacgctacgatgaactctggctctcctgcaaacctgtatagccagggcagtgttgtccagccttctccaactgcttctattattagtgattcaaatttggccatgaactccgcatctggcagcatgcttgcatcgaatctgctgccatcatttgcatcacaatttctgatgagcaggccttcaatgcctactccgttttttggcacgcctcttcaacaagttcaattctcatccggtcttccacaaaatatttctaaccctcagccacctgtctcaatacaaccacggccacccccacccccaccacccccgcagcagccacatccttctcagacactccaacaacttggtgctatccaattaccacaccaagatcagcagcactcatatccccatagtgctatcttgccacaagttacgttgcagtttcctaaccagctacccattcctcaagtacaattgtatcatcaaagccagcaggaatctgggcaaacactgaggcaagttggtgaacaatcacaacttcagaaccagggtatgcaagcagatagtttctctcaacagcagcaagactcagggatcaacttaaaccagttcttttcatctccagaagccattcagagtctacttagtgatcgtgagaagctctgccaacttttagagcagaatccaaaacttatgcaaatgctccaggatcgcattggccagttgtag

SEQ ID NO: 17659 - DNA, 354 bp, Zea mays
  Peptide Sequence Number=SeqID_61034
atgaggcagatcaacccgaaggtacccaatcaaccagtcagtcaggcagagtggcaaaagctggggagcgatgcaggcgtcagagcagcaacaacggaggagatgtcaagtgccaacgatgcttcagcatgtccaattcgcttgtggcataggaatctcatcctagattcaatagaggggctgcaatgccggcatcgccatagctggaaatcgagcactgacggacaccgggcgccgagatgggccgtcttgtccaccgccgcaagaaccgcatgcgttggagccatccttacacctgctcctacttccgcgccagcaacccaacacgccgacgacacgagctcctccttataa

SEQ ID NO: 17660 - DNA, 762 bp, Zea mays
  Peptide Sequence Number=SeqID_61035
atgccatacccatctaagggttggagacccatatttatagccctagatgctgcactaccacaccttctcacacacactacacaacaggattgtcctctagatgctaaagagactacagaggacagtcaaaagcgactgttgtcctctagatgctcaagacttattccatcacgtaggaggagggcggccgacgacgggacagtgccaggggctgcctgcggtggagatctgcgcaagggggagggcagccggcggcgggccatgcagggatggagcggccgacggtgggccgtgcagggttatgtagattcatcaggcgataagtccaaacgaagtgtagtagagattaaaggtcgcttctcagtgacatctgagaatgtcgatcttgcaaaggttcaggaaggtccacttagtagtctctcccggaaatcaccagagggttcactgttaagaaaatctgccagcactggtgattattttgttaatcctaagctgatggcagtggctgggagtagggaggcacatatatcaccattttcatggttggggcggaggaaactcggagtaatcaatggggactggggaatgttgaagttgaaggaggctgaaaggcatgatcttaatattaagagaaaaaaagatctcttagaagaccaaatacaagacgtcatgaaggcggcccataaatcacaggccaccaccagcggccccacacacaacccagagatccaccaacaaacacctaagaagcctaaggcctaa

SEQ ID NO: 17661 - DNA, 477 bp, Zea mays
  Peptide Sequence Number=SeqID_61036
atgactgatgacacggttggccaggtgatcaattggggggtcgaggaggagctgagctgcgtcaatgcgtcatgcatgagacctaactgcacaaaggccgccgcgccgctcaacgagattggtcaatgtacatctagcacggtgtattgccccataccctctggcgtatgggtcactgtagagacaccgatgctgaggtctctacggttgggtcgttcggccccactagcaacactgcagaaagttgaaactcaacaagctagaactgactgcattgtggagatattggcgccactacaatctcgtcattgtcggctttatgcaagctgcaaagaggatgaagacgactatgaaagtggcctaactgtgaagcctgaacctcaactaacagattcaagagagaatgcaacatgtttaatgaatgttgccgtgctatgtaatatatatgcacaaagttctgtagatttaggtggctag

SEQ ID NO: 17662 - DNA, 189 bp, Zea mays
  Peptide Sequence Number=SeqID_61037
atgggcggtaagactggagctgctgcggttgggttaccggagctcaacaaccggtacgtgctcagtggcaaaatggagaagacagagacaaatgatagggatggtttctttattgcatgcagggtagtatatatacaagtgttcccaaggggtgtgtcccttgggaataactgtccatggatggattag

SEQ ID NO: 17663 - DNA, 411 bp, Zea mays
  Peptide Sequence Number=SeqID_61038
atggctaacctcgacttctacatcgacgacgaagcgctggcccaatcctgcgccagtagctcgcatagtttgagccatcccatccgcaacggccaggtgggtgctccaactgtgtactgccgtgtccagttgctgagccctctgactgcccctgagacccgggagtacaccggagagatcatgtttgagacgttcaatatgcctggcctctatattgcagtccaacctatccttgcgctggcttctgggtacactacaactaagtgtgaaatgataggtgttgtagttgatgtgggtgatggggctacccatattgttccggttgttgatggttatgtcattgggagcagtatcagatctattccaattacaggcaaggatgttacccagtttattcatcaacttctaaag

SEQ ID NO: 17664 - DNA, 426 bp, Zea mays
  Peptide Sequence Number=SeqID_61039
atgcggttcacgcaccgaatcctctccagccgcctcacccccgcggtcctccccgatgagcacgcgcttgcggagtccatcaatcgtcgcctcgggccgctcctctacatgctcgactcgctctcctcgcagtaccgcgccgccgccgccatggcttcgtgcctcccaaatcttctcgtcgctgtcccaccgcggaatgccacctcccttcctctcgaagctttgtctgcagacgaagtcgccggctcttccctcggcactggtgccggtgggttgccagtggcggtgggtgggtggcctggtgctggtgttgctgggatgcccgccgcgacggcgaccatagcccgccttcatgtgccgctgccaaaagctgcccaccactcgccctgctcgagccagcgccaccccgactcccgccgccgctga

SEQ ID NO: 17665 - DNA, 798 bp, Zea mays
  Peptide Sequence Number=SeqID_61040
atgagcaagaacacaagagacacaagatttatcccgaggttcggtcacaccaccaaggtgccctacttcctcgttgaggcgcccacaaagagccgggtctctttcaaccctaatcctccctttgccgaccacaaagcttgccactggtatttcaatccatccattactgaagctgaaccatactatgaagtgacctttcctaatcctattgagagagaagacaaagaattaaaagtgctcttagaatctggcctagagtcgctaccagatgaaggttgtacaaactcaacttcatggcttctgatggcactgctgaaatgcgaatggttctgtttcgacaacattgccaagagaatcattggaaaaccatgcgcttctctcttaacatcagctacaagcacttccaatattccaccagatttagcagcgattgtgtccctcaaattcacatttgctgttgtttacaatgaaatgtcatttcaagtttcagaaaaagaactcttcatcaagtcagtcatagcttcacatggaagagacctaaccttcccgtcacccaaactaaagattccagtgcaaccgtcaactccaacgcaactactaggtgcagcaaaacagccagtttcaccttcttcagcactgtccaaactatcgactgccatttctccagagaatagtcctcaaactgaagacaatcttcaaaatgaagaccagaacatactggcttttgaatcaccaccaaaaagggctaggcgtaaatccttgaagtttgactgtgacaaaaatctacacgatgaataa

SEQ ID NO: 17666 - DNA, 519 bp, Zea mays
  Peptide Sequence Number=SeqID_61041
atggggctgtcaatctcgtacccaccggacgactacctgccagcagtggaggacgacatggggcggctgttcatctggtctctcagcttcgacgatatggaggctgccgccgattcgccttcgtattcgccttcggcattgccccccgcctttggctccgggaagctgatcatggagggctccctgggcttcttcgaaagaagagaaactgacagcgtccagatgcagaacgtgttgtccatcaggaatcctaaacctcctaatagagaagcctgcagcagcgtcagtcccggtcatgaaaacttgcataactccattgacgaagctatcatgttgaagttgtaccatgcactatggaggatgcttagtgggtcaactgtagggatctttccttctacatacgacctgtgggactcgctttttgaaaaatggtccccaatagcttatggtttacttgaaaagttcatgaatactccggcaacagaattcaaggtgatattccagaacaatcatatctaa

SEQ ID NO: 17667 - DNA, 1164 bp, Zea mays
  Peptide Sequence Number=SeqID_61042
atggccaggtgggcgctccagcgaactctttcaggtggagaattgggaaaccatggagaggttcagtgcatcttcaattacctccagtgcgacccagaagatcattattttcttctaactgagagccctctgactgcccctgagacccgggagtacaccggagagatcatgttcgagacattcaatgtgcccggcctctatattgcagtccaacctatccttgcgctggctgctgggtacactacaaccaagccaccagctgatcaaacaccagatagttctccgcctgcatttaagcatgtgctgcgtcagcctataatagaaaatgggaggctaaagaagaagcattgggtgatagaccatcttgtgcatgaggggtttgaaagcactgctcggcatgttgatataccctacctccctatgctggcattagatatccttgggagtactaaatggagggtgaatagaagagttcatgatgttgttgagactatctggagtcaaggtggaggcattgcagggctggtggacaaggcaaataatcagaggaccctgatgaaatgtagaaatggaagtaccagcataaagaaggcaaagaaaactaaccgtgagctgcatgtgagagatgtgacactaagctcaaactctcgggcggccactaggaaagtctgggttgtgctggttgaagatacacttgctaacaaatatggtggtggcattgaaaagctttctcacgagggcaagctagcttttgtggagaaccaactgtttgatatatttgattcagcagcaaatcctattgatgggaactactggtggacgaatgctgaggatccctttcagtgtttagctgcatgcatggacctttctgatgccttaagaagtccatcaccttaccatgcggtctgtcacctgcttattcatcaggattttcgcatcgcgcctccgcctcccaggattgtcgcaccacacctccgccattttcgccatcgcgccctcgacaccacctcccatggatcctcgtgcgtcacatggaagattggaggaggcaaaggaggtgcggaggtggatgatgtttcgggagttaaggaaggaaaagggatgcaatttaatcaacaattgagaaccaaatctgatgcttatgtgccgattcaacgaggctaa

SEQ ID NO: 17668 - DNA, 480 bp, Zea mays
  Peptide Sequence Number=SeqID_61043
atggctgttgctggagctatatttggagttgcatttggtggctggatgaatgacaagtttggaaggaggccttccatcatacttgctgatgcactgttctttggaggtgccgttatcatggcgttttccccgacacctagagttatcattattgggagggtatttgttggtcttggtgttggaatggcttccatgacagctcctctgtacatctctgaagcctcccctgctaggatcagaggtgctctagtgagcacaaatgggcttctcatcactggtggccagttcttggcctacctcatcaatctagccttcactaaggtacccgctcaactaaacattcaactcttgccatcttctacaaatttggaaaacatcgttttgcaaagtgccagggacctggcggtggatgcttggcattacaggggttcctgccctggtccagttcgtactgatgctaatgctaccagaatcacctag

SEQ ID NO: 17669 - DNA, 492 bp, Zea mays
  Peptide Sequence Number=SeqID_61044
atgtcccaggatggagggatggacgtggagcttcgccaccgatcgagggatatgagcgttgcatcatcgggcaaggactcggccgataccggccggaattcttcgacggagttcctccgccgccgcgaagccatggacaccgtggatcaactccgacacagcgttcatcgccgaagcgaggtcacaaggaacctgaagaccaaattggagaagtacctagagttgcaccaaaaaggggcaagcggggtggagttgtgcgagtatagggaggtcctcgggtcggactgtctttttagcttttcggacgagggattcctatatcgccttcggcccggaatccgtagcgggttctctcctctagtggaactttgtaaaggcctcgtagtgagcccttgcctactcaccttggcagtgtttaagggtctgcgcaacccgaggcaaataagggatcacggcttgtgggtaaagatgcgcaacctctgcaaagtgtaa

SEQ ID NO: 17670 - DNA, 249 bp, Zea mays
  Peptide Sequence Number=SeqID_61045
atggacgtggagcttcgccaccgatcgagggatatgaacgttgcatcatcgggcaaggactcggccgataccggccggaattcttcgacggagttcctccgccaccgcgaagccatggacacagtggatcaactccgacacagcgttcatcgccgttttaaaataccggccgtggatctcggatccaagtgcccacgtagcgtaccggttcggagcgttgatgatctaatctcgaccatccatatctga

SEQ ID NO: 17671 - DNA, 900 bp, Zea mays
  Peptide Sequence Number=SeqID_61046
atggaggcagcaatacagtcactttctcaaaagaaaatgcaaggagaatttataccgagacgagaggtggatgagcttagtgtcgccctaggcaacaaggagcaccctggtcgtgtgcggggctcctcctccaagttctacgcggcggaggtggtggcggcgctggagtacatccacatgatggacatcgtgtaccgcgacctcaagccggagaacgtcctcgtccgcgccgacggccacatcatgctcaccgacttcgacctctccctcaagtgcgaccccacggctccaactctggcgcacgtcatctccgacccgctctccctcgccgcccgctccggcgccgccgcgtcctgcgccatctcctcctgcatcgtccccgccgcctcctgcttccagctcttccctggccgcggccgccggcgtcgatgctggcgcaccaagaagctatcgtcgaacagcggcaacaatttcgcctccagcggcggcggcggcggcagtagcggcagcgggctggagctggagtttgtggcggagccggtggagctgcgatcgatgtcgttcgtgggcacgcacgagtacctggcgccggagatcgtgtctaggcaagggcacggcaactcggtggactgggacctcgtcactgcgctcctcgccaaggaccccgctcgacacctcggcgccaccgttggcgtcgccgcaatcaagcgccaccctttcttcgccggcgtcaactgggcgctcctccgctgcgccgcgccgccctacgtgccgccaccgttcagcgtcgtcgccaacgccaaggctggcggtcggagcaacggcaacgcagttgtggacgacgacgacgacgacgtgtcggacgacagttgtcccggcacgcccgtggagtattactag

SEQ ID NO: 17672 - DNA, 84 bp, Zea mays
  Peptide Sequence Number=SeqID_61047
atggacgagagggcgtgctggctggtgatgtggcacggcgagggaagttgggccgcgcgggaccttgggccgaacagattttag

SEQ ID NO: 17673 - DNA, 189 bp, Zea mays
  Peptide Sequence Number=SeqID_61048
atggctaaggtgaagaagagagtacttgcactagtcgatgaactaatcagctatgaagagttacaacatgttgatgcatcagtcagctgggctgaacttcagctgaactcaacttcagctgtgaacctctttgaccatacaccagctgaacttgcctccgggcagttgagctggggttttctctcctaa

SEQ ID NO: 17674 - DNA, 2310 bp, Zea mays
  Peptide Sequence Number=SeqID_61049
atggatccttcctcgaggacagattcggtgcttacgctggcactagcgaaccaaacgcgctccctgctcgccgagttggacacgcgcctccactccatcgacgccaagcgggagactcgggagagcgctctcgagtcccggtcggctgaagccgcccaatccatggcggatttctcctccaaccttcgcacagacgttgcagcacacttgaccgccgcagatgctgtcgtcgacgccttgttgggtcagatcgaagctgatgcggtcactcgggtctccaccgcgtctgccagcacgccgtcgaccccggttgtggccgttgggatcgccatcgtcgccgacaactggggcgggggtttcgacggaggtgaggactcaattgagcagcactacaccgtgccatccatcgtcgccgacaattggggcgggctcttcgatggcgataacgttgttgccaatgccctcgacgccatccccacggacacgctcagccgcctcacctgcctcgcccgccgcgaccatgccgccctccaggagctcgagtcaccaccaacagacgaagtcatgcgagcctgtgacgccttcctccttctggttggtggggaccatttcatgccagtgctacgtggcgctctgttcgtcatctgctccagttgcgtcagtctattccagctgcccgtcaactttgctgtctcgagcagaggaacgcgtcgactgttgtgtagctcctgccccaaagttctctcctactcttacaggaaccctgccaggaagaagatgcagctgcagtcaccatttgggggcgacgcgtacaacaccgatgagttcgagcaggcggatccggagtcctattccaaggagtacgggctctcgttcggcatcagccactcgatcagcaccgaggacggaattcttactaccatatcaatctcgacatccacaatcctccacacatcactggtacatacacttccaggtgcttcagttccaagccttgccatgctgagctcgatgtctctggtgcatgccagcttaggtgcacatcaggtgtttgaggaattgtcatcctgcaccgacaacgtcttcaacaatagcatcggcttcacacccgcgctcatggcttatggtattgatattcgtgtaatccatgctatcaagtcaagaagaagtcctgttggtaaggtactgacaattcttcaagcgaactctttatcctctaaggaagttgagaggcgatcatgcatttccttggaggaattcatatgtaattacttttcgtgcgacacccccatcataattagtggcaccatcgatcattggcttgcaaggacaaaatggaatgacattgagtacctcaaggagatcgttggagatcatattttcgctgttgaagttgggaaaaattacgtgtgtcgtgagtggaagcaggagctgatcacattttctcagttgctggatagaatgacgtcaattgtctgttcatcaaacttgacatatcgtgctcagcatccatggtttgagcagttaaaagagctcagtgaatacatgatggttaccgaatgttgttatgctggtgcaggggaactccaatcacttaatgcttggtttggtccagaggagacagtggcaccattgcaccatgatccacatcacaacatcttagctcaggtcttgggcaagaagtatattagattctatcgtgctgtcatagctggggactcgtatccacacacagcgactatgctaagcagtaccagtcaggtagaccttgacaacattgatttgaaggagtttccaacggttgaaagcctggaattcattgactgcatattggtagagggcgacctgctttacatccctactaaatggtggcactacgtcagatctcttcccaccagtttctcggttagcttttggtggcactacaaggttgttgactactggctcgaccgtggaaaatctgggtttgatgtttataagtatagactgttgcgcattgagggccaagaacccatgggtactgtgaattatcgagtagctgacagcagccttagatgtgtcaagctagtagtttctttgcaacacttaccgagcactggcagcagctctggtgattgtgctgtctcgctgagaagatggctcaagttaccaagtgcaacatcacttgaagcgtcaacatcactggactcagaggttcattcggtactgctagttggatctgctttgctgtgtttaacctcggccaaaggcttgtgggtgttcggatcaatgcctttctgccaaagcttctttttgacccttgagttctag

SEQ ID NO: 17675 - DNA, 234 bp, Zea mays
  Peptide Sequence Number=SeqID_61050
atgacttctagccccagaagcggcacacagattgatgagtaccgacaatacgatgctagtggtaacaaatcccgcgagaaactaggaaccctaactgactctgcgcacgcgcggaccgtccgcgccaccaccgcggaccgtccggaccgcgaaccgtccggcctcagggctggaccgtcagcactgctctttttagcgttcaacatatgccccctgccttttggtgaaagttga

SEQ ID NO: 17676 - DNA, 1497 bp, Zea mays
  Peptide Sequence Number=SeqID_61051
atggtggtcatgatgacaaggcacatcctcctattcatccaaccaaattttcagaagagattgtatgagtttgttgtccgacatttccttgcatgttgctctcaaccggccgttggagctgaaacaactgtggaaattgacatagctggtgaacagtttaatgcatcagggcgtgtcatacttgctaaaaattatctggatgtttaccgctttgactcatggggtggaacgttacttccaacatacaacattgggcagcagtttgttccgacaactttaacacttgattctggagtgactcggccaccgcctcttctggctgaagccgaccttcttagctgtatggataaagcaggaattggcactgatgcaaccatgcatgatcacataaaaaagttgcttgaccgttgttatgcaaccaaagatgaaaacacacgtttctccccgacaaatcttggtgaggcattggtgatgggttatgatgaaatggggtatgagctttggaagccttatttaagatcaatgatggaagctgatatgaaatcagttagcgtgggtactaagagtaaatcagaagtacttgagagttgtttgcagcagatgaaggcctgttttcttgacgcaagggtgaagaaagcaaaactccttgatgcaatggggacattctttgcaaggtctaataggcctataaatgaaactcaaaatccagtagaggttgtgaggccttgtggtgcatgcaatggatctgaaatgttgcttaagcgaagggcgagtggtgaatttatggttgggtgccgaagttatccacaatgtagaaacgtggtatggctcccaggatctctttcagaagcggctgtaactaatcaagtttgtcctatctgcgcaccaggtcatcttagagtcccatttgttgaccctgatttatgttggttattgtttagttttcccattgccattccgctcaaattgtatggcaactctaccacacctacaggccctgtttataagattcaattcaagttccgtcggagggatattccaccaaatttcgatgttgatcacctaggttgtgttggtggttgtgatgatatcctcaaagaccttatggagataagtaggtttggaagtcgcagccaggctgcaacaccaggtcaagtgctgtgcacctcatgtggagcgctttgcatatcacgaattgctaatacagaggctaacagggggaggaggttctacaaatgtcaagatcctggctgtggcttcttcaaatgggaagacgaagtggacaatggtacggggagaggccgccgtgggcgcggcagcagcaggcaggcgtctgcgtctgcatctgcaggacggagaggcggaggccggagaggcagaggccgtaacgctgacggcgggatgttcgtttcagcgacgggcgacaccgtgctcggctgctgctttaactgcggcgatccttcccacttcgcaaacgcctgcccgaaccggagatag

SEQ ID NO: 17677 - DNA, 312 bp, Zea mays
  Peptide Sequence Number=SeqID_61052
atgaccatctcatcaaagttcgactcactccccaactctagcgacaactctggtgaggaatttctcaccgtttgttcatcttccgggggcaacccagaacatcaccgtgacccgctcgacgagagcttcgtcaccgcgcttccggttcgtcaatcaaatttttggttcatcgtcaatctgcgaaaaaacctgatgtccagcagtaacgcggggttgaagggtttggttggaagaaaaactcgagtggatggagaacgcagttccgaaggagctatgaggatctcaactgttcacacgagcctttccaagtaa

SEQ ID NO: 17678 - DNA, 1764 bp, Zea mays
  Peptide Sequence Number=SeqID_61053
atggccacattcttctccacttccacgaaccagagggacctcgccggaggcggcggcgacatgtcgtcgttccaccactacgcctactcggacccaccagccggcggcctcatgcctttccccgccaccatcgtgtcgtcggaaggccacgtcgcgcacggcggtgacgacggcggcaggggcgcgttcgtggacgtgaacgcgagggacgggccgacgggcggcgccgagatgggcctgcagacgcagctgctcatggcgaacgccgcgtcggcggtgcagcaccaggggctgtcgcttagccttggcacgcagggggtgccggtgtctctttaccagtaccgccaggcggaggcaggcatggccgccgccgcctttctaagcccgaaccaggcgtcggtggcggcgaccaggagcgcgcagagcatctacgtccagaactccaggtacctcaaggccgcgagggagctgctggacgaggtggtcaacgtccaggacgcgatcaagcggaagggggacaagagccagcagggcaaggattccggcggcggcggcggtggcggcgagggcaaggacgccgagacgagcgacgagaaggctggcgagcacgaggggaactcctccgcgccggagctgtcgccgtcggagaggcaggacctccagaacaaagtgtcggcactgatggcgctgctggatcaggtggaccgcaagtacaggcactaccaccaccagatgcagatggtgatgtcgtccttcgacgcggtggccggcgccggcgcggcgaggccgtacacggcgctggcgctgcagaccatctcgcggcacttccggtcgctgcgcgacgccgtcggcgcgcaggtgcagtcgctgcggcggagcctgggcgagaaggacgggtccgcgcagggaggcgggctgccccggctgcgctacatcgaccagcagctgcggcagcagcgcgccatgcagcagttcggcatgatgcagcagccgcagcacgcctggcgcccgcagcgcggcctcccggagtccgccgtctccgtgctccgcgcctggctcttcgagcatttcctccacccgtacccgaaagattccgagaagctgatgctcgctaggcaaacaggcttgtctaggggtcaggtgtccaactggttcatcaacgcgcgcgttcgactgtggaagccgatgatcgaggagatgtacagggaagagttcggggcggagatggactcgcactcgtcgtcggagaacgcggcgggcaacaagggcaaggacgaggcgatatcctcggaggaccacgaggagttccagagcccgtcgagcgccgccgcggccgcagtgccactgccaggccacctcagcgcgttcaagtcggaggcgatcggtgtcatggacgccgccggcattggagcgagctccagcctcgacggcgccgtcatcggcccgtacgcgacgagcctcaacctcggcggcggcggcggcatcctgcaggaggccctcgcgcaccaccaccaccaccacggcggcgccgacgcgaggttcgtgcaggcgtacggcgacatggccggcttcggcggctacgacggcggcagcgtgtcgctgactctgggcctgcagcactgcaacgaggccggcgccggagccggccccgctgagccgcaggccctcctgtacggcagcgccggcgacttcgacttcatcagcggctccgaggacaggcagcggttcgggtcgtcgcagctgctgcacgattttgtggcgtga

SEQ ID NO: 17679 - DNA, 954 bp, Zea mays
  Peptide Sequence Number=SeqID_61054
atgagatgccgccgcctgcttggccttggttgcccccgcctcctcctccgtcggcggggggaggggacgagacaagctcgaatgtcgttcttccgccacgtggggaagacgtcgtcgattccgccgccggcgggtggattgtcggccgccattgtcgctgtcgcgcggcgggggaaggagtatcatgtcgtagctgtcgtcgagggacatgaactcaagactcccgaaacggagcaccgtcccgggctggaaaggttgctggagactacccatctggagcttgacgggaagctgttcgtcaacacgcagcaggcccctacctggcgcgccaactgtcggcgttttgaccctggggggtccctggaccgacgagtcgggcgaggcggagttcgtcgtcttccggggccgagcccgagtccgagccctagggtcgggcgaagcggagttcgtcgtcttccggggctgagcctgagtccgagccctggagtcgggcgaagcagagttcgtcgtcttccggggctgagcccgagtccgagccctgggtcgggcgaggcggagtcgtcttccggggccgagcccgagtccgagccctggggtcgggcgaagcggagttcgtcgtcttccggggctgagcccgagtctgagccctggggtcgggcaaagcggagttcgtcgtcttccggggcagagcccgagtccgagccctggggtcgggcgaagcggagttcgtcgtcttccggggctgagcccgagtccgagccctggggtcgggcgaagcggagtttcctatggcgcctgaggccggacttggctgctgtcagcctcactctgccgagtggcacagcagtcggagcggcgcaggcggcactgtcctcttgtcaggccggtcagtggagcggtgaagtgactgcggtcacttcggctctgtcgactgaagggcgcgcgtcaggataa

SEQ ID NO: 17680 - DNA, 1197 bp, Zea mays
  Peptide Sequence Number=SeqID_61055
atgtcttcgcgctcccctcatgcatcgtgtctttccacctttcgagcccccagatggggaagcccgtggttcttccgccttgtcattgttggggaaacgcaacttcgtggaagttggtacctttcagccatcgttcggcttcaaggattttcgtcaggcagcccggccgcatccccttgccggtggtcacccaagacggtgacctccagttcggtggtggggagaagcaagccaggctgtgatcttggtcccgcccccagcttcaaggatcttcgtcatcctggctggggtgggggcctggctgagccgaagctctacctcctgcacgggtcggccgaccacctcttcttccagcttctggtggtggaaaccatcctccagctctgtggaggaggcgtcctccagccatgccggggaaggcgaactgttgctgcccagctaggatgcaacattccatcctctgtcctcgctttcgtggcgaggacgggagtgagggcctgccggtgcgctttggagcggcctgcgcttgctggtgcagcattggtggacaggtggacgtcgccatcggtgtcgacatggtggcagctgaagaaagcttctccgctgtcggggccgtcagcgccgcctacggaccgacctctggctcttttggctttaatgtctggttcgcgtcccttgagtggggacgcgaacgagagccttccggtggctgtgtccgtcctgggaccatggctgctgctgcagaggtcgctggcgggtcgcccggagcttgttgccccgcaggctctccgagccccggccgggccgtccactggcgggaccagcgtcggagttgagttgccgaggccacgagccgggctgatgtcctcgggggacaactggctgaggcttcggggtgaccggccgagccgtctgctcgagccggactcctggaagagaccctggcggcgatggcccgagcgtggtgctgatgtcgtccttcgaagtggagatcctccgaccgtgtcgccgtccgaggctaggtcggaccgcgccgaaggtgtagttgacgccgagggtgctgctgctcccttcaaccgtcaaggtccgagcctgcaggatcggaaggtgatgagtgagaggggttccccccttctagcccccgagggagggtcgggctttttgccgaggcaaggccgacccttccttgatggttag

SEQ ID NO: 17681 - DNA, 468 bp, Zea mays
  Peptide Sequence Number=SeqID_61056
atgcgcctcctcaagtggtacctgttcttgacctgtggggggggtgtgagacagcaagggtgtctggactgtgcgctaaataaacagaagtgcaggggcgaaaacataagtaatccacagactcagccaaaccctacagtggacggcgggttgattcagatatttcacggggtcttttacgcaaaatgcctaggtcgaagggggccagaatctgcccacgacaacctccaatccgacccgttcgccaaagatccagcggtggacaacccacatctaatccccgccgtgtataacccatccaacgcgccaaagatcatcttcctcctatcgctcaggtctaggacgactgcgcgtcacacaggcatccgtatggcctccgatgaaccgcacggtcgcgcaagcgaggaccgccgggtaaacaccgagggggagcccggccacggttccgccaccactggagttaggtga

SEQ ID NO: 17682 - DNA, 432 bp, Zea mays
  Peptide Sequence Number=SeqID_61057
atggcgcttcctgttgacgtggctggcttgcgccctaggttgggcgacgtggaggctcctctgaagccgaggttgagtctgtcttccgtggctgaggccgagtccgagcccctgggtcaggcgaggcggaggtcgttcggcagaggacagggcggagtccgagccctggggtcgggcggagcggagttcgtcgtcttccgggacttagcccgagtccgagccctgggtcgggcggagcggagtttcctatggtgcatctggcagggcctgactgcctgtcagtctcactctgtcaagtggcactgcagccggagcggcgcaggcggcgctgtccttttgtcaggccggcctttgcagctttatgctgatgggggttaccagctgagaattaggagtcttgagggtacccctaattatggtccccgacaatag

SEQ ID NO: 17683 - DNA, 261 bp, Zea mays
  Peptide Sequence Number=SeqID_61058
atggctgattcagttaaattcagaattggacaaagtgatatttgtgtcctgtgcttgtgtgccagcgaggtcagtgaagctcttcgagttgtccgttctatttctaccgttgttggttgctcagaacgtggtcacgctgcttgctgtagttcgggggtcactttggtgccatcaccgttgtctgcgttgcaccgccttggccgatccggcgccggctcgccggtgttcccgtgcggccgtgtcgtggaccggagtttgtga

SEQ ID NO: 17684 - DNA, 246 bp, Zea mays
  Peptide Sequence Number=SeqID_61059
atggctgctgccatcgacgtcctgctcatgacagagcaacaccgcattcctactgtcacaaggtttgtggttttgtcgcactttggagtggttgtcagaagctacatgcgtctaaatggaaggaggaagctgaactggaatcctggtctgtccaagcaatcggtgggcgatgcaaggctgctagtaccagaggcgcaggcgccaggatccagcaaaaggagcagcagaagcaagcaaggaaagtga

SEQ ID NO: 17685 - DNA, 729 bp, Zea mays
  Peptide Sequence Number=SeqID_61060
atgcggccgccggcgccgcggccggagtcgaagagcgtcacggccacgccccgcgcggcgaggagcgacgcgcacacggagccggatactgcgatcgtcgggaagagtaaagtgagactgcaggcggcagcccgaacggggtggatcggatcgttcagttatcagaggtgcggacaaacctgtttggctgcatctgaaattggaaatcaacattccactcactttcctaacctgaatctgaagctcacgagagattcctacctcctgaagacggaaaatgattcctctcctccacctgacgcctcgtccgtctgtcctgactggttctgcaccccttcagaagaggcagcggaggtgtacgacatcgctgcgatcaagttccgcgagctcaacgccgtcaccaacttcgacatgagccgctacgacgtggagagcatcctcagcagcgacctccccgttgtgggcggagccaccgggcgcgccgccaagttcccgttggactcgctgcagccggggagcgctgccgcgatgatgctcgctggggctgctgccgcttcgcaggccactatgccaccgtccgagaaggactactggtctctgccccgccctgcactaccagcagcagcaggagcggcagttccctgcttctgctttacgaggctttacggctccggtggcgtgaacgtgggacttcacgaatgggcacccagcagcgggcagctaatctga

SEQ ID NO: 17686 - DNA, 1263 bp, Zea mays
  Peptide Sequence Number=SeqID_61061
atggaggatggctcggagctgcggttcgaccacggtgcgccctacttcaccgtcaccaacggcgaggttgcccgggtcgttggtgggtgggaggcgcgggggatcgtcgccgagtggaaggcaacgttcgcgtgcttcgatctggccaccggaaaatttacggacttcgagaaggagggaacagctaaaaagtatgtgggagtgccagccatgaactcgatatgcaaatcactctgtctagaggatggtgtggtggccaaatttggtgtcactgtgggcaagatggattggcttcaagatcggagttcgtggtcactagctagcctggatgggaaagatctaggctattttgattatgttgtggcgacagataagaacatagcgtcaccagcattttctgggttgactggaagaccgccacctcttgatttgtcgtcatttccacgcctgcctacagcacttcaagatatcccagttcgtccatgttttgctcttatggtagcattctcggagccattggctacggtacctgttcatggtttctctttcaacaattccaattctctgagctgggccttctgtaacagcagtaagccagggcgtgcttgcgtacctccaaacagacaatcttgggtgctgcattcgacaactgagtacgcttccaaggtaataaataatattggtccacgcaaaccttcggcggaggcgcttgctaaggtggcagaggaattgttcagagaattccaggcgactggattaagcattccacgaccaatttttttgaaagctcacagatggggtgctgccttcccagccattgcaattagtggagatgataagtgcgtttgggacaagagcacgaacttggcaatttgtggagatttctgtacaagcccaagtgtcgaaggagcagtccttagtgctacgagaggagtttccgaaatccttgaatgtttaaggtgcccgtcaagggtggttggcttttgctttgccactgatgagatcttcttctccaaaaagctacccttaagtgataatctatgcgtatggcacagcttaggtatgagagggaaactacaggctcctgagcagtgttttgtctctatagattacagctgcagcagtccgaacggctttaatccgaagcgcggctacttttcacagctacaacatacaccgttctcccatgggtatgacaccagccatggcatagaaatcacaccatatgactctaatgatgttcgaggcagaaggatggcatag

SEQ ID NO: 17687 - DNA, 681 bp, Zea mays
  Peptide Sequence Number=SeqID_61062
atgtcgagtcgtcgccatgcgatattcagaccagttcagcttcagaacagtttgcgccaccaagtgtcagggagactcgctggatacgcgctcctgcgaagcatccaagcgcatcgccgcggtcggcggcgtcgtggcgctcgccaaccccacggcggccgccatcacgcacgtgctcaacaacccggcgcgactttcccgctcgccgccggcgtcgacgacctgctcgtcgtctccatcggcagcggcgaggccgaccagcggggcgccgcctcctccgcgtcccagatcgtcaggatcgccgccgagggcgtcgccgacacggtggaccaggccgtggccatggcgttcgggcataacaggacaaccaactacatccgcatacaggcgacagggacgccgcgaggggcgagccgtggcgccgccgcggaggcggaggagatgctggcgcagaggaacgtggagtcggtgctgttccgcgggaaggtggtggcggagcagaccaacgcggagaagctggagcggctggcgcacgagctggtcaaggagcgcgaccggcgcagggccagcgccagcgcgagccccgccgcggcggcgcctgcgctcgtcaagcaccaccggccgtcggcggcgccgtcgtactcgagcctcgtcagccacaccctcgcgagcatcatgtag

SEQ ID NO: 17688 - DNA, 771 bp, Zea mays
  Peptide Sequence Number=SeqID_61063
atgcagcccggctgcacccctccaccggcggtcacccaggatggtgacctccagcttgatggtgggggaaagcgagccgggctgcggcctctgcccctccctcagcctcaaggattttcatcaccagggctggggaggggagtgtgccgagttggggtcggcccccgcgtgggcggcggcccgctccttcactcagtgatcggagggaagggcgatcgtcgtccgtggcgctggcagctgcagcgtgcctggctttcggacgcgagtggcttcggagccgctcgcggcgtcggcgtctgccacggcagcttgaagagcacccgccctgaggtcagtgctgccgctgttcggccccccggagcagaagtcgtcgtcgtcgctgctgctggagcaggtgacggcgcgccgttcgtcggtcttctgttgctccgcaggcccacccctatcgagtggggtgactcgcctgttgattatctgaaccgcttcaccaagcatgagtcgccccgtgtcaaggtgacgagtgagcatgaacagaggcggagttggctcgaaaatgaaaacctggttggccggagcctagccgggttgtccgttagcgggaccgacgctggagttgaccagccgaggcctcgggtcgggctggcgcccttgggagatggtcggccgaggccccagaggtcgaacctcgccgaagttgtcgtcgatgccgaggatgctgccgcccccttccagcgtcaagactcaagcctgcaggatcagattgtcttgtag

SEQ ID NO: 17689 - DNA, 384 bp, Zea mays
  Peptide Sequence Number=SeqID_61064
atggctgaaaggtaccaactcccacggagttgcgttcctccaacgatgtggcgagaagacggcgggtatcccccatccgggggcttggaaggcggcacctatggcaggagaagcgggcgacgcttcgccttcgccgtaataaccgcgccaaaaaagcagggaccgggaaagggggataccccaaaaaggatccttccccgtgaaggaaccgggctccgagcctccctactgatcagaggttctaaggctggccccccgaggggttcaacagccgcctcagatcgcgtgggccctacacccactactggtcagaggttcgaaggctggccccccgaagggttccacggccgcctcaggctactcgggctccgcgcccattactga

SEQ ID NO: 17690 - DNA, 465 bp, Zea mays
  Peptide Sequence Number=SeqID_61065
atggtgctcgagccccatgatgtccaaaccatccgccataaagaatacgagatagccaggcgactcggggcccatgagcatgcgtggcttcaccctatggtagaacgcttggtttatcgccgcctggtgactccttcatatggaagccactactggccgaccccttcctcgccctatatggaagaggaaaataacactattcaccctgttccgactaccgtgccaaccaccaggataaaactaacgacaataagtcacgacctcccccgagttcagcctcgggcgcaacagggagctctacctcgtccgacctcaggcctcggcctcagcctcggcctcgggagaaggtctccgcctcgcccgaccccaggcctcagcctcggcctcaggagacgtctccgcctcgcccgacctcggcctcggaccgactacgccactggggatacatcattaccctacccctag

SEQ ID NO: 17691 - DNA, 318 bp, Zea mays
  Peptide Sequence Number=SeqID_61066
atgagcgatgcgcaggcgacaggggatggtccgcgctgcgttggctgcggcgggcgcgtgaagacgctcttcgtgcagtactccccgggcaacatccgcttgatgaaatgcgataagtgcaaggctgttgctgatccctacatcgagtgcgagttcatgggaatactttaccggtctactttgatacacattgctcttgacacatgttgttggcgatgcattattgggaaacatcgtatttatattcatgttactcctgggagtgcgattttttctcaaattatctttcgatattataaggtagtagagatcaagtaa

SEQ ID NO: 17692 - DNA, 1302 bp, Zea mays
  Peptide Sequence Number=SeqID_61067
atgaatcccccgtgtgaaccggtcgcacgagaccgccagcagccgcctccgcctcgagcagcccaccacgtcttcgacggtgcggcgaacaacgagcggatctatggcacggtcgtccgggaactcgttggcgccatcggcggcggattcaacggcaccgccttcacctacggccagaccagctgcgggaagacattcaccatgaacggctccgatgccgacccgggcatcattcgccgtgcggtccgcgacgtcttcgacactgtgcgccaggctgacgaccgcgagttcctcacccgggtgtcctacatggagatctacaacgaggaaatcaacagcctcttgacacttgaaggccagaagctgaggattcatgagagcttagattacgtagaagctgaacaccggcaacgtgttcgcggcgctcgagtccctcaagaagaagaagaagggcggcaaaggcaaggcggccgggaggaggacggcgagggggccgcgcagcggcaagagccaccgcagaagaagcagttctgggctcccgcgccacttaccaccaagtcctgggcggacgtcgaggacgacgaccactacttcgccaccaccgcgtcgccacgccccgtctggggcactgccggtgagcccgccaaggaagaggacgacgtcgatgatgttgtgcgcgccgcccttcaggaggtagcaaccttgggcaacaaagttgagaaagaggcttttgcgagcttacattttctctggtcttgtggaatgaagatggaggacatggccttcttctttgctgaattggcgctgatgcaatacggatacggcttggtgacacgtctgccttctctggttgctgcttctgctgtctacgcggtcaggctcactgtcaagagagctccctctggaccgacgccctcaagcaccacactgttgtgtaccaggtgctcggaggagcgacccgcgaagggcagcggcagctggtcttcacctgttggttcagtgccggctggagggcagccaagagcagacaatggatccactacaattgaaattgctctgaagattgcatttcgtaaattttctcttgatcatggaattatggccagtagtgaaaatagtacaagaaatgaaagaaacattaagttgaaggtacttgttctaaatggttcctatcatggtgatactctgggtgctatggaagctcaagctccatcgtcttatacatctttttcttcagtagccatgtggttctctgtgccaactgcggtcttttttgtaccagccttctctttggtagcctaa

SEQ ID NO: 17693 - DNA, 4044 bp, Zea mays
  Peptide Sequence Number=SeqID_61068
atggaggcagtgcagacggtacgcgatctgatccgctttttccgcgtctcttctcccttcgccttcgccccacgcgcgcgtgcactgagtgagagaacgaacccgctgctcaacaggtcatccggtccatccgtcgtcactcggcttcaacctgacgccggcaacggcgcgggcttctatgacggggcctactctttcctcgacaccaccaaggcctgcgctacccggttcagcagcgggtcagtgacatccgacgactcgccggcggtgacgcccaggctgctgtccttgatgtccagctccagccccgacaactgctcctcctcctcagaatggcccgaccgagcggcggcgtcgcgctccaatcggtacctcttcgacgcgaacgcacaggcccggtgcgcggggtacctggacctgatgaggctggaggtggatgcgcagctgggcaggctcaggggcggtgtcactggcctggagagctacgctttgccgggcaacggccgtgcgatcggaggtgcgcacctgggcatgtcgcttgatgtcatgctgattgagattgatgagaggttcaacaccctgaagctgctcatgggctccgtgttccggcaggccaaggagatgcttggttcggtcaactcgtcggtgtctgatctgcagtcggagaatgagctgcagctggaagtgttcggtgccatcatcggagagtgcgtcagtggcctgcaggaggagctagagaggaagctgtacgagcagattagcatcacaaacaccatgggcaggaactggaaggaagccataactcagtttgccgccatgcgcgaagaccttggcgctctttgtaagctactactgcctttagcaccagaagctcatatttctaatggcaagaatgaaagtccaggcagcaagagtaacagatggaagtacaatttctttggaaagaaatccagagaggatcgttctccgcgcgctgaggacagcaagagtttcaggaagcaaaaatcatttggtgcaaaggatgtcatctcagaaaagtctgactttcaccatctcaatggtatgactagagagcaagtgataacctattttaagtctgagatcagcaaaatgaaaaggatgcacgaatcagctttgcaagagaagaccgaagaactgttcaggctcaaacgggagaaggggtcacattctctcaagaatgacatagaatttgaacctttgagaaagaaaattccagagcttgtattgagaatggaccaaatcatttccaagaatataaaggtacctgcaatctgcatgacccatgatgaactcgatgaaagatgcagattgatgagcagaatcgatgctttgttctatgaaaatcagcattttcgagggttgcttgcagacaggatgaaggacgttaaggcattatcatcccagctatctgaagccagtacagaactgtcaatgcagatgctgtcggaagaagagctcctgagacaaattgataaagttagagaagactgtgaggacctccgaattgaatgtgatgttagagaaggaatgtaccaaactgttacaaaacatttgcttgatgactataaggacagtatggatggtgctgctctaaatcttagtgcaaaattgtcttcacttgaatctgcagtctctgaaaaggataaggcattatgcatatataacgaagaaaatcacaggttaaaggagaagttagctgagttagaaaaggaacgcttgatccacggtgaccaggaagttccagaagccataaaacaagatagcacagaaattgttctgcgtgacattgaggttgagccttgcacgtcaccgagaagatcaaatgtgaacaattcaaggtatgacgaacttgtgaaacttgactcaagcttagagcaaacgtcatgtgtcctcaaggaaatgaacaacaaaaatatggatcgcagtagtagcctcagtaggaatgagcaagagaagcagctggagtgcattttagtatctatcatgaaactatcaaaagattttgtagagatcgagaaaaagatgtcagcggaaagaaccgagaacaggtcagaggaactgagcgatcactgcaaccacatggtcagacaagccatggtactaacaaagatagggctttggtataaacaaatgattgaagcgaggcgttctgagctccaaaaggctgaagccaaggttatggtattaggcgacaagatcaccgcacagttgagccttctccgaaagatatatttagctctcgatcattactctcctaccttgcatcagcatcctggtctgctagacgctttcatgaagacgtgcaagcttgttgcagatctgagaaccggcactcggcaggttcttcccctggcatccggcactcggcttcttcttgccccggctcccggcgcggcggcgcccgctcctcctccccccgctcgcccgctgcaggtcctcccccgcggcacgcgcccgctgctgcagcctgcagctcccaccccaactggcgattgcagctcctccggtcctccccctgccggcgccgcctgcgagctgcacagctgcagctccccccctggctggcagagctgcagcttcaactctcttgaaggcaaaagcttgcatgctctgcgggcgccgacgccgctcgttgggagcactaggattggcttcagttcggggctccgcttttgctccaacagagtcctcagagggttaactcccattggcgcgatgaagtcgtataggctatcggagctcagcgacaccgaagttagcggcctcaaagctcgtccccgcatcgatttctcatctatttttggcacggtgaatccaatcgttgaagatgtccgtgtgagaggtgatgcagcagttaagcactacacagaaaagtttgacaaggtcatgcttgatgatgttgtcgtctgtgttagcgatcttccagatgcagagcttgatccagctgtgaaggaagcctttgatgttgcatatgacaatatatatgccttccatgtttcacaaaaaatacctgagaagacagttgaaaatatgaaaggcgtaagatgtaagagaataactagatgcattggttctgttgggctgtatgtcccaggtggcactgcagtcttgccttcaactgcattgatgcttgctgtgcctgcacagattgctggatgcaaaactattgttcttgccacaccacctagccgtgatggtagcatatgcaaggaggttctttactgtgcaaagaaagctggtgtgacacacatattgaaagctggaggagctcaggcaatctcagcaatggcatggggaactgcatcttgcccaaaggctgagaagatttttggacctggtaaccagtatgtaacagctgccaaaatgattcttcagaacagtgaagctatggtatctatagacatgcctgctggcccttctgaagttttagtcattgctgataaatacgcgaacccagttcatgttgctgctgatctgctatcccaggcagaacatggcccagatagtcaggttgttctagttgttgctggagatggtgttgatctgggtgccattgaggcagaagttagcaagcagtgcaacgcgcttccaagaggtgaattcgcttcaaaagcacttagccacagcttcactgtgttcgcgaaagatatggttgaggcgatatcattctcaaatctgtatgcccctgagcatttgatcatcaacgtaaaggatgctgagcagtgggaggagttcatcgaaaacgcagggtcagttttcttgggccaatggaccccagagagcgtgggcgattatgcgagcgggacgaaccatgtccttccgacctatggttacgcaaggatgtacagcggtgtatcgctgaactctttcctcaaatacatcactgtccaatccctaacagaggaagggctgagaaagctggggccgtacgtcgcgaagatggccgaagtggaggggctagaggcgcacaagagagccgttacccttaggctgcaagaggttgaggccaatgtaactgtctag

SEQ ID NO: 17694 - DNA, 714 bp, Zea mays
  Peptide Sequence Number=SeqID_61069
atgacgcttcctgttgacgtgtcgggtctgtgccccaggcggggtgacgtggaggctcctccgaagccgagggcggagtccgagccctggggtcaggcgaggcggagtttcgtcgtcttccgggtcttagcccgagtccgagccctggggtcgggcggagcggagttcgccgtcttccgggtcttagcccgagtccgagccctggggtcgggcggagcggagttcgccgtcttccgggtcttagcccgagtccgagccctggggtcgggcggagcggagttcgccgtcttccgggtcttagcccgagtccgagccctggggtcgggcggagcggagttcgccgtcttctgggtcttagcccgagtccgagccctagggtcgggcggagcggagttcgccgtcttccgggtcttagcccgagtccgagccctggggtcgggcggagcggagttcgccgtggcgcctttggcaaggcctgactgtctgtctgactcactctgtcgagtggcactgcagtcggagtggcgcaggcgacgctgtccttctgtcaggctgcaactggcgcgccggttgcttgacgcgtgggcctgggcttccaagctggcgtgtcagaagtcggagaagcgcgtccacctggcgcggttgcaggccgtctacatggttgcctgccccttccgcccgttggtctgggcgaaagtggggggtcgcttgtaa

SEQ ID NO: 17695 - DNA, 477 bp, Zea mays
  Peptide Sequence Number=SeqID_61070
atggcgctccacaagctctgtgacgacggcggcccccagctctcttacggaagcaggcgacgtcagcaaggactcgaccgctccaacagctgtccctccgccaggctccgtcgcacctccgacagccacgacatcacgccagcaaggtgccaagacctctccggctgccacattggcatggccttcttagagagggttggccgcgcgggaccgaggacgggacaggcgctctcttggggccgctcgcttccctcacccgcgtggacgcttgtaacccccctactgcaagcgcacccgacctgggcgcgggacgaacacgaaggccacgggacttccacctctctcacgctcgactccggccacctcgcctctccccccttcgcgctcgtccacgcgctcgacccatctgggctggggcacgcagcacattcactcgtcggctttgggacccccctgtctcgaaacgccgacacttag

SEQ ID NO: 17696 - DNA, 1011 bp, Zea mays
  Peptide Sequence Number=SeqID_61071
gtgaagctggtgccgttcaacccggagtaccaggacgagtcggtgctgtggacggagagcggcgacgtgggcaagggcttccgctgcatccgcatggtgaacaacatccgcctcaacttcgacgccttccacggcgacaagggccacggcggcgtgcacgacggcaccaccgtggtgctgtgggagtgggccaagggcgacaaccagagctggaagatcctgccctggggcgacgaagcctacgccgcgggaggcagcagcgccgccaacgcgccccgcttcggcggcggcggcgagcccaccgtccgcatctactgcaaggccgacgaggggttcagcgccacggtccgcaacggcgccgtgtgcctcgcgcccaccaacccgcgcgacgagtaccagcactggatcaaggacatgcgccacagcaacagcgtcaaggacgaggaagggtacccggccttcgcgctcgtcaacagggtcaccggcgaggccatcaagcactcccagggcgagggccacccggtcaagctggtgccctacaaccccggctaccaggacgagtcggtgctgtggacggagagccgcgacgtcggccacggcttccgctgcgtccgcatggtcaacaacatctacctcaacttcgacgccttccacggcgacaaggaccacggcggcgtgcgcgacggcaccaacatcgtgctctggaagtggtgcgagggcgacaaccagcgctggaagatcgtcccctggtacctcaccttggtcgatggccaacttgtatgttccgggcttcaaaatcttagcgatgatgaagggcccttcccagggaggagtgaggttgtggcgccctcgggcgtcctgtcgcagacgaagcagcaagtctcctacttggaagcctcagggccggacgcttcgggcgtggtagcgccgcagcgactgctgtcgtcgtacgccctggtcctcggggagccgtattctaagtccgtagggaggacggcctcggccccatag

SEQ ID NO: 17697 - DNA, 294 bp, Zea mays
  Peptide Sequence Number=SeqID_61072
atggcgcgcgaccagggcgagcaccggcagagagacgttcggccggcgactgctgtcaagatggctaggccgagcgcgggaaagagggagaggagacgcacggcacagaaaaaggaacaagggcggcgaccattgaacagaggggagaaggaggggcttgagcgggtcttccagggattttacgtacatgaggatcaagataagcgtgagaaatttctagagtcaaggctggacgtgcttggagaaatatccaagggagatgacgtgcgggctctaaagaaaaagaagagatga

SEQ ID NO: 17698 - DNA, 108 bp, Zea mays
  Peptide Sequence Number=SeqID_61073
atgcgagtgcattcccgtgtcagtacgttaattaatcgcgtgatgcggaagatgagccaagtcgaccccaagcgcgggctaatccgcaggatgaagctgatgaactaa

SEQ ID NO: 17699 - DNA, 648 bp, Zea mays
  Peptide Sequence Number=SeqID_61074
atgcagttggcatgcaaccacgccaagtgggtgctccccttcgactccaacgcgcctagcatggaagcccaggcccacacgtcatgcaaccggcgcgccggttgctacgtgcgagcaactgcaccgccactcgcaccactgccgtgcctcctcgactgcggaaccattaccgcgactcgaggcaaccctgtgtatgacccagcagtgccagccaggcgcgacggtcaatacggccaaaaatgggccgggaggtccagggtcctcttacagagggttggccgcgcggggaaggacgggacggcgctcgcgcaaggccgctcgctccctcccgcgtggacgcttgtaaccccctactgcaagcgcacccgacctgggcgcggggctaacacgaaggtcgcgggttccacactcccatgcctgtctccctccggctgcttctccccccttcgtgttccgcctcgcgccgacccatctgtgctggggcacgcggcgacaatttactcatcggtccagggacccctcgggtttcgaaacgccgacacccaccaactagccgttaccagcacttttctgcgcatgggcgcaccggacagtccggtgcgccaacggtgcgccaccggtgcgctaacggtcaactccaacggctag

SEQ ID NO: 17700 - DNA, 1485 bp, Zea mays
  Peptide Sequence Number=SeqID_61075
atgcagcccggccgcatcccctcaccggtggtcacccaagacggtgacctccagtttgatggtggggagaagcgaaccgggctgcggcctccgccccgccctcagcttcaaggatcttcatcatccttgctgtggcggaggcacgtcgtgcgtcgcgagggcggcgctcatgttctgggtggccccggcaagggcgaggacttgccggtgcgccttgaggcgcccggcgcccgctggggcggtgttgaggtggtggcagccggagaaggcttctctaccgacgagattgccaactccgcctgcacccccaggcctccgtccttcggcttgaatggctggttctcgtccttcgtgggcgagagccctcctaccgcagcacccgcccggaagctgttgctgcagctgttctgccacccggggcggaggtcgttgttgctgctgccggagtgggtagcggagtccctcggctcggtcggccttgctgtccgaggcttctcttggttagttaaagggacccctcggccgctcttcgatgagccgaagccggaggttgcggtgtcagcacggacagaggcagagttggctcgaaaagaagatttggtcggccagagcctggccggttcgtccactggcgggaccgacgccggagttgagtcgccgaggccacaagccgggctgatgtcttcgggggacagctggtcgaggcctcggggtggccggccgagccgtctgctcgagccggattcctggagaagaccctggcggcgatggccagggtgtggtgctgatgtcgtccttcagagtggagatcctccgactgcgtcgccgtccaagcctaggttagaccccgccgaaggtgtagttgacgccgaggatggggggcgcccgtggttcttccgccttgtcgtcgttggggaacgcaacttcgaggaagttggtacctttcagccatcgttcgacttcaaggatttttgtcaggcagcccggctgcatcccctcgtcggtggtcacccaagacgcttcaaggatcttcgtcatccttgctggggcggaggccgggctgagccggagctctacctcccgcgtgggccggctgctaggatgcaacattccgtccttctcctcgctttcgtggcgaggacgggagttaggacctgccggtgcgccttgccaactgtcggcgtcggtggagaggtggacgccgctgtctgtgctgatgtggtggcagctgggggaagcttccccaccgtcgaggccgtcagcgccgcctacggaccgacccccggctctttggctttaatatctggttcgcgtcccttgagtgggaacgtgaacgagagccttccggtggccgcgtccgtcctgggatcatggctgctgccgcagaggtcgctggcgagtcgcccggagcttgtcgtcccgcgggccctcctatgtggggggttgtttgcacccgcgggggcggaaccggagttccgtttgtaa

SEQ ID NO: 17701 - DNA, 165 bp, Zea mays
  Peptide Sequence Number=SeqID_61076
atgggcgggggcctcctggcagcggcatcgaccctgaggtcagtgctgccgctgttcggccccccggagcagaagtcgtcgttgccgccgctgtcggagcaggccttccccctcggagtggggtcgttcgtgcctgcggagggggaaccggagttccgttcgtaa

SEQ ID NO: 17702 - DNA, 558 bp, Zea mays
  Peptide Sequence Number=SeqID_61077
atgaagaatgtgtcggcgccagggggaggcgatgatgaggatcctcgtctccccttcaggcaggtcaagggaaacaccgtgtacttggagcagcaggaaggccgcaagaagcgacgtattgatagagcagcccgagcagcggcagtaacagcaacagccgctaagcaggccaagcgaggagatcagccacagactccttcagatcagattgcttaccgagttcgtcgcctcacctctcggcctcgctcctccactcgcaccactgctaccactccaccacccacttcacctgctcccgtcactcctacgccatccactacctcagccatacctaccacctccactactccagcttccactgctccttccactcccctttccgctccacctatcccacctgctcgattccgggagcgcgatgagactgaagtgcgaccacttgctacggatcccagactgtttgatcttcagcgtgctacagcggcacagattgctctgcgagtgcaccggctcttggatctccctgccttcgtgctagcagccggtgccgactctgag

SEQ ID NO: 17703 - DNA, 291 bp, Zea mays
  Peptide Sequence Number=SeqID_61078
atgtctacctggaagactcacacgagagatggaaatccaggcagaacaggagacggctcacgggcaagcgaagaaaatggaatttgggcacttggctcggaaacgatcgctcaaaacggggatttgagtgaaattgaagcctggttttatcggattggcgtgaaatttggcgaatatgttactggaggtgttgtgaaggtgcctgaaaaatttgggttcaatcagatcatttttggctggtttgggcatttcaccgaccatgtggtgtgcgaggatttagggtttcggtga

SEQ ID NO: 17704 - DNA, 333 bp, Zea mays
  Peptide Sequence Number=SeqID_61079
atgacgcagtggcttacccggtctacgctcgccggcggtcggagggagtccggcgaccgtggactggcctctccggcgaagcaaactttgattcctcgctcggggagcttcaccgaggtgtgctcagtcctctccgagggtcggacggggttgggaaaggcttggttggccggtctacggtggcaggggctcgggtggccgtggacacgctgtgcacaggcaaacgccggtgagtttgagctccgggggtgccctaggtggtatgccacatttttggtatggaacttaagtggttttggtgccgtcttcaaggtgaacacggtggatctttag

SEQ ID NO: 17705 - DNA, 276 bp, Zea mays
  Peptide Sequence Number=SeqID_61080
atgtcgggagatcacaccaagaaggagatggtgatcggcgggaacaagcctacaagccccgccaaggccacaagccatgggaaggctccatccggggagtccggcaacaaggtgaagggatccccttcacacgacaagtcgcgtcggagcggtgtcacacccggttttagaagaggttgtgcactttacccacaagccgtgattccctttctgcccggagatcatgactctccattgatcactaccaaggtgacccagcagggcatcactacgtag

SEQ ID NO: 17706 - DNA, 1005 bp, Zea mays
  Peptide Sequence Number=SeqID_61081
atgaatcctcagcacagtttcagagcaaggagttcagcccaggaaggtgatcgagtggtccttctaaatcctgggacgtcatctgaagggcagcaggataatccaagcacagcaagatcattttcttttagaaaggtcattaactcattatcggcaaaaaggacccattctcttccagtaacgcctgtaggaactactgacaaggctgcatctcctccaaatcaattagataccctgccaactacaacttgcattgttgagtacctgacagtccctgaagatggaggcgaagatattcctgaagaagaggcagtctgcagaatttgttttgttgaactcaacgaaggaggtgaaacacttaaaatggagtgcagctgcaaaggagaacttgcacttgcacaccaagactgtgctgtcaaatggtttagcatcaagggaaacaagatatgtgatgtctgtaaacaagaagttcagaatctgccagtgatgttactgagaataccaactcaaactgcaaacaggcgggtagcaaatgctgctcagcagagagcagctcaacaatacagattttggcaggacattccaattctggtgatggttagcatgcttgcgtacttctgtttcttggaacaactcctggttactgatttgcagtcacgtgcactggcaatttcgttgcctttctcgttgtcgaagagctatctatgggcgtatgcttcattccagtttgctatcgttatcctgtttgctcatatcttctacaatgtgttgaaagtgaatccagtccttgcagtcttactctcctcattcactgggtttggtattgctattagtacgaactctctactagtagagtatttgaggtggagagctaggaggaatcagcgtttggctcagcaggctgccaatgctgcacagcaccaagaatctggaaatgatggtggaaatgacaacgatgacgctcagcaagggcacgatccaaattctgggaacaatgctgtgtga

SEQ ID NO: 17707 - DNA, 639 bp, Zea mays
  Peptide Sequence Number=SeqID_61082
atggacgagagttgcactcaactcctctcaagtgatccaatgatcaacttgaataccacgccgtacgccgtcggcaaaattcccgagagcggcgtcttcgggtcgaggcagcctggcgcaccggacactgtccggtgcaccaccggacagtccggtgcaccaccggacagtccggctgctcaggcgacacagacggtctcgggcccccatgcggtggaggtgatgaggaagacgctcgacgacctccgggctgagcaacgcgccggggcccagcacatcgccgcctcggctgacgaggcaagtacgacactggtgccattgggggtgagtcccatcacggcgttggtgcggctgacgtccatcttcgacgcgctcccggtactggattccgctactaactgcctccaacgtctggatcagattcttggcgcccgcctggaggctgagggcagcagactctaccggtcaacaatagagtacgtcttgacatgcttccggagccacgacccggctgtctccttggggccagtcgttgcaggtccggtggtcgatactgaagacgctgcccgggtgggcgtgcagggtgttgtggacatggtggtcgggcgcttccagcgggatcctactgacgatgagtag

SEQ ID NO: 17708 - DNA, 345 bp, Zea mays
  Peptide Sequence Number=SeqID_61083
atgaacacctccccgtggccagcccaactcaggttagttccagtgtctctgtcgcttgttctagcatccctaggccctcatcatgctcgtcgacccgctcaattgaactgggttgccttagatcaccatgaacgcttgtggtcgtccgccttacccgcggtcaccatggtcaggacgtttctgtgcgccgttcctggaattaacttaggggaagtgttcggtggaggttcaaatgtgttcctgtcgcccgggagctccagccatggcgttggccggccggaattggctcgccggggtgcggcgagagctgttcctcgtcgtggaccttggtctgcgaaggaatag

SEQ ID NO: 17709 - DNA, 345 bp, Zea mays
  Peptide Sequence Number=SeqID_61084
atgaacacctccccgtggccagcccaacttaggttagttccagtgtctctgtcgcttgttctagcatccctaggccctcatcatgctcgtcgacccgctcaattgaactgggttgccttagatcaccatgaacgcttgtggtcgtccgccttacccgcggtcaccatggtcaggacgtttctgtgcgccgttcctggaattaacttaggggaagtgttcggtggaggttcaaatgtgttcctgtcgcccgggagctccagccatggcgttggccggccggaattggctcgccggggtgcggcgagagctgttcctcgtcgtggaccttggtctgcgaaggaatag

SEQ ID NO: 17710 - DNA, 1608 bp, Zea mays
  Peptide Sequence Number=SeqID_61085
atggtgtttacttggactgttaggaatttttttagagttactggtttatacaatcagcatgacagaggtgtggtgtggctaatcgttgctcctgattgctactttattcaacacaatgagcgggtgcacatgatattctatggcttcgatctactaagtttgcaacacttccagggacatttcattgaagctgatatgtttgctccttgggatggtcaggaattaacccagtttcgattttctggactaccaatatattggcagcagtcacatggcctgaacagtctattatttttcagaaagctcaagtattcatcatcagttgagatattttgtggtgcacagttttcatttcctaatattctattgcccaagtcttggtcacaggagttagccaccaacatagaaagacatttactaccagaaatgctagaagtggccaatggctatatttttcatgagcttcatctgatgcttgcctctattggagtgacacatatgatcagttgtggtaaatatttgatatggatcattggcttgctaactccatgggatccgggcagagtggtcttcgacctcaagttcgtgatgctttggcttgaggcattgacattgttccaagacatgcagttacaacgtgtggagcctgacaagttctttgttatcactctcctcacatgctatgccaacatcggtgcttttgatcaatttgaatgggtccattggtatgctgaagacaggaatatgaagattgatgcagtctgtggaacaacattgatggagatgtgctcgaagtgtgggcatgttgacaagtcacttcaaatcttggtgcagatgcaaggcaaagatgctgcagcctggactgacatcatctgtgatctgaccacaaatggtcaggcaagcaaggctcttgaactatttgaagagcagccgagaagcaaaacaaagcctaatggtatcacgttccctggagtactgagtgcatgttgccatggtggcttggtcgatgaaggacagaggcatttccaagccatgaaggaggtctatcaaatagagatgagaatcaaacattatagctgccttgtcaatcttctaggacatgctggtcaccaggatgaggaggctgcaacgtcaaacagcacagcgcaaattccttgtacttttgagcggtgcttgcaattttcctgggatcctggtggaagtaatgctatacatcgacttgagggcaagtcaatttttaagaaggggagaatgttagagaatcacgcgaaggatgaaaggaagccgaactcatgcatactgttgagaaaccctaatgaagggttatgtgggcaaataccgaatatagccctgagggctatcgcgtctctatatatagaacatgtacccttcatatggaagagagaagagaaagaggccagaggcccaaccctacaccgtgtctattgtgtttcctctgtcgtgctaatgggaagggagacgggtcttccacaacttctcgcgcctctactgctgacgggagggaagggagcggatctggtgatccgtggtaacgtagttctcaacacgttatcagcacgctctacctcaacgttgctacggatttga

SEQ ID NO: 17711 - DNA, 903 bp, Zea mays
  Peptide Sequence Number=SeqID_61086
atgtcctacaatgggtccgcccccgagccttctgatcttaacaggaaacctgcaaataataatcgattgatggataatcccatattgttttcccagaactttgacaagattacacaccgtgttcagagtaaaaacaaggatcaggtcaggcattactattatcgtcttgttcggcgcatgaagaagctactaggtcctaggttctcacttgatgcaaaaaactccaaggacaccattgctactatgcttcactgggttgggatcgagatgctcacgatcaaggtgcggtcggtaatagtagcttccccaccgtcctcaattgcgtcgtcaacagtcaacacgcctgagactcagagaccttggacgagattgtatcttcttttcagttgtgttgatttggagctgctgcaggagcacgtcgtcacggcgctttcagtggagagctactacaggagtgtcctgtcgtgctcccacatgcgcttgttgcagcgtttgacaacactgataaagatttctaggctatggaattacttcgtccttgaaagggaaatgtgcccttgggccatttctaagtattttggtgattcagtgccaacacaagtggacttgtgcaaagtgatggacaaagtgcaaatcaagtctaaaggagaaatcaaattgaaaaagatggctttgtttagccaaagacagctccgtctgggtgcaccggactatccggtggtgcatcggacagtgtccggtggttcaccggacagtgtccggtacgccaggctggcgactgtcaattggctgttctcgggatgcgatcaacggcgtacggctataaatcaccggactatccggtggtgcaccggactgtccggtgagccattcacaggcgaagtcgtcgctctcgggaagtga

SEQ ID NO: 17712 - DNA, 987 bp, Zea mays
  Peptide Sequence Number=SeqID_61087
atggatcccgctgccgttaagtttctcctcgacgagatcggcaggcttttcgacgagcagaacgcgaagtgggacgcaaggttttctcagtggaatgcgaagcgggagccagaaccgtaccttggagacgaagttgaggcagaggaagtagcggccagcgatctgcgtgaggcgcgcgatctggaacgggaagaggtcgagcatgcgaagctccacgaagatagaagccagggagcggccgatgcggggcgagaggtcgcgctcgcggcacgcttgcttgccgctgatgcgtgcgcagccagaatcgtcgacgttgctgcgcccttcgactcctacgtcccggcctacgccgctcagtttgacggcttcaacctcgaccacgcggccttcctcggcaacggggccaactccggcctcatgggctccgccttcttcaaggaaagagaggaggcgcgcaggtgcatgccctcgcaggacaagctcgtcatcgacctagatccgccagacaacatagagacgtcgctttcggagtcagccttccacgatgttcccggcgccaactacatggaggcgctcaccacatgttcaactccgggcctcaccgagcgcgccatggacgagctcatcaggatggcgcaggccggcgagcgcctgtgggtcaatacgggtggtcgcgaggtgctccacgtcgacacgtacgacagcatcttcgccaagcccggcggctcgttcctcggcccagacgtgcacgtcgacacctgggtcgtcgcgctcgggccgccttccgtcggaatgcctcatcgccgacatggccgatggctcctccaaggtgatctgggtcgagctggagatcgaggacagggtttccatccacctgctctggagctggacatcatgtgcagggcgcaccaagtggtggaggacggatacaagtacttccccgaccaccagttcgtcaccttcttcactgcccccaactaccgctag

SEQ ID NO: 17713 - DNA, 396 bp, Zea mays
  Peptide Sequence Number=SeqID_61088
atgtgggggcaaagttcggaaaatggatattggcggtggtccagaggtgccaaaggttcacaaatagccaataaaaagaccaagaaaagggttcaacaaaaagagcaagggataaccgaaggcagccctggtctggcgcaccagactgtccggtgtgccaccggacagtgtctggtgcaccaccggacagtgtccagtgcaccagggtactccaagctgaactcttcaccttcgggaattttcagagggctccgctataattcaccggactgtccggtgcaccaccggacagtgttcggtgccccaaggaagagcaactctgaactcgccagcttcgggaatccactccgctataattcaccggacatgtccggtgcacaccggactgtccggtga

SEQ ID NO: 17714 - DNA, 450 bp, Zea mays
  Peptide Sequence Number=SeqID_61089
atgggcaagaacaacaagcgcaagcgtgagccgactcctccatcggaggagtttggtgactcggaatactcagaggaggagttctcctctgagtccgaggggtctccggctcccatcccccagcgtgagtcgtctgatgactcagacgactcccaggggcttgcggcggaggtctggacgtatatccgggccgtcgagcgctctgggctcgaaggctcggatgagtcggagttcccctcggaggaggaggactcggacggcggcgagggcgaggaggacgacgacgacgacgatgacgacgacgacgacggtggcgacggcaatggcgacggcggtggcagcggcgggggcgacggcggcggcgacgggagcaagggcggcaccagaggcggcagcagcgtgggcagcaccgggggcggcggcggcggcagcagcaaggccagtggctaa

SEQ ID NO: 17715 - DNA, 498 bp, Zea mays
  Peptide Sequence Number=SeqID_61090
atggcatgggcgacaatacgctcctctaaccacgtggataagtcaacctgctccaacagtgtctccggttttctgatcgtgcagacgctcatcatcgacatcgagcccgacgaggtggtcaagcgcgccatgaacgacatcaacgcggcggcgcggcggcgcgtggcggcggcggagcgcgcggaggccgagaagatacagcaggtcaagcgcgccgagggggaggccgagtccaggcacctggccggcgtcggcgtcgcccgccagcgccaggccatcgtggacggcctgcgccggttcgtgcccgacgagaagtccgtcatggacatggtcctcgccacgcagtacttcgacaccatcagggatatcggcgccacgtcgcgcgccgccaccgtgttcatcccgcacggccccgccgcggtgcacgatgtggctgcgcaggtccgcgacggcgtgctccaggccgcggcgtacaacccctacgccggaaccaagtga

SEQ ID NO: 17716 - DNA, 144 bp, Zea mays
  Peptide Sequence Number=SeqID_61091
atggccagtagcttccgtgaagttggtggggaatgcgaccgcgaggttccgcgggcatcatcgcaaatccccgtgtccagagtgaagtttagaatagaaagcgagatgagaaatgagacattgaagctgcgggagatagactaa

SEQ ID NO: 17717 - DNA, 546 bp, Zea mays
  Peptide Sequence Number=SeqID_61092
atggagaaagggaaggtgggggagaggggagaggaagggtcgatggtttcagacgcggaaggaggcgaggagttgggcgcgtcgggcggctcagccggggcccagggtcgggcacgtcggcgcggcgctggcgggtgggcagcgcaggcgcgcgcggatggtccgccaggtgcgggcgtggctagagggcgacaaggcaaatcgtttcttacctccacggtgcaaccgacaggcaaggaggcgagacttggaagcattgacatcgttgactatgtgcctaaggttaaggtcgtcgacgcgcgctcggacgcggacttgggtgaaccgttgtcgtcgaggtctatttgggcgaatgccgccaaggcgagcttcactggatcaaacacgcagcaccagcgacgcttctctccagtcgaattgccaattgatgaacggtggaagggcatcaccatcgctagggttagggattcgaggacaagggagcttaggaaagaaaaaaggggaccaatggtggatagaagggaaagggaggcgagggcatattag

SEQ ID NO: 17718 - DNA, 345 bp, Zea mays
  Peptide Sequence Number=SeqID_61093
atggagtctaccaggtttgatggccgactcggcctcaactcattcatacaaacaggacaggtgtacacgtatgaaatacccatgggtaatcaggttcgaattattgcttcccaaacccatactcgtttacccaataggtggagattttgtcccatatccatacccatggggacaatttttgtcccatacccgtaccctaatagagaaattccccacgggttatcgggtatcgggtccccattgacatctctagttacagagtgtaaaactgatatgtcagccgtgctcacggttaatagcaacatggaccctcacatgataattgaacttaaagatagagaataa

SEQ ID NO: 17719 - DNA, 228 bp, Zea mays
  Peptide Sequence Number=SeqID_61094
atggcttcgtccacgactgccccgagggtcgtgccgcgactggacggctccgacccggacttcgacgaacggcgcgggcacgaccggatctgcgacggagtgcacgagggcggccgggtctgtggggttgcggccggatctgcggggttacgccgctgtagccagatctgctacgtagcagaagggcagacacgcgcaggtcgtctcttctgcgcctattcgaggtga

SEQ ID NO: 17720 - DNA, 258 bp, Zea mays
  Peptide Sequence Number=SeqID_61095
atgggatgggaggcgggggcgcgtcccgacgagctgagcggagcggagtggagcagcgagagtgtgaatggggtcgcgggcggggttttgagctatgtccaccaccccattccaaaagctaacaatcaaagcgtgaggctatttaaattgcatggtcccagcgacaccgccgcaataagtggggcccccggaatcgggccccgccagccagccacggcgctcgcgtgcatccctgtgggggccctagcggccgagtag

SEQ ID NO: 17721 - DNA, 564 bp, Zea mays
  Peptide Sequence Number=SeqID_61096
atgccacagcggcgcatcacatgcgggaatgggaatggcaacgggaggaatgggaatcacaacacagattacacagatgagaaataccacagcatagcacaacatgcatcggacaatataaataccttgtcgagaaagaacaatgggatgagtaaggatagacaaggttatccttcaccaaggacgctgataaccccaaacaaaaattttacgtcctccctcatttacggcactcagtcgaacgagttcaatctggaagctacccagatctccatggccgttatgcgccaaatgcaaccagagaaaggtgagcaactcaccgcccttattgagctgccgcgcgtgcacgtctccacgagatttgccggcggcgtagaggaggatccccatccatgcacgcacaagaacctgcagcgattcgtgagagtgcacggcttcttccgcaagccctcggaaaagagacgcagctgcagcacaggatcgtctaggcgattacgtcacgtgcgctgcagcttctcagagtttattcttgtgagccgtagacctgctggctgctgtggccac

SEQ ID NO: 17722 - DNA, 354 bp, Zea mays
  Peptide Sequence Number=SeqID_61097
atgtcaacaggccgttgggttccgaccgttggagctctgacctgtgggcccgcctggctgtccggtggtgcactggacaggccctgtagactgtccgacgtccgttgcgctcgaagtagccgttgctccgctgtcacaccggacagtccggtgaattatagcggagcgcctctgagatttcccgaaggtgaagggttcagcttggagtcccctggtgcaccggacactgtccggtggcacaccggacagtctggtgcgccataccagggcacacttcggttgtccctgctctctttgtttgaacccttttcttggtctttttattggcttattgtgaacctttggcacctgtag

SEQ ID NO: 17723 - DNA, 1029 bp, Zea mays
  Peptide Sequence Number=SeqID_61098
atgtaccgtcggcggcggcgggcggtctgcttcactcgagccagatctccggcgaacaagagcacggcggggcgacgagcagcaagacggcggaaagggcggccagggttttcgcggagcgcggaaggtgaagttcaaaaagcgccgacccccgcccccttttataggcagggcgcggcgcttcgggaaacctgcaatccaacagtacgccgtcaatcaacggtcatatcaaaaacccccgcggaaccacttcgagcgagggcagcgtctccgccatctagcgacgtcttcggcaccaggtctacaggaaatagacaccgaagcagctcctatgttccattgaagaaagaagacaattcaattttgaatgataagaaaaataccaagattgatggaaaagctgctttgctaggatttgtgcgggccccatggacaattgcaacttacattgttgaaggggggatgaccaacacatacacaaatataaagaacatgtgccatacagctcccgatgtcttgagactgcaactagcacagtgtataaaactgctttacttggtcataatgattgtgaataggattaagaaagagtgccctcatgtaccccttatgttgtatataaatggaaatggaggtttacttgagcgcatgaaggacacaagagttgatgttattggccttgactggacagtggacatggctgatggaaggaagcgccttggtaatggaatcagtgtacaagggaatgtggatccagcatttctgttctcaccattaccagtactgactgatgaaattcgtaggaggttgtatttggttgcttgcattgagttggacgtagtcacttctttgttactgtgggttgtgaaagcagctggtacaaaaggtcatatacttaacttgggccacggtgtacttcagaaaacacccgaagaagctgtagcacatttctttgatgtcacaaggagcttgagatatgacacccatttccaaggttctgttgctgaagaattgcagcctgttgcttga

SEQ ID NO: 17724 - DNA, 186 bp, Zea mays
  Peptide Sequence Number=SeqID_61099
atggcgcacaacgccgccgaggggacgctacgacggggcggtaccggcgaggacgcgggtcaaggggaggaggacggagcggtgccaaacttccctgtgcggcaggatggcagagggaaggaaggaggcgatggccggagatctcgactgaagaagtctatgaagcacagtgttttagttagctaa

SEQ ID NO: 17725 - DNA, 1701 bp, Zea mays
  Peptide Sequence Number=SeqID_61100
atgtcgggcgtccctgcatctagcaaggcgccggaggcaacgacaggcgccggaggcccgaagtcggcgaaggcggtgccgccgtccagcggagtggcggaggtggcgaaggcggcccgagcgttgccgttgtcgggcaaacgtgtcgccgacttcgccaccgacattagtgtggaggactatctcggtgggtcgggcgaaggccaacttgctatggttgtgcccgccgcggcgaccacgacggctgccgcagtgccgaaggcgaagggcggggctcttagcgccggaggcgaggtgacgaccctcgcagttgttatggatgaggcgagcgctgcgtcccgccggctgaaggaggtgacggaggcgctaagtcaggtggctgacttcgccagccgcactgcgtcgggggccctcacggcggttgtggctgccgaagtcgagagacttcggacacaacatgctgacgccgtccgtgagaaatcggccgccgacagcaagtgtcgcaagctggcggacaaggtggccacactggagggagagaaggctgccctccggcgccagctggcgggggaaaggagggagaccaacgaggctcttgccaaggcgcaggctgcgcagacggaggccaacctggcatgggcggagggcaatcttgccagggagcgcgccaagcagctgcaggagcggctcaccaccctggagagccgcgtggagagggccgaggccgcgtcacgcgcggaggcggagcggacgcaccaactgcttgtagatacataccgcgggctgggcgcggggaccggtgatttcgaagtgccggaccgagagcccggacttcgctgcctggagtgggtgcaggaggagttgcaggcactccccactgtcgtggaggggtttatggcgtatgcctccctggtcacctgcgagggggcgatgaatgcgctctcccgggaagggtgccggcacttcgaggtcttcgaccaagtcgaagaagattttgagcaagatatctttaaggttgaggaccccgcagtgaaggaatccgccggagctatcttcgaccggctgtggggtccacatggtcgcgaggtggtcagagagcgggccaagacggcgagggctcaggcggcgcgtggcgagagggtcgacgacttcggggcgttgaacagcatgctgtctgacccggagccgaccccggcggaggccgtgcctgggttcgccctggagccgaccccggagactgggggagacgcgtcgggtgcccccgcatctgctgcggccggcgaaggcctgcccctagaggtcgccgaaggcgcacctgatgcctccgcagctgctgcgccgagtgctgaagatcccgcagcggtggcggcggagattacagcggaagcaacggcggagccaacggcggaggctcccgcaacgtcagggccgtcgcaggttcaagattttgggcctgcgcacacaaccgctactactaaatttttggcggcttcgaccgcggaagatggtaatgaatgtggtgggtctgcatctgagttttttgattgtgctaactctgggagctcggttgagtggactgaggagtcgtcagaggaggacttggactactttgcggccttggatgtggctgcggcggaggcttcgccgcacgtcgcggacgcaggagatgtgccaggtcctagcaccgggcgacgacgatga

SEQ ID NO: 17726 - DNA, 216 bp, Zea mays
  Peptide Sequence Number=SeqID_61101
atgtccaaaccggacaaaacttttcccctccttatcctcccggtgctccccagccttcttaaccctggggttggaccgcacgagttcggattgagtgactgcccacacagcctcgagtggttgtacgataaaggaaagatctacttccggaagttcgggctccgacccttcttccggagctacgggatccggatctgcggttcccgcttcctctag

SEQ ID NO: 17727 - DNA, 624 bp, Zea mays
  Peptide Sequence Number=SeqID_61102
atggatgttttgatgattaggaaccttggagaggaccagcaaggacttgggaaaggccaaggtgttgaggaggagcagcaagggctcccacaacaggaaggagatcaagaccagtctgcactaaaatggacgcccaagatgcatccggactccgactgcgacggacttgatatggttggaaagataaagagattatctaaccaacccaactggttccaccttaaaattcatccgaaggataagccttcgtggctaggtcactcgtgtgtcacgggtgataacccacggagccatggtgtacttgccttcaacgacctcctgctcaacaacttctacatgctaaacacctggatccttggccactggctcctctactcgccacaatacaaacaagcatggtacaagggagaaattaacatcacaccaaacattccaccgagcgcggcggagaccgttgtccggcgaagaattctggccgacctggcggccaactccagcgctgaccggatgcgcttggccactcccggttcagagaacctcttgggcaaaacaccgagggcgcggtcaacggaggggtcggtggaatccggccatgtcacacccggctttaaggaacaaagccag

SEQ ID NO: 17728 - DNA, 114 bp, Zea mays
  Peptide Sequence Number=SeqID_61103
atggcgacattcacctcggtagtgtctaagggtctagctaaccctggtgacatgggatatacgacttgtgggtacagggtacaacctctgcatagtgtaaaactggtatactag

SEQ ID NO: 17729 - DNA, 319 bp, Zea mays
  Peptide Sequence Number=SeqID_61104
tgatgccctgccggaccacctaggtagtggtcaatggggattagctctccccgggcagaaagggaatcatgactcatgggtaaaatggttcgagatacaaggattatgttatggttttggttcgactatgatggtgttgttcctcgaggaggaaatggtctacgggttgccaaacgggacatttgctgagtacgttgatgtgtactcatccttgctttaccacaaaacaccaggttgtccgcattgtaaccactgctcaggagaaggcgaagccgtggaaggagacttccaggagttccaatactacgacgaattctag

SEQ ID NO: 17730 - DNA, 1083 bp, Zea mays
  Peptide Sequence Number=SeqID_61105
atgccgtcaatggggctcggtgtatgcggctcgctctgccaagcttgggtggcaatgagattgatggttcttggtattggttctggtaatgatcctggcacgtacatgatggctcgtcttagacacactgcacggaagtctgtcatccccttcttaccttcccgtctcgcggagcgtccgcttcgccattccgtgattggtcggtccagccacttggagaggctgcatcaccgcctgcatgaggagcaggagcatcgacgacaggagcagcagggctcttctttctcgctccagcaggagatagagtctgtgaggagctgctcccccgtgcttcccctagaggcgccccctgcaccaccactggacgccccagcccctgtagtagctactggaggagacccagacgacggaggaggcgacagcagctcgagccacgacgccgacctttctgctgaccaggagccggaaggatgggttgctcgaccatcactcgcgacgttgctcgcgggtgtcacttccacgatgcgctcgacaccctgctacgtcgggcacttgaccgaccatagtcgtggggtctacccggactgctgggaggcgacctgcttggtgcgtcgtccggagaacagtctctggggtgctgaggtctgctcggagcactattctatctctgagcgggactcagctgaggtggccatgcaagatgccgcacggcgtgcgctttcacactactgctcgatgctcggtggggtagctgacggtctcaacctaaagtattatccccgccgtccatctggcagcacaggaggcgtgattgtttcacctgtcggtgaggacaatcctaggttgagcagcacagtcaacctagccgccgtgctaaacacggagctagaccatgcattagatgagttgagtagggctcgtgctgagatcgcccagctgcgggctgagcgcgcggaacgtcgtcacctggatgatggttcccccgctcccgtcgggactcagcacccgtaccgctcacctcggcgtggacaccagccttatggcaatcccgactgcaagaccaagatagacttagaaccatag

SEQ ID NO: 17731 - DNA, 192 bp, Zea mays
  Peptide Sequence Number=SeqID_61106
atggccgtgcgcttgccctgctcgggtctcctgcccatggctcccagccccatctcggcctccagttcgcctccacctcagctctggtgcgtgctcggccaccatgatgtccccagcgccggtgaaggtataatatttattaggatgcctgagtcatttacggatagctggaaaattagtttagaaagttaa

SEQ ID NO: 17732 - DNA, 414 bp, Zea mays
  Peptide Sequence Number=SeqID_61107
atgggcggaagttcgacggtggcggcaaattgggcgcacaccggtcaccctctgagcccacaattgccacccaaccggtccaggggcttgggcgaagctcactgtccgcgcgcgaggccacaatttggcttcgagcacgaccgacgacgagggagcaatctcacagcggaaacggcgatggtttgcaacgtccagagcactagggttttggtgaatggacgagattcaaggcggtctaggagggctccaatttgtagctgccgagacccagggctcctcaaccgattccatgatttgtgtcagggacccttggtcaagcttgtccgagcggcgcggcgaagaaaggggagggatagagctgacgtgcgggacccacgtggaagcaagactgcgttggcgtgctgtgcgcggtga

SEQ ID NO: 17733 - DNA, 477 bp, Zea mays
  Peptide Sequence Number=SeqID_61108
atggggaacgttcctggggattccattgaagacaagctggaccgcctgctcgcccaggtatccacgctcaacacgcacatggcgttgcacgatcagtggctcgcgcatatggagaagcttgtgctatcagggaccgacgccacggaggagcttcacgacaccaagccgggcgcgggcagcggaaaagagggcgccatcggacacggtcaggaccctttacaggaatccgatggctctcccgtgccgctcgaccatcgtgtccacgaccgacgccacgccaccggttcgccctatgacgacaacgacgactccctcgacaatgattggcggggcgaccgtcgcatctcaaagggacgacgaggcggaggacctgcggacttccgtcaggagaacaggcatggtggggacttccgccaggaagacaggcgcggtgggcgcgatcccgccggtggcgcctaccaacggcgccgcaactag

SEQ ID NO: 17734 - DNA, 270 bp, Zea mays
  Peptide Sequence Number=SeqID_61109
atggaggtcgcttgggtacacatgaggtcaccggctaaggaaacggccgtagccgagctcggcgaaaatccagcgagcgcgaccggattcccggagtctgttgcgatacggtggggaggaaagatccttgtggtttacctccaacaagagagtgtgatcatgagattccattggttgaggaagcccaacctttcagcatcaaacccttacagataccctcctctgctcaaggatgaaattgaaactcaaatcacagagatgttgcagtag

SEQ ID NO: 17735 - DNA, 273 bp, Zea mays
  Peptide Sequence Number=SeqID_61110
atgagtaggcaggaacactcgccgccgacgagctcccccgcctacgcacgaggaccgaccgactccgaccaccgccagcgacgagccgaccatatcaacgtgactgttgtgacctccccgacctccttggacacctcagcggagctagatcgccgccggaacctttggccttgggatgaagttgtacacgatgtaaaaggcacggatcgggagaagggtgaaccagttccgaagctgcctatggagaagcttcggctcagcagaagaaaatag

SEQ ID NO: 17736 - DNA, 177 bp, Zea mays
  Peptide Sequence Number=SeqID_61111
atgccgttaatggggcttggtgtatgcggctcactctgccaagcttgggtggcaatgagattgatggttcttggtattggctctggtaatggttgtcagcattgcaaccactgctcaggagaagatgaagccgtggaaggagacttccaggagttccaagactacgacgagttctag

SEQ ID NO: 17737 - DNA, 504 bp, Zea mays
  Peptide Sequence Number=SeqID_61112
atggcccgcgcccgagcctataaagccctcccaggcttcgactgcactcttccgcgcaccctcaaacctcaccggagtttagctcgccgccgtttgcccgtgcgcagcgtgtccgcggccgcccaatccctctgccaccgtagaccggccaatagagccattcccaaccccgtccagccctcggagaagactgtgcacacctccgtgaagctccccgagcgaggaatcagagtttgcttcgccggagaggccagtccacgctcgccggagctctcaaccccaccggagtacgtggaccgggtaatccactcaaccatccttcgattccttgtgcacacggtcactacgttaccccgtgaagctcaccgtgcccttggattgaaccagttcgccgtggtttggccggaggacatggttgctggagtgacttggccgtccatcttgccaccgggttggactgtcgagtgggaccctacctcggctgaggaggagcatgaggagtga

SEQ ID NO: 17738 - DNA, 210 bp, Zea mays
  Peptide Sequence Number=SeqID_61113
atgacgacgacgagcaattccaaggaaaagggaacagagctgatccacgggccccaattcacagaggtcacagtgagcgcgtggataactgagggagaagaatcgctgacagggaggcccctcatgtcggcacggatgcaagacgactggcgcgcgctgagagaattttccattttaatttgcaagtttcaaattgaaatcaaaaattga

SEQ ID NO: 17739 - DNA, 2107 bp, Zea mays
  Peptide Sequence Number=SeqID_61114
aaccccgccgtttcccaccgcgcgctcggggcagccaatgccgccgccgccgcgaaaagacttcccggcgttcccgtttgcgccgtacccgatccagtcggaattcatgtcgtttctctacgccgctctctcttcaggccccggcgccctcgccctactcgagagccctaccggcacgggcaagacgctcagcatcatctgcagtgcgctgcagtggctcctcgatcaccgcgaagctgccgtagttgccgctacggcattggcccaccccagcggcgcctccggctccggtggtgacgatgacgagcccgactggttgcgggatttcaagccggcggcggcggttaaagagagcactaagaagaaggcgaagcctcccgcgatgaggaaaacgctggtttcacggaaaccagatggatttggggaggaagacggcggcgacgacgagggggagttcctacttgaggagtatgagagcgacagcgaagacgtcgcgaggcggggtgtagggaaacgagcacattgcggtagtagtagcagcagtagcagcgaggacgacgatgagatgacgcccaaggttttcttcacaagccgcacgcactcgcagctctctcagttcgtcggggagctcaagaggacggagttcgctgggcggatcaggacggtgtgcttggggtccaggaagaacttatgcatcaacaaggatgttctgaagatgggcagtggaaacaggattaatgagaggtgcttggaactgcagaagaacaagaagagcaccaaaattaagcttgaggatgataaacgaaaggtgcgcccagcaaagcgctcttgtggctgcccgatgttaagaagcagaagtctgctgaaagagttcagtagcgaagtgtcaaaccaaggtgcattagacatcgaggatttggcacaaatagggaagaagattggaacctgtccctactatggttcacgagacatggtccgctcagctgaccttgtagtccttccttatcaatctttgttactcaagtctgctagagaatcacttggccttaatctgaagaacagtgttgtcatcatagatgaagctcacaacttagctgattccttgagtaacatgtacaactcaaagatcacgtcttctcaggcattggttgactttctacgctcccttctgaacagcaatgatgatggaagaatcatagttgcaaagcaaaagctaggtggacaacctgatgaagcatatcttaaatttgtgatgctttgtgcggaaaaaatattttctgaggatgcttatgctgttatcctggctggtggaactctccagcctattgaagaaactaggctgcgcttgtgtccaagcttaccaccaactgatataaaattcttcacttgcaaccatattgttcctcctgagagtattcttccaatagcagttacacgtggaccctcaggcaaggcatttgatttcagctacaattcaaggagctctccttccatgattgaggaacttggtcgtttcatctgtaacattataacagtcgtgcctgagggagttgttatgtttttttcttcatatgattatgaaaggcgtgtatatgatgcatggatgacaacaggcacaatttccaggatttctaaaaagaaacatgttttcagagagccaaggaacagtgctgatgtcgaggctgtcctcaacaaatacaaggaggcaattgaatcctgtagtaatttttcccaagacacaggtgtcaatggggcacttctattagctgttgttggtgggaagatttctgaaggcataaatttcagcaatgggatgggtcgttgtgtcataatggttggcttgccttatccaagtccatctgatgttgagcttatagagacaataaagcatatcgaaagtatttctagctcattttcggttggagatgataaggccttaagcagaaaatatgatgatgaatgtgaacttcagcctggttatgatatattacggaagtgcactagaggtggaagagagtattatgagaatttatgcatgaaagctgtgaatcaatctattggtaagctgcttctcctgagcatttgtcatgcatatagcactgtttaa

SEQ ID NO: 17740 - DNA, 312 bp, Zea mays
  Peptide Sequence Number=SeqID_61115
atggtgggaaagagagatggcaaaggcaggaggcaggccaagggtgagaagaggaagcgtcctccttctccccgggcctacctccgcaacatcgagcacgccgacctcaatgacttggacgagtccgaggaggaggatttcgaggtgaaggacgaggatgaggacaacaggtacgacgacggggatgaaggcgacgcgaccatcaaggtcgacaacggtggcaacaaggacggggcggtgacggcggcaaaggcggaggcgacgacaacatcagcggggcagcaacaacggcgacaacaagggcagtggtga

SEQ ID NO: 17741 - DNA, 321 bp, Zea mays
  Peptide Sequence Number=SeqID_61116
atggcgctccctgttgacgtggcgggcccgcgcccgaggctgggcgacgtgggggctcctccgaagttggggttagagatggcaacggaggccagagcggagtccgagccctggggtcgggcgaagcggagttcgtcgtcttccggggctgagcccgagtccgagccctgggtcaggcagagcggagttcgccgtcttccgggtcttagcccgagtccgagccctgggtcgggcggagcggagttcgccgtcttccgggtcttagcccgagtccgagccctaggtcgggcggagcggagttcgccgtcttccgggtcttag

SEQ ID NO: 17742 - DNA, 525 bp, Zea mays
  Peptide Sequence Number=SeqID_61117
atggcgctggcagctgcaccgtgcctggctctcggacgcgagtggcttcggagccgctcgcggcgccggcgtccgccacggcagcttgaagaggttcttctgtcggcgagattgccaaggccggccacggaccgaccttcaactctacggccttctgcccgtccttgcctcacaagttttggcatgggcgggggcctcctggcggcagcatccgccctgaggtcagtgctgccgctgttcggccccccggagcagaagtcgtcgtcgtcgccgctgctggagcagcacgaacagaggcagagttggctcgaaaatggaaacctggttggccggagcctagccgggttgtccgtcagcgggaccgacgccggagttgaccagccgaggcctcgggtcgggctggcgcccttggaagatggtcggccaaggcccctgaggcaaccggccgagtcgcctgctcgggccggattcccggagaagtccctggaccgcgtcgtcgtccgaggctgggtcggtcctcgctga

SEQ ID NO: 17743 - DNA, 510 bp, Zea mays
  Peptide Sequence Number=SeqID_61118
atgacggtggcaagcgagcgggagcagcggtcacgtcgtcagccaggctcacgtcccatccaggggcagcaggagagcctcccctcacggcgtgaagacgacgcgcccgtgatccgttcctcgaacggctcgcgcacgcgcaacggccgccccgccaaccactcgccccgtcgcattaactccgcggcgggacaggcggcgcctctggcaggagaagcgggccaaaaaaggtacgccacgtcgttcgattttgtatccttcgccgtaataaccgcgccaaaaaagggaccgggaaagggggataccccgaaaaggatccttccctgtgaaggaaccgggctccgagcccccctactgatcagaggttcgaagactggccctccgaggggttcaacagtcgcctcagatcgcgtgggccctacacccactactggtcagaggttcgaaggccggccccccgaagggctccacggccgcctcaggctactcgggctccgcgctcattactga

SEQ ID NO: 17744 - DNA, 855 bp, Zea mays
  Peptide Sequence Number=SeqID_61119
atgcaggcggcatgcaaccgcaccaagggggcgcaccctttcgacttcgacgcgcccagcatgggggcccaggcccacacgtcatgcaaccggcgcgccggttgctacgtgcaaggaactgcaccgccactcgcgccactaccgtgcctcctcgactgcggaaccagtaccgcgactcgaggcaaccctgcgtatgacccaacagtgccagccaggcacatcgatcacgggacagtcgacacctttggtaggagaagcaagcgacgcttcgctttcgccataatgaccgcgtcaaaaaaggtggaggggttcaacagccgcctcagagcgctcgggctccgcgcccgctactggtcagaggttcaaaggccggcccctcggaagggttcaacggccgcctcaggccactcgggctccacgcccactactgatcagggagtgaggctgacagcggccaagtccggcctcaggcgccataagaagctccgcctcgcccgacccagggctcggactcaggctcggccccggaagacgacgaactccgcctcgcccgacccagggctcggacttgggctcggccccggaagacgacaaactccgcctcgcccgacccagggctcggactcggcctcggccccggaagacgacgaactccgcctcgccagacccagggctcggactcgacctcggcctcagccgacggtctccgtctcgcccgacctaagggctcggactcgacctcgacctcggaagacagacccgacctcgacctcggaggagcctccgcctcgccctacccagggctcggaccgaccacgtcacaggaagggccatcattaccctacccttagctag

SEQ ID NO: 17745 - DNA, 444 bp, Zea mays
  Peptide Sequence Number=SeqID_61120
atgagccgctcggtcccacttgtaagccactatgtgggtagagttgatgacgtccagacaaagactccaagagccaacagccaaccagacgagcagacggaggcaggctggcagggcgccgccgtgcaccgcgcaggcaactgggcacttcggtcttcggtagcagatcgcaccgcgctggtcggacggaggcaggggcaggggcgccgccgcgggcgcagaatcgcagaaagacgaaaactaatctcagctgccgcccgccgtctgatggcccacctggacccccctgtgggtccgcccctgagagacctcaccaagataatatacccaccccagagggcaccgttcgcacatgcagctctgagggattacctcgggcaccccgccaggtttcaccccctagaggcagatgacacaatcgaagacgtcgaagtcctaagatag

SEQ ID NO: 17746 - DNA, 816 bp, Zea mays
  Peptide Sequence Number=SeqID_61121
atggacgagggttgcactcaacccctttcaagtgatccaatgatcaacttgaataccatgactttcttccttacagttttcttcccgtttgcgaggaatctccacaagttggagcctctcgcccttacaatatttgatcacaaagaaatcacggagtatggttgggaagagcaacacacacaagactcaaattcgcagcacaaccacgcacacaagtcacgacttgagcttgaaacacaacacacggagttcacaactcaaatggagctcaaatcgctaacacaaagaattgaatgcgtgaagttggagccttggagtcttaggatgcttagtgaatgcttagatgactcctccatgcgcctaggggtcccttttatagccacaagacagctaggagccattgaagaccaacaaggaaggctatccttgccttctgtcgagaggcgcaccgcacagtccgagcctacgccccagcaatcaccacggcggaggcagcgaggtgatgcggctcagggtcgcgacgacatcgaggtgttgcagcgcgtgtccgtggtggcgaccactcatcaagaccctatggcgatgcagtgcgagcgtggtatgtggggcatggtagtggagagccacgactacgacttcgaggtgagcgaggaggagatgctctttagctaccagcccatggttgtagctccgccagcacactggggttcagcggatttggggcccgttgaaaggaaaatgtgccctgggtcatttctaagtgttttggtgattaactgtccgacacaccactttaaactaaccatcttggtatga

SEQ ID NO: 17747 - DNA, 303 bp, Zea mays
  Peptide Sequence Number=SeqID_61122
atgccgccgacgaccacgcccacgacgagcgacgtggacggcccggagctgccgccgccctcgcccccgggcgagtgtgacttgggcggcgagtgggacgacggcgtggatcgctcacctccggacgacggcgtcgacggcggggacctgccccctccaccggatgacggcggagaaggggtgtcccgatggcggagaagggggtgtcccgatggcggcgacggggtgtccgatggtggagaagggttgtccgatggcggcgacgggtgtcatatggcgcgacgggtggcggccgtcgcctga

SEQ ID NO: 17748 - DNA, 762 bp, Zea mays
  Peptide Sequence Number=SeqID_61123
atggctcgccccagcctcgggcaactactctgggccagcgacaacaaccgacccctccacgtggacggttccggggtcgccactagggatggcaatgggtacccgaaacccgaaacccgatgggcacgatgttgccatttaatattgaatattgttgaacctgtgataaaattatgttgggttcgatacatttattatgttggtacttatttttgcgattcaaatgatcatgtctatcgtaatgttaatgggtatgggtacccgatgggtacccgctacccatggtgggtaccttacccactgccatccctagtcgccacgtggccggagaagatgataaactccaaggtatcaacagtgagtccggacccccatgggaaagtgtcggacccctgtatatacagaccgggcctccgggtaaggtccaagacccccacaggtgcaaatcggacccctcgaatggggtccagacccctccatgtggggtccgggccgctcatggcagggtcccgggattctgggacagagaatgcccaggccttaatcaagaccaggcgggggtccggagtcgcacgtgtccggaccttatcgtttacgcttctgctccccgatgctgccacgtggcatggtgcacgtgacgtaagccaacgggcagagcctgatgtaaggcctctgggctgcgcggcctctgcatttattgcggataaggcgtgttgcctatctttccactggcaggcggtgtaccatctctgcatttattga

SEQ ID NO: 17749 - DNA, 225 bp, Zea mays
  Peptide Sequence Number=SeqID_61124
atgacttcacttggccattccgagcatttccagtccgagggggcgctcaacctggtgcgccacctgctcgaatggagcgcgccgttgcacgtcggaaggatccgtgccggcgccactcccctcggcaatctcgccgccgaggagttcgtgttgttcgtctcctacgtctcctgcgggttggcgctgccgatttcgcctttgagagcacctagagggggggggtga

SEQ ID NO: 17750 - DNA, 402 bp, Zea mays
  Peptide Sequence Number=SeqID_61125
atgcagttagaaaggacagaagagtgtgacggtgcccatggtgacgttgactgcctccgagacgagggctatcaacttggggagacactccgtggattgaagtatcgcgccgagctggccaaaccatcgtcacaggaggtggaggttcgcctggtgcaggcgggattggagcttgcaagggagaccgacgcgaccgaaggtccatcccctttctatccttcacatcctgatcaactaccgcctctgattgcttcgcgctttttctccggcagagctctgcaagatgctcgttcaggcgcaggatgcgaaggccgcgacgaacgaggtgagggcggtgtgacaccccaggtgtctatttcgtattatctcgggatatttatcctaatctcagatgctcagtaa

SEQ ID NO: 17751 - DNA, 367 bp, Zea mays
  Peptide Sequence Number=SeqID_61126
atggatgagagagatcggttggtgcagggaaattgggaccgcatgttcgagtcaatggaggcgatgactggaagactgaaggaagttgagcgggtgcagcaacaattgttgatgcagtctgagttggcggctgtggttgctgaacaagctgcaaccgagaggaatgatttgcaccacaaattggaagagactggtcgggaggtgtctcaattaaggctggaacagatgggaagagaattgggagaatcttcgacctctaatcaggatcatggtgctaatgatcgtggtccacgacatgatcaacagatgccccggggtggccatcaacggggattgagaaatgatcctcgtcaacctgtggattcag

SEQ ID NO: 17752 - DNA, 861 bp, Zea mays
  Peptide Sequence Number=SeqID_61127
atgaacaaaagaccggcactcaaggtgccattacaaacggaactccggttccacctccgcagcaacgacaacggcccccgctccgggtggccgaactgcagcagcgatggcctcagggcggacgctgctgcaaccttgccctcgcccacgccgacgctcgaggggcgaggacaagggccgtcagccctccggcagatccccactcagatcctcccggacgagtggggcaccgacctccgcgtggaggcgccgtaccgcaaacttctcccctctctatctccctaccccgaccatatctcgacttggaactcacagcgaaaggataggatttggagcagagaagcgaccgtacacagtgactttgccaagatacgcacgctatggcgctctaatcggccgttgaaccatggcagaagcaagcttccacgtgttcgacgcgagctgacatccgggggcgcgctcagagcacgcccgtgcgcgaacccccgcgcgcccgcggccgcccgtgatcacgcccgcgccacggctataaagcccgccccagtacttggctgccttccccgttacctcctccgtacctcgccggacttgcccgagccagccattacctccggcgacccgccagtgccgcccgagagcaaccaccgtggccagcccctctcccgtcctcctccgttcgatccaagccctcagttagcttcctggaaccgccgacgacccccgccgcctgtgctcgtggccagggtaactccgaccacctccgacaccgacccgcacaccgacgtgaccgtcgcaacctcccggacgtcactgaccaccccgccggagctctactgccgccggcaagccccaccgccgtaa

SEQ ID NO: 17753 - DNA, 453 bp, Zea mays
  Peptide Sequence Number=SeqID_61128
atgagggggtacatcccgggatgcgggattacatcggggtggctgtggaggtcaaatacgatagggaattccgaacatcgtcttcctcgccccaggcttttcagctttgaggcgtctcttatcaatgttgtcgtaaacccggtcgagcctcttgacgagtgcatcgagctcctcctcctgctgttagagggtggcttcgtgggtgaggatgcgtgcctaacgctggcactggtattcctcctcttggatggggagtcccaagttcgccccatcgttgttgcctcgtggcagtgtggccacgacgcaagatctttcttgcacctcgtcggagtccagagcgggctccgtcgaggcatagctcgagtcatcctcaagaagaacgaggatggatgctggctagcgtcctacaatggcacgatggttgatagcggcgccgccttcgccactgtttag

SEQ ID NO: 17754 - DNA, 213 bp, Zea mays
  Peptide Sequence Number=SeqID_61129
atggccagtggcgtaaccctcgtcgatgacgacgacgtcgatctcatcaaggtgagaaaccatctggccaagggcgacaccaccacctcagtaaacgccttcggtgatagagcgctccacgcggtcgagaagctcctgcaagcgatcaatcaatacaatggatcaagcagtctcattagctgcgagaagcagacgattcaaatcgagttttaa

SEQ ID NO: 17755 - DNA, 1437 bp, Zea mays
  Peptide Sequence Number=SeqID_61130
atggggggcggtggcggtggcggcaactcgcgggagcttgaccagacgccgacatgggcggtggcgtcggtgtgcggcgtgatcgtgctcatctccatcctgctggagaaggggctccaccacgtgggcgagttcttctcccaccgcaagaagaaggccatggtggaggccctggagaaggtgaaggcggagctcatggtgctgggcttcatctcgctcctcctcgtgttcggccagaactacatcatcaaggtctgcatcagcaaccacgccgccaacaccatgctcccctgcaagctcgaggccgccgccgtcgagggcaaggacggccacggcaaggaggccgccgccgtggtcgctggcaagaagaaggtcgccgtcgccgtccctggaaagaagaagaagaaggccgccgccgccgccgaccatcttggcggtgtggtggactggccgccgccctactacgcgcacaacgccaggatgctggcggaggcgagcatggcgaccaagtgccccgaggggaaagtgccgctcatctccatcaacgccctgcaccagctgcacatcttcatcttcttcctcgccgtcttccacgtctcctacagcgcaatcaccatggcgctcggcagggccaagagcaacttcttccggcagttcttcaggtccgtgaggcaggcagactactgcgcgctgcgccacagctttgtcaacgtccatctggcccctggcagcaagtttgatttccagaagtacatcaagcggtctctggaggatgacttcaaggtgatcgtggggatcagtcctcctctgtgggcttctgctctcatcttcctcttcctcaacgtcaatggatggcacaccatgctctggatctccatcatgccggtggtgatcatcctgtcggtggggacgaagctgcagggcatcatctgccgcatggcgatcgacatcacggagcgccacgccgtcatccagggcatcccgatggtgcaagtcagcgactcctacttctggttcgcacgccccaccttcgtgctcttcctcatccacttcaccctcttccagtcagtctcatgtctctgtctctgtctctgtctctcccagaatggcttccagatcatctacttcctctggattctgtatgagtacggcatggactcgtgcttcaacgactccgaagagttcgtctttgcacgactctgccttggcgtggttgtccaggtgctgtgcagctacgtgacgctcccgctgtacgcgctcgtctcccaaatgggctccaccatgaagcagtccatcttcgacgagcagacctccaaggcgctcaagaactggcgcgccggcgccaagaagaaggctcccaccggcggctccaagcacggcggtggtggctcccccaccgccggcggcagccccaccaaggccgacggcgacgcgtag

SEQ ID NO: 17756 - DNA, 678 bp, Zea mays
  Peptide Sequence Number=SeqID_61131
atggcgtttgggccaaagttccttatccccttcacgccggccgtccttgttcagccatggtcacatggtggtggaacacctagccttgaccagcctgaacgactggcacacagcacagggaacaacacgccgtgcacgcacgccccgcatgaggggaaagaaccgattcagatcggtcctgaccagattgaagctttgtatcagtatgccaaatttcagtttgagtgtggtaactacttaggggctgctgattacctttaccagtatggtgctttgtgcacaaacagtgagcgaaatgtgagtgccctctggggaaagctggcagcagaaatcctaatgcaaaactgggacctagctttggaggaactcaaccgcttgaaggaaataattgattcaaagaacttctcatcacctctgaatcagctccagaacaggatatggctgatgcattgggctctgttcatcttctttaaccatatcaggtacttgaatgctataccgacaaatgcacaccatcttattaggtatctagctactgcagttgttgtcaacaaaaggagaaggaatatgcttaaagagttgattaaggtcattcaacaggagcaccatacctacaaggatcccataactgaatttctggaatgcttatatgttaactatgtagttgtgggcttttga

SEQ ID NO: 17757 - DNA, 564 bp, Zea mays
  Peptide Sequence Number=SeqID_61132
atgcaggcggcatgcaaccgcgccaagtggacgcacctctccgacttccaatgcgcccagcatggaagcccacacccacgcgtcatgcaaccggcgcgccggtcgctacgtgcaagcaactgcaccgccactcgcgccaccaccacgcctcctcgattgcggaatcagtaccgcgactcgaggcgacccagcgcgcgacccagcagcgccagcctggcgcgacggggaagcgagcgacgcttcgccttcgccacaatgaccgcatcaaaaaagggaccgagaaagggggataccccgaaaaggatccttctccgtgaaggaaacaggctccgagcctccctactgatcagaggttcgaaggctggccccacggaggggtttaacagccgcctcagagcgcgtgggctccacacccactactggtcagaggttcgaaggccggcccctcggaagggttcaacggccgcctcaggccactcgggctccgcgcccactactgatcaggggtttgaaggctggccctcgaagggttcacagccgcctcagacacagagcgagggatga

SEQ ID NO: 17758 - DNA, 224 bp, Zea mays
  Peptide Sequence Number=SeqID_61133
aggtcttctcagagcattattctaacattgagcgggacactgccgaggcagcaatgcaggaggatgcaagaggtgagattgtctcaccagttggtgaggcctatcccagattgagtagcatggtcaacttggtcgccgtgctcaacaccaagctagaccacgcccttgatgagttgagcaaggctcgggcgaagattgcggaactgcgtgctgagcgcgcgtag

SEQ ID NO: 17759 - DNA, 81 bp, Zea mays
  Peptide Sequence Number=SeqID_61134
atggccgccgcggaaccatgcgtcatcgtggtcgggaccctctgcaccatcaccggagggttgcggtggccgttgatctaa

SEQ ID NO: 17760 - DNA, 108 bp, Zea mays
  Peptide Sequence Number=SeqID_61135
atggatgatcgggaggaagaaggcgagcactggaccgttcgatccgacacgaacgtgaaactcaactcaggaatggcgatcgatctaatagtgcgagttggcacctga

SEQ ID NO: 17761 - DNA, 1002 bp, Zea mays
  Peptide Sequence Number=SeqID_61136
atgccgcgccttctcgactgtagaaccagtgccgcgactcgaggcaaccctgcgagtggcccaacagtgccaatcgagcacatcgatcacgggctcacgtcccctcctgaagcagcaggggagccctctcccacgggcaagcgacacctttggcaggcgaagcgggcgacgtttcacctccgccatgatgaccgcgtcaaaaaagggaccaggaaaggggcctccccagagcactcgggcttcaggctcattactgatcaggggttcgaaggctggcccctcggaagggttcgacagccgcctcagagcactggggctccgcgcccactactgatcaggggtttgaaggctggcccctcggaagggttcgacaaccgcctcagagcatgcagagcgagggatgactctaggtacgtctgttacatggccgaggctcgggctacgctcccgaggcgcattcaatgcgaggatcgcctgacaccttatcctaacacacgcgcctcagtcggcaaggtcgaactaaaggcgcaacaggaagctccgcctcgctcgaccttgggcctcggcctcaggaggaggtctctgcctcgcccgacccctgggctcggcctcaccctcggccttggaaggtggtctccgcctcgcccgaccccagggctcggcctcaacctcgacctcgggaggaatcgcgtcctcgcccgaccccagcctcggcctcaggaggagtctcggcctcgcccgaccttgggctcagaccgaccgcgccataggggatacatcattaccctacccctagctagctcaggctacgggggaacaagaccggcgtccatccaggctcgccccgggctcaagcgttcctccgacggccacgacaccgcgtacacagggctatatcacctctccgacagccacgttggcatcagccgaagacttcctttctgctctgttcgactagaagggggttgtgtctgcacccagtctgcctatggttcaggctag

SEQ ID NO: 17762 - DNA, 660 bp, Zea mays
  Peptide Sequence Number=SeqID_61137
gggtcaagcgtacggaacaacggcgttgtggacagggaggagagagggaggctggagagcgagctggaagccgcggcgctgggcagagcccggacgggcgagcacgccagggagttccagggcgcggcgagctggggccaagcgccggccatgggaagcggacagtcggacagaggaagctgggagaccgctgcactggaactgggcgacgtaggaaaagcaggagaggagcggtctgcgcaggggagttcacggctggggaaggaagctccacgacgaggagacgaagggggcgagccatgggaacgagcagggagatgtgacggcgcacaggaaaggagaaccgaggagcagaggctggggcacgccatggaagatgggagaaggccggctgcgcgcggctggattgacgagctggcccaccacagcccacagacgggaaacgacgcgggcggcatagagacggcgccggcgttaggggggagtggcgaaccgtccgaccggggcaaaagaaccggtcgccgatgggtcgacggcggttctccacaggtggcccggttcccagaggtcggggagggctctcgtggcggtgaagtcgccggcgaggtcggggaacgtgatccgggtggaatgaggtgctccgtgctcgtggcaaggtag

SEQ ID NO: 17763 - DNA, 291 bp, Zea mays
  Peptide Sequence Number=SeqID_61138
atggcgagagtagcgtgtaccctctgtggcaagaggctggacggtggtgtatctgtgctctcgcatacccttgagagtcttttctttagtcgggttacgagtcacttgattgtgattggtgttaagcgccgaaattccgctgcaaaaatgttggtgtgtgatttgtgtttacttaatcttgcgatcttggttgtaagtggtttatccgaggtccttggggcactcggacagatcctgttaagttatctggtgcacatgcatagcggtctgaggtctttgagacaagtgtag

SEQ ID NO: 17764 - DNA, 954 bp, Zea mays
  Peptide Sequence Number=SeqID_61139
atgcgccgtcgcgggctccccagtttctgccacggcgtcgcctccacgtccacggtgcagcagctccacggcaaggagctggccgccggcagcgccgcgggcgcggacgcagcatcctcatccttcgttgccgtgccgccgtcggtggttggctcgtgcgtggcggagaccgaggtgagcggcaccgggggcgacggtggttcggcggtcacgcttgagcagatgatcctgcagctggacctggaggaggaggccgccaggaaggcgcggcgcgcggcgacgggggaggggacgtcggcggaggagcagggctggtgcccgcggcggatgtcctgcgtcgacggcggcccggccgaccacgtgctccggtcggcgcgggacgcgctgacccagtacccgcgcttctcgctcgacggccgggacgccatgtaccgcgcgtcgttcagcggcttctaccagggcatgggccgcgacggcgacggcgccaaccgcccggcgagggcttcggtgtgctgcgccgccggcgccgggtgcgcggcgctcgcgtgcagcgtggggggatacgagatggacctggagcggacgctgcggttgcccgcaaccgtcgccggggaaagcgtggtgtggtgcaagcccggcgtggtggccaagctaatggggctggaggccgtgcccgtgccgctcaggggagggctccggcggaggaaggcgggcgggcatccggtggcagcttgtggcggcgtcggcggtggcgtcaggaagcagaagccgcggaggacggggcaagacgagctggccttgcacagggagaagctcttcatggcgttgcatggctacgatcttgtcgggacgggcgggcgtcacgctggaggcctccggtccggcgtggcgcccgatgtcgtcggtgccatggacgcggacggcgatgtctgggagtcacggcttcgtcgttga

SEQ ID NO: 17765 - DNA, 1443 bp, Zea mays
  Peptide Sequence Number=SeqID_61140
atgcagtcggcatgcaaccgcaccaagtgggcgcaccccttcgactccaacgcgcccagcatggaggcccaggcccacacgtcacgcaaccggcgcgctagttgctacgtgcgagcagccgcgccgccccttgcgccactaccgcgcctcctcgactgcggaaccagtaccgcgactcgaggcaaccctgcgtatgacccaacagtgccaaccaggcgcatcgatcacgggccaggaccgagaaagggggataccccgaaaaggatccttcttcgtgaaggaaacaagccccgagcctccctactgatcagaggttcaaaggctggcccctcggaggggtttaacagccgcctcagagcgcttgggctccgcgcccactactggtcagaggttcgaaggctggtccctcggaagggttcaacggccgcctcaggccactcgggctccgcgcccactactgatcagggagtgaggctgacaacagccaagtccggccctaggcgctatgggaaactccgctttgcccgaccccagggctcggactcgggctcagccccggaagacgacgaactccgcttcgcccgaccccagggctcggactcgggctcagccccggaagacgacgaactccgcttcgcccgaccccagggctcggactcgggctcagccccggaagacgacgaactccgcttcgcccgaccccagggctcggacacgggctcagccccagaagacgatgaactccgcttcgcccgaccccagggctcggactcgggatcagccccagaagacgacgaactccgcttcgcccgaccccagggctcggactcgggctcagcccctaaggacgacgaactccgcttcgcccgaccccagggctcggactcagccctggcatcagccgacggtctccgcctcgcccgacccaggggctcggactcgacctcgacctcggaggagcctccacctcgcccaacccagggcacggaccgaccacgtcaacaggaggcgccatcattaccctgccccaagctgactcaggctacggggaacaagaccggcgtcccatctggctcgctccactatacgaggaccccccgggttcgaaacgccgacaacatgcaactctccaccatccagaagaatgaactcagcgtcatcgactacttcagaagggtgaaacaccttgtcgacacaatgacagccattgggaggcgactcgaagacggggagctcctcacctacatgttgcagggccttagctctgactatgatccgctcgtcacaagcatcacaacccgcatgaacgagtatatattcaatgatgccggagcaatcatgggcgcgatcgtggctctggtggtcacgatcaaggcaggcgctcttgtcgtccactggctaggagcaacaccagcactagctcagctgttagatatgcagtaa

SEQ ID NO: 17766 - DNA, 303 bp, Zea mays
  Peptide Sequence Number=SeqID_61141
atgtccacagcctcctactccaaccacgccgtcggcactaacctcatgcccattctatcattcagccatatggtgagtgtcaagctcaatcaagagaactacctcctatggactgtgcagcacctccccagcacaggaagcctggagaactctcgaaaggatgttctcatccagctcgtaggcaagagtcatgtagatccacatgtgtcggggaccataattaagggtaccttcaagactcctaaatctcagctgataacctccatcagcacaaagctgcaaaggcctgatgggtgcgactaa

SEQ ID NO: 17767 - DNA, 471 bp, Zea mays
  Peptide Sequence Number=SeqID_61142
atggtgagagaaagacgaacacagacaagcataatgagcaagaacacaagagacacaagatttatcccgaggttcggtcacaccaccaaggtgccctacttcctcgttgaggcgcccacaaagagccgggtctctttcaaccctaatcctcgctttgccgaccacaaaggtcaagcctacacactaatctttgctcaaacgagcggctcgaatcaagaagagcaagaaggatttagagatgaagcaccaaaatcgcagctcttcaatctcactcaaagatttctctccaaagatttgaaatgggagaggcaagaggtgtgtgagagagagtgggaggtgtttctcaggttagaaatggacttttgtgcgtgctcttctgtggggaagagtgtgggaggtgtatataaaggtgccccaaaagctggtgaccgttggggaaatctgactgaaaaacggttgaaccggttctaa

SEQ ID NO: 17768 - DNA, 414 bp, Zea mays
  Peptide Sequence Number=SeqID_61143
atggacggcggaggcggtggtgtagggggaggcggagttggggcaggtgtcatggtgggcggcggagtcgggccgggcggcggcgttggcggtggcggcgacgtggagctcgtcagcaagacgctgcagttcgagcacaagctgttctacttcgatctgaaggagaatccgcgggggaggtacctcaagatctccgagaagacctcggccacgcgctccaccatcatcgtccccgtcgacggcgtggcctggttcctcgacctcttcgactactacatccgcaccgacgagcgcgacgctttcagcaaggagctgcgactccagaccaaggtgttctatttcgatatcggggagaacaagaggggccgattcctcaagattttcattggttcaaaacatctgggtcttaaatga

SEQ ID NO: 17769 - DNA, 2427 bp, Zea mays
  Peptide Sequence Number=SeqID_61144
atggatggcaaatcagggaacatagtgcagagtctgcctgatacgctgtcatccctcatggggctcaacaagtacctcgcacccagaaccagctatatcgaatcggtgtctcacatcatcgaggagttgtcaccaaccaaaccgaagatgaaagtaatggttcacacggctcaaaatatttgttctgatgatacagattcagatgctgaagctgcaaaggttcaagggaatataagggtgttctgtcgtgtgaggccttttcaccatgaagaaaattatcaatccagaactctgtacaccctggatgagagtaatatattcctaaaagttgctgagaccaagataaagcaatacaagtttgacaaggttttcaaccaatgctcaacacaaggtgatgtatttgctgaagtggaaccagtgataaaatcagctttagatggctataatgtttgtatatttgcctatggtcagacaggtagtggaaaaacttataccatggaaggcaagcctacagatctaggtgtcataccacgtgggattcaagcactgtttgatcgaacttcagagagcaacagaaggtttctgttcactttcagtatgctcgagatatatatgggaaatttgcgagacctgctagttccaagaggcaaggcacaaggttttaagaaggtaccaagcctttccattaaaacagatccagatggcggcatcgagattgaaaacctagtggcagttactgtcagtagttttcatgaagtgaaaagactatatgaagtggggacccactttagatcaacagcttccactatggctaattctacatcaagcagatctcactgtttgattcgtatttcattgacctcatttgacgcaccagagaggaaaagagcaagaaacaaattatggatgattgatctaggtggaagtgaaaggcttgtaaagacaaaggcaactgggaaaaggctcaaggaaggcaaagccataaatctgtcgctgtcagccctagcggatgtcatagatgcactacagaccaaaaaatcccacatcccttataggaatagcaagctcacacaaattcttaaagattctataggatgtgagtccaaaacgcttatgcttgttcatatccgtccaaatgaggatgatttgtgtgagagcatctgtaccttgggttttgcgacaagagtcagaagtattcgcctggaaaatgaagaaccacaagaagtaaaagcaagaaaggaacatttattaatggaattagaaaaggagatcagtgatctagaacaagaatgtgaaggtattgttagaaagattaagaagctcaaggagacaatggagcattttaaagggcatcagccatctgctgaagcaaattttgacatttcacatccatccagtgaagagctgaaaactgtcatgccaaagaatacaaaggattcaaagaatcggagagatgtttcttccaggttacccaggtttatgaagccaacagcgtctagccagcacaggatagacttaaataaacaaatacctgttagtaacaagacaaaaccaccagtgccaccaaagagaaggccttcctcagtttatgctgagtctgtaaggctgccagtaaatgctgcaacttggcagtcagaatgtagttctgaatgcagtatctccatgacaagtgacatgaactggataccaagtatacaagatgggacagaatgcagccaggatacatcagaatatgagaccaaacaagtgattttctcagaacatgagaaaccacctcagagtcaagtgatttcatttgaagaatcaggggagatgcaggataaaaccaaggaaatgggcatcatagacattgacagctggattcatcaacagatcattgaaaacactggcatatgtcagtgtcacactgaaaggacgctagatgttattgaagtaaatgaatatgaaacttacaattctaatactgcttcaccagttcagaaggaatttactaatggttccaaaccctcactggatgaagatagcaacctgaacctttgtccccccacgcaaaacacagaagatagcaaggaaaccagggctgttaatcaattcacaaaaacagaattatacactcctccattaaaagaactttgcggcagtgccaaaattaaggaacataagaatgaaaagcttgggcgtcatggaagttgcagaagatcactgcaggaagagctcggcaattgcaagccagagcagccagacaaggaaccaaaagctgatccaaacatgcaacctgaaattgaattccatgacaacaaacaccatataggtaagttgacaaaattcattcaagctcttcgaacagcatggattggtgctcttcttggactaggcaccatgaaccttggattagagcaagacttcttcaagagcttaacactctga

SEQ ID NO: 17770 - DNA, 429 bp, Zea mays
  Peptide Sequence Number=SeqID_61145
atggaacacgaagtggggggaaaactgcggctcgtgttatcctgcgccagagtgggtgcgcttgcagtaggggttacaagcgttcgcgagggagagagggagtcccacgcgaccaccctccgtatgagggccctggcccttccttttatagatgcaaggagagggtccagagaggagccagagccctatgtacatgccaacgtggctgtcggagaggtgctagagccctgtgtacgcggtgtcatggccgtcgggggagcgtttgagccctgtaggagcacagctgtcgggaccttgatgatgtctccttgcttccgtaaggggctgagagccaccgttgtcatggacgcacgtggggagccatcattacttgttaccggggcgagcctggatgggacgccggtcttgttcccccgtagcctgagctag

SEQ ID NO: 17771 - DNA, 336 bp, Zea mays
  Peptide Sequence Number=SeqID_61146
atggtggggtcatcctcggtggggtctctccctgtcggtgttttgggtccgaccgcacacccggggtttcccctcaaggtctggacgtacatccgggccgtcgagcgctccgggctcgagggctcggatgagtctgggttctcctcggacgaggaggactcggacggcggcgaggacgaagatgacgacgacaatgacgacggcgacgacgacgacggtgatggcggcaacggcggcggaggcagcggcggcaagggtggcaccaagggcggcagcagcgtgggcagcaccggaggcggcggcggcaagagcagcggcggcagggccagtggctaa

SEQ ID NO: 17772 - DNA, 684 bp, Zea mays
  Peptide Sequence Number=SeqID_61147
atggcggggatggagcaaacggcgacgagatggcttgggcaggcgagggatgttgatcctagggcaatagaccttgccatgagaatcgccgataggatgttcctcaaaatgaaggaagatgaggcgaagaacaagattgaagaagaggaaaatgatcgatggagaccaaacgacgaatccacctcttcacaaggttcgtctttcaaatccacttctcatatgtactttatctctaatgggagtgacagtgaaagcgaaagtgaggatgaggaggagcaagaaagtgatagtgaagatgaggatgatcttcaacaattcttcgctcagctaagcaagaaaaatcagatgagcttgctcaaactcatgaaaagagcggaagaacaaaaagaaatgcttcataagcaagaagacttcctcatcagaaaaattgaagacttagagaagttgaccaaagagcacgagaagctaaagtgctctcatgatgatttggtccaaagctatgaagacatttcaattgagcaaattagaaacgaaagggtatgcgatacactaatcaagccctccatctatggatcgacggtcaggcgccatcctcatccaactgcgatggcccaaggcggcgacgccgacctccaccgtggcgcacctcaccggtggtcactgtctagcgcaccgacaccctaa

SEQ ID NO: 17773 - DNA, 603 bp, Zea mays
  Peptide Sequence Number=SeqID_61148
atggggaagcctgtcccatcactcctcatgctcctcctcagccgaggcagggtcccactcgacagtccaacccggtggcagggtggtcggccaagttatcccagcaaccatctcctccagagaacctgtaaaaattgtgccacaagcaaggctgagtatactaatactcagctagacttacccggttacaatggatcaagcagtctcattagctgcgagaagcagacgattcgaatcgagtttttatccttgcaagggctcaccgccttggcgtacaatgccccactgaccccgactggccgtcgtgcagtggccgcacttgtacccaccataaccggaatgggagacctcgtctcaggtcgcgtgaggggcaaagtctgcgggcaggttcactcaggtactaggcttaccgatttaccatatttctcggttatgcataaaaccggggcttgccttccaaagcagtggcaggcaggtcctcctgagctggctctggtgctggatctggggctacctcctgagcagctccttgctccggcacgaggatgtactctccgtcagcaagattacagtctatcgaaatgcaatgaacatgttttctag

SEQ ID NO: 17774 - DNA, 399 bp, Zea mays
  Peptide Sequence Number=SeqID_61149
atggctcagtcatccgctttcagtgttggtgaggccgtcgtgtctggaagccgcatcaccttcgactccgtcgacttcctcgtcatcgccaccgacgagctctgccttgccggctttgatgtgcatgtcatgacaagtgtaggaggacccatgcactctgccacctctaggaacaaggtggagaagcgatgcctcgagaggcatgccaccaccctcaagcgacaccttaataggctcattgcctccatcaaggaaaaggcagatggagcctcacccttgatgttcatggctatcatccaagttggtcgtcgtccaagtcatgaagttttatttcctatattttcgaactccctggactgcgggtactatttgtataaaagtcaagggctaaaatactaa

SEQ ID NO: 17775 - DNA, 156 bp, Zea mays
  Peptide Sequence Number=SeqID_61150
atggagattgtttggagcacgtgcgtgggcaggtttcctctaatctgggcaaaggacttggctcaccgatggagccactgtaatggaagttacggtatggtgttctctaatcgcctggagaacctgtcgaggggtctccaccttctacaacaatga

SEQ ID NO: 17776 - DNA, 1305 bp, Zea mays
  Peptide Sequence Number=SeqID_61151
atgaggggcgagaaccacccattaaatccaaagagccggaggtccggagcgcaggtggcactgacggtctcgtcggcggaggcaaccgcttctgcagggggaagcctcacctatggcgaccaccacctcagcaccgacgacatcggccacctgtgcgccaacgccacaccggcgaatggcggccgccccagtgcgcaccggcaggtcctcactcccgtcctcgccataggagcgaggacgagactatcccagaacacgaacaccgccctcgcggcgtacgacgtgttgtgcgacaccccggtgcggccggcggcgcgggaagggccgtggacatggccggcctgcgcacggcgcgaccgtcgcccgtgcagtggacggacaaccacaccccgaccgggcagcaggtggaagttcgcctcctccgtaaggctggtggacgtgcttctcccccgaatgctggaggaagaaacgggtcgccagcccatgcggaaggcagggccccaactcggctcgccctcctccccagcacggatgatgaacgtccttgaagctgagggcaagagagaggccacggcccgactcgctcttccccaccacaaggccgacagtcatcatcctggggcacgcgacacctctggcaggcgaagcgggcgccgtttcgtctccgtcatgatgaccgcctcaaaaagcgaaggaagcgggccccgagccctcctactgatcaggggttcgaaggttgcgccctacgaggttcggcaaccgccccagagcactcgggctccgagccctttactgatcaggggttcgaaggctggcccctcggaagggttcgacagccgccccagagcacgcagagtcagggatgaccctgggtacgtccgttacatggccaaggctcgggctacgctcccgaggtaccctaggacatttccgagaccaacgggaacgatttgtaatggaatcccaccggagggaggcaccgagccctcggaccctatcaaatgggtccgggtccagcaaatcacctgcagtgggcgcaccctcggctcgcccgtagccaagctcgggcaaacattggcgtgcagcaacctcggccaaatcgccttaccaaccgaccgaaaacagcactattcaccccgttccgactactgtgccaaccaccaggcctcagcctcagcctcggcctcgggaggagtcacatcctcgcccgacctcggcctcggcctcaggagaagtctccgcctcgcccgacctcagcctcggaccgactacgccactggggatacatcattaccctacccctag

SEQ ID NO: 17777 - DNA, 93 bp, Zea mays
  Peptide Sequence Number=SeqID_61152
atggccaagatcgaaggcctcagcacagggagcttcgtcaggagagctcattcaacgaagatgaatgaattgcaggctaccccgtggccataa

SEQ ID NO: 17778 - DNA, 486 bp, Zea mays
  Peptide Sequence Number=SeqID_61153
atgaatccgaacagccggatctcgagcagacgtttgggattagatcttatctatttacatctgggccgcccgatatcaggtgaacgcctgagatctaacggcaagcccgggcaggggctccttgcctgccagcggcgataccgcctgagtccgtggtggagctccgctggagagggcggcgcgagcacgccgggggccctagggcatcgggaagggcttaggtgggtttggggcaacgtggcaaacgcggaagtgggcacgacattggcgcagaggcaccagagggtggcggtccgcgacgagatggctcggcggcgacgcagctcaactccggtgagcaatcgcacagacttaaatgcagggaaggggaaattagtggcaggggaaggttggttacctcaagggagaactctaggtctcttgaacggcgataggaacacggcgagacgtcgggtcgacggcagcggtgctccagctgcacggtga

SEQ ID NO: 17779 - DNA, 201 bp, Zea mays
  Peptide Sequence Number=SeqID_61154
atgaaggatgccaaacccatcaagactcctatggggactaatgggcatcttgacctcgacatagaagctttcgcgtcggagttcaccactgtgacgcaaacgtacggctctgcacgcgtcctcgtcgcgccgtcacccgccatcgtcgtcgaccccgtcggcgtagctgatttgtcctgctccatgaccaaatcgaggtaa

SEQ ID NO: 17780 - DNA, 435 bp, Zea mays
  Peptide Sequence Number=SeqID_61155
atggacaagaaggtaggaggggaggtaaatgggcataagaacaaaggaataagtaccatcaaggatggagttaagataggacctgcaaatgtaaaaggagagggcctagatgccataactacccgcaaccttgcaatggcgagacattctcccaccaacaccggggcgacaaatccaccggaggtcatagaggtcatatcctccatgtcggtggaaggggtgatactcctaccgggcctggcaaggaccacacactcggccttcttcttatttcttgtctggcgacacttcttgagcgccacctgggtctccgcctctacctcctcctccttcttctactccgccttgattgcggcatcctcaaagagaggtgaaagggaggccgacacggtcccaagcccctacacgaccagtggctatcacaccaaaagctag

SEQ ID NO: 17781 - DNA, 129 bp, Zea mays
  Peptide Sequence Number=SeqID_61156
atggacgagtctgaaaaaggagatcggcttcctgggactagtaattgtatcacatttgagtcccagaggattggggacgcttcaggtggtatcagagctgttaggttggccgcaggacgtaacccttag

SEQ ID NO: 17782 - DNA, 954 bp, Zea mays
  Peptide Sequence Number=SeqID_61157
atggaggttcgttgccaaaccagcttttgccagaataaagatggtttccccaagttgctgagagcatgcacagttcgcctcggaatcaggagtcagccagagtatgatggtcgtgaattcgtcgagcatggcacagagaagtgtgtcgtgactgtatacattggatctagtccgcgccatgtggaatggagtgtcactgctgcggggcacagattcaaagacacctgccaagtcgtcgtccgcaaggcattgagggccctgtgtcaaatttatgaagaagtggccgacaccccgctcagattctttccgccctttcagagaaactgtcccgtttggatgaccaggatgcatgcattggaagggcagcagctgcttgaggacgaccccatagtcctcaagcccgtgcaactgccttgggagagtcgtgaagtcattgatgttgaagccctgaagcaagccaaggatgagcacgtccagaagttgatggaggcctacttggtaacccataaccaacatagagccctgcggatccaagaacccgcttcatccaacccagttcaacccttgagagctgaagacccccagattcttgaaggtcacccggtctctatcagaggagagaagaaggcttgggaactcccggaaggatccatagtctttgaaggtattccagtcttccctcaggctatgaataagcaagagcaccccgagtcctcccaagatcctccgccagagttgtttgagcccctcaccatgaagaaaattctagcaccctcccttgaagtcaaggaagaagctgcaagcaccccgccagcaccgccgccctctgaggagctacaagagccagccccgcttgaggaagagttcgaccccgtgctgccatctcagtctccgccagaagaagtcatcaacatcagctccctcttgacccatccaggagatgtctcaaattga

SEQ ID NO: 17783 - DNA, 450 bp, Zea mays
  Peptide Sequence Number=SeqID_61158
atggcggttagacttacaccgattccacatctctccttggaaaggggttccttttggtggaaggacttcgtaaggtttgcatatcactacagagggattgcttctccgatggctggtgatgtgtctgaagcactcgacaaagcctggaaaacactcggcgaaggctttgccgagtgtgacactcgacaaagaaggatcgatgaactgtacatcggtaacggcttctttgctgagtactttttatcgagcactcgacaaagactttgccgagtaacactaggtattcggcaaagaaaattcgacgtcacaacgccaggtgacgacgacagagtctgtgccgagcgtccaccgagtgacactcgacaaaggctacctctttgccgagtgcctcctactagcactcggcaaagggatcatccgcgggccccttttgtcagttcctttgcctag

SEQ ID NO: 17784 - DNA, 834 bp, Zea mays
  Peptide Sequence Number=SeqID_61159
atgtcttcgcactccatgtatcgcgtccttccaccttccgagcccccaaatggggagcactcgcgtcgctttgtcttgctgtcgttggaggaacgcaacttcgcggaagttggtacctttcagccatcgctcggcttcaaggattttcatcaggcagcccagctgcatcccctcaccggtgcttcaaggatcttcatcacccttgctggggcggagagcgaggcgagccggggcctgccttcgcgtgggctggcgtcccgcctcttccagcttctgggggtggaaaccatcctccatctctgcggaggaggagccccccagccatgccggggaaggcgaactgttgctgcccagccagggtgcaacatttcatcctttgtctgggcgacggtggccagtcgccaccgggaggtctcactccattcttgttttcgtggcgaggatgggagtgaggacctgccggtgcgctttggagcgcccggcatccgccggtgcgatgttggtggacaggtggacgccgtcgacagcgctgaggtggtgacggctggagaggtaggcttttccgccgacgagaccgtcagcgccacccgcggaccgacctccggctctttggctttaatatctggttcgcgtcccttgagtggggacgcgaacgagagccttccggtggctgcgtccgtcctgggaccatggttgctgctgtggaggtcgctggcgagtcgcccggagtctgttgtcccgcaggctctccgatgtggagaacatgtaggtatttttgggtgtaataccgtgtttttcctcattttcgagcactggaactcgcctgttgactag

SEQ ID NO: 17785 - DNA, 714 bp, Zea mays
  Peptide Sequence Number=SeqID_61160
atgcaggtggcatgcaaccgcaccaagggggcacaccctttcgacttcgacgcgtccagcatggaggcccaggcccacacgtcatggactgggaaaggggatactccgaaagggatccttctccgcgaaggaagcgggccccgaggccccctactgatcagaggttcgaaggctggcccctcggaagggttcaacagccgcctcagagcactcgggctccacgcccactactggctggcccccgaagggttcgacaaccgcctcagagcacgcagagcgagggatgaccctgggtacattcaatacataaccaaggctcgggctacgctcccgagcgccgcctgccctgctccgactgccgggccactcgctagagtgaggtcgacagcggctaagtccagcctcgggcgacataggaagctccgcctcgcccgaccccagggttcggccccccgtctcggcctcgaaagatggacttcgcctcgcccgaccccagggctcggactcaaccacgacttagaagacgacgaactccgcctcgcccgaccacagggctcggactcagcctcggctccggaagatgatggactccgcctcgcccgaccccagggctcggactcaacctcgacctcggaggaatcaccacctcgcccaaactcgggcccggaccggccacgtcgccaggggggccatcattaccctgcccctagctag

SEQ ID NO: 17786 - DNA, 246 bp, Zea mays
  Peptide Sequence Number=SeqID_61161
atgtcatcgggctggagccagtcgctagtgcgtggcaccattgatgaccataaacagcagcttcttataaatgcaagttcaaaaagaatgtcgaagagaagcgagcaagattcagatgttgttggtgagaaaatcgtgactgttgatgtgaaacaagcccagatggcaagaaagaatgtagaggtggcgactgagaggaacttgtcgagcgacacggactggtggactggctcgaggcgctactag

SEQ ID NO: 17787 - DNA, 441 bp, Zea mays
  Peptide Sequence Number=SeqID_61162
atgaaccgtcgaagacagtatgctgtcaacgacggcagtgacaagcagctaatgcgcgagatcatgtcctttgacggcgggatgccgcaatggcagatggccgcacccgaggaagacgaccccgacggtggaagagacctgcgagtggatctgaagcagagttggcctccaccaccggtcgcgctctcagccagcctcattgtggaggatgtcgcgttagaggtcgacgacgggagcgtcgtgtgctgggtcaccaccgccgcctcagggagctccttctccgtcacatctgtggccacatcgcaacttatcatggagcagatcctcacgcgatctgtgatggcatggacccaacggtcccaacatgttccttcttccactattcagatccatcttttttccttcaccctcctcaaaatcgcacttcgtttctctttgtaa

SEQ ID NO: 17788 - DNA, 651 bp, Zea mays
  Peptide Sequence Number=SeqID_61163
atggcgtctccccctcccttcgacctctgcggcgatctcgacgacgacgacatcgatgaacccgtcaccgccgtccccaaggatcgtcgtctccctatcgccacccctacaccgaatgtcctcaacgaccacctcctccgcttcacccgcaacctccagcgccccacccaaaaccctaaccctagccccaatccgccaccgccaccacccccagctgtcgccgaagaacaagtcgagaaggtcaagctcgccggccgccgcctatgcaaacttgccaccaccaccaccgccactcagcgagtggatgaagaggagctaagaagcaagggattcacaaggagaccacccaacaccccaacattcaggaaccatggcgtcagcgacgatgagctgggtcgggagaaggagaaccttggagctatggagaacaatgctgaggatgttggatgggagaagatagaggacttcaagatggatccaactggagtgctgcaacatccaagccacacaagctcccaggaaagatattcaagatgcttttcgcccaccagcgcgagggcctccgatggctctgggtttagtgttactacttacgctactttgctgtgtgcccatagtagttggtgcccttattttaactcagggttgtaa

SEQ ID NO: 17789 - DNA, 1785 bp, Zea mays
  Peptide Sequence Number=SeqID_61164
atggcgtcgcggcaccggaatgcttctccggtgacggcagggaaggactcgccgcagcctgcctcggcggcaacctcgctgcggcttgtggcagagttcccgctcgacgcgcccgaggccaaggagagcgtgaccgttaccgtccgcttccggccgctcagctcgcaggaggttcggctgggggaagagatcgcttggtacgcggatggggacaccattgtgcggagcgagcagaatcacagcatcgcttacgcgtacgatcgggtcttcggaccaactacaacaacccgacacgtatatgatgctgcagctctgcatgttattagtggtgccatggagggaataaatggtacaatatttgcatatggagttacaagcagtgggaagacacatacgatgcatggagatcaaagatccccggggatcatacctttggctgtgaaagatgcatttagtataatacaggagactccaaagcgagagtttcttcttcgtgtatcatacttggaaatctataatgagtgccctttcgcccaggaagtctgtaatcaaattctcaattgggaaggattgacaatgccacaacaagcaaacccatcaaactttgatagcattagcgagtggtgggaatcggcggcttctcacatctccagagaccgcagtagagaattcaatggatctgtgatctacaccatgtggaatatctggaaagagcgcaaccgaaggatcttcgagcacaactcgctatcggttgtaaacgatcttcttaatccttcgggtcagaacttacggattagggaggatcttcagggaacatttgtcgagggcataaaagaagaagtggtcttgtctcctgcacatgctttgtcccttattgcagccggagaagaacatagacatgttggatccacaaatttcaatttgctaagcagcaggagccatacaattttcacactgaacctcatcgatctggcaggttcagagagttcaagggctgaaactacaggagtacgccggaaggaaggatcttatatcaataaaagcttgctaactcttggaacggtgatatcaaaactgactgatggaaaagctactcatgttccatttcgagattccaaattgacacggttactacagtcatccttaagtggccagggacgtgtttctctaatatgcactgttactccagcatcaagcaattcagaagagactcgtaacacgttaaaatttgcccaccgtgcaaagcacattgagattcaagtgtcacaaaacaagattatggatgagaagtctttgataaagaagtaccagaatgaaatttgccaattaaaggaagagctagaccaactgaaaaggggtatactttctggcactccttcgaaagatgccacagaagacaatgtcattctttggaaacagaagctagaagatggtaatgtcaagctccagtctagactggaacaagaagaggcagctaaagctgctttgcttgcaaggatacaacgtctaacaaagctaatcctggtttccacaaaagcaactcagactcctagactgtcccaatgtcctaggccaaggagaagacattcttttggtgaagaggagttggcatgtctcccacacagaaggcgagatattgtattggatggtgaaagcaatgatttatttgttgctatggaaggatttgatgaaacatttgaagtttcttccaaaggagagaacaagaatcgcaaagggcttcttaactggttcaaacttcgggtatacaaatcagacaccgtataa

SEQ ID NO: 17790 - DNA, 294 bp, Zea mays
  Peptide Sequence Number=SeqID_61165
atgggcgattctgacttctgcgtgcgcagagggcgcattaaatgcgcggcagagagccgttggcgcggagatgaccgttgcttcggaggcacaccggacagtccggtgcacaccggacagtccggaactaggtgtaagcctaattccctttcagcggggcatgcagacatgggtgcgggtctggtgggtggggcgcacgccatgggcacgacggttgcggaggaggaggacgggtttgacgggcagggcccacgtgccagcgagggcaaacgaccgaacgggcgaatgggctaa

SEQ ID NO: 17791 - DNA, 747 bp, Zea mays
  Peptide Sequence Number=SeqID_61166
atggccgcaccgcatgacatgcacggcgtggactctttcgcgcagctgcccttcgtccgcggcgcggcgccgaggcctccggcggggagcagggacgtcgccaccagcatccgcctcttcggccgggacttttccagcgaccagcagcaggcggtccagctgctgctgctcaaggaggacgcggcggcggcggcggcgtccggggagaggaagttcgagtgccactactgctgccgcaacttcccgacgtcgcaggcgctgggcgggcaccagaacgcgcacaagcgggagcggcagcacgcgcggagggcgcacctcgaggcctccttcgccgcgcactgcggcgccgcctacctacccggcgcgcacctctacggcctcttcggctacggcggcggcggcggcggcggccacaccgcgcactacccggccgtgtgggcaggcgccgcgccggggatctacggcggcgtggggcccgtggcgcggcctcccgtgtacggcgccgtggccgtgccggggacgtggaggccgtccccacctgggagtggcggcgctttcgtcgcggctggccgacccgtggggtacggagagatggctggcaaagacgacaaggcgaagatgagcgtggtggtgtcactgcccgcgtcgttgccgtcgtcgtgcttgtccggccagtcggcggagatgatagggaggtctgagttgggacacacggatggagtcataagcttggacctctgtttgtag

SEQ ID NO: 17792 - DNA, 360 bp, Zea mays
  Peptide Sequence Number=SeqID_61167
atgactcgtccgaggccacctttgggcgtgagacgcaatcatgactcgctcaaggccatgcccagaagggacaggcagtcacgagtcgcccgagaccaagcccaggcgagagacgcaatcacgacttggccgaggccactctcgggtgggagaggcagtgacgactcgcttgaggccaagcctacaccggacaaacagtcacgacttgtcctaggacactcttgggcaggagacataggcatgagtcacccgaggccatgcccaggtgggacaagcaaccatgactctcccatggccaccctcgagcgggacaagcagacacgacttcccaaggacaaccccgtgcggtactggcagtaa

SEQ ID NO: 17793 - DNA, 90 bp, Zea mays
  Peptide Sequence Number=SeqID_61168
atgatgaagattggaaagacgaagcatcttctttctcttcctttcgacctgctgatggatagcttcgagatcctttatctcctggtctag

SEQ ID NO: 17794 - DNA, 805 bp, Zea mays
  Peptide Sequence Number=SeqID_61169
atggaccggatcggccgcggcgcgaacgcgggcggattcttgaacccggcgaaaggggggggagctcaaaggcggaggcctccggggaaggcaagccgccttgccgggaaaggggggggcctcccccccgggaaagggcccggaggaacggggggcccgagggccccacctttcaaaggggggcggtcccccccggatgggggaggtgcgaaagggggccgaatcctaccgccccccggaaaagcggtggtggactccgccctgagattgatgtggaggattatcttgggggtggctgacttcaccagccgtactgcgtcgggggcccttacagcgacgttgtctgccgaggtcgagagacttcggacgcaacacgcggacgctgtccgtgagaagtcggcctccgacagcaagtgccgcaagctggcggagaaggtggccgcccttgagaaggagaaggcagacctccggcgccagctgatggaggagagaagggaggccaacgaagccatcgccaaggagcagtctgcgcaggcggaggccaggctggcgcgggcggagggcaatgtcgccaaggagctcgccggggagctgcagcggcggcttgctgccttcgagagccgcacggagggggccgaggccgcggcgcgagcggaggccgaacggacgcgcacgcagctcatgacttcatatcgcgagctgggtgtgcggacgagcgacttcgaggtgccggagcgagaggccggacttcactgtctggagtgggtgcaggaggaactgcaggagctccccacagtctggcggg

SEQ ID NO: 17795 - DNA, 177 bp, Zea mays
  Peptide Sequence Number=SeqID_61170
atggatggggtgaagctagaggcagaaggagaggaggcgagggagcggcctggcgcggtgctaggcgagatgggttgtggcagcggggaaacagaggacttaggcccccactccttgttgtcgccggtggagaggtggatctcgtcggaggcgctatgggtgtctgagtggtcgtga

SEQ ID NO: 17796 - DNA, 801 bp, Zea mays
  Peptide Sequence Number=SeqID_61171
atggccatttacaaaactacactcaaatccaagagttcaataaatgaggtgaatcaggttgctcagctgaggatcatcataaaatcaaaatcttgcaatggtgttgggccattgtgcacttcacaacagactgagactgaaaagctgctagcccagttagttgagactgagatgaacagatgtttgaaggaggacacttacaaaggaaagaagtttaatgcaatctgtcacttcttgagctaccaagctaggggagcactgccttcaaagtttgattgcgattatgcctacgcaatattactactttattcgcttgatgggatgcaaggcttctcaagtggcattggaatgtgctcttcaatcacatccaaacatggtgaaatggattaccgaggtgttgctaatattaatgtcactgacatccagtttgtagagcagctctttttaaagttcccctccaagctgacaccccatccaccatcatcatcggcacatcgtgccttgttcgctgcttgtgacgatcaccgttctcttcaatcgcttcgacgacggatattaatgaaaaaaatcatgtctatggactccaggaactgcttaatagtgatagagactgcaaatgcacagttatctcacaatgatggagttctcattattgttcatagggaggatgttggaacaacatcactgagggatggacggttcgaggatcccgtgtctacggcagaagaggccgcgttctgcaatgcctacacaagttttggttttggcttgtacctgtaccatggagatgagatgtcgtag

SEQ ID NO: 17797 - DNA, 360 bp, Zea mays
  Peptide Sequence Number=SeqID_61172
atgtcaagggacaaagattattatgattacatgctaggcattgtagaccttaccaagaaaaggagtacagatgatgaagctatgtttgttttgtatatccagagttttatgcttttgtgtttgtcaaaaggtgaaaagataaaggatataaagcattatatggatatgcgcttctggatatgttcttatgccatgaaaattcaacgagtgctacgtccttttcgtaatttaccatgggttaatatcagctacctcgttctacaagctgtggtcatgtggggaaatggtaggcaaattgaatttgttagggatgcaaggattcttcgaaggaactttgtgattgatctattaagttactag

SEQ ID NO: 17798 - DNA, 984 bp, Zea mays
  Peptide Sequence Number=SeqID_61173
atgagggatcgggaaaggggatatttcgaaaggatccttctcagcgaaaaaaacgggccccgagccctcctactgatcaggggttcgaaggttgcgccctgcggggttcggcaaccgccccagagcactcgggctccgagccctttactgatcaggggtttgaaggttggcccctcggagggatttgacagccgccccagagcatgcagagtcagggatgaccctgggtacgtccgttacatggccaaggcttgggctacgctcctgaggtaccctaggacatttccgagaccagcgggaacgatttgtaatggaatcccatcggagggaggcactgagccctcggaccctatcaaatgggtccgggtccagcaaatcacctccaggtaccttttggagcgcgcctctgggccacttgccgacccttatcgaacggggcttgggcgtccgctcggatcacccgatagcaactcactggaaacaccatcttcgacgcccaccgagggaaaacaacactattcaccctgttccgactactatgccaactaccagggtaaaactaacgacagtaaatcacgacctcccccgagttcagcctcgggcgcaatagggagctccgcctcgctagaccttgggcctcggcctcgggaggagtcacaacctcgcacgacctcaggcctcggcctcaacctcggcctcgggagaaggtctccgcctcgcccgaccccaggccttggcctcagcctcggcctcgggagaaggtctccgtcttgcccgacctcaggcctcggcctcagcctcggcctcgggaggagtcacaaccttgcccgacctcagcctcggcctcaagagaagtctctgcctcacccgacctcggcctcggaccgactacgccacaggggatacatcattaccctacccctagctagctgcctcaggctacgaaggaacaagaccggtgtcccatctagattacttcggtaa

SEQ ID NO: 17799 - DNA, 231 bp, Zea mays
  Peptide Sequence Number=SeqID_61174
atggcccgttgggtagtggcttgcatgcgttgggctaggttcgagagggagtgcggaggtgtgccttgggctcacatgtgggaggcagacgacagaaccacgggggccgaggctgtcatgtgggcccgacatgctaagtgtggcagaacagggaatggattgcacgatgggaatggcaggtgggtccgggcgatggcatgtgggttcgacgtgctccgtgtggcagaatag

SEQ ID NO: 17800 - DNA, 945 bp, Zea mays
  Peptide Sequence Number=SeqID_61175
atggcgaaggaggcgtccgtggacgacgtgatgaaggtgctgatggcgtcgcgcaagttcgagatgcaggagctctgggccacctgctcgcacctggtggcgcgctcgggcctctccgccgacctcctcgccaagcacctccccatcgacgtggtggccaagatcgaggagatccgcgccgccgccaataagtcccccgtgtgcgccgtctccggcggcggcgggccgcgctcgccgttcctcctcacccaccactacctccccgtcaacggcgcgtcggcgtcggcgtcggcgtcggaggccgagcgcgaccacagggtccggcgcatgcggcgcgcgctggacgccgccgacatcgagctggtgaagctgatggtgatgggcgaggggctggacctggacgcggcgctggccgtgcactacgccgtgcagcactgcggccgcgacgtcgtcaaggcgctgctggagctgggcgccgccgacgtcaactcccgcgccgggcccgcggggaagacggcgctgcacctggcggccgagatggtgtcccccgacatggtgtccgtgctcctcgaccaccacgccgaccccagcgcccggacgctggacggcgtcaccccgctcgacgtgctccgcggcctcacctccgagttcctcttcaggggcgccgtgccggggctcacgcacatcgagcccaacaagctcaggctctgcctcgagctcgtgcagtccgcggtgatggtgaccacgcgcgacgacgacgccggggcagggggaggaggaagcgatgccgccgacgacagcttggtgagcctcaccatgaattccacgctcatgtaccagggccaggagatggcggcagcggtggccggcgaggccaggaaagggagcagcggtggtggccgagggagcccgtccaacttgtacttccccactgccttcccataa

SEQ ID NO: 17801 - DNA, 1073 bp, Zea mays
  Peptide Sequence Number=SeqID_61176
atggcggtcaccttcacctcatgcggaggtggcggctccccgaggctgcaccgtggcagcggccatctaaggcgcgcatggtggcgacacgcatccaaggcatgtgcggcggcatcagttctcaacgaaggattcgaccatcacctcgagaagacttccgcctcgcccgagcccgactgcgacctcgacatctacaacaaaggacattccaacccctcgccaaccaaccatcggcctcccctcaccactcttcctcctgcaaccgccgactccgatctagacaccgccgcccgagtgcctagaccccagatcacgctctatccccctccccacttcttcctcccacaaccaccgaagaagagccacgacgctgtgggggaactggaggaggggcggccggctgtagggcgggatcccgttcgagatgtcctaggggcagcacatcctccccgtccacctccattgtcccggtcttccatcccaagaactcctcctcctctcgcctcatgggccgcctcaacccctcctgcgtgtaggtccactccgccgcgaacctcgccaccaagtgccgccacccccctgctcccccggcaccgccaactagccctccaccagcaacgtctgcccgccctacgacgtcatgtacggctccaccatcggtctgctcatcatgacactgtcctgtcccaccgcttcaacgacaacgccgccatgagcggctctctcgtcctcggtggcatcggaggcggcgagggcatgcagtacgtgccattggtgaagagcgcagcgagtgacaagttgtcgtacgacatgtactactacctggtgttgaggggcgtgacagtgggcgggaaggcggtgcggctctcggcgcaggcgttcgcggccaacgcagcagggtccgaaggcgccatcgtggactccggcaccacgttcacatacctagacccgaccgtgttccagcctgtggcggacgcggtggtgacggcggtgggcggtgggtataaacggtccaaagacacagaggtcgggttggggctgcacccttacttcgcgttgccacagggtgccag

SEQ ID NO: 17802 - DNA, 1599 bp, Zea mays
  Peptide Sequence Number=SeqID_61177
atgaccatacgcccaggggctggcaaggaactaaagataacaaaagatacggttcatctgattttgggtttgccatgtgctggaggaggcagggagtttactgattggtacggtgaagtggatgctgctgcaaaactgagacgtgatctcaatgttggtaaagaagaatttgatgttgtcaagcttcaagacaagatagtgcttggcaatgatgatgagctatcaattagatgcttttttctgattctattcaatcgacttctttttccttctgcttcttggggcattacaaacaatgaggtactcatgacttcaaacatggcccgaatggctgaaattgactggtgtcaactagtttacacggatttgtgtgatgctgccgcacgttggcataaaaggaataaaacaaacatcacaacaacaatatatggatgctcactcattgttctaatttactatcttgatcacctacatcaccctgcatctcctgataacaaatatgatgttaaaatattattactgctaactgttctatctgactttatacagtttcgtagccgttcagaaatgtgttacgtcatggctccagaacggcctgtttctgccgttttcaacatatatgtgccacgtatcaagcatttgattggcaacaagttgcaatgtttgccctcccagcatcggccaatgtttcaatcaatgtttgatgctcatgacaaagaggtggataagtactgtgattcccttcagctgagtcatcagatgattgtttcgaagcagattgaactctctgaaacatttggtgaaatgatcaatgaagtactgagagctgcaacgcagcgcgattcacagcaagaagataacccccccactacctcaatgcctccaacaaatgctctagtatcctcaccacctgttccaacacctgataaacaacaacatgatcaggaaatccatgttcctactgatcatatcaaagtatcagatgatgctcccacaacagacaagcctgctgctcctgagttaacaccagatataaatagtgcaactactgaccttgttgcaaaggatagttcctctaaagctgcagtcgctgaacctccccacgtgtcacgtgaagactgtgctcgcaacctacttaagttcattttgtcaggaaaactagatccgagcatgtctatcattaattttggaggatttggaggttctgtcctcgatgttgtccagtcgtttggtcctaataaatgtcttgataatactttcatgcagggatttatcgactgtattcgtgaggatgatgtattatacaatccagattctgtaatcaccactctaatactgaatgtcaatgttgggaccgttttgaatatcgaggagttcgaacagcacagttcaaatccacagcccttctcaacatcacttctcaaagaacaacttgaaccgacgcttccttcagatgaagtactgaaccaaattaaattgatcctggttcctatgctacgccgtagccactggaccctttatgcaatcaactttgaatgtcgtcgaatagacatcttagattcaaatccttatggtacattgcttggaggcactacctag

SEQ ID NO: 17803 - DNA, 288 bp, Zea mays
  Peptide Sequence Number=SeqID_61178
atgacaagcatcaggttcaagggccacggcatgctggcgccttttacagctgactggcagagcaatgatttgcaccatctgatcattgagagatctgagggttcctatgtctatgacattaatgggaacaagtatctggactctcttgcaggattatggtgcacatctttaggtggtagagagcctcgattagtcaaagcagcaactgagggtgcatggttatgttgtgcgattagatccatctatgaattgtttgtgcttctacatttaggaacaatgggcaattag

SEQ ID NO: 17804 - DNA, 654 bp, Zea mays
  Peptide Sequence Number=SeqID_61179
atggatgtgttggatgagctcgatgtcgttctaagccgattagagccagatattggatgtaatgagtcaacagatgttagtgatgatgaggaagacaaggatgagcataacaccatgactggatgtgaacatgcgttaacaataataacaactggtaaccaggaggacaacatgagaattccacatgaggttggtgatacaagttctccgtgtcacgtagcacatgaacaaatggaacatattgctgcatcctcagaagctaaaaagaggttgaattttaatgtggatgttataaatctgagtatgccggatcgtgcaagaccaaaaggacggacaatcaaaaattcagaagataggattatgagactaggtgcgaaaggagagaaaaagaagaataggagatgccaattgtgtggtatagcagatgggcataacagcagaacatgtttgtctgtggaagagaacagggcaaggctagcaaaactggctaatcgaaagagaggacgaccagccggatcaagactaaacaataaaacaactgctccacagtggaatgaaacatcaactgctaaaaacatcgtattgatgaagaagtggaaaatgaagaagccgatgagcatatggatttgggcgaataatttgaagtgtgactaa

SEQ ID NO: 17805 - DNA, 1557 bp, Zea mays
  Peptide Sequence Number=SeqID_61180
atgcagccgggctgcctgatgaaaatccttgaagccgaacgatggctgaaaggtaccaacttccgcgaagttgcgttcctccaacgagagcaagatgaaaacgacgcgagtgctccccatctgggggctcggaaggtggaaggacacgatgcatggagggagtgcgaagacatggttgccatccaagggggtcaccctccttttaaaggcgactctccccacttgcgtcctcagccgtcgcggaccaattcttctccaacacgctccaaggtcctccccctacgacatgggggctgggtcccacgcgtcatgcaagctggcccaggacagaaggagccaaaaccgccgtgcgcggtgcgcgcaactgcccagcggttacaagcattcctccactatcgcctggaccagcgggtaaaagggcggaccgccatgcaggcggcatgcaaccgcaccaagggggcgcaccctttcgacttcgacgcgtccaacatggaggcccaggcccactcgtcatgtaaccggcgcgctggttactacgtgcgagaaactacaccgccactcgcgccagtaccgcgcctcctcgactgcggaaccagtgccgcaactcgaggcaaccctgcgcatgacccgacagtgccaaccgagcacatcggtcatgggtcggtcagccgcgggagaaggcgcgacggtcgatacggccagaaatgggccggcagtaatggaggtggcaggcgggcggaagcagcagtcacgtcgtcagcaagctcacgccccctcttgggacagcgagagaaccctctcccacggcgtgaagacgacgcggaccgggaaaggggatactccgaaagggatccttctccgcgaaggaagcgggccccgagccccctactgataagaggttcgaaggctggcccctcggaagggttcagcagccgcctcagagcactcgggctccgcgcccactactggtcagaggttcgaagactggcccctcggaagggttcaacagccgcctcaagccactcgggctccatgcccactactgatcaggggttcgtaggctggcccccgaagggttctgacagccgcctcagagcacgcagagcgagggatgaccctgggtacgttcgatacataaccaaggcttgggctacgctcctgagataccctaggacatttccgagaccgacgagaacgattttgtattggaatcccaccagagggaggcatcgagccctcggaccccgtcaaaaggggattgggtccggcaaatcacccgcagcctcgggcgccataggaagctccgcctcgcccgaccccagggctcggcccccgtctcggcctcggaagatggacttcgcctcgcccgaccctagggctcggacacagcctcggcttcggaagacggtctccgcctcgcccgaccccaaggctcgggctcaacctcgacgctggacgacgaactctgcctcgcccgacccggggctcgaactcgacctcgacctcggaggagcctccgcctcgcccgacctagggctcggaccgaccatgtcatag

SEQ ID NO: 17806 - DNA, 138 bp, Zea mays
  Peptide Sequence Number=SeqID_61181
atggcggtgggcgacctggcgttcaaggcgctaacggctgggctgggcgtcgccacgctctacctcgccgccaccttccccgtcaacgtctaccgcggcctctcgtggcactccgagcagttcctttgcaagcgttaa

SEQ ID NO: 17807 - DNA, 588 bp, Zea mays
  Peptide Sequence Number=SeqID_61182
atgtcttcttcctcccttatgcgtcgcgtctttccaccttccaagcccccagatggggggtacccgccgtcttttcgcctcatcgttggaggaacgcaactccgtgggagttggtacctttcagccatcgttcggcttcaaggattttcatcatgcagcccggctgtatccccccgtcggtggtcacccaagacggtgacctccagcttgatggtgaaggaaagcgagccgggctgcgatcttggtcccaccctcagcttcaaggatgttcatcatcctcgctggggtgggggccgggctgagccggcgctctacctcccgcgcgggtccgtgggtctccctctcccgcggcgttcgggggagagggtgctcactggccctgcgggcggcccggacttcgacaacgcggggccggtcgacggcgggcgtcgtcacctccagcgtgtcgggctcgtcggcttggctcccggcggcccctcccgccggagggcggctgccgcgccatccgggttgtccgtcagcgggaccgacgccggagttgatcagccgaggcctcggaccgggctggcgcccttggaagatggttag

SEQ ID NO: 17808 - DNA, 1580 bp, Zea mays
  Peptide Sequence Number=SeqID_61183
atggtgacctccggcttgatggtgggggaaagcgagccgggctgcggcctctgcccctccctcagcctcaaggattttcatcaccagggctggggaggggactgcagcgtgcccggctttcggacgcgagtggctttggagccgctcgcggcgccggcgtctgccacggcggctagaagaggttcttccgccggcgtgatagccaaggctggccacggaccgacctccaactctacggccttctgcccgcccttgccttacgagttttggcatgggcgggggcctcctggcagcagcatccgccatgaggtcagtgctgccgctgttcggccccccggagcagaagtcgtcgtcgtcgccgctgctggagcaggtgacggcgcgccgttcgttggtcttccgttgctccgcagggcttcccccacggagtggggttactcgcctgttgattatctgacccgcttcacaaagcatgagtcgccccgtgtcaaggtgacgagtgagcacgaacagaggcggagttggctcgaaaatgaaaacctggttggccggagcctagccgggttgtccgtcagcgggaccgatgccggagttgatcagccgaggcctcggaacgggctggcgcccttagaagatggttggccgaggcccctggggtcagtgtccatccctctcggtccctgcccgccacttcgtctgctctccatccctcttctgtccccatgccgcgcccgccgccgcctaggtcagtgtccatccctctcggtccctgcccgccacttcgtctgctctccatccctcttccgtccccatgccacgcccgccgccgcttgcttctccacttttttgactgtttttcctgccgtcctagctatgggctccgccgagggggatggaagcgcattgccggaattcgccgaggtaacgtccccaaccggccgctacggcaaacctccccagcctgaccgcccgcgccgcccgaccgcgatgccacccacgccgccggagacggagacggagacggagccggaattcgccgaggtcaaccccaccggccgctacgggcgggtaatgcctctcttcccttcccccgaccaccctccccgcctccgatttggatcggctccatggtaccggattaagcacaagaaggtagacattagagctttaaagaaatggtcaaggcaaatcttgagtggtcttgtctacctgcacagccatgatccaccagtgatccatagagacttaaaatgtgacaatatattcacgaatggaaaccagggtgaagtaaagattggagaccttggtttagcgaatatcctggataatgcacgttcagctcatagtatcattgatcaagatgtaactgcgattgcagaaatgatagatgctgaaatatgttcgcatattcctgattgggcagcagaggagtcaattgacaaccaaggggatgaagctgcttactctgagacccatagttcagatggtgatgagggaacttctgaactgagtgatgagatcggttgccgctacacccacatcggcgacatgcactggatcttcgcccgccatcagcgctc

SEQ ID NO: 17809 - DNA, 231 bp, Zea mays
  Peptide Sequence Number=SeqID_61184
atggagcctgacggagggacagctgtcggagcggtcgagtccttgctgacgtccccctgcttcctgccaggggttctcctctacttaacctctcgcagagggaagcggaaggagaaaggtcgcatgctgcacgccaagggacaggcagctgaaggacaagagtctcgcatgcagctgacaaacagacaggcaactgaaaggtttacgtggttagtgagtgctaaaaattaa

SEQ ID NO: 17810 - DNA, 546 bp, Zea mays
  Peptide Sequence Number=SeqID_61185
atggagctcgctgcacatgaccatggagacaaggcgaaaggcctgctacagaagaggagctcgatcggcgatgggagcgaccatggccggacctgggcgaggctcttggcagcagaggaagccatcgcgctgctacagagggaatggcgagctgcacacacacaaaagggggaggtcgacctggggaggatggcggccaggtggggctgctcgaggaactccacggccaggcggggatggccgaatttggagcgaaggagctctgggcgagcaggggttgggcgaataggatctggcctggagctggactgcgtggatgagagctttctacgcctgcgcctggggaagggaacgcacgtgggggagctcgcggcttgcgcgccatgggagagggaaaggatccctgctgctggcgaggtgcgccagggaggtagccatgggagctcccttgctcctgcgcgaatcagagaggaggaaaacgccaggaaggaagaacgccggctggggaagaagacagggggaggagcggctgctcggttgatttaa

SEQ ID NO: 17811 - DNA, 546 bp, Zea mays
  Peptide Sequence Number=SeqID_61186
atggagctcgctgcacatgaccatggagacaaggcgaaaggcctgctacagaagaggagctcggtcggcgatgggagcgaccatggccggacctgggcgaggcccttggcagcagaggaagccatcgcgctgctacagagggaatggcgagctgcacacacaaaaaagggggaggccgacctggggaggatggcggccaggtggggctgctcgaggaactccacggccaggcggggatggccggatttggagcgaaggagctctgggcgagcaggggttgggcgaattggatctggcctggagctggactgcgtggatgagagctttctacgcctgcgcctggggaagggaacacacgtgggggagctcgcggcttgcgcgccatgggagagggaaaggatccctgctgctggcgaggtgcgccagggaggtagccatgggagctcccttgctcctgcgcgaatcagagaggaggaaaacgccaggaaggaagaacgccggctggggaagaagacagggggaggagcggctgctcggttgatttaa

SEQ ID NO: 17812 - DNA, 648 bp, Zea mays
  Peptide Sequence Number=SeqID_61187
atggacgacgacgacgcgggcgaggagcgggcgccggggcggggcggggtggcgtgtcgatggccggtggcgagccgctggcgccgggaggggatggggctaggcggggttggccgaacggggcgcggccgtgggacgggcgaggccgggagtgggcgacggcacttgcgggggggggcgctggtggggccggccgtgggcggggcggcgcgggcggagcgttgcgggctccagcggcgcggtgtgaggccggccgggggcggggcggcgaggccggccgggcacggtagagggtggcgcgacaatgcggcgagggcggggctccggtggcgcgatagagggcgacgcgggggagggcggcgtgggctccggctccggcggcacagatgggcggcgcaggcaaacagggggcgcgcggttttggcaaacagagagcgtgggcgcgtgctcgggtcaaaattagggcatgggtcaaaatcagggggtcggcgccaagatccatggcgccgacctcctgacacgtggactgccgcggccaggggggtcggcgccatagatcttggcgccgaccacctgacacgtcacggccagccgggcatccacgtcaggcagataggcgccaaaactgttggcgccagcacaccctag

SEQ ID NO: 17813 - DNA, 222 bp, Zea mays
  Peptide Sequence Number=SeqID_61188
atgaggccgcaacgaagaatcgttgtgtggggggaatattctagtgtttttttatgggtatctgacctttttagcatctatttgagtgaagaagataaagataatgtttcagggataagaatccacacttacctggagacatggttgaaacgcgatacggccatctatgacgtgtttcgcttaaataacaataacataaaacttaggcttgaagaagcctga

SEQ ID NO: 17814 - DNA, 870 bp, Zea mays
  Peptide Sequence Number=SeqID_61189
atgacttctcacggatcctcggacgaagggaatgcacagtcccacacggacgggcttgcacgagagggtttcccccgtatcttgtgggaggtacttcagggagctggttacacgacgcctccccagtacgcggtgcagctgtttgagaagcaccgagtgccccgctgtaggatgaggatgaccctagagcctcatcccctgcagccaggatggcgttcattggattcagagtcttttgaatacagggctgaggatactatcgaggcgattgctcttcatggactgaccacattatgtggtttccaccccttggagctgtccacccaccccattggtttgttccccgcagagaaggaggacgacccaatgtggaaggaccgagtggagcatgccaaggatatatgggctatctacctaggtcagactgctcacttgacggtgcggtgcatgaatgccctgtatcgtctgcaagtgatgcgaggagaggcaatgtctcatctgatggcactgttggaggctaccaagatcaccttggataacagagaggaacttgtggtagacttgtccactgagatggtggaaaaagacttacaagtggaacaattgtcaaatgagatccaagagcttgaggagctagtgggaaccagggagaacaccattgaggttctcgaggatcaatttataaacaaaaagcatcaactcgcggaggctaaccagcacctggatatgcaccaccaggagatccaggacatggaggccaacgaggatgtcgacatcgagggaggagaggagcctgccttcagcttggacactgctggctcagggagacctccttcccccgagtcgagcgttgcctcgtttgctcactag

SEQ ID NO: 17815 - DNA, 96 bp, Zea mays
  Peptide Sequence Number=SeqID_61190
atgtgggtccagaccgcgctggccacagcgtcacgcggcccacggcggagcttcaacgacggaaaaatagtatttcgattgtggaataggaattaa

SEQ ID NO: 17816 - DNA, 426 bp, Zea mays
  Peptide Sequence Number=SeqID_61191
atgggcaagagcaagaagggtggtagttcttcgcatcactccggcgataagcggaagcgtgagccgactcctccctcaaaggacttcggtgactcggagtactcggaggaggagttctcctccgagtcagagggctcaccggtccatgcctctccccttgcgtcgtctgatgactcagacgactcccagaggatcgccgcagagaactcctcggactcgtccgaggagggcggcggcgacggcgatggcagtgacgacgacgacgacggaggcgatggtgacggcggcggtgacggcggcgaaggcgacggcaagggcggtgacggcggtggcaagggtggcagctgcgacgacaagggtggcagcggcgacggcggcgatggcagcaagggcagcagcaggggcagcaacaaggccagtggctag

SEQ ID NO: 17817 - DNA, 453 bp, Zea mays
  Peptide Sequence Number=SeqID_61192
atggcctcagggcaaacgctactgttgaaaggccctcgttcacgtcccctcatgggagacgagaaccagccattaaagccaaagagccaaaggtctagagcgcaggtggcactgacggtctcgtcggcggaggcaaccgctccggcaaggggaagcctcacctatggcgaccaccacctcagcaccaacgacagcggccacctacccaccaacaccgcaccggcgaacggcggcagccccaaagcgcaccgacaggtcctcactcccgtcctcgccacaagaacgagaacgggactgtcccagaacacgagtgccgccctcgcggcgtacgacatgttgtgcgacccccggtgcaaccgacgacgcaaggaggacctggacgtggccggcccgcgcacggcgcgaccgacacccgagcggcggacggacgaccgcgctctgccccaatggtag

SEQ ID NO: 17818 - DNA, 699 bp, Zea mays
  Peptide Sequence Number=SeqID_61193
atggagcatcatcccggtctggagaggttgctggagactacccatctagagcttgacgggaagctcttcgtcaacatgcagcaggcccctacctggcacgccaactgtcagcgtttcgaccccggggggtccctggaccgacgaagaccgttttccgaggtcgaggttgagtccgagccgtggggttgggcgaggcggagaccgtcttctgaggtcgaggtggagtccgagccctggggtcgggcgaggcggagaccatcttccgaggtcgaggcagaggctgagcccaggggtcgggcgaggcggagcttcctatggcgcccgaggctggactcgactgctgtcagcctcaccctggtgggtggcacagcagtcggagcagggcaagcggcgctgttttcctgtcaggtcagtcagtggaggggcgaaatgactgcagtcacttcggccctgtctactgaggagcgcgtcaggataaggtgtcaggctatccttgcattgaatgctcctgcgatacggtcggttggcgaggcgatccggccaaggttgcttcactgcgaagcctgcccgagctgggcctcgggcgagtcaaaggtgcgcctgttgcttgaggaggccctcgggcgaggcgggaattcacctgggtctactgttcctgcccgaggctgggctcgggcgaggggagatcgtgtcccttga

SEQ ID NO: 17819 - DNA, 354 bp, Zea mays
  Peptide Sequence Number=SeqID_61194
atggcgctccacgccgtctcccccgcggcggtctcctccccgctacgcgccctctcgcgcagcctcccccagcgctcagctttttaccatttaaatgtgggggttcagatgatgcacaacgatggtggaacgaaagaaaagatggagaaggcgatcgaaacagtccaaactaacttcaacactgtgaggacagggcgtgcaagcccggccatgcttgaccggatcgaggtcgagtactacggaactccagtgaacttgaagagcattgcacagataagcactccagatgcaacttctcttcttattcaaccatatgacaagtcaaggaaatcttttcttcaacctttagaatag

SEQ ID NO: 17820 - DNA, 492 bp, Zea mays
  Peptide Sequence Number=SeqID_61195
atggggatcggtgagcacttcgagggcgtcaagcagcactgggcgagcaacttcgccttcctcgactacttcaagaaggtctacggccgcgccgagccccctccccaagtgggtccgacgccgacgtcgacgagttcatcgcctccgaccccggtctacgggccccagatgcggttcccgcagctcaaggccctgcgggagtcgaggaagttcgcgctcgccggggccctcgtcggcgccgcccacctcggcggcgtcgcgctcaagtactccaaggcgccgcacggcgtcctgctggcgacgggcttcggcgcgatcaccggcgccgtgctgggatctgaggtggcggaccactggtaccagctctacgagatggacaagcagggggccaacctcagaaccggtgtcagaccaaaatctgcacctgattcacaagtatccctggtgattactgctcaatcttttagagggatccttgagctagcttattaa

SEQ ID NO: 17821 - DNA, 519 bp, Zea mays
  Peptide Sequence Number=SeqID_61196
atgctcgacgtcgccgactcgacctccgtgccgctcgcccacgcgttcctctctgccgcccctacatgctccggcctgattccgcctgcgtccgcggacccagatccggcatccgtagtgcctgtgcattgcctcgcgatccggcgccgcggcacccgtgcgttgcctcgtggtgtggtggtcgatgactccaatcaccagtacaagatacgcgagcctgtcccgctctacaccgacaaggggcagaagcgtgcccaagctttggcggcggggtccctgctctccttcatcagtcacgcacctcgatcttggctagatgcttgtgcagttgcactgcgatccatggcatggcatggccctcgatccctcgacaacgacatggtggaggcaacgagccacaggcaggtgctcggctccgtctctggtaacggtgacaagaagggtgccactcatgtggcaaccccacacccagcaaggggcaagacccctacaaacaatgacaaatcaaaggagaaataa

SEQ ID NO: 17822 - DNA, 537 bp, Zea mays
  Peptide Sequence Number=SeqID_61197
atgaggcggaaagacggcgggtatcccccatccgggggcttggaaggtggaaagacacgatgcatgagggagcgtgaagacatggtctacttccaagggggtcaccctccttttaaaggcgactatccctacttgtgtccccagccgtcacgggctgagttttctccaacacgctccaaggccctcccctgcggcgtggggggctgggtcccgcatgtcatgcaagccggctcagagcagaagaagccaaaccgtcgcgcgcggagaagcgggcgacgcttcgccttcgccgtaataaccgcgccaaaaaagggaccgggaaagggggataccccgaaaaggatccttccccgtgaaggaaccaggctccgagcctccctactgatcagaggttcgaaggctggccccccgaagggttcgacagccgcctcagatcgcgtgggccctacacccactactggtcagaggttcgaaggccggccccccgaagggctccacggccgcctcaggctactcgggctccgcgcccattactga

SEQ ID NO: 17823 - DNA, 174 bp, Zea mays
  Peptide Sequence Number=SeqID_61198
atggagagtcatgatctccgggcagaatgggaatcacggcttgtgggtggttatgagattgatggttttggttatgactatggtgctggttgtcagcattgcaaccactgctcaggcgaagatgaagccgtggaaggagacttccaggagttccaagattacgacgagttctag

SEQ ID NO: 17824 - DNA, 231 bp, Zea mays
  Peptide Sequence Number=SeqID_61199
atggccacggtggccgaggctctggcggcaatggcgggcggaattgagctcgtcggagctaaggagaggtggctcgccggtgaagcgtcgatcacgaggcagcgcagagagaggtcaagttcaaatgcggattgggcccaaatctttgagattaaggccacgatcccgttgaaagatctcttcctctcagggatcaaggtgaacatccctgatctttggctcaaggtctga

SEQ ID NO: 17825 - DNA, 519 bp, Zea mays
  Peptide Sequence Number=SeqID_61200
atgtcgtgtcttctcgactgcggaaccagtaccgcgactcgaggcagccctacgcgtgacccaacagtgccaattgagagcaacgatcacgggggtttgaaggttgcgccctctagggttcggcaaccaccccagagcactcgggctccgtgccctttactgatcaggggttcgaaggctggcccctcggaagggttcgacagccgccccagagcatgcagagtcagggatgaccctgggtacgtctgttacatggccgaggctcgggctatgctcccgaggtaccctaggacatttccgagagggaacgattttgtaacggaatcccaccggagggaggcatcaagccctcggaccctatcgaacgggtccgggtccggcaaatcacccacagaggctcaggggctgctctcgcaccaggctacggccgaactgttgaccacgtcaacaaacctgcgtgaaaactctaagcctgaccgtgcacccgggctacggccaggccgcatgagggaacaataa

SEQ ID NO: 17826 - DNA, 651 bp, Zea mays
  Peptide Sequence Number=SeqID_61201
atgtcttcacgctcggggtctacgagcggcgggagcaccggtggcggcagcagcgcagggggaggcgccgcggtgccgctggccttgctgctgaggcgggaggtggccagcgagcgcaccgcatcggagcgaccggagctgcactcgggcctcttcagccaggccaagaaaggcgaggacttcacattcctcaagctcgaatgcgagcgcgtccccggcgtcccgtcctcctccttctccgccttcggcgtaagcgcagccccccgttctctctctctatcccctcccatcgcgatcgctgcccccgatctggcgtcacgtggatcgctgccatgcctggaggcatctaggtggggtggcgatgaacgatcggctaggctgtttgatgggcacaatgggaacggggccgcaatttacaccaaagagaatctcttgaacaacatcttgaacgcggtccctgctgatctcaacagggaagactggcttgctgcactcccaagagcgctggttgctgcattcgttaaaacggataaagatttccagactaaaggaccagaaccggctagaggcatcggggcgtggaaccatgttaaggttgagtttcctcaaaatcctttcccaaacttctctggacagcacacaggagaatag

SEQ ID NO: 17827 - DNA, 333 bp, Zea mays
  Peptide Sequence Number=SeqID_61202
atggccggttcaaaggatagctctgaagtttccgccagcaacatcatcaagccgacatgggaaaccttgtcggctgaagaacaactcatgttcgaggagcgccaggagcagctgatccaggaagcaaaggcgaaattcctggccgacttcaaggtggacaggaacaacaaagtcgttcggcaatgtgcgacagatctagcttcgctccaacatactacgaatacccccaatccggttcaaaagaaacggcaagtggaggttaagtttacattcaatgttggcaaatgcgataagatattcgacgagttactaaaaatggcaacattaagatag

SEQ ID NO: 17828 - DNA, 306 bp, Zea mays
  Peptide Sequence Number=SeqID_61203
atggccctcggcaaagacggctccagtgggccccaccgtcagtccctgtgccgagagctctcgttggcactcggcaaaggaggcttctttgccgagtgtctagtggacgggctctcggcaaagagtcctccagtgggcccctttgccagtctctttgccaagtgcgctgggcggcactcggcaaaggtcatcaacgaggtgggcatctggactggttcgacgaagggctggacgaagcgtgagggttgttcgacgccgccgattgacccagcacagagaagagattgcatgtgtgagaacatatga

SEQ ID NO: 17829 - DNA, 840 bp, Zea mays
  Peptide Sequence Number=SeqID_61204
atggagcccagttttcctcccccacacctgatgcccctccctccatcttcctctctgcaacaaccctaccatggttgtgcccctacttccatgtgtgcggtagtgcgtgggcgcgcgggcgagcgaatgcgtggtgctgcaggagttgaagttgcagtccttcatcagatagacttcttgcacaacatgattgtgtggtctgctgaacttgacagaatgagcagcagatgtgttataacttgtaggttatatgttcagggttggatggttactgaagaaaacctcgtagcactatttataaattgcggacaggttgtggactgtcacatgtgtggggacccaaatttagtccttagtttgcttactctgtgtaatgggtctactatttatggggtgaaaaacatcgatgtcccagagggtgcaagggctgctctgaatctgtcaggaaccgtgcttggatattatcctgtcaatgttctaccgtcaaaaactgccattgcaccagtcaacgaaacattcctacccaggtctaacgatgaacatgaaatgtgtgcaaggactatctactgcacaaacattgacaagaaggtcactcaagcagatctaaagttattctttgagtccatatgtggtgagctaaaagtttgcagaaatggcaccatcaagatcgatctggagaccaacaagatcatggacttcatcaagtttgacgtcgacaacgtggtcatgatgagcggcgggaggaacaccgggcatgtaggagtgatcaagaacagggagaagcacaagggcagcttcgagaccatccacgtgctgcttggagctttttgctatgtctag

SEQ ID NO: 17830 - DNA, 330 bp, Zea mays
  Peptide Sequence Number=SeqID_61205
atgacgccgctcgtgggtgtcactttcatgatgcgctcgacaccttgctacgccaggcacttgaccggcgtacctgctgaggtggccatgcaagatgtcgcacggcgtacgctttcgcactactgctcaatgttcggtggggtggccgatggtcttaacctgagggctcgtgttgagatcgcccagttgcgggctgagcgcgtggagcgccgtcacctagaggatggttctcccgcccccatcgggactcagcacccgttccgctcacctcagcgtggacaccaagcttataggaacttcgaccttgggatgatggtgtacacgatatga

SEQ ID NO: 17831 - DNA, 153 bp, Zea mays
  Peptide Sequence Number=SeqID_61206
atgccggtccttcggctcctgctgctgaggaagttcccgtgcctgagcttactgacgctgaccttaatgggggtgctccacctgctgctgaccccaatgggggtgttccacttgctgctgaccccaatgggcattggtggacggaatggctag

SEQ ID NO: 17832 - DNA, 438 bp, Zea mays
  Peptide Sequence Number=SeqID_61207
atgggcaagaacaacaaacacaagcgtgagccgactcctccatcagaggactttggcgactcggaatactcagaggagaagttctcctctgagtccgaggggtctccggctcccgtctctcccccagcgtcgtccgatgactcggacgactctcaggggattgccgtggaggtctggacttacatccgggccgtcgagcgctccgggctcgagggctcggatgagtcggagtactcctcggatgaggaggactcgtccgaggagggcggcgaaggtgacgacgacgacgatgacaacgacgatggaggcgacggcagcgacgacggtggcggcggcagcaggggcggcaacggcggcggcaggagcggcgacggcgacagcagcaggggcagcggcggcggcggcagcagcaagggcagcaacaaggccagtggctaa

SEQ ID NO: 17833 - DNA, 375 bp, Zea mays
  Peptide Sequence Number=SeqID_61208
atggattcacgatggccaagcgatgcccccaaggccaatccaccccgattctatcgggtgcacgacggaaatgcccgcgcgacggatttggcggacctcccggccactatttctctcctacctcgaccctcatggcatggcggtgcactcattggtctatggaacaagaagacgggtgatttatatgggccccgaggcttggccggcgttgaactggggctcgcgaacttcatggagctaacgcgtgaagtttgccgatttctgttaggggaggatggcgaaactggcaagccggggccaccagacagcggaataaagggagagaaggcggatgcggcattacctgcgaagctgaccagcgggacccgtgcctga

SEQ ID NO: 17834 - DNA, 273 bp, Zea mays
  Peptide Sequence Number=SeqID_61209
atggctttgggagatagggttcaagagaggtctagggttttccctcctcttgcccaaggtagtaagtgcacaaagggcccgtttggcacagctccagctcctgattctaagcgaggatctggaggagccgtgccaaacgggagaatcaggaggatcagctcctcacgagaatcaggatctggagctaaagaagcaggagctggagctttgccaaacgggcccttagatcggatggctttgggcgcgtaccggttcgctgtaaggcagagctaa

SEQ ID NO: 17835 - DNA, 240 bp, Zea mays
  Peptide Sequence Number=SeqID_61210
atgacgaagggcacctcaccgccagcaccgatccacgccataattcgcgtcgtggttcggttaagcgcttggcgggcatctcttcacgatgatattcgtgaatcggaaaacgaagaagagatagaagttgaagaagcgaggactacaccaccaccacctgaagaaccctgggccgggaactgcttttattttgacatctgtggagcagagcctgactcacctataacatatgtcgtgtga

SEQ ID NO: 17836 - DNA, 2508 bp, Zea mays
  Peptide Sequence Number=SeqID_61211
atggccaactccaaatttggattgctcgatctcgcggacggcgagtccggagaggccgcggtatccgtggccatcaccaaggtcgaggccgccgccgccgccgccgccaggaaggctgaggccgcctccgatgccgccgggaccggcaaggagaaggccccgcataagaaccacctttacttcactaaactccagttagataatggtatgagaaatattgagcacgagctgaaaaggttgagagatgtactcataaagctgaggggagaggaaacaaagcttaaggagaacatggaggatggaggccgtctcatgcagttgttgtcggaggaacaaaggaagctgagacaggagcagacgaaactgtgggcgcagcaagcaaagttgagattgcagaggaaagaattctatttggagcatggattccctcttggtgctggcgaagaggggcctcaagttcccaatcgggcggaaactgttcatggctgcgacaatgccggtgctgctgccaatgtcaatggcagctgtaacggtggtaggcagggataccctgaggttcgctacaagaggaaggtccagaagtacgtggttaagaccaagcagccatcctctggccctgctactgcaggggctgaacacaagcctgaggagaaggtcacttctgatgctagctcagaggccgatcatcacgacgaagctgccactcctgccaatgtggaagtcgcggctgcctcggtggctgctgcctgtaacaacggacaagatggccctagaaccaacaacgtatttgttcgaaaggagaagctcaatggctccgtgaaaaggaagaacaagaattctaagaacggtgggagcaacgataagttgaagaagcaagatttatccgagaccgaggaaccacccagggaacaagagaaaaaggtaacccctgctgttcttgatttccaaaattttaaacccctgctgttcttgatttccaaaatttttgaacagactcttgatgagtacgagcgagaacagaagaagtcctcggaagatgcctcaagaactgaggccaggaaggtctgtgacgatgaatttaggggcctgcagatgttgaagaataaggtagatgatggggaagccatcatgatcaaggcagaaaagcttcagcaaaagtcgaagaagcctcagccggaggcaaaggtacctaagaaggtcgtcatcccgttgaaagatctctcctttgctccaccaaggcgtacttttttcctggaagatggttcttccaatggcggcggtttccgaggccgcagccgcgacaatggcagggttgtccagaacgaggcgagcaacggtgctccgaggggcggcggcggcgacggctaccacgaccagggcagcaacggcggtactgggtactaccaccaccagcagagtggctacgcgcgccgcccacgtggacgcggctactccggcaacggtcgccacccggcccctgccacgaagcccatacttgtggaggagttcccgccgctacccgccttctctgctgcggcccgagtgagtcatacatcgatcgacatgccgcgcagcgacggcgtgcatcagccgtcctgcgtcacggtgccgctgggcaagtcggtgcggcgcgcgctccgggccgccatcggcatgccgaagaagaagaagaagaatccgccgccgccgccgcttggcgtgtcaatggagctgagcagctcgtcgtcggtggcggcgaggaaggaggcggtggtgcgagtggtgatgcggggcggcgtggtggaggtgtacccgagcgttgtgctggcctgcaccgtcatccggaaccacccgccggggctctgcctcgcgcacccggacgtgttccgcaacccgcacggcgccgtcgtccgcccgctcgagccgctcttcccgggccagaagttcctgctgctccccgagagcaccgtcgtcaggctgaagcagaagatccccgagagctcaatcggcgccttcgctgacgacgacgtggaggaggacgacgacgacgaagaagaagaagaaggcgacggcgcggcggtggtgtcgtcgtcggaaggcgaggcggccgcggagggtgacggtactactagtactactacctccatgccgtcgtgcagcgcgagggaatacttcgtgtccagggaccggtggtccgagtgccgctccagggagctagtgccagtggaacaggggctcgccatggagccgaggccgagcaaagacgacgatgagccggccgagagaaagcaggagaagacaaggacaaagaaggggaacaagaagaagaggcggaaagggaggcggcggagagaccgtagtagcccggtgccccagctgccgatggagctcatcaggggagtcgggaggacgtgggagcccagcctgccgtcggtggaggaggagcaggaggaggccgccgccgtcgtaattgtttctcctctccaccctccgccgtcggatgccacagcccacaacacaagatcatga

SEQ ID NO: 17837 - DNA, 1377 bp, Zea mays
  Peptide Sequence Number=SeqID_61212
atggagagtcatgatctccgggcagaatgggaatcacggcttgtgggtggttatgagattgatggttccggttatgattatggtattgctagtccactacagccaaacaggatacttgctgagtatgttgatgtgtactcacccttgctctacacaccaaaccccccccaggttgtcagcattgcaaccactgctcaggcgaagatgaagctgtggaaggagacttccaggagttccaagattacgacgagttctaggtgtgggttagcggcaacccccagtcggctgcctgtgaaggccgcgttatctacgtttcttttccgcactttgatttattgtaagaactatatggacgtctcagacatggctcgacttagacacactgcacgaaagtcagtcatccccttcttaccctcccgccttgctgagcgtccgcttcgccgtcccgtggccggacagtccagccacttggagagactacaccaccgcctgcgtgaggagcaggagcgtcgacgacaggagcagcggagctcttccctctcgctccaccaggagatagagtctgtgaggagctgctcccctgtgctttctctggagccgccccctgcaccaccactgggcgccccagcttctggagtagctgctggaggagacccagacgacggaggaggcgacgacagctcgagccacgacaccgacttctctgctaatcctgagccggaaggatgggttgctcgacccatcactcgcgacgctgctcgcgggtgtcacttccacgatgcgctcgacaccctgctacgtcgggcatttgaccgacatacttggtccgtcgagtatcgctgtgtggtctaccagcatagtcgcggggtctacccggaccgctgggaggcgacttgcttggtgcgctgcccggaggacagtctccagggtgcagaggcctgttcagagcactattctacctctgagcgggactcagctgaggcagccatgcaagatgctgcacggcgtgcgctttcgcactactgctcggttttcggtggggcagctgacggccttgacctgaagtattacccccgccgttcatctggcagcacaggaggcgtgattgtctcacctgtcggtgagggcaatcctaggttgagcagcacagtcaacctagccgccgtgctaaacacggagctggaccatgcactagacgagctgagtagggctcgtgctgagatcgccctgctgcgggctgagcgcgcggaacgtcgttttctggacggtggatcccccgctcccgttgggactcagcacccgtaccgctcacctcagcatggacaccagtcttatggcaatcccgcctgcaagaccaagatcaacctagaaccatag

SEQ ID NO: 17838 - DNA, 174 bp, Zea mays
  Peptide Sequence Number=SeqID_61213
atggagagtcatgatctccgggcagaatgggaatcacggcttgtgggtggttatgagattgatggttccggttatgattatggtgctggttgtcagcattgcaaccactgctcaggcgaagatgaagctgtggaaggagacttccaggagttccaagattacgacgagttctag

SEQ ID NO: 17839 - DNA, 417 bp, Zea mays
  Peptide Sequence Number=SeqID_61214
atgatcctggactatttaccgagtgcctgcggaaatactgaggaagagaaagcgaaagagaaggagattaagttgaagcaagaatccacatggaaacgccttgaagagattgcatcagcgcaagcgacgagcggcgaaattggcggtagccggtgggtagaaacactgctagtcgagagcatgcaaatgaatcatgttcttgagcctgagattgttgtgtacaattcatcagatcctagaacgccgggcagcagtaggcggcgccgccaccgtcctgtccatgtcccaggtgacgacgtcctcacctcatgcccgagcccgacgaccagcatggaccactcgcccgatgatctgtcgttgatggcgctcggcgaggacggggatcacggcgccgccctgcccctcattgcggactag

SEQ ID NO: 17840 - DNA, 1095 bp, Zea mays
  Peptide Sequence Number=SeqID_61215
atgccgctgtgtatgggtggggcagaggaaaggatacaacttgaaactgctcgcttatacaagttatctggtgttgacccacttgcaggatgcttgcctacccttgtgacaataccagtttggattggtctatacagagctctctcaaatgtagctaatgagggacttctgactgaaggctttttttggataccttctctggctggtcctacaacaattgctgctcgacaaaacggccaggggatatcatggctttttccttttactgatggccatccacctcttggctggtcagatactttggcatacattgtgttaccagttcttcttgtcatttcacagtacatatctactcaagtaatgcagccaccacagagcaatgatcctaaccaacaaggtgctcaggctgtaacaaagttcttaccattgctaattggttattttgctctttccgtgccttcaggactaaggctgtactggcttacaaataatatcctcagtactgcacaacaagtgtggcttcaaaagcttggaggtgcaaaaaatcctgtcaaagaatatattgacaagctttcaagagaagaaacgactactgttcagaagaatgattctactgttcagagtgaacctctctctaaacatagtaaaccccagcctagccaagagccgaaaccaagtgggccacaacgtggtgaaagggcgtgtttggcattggctccagagcagaactctaaggcaagaccctgccaaacaccctatggcatgtattggtgggaaactgggggcctgggcgtggtggctcgtcgcctggaagatggtccaggcgccgtgactaccagagaggagatgcagtctaaaataagggtgttgcatctgacaggaagagaaaaaatatttaggaaactgaaggaggaagaatctatgagaaaagaggttatgggacaaggtaaacaatcagaacagtcaagttctgaatctagagtcacggatggaacacaaaattcggatgtgtcttctggagaccaaaaagaccaacaggtgaagtccactttaactcgactgattacggatattaatttaacaggggtctcatga

SEQ ID NO: 17841 - DNA, 408 bp, Zea mays
  Peptide Sequence Number=SeqID_61216
atggagcttcgttcgattccgacaaacaagcttcggcggcggttaaaattttggcagcaaaacagtgcaaatagcagtaaatgctgtggtaagaaggcgaagcgccagaagttttacaccaggcggacacccgctcgcactcgctgtacggtggaccgcagagaccgaacagtaactctgcaaggtggggccgctacgcgcagggagattgaatcgtttctcgacaacgagctcagggaaggtgtttttgagaccttcggcgctccgaagcttaagaaacttttttcacagatcaagctcgttacgaaaaacgatctagcaccgcgaaaggggctactgttgggtctatgcttcgtcgccgaaggtcttatagaaagaagtggtcctcggatgaagctgtttgtataa

SEQ ID NO: 17842 - DNA, 441 bp, Zea mays
  Peptide Sequence Number=SeqID_61217
atgggcaagaacaacaagcgcaagcgcgagccgactcctccatctgaggatttcggtgactcggaatactcggaggaggagttctcctccgagtccgaggggtctccggctcccgtctctcccccggcgtcgtccgatgactcggacgactcccaggggatagccgcggaggtctggacgtacatccgggccgtcgagcgctccgggctcgaaggctcggatgagtcggagtactcctcggatgaggaggactcggacggcggcgacgagggtgaagacgacgacgacgacggcgacggtgacggcagcggcagtggcggcggcggcgacggtagcaggggcagcaccaagggcgacagcagcaagggcagcaccaagggcggcagcagcaggggcagcaccaagggcggcggcggcggcaggggcagggccagtggctag

SEQ ID NO: 17843 - DNA, 270 bp, Zea mays
  Peptide Sequence Number=SeqID_61218
atgacgaggggctgcacgggcgatgatgccggcatagggagaggcgtgcagggcagccacgctgccagggagcaggggacagctgccctaggccaagaaagaggaaggaagcttgcacgccgtcgaggtcaccagccgctggaccagggcgaaggtcgggttgagtctgcacttgcaatgaggtcactgcaacctcaagtgaaggccattcaacaacgatatgctggtgatcagtggctgctgcagcaactgctgttgattagtgtttag

SEQ ID NO: 17844 - DNA, 2781 bp, Zea mays
  Peptide Sequence Number=SeqID_61219
atgcccctcgaccccgactcctcgtcgccgccgccgccacaccgcgactggttcttcccgccggcgccgccgttcctcgcctcctccaggtcccggacccccagtgcgcccttcccctccacctaccgctcctccaagccctactcagcctaccccctcgccgaccgccgaccgcctcctaccccacgctcccgctcccgctctccgcacccaccgccggagcagcagcagaagacgccgacgccgcctactcctacgtccgcgccgcgccgccgtgaccctcggtacgccggcgtccgccgcgaagatgcccgtacggctgcctccgagcaagcggcggccccgatggccgcgccagtgcacgggaggaagcccgcagcgtcggcgatcgctccacggtggtcgggggtgctctccgtggcggttattttactgtgcctggcctcccttctccgcaggaacttctctttgcacgaccaggtttaccttctgcaggagcagctggctgtagctactgcaaaacttcagtcctgcactgtagattcttcattgaatacaagcatcattaatctgttctatcaggatgctgctaacagtaccacgcagagcagaagccttaagaacctttccttgcttatctcgctttcggtattatacgcaccactcctcattctcaagtacgtggaccttgtgtcaaagataaggaggtcacgtgactctgaacaagttccaataaacaagcggttcgcatacagggtcgatatatttttgtcacttcatccgtatgctaaaccattggtcctacttgttgctacgttgttactaattgctcttggtggactggctctgtatggtgtgacggatgatagcttatctgattgtctttggctgtcctggaccttcgtcgctgactcagggaaccatgccaatgctgtgggtcttggacccaagctggtttcagtttcaattagtattggtggaatgttggtttttgctatgatgcttggtcttgtcactgattcaatctctgagaagtttgattctttgaggaaaggaagaagtgaagtcatagaacagagccacactctaattcttgggtggagtgataaattgggatctttgctgaaccaaattgccattgctaatgaaagcttgagaggtgggaccattgtagtgatggctgagagagacaaagaagaaatggaagcagatattgctaaaatggagtttgacatgaaaggaacagctgtaatatgtagaagtggaagccctttgatacttgctgatttgaaaaaggtctcagtttcaaaggcgcgggcaattgttgttttagctgaagaaggaaatgctgaccagagtgatgcacgagcactgcgaacagtcctgagtttaactggagttaaagagggactaagtggtcacatagtagtggagcttagtgatcttgacaatgaagttctagtcaaacttgttggtggagatcttgtggaaacagttgtggcacatgatgtgattggacgattgatgatacagtgtgcacgtcaaccaggccttgcacagatatgggaagacattcttggttttgagaactgtgaattctacattaaaagatggcctaaattggatggaatgcgatttgaagatgtgctgattagctttcctgaagctgttccatgtggcataaaagtggcatcttatgggggcaagattattttaaaccctgatgattgttatgttttgcaagagggtgatgaggtgatagtaattgcagaggatgatgatacatatgctccagcaccattgcccaaggttaaagaggctgtttacatagacattgttcatcctgaaagaaagcctcagaagattcttctttgtggatggcgacgggatatagatgatatgattgcggttaggagagggtatctgcctaaagattttgttgttccaaagtctccagaaagaatattgttttgtggttggcgccgtgatatagaagatatgataatggtacttgatgctttccttgcgccaggatcagagttgtggatgtttaatgacgtccctgaggttgacagagaaagaaagctaattgatggaggtttggacttcagtcgcctcgataatattactttggtgcatcgtgagggaaatgctgttattcgccgtcacttggagagccttcctttagaatcattcgattctatcctgattttggcagatgaatctgtagaagattcagcaatccaagctgactcaaggtcacttgcaactttgctgctgataagagatattcaggcaaaacgtcttccatgcaaggaatcattgatttcacatgttccccgagggaccttttctgaaggttcttggataggggagatgcaacaagcatctgataaatctgtcataatcagtgaaattttggaccccaggacaaaaaatttgttgtcagtgtcaaaaattagtgactacgttctttcaaatgaattagtgagcatggcattggcaatggtcgcagaagatcggcagataaataatgtcttggaggagctcttcgctgaacaaggaaatgaaatgcaaatacgaccttctgatatgtaccttagagaagaagaggaattaaatttctttgaggtcattctgcgagctaggcagaggaaagagattgtcattgggtaccgtcttgaggcagctgagcgtgccataatcaatccaatagacaaagtttcaaggcgaaggtggtcacccaaggatgtttttgttgttatatccgagaaagaatga

SEQ ID NO: 17845 - DNA, 294 bp, Zea mays
  Peptide Sequence Number=SeqID_61220
atgggcgcaccagacagttcgattattctggacaggagaagctttttggaaaaacaggccaagcgcggaccgtctgggcccctgcggtggaccgtccgtgacagaagaatgaccctcagacagaaccaatgcaaaaacacaagtttccactacagactgtccggaggaaaagcgaagaccgtccgagccctcgcgcggaccgtccggcctcaggcgcggaccgtccggtcggggcggaccgtccgcaccaggagggcggaccgtccgcgctcagcagaatggcccaacggctag

SEQ ID NO: 17846 - DNA, 771 bp, Zea mays
  Peptide Sequence Number=SeqID_61221
atgaagctgtggaaggagacttccaggagttccaagattacgacgagttctaggtgtgggttagcggcaacccccagtcggctgcctgtgaaggccgcgttatctacgtttcttttccgcactttgatttattgtaagaactatatggacgtctcagacatggctcgacttagacacactgcacgaaagtcagtcatccccttcttaccctcccgccttgctgagcgtccgcttcgccgtcccgtggccggacagtccagccacttggagagactacaccaccgcctgcgtgaggagcaggagcgtcgacgacaggagcagcggagctcttccctctcgctccaccaggagatagagtctgtgaggagctgctcccctgtgctttctctggagccgccccctgcaccaccactgggcgccccagcttctggagtagctgctggaggagacccagacgacggaggaggcgacgacagctcgagccacgacaccgacttctctgctaaccctgagccggaaggatgggttgctcgacccatcactcgcgacgctgctcgcgggtgtcacttccacgatgcgctcgacaccctgctacgtcgggcatttgaccggcatacttggtccgtcgagtatcgctgtgtggtctaccagcatagtcgcggggtctacccggtccgctgggaggcgacttgcttggtgcgctgcccggagtgttctccagggtgcagaggcctgtcagagcactattctatctctgagacgaatttctag

SEQ ID NO: 17847 - DNA, 137 bp, Zea mays
  Peptide Sequence Number=SeqID_61222
tgatgccctgctggatcaccttggtagtgatcaatggagagtcatgatctccgggcagaatgggaatcacggcttgtggagatattgtggtacaggtggttatgagattgatggttccggttatgattatggtattg

SEQ ID NO: 17848 - DNA, 1557 bp, Zea mays
  Peptide Sequence Number=SeqID_61223
atgcaccgcccgccggcctacgtcacggtcaataagccatgtagcagtattagacccttggccgagtggggagtggaggtgctccagatggagcctggatacgcgtcaatacccgacccatgcctaggccgcgacacttcccctcccgagtccttattacgggtggggtcccgtgccttctgggtccgacgacattgcctctgggaacgccaccttaactgctcacgagatacccctggggttgttctctgcgcggttaagggtaactgcgccggcatcatgcctttataccgtgttactatcggcccgcctatggtcacgccgactgccacgcctgcccccgcggctgactggcccgaaccggcgcgccggatgtatgacatgtgggcccgggcccccatgccagaggttgggctaccggttgcagcgaagctgagggggcgcgcaaccgcgggacggttgcatgctccttacgcgacgggcggttgcacgctccctgtgcgacggttcgccttcttcgcgcttcgggccagcgccggatcgttcgctagagggatccgcgttagggccacccccagcggtctcaccaccggggagcttgcactttttgtttcctgcgcggcggtgctgtcgatcttgtcttcttcttgctgctgcgacctcgcgggggttgacactcttctgccatcgttcggcttcaaggattttcatcatgcagcccgactgcaatctcccaccagtgcttcaaggatgttcatcatcctcgctggggtggaaggcgagccgagttggggtcctgccttccgcatgggctggcgacccgcttcttcctccagcatttgggggagaagggcgttcaccagccttgcggaggaggcgaacttcggctacgtggggtcgaccggctgcaggcgtcatcagctgccacgtgtctggctccttggcttggatggcctcggtgccgcctccgacgttgtctcctgccgcttggtcggggcgtggctgtccgtccaccgcacgggcggcggtcgcaccgaggacgggagcgaggacctcttcgcgcgcgctgaggtggccgccgttgccagtaagccaccagtgcagaggtggccgctgtcgttggtgctgaggtggtcgccgccgctggtgaggctgtccactgcagaggaggatgggggcgaggacctcttcgcaatggcgcatgcattgagggtagggatggaactagggcttcgcttgaaagcagatgtaatacttttgctttttgtaaggtgtgatgtgtcgaggttggataccagtgtatctgaaagggttgtcaacaactctcgagaggcagcctcgtcgggatctagatctggtggtggagcatgtaggcccacggtacgggaccaggctgagcggctacacgggctccggaccaccctaggagacaaataccaacatgtcgggtttatggggacggacctcacagggttggcgtacacgatcctgtcggaagtctgggcccgtggggagtccagaagggtttccgggggaaggcaggcttcggccccgtag

SEQ ID NO: 17849 - DNA, 2637 bp, Zea mays
  Peptide Sequence Number=SeqID_61224
atggcgccggacccgtgcgccgacctcgcggtgacgcccaagacgtcggccaaggacgaggcgtcctgctccgtggccccgcccacgccgcccaaggtcacccccgacgaggtccgcgcggtggcgcgcaagttcgcggaccagcctatccaggagacggaacccgacgtctgggccgtcctcaccgccatctccaagaaggcccgcctccggccccaggggatgaacattcttttgagcgctgacgagcactacctagggcgtgctgttgaggagcggtttcgggtttttgcccagcagatcagtgggaagcattgcaagatatacaaggacaccgtctcaggggagcggaaccgccatgagcctgtgcctgttttcttcaaggacacaagctcaaatggcacattcatcaactggaaaaagttcaagaaaaatgcatccccggtcaagcttaatcatggcgacattatatcattaccatcacctcctcatgacggcaaatcctttgtatttgtctaccgggaagttaatgcaatcagttgtgtagagaatggggttcccattcttaaaaggaagtcagaggagggtagttctggaagcaagaggcttaagggtcttggtattggttctcctgatggtcctgtttcactagacgatgtccgaagactagaaaaatctaatgctgatctcagggaacaacttgaggctcatgttgtgacaattgaaactttgagggctgaaataaaaacgacccaagtgcagcatggaaaggaacttgaggagttgagagaaactacgtcgagttcttatcttgatcaaactaaatctctccagtccacacttgaggagaaacagaagcaaatagattcactcagtacatcaaatacagagttacagaactctataaaagatctggatgaaaggcttggtgcatctaaacaatcacgcgcggatgctgatgagataatttcaagccagaaagcaatcatccgtgagcttgaggaacagctaagtgaggagcgcaacttaagaagagaagagcgtgataaggctgcacatgacttgaaatttgcagtgcataaagtgcaagccgaggctcaagaagaaattaagaaacaagcagagtcttaccttagacaacaaagagaacagaaagaagttattaacaagcttcaggaatcagaaaaagaaacacgtttgtttgtggaaactttgaggtccaagttggaagatgctcgagataatcttgtaacatctgagaaaaaagtaagagagctggaagctcagtttcaggacgagcagctagtatcagccaacaatcgaaagaaatcagaaaatctggaaactgaattgagaaaactgaagaaggaacttgagaatgagaaggctgctcgagaagaagcatgggcaaaggtctcagctcttgagcttgaaatagctgcaacgattagagatctatcaattgagaaacagaggtatcaaggggctagagaacggattattctacgggagactcagctgcgtgctttctattcaactacagaagaaatctcttctctgtttgcgaagcagcaggaacagctgaaagctatgcagagaactttggaggatgaggagaactatgagagcaccttaatgagtgtggatctcaataaagagcatctagccattgataatgctggtatgaagccagtaaactgctcaaaaaatacactgggagcttcaattgcttcaccagaaaatactcaggtaagtgaacatagttccagtgacgaagatgccaacatgactgagcagcaagatgatgatgttactgccaatggtggcaacactcaagatctagaatgcaccagtccagaaaggtcagtggagaggaggccgggttttcatggcaatcctgttcctacagctcctgagagggaagtaacagatactgagcaagttcctgagacagaaagcgaagctggtaatgttggttgcgatgaccaaagatgtgacaatatcggaggagagactatgccgctagaggacgaagtgctgcttccagagaacgaggagcctactgcattgctcaaagatgcagggcagccacaatcaaatatggttcctattccaattctcgatgatggcggcggccactgttcagaagaaaaacacgagggtgcttgctctgagagcaaacgggatgacacacatgttggagctatcagaacgggtgatctgttggcctcagaagttgctggcagctgggcagtggaaacagctccatctgtcaatggggagaacgaatctccaaggagcttgggagatgctacagagcgagatgaagatggaggtagcgtggcagctgatgctttgctaactttggtgaactcagagggccaggcggctgggagccagaataatgttgagcaggccagttccaaaataaccgatgatcgccgtgttcttagtgccatgattgggattgttgatcctgaattcaggaagcaaatgtccaggagtggagctggaaacgaggagccgatgtctgacgctgagacggatgaaggcgtcgaggaaggtgattcagattcaggttcagatggcagcgacagcgacagcgaggaggctatggttgaggattctgttgggtag

SEQ ID NO: 17850 - DNA, 1665 bp, Zea mays
  Peptide Sequence Number=SeqID_61225
atgcggcggtgtgctaggctgccgaacgcggcacgcgcagcgcaggtccgtcgagtggcgcctagcgagcgcaccaagggggggcacggcacgccgagccgcgcgcgacgaaggaatagcttgggccggcacggcaaccccaccgcctcagcccgtccgcccgcccgtcaccaaacgccgattaaatttaatacccttaaaagcgcccgcgcgacccagtcgagccggccccgcatcccattccgtgccaccgccgccgcgctgcgtctgcgtctgcgtgcgtcgcccgcagtgtccgcagccagaaccagcgcacgcgctgctccgccgacgccgaagcctcgtccgcgagcgcgtggggctaagcaagcactcgagctccctcgagcggcgggtgcagtgcagccaggccgcgcgcgccgcagcatgaacggcgtcggcgacgcgcacgcggccgcggccgcggccgccatggtgcagcaaacgctggggatgtcgctgccgatggcggcgttcgtgcccgagcagggcagcgccaataggctgaccaggccgccggggctgccgccgctgccgcaggcgttcgcggcccagcagcgcggggacgtgtgcatggaggccgtcgaccccgcggctggcccgcgcaaggcgcaccggcgctcccgcagcgacgtcccgttcggctacttcccgccggcgggccaccaccagctcccgccgcccaaggtggaggccggctggggcggccacctccccgccggcggcggcggcggcggcgacgacgacctgttcaacgcgtacctcaacctggaggggctggacgggctcaactcctccgacgaccgcctcgacgacggggacagccgcggcagcagcatgaggaccaacggcgccgacagcagcgagaacgagtcggaggagtgcgccgccgacagccgcgccgggatccgcctctgcgccgccgctgccgacaggcgggaggggctcaagagggccgccgctgcgcccgtggcgcgccacgccaggagcctgtccatggatagcctcatcggcaagctcaacttctccgccggcgcgacgggcgccgctagcggcgtcattccgggacccaacaggttcagcctcgagttcggcaccggcgagttttcgccggtcgagatgaagaagatcatggccgacgagaagctggccgagatggcgctcgccgaccccaagcgcgtcaagagggtgctggccaacaggcagtcggcggcgcggtccaaggagcgcaagatgcgatacattggcgagctggagcacaaggtgcagatcctgcagacggaggccaccactctctccgcccagctcacgcttcttcagcgggactccgcggggatcgcgacgcagaacaacgagctcaagttccggctgcaggccatggagcagcaggcgcagctgcgtgacgcattgaatgaggcactgacagccgaggtccaacgcctgaaggtcgcgaccgcagagctcggggattcttgctcgtccagcaacctagcccagcagatccaaatcagcgttcaggaccagatgtttcaactgcatcagcagcaggcaacgcctataccgttctaccagctgcagcaggcgcagcagaatggcgcagggaagaagcatgagccgacggaatga

SEQ ID NO: 17851 - DNA, 567 bp, Zea mays
  Peptide Sequence Number=SeqID_61226
ggggggccgcgcgcctgcatttcccgacggaacccgcaccgccgttcccggcggcccccatccgcccccacacagtcggcatgctcgggccctcccacaggcgctcgcgcccctcttcccatccgccccccacccagtcggtgtgctcgggctcagtggccgcgccgccgcccaccccaactgcgccctcctcttcttcgggcctccccagggcagccgccatgcagcccactgcggccacaaccgcctctggtgtcggcccggtcctgcccatcgatgctgtcgtggcccccaccacctctgacatcggcgtcctttcgcctagcgcggtcgtcgccactgtcgcggccagcgcgcgtgcagccggccccgtcccctccggacttagcctcccgagctacccgacatgcacaggcgccctcaccggacttctctcgccgacccgactcctccggcagccaccccctaggttctccaccactcgtccgctcgctgctgacaccacatgggcttccccggcgccctccacagactccgcgctggcatctgccgtcgccaccatccagg

SEQ ID NO: 17852 - DNA, 330 bp, Zea mays
  Peptide Sequence Number=SeqID_61227
atggagcagggagacacgcctgggagccgagtattgagaggtcatggccgacggccagatctggctggagcgcaaacagtggatggtggtgcggtgactagctgggttggtgatcgacggcgcatgatgcggacacgtccaggtagccgcggccgtggtcgagctcaccggtgtgccgagtacggcgtccaggtgccgacaacacgggagcagaggtgcagacgggaaacacggctagagcttgagaatagccagcgcagagatgaagaacgagctgagacaagacgtggcctgagcaagaagttgacgcgcgatgagataagaacctga

SEQ ID NO: 17853 - DNA, 2016 bp, Zea mays
  Peptide Sequence Number=SeqID_61228
atgaccgagccgagggactcctacacctccgggatacggatacctcactcatcaccttctgcgataacggcaccctcggtgtcaactacaccttcgacgaagtccaacctagcctcagacggcaacgcagtcggaggatatccactccgaaggacgacatcagcaccacgcccggaccatcgtcgacagggtcttctccaggaatccggctcgtgcagacagctcggccggccacctcgaagcctcagccagctgtcccccgaggacatcagcccggctcgtggcctcggcaactcgactccgacatcggtcccgctagtggacggcctggccaggctccggccgacgaagtcttcttttcgagccaactccgcctctgtccgtgctgacaccgctgcccccggcttcggctcatcgaagagcggtcgagggtttcctttaactaagcaagagaagcctcgggcggcaaggccgaccgagccgagggactcctacgcctccaggatacggatacctcactcgtcaccttcgcacgaggcaactcacacttggttaagcggttcagttagccgacaggcaagtcctagtgctcgaaatgaggaaaaacacggctccatgccgaagatacatacatgttcaggccccaacagccacaatgaacaaaacaccggcactcaaggtgccattacaaacggaactccggttccgcctccgcgggtacgaacaaccccccacattggagggcccgcggggcgacaagctccgggcgactcaccagcgacctctgtagcagcagccatggtcccaggacggacgcggccacaggaaggctctcgcggcgctgacgacctcgacggtggggaagctttctccagctgccaccacatcagcaccgacgacggcgtccgcctctccaccaacgccgcaccggcgagcgcgggccgctccaaagcgcaccggcaggtcctcgctcccgtcctcgccacgaaagcgaggaggaggacggaatgttgcatcctagctgggcagcaacagtcgccttccccggcatggctggaggacgcttcctccgcagagctggaggatggtctccaccaccagaagctggaagaggaggtggccagccgacccgtgcgagaggtagagccccggctcacctcgctctccgccccagcaaggatgatgaagatccttgaagctgagggcgggaccaagatcgcagcccggctcgcttctccccaccatcaaactggaggtcaccgtctgggccatcgcgggctaagtcttctccaacatgctccaaggtcctccccctacgacacgggggctgggtcccacgcgtcatgcaagctggccaggggcagaagaagccaaaccgccgcgcgcgcggtacgcgcaactgcccagcggttacgagcaatcctccactttcgcccaggccagcgggtgaaaggacggaccgccatgcaggcggcatgcaactgcaccaaaggggcgcaccctttcgacttcgacgcgtctagcatggaggcccaggcccacacgtcatgtaaccggcgcgtcggttgctacgtgcaagaaactgcaccgccactcgcaccgctatcgtgcctcctcgaatgcggaaccagtaccgcgactcgaggcaaccctgcgaatgacccaacagtgccaaccaggcacatcggtcacgagtcagtcagccgcgggagaaggcgcgatggtcgatacggccagaaatgggccggtagtaatggttgtggcaggcaagcggaagcagcggtcaagtcggactgggaaaggggataccacgagagggatccttctccgcaaaggaaacgggccctgagcccccctactgatcagaggttcgaaggctggcccctcggaggggttcaacagccgcctcagagcgcttgggctccgcgcccactactggtcagaggttcgaaggccggcccctcggaagggttcaacggccgcctgaggccactcgggctccgcgcccactactga

SEQ ID NO: 17854 - DNA, 972 bp, Zea mays
  Peptide Sequence Number=SeqID_61229
atggaaaagtttgaaaccgagccaaatgcgtttgtcatgatttggcatctcttttgtcgcgaggaagaggtctgcgccggatttttgccaagattcgcacgtttgcgatctcggcaagcttttgaacatgggcagaagaacacctccacgtgttcgacgagccctgaacgcgccagagcacgcccagcgcccgaccccacgcgccccgcgccgtgccaagccacgcccgtgtcccctgcccgcgcccgctcctataaagccagccaaggcttcagccgtacacccccgtgcactcttgaccttaatggagcacgagatcgccagagtttgcccggcacacggcgtgccagcggcctcctgagcacccgccaccgtagacaggccaaccgagccatcccccgccccgtccaaccctcgagagagactctgcgtgcctcggtgaagctcccagcaagaggaatcgagctctgcctcgccggagaaaccaaatcaaggtcaccagacttcaaccgaccgtcgacgaacatagaccgagctccacggccggagcaaccgccgccgacaagctcgcccgccttcgcacgtggaccggccgattccggccatcaccgtcgtcgagccatacctcgtcgtgaccgcaaggacctcccgaagccaaccccacccttcaccggacctccctcgccaccgggagccggttacacgacgcctccccagtacacggtgcagctgttcgagaagcaccgagtgccccgctgtagggtgaggatgaccctggagcctcatcccttacagccagactggcgttcgttagactctgagtctttcggataccgggctgaggatactatcgaggccattgctctccacgggctgaccaccttatgtggttttcaccccttggagctgtctactcatcccattggcttgttccccgctgaaaaggaggacgacccaatgtggaaggactga

SEQ ID NO: 17855 - DNA, 447 bp, Zea mays
  Peptide Sequence Number=SeqID_61230
atgacgaagatcgatgcttgccgaaggtggtcgaaaagggttcaccggaggtgggcatcaatgttggcgacttgctctcaagtgaagataataatttattacaagtgtaccttcggcttggaggaagataaagaatacaagcgtgacgcaaaagcaaatgccaagtcgcgtgaacacggcgaagggtgggacacgggcgcaacctggcgggtggggtctactcgtcagaggctcgaaggggagagtgagagcgacggtgcgggagaggctggcccaagggtcctaggtgtcaggaccttcgtcctcctctcgcacgtgcacggcgcgaagcgccatgtccggaatcggcgaacgatgagggttgagggtgggtcggtcggcgggattgctcagggaggcgagcctctttggcatggcacagccccaggagcataccgacgatggtag

SEQ ID NO: 17856 - DNA, 321 bp, Zea mays
  Peptide Sequence Number=SeqID_61231
atggctgctgtcagcctcactctgtcgagtggcacaacagtcggagcggcgcaggcggccctgtccttttgtcaggccgctggccgtagcccgggtgcacggtcgggtcccaagttctcgggctggtatgttgacgctgtcaacggtttggccggagccgggtttgcgagagcagcccccgagcctccgcacagagcgagaggacagtcaaggacagactcgacttttttacatacgcccctgcgtcgcctttctgcaaggaggaggggggaaaagcgccatgttgcccttggagggcgccgaacatggtgtctccagtga

SEQ ID NO: 17857 - DNA, 115 bp, Zea mays
  Peptide Sequence Number=SeqID_61232
atgggtgaccaccgcgcagaagacgcgcccgagtacggatctcgaatcctatcgcttgaaaacaaggttcggattgcagaggaacagacgagagggatctcaccggtggcagaag

SEQ ID NO: 17858 - DNA, 273 bp, Zea mays
  Peptide Sequence Number=SeqID_61233
atgggggaggataaaacctggggcctcaccctcctccatccagccgagctcggcggcagacctgaaagtcgccgctcacccacaattcccagctgcatccggcgctggcgataccaattcaagaatccgggcgccaaggtggagagagatgaagagcacccctgtgcggaccttcaacgagtgcgtgatggttggccatgtcgcatggattgtgcgcgtggttggcagtgggggggaaacttgggggcaccggtcgaatacgaatcaagctga

SEQ ID NO: 17859 - DNA, 636 bp, Zea mays
  Peptide Sequence Number=SeqID_61234
atggctcgcaggcacaagaatggggacagtggccaggacaagctccagcgtcgcagccacagtggaccggtgttgggtggacacaggcacctccaggcacttggacgcctccaccacccaaggatcgcagccagtcctgggatgggtgccaccggtctcccagccaccggcgggctctcagccatttcaagcgtggatggcaccgctaccgacgagggttcagcgtcacatgctcagggatcggagagtgatgtcaacatccaagacttcctcgtccatggttctggagggagtggccaccttcctggtggcggagtagggagtggccaaaactcccacagcccgcaggagtgggtaccttccttgaatcataagccatatgaacatcttgcatctatttgtgatcttggccttccacagtgtcctccagtgatccatttgcacattgccgtgaaactgaatattagaaacaaagtgacagagcctgaaaaaccgagtttgtatattaagaactgtgtgctttcaatagatagggaaagctctggccaaatgctatcatttggttcagccgaaccaggtcctgttgtctataaaaagagctccaggtcgtctattaaaagagctccaggtcgctag

SEQ ID NO: 17860 - DNA, 1113 bp, Zea mays
  Peptide Sequence Number=SeqID_61235
atgacgaagcgcaccgccttcgccgcggacgacgcgatcatcgccgccgccgccgccgtcacgtcgcagcccggccggcggttcacgtcgtacccgccggcgagggcgcgcggcggatgcaggctggccccggcggtggcggcggcggcgcgccaggccacggacgaccccggcgccgctgggtcctggccagaactagtcgtgccgcggcacgccgacttcgacgactggatggagaagcacccgtcggcattggccgcgttcgagtcggtgctggccgccgccaaaggcaagaagatcgtcatgttcctcgactacgacggcaccctgtcgccgatcgtcagggaccccgacagcgccgtcatgtccgaggagatgcgggacgcggtgagaggcgtggccgagcacttcccgacggcgatcgtgagcgggaggtgtagagacaaggtgttcaacttcgtgaagctggcggagctgtactacgccgggagccacggcatggacatcaagggccccacagcacagtccaagcacaccaaggcaaaggccggagccgttctatgccaacctgcgagggcgttcctgccggtcattgaggaggtgtaccgcgcgctgacggcgagcacggcgccgatccccggcgcgacggtggagaacaacaagttctgcctctccgtccacttccgctgcgtccaggaggagaaatggcgcgctctggaggagcaggtccggtcggtgctcaaggagtacccggacctccgcctcaccaagggcaggaaggtcctcgagatccggccgtccatcaagtgggacaagggcaacgccctgcagttcttgctcgagtctctcggttttgctggcagtaacagtgtcttcccgatatatatcggagacgatagcaccgacgaggacgcgttcaaggtcctgcgcaacttggggcaagggatcgggatcctggtgagcaagattccgaaggagacccgcgcatcctactccctgcgtgaaccttctgaggtagcaacactacccactgctaccagttattactgtacagtggaggagttcctgcgcaagttggtcagctggtccaaggagagcaggcaacgggactag

SEQ ID NO: 17861 - DNA, 562 bp, Zea mays
  Peptide Sequence Number=SeqID_61236
aaagcgaagggtacctcgaccagtatcagaatcgaggtcttcgactggagttgacagagacgtcggagcgaagggccgcactgttaaaaagggggctcattgtagcctcgcgaaggcgcccccatcgtcttggacagttctgaacgacgacagtcctggcgaggtcgaaggctcggtttcgcaggacgaagggtgccgcgcgcgggcgaaggccacgccacccaacggtgggacccaggccacgtttcgtcgtcatttgcgcccatttgtaagcccctcctcgcggtatagaaagcgaatggtacctcgaccagtaccagaatcgaggtcttcggccggagctgccagagacgttggagcgaaagaccgcactattaaaaaggaggctcattgtagcctcgcgaaggcgctcccatcggcttggacagttctgaaccatgacagtcatggcaaggtcgaaggctcggcttcgcagggcgaagggtgccgtgcgcgggcgacctctctggacgacgcaaaggcggccatcgccgagaaaaaaaggcaagacaatcctcgctga

SEQ ID NO: 17862 - DNA, 119 bp, Zea mays
  Peptide Sequence Number=SeqID_61237
agaccttttggtttacaggtggcaatgagattgatggttttggttatgactatggtgctggcgaagatgaagctgtggaaggagacttccaggagttccaagaatacgacgagttctag

SEQ ID NO: 17863 - DNA, 180 bp, Zea mays
  Peptide Sequence Number=SeqID_61238
atggcggctctcggcccccttacggaagcaagaggacgtcagcaaggactcgacagccccgacagatgccctctcgccaggctccagcactcctccgacggccacgacatcacacgaaccgggtgccaaaacctctccggctgccacgacggcatattgttggatataaaggcaatttag

SEQ ID NO: 17864 - DNA, 1104 bp, Zea mays
  Peptide Sequence Number=SeqID_61239
atggattttttttctcgcgggctcacagcccaaaatgccgctacagcttacattctctgcactgggccactagccgcaccaggggcccaacatccctcctctccgcaacccacccgcggcctccacgagccgagtgtcatcgggccattggggtcgggggctcggggcacatatcacccgcttccctctgttgaatcctccttccgcgccgccgccatctcctcctcctctgactccggcggcctcacgccctcctcacgctccgcaacgccgtacctggatgttggtttctacttcgactctccgagggatagagaagagacccagtgccacaaggttcccgtagtctgtaatcggggagctgagaatctaggccataggcttcttgaagccgttgggagacaaaggaggccggacgagcgagcgaacaaccagatggaggcggtggtgcggaaggtgcagcagcgggtgaggaaggcgcgggaggagatggatcagtgggatgacctcaacactcggctcctctcccaattctccaatgctgccgcggtcatctctcgccttcaggcccttggagaggacaagaattatggccccttgcgtgctgtacccaacatcagagtggacctcattgggaaccagatggaggttctggagctcattttcgttaaaattagggagacactggagaagttcaatgacgtcgtgaaagctttaaataaggctctgcgtgataccaagcagatggtttacgctaaaatcatcagctatctccttgctgacttggaagacatgagcaaccatggtgatcctttcatttgcagttccagtgacattgctgtactacgccaactcttagtagaccagccaaacattccaaaagatgaagaaataggtgcaccattgcctcttccaggtggtgcccagaaggtttcgaccaagttaaacttctttaacgctgatcaagacaataccctaaaaaagtggtacatgtatgcactgcacttgtccaatacattatgcaactcaacgcaccaatcacacagaggcctaggactaggaggcctgtgggcaccagagactccagaagctgagaaacgttga

SEQ ID NO: 17865 - DNA, 999 bp, Zea mays
  Peptide Sequence Number=SeqID_61240
atgacgaagcacgccgcctactccagcgaggacgtggtcgcggccgtggcggcgccggcgccggccggccggcatttcacgtcgttccaggcgctgaagggcgcgcccctcgactgcaagaagcacgccgccgtggacctgtccgcgtccggggcggccgtcgtgggcggcggcccctggtttgagtccatgaaggcttcgtcgccgcggcgcgccgccgacgccgagcacggcgactggatggagaagcacccgtccgcattggcccagttcgagccgctgcttgccgccgccaaggggaagcagatcgtgatgttcctggactacgacggcaccctgtcaccgatcgtcgaggaccccgaccgcgccgtcatgtcggaggagatgagagaagccgtgcggcgcgtcgccgagcacttccccaccgcgattgtgagcggaagatgcagggacaaggtcgtacacacgcaggctgaagccgcagctgtccattaccaagctgcgagtgagttcctgccggtcatcgaagaggtgttccgcacgctgacggccaagatggagtccatcgccggcgccagggtggagcacaacaagtactgcctgtccgtccacttccgctgcgtccgggaggaggaatggaatgccgtgaacgaggaggtcaggtcggtgctcagggagtacccgaacctcaagctcactcacggcagaaaggtgctggagattcgtccgtccatcaagtgggacaagggcaaggccctcgagttcttgctcaagtctcttggctatgctgggcgcaacgacgtcttcccgatttacatcggagatgatcgcactgacgaggacgctttcaaggtgctccgcaacatggggcagggcatcggaatcctggtgtccaagcttcctaaggagacggcggcatcctactcgctgagtgaccctgccgaggtcaaggagttcctccgcaagctggccaataagaagggggcgcgccaaccatga

SEQ ID NO: 17866 - DNA, 423 bp, Zea mays
  Peptide Sequence Number=SeqID_61241
atggctctggagtccaaaaacgccggacggcgtcaccgggaggaggagctcaagcagggaaaggaaggcgcaggtgcagccgaggaggagaagacgatttggtcccgtattcggaggaacatggctgcctatgagacggaggaggaggggacgagggcgagaaccattgctcaacgtgcgagggcaacgaccacaacgagagatgccaaggcggtagagaggagggaggaggagaagcggaggttggaagcggaggtgaggaaggagcgcgagaagatgaggaaagaagaagcggcgaagatgctacaagctgagaagaggaagctcaaggagaaggagaggaagaagcgtgaagcggatgatgagaaggagaggaggaggaaagaggagctcaagaaaaagaagacggtcaagagaaaataa

SEQ ID NO: 17867 - DNA, 510 bp, Zea mays
  Peptide Sequence Number=SeqID_61242
atggcgcgcctcatcagcctcgccgtcgccgtggcggtggccgtcctcgcgctagcgtccggcgcggcgtcgcaggcgccgggtccggcttcgtcggtggactgcacgtcggcgctggccgggctcgtgggctgcctgccgtacgtgcagcaggggagcacgcagggcaagcccgccagggagtgctgcgccggcgtcaaggccgccctcaagaggcacgccaccgtcgcctgcctctgcgccgctttcggccggaactacggcatgccgctcaacctcacccgcgccgccggcctgcccgcggcgtgcggcgaagaccccgccgccttcagccggtgcaacatcaaagtgcccggcgcccctgcttctgcgcctatagcttccggaacggctccggcagccccaaccccgggctcgtccaagtcagcggcggtgatccgatcgccggtctcagcgttcgccgtcctcgtcggcgtggccgcgactctcctctcgcactgccccctctga

SEQ ID NO: 17868 - DNA, 519 bp, Zea mays
  Peptide Sequence Number=SeqID_61243
atgcaggagtatagatgtccaaacgggccacccggcacggacccggcccgaacccgtttcggcccggtacgaatagggtcgggccaggcacggcccattgatgcttcgggccgggtcgggctggcccacgtgcctaaggatatgcccaaacccggcacgcacagggaaaaatcgtgtcgggccggcccgttggcccgggacactacgagtgccgcccgtgcatgtgtaactaggccacgatatcgttcggccggaagaatagaagggctatctgggccgtccagcgactgcggctcctgcgtcctaatcaatgcgcagccgggcacctcagggtctccagcgacggcggtaggaggtggtcacgggctagcgctgcgcaccggcaacatcgggtgccggctgctatcagactgggcgtggcagatgcacgaccactgcgtgctgctgggcgccgtggaccaaggcctcagcgccgccgagttcagcgagaagacaatacgtttttttcactctgaatag

SEQ ID NO: 17869 - DNA, 771 bp, Zea mays
  Peptide Sequence Number=SeqID_61244
atggggggaaacccgccgtcttttcgcctcatcgttggaggaacgcaactccgtgggagttggtacctttcagccatcgttcggcttcaaggattttcatcacacaacccggttgctcccctccgctggtggtcacccgagacggtgaccaccagctcctgggtggggaggagcaagtcgggctgcgatcttggtcccaccctcagcttcaaggatgttcatcatcctcgctggggtgggtgccgggctgagccggcgctctacctcccgcgcgggttcgtgggtcatcctctcccgcggcattcgagggagagggcgctcactggccctgcgggcggcccggacttcgacaacgcggggctagtcgacggcaggcgtcgtcacctccagcgtgtcgggttcgtcggcttggctcccggcggccccttctgcaggagggcggctgccgcgccatgtacacgggaggaccaccctagatgccgcgcgctgctagggcggcgttcgtgttctgggtggtcctgcctttgcaccgggacggcgcctttacgcggaggccggcgccccactcgtccgggaggatttgagtggggatttgtcggagggctgatggctcctgccgtcggtgtcgaggcggaggtggctcgagaagtccccgtcgccgacgggatcaccgccaccatccgcgcttcgggcctctggctctttgtacttgtcctcgcccctcgagcgtcggcgtgggcgagggcaagactgcagcagtgcctaccctga

SEQ ID NO: 17870 - DNA, 483 bp, Zea mays
  Peptide Sequence Number=SeqID_61245
atgggggaggataaaacctggggcctcaccctcctccatccagccgagctcggcggcagacctgaaagtcgccgctcacccacaattcccagctgcatccggcgctggcgataccaattcaagaatccgggcgccaaggtggagagagatgaagagcacccctgtgcggaccttcaacgagtgcgtgatggttggccatgtcgcatggattgtgcgcgtggttggcagtgggggggaaacttgggggcaccggtcgaatttctcgccgccgtcctggcggacaccgtcgaggccgtggtgctccgtgttacaaatcctagtgagaaccttctgccaccggattcgagatccgtactcgggcgcgtcttctgcgcggtggtcacccatggcgccgccgcaaggggagctctgctccgtcgccgtgtgtcagctcaggaaggattgcaggtgaccgttggttggtcgatgaacgaaccagattaa

SEQ ID NO: 17871 - DNA, 339 bp, Zea mays
  Peptide Sequence Number=SeqID_61246
atgcaggcggcatgcaaccgtgccaagtgggcacgccccctcgactccaacgagcccagcatggaggtccaggcccacgcgtcatgcgaccggcgcgccggttgctacgtgcgggcagaagcagcggtcacgtcgtcagccaagctcacgtcctatccggggcagcaggagagccctccctcacaacgtgaagacggcgcgcccgtgatccgttcctcgaacggctcgcgcacgcgcaacggccgccccgcgaaccactcgcctcgtcgcatcaactccgcggcaggacaggcggcgcctcaggcgggagaagcaagcgacgcttcgacttcgccataa

SEQ ID NO: 17872 - DNA, 252 bp, Zea mays
  Peptide Sequence Number=SeqID_61247
atggcgccccgcacgctctgtgacgacgacggctctcagcccccttacggaagcaagaggacatcagcaaggactcgacagctccgacagctgtccttccgccaggctccagcgctcctccgatggccacgacaccacacgaaccgggaaaagttagctatacccacggagatattaccgaagtcctctggtggattggagaggtggatgccttcaaagagcaaggaagctaaaaagagcaccaaaagttga

SEQ ID NO: 17873 - DNA, 1644 bp, Zea mays
  Peptide Sequence Number=SeqID_61248
atgttgacatatcctatattgaacgaccgatcaattgatcagtggacggttactgagttgaaggatgagcttgagcgaaggtatctgcctgtcagtggttcgaaggatgagcttttgaagagactctttgaggccatgcaggatgagatacttgatggtgagggaaaaacaactgttgtaacttcccctcctgaggaattgaaaggtggtgaaactcctggttccattgatgtatctgttaaccaggcttcaattgagcaacatgttcataaaggtgcttccgaggctgcgaaacagggggtaggtcttgttatctctgttacagaagcttatgatgaaagtacatttgctacttcagaagttactcaggaggctgtggttggtactgcagaagttagtcagagaagtttggatgctgttgcagaagttgagtcttgtctagttgatgcagctgcaactgatgaacccgatggtaatggtcaaggttcagcttcaagtggtgatactatagtgaaggaaggaagtccgcgctctgaaggtcatggcaatactattgagaagaccccagaagatggcaccaataagaaaatagctgtcgatgatgaaccttctgaccttactggtggtgacatcaagttgggcctcgatgtgcacagcaagattctaaagctggaagatgaacccgcacctcctcatgatatgttgcataatcatgaggattctgatgttgttgcagttgctgagccagaagatgacacaagcaaaaaaatgataagtgatgatgtaccgactggtcttatgcataccaatgttgagttaggtgccaaggtagactgcaaaattgaacaggaagaagtatcaacattgtctgatgctgctgcattgcattcttatcctaaggaacatattgtggctgtggcaaaaggccttgcgctcccaaggaggatgctgatgtcaggctacacaagtaatatagacttggacagaaaagaggagagtcctgacataaattcttgtgagaaactgaacttaaataggagttcaggtgatgaatcaatggatgaggatgtgatggaaaggaagcatgccgattcctatatcaaacctgaagatcttagaggaaagacaaaggttacttcggagcatgtgtttaaagatgtttctctgcttgatactcgtgctgagggttcccctgcacactcaaaggaagttgtcactgaagagaagctatcaactccaactgaaaagaggaaacttgaagatcaagaagtcattgaaaataatgagccaatcaaacgccagtacctatggaacgaggatgctgtcaatatttctgatcaacaagcatccaaaataactagtactggtactcagaaggaagttatttgtcctgctccagaacgttcttttggcaggcctaatacagtagcaagaagaaattctccaaaggagcggattggtgaggttcttctacatgttcaaaacataccacctgccaaaacatccgcaacaacttctttaagaattgatcggtttgtgcgcccatttactctgaaagctgtgaaagaacttcttggtaaaactggatccatctgcagtttttggatggatgaaatcaagactcactgctatgtcacagtatga

SEQ ID NO: 17874 - DNA, 438 bp, Zea mays
  Peptide Sequence Number=SeqID_61249
ctcctcccgtgccagcagtccgtcgagcagggcgctggcgatggcggcaacggcaaggccaccgctgctggcgctgagaaggctaccgtcatgccaaaggagacgggccacggcggcgacgtcgaccggccggacagagaccacatatggagcttgattcgtggcacagaagccgccgctcggagacaggctcggacggcttctccgatatcgacggctcggccgccaccgaccgctcgtgcccgggctgcggcgacgacgagcgcgggggaggaggaggtggaagcgaggtggccggagacgggcgtgagagaggtggaaatcccgcggccttcgtgttcgtcccgcgcccaggtcgggcgtaaggagaggatccaggtgtacaatgggggtgtagcagagtgctacgtgtctagcgggggagagctagcgccctaa

SEQ ID NO: 17875 - DNA, 633 bp, Zea mays
  Peptide Sequence Number=SeqID_61250
atgacgtttgctgctggagacacatcccgattcgtcgatagggccgagtgcacctacctcattcacaagataaacgacgctcctaccccctcctctgttttgtacctgcttgaacatatcagcaatctcgcttgtataacttgtggatggtatgctggagcgctgtcgaattccttccctggcgcaattgttgttcagtttctcagtccaagtttttgttctcttcgtcccacgctttttgttgtcttttttgagatttcactacttgtgtttgctcttgttttggtctttcttaatattgcccctgtcattgttttcaggccgattatatacccaggtatggacttgatgtttaatgccacacctgctccaggagagcagacaaccttcaagtgggtcattgatcatgggtgtaaaatggtatggtatctaaaactgaatccaaaatataaaaagatcactggtgaggagtatgtctctcccaggcttcaactgtctcggactttagtgaaacttgacactatcgttcagacatctttcaagttcatgatatatgatcagtcaaatggaaagcacaaggagcagctaggtatagacccctccaactaccttgtcggcgcaacaataagatga

SEQ ID NO: 17876 - DNA, 1011 bp, Zea mays
  Peptide Sequence Number=SeqID_61251
atgaacgacctcatgaccaagtccttcatgagctacgtcgacctgaagaaggcggcgatgaaggacctggaggcggcgggcgacgggatcgagctcccggaggcgggcgccggcggcgtcacggacgagcgcctgcgcgggttcttccaggaggcggaggcggtgaaggcggagatggcggccatccgcgacgcgctcgaccgcctgcacgccgccaacgaggagggcaagtcgctgcgccaggtggacgccctccgcgcgcaccgcggccgcgtcaacgccgatatcgtcgccgtgctccgccgcgcccgcgacatccgcgctaggctcgagtctctggaccgcgccaacgccgcgcagcggaggctttctgctgggtgccgcgagggcacgccgctggaccgcacgcgcaccgccgtcacctcgggactccggaagaagctcaaggacctcatgctcgacttccaggcgctgcggcagcggatgatgtccgagtacaaggagaccgtggagcggcgctactacacgctcaccggggaggtccccgaggaggaggtgatcgagcgcatcatctccgacggccgcggcgaggagctcctgggcgccgctgtcgcggagcacggcaagggcgccgtgctcgccgcggtgcacgagatccaggaccgccgtgacgcggcgcgcgaggtggaacgcagcctcctggagctccaccaagtgttcctcgacatggccgtcatggtggagacgcagggggagaagctcgacgacatcgagagccacgtcgccaacgcctcccactacgtgcagggcggcaacaaggagctgggcaaggccaaggagtaccagagaagcagccgcaagtgtctctgcatcggcatcataatcctgctgctcctcgtcctgcttgtcatcgtgccaatcgccaccagcctcaggagcacgtacctcggcgccatagcctatggcgccgagctgtgttacctcggcgccacgggctacggcgccgagtaa

SEQ ID NO: 17877 - DNA, 171 bp, Zea mays
  Peptide Sequence Number=SeqID_61252
atgacagagccaccagatgcaccagccaccaagtcgtggtcacatcttgcagccccacgtgccatggagacaccagcacctccattgagatatcgtggctccgcggcgcagctagtactgagctgcagttggggcattagtgtcggtgtttcgaaaccggggggtccctaa

SEQ ID NO: 17878 - DNA, 996 bp, Zea mays
  Peptide Sequence Number=SeqID_61253
atgacggtggcagacgcgcgggagcagcgggcacgtcgacagccaagctcacgtcccatccgggggcagcgagagagccccctctcacggtgtgaagacaacgcgcccgtgatccgttcctcgaacggctcgcgcacgcccaacggctgccccgccaactactcgccccgtcgcattaactccgcggctggacaggtgacgctcctggcaggagcaacgggcgacgcttcgccttcgccgaaacaaccgcaccaaaaaaggctccgagcctccttactgatcaggggttcgaaggctggccccccgaagggttcaacagccgcctcagatcgcgtgggccctacacccactactggtcagaggctggcccccgaagggttcacagtcgcctcagacgccgagcgagggatgaccaggggggctcggactcggcctctgcggacgacctccgcctcgcccgacccaggggctcggactcggcctctgttgacgacctccgcctcgcccgacccaggggctcggactcggcctctgctgacgacctccgcctcgcccgacccagggggctcggactcggcctctgctgacgacctccgcctcgcccgacccaggggctcggactcggcctctgctgatgacctccgcctcgcccgacccaggggcttggactcggcctctgctgacgacctccgcctcgcccgacccaggggctcggactcggcctcggccatggaagacagactcgatcccggcttcggggggagcctccacgtcgcccaacctagggcacaggccagccacgtcgacaggaagcgccatcatcaccctaccccgagccgactcgggccgcagagaacaagaccgggcgacgtcagcaaggacacaaccgttccaacagctgtccctccgccaggctccgttgctcctccgacagccacgacatcacgccagcagggtgccaagatctctccggctgccacattggcatgtacttag

SEQ ID NO: 17879 - DNA, 1887 bp, Zea mays
  Peptide Sequence Number=SeqID_61254
atgaatttttcctcgctgctggcggagctcgcggcgtgcgagaagcgtctcattgcttgcatcgaaggtgtgcctgccaagtgttcggtgaactgccagaacgccttcggcggcttcacagcaccggctacggacgacaaaatgtctagcaccaagcctagcctcaccacatccacgaccatctatggcgctcccgtcttcgaccaatactgcgatgcggatctcggtgacaacgccatggagctcgtccagcgcggccccgtcgacatcgagcgcatcgacctccgcagcggtgcgctggctggctgctacggcgagcagtccgcacgcggacacactccttcctccttcaacgacgatttgggtgcctcgctcgactcggtcgccaacagctccgtccatggcggccacggatccgtgctgccccacctcatgcccatctgcgcgggcactagcaggatccatgtgcccgacgaccggagtctggactacgccgaggatttcgacaccaatcacttggacaaggggtgcgtactcttcggtggcgtgcgcgcgtccagggaggaggtagcgcaggcgcgatgcgacaacaccaagctcgtcatcaagcaggccttggctgaggccaacaccgccaaggactcgctggagctcgccggcggtgacaacacgcacttcaacggcgtgcatcgcggccaaccgtttgagacgctgagcaacccgtccgcccaccaccgccttctccacgcgagcgtcgacaacgtgtgcctcaatgatgtcgtccccgacagggagagcgcgctccagaacctccgcctggagtacgagtgcgtcagggtcagcgaggtcacagcgcagggccgcctcaaggaactcaacagcatcctcgccgccacaacgacggcgacggcgtgcagcacacccacgtccaccaagtgttcgatgcgagtcctcaaccacggcgcatactcagttcccaacctccccgtggtctgcatcgtgggcgggtccaacttccccagcctgcggggcttcgaggcgatctgcaccagcacagcacggccgcggagctcccggcgctccacgagcagctcctccatcgcgcaaccgcatccgcaagctggggcggtggggtcgtccgagtcggagcttgcggcgccttcctccgtccacgacaactctgtcgcgctgatctccttctccggcagatgcgactacgcgcgcgccaacgagatgaccagcgcccagatcgacgccatggcacaggacgagacggacgagattgccaacaccgtggagcagctgacgggcctgggcgtggagaaggtggttgctgagtacaaattcagggacccaaagacctccgaccaggagatgctcgagagcatctgcagcgtgctcatgcccttgaagctccaagctaagatcgccaaagccaagttcgaggcggcgtgctcgggcaagatctcgtgcgcggacatcgtcgccttcaccgccagcgacgcgtcctacttcctcagcaacgacgacatcaacttcaccatacccgcggggcggtacgacgggaccgtctccatcaccagcgagaccctgccgaacctgcccccgccgttcgccggcttcgaccagcttgtgaagatgttcgctgacaaaggggatcgcctgccgtccagcaacacctctgatatggacccgtcgttcgccgccatgctgcagaccaaatgcaagtcgacgaatgacagcaacaacacggtgatgcaggacttcaagacccccgacatcctggataaccgctactacaagaacgtgttggctcacaaggttcttttcacaccggacgtgacgctcaccaccaacttcatgtcgaacaatctggttgctgtctaa

SEQ ID NO: 17880 - DNA, 1092 bp, Zea mays
  Peptide Sequence Number=SeqID_61255
atgggggaaaccgccgtcttttcgcctcatcgttggaggaacgcaactccgtgggagttggtacctttcagccatcgttcggcttcaaggattttcatcagccagcccggccgcacccctccaccggcggtcacccaggatggtgacctccggcttgatggtgggggaaaacgaaccgggctgcggcctctgcccctccctcagcctcaaggattttcatcaccagggctggggaggggagtatgccgagttgaggtcggcccccgcgtgggcggcagcccgctccttcactcagtgactggagggaggagcggttgtcgtccgcggcgctggcatctgcagcgtgcctggctttcggacgcgagcggcttcggagccgctcgcggcgccagcgtctgccacggcagctggaagaggttcttccgccggcgtgatagccaaggttggccacggaccgacccccaactctacggccttctgcccgtccttgcctctcgagttttagggcatgggcgggggcctcctggcagcagcatccgccctgaggtcatcactgctgctgttcggccccccggggcagaagtcttcatcgtcgctgctgctggggcgggcgacgacgagccgctcgtcggtcttctgtcgctccgcaggcctacccccatggagtggggttgttcgtacccgcggaggagggaaccggagttccgttttgtaatggcacttcgaatgccagggagtccctcggctcggtcggccttgctgtccgaggctcctctagctcagttaaagggaccccacggccgctcttcgatgagccgaggccaggggtcgggctggcgccctcgggagatggtcggccgaggccccaggggcgaccggccgagccgcctgctcgggtcggattcccaaaggagtccctggcagcgattgcccgagcgtggtgatgacgtcgtccttcggagcggagaacctcggaccgcgtcgccgtccgaggctaggtcgggcttcgccggaggtgtcgtcgatgccgagggtgttgctgcctccttccagcgtcaagacccgagcctgcagggtcaaagtgtcttgtag

SEQ ID NO: 17881 - DNA, 852 bp, Zea mays
  Peptide Sequence Number=SeqID_61256
atgacgcttggctttcgaggcacgcggatgccagatttccccggatggggcgtgtgcggctgccggggccgcatcccttctggtctacccccgttggctgcttcttctacctaccctcgccgtcgcctcaacttcccggccgccgtcccctccgatcaccagctgctgcttgtgctgctgagccaagagcagctagcgatgaacatcttgaacctgcagcccatcaacccaggcgggcacccggcgttcccggcggccaaggagagcgggcacctcacgccggcgtcggtgcgcttcgacggcgtgccggtgccggcgcagtcccacgcgcactgtccgaggtggcaggctcagacgctgcgccgggacagcagctacgtcggcgtggagcacgaagggaccaggaccaccgcgtccgtcccggtcccggtcccggtcccagccgttgccccggtgcctgccccgttcaagccgctcacgctcgacttcctgcggtcgctcatggacaggagctgcagcatgagccccgccgtcgcggagtacggcgaggacagcgccccgccgccgccgcagatggtggcgctccgcgtggtggtggcctccgccgtggagctggacgcgcgccagaccgagctcatcgcgcgcaagatgcgccgcctcaccgggttcgtcaacctcaaggtcgacaacgtcgtggacgcgtccctcctcgccggcttcgtcgtccgctacggcaccgacgactcgcacgtcatcgacctcagcgtcaagggccagctcgccgcgctccagaaccgcgtcgactccatcgaccaccagaccgcccacgtccacggacacccgcaccactga

SEQ ID NO: 17882 - DNA, 294 bp, Zea mays
  Peptide Sequence Number=SeqID_61257
atggcatcggctgaatgcctgaatcgggtcaggaagcacggagcagatagaagtgcactttccaatacagttagacagagaaggcatggctgtgatgttataatgctgaaggaccccaagaatagattacgccctgtcatccaccactgcccgttatttgtgggcttcaccgatggctggaaacatttggtgatagcaaacgaccttcgggctgaagacgtctgcgagcttgttaaggggccagacgatggtgagccggtgtactatgtccggatgtgtggtcacaaaatttaa

SEQ ID NO: 17883 - DNA, 660 bp, Zea mays
  Peptide Sequence Number=SeqID_61258
atggggaggccacgcgcgccttggatccagccgccgttgaggggctcgactgcccctgcctgcaccaagccgccatggctggcgtgggtggcgccgccgtcgaggggctcgaccgctcctgttctgcaccagtctgccctgaccgtcgtgggtggcgccgccgtgtgccccttgcgcgcgccgaggggcatgcttgcctctgacagggccgaggctgacgacggccacgcccgcaccggggctcgccgttgctcgattcgggccggcccccagccctacccctgcctggagggagccgcgccgtcgagccttgggggggtgactccaactccgacccctaggtcgggcgtagcggagttcgccttcttccggttcttagcccaagtccgagccctgatcgggcaagcggagttcgccgtcttccggggcttacccgagtccgagccttgggtctggcgatgccagctttctatggtgcctgcgccaggcctgactgcctgtcacctcactctatcaagtggcacttgtagtcggacggctcatacggcgaagtctttctgtcatgcccggttcggcggtatctgcgaaatgacggtggtcacttgggctctatcgactgaaggggcgcgtaggataaggtggtcaggcatctttgcataa

SEQ ID NO: 17884 - DNA, 390 bp, Zea mays
  Peptide Sequence Number=SeqID_61259
atgacttctcacggatcctcggacgaagggaatgcacagtcccacactgacggacttgcacgagagggtttcccccgtattttgtgggaggtacttcagggagctggttacacgacgcctccccaactgaccaccttctgcggattccaccccttggagttgtccactcaccccattggcttgttccccgctgagaaggaggacgacccaatgtggaaggaccgagtggagcatgccaaggatatctgggctatctacccaggtcagactgctcacttgacggtgcggtgcatgaatgccctgtatcgtctgcaagtgatgcgtggtgaggcaatgtcccatctgatggcattgttggaggcaaccaagatcactttggataacagatag

SEQ ID NO: 17885 - DNA, 186 bp, Zea mays
  Peptide Sequence Number=SeqID_61260
atgtacaatggatcaagcagtctcattagctgcgagaagcagacgattcgaatcgagtttttatccttgcaagtgaccgcacttgtaccgaccataaccggaatgggagaccacgtctcaggtcgcgtgaggagggcaatctgctgccaggttcaatcaggatttaataatcattatgctaagtga

SEQ ID NO: 17886 - DNA, 1407 bp, Zea mays
  Peptide Sequence Number=SeqID_61261
atggtcccgacgaccacgggcgccggtggagatgaagaacggcgagtaactgcctctgcagtgggtggaggcggcggtggtgcctccaaatcgacgtccataggagcagatgcagacgatcccacgtcaaccaccggcaccggtggcgacggggatgcagtggggagtccacactccaccaccggcagaggaaccaccactgtccatccatggataacgcagaagtgcacatttgcacttgcacacggcgttcagggatcacgtgcaccgatcgatcttgctgttcttgtcaagaacagcgtgttcttcctcttccccttctctgatttctcccttgagacagtgctgataactgaggcctttggtgaagatgtcgacgaaccgagaagtggtcgggatataaagaacccgcacatccccgacagtgacacgctcgcgaacaaagtggaggtcgagctcgacatgtttcatgcgctgatgttggagggggttgatgcaaccaccggcatggcaagtgggcccacgccaaatgcaccgcgacatgagcccaacaacccatgcatgccgctccgtaggggacgtggaaagcggtttcaacagacccacacacgccgctcttccatgcatagaaacgcggggaaagtggtttcaacagctgtgaggtggagtcgttttactcatcctaatccgcccaccaacctggctacaaaaagtcgtaccgaggcccctcaagcgatagcgatggtggatctgctcgccaccggtggcttgacgctctccaggtactccgactcgcctacgtcctccaaggtacgcccgtacgtacatctgattttttggctcactgactccatgggcatcttcataggcctgtccaccgagtccgtgtcgcgttcatgggacctaatggagatcgatgctgccggggtggagggcatcgacggtgaggcatgggccacacggaggacatcgcgaccaagagacaagactgtctccaaggaacacgacaaagtcggaagtggactaaagtatgttaggacaaccagcccaatcggtgtaggtgtagacgacgaggtcggtggtcgcagaccatcgaagaagaaggccaaagtcagtggtgcctcagatgtaccacatgatttgcttcatagtggtgatatgtggctcccacgaggcgtgcatatggaggcacaccttatatatgacataggtgatgtcagggcgattgtagacatgatattgaagagcctcgatgagactttgatagctagtcggatcagccaccggagggccgtcaatggaggagaccttgccccgagtgtccaatggagtcgtgcagggcttacaatcagccatgccatcatactcaaggatgttgatggtgtacttgcgctggtggaggaataa

SEQ ID NO: 17887 - DNA, 363 bp, Zea mays
  Peptide Sequence Number=SeqID_61262
atgggaggtgcagagagcttgcagggagaaacgacgaccgattggggaagctcggctggcttccagcccacgcgcaagggagaagttggagggggagaagggcgctgtgagggcagagacatggcgccgtgcacccgggacagaggagcagggagatgcgacggccgatgggaggagcttcggcgcgccggggaagaaaggtgtcgtgctgcagccgtggggaggaagggctcgcagccatggagcagggaagggtgcaggcttcctgctggccgtggagcaggggacgctgggcagaggagggcggctgggagtgtggaggcgccatgggagaaggagctgagctccctgctgcaaccgtga

SEQ ID NO: 17888 - DNA, 600 bp, Zea mays
  Peptide Sequence Number=SeqID_61263
atgaagttttattatgttgaatcactagccttcgtagctggatcatcagcttcagcactgccagcaccagcagtccaagcccttgctcccagaggcgacgacccggatgactctggtgacgatgatgaatatgacgaagaggaagaaaaagaagatgaggaaaacatcaacgaggaagccaacgaagaacaccaagaccactacgtggggttatggcctgtcactgaacattacacttcaatgttcgagacagggcacttccctaacctgctgcaggatgttctgcatgcgttgggaacctacgtccgacccctatacgagacaaggcgagtgtacgagcctcctcgggcttgctactacatcactcgcattcatgtcagggtgatggatgcaggtcttaacaccgacctggatagtgctacactagacctctctagggtacacttggagctggaggatgcacatgcaaggattgcagccttggaagctcagcttgatggaaggaattcctctgaagttcaagtccctgccatggcgttatcccctccccgcaagaggatccgctatggagaaccaggatccatcaccaggctgctttag

SEQ ID NO: 17889 - DNA, 444 bp, Zea mays
  Peptide Sequence Number=SeqID_61264
atggccgagcagcagccctacgcagcgctctctctcccatggcaagcagccttcttccccatggccatggtctgcaacaagaagtcgcgcgctgctgttctatgttttgcgcagcagccccgacacctccgcgcgctgtcgggtcgctgctttgtgctgcacagtgaacagcacaccgggatgcccacctggtgttcgctgtttttgtgcagccccgaacatcggcgtcgttcacccccggagaggaaccccgtgttttgcgtggagaagaaggcaagccgctcaacgctcgtcgatgttcgtagcgatgcacaaatcggaatcgcaatcgtcctcacaaacaccgattgggtttgtttatgggaatacatcgatagatgtttatgtgagaagtgtattggttttatgcatgtgatcggtgatggtgatagtcgatgcaaataa

SEQ ID NO: 17890 - DNA, 537 bp, Zea mays
  Peptide Sequence Number=SeqID_61265
atggttaaaaaatttggcagcaaaacagtgcaaatagcagtaaatgctgtggtaacttcacacctactcgtctgtttatatagtgctgcaggtaagaaggcgaagcggcagggtttttacaccaggcgggcagtaacttgtactcgctgtgcagtggaccgcaaagaccaaacagtgactctgcaaggtgggaccgacacgatctcgggaaatgaatcgtttctcggcaacgagctcagggaaggtgttttttggaccttcggcttcccgaagcttgagaggattttttcacggttcaagctcgttacgaaaaacgatctagcgccgcgaaaggggctactgttgggcccatgcttcgttgcgccgaaggccttgcgtgaagaagcagcttcggctgaaatcgtccccaggaaatggccgaaggaccgaaggagcatcatgtacaccctcaaggagaaggggatcgacatggtgattgcttctcgctcgcccacctcggacatagccaaggtgttccaagacaagttggagctctag

SEQ ID NO: 17891 - DNA, 1323 bp, Zea mays
  Peptide Sequence Number=SeqID_61266
atggtgtgtttgggcctcggcggccgcagaaaacacacactacaagataatccgatcctgcaggctcggatcttgacaattgaagggagcagcagcaccctcggcgtcaactacaccttcggcgaggaatccggctcgagcagacggctcggccggtcacctcaaagcctcagccagctgtcccccaaggacatcagctcggtttgtggcctcggtacgaacaaccccacacgattggggggcctgcggagcaacagaaggccgacggacggctcgccgacgccccgctccagcagtggcgacgacgacgacttctgctccgggggcccgaacagcagcagtgatgacctcagggcggatgttgctgccataaggccctcgcccatgccctcactcgagaggcaaggacgggcagaaggccgtagagttggaggtcagtccgtgggtggcgccggctatctcatcggcggagaaacctcttccggctgccgtggcggaaggcggcgccggaagcggctccgaagccactcgggtcagagagccgggcacgcggcagctgccagcgccacgaacggcgaacgcccctccccccgatcactgagggaaggagtgggccaccgcccgcgcagggaccgaccccaactcggcgcactcccctccccagcactgatgatgaaaatccttgaagctgagggaggggcagaggccgcagcccgggcagaagaagccaaactgccgtgcgcggtgcatgcaactgcccagcggttacaagcattcctccactttcgcccagaccagcgggtgaaagggcggacaactatgcagtcggcatgcaaccgcaccaagtgggcgcaccccttcgactccaacgcgcccagcatggaggcccaggcccacacgtcatgcaaccggcgcaccggttgctacgtgcgagcaactgcaccgccactcgcgccactgccacgcctcctcgactgcggaaccagtaccgcgactcgaggcaaccctgtgtacgacccaacagtgccagacaggcgcatcgatcacgggccagtcagccgcgggaggaggcgcgacggtcgatgtggccaaaaatgggccggcagtaatggcggtggcaggcgggcagaagcagcggtcacgtcatcagccaagctcacgagaagcgagcgacgcttcgccttcgccataatgaccgcgtcaaaaaagccgcctcagagcgcttgggctccacgcccactactggtcagaggttcgaaggccggcccctcggaagggttcaacggccgcctcagtccactcgggctcctcgcccactactaa

SEQ ID NO: 17892 - DNA, 462 bp, Zea mays
  Peptide Sequence Number=SeqID_61267
atgggcaagagcaagaagggcggaagttcgtcgcaccactccggcgacaaatggaagcgcaagccgactcctccctcggaggacttcggcgattccgagtacttggaggaggagttctcctccgagtccgaggggtcgtcggtccacgcctctcccccggcatcgtctgacgactcagacgattcccaggggattgcggtggaggtgtggacatacatccgggccgtcgagcgcgctgggctcgagggctcggatgagtcggaggtctcctcggacgagggggactcctctgactcttccgaggaggggagcgacggcgacgatggcggcgagggcgatggcggcaacgggggcgacaacgatggtggtggcgacggagatggcggtggcgacggcagcaagggcgacggtggcagcggcagcggcaagggcggcaatggcagcagcaaggccagtggctag

SEQ ID NO: 17893 - DNA, 342 bp, Zea mays
  Peptide Sequence Number=SeqID_61268
atgggggtcatggagatcgttgcgagcgcgacagtggggggctcagtggttgtcggcgggggaggctgcaccgacggtgcccgctgtgttgccagagacaacatggccgggggccacaccaagccggcggtcatgataaagggaaacaacaacatacacgaagattacgaccgactgaggaaggattcttacttgggcgacaaacattggctagagctccaacttgtcttggaacaccttggctatgtccgaggtgggcgagcgagaagcaatcaccatgtcgatccccttctccttgagggtgtacatgatgctcctggcatgactcaaaaggcttggtga

SEQ ID NO: 17894 - DNA, 513 bp, Zea mays
  Peptide Sequence Number=SeqID_61269
atgccatcatcggatccgatcgagctatgcgccgcagcgccgacgatggacatggcgctgccagccgttgacgtcgtcaccatcctctaccgcctcaacattctatccatgctcgccgctgctgcatgtcgcgaactccatggagggctacacactagaaatcacaagtccatggtagatgtaaatgttaaagatgttgttactataatagatgaaatattcacaacttacactggaagctatcttactaaatcagataagtgggtacaaatcaagaccaatcaagacagacaaatttgcagcaaggctgcattttttcagcccaaaagttccaagtcaccatctaagaaaattgaaatggcgagatctcttaatctaattggtgcgccttggaagaacaaagctttaaggtctgacgagcacaaaattgtggtccattcagaagtaattctctgtgttgaaatttatcagaagacatatgcctttgttaagaaatctcatatttgtgtatag

SEQ ID NO: 17895 - DNA, 825 bp, Zea mays
  Peptide Sequence Number=SeqID_61270
atggcgcctcctgttgacatggtcggtccgtgccctgggttgggcgaggtggaggctcctccgaggtcgaggtcgagtctgtcttccaaggccgaggtcgagtccgagcccctgggtcgggcgaggcggagaccgtcggctgataccaaggctgaggctgagcccgagtccgagccctggggtcgggcggagcagagttcgtcgtcttctggggctgagcccgagtccgagccctggggtcgggcggagcggagttcgtcgtcttacggggctgagcccgagtccgagccctggggtcgggcggagcggagttcgtcgtcttccggggctgagcccgagtccgagccctggggtcgggcggagcggagttcgtcgtcttccggggctgagcccgagtccgagccctggggtcgggcggagcggagttcatcgtcttccgaggctgagcccgagtccgagccctggggtcgggcgcagcagagttcatcgtcttccggggctgagcccgagtccgagccctggggtcgggcgaagcggagttcatcgtctttcggggctgagcccgagtccgagccctggggtcgggcgaagcggagttcgtcgtcttccggggctgagcccgagtccgagccctggggtcgggcgaagcggagtttcctatggcgcctgaggtcagacttggctgctgtcagcctcactctgtcgagtggcacagcagtcagagcagcgcaggcggcgctgtcctcttgtcaggccggtcagtggagcggcgaagtgactacggtcacttcggctctatcaaccggagggcgcgcgtcagtataa

SEQ ID NO: 17896 - DNA, 765 bp, Zea mays
  Peptide Sequence Number=SeqID_61271
atggcgcctcctgttgacgtggtcggtccgtgccctgggttgggcgaggtggaggctcctccgaggtcgaggtcgagtctgtcttccaaggccgaggtcgagtccgagcccctgggtcggggtcgggcgaagcggagttcgtcgtccttcggggctgagcccgagtccgagccctggggtcgggcgaagcggagttcgtcgtcttccggggttgagcccgagtccgagccctggggtcgggcggagcagagttcgtcgtcttccggggctgaacccgagtccgagccctggggtcgggcggagcggagttcgttgtcttccggggctgagcctgagtccgagccctggggtcgggcggagcggagttcatcgtcttccggggctgagcccgagtccgagccctggggtcgggcgaagcgaagttcgtcgtcttccggggctgagcccgagtccgagccctggggtcgggcgaagcggagttcgttgtcttctggggctgagcccgagtccgagccctggggtcgggcgaagcagagttcgtcgtcttccggggctgagcccgagtccgagccctggggtcgggcgaagcggagtttcctatggcgcctgaggccagacttggctgctgtcagcctcactatgtcgagtggcacagcagtcagagcagcgcaggcggcgctgtcctcttgtcaggccgatcagtggagcggcgaagtgactacggtcacttcggctctatcaaccggagggcgcgcgtcaggataa

SEQ ID NO: 17897 - DNA, 114 bp, Zea mays
  Peptide Sequence Number=SeqID_61272
atggcaaagccaaccatgagctactccacacgatcctctcctgacgaaggtagagcaatagcaaaactacttaatagtgcttttgtttacaaggtaggggataaacaatgctag

SEQ ID NO: 17898 - DNA, 309 bp, Zea mays
  Peptide Sequence Number=SeqID_61273
atgaagggcgtcgggggcggcgcggcctccccgggggactatgtctacttcaaatctgtcgtcccgctccacaagatctccatttttttggctggtgaatctgaagtgcctgactcccaagaaacatttactgatattgatcgaagtgatgctgctgatgtcctagttacggacatggagcttcatgacaaggagcttcatgcagccaacactttgctccaaatggcctatacaactcttaaagggacaccaagcagatacttatttcaaaactccacgacgaagtgtaggaggatcagcttttgctaa

SEQ ID NO: 17899 - DNA, 636 bp, Zea mays
  Peptide Sequence Number=SeqID_61274
atgtgggtcccacgtggaagcgagacaatgcgcgcagaacggtggggtccaccagtcagtgaagggcaaggcgcgcgacgcgatggtgtgactgacaggttgagcccacccgtcggcgccagcagggtggaagcgtgggctggcgcggttgttaaaggaccgatggaattcttggagcaaaggaccagcgcacggtcacctccaaagcaagtcccaggctgcttcaacaaggagctgtacaaagtgaaaaccttcttcgcaatcactctgcatggtactgccaattcacatttttcaagtgttgtttggaaggcatctgccaacttcaatgatctcttcttgacagcaggtgtacagaacctattgtgtttgaagttaggagaggagattggtgttaatatcgaaaacccatggattacttggttcgaggttgctagcaagcgaatggaggaggttgttcatgctttggctaccggccaagcttcaatcgacgccataatgaaacagcctgtgaaggtgtataaatgggacatggatgagacacttattttgctcatgtcacttctggttggctcatatgctagggattttgaaggcctcaaggatcatgagaaaagtactcaaacaaggaagtga

SEQ ID NO: 17900 - DNA, 1095 bp, Zea mays
  Peptide Sequence Number=SeqID_61275
atgaccgagccgagggactcctacgcctccgggatacggatacctcactcatcaccttctgcgataaggagcagcagcaccctcggcgtcggctacaccttcggcgaggtccgacctagcctcggacggcgacacggtctgagggtctccactccgaaggacgacgtcatcaccaagcccgggccatcgccgccggaccagcgggcgagagggcgggcagtcatgcaggcggcatgcaaccgcgccaagtgggcgcacctctccgacttccagcgcgcccagcatggaggcccaggcccacgcgtcaagcaatcggcgcgccggatgctacgtgcgagcaactgcaccgccactcgcgccactaccacgcctcctcgactgcggaaccagtgccgtgactcgaggcaaccctacgcacgacccagcagcgccagcctggcgcgacggaaaggcggcgcctctggcaggggaagcgagcgacgtttcgccttcgccataatgaccgcgtcaaaaaagggaccgggaaagggggataccccaaaaaggatccttctctgtgaaggaaccaggctccgagcctccctactgattagaggttcgaaggctggcccctcgaagggttcaacagccgcctcagagtgcgtgggctccacacccactactggtcagaggttcgaaggccggcccctcggaagggttcaacgaccgcctcaggctactcgggctccgcgcccactactgatcaggggttcgaaggctggccctcgaaaggttcacagccgccttagacacagagcgagggatggccatgggtacgttcgatacataaccaaggctcgggctgcgctcccgagggctcggactcgggctaagccccggaagacggtgaactccgctccgcccgacccagggctcggacttgggctaagccccggaagacggcgaactctgctccgcccgacccagggctcggacttgggctcagccccggaagacgacgaactccgcttcgcccgaccccatggctcggactccaccctggcctcagccgacggtctccgcctcgcccgacccaggggctcggactcgacctag

SEQ ID NO: 17901 - DNA, 333 bp, Zea mays
  Peptide Sequence Number=SeqID_61276
atgaccggggataaacaaaggcaaaagctcaagcaaaagccatcaagcaaaatctccaacacctacatcaaaaaggtggataagaagactgctacaccatacttaatcaaaaagaagaagaatggaaaggtgatagcaatcaaggccaacaagcaagccaacaaaggaaagggggccaaacgcatctgggtgccaaaggaaattatttcaaccatgaggagcaccaagaaggtttggatcccgaaagggaaatatgcgtatctatttaccttgtatctagtttacctatcctgcctagtactaaaattgttatttacctacgttttaaaataa

SEQ ID NO: 17902 - DNA, 399 bp, Zea mays
  Peptide Sequence Number=SeqID_61277
atgggcaagaacaacaaacgcaagcgcgagccgactcctccatcagaggactttggcgactcggaatactcagaggaggagttctcctctgagtccgaggggtctccagctcccgtctctcccccagcgtcgtccgatgactcggacgactctcaggggattgcctcggagatctggacttacatccgggccatcgagcgctccgggctcgagggctcggatgagtcggagtactcctcggacgaggaggactcgctcgaggaggacgacgaaggtgacgacaacgacgacgacgacggaggcaggggcggcaacggcggcagcaggggcggcaacggcggcagcaggggcggcggcggcggcagcagcagcaagggcagcaacaaggccagtggctag

SEQ ID NO: 17903 - DNA, 1044 bp, Zea mays
  Peptide Sequence Number=SeqID_61278
atggccaccactgtgagacattggcatggtggagggtgcattggtgcttcttccactggcgcctggtgtgaaccagttcccttttgttcattgcttcttgggtcctatgataatattcatgttagcccatcagaatctgaagctcatgtgggggtgagggatcaaggcgcaaaccgatcaatgagaagtgccggttgcattcttgctgagttgctatcagggaagcctatcatgccaggacgaactgaggctgaccaccctagattaaacttcaaagaccggtaccctgagccatacagagattctcatccacaactgaaaatgggtttcgtcacgaagccagagacgctgaccgatgggatagtgaagctgatgatttggcaccgcaccatccccagcatgcaaggtctaatgccattaaattttgagggtagcgatattgttttcaccctattgaatagggtatatgatgatgttggcaagcgctggagcagattttgttcattgggtctgtgtgggctaccagggattaaggttaatgattcaattatgctctttgtattgtgcttatggttgagtatggcgtttaacactaactacgagacagtctttctgatcataagtgggatgatgcgaactatctggagccccgacggcccaaacaaaattcacccggacgttgacctcaccgcgcctgacgccggtcgccccaacgacgaccccgcatggttctgcctacgagtcggttatggcggcgagaagccccaacgtgaggctacaaaggctatcgacaggaagaaccagagctcgatgctgaaatgcctgcactctgcgccgccgaagcgtccgagagctcagttcgcgaggctgagcgcagagactgaggccgcggggaaggcaccggcggagcccaagccaagggtcgagcggatctgcgccatgcgagcatccccaattcacaccaagacagcgagggtcgaatgtcccagcgagagcaggcaggaaagctcaagaaaaccaccaatcctaggccattcaggctaa

SEQ ID NO: 17904 - DNA, 402 bp, Zea mays
  Peptide Sequence Number=SeqID_61279
atgaagcctgtgcttctggtttcaacaccaagcaaatcagtggaagttgctatgtccatctgtagtttctcctatgcttgcgggaaccagaaggcgcgggttctgttgggcggccgccaggacttcttctactcggcgctcccttcggtttcccttcccaccgccgcgccactcgctcccgcgggatccagatccggtggacgtagctctggggcctcgacgcagacagcctgggatcgagatgctccaccaatgggggatcgagaggacgaccgctccccactggcgcagcccaagcccaagcactggagatccgtccgctcctctcctgaccgcgggatgggcattatgagcttcgtacctgaggaagcagggcgggcattgaggtcggtggcttcctag

SEQ ID NO: 17905 - DNA, 1017 bp, Zea mays
  Peptide Sequence Number=SeqID_61280
atggcggtcgtccctgctgcagagaccctcgacgggctcaaggacaggttcgatctcggggtcttcgtaggcgacctcgccctcgatgaggaagtcaccagtgtgcgctgcttcatcgttgccagtgacgacgagtccctggaggggctgcagcaggagcttgacaactgcaagaatgaccaggaagtcgcaaacattctagccagtggcatcaaactgcgcgagtacacaaaaggcgtcgagaataacatacgccaaatcgagctggattctatccaggattacattaaggaaagtgaaaatctagtttctctgcatgatcaaatttgtgattgtgacaatattttgttacaaatggaaacagttctgactggattccagacagaaattggttccataagttcagagataaaggtccttcaggagaaatctatggacatgggattaaagctgaaaaatcgtaaggctgcagaatctaaattgtcaaaatttgtcgaggatataatagtacctccaagaatgattgacataattgttgatggagaggtcaatgatgaatacatgaaaacacttgagactctaagcaaaaaaatcaaattcatcgatgctgaccccatggttaaatcatccaaggctctaaaagatgttcaacctgaggttgagagactacgacagaaagccgtctcaaagtacctgtctcgctcaacatgtatctatgcaaagttctgtgaactaaataatggtttcgacattataatttatatcactgctgcttctgaaccggcgcatcctcgtaattatgaagaaggcttgggcaatgggcaacagcataaatcttgtcagggtattggtagggaaggagaagtgtctgagatgagcggaggaaaggaggagaggtggtggctgagactgcttggaagagacatgaacagtgatgaagaatttgcccaggtccaacacagacagaagaagaatcagcccaggcccgtaaatggaccacagaatcagttggtttag

SEQ ID NO: 17906 - DNA, 588 bp, Zea mays
  Peptide Sequence Number=SeqID_61281
atgaacaatactgtcggcgtttcgaccccggggggtccctggaccgacgagtcgggtgcgcttgcagtagggggttacaagcgtccgcgagggagggagcgagagtcttatgcggcggcccgttctcccgcgcggccaaccttcccgtacgagagccctggaccttccttttataggcgtaaggagagggcccagtccgagcccgaggtcgggcgaggcggaggctcctccgaggtcgaggtcgagtctgggcccgaggggggttacaagcatccgcaagggagggagcgagagcgagagccttatgcggtggcccgttctcccacgcggccaaccttcccgtacgagagccctggatcttccttttataggcgtaaggagagggcccaggctgagtccgagccctggggtcgggcgaggcggagtccgtcttctgaggtcgaggctgagtccgagccctgggtcgggcgaggcggagtccgtcttccgaggtcgaggctgagtccgagccctagggtcggtcagtggagcggcgaagtgactgcagtcacttcagctctatcgactgaggagcgcgcgtcaggatga

SEQ ID NO: 17907 - DNA, 306 bp, Zea mays
  Peptide Sequence Number=SeqID_61282
atggggctcggtgtatgcggctcgctctaccaaggtggtgatgagaatgttggttttggtattgactttggtaatgcatttgttgacaaacgtaggaaagtagtaatagtggcattgaaggccctgactccagcaacacatgctatgaacacacaatcactttctgccatctctattgactattgtgacattcaagtttatgccgaagggccaactcgaccaacaggaggtgttgctgctatagcaatgctcattggtcctaatgctccaatttctttcgagagaaatatagagcttctcacataa

SEQ ID NO: 17908 - DNA, 384 bp, Zea mays
  Peptide Sequence Number=SeqID_61283
atggctgggctggccggtctacggtggcaggggctcgggtggccgcgggcacgtcgcgtatgggcaaacggcggcgaactgagctccgtgttcaaatgtcgccagaggtcgcaaacgtgcgaatctttgcaaaagtccggcgcagacctcttcctggcacctagggctatcactcaactcttccccgaggtgaggatcgacggcccgtacgtcgcgccggcgcaggactacaatcagtacgacatcgtgcttcttgtcggacagggcattggcgccacgcccatgatctgcaattctccatcatcaaggacatcagcaaacatgaagcagctggacgacaacctggaggccggctcgagcttgggatctggcgctactgggtga

SEQ ID NO: 17909 - DNA, 246 bp, Zea mays
  Peptide Sequence Number=SeqID_61284
atgacgaatgcctcgaaggagtgcttgctggcgagtttagaagcggtagaagccgggatgcacatgtatagtgtcatgaagaatgtcgctaaaagtggctgtgtcatggctgcccaccggtttggcgagggcatcatgagccactggattgcatttctaatctatcctcaggatggtaggctcattgtactggactctttggatacaccaaaagaagggtatcaagaatttgaaaacgtattgtga

SEQ ID NO: 17910 - DNA, 2400 bp, Zea mays
  Peptide Sequence Number=SeqID_61285
atgaaggaggtggtgttcgccggcgagctgttcgacgcgctgttgcggcgcagcaacatctcgggcgacaacatcgacaaggcggagctgctcaagttctgggaccaaatcaccgacaccagcttcaacggccgactgcagactttcttccacatggtggacgcggacgcggacggcaggatgtctgaggagaaggtcagacagccggaacagcaatataatgccgcacaaacagacacagccttgcctttcttctattcctgccctgatggatgtatctgcggcatggcggagcgcatgcagaccatcacgcagagggcgtccgagaacaagctgtcgaagatcacagagcaggcggaggagtacgcccggctgatcatggaggagctggacccggacaaactcggctacatcgaggtgcgcaacctggagaggctgctggaggaccccagccagttggtgagcatcggcaccgccaaggacatgaggcagatgctgaggagccagagcctccgtccgacgcccgagccgaaccctctccggcgcacgcagtacttcctggaggacaactggcggcgcgtgtgggtggtgctcctgtggctgtccatctgcgtgggtctcttcgcctggaagtttgcccagtaccggcgccggtacgtgttccaggtgatggggtactgcgtgtgcgtggccaagggcggcgccgagacgctcaagttcaacatggcgctgatcctgctccctgtgtgccggaacaccatcacctggatccgcaaccacaccggcgtgggccgcgtggtgcccttcgacgacaacatcagcttccacatggtggtggccgcgggcatcgccgtcggcgccgggctccacgtggtgtcccacctgacgtgcgacttcccgcggctgctccgcgccacggacgccgcgtacgcgcccctggcgcagtacttcggggtgccccgcccgcgcaactactggtggttcgtgaagggcacggaggggtggacggggctcgccatgctcgtgctcatggccgtcgccttcaccctggcgatgccgtggttccgccgcggggagctcgcgctgacggacctgctgaagcggctggtaggcccgctgaagcggctgacggacacgctcaagctgacggacccgctgaagcggctgacgggccagctcaagcggctgactgcaggcccgcggaagcggccgacggacccgctcaagccgacggacccgctgaagcggctgacgggtttcaacgcgttctggtacacgcaccactgcttcgtggcggtgtacgcgctgctgctggtgcacgggcactacctgtacctgacgcacaagtggtacaagaagtcgacgtggatgtacctggccgtgcccatggtgctgtacgcgtgcgagcgcctcacgcgggcgctccgctccagggtccgcgccgtcaggatccgcaaggtgggcgtgtacccgggcgacgtgctctcgctccacttctccaagccgccgggcttcagctacaagagcggccagtacatgttcgtcaactgcgccgacgtctcaccgttcgagtggcacccgttctgcatcacgtcagccccacaggatgagtacctgagcgtccacatcaagaaacagggcgactggaccggcgagctccggaacgtcttctcgagggtgtgccggccgccgacggagggcaacagtcggctgctccgcgacggcagcgccaattctctatctctacgcttccccaaggtgaggatcgacggcccgtacggcgcgccggcgcaggactacaagcagtacgatgtcgtgcttctggtcgggcagggcattggcgctacgccgatgatctccatcatcaaggacatcatcaacaacatgaagcagctagatggcgacctggaggccgacgctggctcgggcttgggctccggcggtgtcgacgcgtcgtcgtcgtcgtcgctgccatccttccgcacgcagcgggcctacttctactgggtgacccgggagcagggctccttcgagtggttccatggcatcatggacgaggtggccgagaccgacaagaagggcatcatcgagctccacaaccactgcaccagcgtgtacaaggacggggacctccgctccagggtcatcgcccagcttcaaatgctcaaccaggccaagcacaacatcgacgttatttccggcacccgcgtcaagacccacttcgccaggcccgattggccaaacgtctacaagcacattgcggagaaccaccaaaaccaacgtgttggagtgttctactgtggcggtggcccggagccgctaaagacgctgcgcgaactcgccaaggatttctcgcggaaaaccaacaccaagttcgagttccacaaggagaacttctag

SEQ ID NO: 17911 - DNA, 1506 bp, Zea mays
  Peptide Sequence Number=SeqID_61286
atggcccaccccatgtcgtcgcagtcatcgcctccaagctggttctcaaggtacccttcgtatccattccatcccgtcatttgtggtgggatgtcgcatgatggatcgatcgactgcttcgaactgcctgtcttgggttggggtgctgcgcatgactcaaagaagtaccagcagtcgaactacatgacggcaaagttcaccagtgtggctaacattcccttcctcttcctccaactcccgcggatatcctcaaggcccacaacctcctcgtcggccacaagaccgcactcttcatcgtgttgtggttcgtacggtccccaattcgcgtctcaggtttcacctcctctgtgcctatctgtggcgcttgttttgatggatttgattgcacacttcagggtatgctcactgggcttctgcaacctcttgcccctctcctatttcaccaagaagagggagacagaggctgtcatctccacctatgcggtcctcgtgcagctcgccatggcggagtccatgctggtcatgtggttaacatttgttcccttcatccacaatagcgtactacatggcataatttctggttctttggctgttgcgatgagtacaaacgacgcctatggcttcaccggtggtgatgctagacctgacatggttctccgtgtgcaagatagaggcgacatcaccatatttgatgacggcgtgtggcagatcaacttgacatgtgcagtgggaatctcatctatcaaggtccagtatgatcagaacgggcaggccatgtggggtaacaagcatggattcagcggtggtgtcatacttgataaggttacttatggcatggtgaaagaaccagttccgatgagaccagggccatggggtggggagggaggctgggcatgggacgactgggtttacaccggcgtgaacggcgtgcacatgccagcactggctcggggactggaggactgcccccaagtacatgttgtccaagtctcgccgtttcagaaaatctcgaaaactccggatgagttctccgaggaggagttctcctcaggagactatggttcgccgaccccagcatcccctgcggcgtcgtctgatgtctcagacgattccatggggctgtcagtggcgaagcgggcctacatccggtccgtagagcgcatggggctcaagggatcggatgactcaggggaggactctgaggagggcggcgacagcggtggcgaggatgacgatggcggcgagggcgaaagcggtgatggcaacagcggcgagggcgacgacgatgacggcgagggcgacgacgaggagctagaggttgttcgtcgcgatgcaaaggctgcctgtcgtgatatcaagttcttagaggacgatcgtactatcatgaatgcatggtgtgacgaagcgatggacaaggccctctgtgctggccgaatcctgatgaagaggcctggcgttgtggtgcttgatgacattgtggcattccttagtcgccattctacttaa

SEQ ID NO: 17912 - DNA, 664 bp, Zea mays
  Peptide Sequence Number=SeqID_61287
atgggtgtgcggtcgcagagtccaggcatcttgggggtggcgctggagcaggtgtcggggtcgcggattccgggtatcctgcggagggaggtttggttggttgacgagcggagcacgcgggatgaggatggggcgggggcatattgtgcggtctacactattgccttaatatgtagtagagataacttaaatgacaatgacttcaccaacaagactaacttgattttggtttctattgccagtgcacaaccatcgcccgctgctggtgcatcccgatgctcgctgcatccccatctcgacggcgcgtctacgctcgacgacagcgtgtctcagcggtggcgcatctcaccgcttggtggctgcccggtcagctggggcacgtgcccaggctctagcctttgtcggcctagcggtattgagtgcttagtagtcagcgccccaaaccctagcgcgcaagcaggaggcagttccagcagccctgcacctcgagtcgctctgcactatcattgctcccgcgacaccgcgtcgccgttcacgctcccacactcgcccactgctcatcggacctgctcgcggcacccgcacactgcaccccactcgtgttccccacgctcgcgctcagcgcagcgcccctgcaagctcacatttggccgctccagcacgg

SEQ ID NO: 17913 - DNA, 513 bp, Zea mays
  Peptide Sequence Number=SeqID_61288
atgcaccacgtcgttcgatttcgtatccttttccacttcctctttctctctcttgcctcagggatcgggaaagaggatactccgaaagggatccttctccgcgaaggaaacgggccccgagcccccctactgatcagaggttcgaaggctggcccctcggaagggttcaacaaccgcctcagagcgctcgggctccgcgcccactactggtcagaggttcgaaggccgacccctcggaagggttcaacggctgcctcaggccactcgggctccgcgcccactactgatcaggggttcgtaggctggcccccgaagggttcgacagccgcctcagacatagagcgagggatgaccctgggctcgggggctgctctcgcaaacccagctccggccaaaccgttgacagcgtcaacataccagcccgagaacttgggactcgactgtgcacccgggctatggccagttcgcatgagggaacaaccagaccggtcgaagcatcacgaaacacgctaa

SEQ ID NO: 17914 - DNA, 312 bp, Zea mays
  Peptide Sequence Number=SeqID_61289
atgcctgccacctccaccactgactgcctccttccggccgcatctgctaccaccgccatcacccccgtccctgcctcccccgctaccaaactcagtgcccctgcctccgccaccggcactggcgcccactgctcccgccacgtccccatcaccaccctcttttcacctattcctgcctccttcctgctgctcaacatccctgcctgccgggatcggcacataggtacaccgggtcgctaccaagggctcacctacaccccaaggcgggtcgctaccaagggctcacctacaccccaaggcgcctacacctaa

SEQ ID NO: 17915 - DNA, 1215 bp, Zea mays
  Peptide Sequence Number=SeqID_61290
atggcaggattaattgatatttttataccatctttgaacaaattctccttgactcttgaaggcgttaggagagcactggaaaaggacctggatttgaagatatattcacttgatgcacataaaaagtttataaagcaatgtgtagacaaagtttttgctgaatctgctgatgaaaatgcaaatgatgatgcattagaggattctgatgctaaagatgatcatttatcaaaagaagggacagatgttgctaaaccaatgcctgtttcaaataaaatgtcctccaatgctgatgtcgtaacatccagcaagacaggaaaggatcctgaagaagaaaagaatcaaacttccagcagtgatattagtgaagacatgataaaagaagccattgaaaaaagggcatcttattttagaaagaactctgatactcttactttacaaggagttcggcgtactttggaagaagatctcaagcttcagaagaaagctttagatgcctataagaattttattactacaggattagacaagcagattttgcaagaacctgcaaatgggacaaagaaaaaaagtaaaaatggatcttccaaggatactgacaaaacaagtaaaggctctaaaagagtccatgaagaatcagatagctctgaattaaatgatagaaagagtgatatggataatagcgacgtggattcaaggccaagaaagaaaagggcagaaaaggctaaagtcaccaaaaaacagaaaatagttacaaatgagaggaaactgtcaactccaaaggctaaaaaggttgcaaaacaagatttgggtagcagtactgaagaacagggtggcaattcagcagaagaggataattctcattcatccgctgaggaagataataagagaaaacggcaacagactccagcttatgggaaacaagcagagcatctgaaatcgataatcaagtcttgtggaatgactattccacctactgtgtatcggagagtcaagcaagctgctgagaacaagcgtgaggcctgtttgataaaggagttacaggatatacttgaaaaggaaggattgtcaaaaaatccttctgaaaaaggacacccaaaacgggcagggagctcctgcaattcacttaagaagaaagaattggcccactttataagaaaaattggcaaaaacttaaaaggatacatcgggtgcaaccatatctattggtgcaactaa

SEQ ID NO: 17916 - DNA, 135 bp, Zea mays
  Peptide Sequence Number=SeqID_61291
atggagttttgggtcgtgctcttgtgtgtggggagagaggtcaggcagactgtctgtcagtctgactgtcagactgactggcagactgacctgcagactggtcaagttgtccaagaccggttgaaccgcccctaa

SEQ ID NO: 17917 - DNA, 285 bp, Zea mays
  Peptide Sequence Number=SeqID_61292
atggcgccgatcctgctcccgatgtgccagaacaccatgacctttgtccgcaaccacatcggcgtgggccgcgtggtgcccttcgacaacaacatcagcttccacatggtggtggccacgggcatcggcgtcagcgccgggctccacgtggtttcccacctgacgtgcgacttctcgcggctgctctgcgccacagacgctgcatacgcgtcgctggcgcagtacttcggggtgccccacccgcccaactactggtggttcatgaagggcacagaggggtgttag

SEQ ID NO: 17918 - DNA, 1374 bp, Zea mays
  Peptide Sequence Number=SeqID_61293
atggcggccggcgagagcggcagcagcatgagaagaagggcctgggtggtggaggtggagaagacgctggacgaggcggacgcgtcggtggaggtgtcacggtggcagctccactccatctaccgcgtgccggcgtgtatcaaggacctcaaccgcaaggcgtacaagccgcaggtggtgtcgctgggccccttccaccaccgccgcgacggcgaactcctgcccatggaggagcacaagaagcgcgcgctgcggcacctgctccgccgatccaagcgcccgctggaggagttcgcggccgccgtggcggacgtcgcggggcagctggagagcgcgtacctggacctgggcgccgagtggcgcggcgcagacgggcgggagcggttcctggagatgatgatcgtcgacggctgcttcctgctggaggtcatcaaggccaccgagatggacgggaggaacgtcgtcagcgactacgcccccaacgaccccatcttcagccaccacggggtgctctacatggtgccctacatccgccgcgacatgctcatgctcgagaatcagctgcccttgctcctgcttgagaagctcgtcgccgtccagactggcaagcctccgagcgccgacgcgatcaaccggatggtgctcaagttcatgtcggggtccccatcggcgcggctgccgccgggcagcacgctcgggctccacccgctcgacctgcggcgccggagcatgctcttcggcccgcagcaggcgccccagccggtgtcacgggacatggcgccggagacgacggacatcatccggtcggcggtggagctgtacgaggccgggatccggttcaggaagaccagctcggacagcctccacaacgtgcggttccgcggcggcgtgctgagcatgccggcggtgtccgtggacgactccaccgagtacatgttcctcaacatgatggcgttcgagcggctgcacgtcggcgcaggcaacgacgtcacggcctacgtcttcttcatggacagcatcatcgactcggccaaggacgtggcgctgctcagcaccagcggcatcatccagaacgccgtcggcagcgacaaggcggtggcccagctgttcaacagcatctccaaggacgtcgtgctcgagccgcagagctcgctggacgctgtgcaacgggaggtcaacgcctactgcgggaagccgtggaacctgtggcgcgccaatctcatccacacctacttccggagcccctgggcgttcatgtccctcgccgccgccgtcttcctactcgtcatgaccgtcatgcagaccgtctacaccgtgctgccattctaccagcaggaccaaggcagctcgccggcggcaccggctccattgtga

SEQ ID NO: 17919 - DNA, 1026 bp, Zea mays
  Peptide Sequence Number=SeqID_61294
atgcgcaccggcgaagcggcggcgggtggcgccgacttcaacacgaacatctgcatggaggattaccgcgtaggtggtgtcatgatgtttgacatgcacatgggccggggactcgttggtgagttcttttggggattaggtcttgaacaaggttatggtgcagggtcagatgcagggcagctggctattgtcctggctccggtggtggccactttgcctatggcggcggttggagcgaaggatacttcgcaggacccatggtccaaattctgcgccagcggcgagatttcgtcggctgccgccgccaaagacgtggcgggctctgtgtcccagcagctgaggcatgcgtcgcagcagctgaagcatgtggccgccttcactgaccatgttgcgtcgggcgccctgacttcgaagtttgctaccgagaggcagcgactcgagggcaggattgagcgcctccgagtgcaacatacggatgctattcgggacaagtcggctgtggaaaacaagagtcgcaggctgacggagaggttggcggctgcggaggccgagaaggaggatctcaggcgccagttggtggaggagaggagggacgcaaacagagcctgtgctgaggcgctggctgcgcaagcggaggccaaacttgcacgagcggaggccagtcttgcatgccaacgtgctgaggagatggagacgaggctctgtggcctgcgcaaccgccaggacaaaacggaggcctcgacgcgtgcggaggtcgagcagacgcatatgcagcttgtggacgcgtaccgggagctaggtgcgcggaccgctcccttcgaagggcccggtcaggaggtgggcctctgcttccttgggtggctacagaaggagctggaggtgttcccgacaattgtaacgggcctcatgtccttcgcctccctcgtcacctgcgagggggccgtgaatgccttgtcccgcgaggggtgcgggcacttcgaggtcttcgaccagtcggacgaaggcttcgagcgcaaaatcttctag

SEQ ID NO: 17920 - DNA, 570 bp, Zea mays
  Peptide Sequence Number=SeqID_61295
atggatcagatggagtgtgatgaagaggtcgaggacctcagtgatctggacagcacactgcccgaggcatcgggggtggagctggcgctgccatccgatgctggcgagggccccttggcgacccccgcgccgactggagctggcgaagaccccgtgccggccactgcgccgacgggtgaggacgctttgaaggtggtgggcgaaccggctgccgaaaacccagtggtgtcggccgggcattcgcaggagttcttttcctggacggatgagtcctcggatgaagacttggattattttgctgcattagatgtagccgcagcggagtcttcgacgcgtgtggaggtcagcgaggtggctaatcttcctagtgcaagtgctaagtacaggcggcgaagggtggtgtcgaagcacagtgtgggggcttttgctggtatattacatggctccgcctcgttaaaaacctcaacccccgggaggaaaagagtgtgggccggaataatattgtttggtgtgcgggctggaataatattgtttggtggattacaagggcgtgttggccctgagggttag

SEQ ID NO: 17921 - DNA, 255 bp, Zea mays
  Peptide Sequence Number=SeqID_61296
atggcgttaatccaccctctgcaatcagggtgcgcagggcatggcaggagaggtcgcggttgcggagaaagggtggcgtggcctgagaagttgactggagagggcgccctgcgcctttcggtcttatggggaagggtgaccccagtaattggagatggtacacacatacgggtaaaggaaatgttctcttatcatatgatttacaatttgggtgttacacgcgggtttataacccagaacccagaggactcttaa

SEQ ID NO: 17922 - DNA, 177 bp, Zea mays
  Peptide Sequence Number=SeqID_61297
atggattttagaaacagctattgcttttggcaaaccaaacccctcaggcaaacagctgcatggtctagaggtacgattcaggatatggttgatggtgtgacttggcctaccaccctgccaccgggttggacggtcgagtgggatgttgctccggcaggagaggagcacgaggagtag

SEQ ID NO: 17923 - DNA, 858 bp, Zea mays
  Peptide Sequence Number=SeqID_61298
gagcaggagcagcaggactcttccccctcgtgtcagcaggaggtggagtctaggaggcagccttcctctgcacctcagccagagatgccccctgcaccaccacaaggcatcccggctactggaggagaccctgacagagacgacgccggcgccggtggcagttcaagccacaacacagagctctcagaggagcaggagctagagggatggatcgctagacccatcactcatgacgctgatcgcgggtgtcacttccacaacgctctcgacaccttgctgcgtcgggccttcgatcgacacacttggtttatcgagtatcgttgtgtagtctaccagcatcattgcgggttatacccggaccagtgggaggctacttgcttggtgtaccgcccggacaatgatctttggggtgcatatgctttcttagagcactattatatcactaagagggatactgccgaggcagccatgcaagatgcagcacgacgtgcactttctaagtattgctcgttgttcagcggggtaactgatagcctcgacctgaagtactgccctcatcattcgatcggcagtgctggaggtgtgattgtctcatccgttggtgagggcaatcccaagctgaacaacatagtcaacctggtcgtcatgctcaacaccgagctagaccacgcacttgacgagttgggcaaggttcgggcggaggttgcggaattgcatgctgagcgcgcatcgcgccactatttggatggtggttctcccgcccctgtcgggattcagcacccttaccgttcgccaccccgtggtcgcttcgattacggtacccctgactgcaggacccagatagatttggatccatag

SEQ ID NO: 17924 - DNA, 498 bp, Zea mays
  Peptide Sequence Number=SeqID_61299
atggtggggaagaagttcaacgaggccgtgtgcaagaatgagggcatcgccggtgacgtttggcagcatcgttcccaagcaacgtcaccagaatatgtgtcatcatatggtttgatcgggcagataacagagctgcacgatgagctccagtaccttcagcatgagaccgaaaatgtccttccacgtgagcaaggaagatgcaccgacgaactggaagaggtgctagaagcaaggatcagagtgcttgaaggaataacatcacacaatctgtcggtatatagacttttagcgacacacaagccgttggcacaagaatatgtcggcaaaaatttgtccgacgacaaagatatgtctgtcggcaataacataacattgcccacaaatagtctgtcggtagatctatgtctgccggtaaaggttattgccgacaggactttcgctgacacacattatctgtcggcaaagctctttaccgacggactgtgcgacgctatttag

SEQ ID NO: 17925 - DNA, 201 bp, Zea mays
  Peptide Sequence Number=SeqID_61300
atggggctcggtgtatgcggctcgctctgccaaggttggttcgccccttggggaggagtgcgatacttgatcagagatggttggtttacaggtggtgatgaggatgatggttatgatgtttatggctatagtaatggtaaagaagaaggtgtcgaggcggatctccaggagttccaggacttcgatgagtttgaggagtag

SEQ ID NO: 17926 - DNA, 715 bp, Zea mays
  Peptide Sequence Number=SeqID_61301
atgaagcttctcttcgcggcacaggcgcgtgaacggcgagggggaggctcggctgggggaggcctcgtgggcggcttaccgaagtcgaggatggacacaacgcgtaggggcgagctgcggccacggccagcagccacatggtcggggaacgtggctaggaccatggtccgactgtgcaacaataagggacaggggaggagggtagacggagttcacctcggcggacaagccgcgcagagtagtgcgggcagcaggacgcacgacgcacggggcggggcggttcgactgttcctggctggacgccatggccacaacttggtagagcgcgcgcgcagcaaggggcatcgccctgccttgccgcggctagggcgtccgcctggaggtgctagggtcagccgcgtcgagctcgcgcgcacccgcgctgctaccgaggctgcaggacggcggggttcgacgacaatggcgcggcgcatcgagggcaagaacaccacaaacggtggggccctatgcgcggcgactgcccaacggcaacaacgagggcgagacgaaagtggcggcacagaggcgagggcgaggcattgcgcgcggcgtgcggagcttctcggccacggccttgctgggtggtttttgaatggaacccggcgtgggaaatgtggtcctgggcttttggggaatataaatattacccctgggaacccagctgggcggggtggtg

SEQ ID NO: 17927 - DNA, 420 bp, Zea mays
  Peptide Sequence Number=SeqID_61302
atggaggcagaagagtggcaaataatcgagatgattgtcgtccgggctgacagcagcctgggcatccgagccaagactgagcgcctcgaggctgaggccacacaccttaggtcggggcgtgatgaggcgcacaaggacgccaagcgtcttcgtggggaaaggactcgtcttcagcaagatctgcgcgaggtgaccccacgggctgaagaagccgaatcgatagtgcgagtggcgaacacccgccttgaggaggctaactcagaccttcgacgggagcgagagatggccggagatcttcagaagaagttttccgaggcccttgacgctatgaaggcaatccaggaggtgccgaaggcggcagaggatgaagtgcgcaagctttcaattgcttgtgatggcgctattgcgacgcaggtctga

SEQ ID NO: 17928 - DNA, 492 bp, Zea mays
  Peptide Sequence Number=SeqID_61303
atggcgcctctttgctatataattgaccgtagggccctttctctcaacaccattcctgctttcttctttctcttccgaagccaaagaaaaccccatcttcttgctctcagtacaatggttggtcctacaaagaagaggaagagcgagctgactcctccctccaattcatttggagacttccaatttttggaggagttctccgattttgactacgacgagactcgatcgcccactctagcgtcctcctccttgaccgtatctaagggttgggaccttaaggagctagcctactttaggggcttcgagcatgcatatctcaaagtatttgaggaggaggaggaggatgacggtggcaagggcgacaacgaagctggtggtggtagcaatggaggcagtgacaacaatagcggtggtggcggcgaaagcgacaacgatggaggcgacagtgacagcgacaacagcggtgctggtgacaaggagccaccagcttaa

SEQ ID NO: 17929 - DNA, 615 bp, Zea mays
  Peptide Sequence Number=SeqID_61304
atggttgtaagtgtgttaacaaggcaagcacggaggtcggttgaagcagaaaagaagaagaagttaacaaagaagccgaagctggcatcaaagccttcagcaccaaagaaaagaaaggttacaagttctgagcgcagagatgaagagggaccttcttcgccgaaacatttagagaagaccccttcggcaacttccgttggggtaacagaaattttagaggtaatgactgcacccttacctttcccaatgtcgagtcctctagagtccgatctaacaagcttgttacagccacagaagaaaattgttgagggaaatgtcgagtcctctagagtccgatctaacaagcgtcgaatgatgaaagtgatgagggccatccttgacacccctattccaatgattcaaaaggaaattactcctgctatagctgatgaaggtccccatcaagctgagaacagtggcgatccccttggcacaactatgtcagaaatcgatagacttattgcgaacgttgcgcttgggaaaaatactgaggggacagttgttgtggagatttctacgtcaaagggaaagacaactgaggaagcctcttcggaagatagaagcttcgatctttga

SEQ ID NO: 17930 - DNA, 360 bp, Zea mays
  Peptide Sequence Number=SeqID_61305
atggtgagccggagggctccgccacgtacacctcccagttgccggactcatggggcacttgttgttgctactctatggatggttagtggtggccacgagcgctggcaacggtgcctcccctacttgccacctagcgaaggcagcaggtcggctggggcgttgcttttgagtggcggcgttcttcccacgacgtcacctctccgactcgctcgtggtggagcgcccgagcgcctcattcgggatggctcacatgtcgggaccggcaaggtggagctctccagtggagttggcaaggaaatagagggagccaaacttgatgccgctcccattggcgaaaatcctatctctggcaaatgctga

SEQ ID NO: 17931 - DNA, 156 bp, Zea mays
  Peptide Sequence Number=SeqID_61306
atgaacaagatcgaaggccccagcacagggagcttcgtcaggaagacctattcaacgaagatggatgcagaaatgcaggctatcctatggccacaatcttacaagccacctcagctaccaatgtatgatgggcactcagaccaaaacaatttctga

SEQ ID NO: 17932 - DNA, 1239 bp, Zea mays
  Peptide Sequence Number=SeqID_61307
atggagatgcacgccgacgtcgacgggtgcagcgtgcccctggccgtgctcctcaagcgggagctgtgcaaccagaaggtggagaggccggacatcctgttcggggaggccaacaagagcaagaaaggggaggacttcacgctcctcgtgcccaggtgccaccgcaccccgggcggcagtggcggcggcgagaatgccggcgacgacgacaccatttccgtatttgcgatttttgacggacacaatggctctgcagctgccatatacacccgggagaatctaataagcagtgtgttggctgctattcctccaaatctcacaagtgaggagtggaaagctgcgctgccaagggcactagttgctggttttgtaaaaacagataaagacttccaaggaaaaggtattataaatgggatgccagctgcacgctcagggaccactgtgacttttgttataatagatggatgggttgtcactgtagcatcagttggcgattcacgatgcattctagaatctgctgagggttcaatatattttttatcagcagatcatcgcctggatgctaatgaagaggaggtggagcgtgtaacagcaagtggtggtgaagttgggagaataaatatcgctgggggtgccgggattggtccactcagatgctggccaggtggattgtgtttatcaaggtcaataggtgatatcgacgtcggggaatttatagttcctgtcccacacgtgaagcaagtaaagttgtccaatgctggtgggcggcttgtcattgccagtgatggtgtgtgggatgcactgcactttcaagaggctctgaactacaccaggggcctgccagctgaagctgctgctaatcgaattgtcaaggaagctgtcacttcgaagggattaagagatgatactacttgcatagtagttgatatactacctccagagaagttaagccccccactaaagagacctggaaaaggagtcatcaaagctctgttccggcggaggccctctgatgaaatgtctgaagatcagatggacagaggatgcttagaaactgatgttgtggaggaaatatacgaggagggctctgcaatgcttgctcgaaggttgaatataaattacccagaaggaaatatgttcaagctgcatgattgtgctgtctgccaattggagatgaaacctggtgagggcacctctgttcatgattcccaatctgctgttcaacctgtacctaagtag

SEQ ID NO: 17933 - DNA, 270 bp, Zea mays
  Peptide Sequence Number=SeqID_61308
atgggcagagtttttgatgccatcggcttcgtctaccccgattatggctacccgctgtggggacaggggaagaagagaaaagcagctgctttagccaccccagctgaacctatgccgaaggctgcgggcaaaaagatgaaggaaaaattgccgaagcttccaaagctctacccgaggctgaaacgaagcaagcataagtcgaagctgcaaaaattcaagctgaaaccgaagctgagccttcagagcccactgagacagagctcgccgtag

SEQ ID NO: 17934 - DNA, 420 bp, Zea mays
  Peptide Sequence Number=SeqID_61309
atgtcgctgattccgccgccggcgggcgggttgtcggccgccattgtcgttgtcgcgcggcggaggaaggagtatcatgtcgtagctgccgtcgaaggacatgaactcaaggctcccgaaacggagcaccgtcccgtgccggagaggttgctggagactgcccatctggagcttgacgggaagctgttcgtcagcacgcagcaggcccctacctggcgcgccaactatcggcgtttcgagaccggggggtccccgagccgacgagtgagtgtgctgcgtgccccagccccagatgggtcgagcgcgtgggcgagcgcgaaggggggaagaggcgaggtggccggagacgggcgtgagagaggtggagatcccgcggccttcgtgttcgtcccgcgcccaggtcgggtgcgcttgcagtag

SEQ ID NO: 17935 - DNA, 1122 bp, Zea mays
  Peptide Sequence Number=SeqID_61310
atgtcttcgcgctcccttatgcatcgtgtctttccaccttccgagcccccggatgggggatgcccgcagtccttccgccttgtcgttggagggacgcaactccgtgggagtcggtacctttcagccatcgttcggcttcaaggattttcatcagtcagcccggctgcatcccctcgccggtggtcacccgagacggtgaccaccaggccctgggtggggagaagcaagccgggctgcgatcttggtcccaccctcagcttcaaggatgttcatcatcctcgctggggtggaggccgggctgagccggagctctacctcccgcgcggtttcgtgggtcagcctctccttcagcgttcgagggagagggcgctcactggccctgcgagaggggcggacttcgacaacgcggggctggtcgacggcgggcgtcgtcagcctcagcgtgttgggctcgccggcttggctcctgggcggtcctgcctttgcaccggtacggcgcctccacgcggaggtcggtgccccactcgtctgggaggatctgagtggggatctgccggagggctgacggcccctgtcgtcggtgccgaggtggaggcggctcgagaagtccccgttgccgacgggatcaccgccaccatccgcgctttgggcctccggctctttgtacttgtcctcgcccctcgagcgtcggcgtgggcgagggcaaggttgcagcagcgaacccctcggccgctcttcgatgagccgaagccaggggtagcggtgtcagcacggacagaggcagagttggctcgaaaagaagacttggtcggccggagcctggtcgggtcgtccgttagcgggaccgacgccggagttgatctgccgaggcctcgggccgggctgatgtcttcgagggacagctggccgaggcctcggggtgatcagccgaggcgcctgctcgagccggattctcggagaagtccctggcggcgatggcccggacgtggtgatgacgtcgtccttcagagtggagatcctcgtaccgcgtcgccgtccgaggctaggtcggacctcgccgaaggtgtagtcgatgccgagggtgctgctgctctcttcaactgtcaagatccgggcctgtag

SEQ ID NO: 17936 - DNA, 267 bp, Zea mays
  Peptide Sequence Number=SeqID_61311
atgggtaagggtacgggcagcttcggcaagcgccggaacaagacgcacacgctctgcatccgctgcggccgccgcagcttccacctccagaagagtacctgctcctcctgcggttaccccgccgcccgcatccgcaagtgtaagatccgcctccccgctttcttcctctccctctctcttcgtccgtctgccccgctgctagatctagtcaattttagtgtttaccctttgcagtttgtaataagttgctccgtggcatgtatctag

SEQ ID NO: 17937 - DNA, 714 bp, Zea mays
  Peptide Sequence Number=SeqID_61312
atgcaggcggcatgcaaccgcgccaggtggacgcgcctctccgactcccaacacgccagcatggaggcccaggcccacgcgtcacacaaccggcgcgccagatgctgcatgcaagcaactgcaccgccacttgcgccaccaccgcgcctcttcgattgcggaaccaataccgcgactcgaggcggcccagcgcacgacccagcggcgccagcctggcgcgacggtcaatgcggccgaaagagaagcgggcgacgcttcgccttcgccgcaataaccgcgccaaaaaagggaccgggaaagggggataccccgaaaaggatccttccccgtgaaggaaccgggctccgagccccccctactgatcagaggttcgaaggctggccccccgaggggttcatcagccgcctcagatcgcgtgggccctacacccactactggttagaggttcgaaggccggccccccgaagggcttcacggccgcctcaggctactcgggctccgcgcccattactgatcaggggttcgaaggctggcccccgaagggttcatagtcgcctcagacgccgagtgagggatgaccagggggctcggactcgggccaagccccggaagacggcgaactccgctccgcccgacccagggctcggactcgggctaagccccggaagacggcgaactccgctccgcccgacccagggctcggactcgggctaa

SEQ ID NO: 17938 - DNA, 1005 bp, Zea mays
  Peptide Sequence Number=SeqID_61313
atggacgagtctggggattttgttataatactgaaaaacttcctgctccttttggagaggatgcgctttgcaaaaaaaaaggagatcggaagtcagatggaggtccgctgccaaactagcttgtgccagaatgaagatggtttccccaagttgctgagagcatgcacagtccgcctcggaatcaggagccagccagagtatgatggtcgtgagttcgtcgagcatggcacagagaaagagaccgtcccgcttgggatggccaggatgcgtgcattggaagggcagcaactgcttgaggatgaccccacagtcgtgtacctcactgcatacctgctcacccttgatgcacagtatgatttcttggctcggcaccaccgtcagatgattacccgagcagaagatgcagagaagcgcaaccgtcagctgcatgtggatctcaccacagctcaagcccgtgtagctgccttggaaagtcgtgaagtcattgctgtggaagccctgaagcaagccaaggatgagcacgtccagaagttgatggaggcctacttggtcacccataaccaacgtagagccctgcggatccaagagcccgctccatccaaccctgttgaacccatcaaagctgaagacccccagattcttgaaggtcacccggtctctatcagaggagagaagaaggcttgggaactcctggaaggagcaatagtcttggaaggaattccagtcttccctcaggctatgaataagcaagagcaccctgaatcctcccaagatcccccgccggagttttttgagcccctcaccatgaagaagattccagcaccatcccttgaagtcaaggaagaagctgcaagcaccccgccagcaccaccgccctctgaggagctacaagagccagtcccgcttgaagaagagttcgaccccgtgctgccatctcagtcgctgccagaagaagtcatcaacatcagctccctgttgacccatccaggagatgtctcagattga

SEQ ID NO: 17939 - DNA, 219 bp, Zea mays
  Peptide Sequence Number=SeqID_61314
atggagccggtcgtggggatcgtggtgtcaaacaagatgcagaagtcggtggtggttgcggtggaccgcctcttccactataagatgtacaaccgctatgtcaagcgcacctctaagttcatggcacacgacgaggctgactcctgcaacattggcgaccgggtcggattaatcagtgtcctcataagtgctagatatacatcggctgatgctgcttag

SEQ ID NO: 17940 - DNA, 303 bp, Zea mays
  Peptide Sequence Number=SeqID_61315
atggaggtttctcaccggggacgaagacaatcgccggagccgagaggaaatccgtcgattgccaaagattatgggatccaatcaacaaaccgaacgcgctgcgacgaagccctcgacgagacgaacacagtggtaccctcggattccgaaggcgatgcacggattgagacggctaacccccttaacaagagcattgatacacacttgatgaagatgttgtcgactctgatcttgactgatttggaggagttggaggttgccaaaaggacaggtgcaagaggaaagaataacgagaaaaggtaa

SEQ ID NO: 17941 - DNA, 207 bp, Zea mays
  Peptide Sequence Number=SeqID_61316
atggggctcggtgtatgcggctcgctctgccaagcttgggtttgcccccttggggaggagtgcggtggtgatgagaatgatggttttgattatgattatggtaatggtaagtggtattctttccgtttggaaagggtaaagaagaaggagaacggtgtcgaggcggatctccaggagttccaggacatcgacgagttcgaggattag

SEQ ID NO: 17942 - DNA, 489 bp, Zea mays
  Peptide Sequence Number=SeqID_61317
atggcgagcgagcctgtgagcgggcgcactgggcagcagcaggcacaggcagcacccgcgggccgcggcagagagcagcagcagcagaagagcagaggaggaggcgttgtggcctctgatcaacggagtgcgttcccatggccgaggaggagccagacccgcatcgcctattcgccgagggggttgccatgtctgcgccgagcattccgttgtcatttttaccgagctgcagtgccggacgcggccgctcagaggcaggcaggcaggcttaccagttaccaggggtccagggtggtctgtcttttgacccgttccttcacgccacgtgacgtgaccgagagaaccacctatcggcttgcatgcggggccacatggcagtggcctgctacgccttctcttgccgcctgctcgggagtcgggagaccctgttctcctctgactccccccgatacattgaacaacatgctgattccgaattgcagtagctga

SEQ ID NO: 17943 - DNA, 324 bp, Zea mays
  Peptide Sequence Number=SeqID_61318
atgtcaagacgacgatcagaatcagcccgcgtgttccgagaccgccttgttgacgtcctcgcagccccaacgccgctccacaatcctgatcagggtccgtcggagtgtctccctaccgtccccacccatgagcgcgtctacaccaccgcgagaggccgaggcggatgcgccctctccatccggcgcggtaactccccgtccccgtcgctcggtccgagtccaactccgtgtccgcagcctaccctcggaggcgtcgtcctccactctaaggagtcgtcgcaggatgctggccctacagatgacataaaggtgatcaatatctaa

SEQ ID NO: 17944 - DNA, 480 bp, Zea mays
  Peptide Sequence Number=SeqID_61319
atgcgatgcgaatgcgacgggtgtggtgccgatgccgggcccggggtgtggtggtctactggtctgcaatactgcatgcccactcagccattgccatggcatcttcgggtgacacttgacagagaaatgatcatggatggcatggaacctgacgggtgggggcttccgaggccgctgatgagtccgcgggacccggccgcccggccggcgtgcaaaaggaaaagggcttactccatccgattgtcggttttatattgccaagcaggtctccgtgagccgtgcagtgcagagaatatccttccaccactcgaggtctcaggtgtgcagattggatccccaagtacaaccatacatgactcgagtactggattggagggatttgaaccttggctgggagcagctacgcctggtgaccgtagaagaccgtacgtgaaacggaagggctatcgtgtcatcagtgcgtatttgttcagaagctga

SEQ ID NO: 17945 - DNA, 231 bp, Zea mays
  Peptide Sequence Number=SeqID_61320
atggcctctgccgaacgacctccgcctcgcccgacccaggggctcggactcggcctcggccacggaagacagactcaacctcggcttcggaggagcctccacgtcgcccaacctagggcgcaagccagccacgttgcctttggtgcaatctatgctcaggtaaagaagaaggagaacggtgtcgaggcggatctccaggagttccaggacatcgacgagttcgaggattag

SEQ ID NO: 17946 - DNA, 297 bp, Zea mays
  Peptide Sequence Number=SeqID_61321
atgaagaaaatagacgaggaggtccagcgacaagcagatcaggtgctcaaggtggcggataagtggttcctctcgcacttcagggtagattgccaccagaaggccgtccaagagagggagataaacgccgagtacatgtcagtcgtgctgcaacagctccccatgataggtgatgccaggcgccaaaacaattgcgccaaatacatcggcaacaaatgggtttccccagccatattctggtatgccgatggactcatatccaggacgagcgtcaccaccatcttcgctaaatggtga

SEQ ID NO: 17947 - DNA, 483 bp, Zea mays
  Peptide Sequence Number=SeqID_61322
atggtggtggggctgcgcacactgggagacccgatggcagcggcgcgagactgctgctgcacacccggctgggcgagcgagatggctccgagcgtgacatcgagggcgggcgagatcagagatgaaggtgcggcgtctgacggcctgtacgacgaggtagagatcgatggaggagctcgacaaccgaacaagcaggaggggacgcttgcgcggggacagcaaggacgtgccaacgcgatgagcttggacgacggcgctcgctgcagtctagtgaagaggacaccggcaccaggaaaccaacaatttgggcgaccacgaggtgagcgcgcttgggaggttgagcaagaagagagcacgactgttgctggtctccttcctatgcccgaacgtagctcagactcgcggcgacgagcagagatcatgtcgaggcggacgactgcgagcgcgcaagcacgcggcggcagttgcgtggcagtggcctga

SEQ ID NO: 17948 - DNA, 513 bp, Zea mays
  Peptide Sequence Number=SeqID_61323
atggctccgagcgcgacatcgagggcaggcgagatcagagatgaaggcgcggcgtctgacggcctgtacgacgaggtagagatcgatggaggagctcgacaaccgaacaagcaggaggggacgctggcgcggggacagcaaggacgtgccaacgcgatgagcttggacgacggcgctcgctgcagtctagcaaagaggacaccggcaccaggaaaccaacaatttgggcgaccacgagggtgttacagatctaacccccttaacaggaatctcgccctcgagattcaagaagaggctggcaagacaacaagatgttcgagaccaactgatgcaattcttgaggatctcctggacatgtgggttaggacccgcacacgtttccgctgcgtcacttcaatttattggttgatgttgatcgcattgtcttcagtggggttagcagctaacccccttaacaggagcattgatatgcgcttggtgaagatgctgacgactctgatcttgactgattaa

SEQ ID NO: 17949 - DNA, 125 bp, Zea mays
  Peptide Sequence Number=SeqID_61324
atggatcctaatagcaaggggattgtgatcaacgataagaaggataccctcaacaataacgagccaaaaggagataagcccaacgactcaggctcgaacaataaggggaaggacgggaagaagaa

SEQ ID NO: 17950 - DNA, 306 bp, Zea mays
  Peptide Sequence Number=SeqID_61325
atggagatgaagaaggtccgcactgcggtgaggggcggtggttgtattctccagccgcgcgtctggccaacggtcggccgcgcaatcaacgtcgaccacgtcagtcgggccaacaaccacaaggtcgcaccggactgtctggtgtacaccgaactgtccggtgtgccaagtgatcaacggtcggcttcgctagggaaggaaagcaaccgtctactgtgcagtgtccggtgtgcaccggacaatccggtgcacccacggacagaaggcaaccaggaccttccaaatggagttccatgcggctcctag

SEQ ID NO: 17951 - DNA, 294 bp, Zea mays
  Peptide Sequence Number=SeqID_61326
atgaagctagagatcccagtgagggttgatcctgaggtacccctcgtagaccgctgcgaagattgccgcctgagcgatggagttcgagttgaagttatgaagttccaccccatagtagtgcgagagcgctcgcataaagcggcttgccatcatcctgaacccacgctcgtggaatggcacgaagctaaagatgtagaccgcgggcgggatcacttagaccccgcaaggatcaccacacaattggtgtctcttgcctcgcttacaaagcacttgagagtaagaagtgagaaataa

SEQ ID NO: 17952 - DNA, 615 bp, Zea mays
  Peptide Sequence Number=SeqID_61327
atggtccagatcgtcgagcaccgcgccgagacctctgaggacttcctggtggaggaagaagcagcatcctccactccacgagtgtctaaccaccctgcgcctagggctactgctgtgcacgctgcacggcagcacacgcctgcgcagacgtcccggactccgtcaagagcatcttctggggcgttgtttgcggccagggagttgctacgccaccctcctagctccacggcctcgccgtggatgcggagcggggccgtggatgtatggctaagggggttgttgatatgtgtgcgcgacaactctagggttgtcggctggttgcgcccgtgccatcctgtctctggtggccttcgtctttgggcaatctcttgtagggtgcatgcagtcttcgccgtggaacaagcagtaaaatctgcgcggctgctgcgcacgtccccggccccaaccacgagttccgtttccgcggccttgggggatactcctggcggcgaggtgcctcgccagtggggtgctggttggcgatgttgtgtacctgctgctgattgcagccgtcccgaccggagtctgcctgcgaaggcctggtccacgtatggctggactccggagggtctttag

SEQ ID NO: 17953 - DNA, 453 bp, Zea mays
  Peptide Sequence Number=SeqID_61328
atgggtcctatgggtgtgctactaacgctccctagccgaagctgtgtacaggttcaggtcccagtcgaagctacctcctgtggccgggtcaccaactctttcttaggtatactggtatccaacctcgacacattgagcctacattccaggggggccaagtaccagggaggagttgtatcgaccaccagaccagcgatcaccaactccaaggagatcttcaagtgccttcttcgtcgcttccaccgcctggggccccggtgccacctgcgccgcctggaaccctcatcgtcatctccctacggaggcgacatcgaggccatcaagtctaagatcatctcgtacccacactactactcgctcctcactgcctacctcgaatgcaacaaagtggggacaccaccggaggtgtcggcgaggctgacggagatatcgcaggaggtggaggcacggtag

SEQ ID NO: 17954 - DNA, 657 bp, Zea mays
  Peptide Sequence Number=SeqID_61329
atggagaggcgcactaccgcgggcggtggttcgcttctcgcatggcggttcgccttctccgcactcagagaccaacacaccagctgtatgacttgtggacccgagcccccatgtcataggctgggttgctttggtgcgcgtcgggcgagatttttcacggcatctcggggcgcgagcaggagagcctgccctaaaaaagggattcaccccgtgtgcagtagttacgctctcgcattctctcccaatggctgcgcccttttgcctccgagctctctacgctcctttgccttcgaggtctctgctttgcgccgccgccgacgccatgacttcgcttggccaacccgatcacttccagaccgaggcgacactcaatgtggtgcgccacctgctcggatggagcgcgccggcgccactcccctcggtgatcttgccgccggggagttcgtgctcttcgtctacctctccgagatgttcgtatggatggtcctcttctgccagtgctcagatgaaaggatgttgcgcagcgaccttccggagatggaaagcgagttgagctacgactccacccttcacatgaactccatcgcctcctgtagcggcctcgtcagctcctccctaaacttcaccagcatctcgtggtacacctccatgaactag

SEQ ID NO: 17955 - DNA, 141 bp, Zea mays
  Peptide Sequence Number=SeqID_61330
atggccatgatgggttcaatattagaaaagatgtacctctgccaggtgaagaagcaggaaacttttgttgcttctgttctaaggtggtaccaaaagaagagaatcaagactaaagctacgggaggaaaggtcctccgttga

SEQ ID NO: 17956 - DNA, 465 bp, Zea mays
  Peptide Sequence Number=SeqID_61331
atggttcaaatcatagagcaccatgacttcattctcgaggacttcccgatggacgaagaggttgcgtcttccatgtcatggggctccaatcgccctgcgcctgcacagacatcccgggctctatcaagggctgctcctggggcattatctttagccagggagttgttacgtcaccctccaagttccacggcctcaccgggggccatgaagcagtggcgtgacgatgttgaccgtctccttggcatggtgcattctgtctcggccagacctaggccttggtcattccgacgtcaacatgaggcatcagcgtcagtatgttcaccctcagtgaaggtcgcaccgactgaggacctgcgggcggagctcaaccgcaggcgtgcgggagaggatgctccaatatctctggagaggcctgatgacctgcgggcagaactcaaccggaggcgtgtgggcgaggacgcatga

SEQ ID NO: 17957 - DNA, 276 bp, Zea mays
  Peptide Sequence Number=SeqID_61332
atggccgagagattgaacgtccttgctccccgtgactcgtggccctacaactccgtgatcgaggaagatttgcataacctcatcgatcggggtgccaaaggttcaacacaaaccaataaaaagatcaaagttagggttcaaaagaatggagcaaaagaaaccgaagagaaccctggtctggcgcaccggactgtccggtgcccagggtcgtatggcttcaaacttgccaccttcgggtttctggagagccgctccgctataattgagagcacctag

SEQ ID NO: 17958 - DNA, 450 bp, Zea mays
  Peptide Sequence Number=SeqID_61333
atggcacgcttaatttatagggcccgagggtggtggctcttgaatttggaatggcgcgctggcagccgaagatgggggagagttactggtacatggttatcgtggcacttcaccgtggcaagaccatcgacgatgatcggacaagctaaggcgagtcactatgatgaagtactgcgcttaggcacgtggcacccgagcggcaggcggctaactctggtgaggttatctggaccgaccgtgaggcaagtggacacggcggccggggcggaacggtgtctcaagctcatcctcagcacccgatttttcaccgaggatcgttatccgcattcgaccgggcgtgaatcgcgacgccggtgtgaatctgggcgcaaggtcaccggcggtgaggggggccgaacatgtgatcttattcagtcactttaccatggtgatcaccatcagagcgtctga

SEQ ID NO: 17959 - DNA, 468 bp, Zea mays
  Peptide Sequence Number=SeqID_61334
atggattgctataattgtggagagcttggtcatcttgctcatcaatgcacaaaccctaagaaaaacaaattcaagggcaagaaagatgatgagagtgaaaatgagaagaagggaaataagttttttaagaaaaaagatggcaagaaaaagaggatccacaaaagaaaaaatgggaaagcatacagtgttggtgattggctcaccaacattgaatcttcaagcggctcttactcaagtgaagaagatgatgaaaagatcgtcatcgtcgtcgtggatttctcttcaccaccatcatcatcttcatccactacacacctatgccttatggctaaagatgaagatgttgatgaacaagacaaaatcacatttggagataattcaaaagaaaaggttcaagggcttggcaaggtggctatatcaaatgatctttcaatctcaaatgttctcttggttgcaccatggagttaa

SEQ ID NO: 17960 - DNA, 603 bp, Zea mays
  Peptide Sequence Number=SeqID_61335
atgcccaaaaccacatatagcactagcaagtactacccaaaaagtttagtggagtcaaggaaagtccaggggctccggggtaaaaatccccagacacagcttactgttaccgaggatggcgggttgttttcaaataaacagagggtctcttatgaaaaagtgcctggccgaaggggtatcgagcgtttctggccgcccgatcggcaatctggggtccagattagatcaccacacttgcgaaccggtcataaattcccatggccgttgatctgccaccgacggacacgatcaaccgatcgaatctgtaagctctggtttaaatcccgatcgtccgtgttggatccaacggtacacgcgccatcgcccaacacgccgtcacgctgcggcgttgggccttccccgcggcggcgcgtcaccggcgccaacccaatccgtgaacccattgccccaaactctaatccgaaggcacatgcgcaaagcggagatgaaggcgaacatgcgaggcacggactcaccggttgcgatgcggcgtggaggtctgaccgtggcaagaagcgatccgcggcggcgcaggagcaacggcgagcaattccggtggggtag

SEQ ID NO: 17961 - DNA, 390 bp, Zea mays
  Peptide Sequence Number=SeqID_61336
atgcccaaaaccacatatagcattagcaagtactacccaaaaagtttagtggagtcaaggaaagtccaagggctccagggtaaaaatccccagacacagcttagtgttaccgaggatggcgggttgttttcaaataaacagagggtctcttatgaaaaagtgcctggccgaaggggtatcgagcgtttctggccgcccgatctgcaatctggggtccagattagatcaccacacttgcgaaccgattgcaatctcgctgatggagaatacgtgctcatccctgagcaaggagctgtccatggggaagaccaagagcaagctcccgagactgccatcgaggatctccccgcagccccagctattgaaggcaagccccaattttatgtataa

SEQ ID NO: 17962 - DNA, 480 bp, Zea mays
  Peptide Sequence Number=SeqID_61337
atggccataatctcaaagatttggagccaacccgcgcttgaacacgacatctctctgcgctgcctcgtgctcgacgctgtgccagacgccagagcgtgcactggcgctcgcccgcgcacgccccgagcgcttgtcagagcctcccctcagtcgtgctcgcccacgcctttaaaaccacccctaggcgcgcctcacctcactccacgctcaacctcgctggccagacacccctcctttagctccgacgagctttcctccgccagccatcactgcccaagcctcggccaccgcggccagctcgctccagccgcgtccaagctgcgcctgtccctcgattgcaatcttgctgacgaagagtacgtgctcatccctgagcaaggagctgtccacgaggaagatcaggagcaagctcccgagactgccatcaaggatctccccgcagccccagctattgaaggcaagccccggtttaatgcataa

SEQ ID NO: 17963 - DNA, 351 bp, Zea mays
  Peptide Sequence Number=SeqID_61338
atggggaagcctataccatcactcctcatgctcctcctcagccgagtgaccgcacttgtacccaccataaccggaatgagagaccacgtctcaggtcgcgtgaggagggcaatctgcgggcaggttcactcaggttatgcacaaaaaccggggcttgccttccaaagctggggcaggcagatcctctggggcaggctctggtgctggatccggggctacctcctgagcaactccttactccggcacgaggacgtacctttggacttagatcaaaaccacaacgtgaagatgcgcaaagaatatgaaggatggcgcagagccgaagctatgcgcaggggagcttcgacgtga

SEQ ID NO: 17964 - DNA, 195 bp, Zea mays
  Peptide Sequence Number=SeqID_61339
atggcgggtagaggaaagctcaccggagctaaaggaggggtgtctggccagcgagggcttgcaggtttcactgactggatcaagagatatggaggggtgaagttgggtttgtctcactgccgaacacagagagaaaatcctgggtttgatgtgtccagggcacacgtcccgatgccatcttctggtattaggtag

SEQ ID NO: 17965 - DNA, 1794 bp, Zea mays
  Peptide Sequence Number=SeqID_61340
atggcggcgcgactgccgctggggggggggggaagggcacgactgccggcagggcagagtgttgccggcgcgcggtcgccggttgggtggcgacgctgccagcaaggggccgcggttgtccgggggagggggggtggcggcgtggccagcaaggaggggcgcggccgctggtggggcagagggccgccaccggtggctagaggagggcagcggcggttggagggtgggaggaaaaagaaaatgtctaacctagctctataccatgtgggaaaccctaaccctagaatagggtgtggtgatgtattaatagacttggagttgggccagacccattatagagggggcgagaggatcctcttggagatgaagctaggcgggggcagttcaggtttcagtgcaagatccacaaatgatgaattggcattaattccattagaaccctcaacatcatcattttctattgctggagggcctacattttcaaatggtttttcatctgggattggttctagtttttcgcaagataatagctttagtcctttattaagggatggagaagatggttacaatagtctcagcaatggaactaaagatgacactcacggattgagtggattacataacttgggtaatacatgcttcatgaatagtgccatacaatccttggttcatacacctccattggtacagtactttttggaggactatacttgtgaaataaacaaggaaaatccactaggcctccagggggaacttgcaatagcatttggagagctacttagaaaactttggtcgtctggtcgaacttctattgctccacgggcatttaaatcgaaactttctcgatttgccccccagttcagtggatataatcagcatgattctcaggagctacttgcgtttctgttggatggtctgcatgaagatctgaaccgtgtaaaagagaaaccatatattgaggcaaaagatgcagatggccgcccagatgatgaatttgctgaagaatgctggaattaccataaagctcgaaatgactccataattgttgataagtttcaaggtcaatacaagtccacattggtgtgcccagtttgtaacaaaatctctgttacctttgatccatttatgtatttgtcgctaccattgccatcaacagttactcggatgattactgtaactgtattcagtggtacgggagatgttcttccaatgccttacactgtgactgtacagaaaaatggaaactgccgtgatcttactaaagcccttgctgatgtctgctgcttaaaaaattctgagacattgttgcttgcagaggtatacgaacgtcggatctaccgctacctaacaaatccaattgagggacttcatatcataaaagatgaagatatacttgttgcatacaggctccctgttggtcatgaaaaacttttgaggttggagattctgcattcgagggcagacagtggcgtcacccatggggatggagacgccgtcaacgaagatgatgcgacaaaatttggcgttatccctggagatgggcacaccgtcgtccaggatgtggtgacaaaattggcaggcgatgttgcccatagagatggggacgccggttgccaggatggcgtgatgaaggtggcatgcggcgcagcccatggagatggggacaccggttgccaggatgacgtgacaaaggtgacatgcggcgcaatccatggagatggggacaccggttgccaggacgatgccaagaaattggcaacagaagccatgggatcggatcgaaacccaagctaa

SEQ ID NO: 17966 - DNA, 130 bp, Zea mays
  Peptide Sequence Number=SeqID_61341
atggcgccgggaggtattgggcaatcccacgataaaatccatgcaaatgtcctcccatttccaagatggtatgggaaggggttgcaaagggtctgctaccttcaagtgactggccttgactctctggcag

SEQ ID NO: 17967 - DNA, 639 bp, Zea mays
  Peptide Sequence Number=SeqID_61342
atgggaactcacatacaagagacagccctaggtgctaggaggaggcatgcgccgaatttttgccaagattcgcacgcttgcgatctcggcgagctgttgagcaagggcagaagaacacttccacgtgttcgacacgctctgaacgcgccagagcacgcccagcgcccgaccccgcgcgccccgcgccgcgccaagctgtgcccgtgtctcctgctcgcgctcgcgcctataaagcccaccgaagcttcaaccatactcccccgcgtgctctcgacctcactggagccagagatcaccggcgtttgccctgcaaacgattgcaacctcgctgacggagagtacgtcctcgtgccggagcaaggagttgctcaggaggtagccccggatctagcaccaaagcctgccccagaggatctgcctgccccagctttggaattcaagccccgattgccctcctcacgcgacctgagacgtggtctcccattccggttatggtgggtacaagtgcggtcactgcacgacggcagtcggggttctctggaggacattgttgctggagtgacttggtcgtccatcttgccaccgggttggacagtcgagtgggacactacctcggctgaggaggagcatgaggagtga

SEQ ID NO: 17968 - DNA, 657 bp, Zea mays
  Peptide Sequence Number=SeqID_61343
atggcggtggcaggcgggcaggagcagggccccgccatcagccaagctcatgtcccatccgggggcagcaagagaaccctctctcacggcgtgaagacaacgcgcctgtgctccgttccacgaacggctcacgcacgcgcaacgaccgccccgccaaccactcgccccatcgcattaactccgcggcgggacaggcggcgcccctggcaggagaagcgggcgacgcttcgccttcgccataatgaccgcgtcaaaaaaggggttcgaaggctggcccccgaagggttcacagccgcctcagacgccgagcgagggatgaaccatgggtacgttcgatacataaccaaggctcgagctgcgctcccaagctcaccggagacaccatgttcggcgcccatcgagggcaacatggcgcttcccccctccttgcggaaaggcgacgcagggggcgtatgtaaaaaagccaagtctgtccctgatcgccctctcgccctgtgcagaggctcgggggctcctctcgcaaacccagctccggccgaaccgttgacagcgtcaacataccagcccgagaacttgggacccgaccgtacacccgggctacggccagctcgcatgagggaacggccagaccagccgaagcattacgcgaggcattaa

SEQ ID NO: 17969 - DNA, 819 bp, Zea mays
  Peptide Sequence Number=SeqID_61344
atgctgccactaccaccatttcctctgttcccagtgttcattttttttctgaatcctttgtttcagggtctaagggaaaggttttcacattgcaactcaaacatggacgcgggccaggttagggcgccgcgcgatcgggatcgcctcagcaagaagcagcagaagaaggatgccaggaaggcggagaaggctgagacggtggcgcagccccagcaacagcatctgttcaacaccgaagacctattcgcggccaactatggtgatgtcaccgtcgagctaaatcataatccaacagggcaacaagatagcctgctcactgtctggttacgaagggtgcagggtgttctgcatgataatcaaactgaattgtgtctaatgcgtagaatcaaggcagccatcatccgtgggagttccttcgacgcagactgcacaatcataggtattcatccctcctcgaacaacctacctgcaccacatgactctgagagaatttctaaccaaggtagtgcagcagcaccagaagtgtcaatcctaaaaacgagaatacaaccaaatgatgaagctcaacaggaagtgcagactcggtctattcctgatccaagggaggttgcaggatgtctgttgcatatgttgctccaacaaagtcgtcctatgctatgtctcatccttctttccaccgtgtatcagcttgtgactcaatatggaaggataccagtataccacacattctgtggaggattctggaattattttagcttggatttgcaaaagatcaagttgaggaagtgcctagcatcagagtcgatggaaggtgaataa

SEQ ID NO: 17970 - DNA, 1692 bp, Zea mays
  Peptide Sequence Number=SeqID_61345
atgcccaacaccgcggcgttccggcgcgccgtcgcggagctgggcgcgagggccgccggtgggggaggggccaggcttgacgtgccccccgggaggtggctcacgggcagcttcaacctcaccagccgcttcaccctcttcctgcaccgcggcgcggtctcatcggctcccagggcagaatttgatcctctattggtcttgtcattattgtacaatgctgcaaaacaatctcctggagtctctgttagtaacagcaatttctggattcagagtgaaaagccttattctccggaggctgttgactcggcacttgagtgttggtctggtacaacagatcccgtagaagtagaggcagttcttgttccctacatattggaggatgaactgaagacagtaagaattaatctaggagataatgaacattatatgagttatgttgcagcagagctctcagcaattgattcctctcatgttcttgtatcaagaacaattggaaaagcatcatccgagataagactgtattttgcagccgcaaatatacatgttgtttctgatatatcaaaacatgcacttgattctcttggagatggtgacatcaactggcaagtaaataagcgagcttcctacatttgtggccaaacaatttatggagatgcactcttggcaaatattggatacacaaggagagattcggaacttcacactgaagatgtcaatctatgttcctattacaggatacttctgggcaagttacctgatggaaattgtaagatgtctagggattcgattcttgcagcggagcttccatctgcatactcttgttttagttggaaaggcctctctccacgagatctcctttgctcattttgtcgccttcagaggttgccagagccccattttgttgtcagtagggtttcctgtgatacattaatgttggctgtgagctctgaagaaagaggagcaccagcaggcagcgcagaaaatcagtacaccaatgatgtcaggatcaacaaggaaaaaccagatctttttaaatgtgaagtgaacatacgttcacggaagcaagaaattttactagagtattctgcagctgacacttggagcaaggaatctgatgctattcagaattcttcattgaaggtcttgatttggttcaataattattttaagagactaacctcaaaaacaagcaagctatatctttctgagtctactgctgatgtcaaggataaagcaaaaacatatttgttggagagccacaatgagtttgagtttgagattgggacgagtgctgttagtaatcagcttgaatcatgtgtaactcagctgtcagtgaatcaaactgcacgttttgtagctgaactgcctcctagggatttaatcatggctgcatcttgtgaattctcaccaggccattcatttataatgccaacaggatggctttatcaagttctagattatgactggtttgaagctattagcactgagccaaataaagggagaggacataaaagaaggttaaagtttttagtggatgcgggagagattaactgtggaagaggaaaggtacgcgaatccgaaacatctggccattttggacagagtaagtgtgatgctggaatgtggataattagtttagtcataaatgacaaccttggttgtgttgcaacttttgagtgtggaaataactag

SEQ ID NO: 17971 - DNA, 828 bp, Zea mays
  Peptide Sequence Number=SeqID_61346
atgaaaatccttgaagccgagcgatgtctgaagagcgccaacccccgtgatgtcgcgctcctccaacagcagcaagaagaaggcaacacgggcggctctccccactcgcattccaagcgtcacgggcaaagtctccaccgacgagctctagggttcccaccctccgacgcgggggctgggtcccacatgtcatgcgagcggaccgaaaacagaagaagccaaaccgctgcacgcgaagcaggtaaccgccccgtggttataagtgttcccccatcctcgccgaaaccagcgggcgaaagggcggaccgttgtgcaccctttcgacttcatcgcatccggtgggtcagcgtgaaggcccgggcccgcatgtcatgcaaccggcgcaacggttactgcgtgcaaggaaaccgcaccgccactcgcgccaatgccgcgtcttctcgactgcggaaccagtgccgcgactcgaggcagccctgcgcgctggcccctcggaagggttcgacagccgccatagagcactcgggctccgagccccttactgatcaggggctggcccctcggaagggttcgacagctgccccagagcacttgggctccgcgccctctactgatcaggggttcgaaggctggcccctcggaagggagcgattttgtaacagaatcccaccagagggaggcatcgagcccttggaccctattgaatgggtccgggaaaacagcaccgctcacaccgctccgactgctgtgccaaccacccgggtaaggctgacaacagccgagttcagcctcgggcgcaacaggaagctccgcctcgcccgaccttag

SEQ ID NO: 17972 - DNA, 360 bp, Zea mays
  Peptide Sequence Number=SeqID_61347
atgatgaccgtaggccttatggtggggagaagcaagtcgggctgcggcctctgccccgccctcagcttcaaggatgttcatcatcctcgctatggcggagggcgagctgagccagggttctacctcccgcatgggccgacaagccgcctcttccttcagcattcagaggagagggcgctcactggccttgcggaggggacgaactttgacaacgtgggatcggtcggccgcaagcgtcgtcagctgcagcgtgtctggctcgctgtctcagctggctctggcgcggcctccgacgctgcctcctgccgcttggtccgggcgtggccgtccgttgtaggatcccaaaaattcaaattctga

SEQ ID NO: 17973 - DNA, 936 bp, Zea mays
  Peptide Sequence Number=SeqID_61348
atgggcgaccgggcgtacgcgccggccgtgaagccggttcccgtgcgggccaccaacggcaccgcgaacggcggcggcgtggggcctccgcggcccgcgccgccgtccatggtgcccggcgggcgcgtgccccctccgccgatgtacaggcggaggcccgcgcagtcgcgtcctccggcgcggcgtgccgggcggagcgcccgcgggtggtgctgcgcgtgctgcctgtggctgacgctggtgctggtggggctggcgttcctgggcgccatcgcggcgggggtgttctacgtggtgtaccggccgcggccgcccagcttcgcggtgacgtcggtgcggctggcggcgctgaacgtgtcggactcggacgcgctcacctcccgcgtggagttcacggtgacggcgcggaacccgaacgacaagatcgccttcgactacggcgacatggcggtgtccttcgcctcgggcggcgcggacgtgggcgacgccgtggtcccggggttcctccacccggcgggcaacacgacggtcatccgcgccgccgcgtccaccgccgcgtccaccatcgaccccgtccaggcggcggcgctcagatccaggaagtcccacgtgatgtcggcgcagatggacgccaaggtcgggttccagatcgggcggtccaagtccaagagcatcaacgtccgcgtcagctgcgcgggggtctccgttgggctcgccaagccggctccggctccggctgcggccgcgcccgcgcccgcgcccgcgccggacgcggagccggccccggcccgcggccgtgggcgtgggcggtcgccgcggtcggtcgtacggacgtcctcctcctcctcctcctccggcggcggtggcggcgggaagttgacgccgacggacgcaaagtgtaaggtccgcatcaagatctggatttggtcgttttga

SEQ ID NO: 17974 - DNA, 366 bp, Zea mays
  Peptide Sequence Number=SeqID_61349
atggagaacgcagaagtgcacattttgcacttgcacacggcgttcagggatcgcgtgcaccggtggaagcgctgcggcttgcccaacggtgaacgcttccaacatcgcatcatcaacaatgtgaagaacttcgcgcatacggcgtatgcgcatggaaacggagcagttggccgctcgtctcacacggtcaaaggaagatctgagaatgacactgaaagcatggctagcatgcaggctgccacatgcgccaggccatcaccggtctctgttggtgggcgtggcccgacgaggctccgacgctcggtccatacatttgatttgtcacgtgttcatgattcacgagatcaacacaagaagaatggatga

SEQ ID NO: 17975 - DNA, 243 bp, Zea mays
  Peptide Sequence Number=SeqID_61350
atgtccgaacttcaagctcgtgactttcattttgcgattattggttcagcctcaattgcatttatcaatgacccgataagagagcttaaagcactcatgcctaggactttgttttggatccatttgcaatctagagggcacaatgatattgcgcgcattactaggaatttcatcatgatgaacctctttcgtgaggcgtccccgagaatagatcaaataccgataagtcaaatgtggatatga

SEQ ID NO: 17976 - DNA, 465 bp, Zea mays
  Peptide Sequence Number=SeqID_61351
atggcatgcggcagcgcgcacgaccttgggtggccctctggtggcgtgcgtggctgcctcgcaggcggcctcggccccggcagcgcaggctcaacggcggcccggccacggcacgggagcgtgcgcggctgcccgacggcgcacttccctcgtcgtggcctcaacggcgcgggcgggcgttcggccaccggtgaaggccaatgccatattcatgaaagagataagaacagtggtgtgaaggaaacgatatttgcatattaccgttattctttcttagtgtcatgtatttatacaggggatacaaagtctcccaaggggcgctcagcaaccagcccgttcgccgtccagccgcaatcggcaatgccgcacgcagaggaggagagagaagccacgtcacatgcactgatgcaccacgtccgcacggcacatgcactgatgcaccacgtccgtgacggcaagcgctag

SEQ ID NO: 17977 - DNA, 669 bp, Zea mays
  Peptide Sequence Number=SeqID_61352
atgccgccgcgcccaagcccgcgccgcgcgctcctcgccgtcgccgcggccgccgccaagaagttgtggatccgccgagttcatcaacccgccctggctcgacggatcgtaagtctttgcagagacgaggaggggggggggggggagctcgaaactgacagtgacgcccccgcgcccgctgctgtgctcaagaccccgttcctcggcgccaggcgcgcgctcgccaatgccgccgcgccccaagcccgcgccgcgcgctcctcgccgtcgccgcggccgccgccaagaagttgtggatccgccgagttcatcaacccgccctggctcgacggatcgctccctggcgacttcgggttcgatccgctggggctgggcaaggacccggcgttcctcaagtggtaccgggaggcggagctgatccacgggcggtcggcgatggccgccgtgctgggcatcttcatgggccagccgcgatttggggactgcggacgcgcgggcgcggaccttccatctgcgcgtccgaggaggcgccggcgatggcaggcggggcagcgcgtggagaagaaagcgcggcgtggagaaaggcagaaagcgcggggacgcggttttggcaaaaccccttttgctcctgggccggccaatgatgacgaccttgatgacacgatgtga

SEQ ID NO: 17978 - DNA, 670 bp, Zea mays
  Peptide Sequence Number=SeqID_61353
aggattggggacgcttcaggtggtatcggagctgttaggttggccgcaggacatggaggttcagtgccaaaccagcttgtgccagaatgaagatggtttccccaagttgctgagagcatgcacagttcgcctcggaatcaggagccagccagagtatgatggtcgtgaatttgttgagcatggcacagtgaagatgcgtgcattggaaggtcagcagcggcttgaggacgaccccacagtcgtgcacctcactgcatacctgctcaccctagatgcacagtatgatttcttggctcggcaccaccgtcagatgattgcccaagcagaagatgcagagaagcgcacccgtcagctccatgtggatctcaccacagctcaagctcgtgcaactgccttggaaagtcgtgaagtcattgttgttgaagccctgaagcaagccaaggatgagcatgtccagaagctgatggaggcctacttggtaacccataaccaacgtagagccctacggatccaagagcccgcttcatccaacccagttcaacccaagatagttgaagatccccagattcgtgaaggtcacccggtctctatcagaggagagaagaaggcttgggaactcccgaaaggagccatagtcttggaaggaattccagtcttccctcaggctatg

SEQ ID NO: 17979 - DNA, 399 bp, Zea mays
  Peptide Sequence Number=SeqID_61354
atgggtggatgggaaagtgggctattgactcctttcgattttttacaattcaatgctagaaagacatactcaagacagtacatattacatatgtatcagtatagtttgggctgccatgttttctattgtatcactaaaggcaagcatccgttttgtgagtactatgaatgggatgtgaacattgcaaacaatcgctttgatctctttatggtggactacataccagaagcagtccatcttatatctcatttgttacaaccaaacccagaggcaagaccgatgacagtatatgtcatgcaccatccactctattggagccctgaattgcgccttttgtttttaagggatactagtgatagaattgagaaaaccagtgaaactgacctcataatcttctga

SEQ ID NO: 17980 - DNA, 165 bp, Zea mays
  Peptide Sequence Number=SeqID_61355
atgggctttgccgcggacacagggaaggcacgtggctggtgcacaccaggtcctgatgtcgatctgctagagaaaatgctccagtacgagccgacgaagcggatccccgcgaagaaggccctggagcacccctacttcaacgttgtgaggaacaaaatgcactga

SEQ ID NO: 17981 - DNA, 789 bp, Zea mays
  Peptide Sequence Number=SeqID_61356
gattcattctaccatgctttaactgaggagcaatctaagcatctgcaagactacaactttgatcaccccggatctgttcacatgggagttgtattttgcatgaagttctatgcagtgtctattgttcgaagagctgatgaactgcaaacaacgcttatggagatggttaagcaagacattagacaccaattaagtgcaaagaggaaatggactactcagatcagatgtgtatcgtatggggtgcttgagagcagcaagcatgcagatcttcaaattgagatggaggttgccgagaaggggtctgtacacactcttggtaatgcccgtgtcttattttctctgaagaagactggtcatttcgacattcttgcttttattgatggtgttagttacgaagttcaagttgatcgaaagcggagagctggagctgatcaatcccttaacaggtcagtactcagtactaaacggaataacacaatggaggatgaaaacgaagatgatgagtacgaggaactgcactcacactatttattagtttccacagatattttcttaaagagcacaagatatccaaacaggaaggttgccttaggcagagtacttagccaagaccccaaaaccaaagttggagatgttgctttaggcaaagaattttggatggtgcgtgttagtctggtatctatgcgcgatgaacaactaataaggccatataacaacttcaaggttcttagacaagtaggcaataatccaattgcatggccttcaagttgtattgaaaaggttaactga

SEQ ID NO: 17982 - DNA, 228 bp, Zea mays
  Peptide Sequence Number=SeqID_61357
atggccgatccgatcctaaggtctgcgcagatcacggaggactggtgcagtcggttgcgcacagcccgccgcctggagcggaatcctgattggggtggggaagaaggagcgatccgacaagcggggaccacccgccagctgcccaaggagtttctgtttaggataatgcaccgcagatgtcgaagtaaaagttgttctccactggaggattctcggtctgggagataa

SEQ ID NO: 17983 - DNA, 546 bp, Zea mays
  Peptide Sequence Number=SeqID_61358
atgaagtcgtggaaggagaccgtcaggagttccaagattatgatgagttctaggcgtggatggctcgtcttagacacaccgcacggaagtctgtcatccccttcttaccctctcgtctcgcagagcgtccgcttcgccgtcccgtggccgcaggagatagagtctgtgaggagctactcccctgtgcttcccctggaggtgcccctagcaccaccactgggcgccccagcctctgtagtagctgctggaggagacccagatgacggaggtggcgacagcaactcgagccacgacaccgacttttctgctgaccaggagccggaaggatgggttgctcgacccatcactcgcgacgctgctcgcgggtgtcacttccatgatgcgctcaacaccctgctacgtcgggaacttgaccggcgtacttggtctatcgagtatcgctgtgtggtctaccagcatagtcgcgggatctacccggaccgctgggaagcgacctgcttggtgcgccgtctggagaacagtctccagggtgctgaggtctgctag

SEQ ID NO: 17984 - DNA, 462 bp, Zea mays
  Peptide Sequence Number=SeqID_61359
atggaactacgccatggaagtagggagcgtgcacgtgatagtcgccgcatcgctgcgttgtcagcagaggttgaccgttggcagtgggagattgtggagcgggatagggctattgactgggctatgccatccagaactcgtgctcatgatggggctggaacttcctgtggtggggaggaaactctaatcccgccgcctgtacctcccatgctggttgaggctatttctgctctgattaatgccactgttgataatactcattttcttcaagaaatggctgggaagcaaattcatcagcagggaggcagaggtcaacaccaagcccccagagacaccatgtacatggagttttcggaatctcatccacctgttttcgttaaagcggaagaacccttggagatggacgaatggacttgtgttatggagcaaaaatttggactggttcagtgcacagatacttag

SEQ ID NO: 17985 - DNA, 876 bp, Zea mays
  Peptide Sequence Number=SeqID_61360
atgacttcacccacccctatcaatggaggagacacttgtttcagttctgactaccttttccacgagggctttccctccatcttgtgggaggtgctctgctcaatcggttaccgtacaccccctctgtatacggtgcagctatacgaggagcatcaggtgccacgttgcagggtttggttgactctggaggctcaccctctgcagccgggttggcattcccttgactctgagactattgggttcaaggcggacgacaccaccgaggccgcagctatgaagaccctgacgaccttctgcggataccatcccttggagatggtaatgcacccactaggactcttcctcgctgagaagggggatgaccccatgtggtgcaacagagtgagccatgcaaaagacgtgtgggccttgcatcccgaccaagttgggaggatcgccgttcagtgtatgtgcgcactgtattgcctacaggccctgcagagcgacgccatcacacacctcactaaccctgctcagaccactaagctcaccctcgatagtcgagaggacttcgtggtcgacttgtcttcagaattggtggagaaggacctacaggtggaacagttaagccagcgcaccgcgaccttagagcagcagatggaaatccaagataacactatcgatatcctggaaatccagctccacgatgtgcacaaggaacttgaggaagccaacgaccacctggagatgcaccaccaggacatggaggcaaacgaggcaggaagcgagggagaggaggctcccgaggaactagagccagctcccggtcaaaatgcgactctctccgggatgcccccttcacccgcatccagcgttgcctctaccactcagggttga

SEQ ID NO: 17986 - DNA, 390 bp, Zea mays
  Peptide Sequence Number=SeqID_61361
atgttgctctctctccatgggcaaagagttaacctgaagaatccatccacatcaacagagaagctcttgaaagtggatatccatatctatcgtaacaacacccaagagagtaccggactgcaagccattgatgagattgtccccaaatctatgacgagttcctcaagctctacaagtttctggatggattcagttttggttacatcggctttgggggactgggacttgaaactacctcaaggctcgccatcgcctcttattgctaaaccagagatccgctggatgatcctgatggaagatgacgagttcctcatcattggctacgatgggatattcgtgatgactagccagaatgttatgagcaatccgcaagggactccggaggcatga

SEQ ID NO: 17987 - DNA, 366 bp, Zea mays
  Peptide Sequence Number=SeqID_61362
atggcgcccgaggccagacttggctattgtcagcctcactctgtcgagtggcacagcagtcggagcgacgcaggcggcgctgtcttcttgtcaggtcggcctttgcggctttgtgctgatgggggttaccagatgagattaggagtcttgggggtacccctaattatggtccccgacaaggagattgctcgaaaggctccggacgataaggctaaagtctggaggcaccgggggcaggcacaattaatgagccaagcaggacagcctagcctgagcatcacggacggtgtggcacatacgtgcggacggtctggtgatcagacagacggtccggctaactctatcggacagtccgcctatggctaa

SEQ ID NO: 17988 - DNA, 255 bp, Zea mays
  Peptide Sequence Number=SeqID_61363
atgggcggcatccgcgccgtctctctcgccctgctgtggttcctcctcctctgggtggagtcctgcactctccatggcgcgcaaagatattatttgaagttttcgcttttcttaggtcgattgctatcacaggataggcagatggttgacaacgcctggatgacggtgccgacgttcagggattggaacatgaagaacagggcgctgctggactactccatgcacttctccaagatccacgagatgtgcaagtag

SEQ ID NO: 17989 - DNA, 393 bp, Zea mays
  Peptide Sequence Number=SeqID_61364
atgcgcctcatcctgtggtacctgttcttgacctgtggggggtgtgagacagcaagagtgagctcacatacgttcatcgctcaacaagttgtggggaataatgtgcatgaactcgccaaaggtgggagctcacgtggagtaggtggtaccctttacccacaagtcatgttacccatctgccaagggatcgcgacttcccatacacctctattgaggaggcgaggcagggtaacactacgagacctttacaaagttccactagctttagaaaacccgctacagtttataggaagctccaatgcagggttcttgcctgaccgccatcgcagcaaaatcaaccaaggacctccctacactgaccactcccctactgcccttgcccctttcgggtaa

SEQ ID NO: 17990 - DNA, 1230 bp, Zea mays
  Peptide Sequence Number=SeqID_61365
atggcgactcgatatctggacattggatgggcatggtctcctcctccgacgaagatgacgagaacgacgacgacaacagtgaccaggacagcgacggcagtggcgatgatgacggcgatgatgatggcggggcaagccaatgcgatgagatgcctcccagcaagcgtcgtcggctgcagcatgatagcttattctgatatccgagagaaatccagtttcatcttcggtccaaagatccactgcaagaaagtttgtacgcaagagattgcggacaagatattttctgtagcgagggaaacaatccgtcctggacgagggttgacctcatttgaggctaccaaactccgtgtagcattggaggacattgcttgcatgatggagcaggactctcttgtgttgcaagagcatttggacaaggtcaacaacgttaccaaccatgttcacaccgactacgaaccctcaaacttgtcctcaccaatccctactgaagatgacctcgatgaagactgggattttgccgagcactttgaaaatttttggggtgttgaatacgaaatagatcagatgcctttctttagtgataatgagatggggaagtctggcaaagtgattgcaaagtgggacacaagagcaacaaagatttacacaaaaatttgtgtagaagaggtcaatgcaggcaacaagccgcataactttctagatgcaaaagggtatgctgacctcattaggaagtttaaggaacgcattggtcgcacgtacacctgggatcaaatgaagaataggtgggactctttaaagagaatgtacacgcaatggaaaacacttaatcaaagggcaacagaagacatttttggtgcgggtgaaaacagcacacctaaccctagctctacaattaagggaaagcataaggttttgcatgactctcctaaacctaagaagaaaaaggatatgagggatgaatacatgaaacggattgtcgatgctttcgagtccaggggctcttacaagtccataacctcatctgaaaacgaccccgtgcataaaaaggttgctgcccaattggaacaagtgatcaaagatggtgcagaggaaggaagcgacttacatttctttgcgactcatcttttaatggagaaacgttatagagatgtatttgctaccctcaagaccaaagaaggaaggaacgcttggctgcgtcgtgcttacgagaagaatgagaagtcaaattag

SEQ ID NO: 17991 - DNA, 467 bp, Zea mays
  Peptide Sequence Number=SeqID_61366
ttgccgcggcgaagaaaagggcggaggggcttaccggcggcgagactgttccggtgaagtggccgaggggaggtccacggaataccagagaagctatgagcgaaaggaatcgggcggagactcactggatagctcggtccacgcgcggcggcggaagaccgaagtccggtgaggtcgatctcgggcctccggtgaagtccggtcgggtccgagggcttggcgagcttcacaggctactggcggagctagccgaagcactggttgggctggagggtggctggagtgggctggccacggcggccgtagctctggcggcaatggcgggcggaaacgagctcgccggagctaaggaaaagtggctggccggtgagggtgagtgcggggcgaagagagagatatggagccaggaaatctggtctgtctccctgcccaaacccgaggcaaatcccaagttttgtcgtgtctag

SEQ ID NO: 17992 - DNA, 1026 bp, Zea mays
  Peptide Sequence Number=SeqID_61367
atggcggaggacgccgccgccgatctgcgccggaggatgaaggacaagcgagccgccatcgagcgccggatcaccgactcccgggaccgcgccgccgccgcctcctccgccttcagcgccgccctcctcgaggcgcgctccatcgccaaccagaccgtctccaaccgaggcatatcaaactcttggccccctacttctactactcgcctcttttttcccccttcggctttggcttcgccctcctctccaatctttggtttagttagcataatggatcagccagcaaaactcagcgaacaaaaacaacacctcaggaaattagaatcagatctagcacaggccctctccggaacaattagatatataccattaaaagatccaaactttagatatataccatggaccccacatgtcattgactcatgtggacccacattccaagcaagcagaaggtcaaaacacaagttcatgactgagtcgatttcaaacaccactgcaacaaatgaacatcttagacacttggctatggaccgtaggtctacaagagatgaatgcatgaatgccatatcaaatcaactaaaagatattgaatcccttgaagctgaaagtgacgcacatggagataagagcctagagacggctcttatgtggtatgataagtttcttggttttcaagttgttggaggagaaggggtgaaatttgtgttcaacaaaattgatgtgcaaaatcctgacaagaagtattctttttgcataaaacttgctggagaaagatacatcttagtctggtgtgttccatctgtggacgatgctgaagaattggtgaaggatcttaactgcagcaatgatctgtacaaatttgtgagggccatgagagagatgttccaggctgctacaatcagtggttccaagctcaggactattgggcatggtttgcggaaatctgttgccaagctccttttgccccgacgtttcatccataacatcttcatcgttctcagcgttatcactggattccagaagtga

SEQ ID NO: 17993 - DNA, 1314 bp, Zea mays
  Peptide Sequence Number=SeqID_61368
atggcggtggcggcgccggcctcggacgccaagccgcgcctcaacgtgccaccgtccatggcatccgcgctccgcctcgatcccgtggggctgggggcgggaccctctatgccgtccccctcccgccgactcgccgagcctcccaagacgccctccccatccaagaccacctacagcgaccgtttcatcccctgccgctcctcctcccgcctccagaacttcgcgctaatcgactcccctctctccccagccaaggacgacacgccctactcccgcctcctccgcgccgagctctttggccccgattcacccaaacccaccaccgccacctccgcagcctccgcctcgcccaacaccaacctcttccgcttcaagaaagaccactccgctcccacctcacccttcgctaaagctgccgccgcgcaccatgactgcaccgcgggatccggagacgcgccgtcgccgcagaagccacccaggaaggtccccaaaacgccgcataaggtcctggacgcgccctccctgcaggacgacttctatctcaacctcgtcgactggtcctcgcagaacgtgctcgccgtcggcctcggcacctgcgtctacctctggtccgcgtccaatagcaaggtactgtctcagctatacgaacaagattactgctgcatacctgcgtctacctctggtaggacagtgacaatgatggattcgatgacgcctcctaacccaccaaccaaaatccaggtcaccaagctctgcgatttggggcctagggacagcgtatgcgccgtgcattggtcacgggaaggctcttatctttccattggcaccggccttggagatgtccagatttgggatagttctcgctgtaagcggattagaaatatgggaggtcaccaaacaaggactggggtattagcatggagctcatgcatcttgtcgtcgggtagcagggacaagaacatactgcagcatgacatccgtgtccccaatgactatatcagcaagttttctggtcatagatcagaggtttgcaaccttgcctggtgcaaaaatgtgaatgagcttgtgagcacacatggatattcccaaaatcagatcatggtgtggaaatacccatccatgtcaaaggttgcaactctaactggacatacgatgcgtgtgctttacctcgcgtcgtcgcctgatggacagaccatagtaacaggggcaggtgacgaaactctacggttctggaacatatttccatcagttagaacacagactcctgtgcgtgatattgggctctcgtcattctcaagaagccacatccggtga

SEQ ID NO: 17994 - DNA, 1065 bp, Zea mays
  Peptide Sequence Number=SeqID_61369
atgatgatgctcaccaaggagttcgccctatcgccgccgccaggtgtcgtgccgcgccggaggccgtcggcgagggtcgcacccaccgccgctcgagggggttcgccggtgcccgacctatggctgcggaccgccgcccccgtccccgcttccgccgccgccggcttcgccagcagccacagccacgacggcgactgcgacctggccatgctcgtcaccgacttcctcgagaacggggccaccgccggttccggagactcccgcaatagcagcgacagtgaatccggtctccctgacctcgcccacctcgcggacacgatctcgggtggagacgagaaagaaaacgagctgctcgccatggtccactcgctactcctctctatccatgagccgcagcttcagcctttcaaaacaggccaatgtggaggcagctgcatccgccatttgcttgtcaagctcttgagatactcgggaaacgacgcagcagtttgcacatccaaatggcaggggtttgacaagatacctggaggtgactacgagtacattgatgtcataatgcacggtgatactacagctccagagcgtctaatcgttgatatcgacttcagaagccactttgaaattgccagggcagttgattcttatggcaccctgttgaattcgctcccagtggtctttgttggcacccttccgcgactgaagcagttcctgcatgtgatggtagatgctgcaaaatggtccctgaagcaaaactcaatgccccttcctccctggagatccttgccttacctccaagcgaaatggcagtccaagtatgagaggaaagattccattaccgagggaggcttccagagcacatcttctgatcacgcgctgtgcattgggcacctgaagaggctgaaaacgtccctgcagttagagcttgagaccgcaggattactgatgatgccaatcaaggccaacaagaagaggatgccaaaaaaatggagaaatgagaggcttttttcatccgtccaatacataatggtggagactcttcttacaggtttggagtttacagattag

SEQ ID NO: 17995 - DNA, 753 bp, Zea mays
  Peptide Sequence Number=SeqID_61370
atgggtattgtcaggattctagtgggagtgactgatgttgatagtattcctgaatcgacagatattgcggtaggagaagggttgtatgaaatttattttaaagttgacaaagtgtgcaaagatggtgtttggaaggattataagcaagaggtaaagaaaggtaaaggagatgatgatcagcaagatgaggactttgatagtcttaatgattatctacacaagaatgaggctgcctttcaagatactgagatggaagataaatctatggacaatgatgtacgtgtcaaagccctagagtcgagccttcctgatcatactcttgatacacaaaaatgtgggacctctgattttttacctccttttattgagaatggtccaaaaataattcttactcaaaggtcaaagactgggccaacaattgctgtggagaatttggtaactagcaggaggatagatttcgatgaggatattatgagcaaggctcagcgcttaggagccaagcgtaatttggaaaacattgagttcttctttattacttttaagcctaaagttattgcttctaacttaaataatgttggaatccgtcttggtagaaacgattatgaagtattaaattcaattgtttccatcaagaacatagaagtggacatactttcactatatgctaaatctctctctccgattatatcacgaactttagaagaggacgaggaggttgagattgacgcaaagctctcccatgcatgttactaa

SEQ ID NO: 17996 - DNA, 558 bp, Zea mays
  Peptide Sequence Number=SeqID_61371
atggtgctggtcgtccgtgggcgcggtgaaggggaccagtccgccatcgatgcaacctccatcgacgcgtcggctggatcgctctcgagcgaagacgaaaagcatggaggcgtccagggctttacacgcttcgtctacgagtgcacgtccgacctaaaacctccgaccgatcctccctattccaccatcacctgccgccattctagagttttgtatccccccacagaagttacgcccaagttcttatggctggtggaggggcaatgggggatggtaaggcaacaacttggaaggaggttgatcgccgcttccaacccaggcgcgaggaggcgacaaatcggtagtacttcgggggtcatcgacatcctcggggtcgtggcccaagagaggatcggggtcctgggacttaacgcagtcggggaggtcgtcttggaggaaggtcgttccgtggatcggacagtgcattccctcaagacttcgctgaatccagtaaagtgggatcattttgggctggagtcgaataagagaagaagcatgcgactgctaatggtacactag

SEQ ID NO: 17997 - DNA, 201 bp, Zea mays
  Peptide Sequence Number=SeqID_61372
atggcgctccacaagctctatgacgacggcggccccccagctcccttacggaagcaggacgacgtcagcagggactcgaccgctccaacagctgtccctccgccaggctccgccgcacctccgacagccacgacatcacgccagcagggtgcccagatctctccggctgccacattggcattgcagcagattcaccactag

SEQ ID NO: 17998 - DNA, 465 bp, Zea mays
  Peptide Sequence Number=SeqID_61373
atggcgggcggaattaagctcgccggagctaaggaaaggtggctggcccggagaggagatatggagccaggaaatctggtctgtctccctgcccaaacccgaggcaaatccaagacttttcaggacaggcaggacactctgcagcagcagtttttggcagatagggctgagcaccgggccttcatgactcacattcttcagcatatcggtgttcagatccctcctattcagtctgcaccccctccagctcttcaggcaactgttgttccagcagttcaggcaggacctcctctaccttctgttggtccttcttcctctccgatctggtcggtcaccctggacttctcgtcgccggttatcagctccgtcagtgctcagctgccagtgccaccagctcttgctgttaccactgctgttgtggcggtgtctgtgacctcttcagcttggacagctcctgcagtgtag

SEQ ID NO: 17999 - DNA, 468 bp, Zea mays
  Peptide Sequence Number=SeqID_61374
atgagagtgggctcacaagtggcgcaccggacagtgttcggtgcaccaggccaagcaccaaacgaactcgccactctcgggtttcttcagggcgcgctccgctataattcactggactatccggcagaggatacaactttccatcagttcgagactcaaggcacaacagttcctgatgatgatgatgatgatgatgatgattttgggattccgcctccgcctcctgtgcctcctcgctcacatgatcatgaggccgggagttcccgtgttgtccctgctactcctcctgctgttgaccctgctctggctgcgatccttcagtcccttgcacaacaacaagctcttatggcatccgagcaggctcgactggcagccgagcaggctcgtcaggcagcagtccagcagcagatgtccgagaggatgtgttggggggccttcgtctccgaaggtcctcaaaaacacgactaa

SEQ ID NO: 18000 - DNA, 249 bp, Zea mays
  Peptide Sequence Number=SeqID_61375
atgtgtgccacttgtgttgagctccaaagcccctgtcgagctcttcccctgaaagccgccttcgagcacaacccctgtcatgtgttcgatgggaagtctgaaccaatgctcatcgtcgatctacgattatcaaatcattctggtcatggtacgataattgattgcgtgatgcggaagacaagccaagtcgaccccaagcgcggactaatccgcaggatgatgctgatggacgaaccggaagatggataa

SEQ ID NO: 18001 - DNA, 135 bp, Zea mays
  Peptide Sequence Number=SeqID_61376
atggcgacctccagcttgatggtgggggaaagcgagccgggctgtggcctcttcccctccctcagcctcaaggattttcatcaccagggctggggaggggagtgcgccgagttgaggatccgctttccgaagtag

SEQ ID NO: 18002 - DNA, 507 bp, Zea mays
  Peptide Sequence Number=SeqID_61377
atgcttaaatccatactcgttgtcgagcggaatataaacactaggggtgttactctgccacacctttggcaggcgaagcaggcgatgcttcacctccgccataatgaccgcgtcaaaaaagggaccaggaaaggggatactccgaaagggatccttctccacgaaggaagcgggccccgagcccccctactgataagaggttcgaaggctggcccctcgaaaggattcaacagccgcctcagagcactagggctccgcgcccactataggtcagaggttcgaaggctggcccctcggaagggttcaacggccgcctcaggccacccgggctccgtgcccactactgatcaggggttcgtaggctggcccccgaagggttctgacagccgcctcagagcacgcagagcgagggatgaccctgggtacgttcgatacataaccaaggctcgggctacgctcccgaggtaccctaggacatttccgagacccacgggaacgattttgtaa

SEQ ID NO: 18003 - DNA, 327 bp, Zea mays
  Peptide Sequence Number=SeqID_61378
atggcgggcggaaacgagctcgccggagctaaggaaaagtggctggccggtgagggatttgagttagggatcaaggtgaacatccctgatctttggctcaaggtcaaggctcagtccactcaagggacacgatctcacctcgcccgagcccagcatcgggcaaaggcagccgaccccagaggattcacgtctcgcccgagggctcccttaagcaacggacacaccttcggctcgcccgaggcccagtcttcgcagagaagcaaccttggccagatcgccacgccaaccgaccgcatcgcaggagcatttaatgcaaggatcgcctga

SEQ ID NO: 18004 - DNA, 189 bp, Zea mays
  Peptide Sequence Number=SeqID_61379
atggaggacgtcgcgctgctcgactcgtacgatgaggagatggagtcgcacgtgtgcatcaccggcatggcgtgttccacctgcaccaatgtcatcgaggctgccgtctccgcgcaccataaaggcggccaagagtatgaggggctttgttgcaggatactgaagaaaaatggtgatgataatagctag

SEQ ID NO: 18005 - DNA, 2910 bp, Zea mays
  Peptide Sequence Number=SeqID_61380
atggcggcggaaccaagagagcccacatcctcgctggatgcccagctcgcggcctcttcctcctccgcagccggcgtaggcggccccaacccgtgctgcgcgacgcagtggaagaattgccagaaattggtgaggagccggacggcgctgcgggaggcggtgaagctcctgcaggctgagaacgagaagctgcggaaggagaactcggagctcagcaaagtgtgcaaggaggaacacctccgaggtgattcagcagaagcagctagggcaactgagtctgatgccagagatctattggaaaaggagataattgaattaaagacacagaacatgagtttgaagcaaacacaaaatacctgcaaaaataatgatgaacttttacgtatctctgaattagaggaagaaaatagaaagctcatacagattttaggagaagaaaggaagaagatcacttctgagaagaaaaaaattgaagaagaaaagtgcaaaactctagaaatgcaaaggatatggaagtcagaagcacagaagtctgaagagtatagaagagttgctgatactgaaagaaaagttgccaatgattggagagcatcatgtgaaaggttgaggagtgaagcaaatgaactcagagctcagttgactgctcaaattcagaaaacagaagaaatacttaaaagggctgaagcggagaagcagaaggtcgccagagaaaagaaacgtgctgattcagagaaatcattatctgaaaagaatagaacacttgttgaagttgagaagaaaaaagtaacagaagaaaagtgccgtgctgacaatttatttgctaagttagaggagcagaagaaactcaatgaacatttgcgaactagcatacaggttgaaacgaagaatgcaatagaagagaaaaaacgaggagaccatttgtttcagaaattagaagagatgagagaacagactgaatgtttacagagaaaggcaaatgaattctctgcaggtagagatgtaatttcttctggcaagtgtggccggcgacacattgatagaatttctgagaatgcaaacgttaagcttctcaaagagaaacttaagctgaaaaaagaacaactaaagcatgtcaagaatgtgtccaagctagataaagcaaaaactgctttaataagaagagagcttcaaagtttaaagcaagactggacacagctactgggtcggtttaacatgctggatgaccaccttgcacgtggtgttgaagatattcatgtcttaacacagccctcccaggctcccagcccctacacgcctccctacaggccagtccatctcgtgtgcacacaaccaagggaaccgttgaatcagcatccagagatacatggctttgaacagaagctgcttcctaatgattcagttcctgccccatattttcggttgcaggctgggacagttccatttggctcttctatcccaagtgaatacacttcatatcagttgcccagagaaagctgctcacgatcaatctcaggtactagttctgaattatgcccccctcttggtagctctcacagactgctgaagtcaaaatgtcagcacagatcttcatgtccaacatccatatctgatgaaaaattcatgggctcacagggcaaggataacctatttgtctcatcgacagatatcaggaaaaaacaggattcagttgttcccgagctggctcctaaaattagaaatgatagagcattgccttgtggtacgcttacagatagaagagaaacacttggtggtgataggaagagaaaacacaccaaaatgtctcaagacccctctgcttttcttccctcaaaaaatgatttgctacatttgaaatcaaaggtgcctgctaccacttcaaatgttgcattatcctttgatgatgatcctttgtgtctgcagcaaggaaataacaccatatgtgttactgaaggtgacatggataaagctccttcattcagtttcccttctaaagtgtcttgtggaggaaatggctgtactagtagcaagtttgcttcattgatcccctttgaggaaatggtcagggaaaactgcttaaagttgctcaatttggatgatgatgcagatgaggaaaagtttagaaaggcaaaggagagaccccattcaccaaacctgagcatcatccgaccccgtagaactaaactgccaacgtatgcagaacctcacagcttgggtagatctctcaacggttgtcctgccttaggatctgatgccattgattccaagacaaggtccaaagcatcggaagttaaagagcctgtaattcagaaatcgactcaaaattatatccagcttgatccgtcgtcaaatacaatcgagtgtagtggcattgctaaacctctttttgtgaatgataaatccaatgcagctgtcaatgtttcttgtagcaccagtttggttgtagtgccagcgagcacttcttttgacagccttttgcatgagcatgtggcccagaattctgtagcatcttctgctgaggcattagacagtataagcagaccaatgttatcgggaggtggtcattcagattccattttacatttgtccaaggaagtgtctaacaaaaacaactcacatctgatttgtgacaaatcaagtcctgggctgcaagctaatgttcggacaagtgaaacaacagtgaccaagccaaacaattcggtctcgaatagtttgcttcggcaccatcatggatccgaaaaccctccattgcacttagttggatttacaagaatgaaaagaagcaaaatgattaacatatttcggtattgggagatactgagttctcaatctcaaaagcattctgacgaagcttcagttgatggtccactgcttgataaagtgtcaactgacacaatgctacctatagagtag

SEQ ID NO: 18006 - DNA, 1254 bp, Zea mays
  Peptide Sequence Number=SeqID_61381
atggcgctgagccccacgcccacggccgttgctgcaccgccgccggagccgggccccgagcccgcgccgtccgctgagctgccgctgccggacgccatcgcggccgcgctgccgccggacccgtacgagcagctggaggtggcgcgcaagatcacggccgtggccgtggcgtcccgggcctcgcgcctcgagctggaggccgcgcggctacggcagaggctggccgacagggaccgcctcgccgccgagctcgccgacagggccgccaagctcgagcaggcgctccgcgacgccgacgcgcggctccgcagcgcactcgacgacaacgccaagctggccaaggagcgggactcgctcgcgcagacgtccaagaagctggccagggacctcgccaagctggaaaccttcaagcggcacctgatgcagtcgctgggcgatgataattcccaagaaacagtagacataagaacctacgagcaatcggtggcaaaagcgaattcctggaaagacgggctagagaagaacagccatcctgtatcctctctatccgacgagtccgtcgaagccgacagcgtaaatcaggaagtgacgacgaggccatttgagcagaaactgaccatcacgcacatcactccacgcctcacctcggatcctgcgccgaagctgagaaccgccgcgacatccccgagaaggtactccacggcggtgtcgcccaaactggcgtccggcgccacctcgccgcgattggagggccacatggcgatgtcgccatggctaccctcgagcaagatgtcctctgcagccaactcgccacctcgtggacagtctatctcaggtgcttcaggcaccgaatcgttgatattcgcgtatactgttgcgatgcaggagaccctgaggaaggcggacgagatcttcggtgcagaaaacatggacctcttcagggccgacagcagggctcggactcgggctaagccccggaagacggcgaacttcgctccacccgacccagggctcggactcgggctaagccccggaagacggcgaactccgctccgcccgacccagggctcggacttgggctcagccccagaagtcgacgaattccgctccgcccgacctagggctcggacttgggctcagccccagaagacgacgtactccacctcgcccgacctaggggctcggactcgacctcggccacggaagacggactcaacctcgacctcggaggagcctccacatcgcccaacctag

SEQ ID NO: 18007 - DNA, 1023 bp, Zea mays
  Peptide Sequence Number=SeqID_61382
atgggtaaaagtaatattttgtggactctactggctctccatgtctttgcttccatgtgtggtgataagtttctcgcaccaaagagttgcaactttctcatgacaactatacggttagttgtcctgcttcttgagagcaacgacacttctctgtgccttgtgtcatcatatatccagtcaaacaagccaacaacattaccatcctgtgcacattgtctgtttaatgtggatacggtttccattgatggcttcatctcttcactgttggatgagttggatttatgttctctgcaatggaacaaccgcacctgctcaaatgaaaatatcacaaggtgcagttcgcatatggtatcaagtggacttgataccagatgtagtgaaacttgtaatatcttcaagcaaggaaaactatctgaggatactcataactacccagcagagattaatttatgctacttcaccgagctaatttctttgctcgagctctttgggatctatatgagctgcgagtggacatacaacaatgtcgttatccgtcttctggagattctggaattgtgcatgtgccgtgactattcagctgctctgttagtacttgtgagccaacttggaaggtcatttgtcgatgatgttggttacgaggagagaagtgttagtaagctaaggaacaaattatcgttattgttaacaggggcacattttacaaaatcatggagtttaagtgttcagtttactgccattggtgcattggtcagcgtccttccactgccatttgataaaattgttgccactggaagtagacaattatcaggttccttcgatgtggaaatgaaacagatttctgaatggaacttctttgagcaatcaatctctagttgttttgtttgtgaggtttttggtgttctagaggcacggaacggctcctcgcgaactccaatggttgaccgcgtgatcagtgccgaccacgtcagcaggcaacggtcgggaagggtcactggacatgtccggtgtgccactagatag

SEQ ID NO: 18008 - DNA, 300 bp, Zea mays
  Peptide Sequence Number=SeqID_61383
atgaccccaaggcaatgcaaatccactatgttatcccttaatgaaaacctaagcctaaagggtaactgtaatcttgctgacggagagtacatcctcgtgccggagcaaggagctgctcaggaggtagccccagatccagcacccgagcctgcaccagaggacctgcctgccactgctttggaaggcaagcccggttctctggaggagatggttgctgggataacttggccgtccaccttgccaccgggttggactgttgagtgggaccctgcctcagccgaggaggagcatgaggagtga

SEQ ID NO: 18009 - DNA, 360 bp, Zea mays
  Peptide Sequence Number=SeqID_61384
atggagaggggtgatgagaagcctgagggagtggggatggaggcaatggagcctgggcgagtggggatggaagcgatggagcgtgggcgcgagcccgagatacgtggggaagagaagacgtgggctttacccctcatgcggattgggctgggatccctgcagggattgggtcatacaaaggagcccttagaatgcttggtgttatggtggaggcgcctaggggcctcttttatagccccaagggccaaggagtcgttgctcctccatttggaaggcagtggttgccttctgtctgtgggtgcaccggacagtccggtggcacatcggacactcaatccgcaacaccaccgaatcgtctga

SEQ ID NO: 18010 - DNA, 1212 bp, Zea mays
  Peptide Sequence Number=SeqID_61385
atgggggcccacgcccacgcgtcatgcaaccggcgcgccggtcgctacgtgcaagcaactgcaccgccactcgcaccactgccacgcctcctcgactgtggaaccagaaccgcgactcgaggcaaccctgcgtacgacccagcagtgccagccaggcgcgatggtcaatacggccaaaaatgggccggcagtaatggcggtggcaggcgggcggaagcagcggtcacgtcatcagccaagcttacgtcccatcctggggcacgacgcttcgccttcgccataatgatcgcgtcaaaaaagggaccgggaaagggggataccccgaaaaggatccttctccgtgaaggaaacaggctccgagcctcactactgatcagaggttcgaaggctggcccctcggaggggtttaacagccgcctcagagcgtgtgggctccacacccactactggtcagaggttcgaaggccggcccctcggaagggttcaacggccacctcaggccactcgggctccgcgcccactactgatcagggttcgaaggctggccctcgaagggttcacagccgcctcagacatagagcgagggatgaccctgggtacgttcgatacataaccgaggctcgggctacgctcccgagcgacgaacatacttccgactcgcccgaggcccagtcttcgccaagaagcaaccctggccaagtcgccacgccaaccgacaaaatcgcaggggcatttaatgcaaaggcagtcaggcccggcctcaggcaccataggaaactccgcttcgcccgacccagggctcggactcgggctcagccccggaagacggcgaactccgctccgcccgacccagggctcggactcgggctaagccccggaagacggcgaactccgctccgcccgacccagggctcggactcgggctcagccccggaagacgacgaactccgcttcgcccgaccccagggctcggactcagccctggcctccgccgacggtctccgcctcgcccgacccaggggctcggactcgtcctcggcctcggaagacagactcgacctcgacctcggaggagcctccacatcgcccaacctagggcgcggaccggccacgtcatcaggaggcgccatcattaccctaccccaagccgactcaggctacgggaaacaagaccggcgtcccgtctggctcgctccgccagacaagcaatga

SEQ ID NO: 18011 - DNA, 552 bp, Zea mays
  Peptide Sequence Number=SeqID_61386
atgccggggaaggcgaactgttgctgcccatctaggatgcaacattccgccctcttcctcgctttcgtggcgagggtgggagcgaggacctgccggtgcgcttcggggcggcccacgtttgccgttaaaggaacccctcggccgctcttcgatgagccgaaaccaggggtagcggtgtcagcacggacagagacagagttggctcgaaaagaagacttggtcggccggagcctggccgggttgtccgttagcgggaccgacgccagagttgatctgccgaggcctcgggccgggctgatgtcttcgggggacagctggccgaggcctcggggtgaccagccgagccgcctgctcgagccggattcttggaggagacccaggcggcgatggcccgggcgtgatgatgaagttgtccttcagagtggagatcctcggaccacgtcgctgtcggaggctaggtcggacctcgccgaaggtgtagtcgacgccgagggtgctgctgctcccttcaaccgtcaagatccgagcctgcaggatcagattatcttgtag

SEQ ID NO: 18012 - DNA, 745 bp, Zea mays
  Peptide Sequence Number=SeqID_61387
atgagaccgcctgtggccgaggtgaatgacgaggcacactcgcacaaagagaaggggggccaaagattaatacgagctgggactagggagggaaatgctggcgcctgggctctcgtcgcggggccgcgggggcactggcagtgtggcagcgacgacgaggtgaggcgtcgtgagggcgatcgtgcgacgcagacgcagacggagcgcgagcgcaaccagccgcaccggcaccggctctgctgcacatcacatcaggcagcggaggcgatgggccgacggggcacaaactggtggctggggcgctgcacgagcacgacgatatgctacggccgcggctgggtctggggcgtgtcgcgtctggctgtcagtgtcaccaaccgtcgtttacccgtccaggaaaagcgcggggcctcttgccttgcccggcggccgtggagcaagcagaagctgctcctgcggaccgcagcgcctccctccttccggaacggcgggctccggccgtccgccgttctggccccgactccgagcaagcagacccagcgcctcttcacttcacgtgctggagttgaactcggcagatcggaccgacacgaacagatcaaccccaaggcgtcattcgtgcgatcgcgggaaccatcttacccccgtcagccaagagccaataggaggcacaccctgaccccccatgacccagccaaaacagctgccgtgctgtacaaaaacgactgcgaagctgacgacagtg

SEQ ID NO: 18013 - DNA, 1464 bp, Zea mays
  Peptide Sequence Number=SeqID_61388
atggcaaatcctgcgcgcgaggcgaagagggcgcgggggagcgcgaaggctgctgcctctggcagtagcaagccggtgcctcctgcaaaagcagctgcccccggacccagcaaggcgtcggtgagcatgaaagttgccgcctctggcggaggcaggcctcctctgggcggacctacgaaaggacaggagctgccttcgccggggagacgtgttgatgacttcggcacgaatatcagtgtcgaggattatcttgttgggttgggtgagggacagttggttgttgtcccgccttcggtggcaaccactttgccttcggcggtggtaagggcgaagggagccgtgcaggacccgtgggccgccttcggcgcgagcggcgagattctgacagccgctgccactaaggacgtggcgggcaccatgtcccagcggctgagggaggtgtcgcagcagctcacacaacagttgaagaaagcggccgacttcgccgaccgtgttgcgttgggcgtcctgactgcagacatcgctgccgaagtcaagagtcttcgggcgcagcatgcagatgctgcccgggagaagtcgactgcggagagcaaaaaccgcaggctggcggagaaggtggctaccttggaggccgagaagacggacctccggctccggctggcggaggagaggagggaagctaaccaggccgtcactgaagtgcaggttgcgcgagcggaggctaaagtggcgcgggcggagaacagtctcgccagccaacgcgccgaggagtgggaggcaaggttcaatgccctgcgcggccgcgtggacaaggtcgaggcctcggtgcgctcggaggtcgagcggacgcacacgcagttcgtggatgcgtaccgcgatctgggtgcgcggactgcagacttcaaagtacccgtccaagaggcaggccttcgcttcctcgaatggctgcaggaggagctgctggtgctcccgactattgtgaagggtttcatgtcctttgcctccctcgtcacctgcgaggggaccctgaatgcgttgtcccgcgaggcatgccgacactatgaggtcttcgaccaatctgacgagaactttgaacgtgaaattttcaaggccgaagaccctatggtgaagcagtcagcgagggcactcttcgataggatgtggggaccacacggtcgggaggcggttaaggagtggtctgaccgggcgatagagcagatggcacgtgctaaggatgtcgaggaccttagagatctggtcggcgcgccgcccgaggctgaggtcaacccggtgccgccttcaagtgccggtgaaggctcctcggctgcacccatgcctaccatagtcggtgaaggccctttgcgagcccctgcgccgacggccgaagatcccccaaaggtggtggctgagccagcggccgaagaccccatggccgcggccgggccttcgcaagtggctgagtag

SEQ ID NO: 18014 - DNA, 1791 bp, Zea mays
  Peptide Sequence Number=SeqID_61389
atggtgaccaccagttcggtggtggggagaagcaagccgggctgcggcctctgccccgccctcagcttcaaggatcttcatcatccttgctgtggcggggggcgagctgagccggagctctacctccagtatgggccgacgagccacctcttccttcagcattcaggggagagggcgctcaccggcttagcggaggggcggactttgacagcgcggggccggtcggccgcaggcgtcgtcagctccagcatgcatggctcgctggctcagctggctctggcgcagcttccggtgccacctcctaccgctggggcggagtgtggctatctgcccgccgtacgggcggttgttgcgtcgtgcgcaccgggggaccgtccaagacgtcgcacgccgctagggcggcgttcgtgttcttggattgtctcgtgctcgctccggcacgacgcctccgtgcggaggtcggtgctcgcccgtccgggaggacttgagtggggatctgccggtgggcaggtggctgccgtcgttggtggtgaggtggtggcagtcggagaaggtttctccgccgacgagaccgtcgacgccacccgtggactgacctccggctctttggctttgatagcttgtcctcgcccctcgagtggggacgcgggcgagggccttgtcgcagcagcgtctgccctgaggtcatcgatgctgctgtttagccgcccggagcggaggtcattgtcgctgctgatggagcggtcgacggcgagccacctggaatttgtcgtcccgcaagccctccgacgtggaggttgttcatacccgcgggagtggaaccggagttccgtttgtaatggcaccttgagtgccggtaggcgtaggagtccctcgactcggtcggccttgccacccaaggcttctcttgctcagttaaagaaccctcggctgctctgcgatgagccggagccggaggcagcggtgtcagcgtggacagaggtggagtcggctcgagaagaagcttcgttgacctgggagcacgtggcctccttggccgaggaggtgcagcagcgccggctggagcttggccaagtcgtccgccggcgagaccaaccccggagtcgggctgccgagaccatgagctgggctgatgtcctcgggggacagctggctgaggctacggagcggtcggtggaggtgtttgcccgggccgagacccttacggagaccttggctatgatggcccgagcttggtgctggcctcctccttcgaggtggagatccttccgcccgcgtcaccgtccgaggccgggccagattccgccgaaggtggagacgatgccgagggtcctgctgctccctctgttgatgtctgaacctacagggagatatcaagacttgttcgtcggtaacagaatcgtttatccgagcgagagttacttttcacggaaggtgacgagtgaggagtccctcggctcagtcggccttgccgcttacgtgtactccgtcgttttcaggatcccgctatcgaagcagtcgaaaagcgcgaaagatgttctggcagaagactttttccgaggaaaattttttacgcagagggggttccccccttctagcccccgagggagggtcgggctttgccgaggcaaggctgacccttccttgacgcttgtatgttccgggcttcaaaatcttggcgatgatgaatggcccctcccagggaggagtaagcttgtggcgccctcgggcgtcttgccgcagctgaagtaccaagtcccccacttggaggtctcagggccgaacccctag

SEQ ID NO: 18015 - DNA, 1228 bp, Zea mays
  Peptide Sequence Number=SeqID_61390
gagctgttgcctctcttccaccatagacgatctaatcttactcctttcaccatacaacgttagcgaagagaaggtcgcctccgctttacccggcgcatctcctctcgctccgatccctgcggacgacgcgcacgacctcctccttctggccttcgtagagttctgctgcgcctccaacttggcggacgagctgaggcagcccagatcattgatggtcgcggatgacctcacgccgcatgatctgatggccacgaccgacctcacggcgcctcacacctggtatccgtccacgcgtgccatgcgccgccgcgtcgtgtaccactgcgggccaacaaacagcggcaagactcacaacgcgctcgccagcttctcggcggccaagtccggggtgtactgcagtcccctacgcctcctcgccatagagatattcgacaagatgatggccgaccctgtcaggggctttgcatggacgcgcgctctgcttgggctcagggcggacgagatacacctctgcggcgaccctagcaatatccactctagtgactgggtggttgttttctctcgcaagaagatattcgagttgaagtggaaaatcgagatgtctaccaaccacaagtgttgtgttatttatggagctctgccgccagagacacgacaacatcaagcagagttgttcaatgaggagcataatgaatatgatgtcctcatagctaccgatgcagtagggatggggctcaaccttaacattaggagggttgtgttctataccttaatgaaatacgatggggaaaagatggcgtcggttcctacttcacaggtaaaacagattgccacagcaagctccgcctcgcccgaccttgggcctcagcctcacgagaagtctccgcctcgcccgaccccagggctcggcccccgcctcggcctcggaaggtggactccgcctcgcccgaccccagggctcggcctcgacctcgacctcggaaggtggtctccgtctcgcccgaccccagagcccggcctcaacctcgacctcgggaggaatcgcgtcctcgcccgaccccggcctcgacctcaggaggagtctctgcctcgcccgacctcgggctcggaccgaccacgccacagggggctacgggggaacaagaccggcgtcccatccaggctcaccccggtaacaaggctcaaacgctcctccgacggccacgacaccatgtacatagggctctag

SEQ ID NO: 18016 - DNA, 216 bp, Zea mays
  Peptide Sequence Number=SeqID_61391
atgtccggtgcacaccggacagtccggtgccccctttcgaccgttggctcggccacgtgtctcgcgcagatcgcgcgaccgaccgttggcccggccgaccgttggctcaccggacagtccgatgatgatgatgatggttatgactatggtaatggtaaacaaggcgtcgaggcggatctccaggagttccaggacgtcgacgagttcgaggattag

SEQ ID NO: 18017 - DNA, 915 bp, Zea mays
  Peptide Sequence Number=SeqID_61392
atggaatacctctttgatgaaccccgcaaccatcagcttgtggatctcctcgcctatggctctgtgcttttcttcgtcgaaacggcgcagaggctgcttcacgggtcgggctccacctcggatatccagcatgtccgagggactccacgcaaaaacctcggcgttcgcacgaagaaagtcgacgagcactgcttcctatttggggtcgagctcagagccgatccggacttgcttggaggcgtcgttgctggggtcgagagggacggacttaaccgcctttgttggctcgaagttgccagcgtggcacctcgcatctggcacctccctggagaggcactccaggtcggcgatgagggcctcgaactcggcgagggcctcagcgtattccacacactccacgtcgcattcgtacgcgtgtcagtatgtggatccgatggtgatgaccccattggggcccggcatcttgagcttgaggtaggtgtagttggggacgaccatgaacttggtgtagcacggtctctccagcaccgcgtggtaggttcctcggaacccgaccacctcgaacgtgagggtttcctttcggaagttggagggagtcccgaagcagacgggcagatcgagttgtccaaggggctgtacgcgcttcccggggatgatcccgtgaaagggcgccgcaccggcccggatcgtggacagatcgatctgcaagagcccgagggtctcgacatagatgatgttgaggctgctgcctccgtctatgaggaccttggtgagcctgacgttgccgatgacagggtcgacaacgagcgggtactttcctgggctcggcacgcggtcggggtggtcgccttggtcgaaggtgcacaacaacactgtagatcattttcggcggccagggttattttcggcggttga

SEQ ID NO: 18018 - DNA, 1287 bp, Zea mays
  Peptide Sequence Number=SeqID_61393
atggtgaccaccagttcgatggtggggagaagcaagccgggctgcggcctctgccccgccctcagcttcaaggatcttcatcatccttgctgtggcggggggcgagctgagccggagctctacctccagtatgggccgacgagccacctcttccttcagcattcaggggagagggcgctcaccggcttagcggagggggcggactttgacagcgcggggccggtcggccgcaggtgtcgtcagctccagcatgcatggctcgctggctcagctggctctggcgcagcttccggtgccacctcctaccgctggggcggagtgtggctatctgcccgccgtacgggcggttgttgcgccgtgcgcactgggggaccgtccaagacgtcgcacgccgctagggcggcgttcgtgttcttggattgtctcgtgctcgctccggcacgacgcctccgcgtggaggtcgtcggagaaggtttctccaccgacgagaccgtcggcgccacccgtggactgacctccggctctttggctttgatagcttgtcctcgcccctcgagtggggacgcgggcgagggccttgtcgcagcagcgtctgccttgaggtcatcgatgctgctgtttagctgcccggagcggaggtcgtcgtcgctgctgatggagcggtcgacggcgagccacctagaatttgtcgtcccgcaggccctccgacgtggaggttgttcatacccgcgggagtggaatcggagttccgtttgtaatggcaccttgagtgccggtgtttgttcattgtggctgtcgaagcctgaacatctaggtgtttgcccgggccgagacccttacggagaccttggctatgatggcccgagcttggtgctggcctcctccttcgaggtggagatccttccgcccgcgtcgccgtccgaggccgggccagattccgccgaaggtggagacgacgccgagggtcctattgctccctctattgatgacttgttcgtcggtaacagaatcgtttatccgagcgagagttacttttcacggaaggtgacgagtgaggattctgttatcgatatagtcgagaaggcacgaaaaatcgttctggcagaaaagttttcgagcgttaagacttgtccggagtccctcggctcagtcggccttgccacttatgtgtactccgtcgttttcaggatcccgctatcgaagcagtcgaaaagcgcgaaagatgttctggcagaaagactttttccgaggaaaattttttacgcagagggggttccccccttctag

SEQ ID NO: 18019 - DNA, 855 bp, Zea mays
  Peptide Sequence Number=SeqID_61394
atgactctgggtacgtccgatacatggccgaggctcgggctatgctcccgaggtaccctaggacatttccgagaccagcaggagcgattttgtaatggaatcccaccagagggaggcatcgagccctcggaccctatcgaacgggaccgggtccggcaaatcacctgtcaaggcttcgtctgctcaagggacacggtctcgcctcgcccgagcccagcctcgggtggggactgtagtcccaggcgaattcacgcctcgcccgagggcctcctcggcaacgggcgcaccctcgactcgcccgaagcccagctcggacaaggcttcgttgtgaagcaaccatggccaaatcacctcaccaaccgaccgtatcgcaggcgcattcaatgcaaggatcgcctggcgccttatcctgacacgcgtgcctcagtcggcaaggtcgaagaaaacagcgccgctcgcccctcttcgactgctgtgccacccgccagggtgaggctgacagcagctgagtccagcctcaggcgccacaggaagctccgcctcgcccgaacttgggcctcggcctcaggagaagtcttcgcctcgcccgaccctagggctcggcccccgccacggcctcggaaggtggtctccgcctcgcccgaccccagggctcggcctcgacctcgacctcgacctcgaaaggtggtctccgcctcgcctgaccccagggcccagcctcaacctcgacctcgggaggaatcgtgtcctcgcccgaccccggccttggcctcaggaggagtctccgcctcgcccgacctcgggctcggaccgaccacgccacagggggtacatgattaccctacccctagctag

SEQ ID NO: 18020 - DNA, 216 bp, Zea mays
  Peptide Sequence Number=SeqID_61395
atggggtccaggcacagtgcttgctctgccgaggctgagtgccgaggttcttttgttttgcttttgttagtcaccctcctgcggggagagagatacttgatcagagatggttggtttacagatgatgatgatgatggttatgactatggtaatggtaaacaaggcgtcgaggcggatctccaggagttccaggacgtcgacgagttcgaggattag

SEQ ID NO: 18021 - DNA, 405 bp, Zea mays
  Peptide Sequence Number=SeqID_61396
atgcaccatctgagacgaattgttgaaattacagttatacctatgacaaatattgggcctctccgtgagccgccgagaacccttgatctgatgaggtccttctccctcggcgcgagctatccatccgcttcggccttcggaccccgcctaccgaagaagttctgcgcctccaacttggcggacgagctgaggaagcccagatcgttgatggccgcagacgacctcacggcgcgcgatctgatgacggccgcggccgacctcacggcacctcaaacctggtatccttccgcgcgcgccatgcgccgccgcgtcgtgtaccactgcgggccaacaaacagcggcaagacacacaacgcgctcgccagcttctcggcggctgttggggacttgttctcgaatgcttag

SEQ ID NO: 18022 - DNA, 423 bp, Zea mays
  Peptide Sequence Number=SeqID_61397
atggccgcaataagacacaacatcatcaaaccacgtttgggtcatgtatgtagtatcaagggggacctcggcattagagcctccacattaacagctcatgtaacaacacgccatacctggtgcaagaccatgcatgctggaagtatgggacgtgaggcaccacaaactgtgttgcgcccgcgctgccatagtcaacatcatgcccacgtctactggcgtcgccaaggccatcgcattggtgcacccaacctcaagggcaagctcaatgcgatcgcgctccgggtgcccaccttgaacgtctctgtcgtcgacctcattgtgcaggtctccaagaagacgctcgtcgaggaggtgaaccatcttttttttgcattttggccctttttgcaaaagtttatcacaaatacacaattttttgtttga

SEQ ID NO: 18023 - DNA, 474 bp, Zea mays
  Peptide Sequence Number=SeqID_61398
atggcccagtgctacatctggttcagccgcaccaggttccgatcgtctataaaaggagccccagggcccgcgggtcaggcgttcctaggcatcccgctcgtcagcccgttttggccaaacgcgcaagcgcgtactcgccacgcggtcgctgtcgtgtgggctcgcttaccagggtcttcttcttccctgtttttgcgccggaaacaaactcccgcgcgtagggcatgcaacaacccacacgtcgtgcgcatcggagccgagtcaatcgcgcgcacaacggctgccgagttccacgcggatggcgcctggtttccggaccataaaattgtcgtgccgccgccttacccccatcttcgggattgggctccgccctctgagatgggcaaggtgaaagggaagcagcgtcaggacaagttctaccacctagccaaggcgcttgtgtattggagtcgtgcggcattcaggctgctctag

SEQ ID NO: 18024 - DNA, 243 bp, Zea mays
  Peptide Sequence Number=SeqID_61399
atggcagtgaagctagagcaaggacttagcaccgatggacataaagcaatggtatcatggttggctacacttatggatgcccattgttcaccatttaaggagatggaaatgaatgctcaaggcaaaggttgccgcctcctagatggcttggtggtagttccccgtgagctcttcaacgaagattgtgaagaggccgcggtggtgattgtgagaggcgttgtccttgcctcgccggagcggtga

SEQ ID NO: 18025 - DNA, 464 bp, Zea mays
  Peptide Sequence Number=SeqID_61400
atgaccgccatcgaagcaaaatcatcccaagggcctccctacactgaccactcccctactgcccttgcccctttcgggtaccaggatgatcttcaggtgactcgtaacctcactgctaaacgtagcaatacatacaaacatgccgccaaccacgagatctacggtctggatcccaacccaccaaagcgcgaccgcggagcagattcagctattcacggcgcacggcggatgacgaccagttccgatggtgatagggcaatcccggcggtgcaggccgccattctcgaatgccaaggccgccacgcacccagcagataccagagaatcacctggagggtcttcgagggtgcgaccgcgatggattacagaatccctccacggctgcgccagtcttcccccgaccaatttctttcacctgtttgcggattggatgaagggaccgagggagtacgtcaacgcgccag

SEQ ID NO: 18026 - DNA, 396 bp, Zea mays
  Peptide Sequence Number=SeqID_61401
atgtggtccatgttcatgcctactccatcgcctaaattggagacacacgaccttaacaagactgtcatgctagcttctggtactgccattggatatggttcaacattgactatgactgatacatcgaacaagattaagaagaggacaaaaggagatgtttctgtactgaatcctactcttataatttcagttcctgcaattttggatcgtatcagagatgcagtgtttaagaaagttggtgagaagggtggcctcacaaaaaagctgtttgattttgcatataagcggaatcttgcatcaataagggggtctgattatccgatgtcgagaggagagtcctcgcagacccacgcaggacacataagttcgacggccacggggccccgtcgaacttaa

SEQ ID NO: 18027 - DNA, 492 bp, Zea mays
  Peptide Sequence Number=SeqID_61402
atggcgcctcctgttgacgtggctggtctgcgccctaggttgggcgatgtggaagctcctccgaagccgaggtcgagtctgtcttccgtggtcgaggtcgagtccgagcccttgggtcgggcgaggcggagttcgtcgtcttctagggctgagcccaagtccgagccctgggtcgggaggagcggagttcgtcgtcttccgggacttagcccgagtccgagccctgggtcgggcggagcggagttcgccgtcttccgggacttagcccgactttatgctgatgggggttaccagctgagaattaggagccttgagggtatccctaattatggtccccgacatttgtataccggtgttggggaccttcggcttctgaaggtaccttcaaacttggacctttcggacttgagtcaaaatcacagtgtgaagaagcacaagggatacgaaggatggaacgaagccgaagctgtgcgcaagggagcttcggcgtga

SEQ ID NO: 18028 - DNA, 639 bp, Zea mays
  Peptide Sequence Number=SeqID_61403
atggagagaggcggccatgggaggagaaacaacaacctgctcccaggcgtgacttcaatgaggactgagcacgggggcacgacagggctgagggcgagctcggcgatcaccaaggcgaggtatggctcgacggcggtggtggccggaatcggctggtccacgtgcgaaggcagaggctatgtgcgcaaggaatcgaagaatggggcagaggcttacccggtctacgttcaccggcggtcgggtgaagtccggcgaccgtggactggcttctccggcgaggcaaagtccgattccttgctcggggagcttcaccgcgacatgcatagtctcttccgagggtcgggcgtggctgggaagggctctgcaggccggtctacagtggcgggggatcgggtggccgcgggcacgctgtctgcagggcaaacgctggtgatctccggctccggtgaggtcgagcgtgcgcggaggagtacgatcgacgtctatgggggctttataggcgcgggcgcgggcaacggcgccggctcggctttggcgcgacgcggggcacgcgggggcccgcgcgggcgtgctttggcgagctcagagcgcgtcgaacacgtggctctttgcttctgcttgtgttcttccctctgctga

SEQ ID NO: 18029 - DNA, 408 bp, Zea mays
  Peptide Sequence Number=SeqID_61404
atgccggacctccgaaccctcatcgccggaccgcgtcggcgctccctcgccgctagggttaaggtgacggcccgtcttcaccttcggcgaggtggacctccgccacgtctcgctcccatccttgcccgtctccggcctgtcccccttccgcgcggctgccgtggcggctccgcgagcgattttagagatatattcgacgtcaaccacttcaaggagtcgttgaaggaagacattgtgatcgtggattccctaccactggattatagaagggcgaaaccgtacgtgagagcacccacctcctggtccaaggcttccttctataaagactgcgcaaaagtcctgaggaagttcaaagtggtgaggtttacccacacggattcatggatcgtgaacaacggcttcccttaa

SEQ ID NO: 18030 - DNA, 606 bp, Zea mays
  Peptide Sequence Number=SeqID_61405
atgtatatgtatgagcatgaggaaaattatgaagaaagtatttgtagggactttaaaaatgattttgaagaggattctatcaaagagtattaccatcacacagaggacgaaaccaaagactatgaaccatgtacaacagtcttcaacccaagaatcaccgagcattgtgatcttaggggcgagggagtggaaaaaggagttgcttgtggtttggtagaggggattttatcaggtgccacacaacaacaggtgcgacggaggggagggggtggtattgccagtgatgatggtggcggtgggtgtgctgtaaagagggcgtggggcagtggtagtgcgcatggagatggggcacacgtgcattgggaacaggggcagtgctttgattctcatggggaggaacctccccagcgtgatgcccggcgacggagaaacaaacgctggaatgtgcgtcgccatcacgaagctggagaacaggaatcagcacaaccctatctcggaacgaagcctcagaagtgggagaaactcctgatgaacaggtacaccgagaaagatgcaactctcgttgccgtgatcgccaaaaagctcaagaacaagagcaggaactag

SEQ ID NO: 18031 - DNA, 549 bp, Zea mays
  Peptide Sequence Number=SeqID_61406
atgaaggattgtccctctcgcctaaggaccggtttgtcatcactccttacctatactcttatcaagtacaaccactcgagactgtatgggcagtcactcaatctgaacttgtacgatccgaaccccagggttatgatggcttgggagcaccgggaggataaggaaggggaatgttttgtacggtttgggcatggtggtggcctgactccttccggtataatcgttttgaaaaggaggtcattgatcgggtttcatctttcgaaggtcctcaaaaacacaactaacatgttttccaagtataatacattcacaggaaccttcggcctcggaatgaagctgtacacgatacgaaaagtatggtctgggagaaggatgaaccagttccgaagctacgcaaggagaagcttcggcttagcagtggaaagtgaaatcgacttaaagaggaaaaggctatctagtccccgatggattgtccttaagtcaatagtaaatatcaagggcatgaatttacttttacacaggctgcgtcctgtgcctataaatagatga

SEQ ID NO: 18032 - DNA, 525 bp, Zea mays
  Peptide Sequence Number=SeqID_61407
atgggtgaaacactcttgggaaagatgccatctaggactcgtgcacatgacggcgccggtacttcctgtggtcaggaagacacgcccaatccaccacctgtaccgccaatattggccgaggctatcgctgccttggttaatgcgaccgctgacaatacccgctttctgcgtgaaatggcgggaaatcaattccagcaaaaaggcggaagggcttatccacagggaccacgtgagacttcatacctggacttctctgaaacccgtcccccactcttcgttaaagctgaagaccctctggaagccgacgaatggtatgcaattgatcaagtaaatactgacctgaaaaagaagaattgctttatgagaggcctcaacaaccggcttcaaagaaaaatggccacctgcctagatctctcctacagtagggctatcagcacagcgctggcagtagaagctaagaacacatgcccaggaaaattgaatggatttggaggtgacaggtccaatcagggacctgaaaagtga

SEQ ID NO: 18033 - DNA, 600 bp, Zea mays
  Peptide Sequence Number=SeqID_61408
atggagctctggctcggctcacccaaccggcctgggccgaaaaccacattgctcgcgtacacacttggccagctgccggaattgtttaaagtattcatgggtggtgaggtcatgccgacgtcaagaatgacctcatctctacgggcgcctgtaccactgatgactgggcccgggtattctctgtattttgaaccgcatggagttggaccagggatgcaactacgtggtgctcaaccgccgccgggagcttcgggattcaggcggagtccgcatgacctcgcgaccgagcccggagtacttaagcggcgcggtgtcctccccttcgcactcaagtcgccgtacgcgctgcccttgcaactctcgccattaccgcgcagagaaaccgtgaggagtcgagtgccttgtgccgccgcgagtaatcctcgcaaagacgtcgatccggtcctcggtggggtgtccgtgggctttgtctggccggtagggaggtgtccgtggcaatacctctcggaatccatcgctggcatcgccggaattcctcaccgtacttcggcttccaccgtgcgccgagcacagggctgcctgctgccttcgtgctggtaa

SEQ ID NO: 18034 - DNA, 567 bp, Zea mays
  Peptide Sequence Number=SeqID_61409
atggagctctggctcggctcacccaaccggcctgggccgaaaaccacattgctcgcgtacacacttggccagctgccggaattgtttaaagtattcatgggtggtgaggtcatgccgacgtcaagaatgacctcatctctacgggcgcctgtaccactgatgactgggcccgggtattctctgtattttgaaccgcatggagttggaccagggatgcaactacgtggtgctcaaccgccgccgggagcttcgggattcaggcggagtccgcatgacctcgcgaccgagcccggagtacttaagcggcgcggtgtcctccccttcgcactcaagtcgccgtacgcgctgcccttgcaactctcgccattaccgcgcagagaaaccgtgaggagtcgagtgccttgtgccgccgcgagtaatcctcgcaaagacgttgatccggtcctcggtggggtgtccgtgggctttgtctggccggtagggaggtgtccgtggcaatacctctcggaatccgtcgctggcatcgctggaattcctcaccgtacttcggcttccgccgtgcgctaa

SEQ ID NO: 18035 - DNA, 93 bp, Zea mays
  Peptide Sequence Number=SeqID_61410
atggcgaactccggcgacggcgtgcggatgtggacgtgtcacaaatctacccctcttaaaaagaatctcgtcctcgagattagggaaggctag

SEQ ID NO: 18036 - DNA, 789 bp, Zea mays
  Peptide Sequence Number=SeqID_61411
atgacttctcacggatcctcggacgaagggaatgcacagtcccacactgatggacttgcacgagagggtttcccccgtattttgtgggaggtacttcaaggagctggttacacgacgcctccccagtacacggtggagttgttcgagaagcaccgagtgccccgctgtagggatactatcgaggcgattgctcttcacggactgaccaccttctgcggattccaccccttggagctgtccactcaccccattggcttgttccccgcggagaaggaggacgaccccatgtggaaggaccgagtggagcatgctaaggatatctgggctatctacccaggtcagactgctcacttgacggtgcgatgcatgaatgccctgtatcgtctgcaagtgatgcgtggagaggcaatgtcccatctaatggcattgttggaggcaaccaagatcactttggataacagagaggaacttgtggttgatttgtccactaagatggtggaaaaagacctacaggtggaacagttgtcaaatgagatccaagagcttgaggagctagtgggaacgagggagaacaccatcgaggttctcgaggatcagcttatcaacactcagcagcaacttgcggaggctaaccagcatctggatatgcatcaccaggagatccaggacatggaggccaacgaggatgtcgatatcgagggaggagaggagcctgcctctagcttggacactgctggctcagggagaccaccttcccctgagtcgagcgttgcctcgtttgctcactag

SEQ ID NO: 18037 - DNA, 330 bp, Zea mays
  Peptide Sequence Number=SeqID_61412
atggtggtggtagtgggagctaggtccaggaagcttgtgaatgacttgccgaagcaacagaagcggcaggttgattacccacgtattctgtgtggcccttgtcctcaccacagaataagcattagagtgtcctgggctgatgtaacaccccaggtgttacttaggattttcactcaagactacacaaatttcagcctcgctgacggagagtacgtcctcgtgccggagcaaggagttgctcaggaggtagccccggatccagcaccagagcctgccccagaggatctgcctgccccagctttggaaggcaagccccggttttatgcataa

SEQ ID NO: 18038 - DNA, 171 bp, Zea mays
  Peptide Sequence Number=SeqID_61413
atggcgcctcctgttgacgtggccggtccgcgccctaggttgggcgatgtggaggctcctccgaggtcgaggtcgagtccgtcttccgtggccgaggtcgagtccgagcccctagcccgagtccgagccctggatcgggcggagcggagttcgccgtcttccggggcttag

SEQ ID NO: 18039 - DNA, 2241 bp, Zea mays
  Peptide Sequence Number=SeqID_61414
atgaacaagacaccggcactcaaggtgccattacaaatggaactccggttccacctctgcaggtacgaacaaccccacacgattggggggcctgtggagcaacaaaaggccgacgggtggctcatcgccgcccgctccaacaacgacgacttctgctctgaggggccgaacagcagcagcgatgacctcagggcggatgctgctgccatagggccctcgcccacttcctcactcgagaggcaaggacgagcagaaggccgtagagttggaggtcagtccgtgggcggcaccggctatctcgtcgacggagaaacctcttccggctgccgtggcggaaggcggcgccggaagcggctccaaagccgctcgggccagagagccgggcacgcggcagctgccagcgccacgaacggcgaacacccttccccccgatcactgagggaaggagcgggccgctgcccgcgcagagaccgaccccaactcggcgcactcccctccccagctctgatgatgaacatccttgaagctgagggaggggcagaggccgcagcccggcttgcttctccccacccaggggctggtggtcaccgtcttggggcaaaagaagccaaaccgccgcgcgcggtgcgcgcaactgcccagcggttacaagcattcctccactttcgcccagaccagtgggtgaaagggcggacagccatgcaggcagcatgcgaccgcgccaagtgggcgcaccccttcgactccaacacgcccagcacgggggcccaggcccacacgtcatgcaaccggcgcgccggttgctacatgcgagcaactgcaccgccactcacgccgctaccgcgcctcctcgactgcggaaccagtaccgcgactcgaggcaaccctgtgtatgacccaacagtgccagccaggcgcatcggtcacgggtcagtcagatgcaggagaaggagcgacggtcaatacggccaaaaatgggtcgataataatggcggtggcaggcgggcagaagcagcggtcacatcgtcagccaagctcacgtcccatccagggacacaagggaaccctctcaagtggacaggcggcacctttggcaggagaagcggacgacgcttcgccttcgccataatgaccgcgtcaaaaaaggctggcccctcggaggggttcaacagccgcctcagagcgctcgggctccgcgcccactactggctggccctcgaaggggttcacagccgcctcagacgcagagcgagggatgaccctgggtacgttcgatacataaccaaggctcgggctacgctcccgagggcgcggtccactcaagggacacaatctcgcctcgcccgagcccagcctcgggcaagggcagtcgaccccggaggattcacgtctcgcccaagggccccctcaggcaacggacacaccttcggcttgcccgaggcccagtcttcgccaagaagcaaccttggcccgatcgctacgccgaccgaccgtttcgcaggagcatttaatgcaaagggctcggactcgggctcacacccggaagacgacgaactccgcttcgcccgaccccagggctcggactcgggctcagccccggaagacgacgaacttcgcctcgcccgacccagggctcagactcgggctcagccccggaagacgacgaactccgcctcgcccgacccagggctcggactcgggcttagccccggaagacgacgaactccgcctcgcccgaccccagggctcggactcgggctcagccccggaagacgacgaactccgcctcgcccgacccagggctcggactcgggctcagccccggaagacgacgaactccgcctcgcccgacccagggctcggactcgggctcagccctggcttcagccgacggtctccacctcgcccgacccaggggctcggactcgacctcggcctcggatgacagactcgacctcgacctcggaggagcctccgcctcgcccaacccagggctcggaccgaccacgtcacaggaggggccatcattaccctacctggctctggctacggggaacaagaccagcgtcccatctggttcgccccggtaaacaagtaatgatggcgccccacatgctcatgacgacagcgactctcagcccccttacggaagcaaggagacgtcagcaaggactcgacagccccgacagctgtccttccgccaggctccagcgctcctccgacggccacgacaccacatga

SEQ ID NO: 18040 - DNA, 1011 bp, Zea mays
  Peptide Sequence Number=SeqID_61415
atgacgctggaggctctgtgcccgaccagcagcgacgtcctcgtctacgacaccttcaacgccgccgccgcatgcgccgctgcttctgcggggaccttccttttcggcaatgcaccaccggtggaggtgccggcggcggcggcggcccaggcgaacggggagaacagcgtgcagcaggggcggaggaagcggcggcgacggcagaggagcaccaagaacgccgaggacgccgagagccagcggatgacccacatcgccgtcgagcgcaaccgccgccgccagatgaacgagtacctcgccgcgctccgctcgctcatgccggactcctacgtccaccggagcgatcaggcgtccgtggtcagtggcgcaatcgatttcgtgaaggagctggagcagcagctgcaatccctggaggcccagaagctggcgctgaagcggcagctgcagcagcagcagcagcgcagcgtcacggccgcgatacgcgacgacgcggcgcagccggctcgaggccgtgatgacatcggcgcgggcgcgggcggggacgccgcggcgcgcagcgaggtgtcggcgccggagccagacccgcctccgttcgcgcggttcttccggtacccgcagtacgcgcggcggcacgcggcggcgcgggaggacgccggcgcggaggagacgagccgcgcctccgcggtggcggacgtggaggtgggcgtggtggtggacgcgcacgccagcctgcgcgtgatggcgccgcggaggcccgggcagcttctgcggatggtggccgggatgcaggcgctcggcctcgccgtgctgcacctcaacgtggccaccgccgcggtcgacgcgacggcgctctacacgctcagcctcaaggtggaggaagggtgcgccctggcgacggcggaggagatcgccgcggcggtgcaccacgtcctatgcatcatcgacgccgaggcgacgccgcagaggctgctcgctgccggagcaccagggacagggcagccggacgtctag

SEQ ID NO: 18041 - DNA, 531 bp, Zea mays
  Peptide Sequence Number=SeqID_61416
atgtcacgtaagtcgctactgatcgaccttgaattcttgtgtgctgggacgatggtcgttgctgacgttgggtactacctcgctgatgagctcggggtgcacttcatttggcagcacaaccaagagtcatcggtactcggcataccgcgcgcgttcgacgactactatatcgagtactgtggcgtcatcttggcgccggaggtaagtttgatagctaatattctgagtgcacctagaaaactcgtcaaactctctgggcgacaagataattcaattgaactagtcgattggcaaagctgcatcgcggttgaaacgtgtcactggcaatggcaatgtagaaaatgcggctatgaaagacgaaacagaagtagaaccatcctaaaaattgggatttcctcattgagcgacaacgagcatgtggtggaaaacttgaacgaacatggttttgtgcaaggctacatgcccattatccagaaaagagagtgcagcaatagggtcgcaggttcatctggtcaaaattgctgcagctag

SEQ ID NO: 18042 - DNA, 585 bp, Zea mays
  Peptide Sequence Number=SeqID_61417
atggcgcctactactagcagcacagagcatgcacacgtcaagcacatcacgttgcaccagttcctgaagcaacagcagctgcagcagcaccggatgaagcccgccgtgatgtggggctggccagcgacggcggcagctatcggccgccacgtgcccgacgacgtcgcggacgacgacgacgacggcgacggcctcggcggggcgtggccgccgcgctcgtacacgtgcgcgttctgccgccgcgagttcaagtccgcgcaggccttgggtgggcacatgaacgtgcaccgccgggaccgagccaagatgcgcggcggacaccagcatggcagcgccgcggcgcagctcggaggcgcggcgtcgtcgccggccacggacgagacgccccacgctgcgaagtacgcggtgttgtacccgatactgaactccagtgccgccggcgcggtcctcattcccagcggcgacgtgctgctctcggccgggccgctggcgctggcgcccgcgcacgaccggtgccacgtcatcgacgacgaggtcgagggagacaaggacgtcgacctggagctgcgcctctggtggccgtga

SEQ ID NO: 18043 - DNA, 213 bp, Zea mays
  Peptide Sequence Number=SeqID_61418
atgtcctcgcgtcctgcaagcatgtactttcaagaaagagatccaaaacaggttttcagcttgttccaacggagcggagttgcattcagctatatactatacaacggtgtgcagttactgacaaagttaataatttttacccacactccaggtggaaagcttgggcaaaattgcgaaagggcctctagcgtaatggttaaggcttccgagtag

SEQ ID NO: 18044 - DNA, 282 bp, Zea mays
  Peptide Sequence Number=SeqID_61419
atggatggacattctggaggcccaaactacgccattgtcgttattggccatccagagcctagagagttcgtcgagaacgtgcaagacccctacctaacacgccaactatcagtgtttcgaacatctactccgacaataggggtacaagcgggtgagagtgagaataagagctcccaagtaccttatgcatgggtggacctaaagactatgggactagatcctaaactaagccttggacatcacggtggctcacgccttggctccagcctccgagtcttctag

SEQ ID NO: 18045 - DNA, 180 bp, Zea mays
  Peptide Sequence Number=SeqID_61420
atggctttggcgtcggccaacgagatttctctcctagctctcggtccatggtgtggattcatgtggtgtggagggtttgaaggcttaggcggggttcacggccttggttatcgggacaaggcgacgagagatctatgggcaggaagaagtacctgggtcatggggcctgcatggaagtga

SEQ ID NO: 18046 - DNA, 933 bp, Zea mays
  Peptide Sequence Number=SeqID_61421
atggccggcctcgacctcggcaccgctgcgacgcgctacgttcatcagctccaccacctccaccctgaccttcagctacagcacaactacgccaagcagccggaaccctccgaggatgaccctaatggcagcggcggcggcaacagcaacaacggcgggccgtatggtgatcacgacggcgggtcgtcctcatccggcccagccggagatgggcacggtggcagcggcggtaacggggagatggtagcccgccggccccgtgggcgcccagcgggctcgaagaataagccgaagcccccggtgatcatcacgcgggagagcgccaacacgctgcgagcccacatcctggaggtggcgagcggctgcgacgtgttcgagagtgtctccacgtacgcgcgccggcggcagcgcggcgtctgcgtgctgagcggcagcggcgaggtcaccaacgtgacgctgcggcagccgtcggcgcccacgggcgccgttgtgacgctgcacgggaggttcgagatcctgtcgctgtcgggttccttccttccgccgccggctccccccggcgccaccagcctcaccatcttcctcgcgggggggcaggggcaggtggtcggtgggaacgtcgtgggtgcgctctacgccgccggccccgtcatcgtcatcgccgcgtccttcgccaacgtcgcctacgagcgcctccccctggaggaggaagaggcggctcagcaggcagcgccacccggcctccagatgcagccacccagcggtggtgtcgatggcgctggaggcatgggcggtgggccgttccctcccgacccgtcggctgccggtctgccgttcttcaacctgccgctcaacaacatgactggtggtggatcacagatcccgccgggcgccgacggccatggttgggccggtgcacggccaccgttctga

SEQ ID NO: 18047 - DNA, 402 bp, Zea mays
  Peptide Sequence Number=SeqID_61422
atgacccagtccgacactattaaaatggggcccgtgttagcccaacccgagagcttctatacaagagccaatacctttagcaaatcgtttggcaaattcctccttgggatgcatgtcgtcgcagcaaacgttgagggaggcctcgccaggacatgtgaccccaagcggaaggaggcagcgcagctgtacaataccaggatccacaagatggtcgctggcctcaacgtcgatatgggcttcacaaccatgttggtgttgctggacatctctcacctcctagacgacctcatggagcacagggagaagtactgcttctccgagaccactaacggatgctgcaggacatcttctccgtctagcagcaccaagggagccagggaggagtatggcttctccgtctag

SEQ ID NO: 18048 - DNA, 1893 bp, Zea mays
  Peptide Sequence Number=SeqID_61423
atgccgccgcccccagccgtgccacacgacgtgggtgctgtcctccgcctcctggagtcccgcgaccttcccgccgccgcgcgcctcgccgccggctctgcttcctcctcgccgctcccgctcgccgcggtcctcctacaccgcccgctgcccccgcgcctcggctacagcctccacgcccgcgcagcgcgtgcgggcctcctcgcggaccgctaccttgctaacgcgctgctcgcgttctacgtccgcctcccggaccacctgcctcacgcgctcagggcgttcgacgacctgccccgccgcgacgtcgtcgcgcactcctccgtcctcgctgcattcctccgtgcgggtctcccgcgccgcgcgctcctccagctcaggaccatggcctccggcggctacggcgctgacgacgacgtcgcccccagcgcgcacgcgctttccgcctccgccaaggcgtgcgccgtgctgcacgacctccgcgcgggagcctgcgtgcacgggaccaccgttgtgcgagggtacggcgacgatggcgtcgtgctgagcgcgctcgtggacatgtacggccactcgggtgcgccgggcgacgcgcggaaggcgttcgaggaaatgcgcgcaccggatgggatatgctacacgtcgttgatatcagcattcgtgcggaacgactggttcgacgaggccctgcggtggtttcaggctatgctcaggacagatggggtttggccggacggctgcacatttggctctatgatgtcggcgcttgggaacatgaagagagcgaggcagggtagggaggcacacgcgcaggttgtgacacgtggcctgtgtgggaacgtcatcgtggagagcagcacacttgacatgtatgccaagtgtggtatgatggtggatgcacgcaaggtattcgacaggatgaaggctccgaatgcagtttcatggtgtgccctgcttggggggtattgtcaaactgggaagcatgagaaggttctctcgttgtttcgacagatgcatatgcaggagcaggacgatgactggtatagcttagggactcttctgcgatcttgtgctggtctgtctgcagtgaagctaggaaaagaaatccactgccgttctatgaggatgagaggatgcggagatgtcattgttgaatccgcactcgtggacctgtacgcaaaatgtggtgcagtagactatgcctacagagtattcaaaatgagcagtgtccgcaacatgattacttggaatgccatgatttgtggttgtgctcagaatggccatggtgagcgagccatcagcctgttcaatgagatggttagaggaggggtcaagccagactacatcagtttcattggtgttctttttgcttgtagccatactgggatggttgaagagggaaggaactacttcaactcaatgagcaaggactatggtattccccctggtattgaacattacaattgcattgttgacctcctcagtagagtggagcttctagaagaggctgaagatcttgtaaacaagtcacaatttagagatgattcatcactgtgggcagcaatacttggtgcctgtgccacacatactaacccagatgtagcagtaagggttgcaaagaagatgatggaattggagcctcaataccacctgagctatgttcttcttgaaaatgtgtataggacgattgggcattgggaagacgctgtaaaggtaaggaagctgatgaaatcaagaaaggtaaagaaagaacctggaacaagctggattaatgcaaacagaagcaaactatacatgtgtaatgctaagggggcagcctcagagcctgtagcttctgaggacttcaggaagtgcagttcattgactgatttagcttgtgattttggtatctga

SEQ ID NO: 18049 - DNA, 255 bp, Zea mays
  Peptide Sequence Number=SeqID_61424
atggacagtctcttgtctaactatacagaggaggggcaaagtcctgagctaataccaagtcttgtgcaagagctggaccccgccattggtgctgaaggagatgaggctgcatcctgtcttgaaggcatcagttctgcgccttgctgggctcattgctcatttatcctggagactgattgtgctgcaggggctagaaagctaaggtgtgatgtcattgatacaaccactgatccaagaagctcttcaagaaagtga

SEQ ID NO: 18050 - DNA, 1219 bp, Zea mays
  Peptide Sequence Number=SeqID_61425
actcgctcctccactgctcagtccactccgtcagacccagtctctactcctcctcccacctcgccagctcctgcagctcttgagccttccaccacacccgctgctaccaccacctccaccactccagcttccattgctcctgctcccgcttccgctccacctattcctccacctcgctattgggagcgtgacgagactgaggtgcgaccactcactgctaatcctcgactgctcaaccttcaatgggccacggctgcaggtcggtgcagagtcaaagggttgcatcacctatctgctaggtttatactcccttctcaccttcggtggcagatatgttgaggagtgggtcaaagttttctatgccatagtttggatagacccagatcatcagtggatgaggttcagatttgagcatgaggatcctgcacagtcccaggccacccttgaggcctctagacttcagtttggcttctatcgcctagctcctgaggacacaactctagctccagatctagttgatccactggcatcagatctcagggttgaggacgaggccatccgacagtttgaggatcagggtgcagctggtgatacttcttctgatgatgatgaggatctagggattccgccaccacctcctgtgccacctcgttcccatgatcacgaggctggtggctccagtgttgctcctctggctcctccagcgttaccgctctggcttccatccttcagtcactcactcagcagcaggctctcatggtcacagagcatgcccatcaggcagcagagtgttccgatccctacagtaaagtctgctcctcctccagcacttcaggctgtcattgtgccatccattcagtcaggaccccagctccacttctttggtcctaccatctctccgctcaggccagtcaccctggacttctcgacccaggtcgtcggtctaatcaatgctcagccaccagtgcctctagcatctgatgtcaccactgctatcgtggttgtttccgtgactacttcagctcctgcagatcctgcaccacagccagcgtcagagtcatcaccagttatagcatctactgcagatcctagatccgagacggactcagatactttgctcgtgatgtttgttaatgactgtgtgtattatgttttcacctatgatgttgtcaccagtcgttcagttcttgttcatggacttcatttcatacttatgtga

SEQ ID NO: 18051 - DNA, 159 bp, Zea mays
  Peptide Sequence Number=SeqID_61426
atggcggtcggcgatgctccctactccggtgaaactccggtgagggtgctcgactgtgggcttggggaaaacgcggggagtgcaaccgagggtcggtgcctaaagggtttcgtgccagggataaggataaatcttatccctaaggccggtttgtcttag

SEQ ID NO: 18052 - DNA, 507 bp, Zea mays
  Peptide Sequence Number=SeqID_61427
atgccgcttgggccaaaaccctgggtcggcccaccaaacaatccgtccgagggccaaaccagggaccggcgccgacaggcggcccccacctaccagtgggcgtctcgaacccacgcaacgcagtgcgctctgcccaatccgtcgggatcgaccacgctggcgtgggccaatgccggggggaagtcaactagaacgtggagcagaggagcggaaatcgccgcgaagatcgggctagacgatgtctcgaccgatttggcttggtggggcatcgtcgcctgccatggcgccaccgtggtgtcgttcgtcgccgtgggcgaggccaaggatgtagtggttctggaagagggttgggaagacgcaggagattacgacaaacatgctggtacctttgggtcggccgaagatggtcggagtcagccggtctacgtctcccagcggttggagctcgacgatgctccggtgaagcagagctctagcttgagcctccgaaagctccatgtaacttag

SEQ ID NO: 18053 - DNA, 183 bp, Zea mays
  Peptide Sequence Number=SeqID_61428
atgaagcatgattctgctttcgaagatgcattcttagagccgaagcaactgtttgtacctgtatgttctgcattgcctaaggaacgtcttttgaacttcttcgccttctatttcagcggtattcgcgttgacttttcacgcttcgccttatatttcggcggtatttggctctgcattccctaa

SEQ ID NO: 18054 - DNA, 942 bp, Zea mays
  Peptide Sequence Number=SeqID_61429
atgcctcgctccacttgcatccaccgcgcccttccaccttacaggcctctagatgggaggagtgcaaccccatgggggttggcattcttccgctatcgctcggcttcaaggattttcatcacgcagcccggtcgcaacctccggtcggtggtcatccacaaggatgactaccagccttgtggtggagagaagcgagccgggctgcagcctcccccctaccctcagcttcaaggatcattcgggggagaatggcgttcgccagccttgcgaaggaggcaaacttcggctacgtggggtcgaccgtctgaggcgccgtcagctgccgcgtgcctggctcctcggcctgggtggccttggtgccgcctccggcgctgcctcctgccgcttggatggggcgtggctgttcgtccattgcacgggcgacggttgcgccatgcgcaggtcggccacatccacggcttctcccgcgccgccggccgcaccggggggtcgtacaagacgtcatacgccgcgggggcggcggcggcggcgttcttggatggtcttgtcctcactccagcagtgaggaagggagcgaggacctcttcgcgcgtgctagggcagccgccgcccatcggtgcagaggtggtcgctgccgctggtggggctgaggtggtcgctgccgctggtgaggctgcccactgcagaggtggttgcctctgctggcgataccgtcagtgccacctgctaccggacccctggctctttggctttaatggcctcgttgtcgccccccaggtggccaccgccgttggtgttgatgtggtcacctccgccgacgagccgctcggagctagctatccaatggtccttactggtgtggagggtggtggagcgtgcaggcccacggtacaggatcaggctgagcggctgcacgggctccggaccaacccaggagactaa

SEQ ID NO: 18055 - DNA, 525 bp, Zea mays
  Peptide Sequence Number=SeqID_61430
atgaagaagcgtaacatcaatggcagtccttcaaaattgatgaagaagatggtgacaaagcggatgaaagcagtggaatccccgacaagaaaggagctaaaaatcacaaaggacattgtgcaccttatatttgggctacctaatgccggtggtggaaagccattaggcattgacgaagttgttgctgcaaataacttgagggtcggtcttggtttatccaaagaagacttcgatgttgcagcactacaagatcgattaaggaaaggaggcgatgacgatctaatcatgatatctttctttttgatactattcaatcggttgttgttccctactgcaagttggggaataactaaccacaaggtactgctgactaaagaaatgcatcgttttcatgagacggattggtgccagctcatattcaatgacatatgccaagtagtgaagaagtggcacactagaaacatcacaaatgtttctacaaggatatacgattgctccatcgtcattcttgtaagcatatcatga

SEQ ID NO: 18056 - DNA, 543 bp, Zea mays
  Peptide Sequence Number=SeqID_61431
atggagatgaatgaagaaaggaaggtcagcttactaggactagcagatatattatcagcctcaattggaggattctcatgggctcccttgatttcaaagatctgcaagaataaagtcgaggcggaggctttgtttactggtcttagtgccttgatatgtcgaggacagcatggatcccaggtccaacatatagatggaatccggatcgctggacttccttttgatggtgcaagagaaagtagcctaagtggtagctctactttcacttcggattcctatgagaataagctgagctcgcgccgctcaccccgctccgactgctgtgccagccacccgggcaaggctgacaacagcaagttcagcctcgggtgcaacaggaagctccacctcgcccgaccccaagactcggcctcagcctcggcctcaggaggaatcgcttcctcgcccgaccctggcctcggcctcaggagaagtctccgcctcgcccgaccttgggctcggaccgaccgcgccacaaaggatacatcattaccctacccctag

SEQ ID NO: 18057 - DNA, 255 bp, Zea mays
  Peptide Sequence Number=SeqID_61432
atggctgtgcctgggcagcgctattgtgagagtgaaagtggacgtgctgctactcccctcattcccaacatgtatcaagtacctgcattgaataatgcaagggaggcgagcttgggaggaggtgtggctgacatacctgagcgcaagcatcgcgacatgcagagaacagagctgagcgcagctgttgcagactcgtggcaggtaaaggcgtggagctgttcgagctggagcaagagctgggcgtcgagcggatga

SEQ ID NO: 18058 - DNA, 159 bp, Zea mays
  Peptide Sequence Number=SeqID_61433
atggtgagcggcggcgccgcgacgggggcgggcccgcgcatctcctcggccctcgcggcggccggcccctgctgctcgtcggcgccgacgtccgcgccgggcatcaggctcagggtcgtgattgtgggaaggcagaacaggcagaacggcagaacgtaa

SEQ ID NO: 18059 - DNA, 294 bp, Zea mays
  Peptide Sequence Number=SeqID_61434
atgtcaggacgatccataatcccaactcaggtgatgacagaggaaaccactctcaaggcatcagctgagctcccagacttcagggacgcaacaaagctcttacagggacatttggatcgtgatccattaccacccctacttataggccaccggctccaagaggtagaggaggcagaagcttcggaggaaggttcagctcccagcccagaagattgttatgtttattctgcggggaggacaaaggatatagaacaaggacatgccaagtcacgatccagaagcagaaagagatag

SEQ ID NO: 18060 - DNA, 507 bp, Zea mays
  Peptide Sequence Number=SeqID_61435
atggtggtggtgttcgaggacttcccgacggagaaggcggccgaggtcatgcgcctcgcgaccggcgatgacctgcccatcgcccggaaggcgtcgctgcagcggttcctggccaagcgcaaggaccgcctcgtccagcgcgcgccctacgcccgcccgtcgtaccccacggaggagccggagaagaagacggtcaagccagcctcggccttggcctcctggctcgggctcggcagcacggaagccgaccgcctcaccatcgcgctgttctgcggttctgcccaccctcgacaggtaacctccgcctcacgctctctagctccaccccgtcccgtcattgccgatggtgccgccagatgccacaaggaagggggagggatgcggatggggacgatctacgccgtcgcggcactggcgctcgacgtggctagcgacgtggcggtggactgcgaggacaacctcatccccgcaaaagggtcacctctggcacttcggcatcaatggtga

SEQ ID NO: 18061 - DNA, 552 bp, Zea mays
  Peptide Sequence Number=SeqID_61436
atggggctgggtctcggagctcttctcaaatccgggggctctcagatttggttcagcttctcactttgttttttaaatgagaagaagcagacaacaaattatagtgaaggctcctctcatcccctgtcgcatggtggatcacccccatggaaccagcctagccaaagacaggaaggataccagttcaacaatgtgtttgactggaccattctgaagtatcctcagatatgctccaacctgcgaaccagggtaggtgaaagaaccagtggagttgctggaccctcaatggataagatggagaaggccccaggagaagtgttcggtagaaggaaccctagcagtcctgtgaaccagaccgacagttacgcgcaacagccacacgagaccgtatccatgtcgctaaacgaaattaacttcactgtcatcttcgacattgacaactccaacctatgggtgccctcctccaagtggtatttctcggtgtgcatggtgttcgattatgtggttgagactattttactaactctgcacttctgtgtagctctgaaatga

SEQ ID NO: 18062 - DNA, 480 bp, Zea mays
  Peptide Sequence Number=SeqID_61437
atgaaggagccatgtggcggccacatccgcggctgcgataaagcacccggaagggggccgcgagagcgcaatcgccgcagagcggggaggcatgaccgcggacgacgcgtgcgggttcggcggtggtttctgggaacggcgtgcgcgtcggattatgccgcgcccagtgccggcttgtgcggcggcgggtggccgggctctgggatggggcgtcggcgctcggggacggggatggggatggcgcggcggatttctgggctcagggacggcgtcggcgctcggggtggggacgtgctgcagggatggcgcggtcatggtcgggctcggggctcgtcggggctcggggatggggcgttggcgctcggggacggggatggaggtggcagggagggctgggggatcggcggggatggcgcatgggtcgacggggatggcgcgtgggtcggcggggatggagggggtgttgttgtgaaacggtga

SEQ ID NO: 18063 - DNA, 429 bp, Zea mays
  Peptide Sequence Number=SeqID_61438
atgggcaagaacaacaaacgcaagcgcgagctgactcctccatcagaggactttggtgactcggaatactcagaggaggagttctcctctgagtctgaggggtctccagctcctgtatctcccccagcgtcgtccgatgactcggacgactctcaggggattgccgcggaggtctggacttacatccgggtcgtcgagcgctccgggctcgagggctcggatgagtcggagtactcctcggacgaggaggactcgcccgaggaggacgacgaaggtgacgacgacgacgacaacggaggcgacggcagcgacgacggtgacggcggcggcaggagcggcaatggcagcagcaggggcggcaacggcgacagcagcaggggcagcggtggcggcggcagcagcaagggcagcaacaaggccagtggctga

SEQ ID NO: 18064 - DNA, 804 bp, Zea mays
  Peptide Sequence Number=SeqID_61439
atggcgtgctccaaagcggtgctgctcgccgcgctcctagccgtcgcaggagcgctctcctccgctgcggtgtgggaggactacgaccaccacatgtaccacaagtgctacaggtcctgcatgaggaagtgcgacgacgacgatgccgatgatgccttgaagaatagcatcagccccgatagtcacctctggtcagatgatcacgaccatgacgacgatcacgaccaccacgatgatcacaaccacgaccacgacgaccaccatgatgatcacgaccacgaccaccatcacgatgatcacgaccacgaccatgatgatcacgaccatgaccataatgacaaccacggcgaacaccatgacgacgacgatgaggatgacgattacaactattgccgggtggagtgcatcgaggactgcatcgactacgtgcccggcatttgttaccgccactgcgtctcctactcctgcctctacctgccaccgtatgctatcaccatgaccatcatcgtcatcaccaccatcaccaccaccaccatgaagatgaccatgacgatgacgataacgatgaccaccacgatggcccaacgccaagcccacctaaacctgaacccaagccgcaaccaccaaagccagggccgacgcccaagccgccgatgcctagtccaacgccagagccaccgcccccatacaacagaagccaagtacacgccgaaactgccgcaaaagccgtcttcgtctagtacaccacgcaccgatgccgcccaatactctgcagtcaccaccaaaacaggcatcgtccactga

SEQ ID NO: 18065 - DNA, 459 bp, Zea mays
  Peptide Sequence Number=SeqID_61440
atggctccttcaaacttgagtaataatggtctgttctttgtcaaccaaaagaccaaaggggggattggtatcctagatttgaacactatgaataatagaacccttcttagcaaatggttgtacagagggaagggcgtttcaagctcgaggatgggacgcaaattagattttgggaagatatatgatgtggtctcctttaatatcttaccacctagaagcatacatcatatgtttggaaggtggatggaaggggtagaggggaaccttaggaacaagatttggttggaacttgtgccttttgctgggcaatttggttatgcaaaaatgatgtcgtttttacaatgcacaagtgcctactcctttgcaggttatcctttcggtgacacattggctttcacgttgggctattctacagagggaggaggttcgacctatggttgtgccaaagattcaacataa

SEQ ID NO: 18066 - DNA, 273 bp, Zea mays
  Peptide Sequence Number=SeqID_61441
atggctgaaaggtaccaacgcccacggagttgtgttcccccccaacgacaaggcggaaggactgcgggcatcccccatccgggggctcagaagccgtcacgggatgagtcttctccaacacgctccaaggtcctccccgtacggcacgggggctgggtcccacacgtcatgcaagccggcccagagcagaagaagccaaaccgccgcgcgcggtgcatgcaaccgcccagcggttacaagcggccctccactttcgcccagaccagcgggtga

SEQ ID NO: 18067 - DNA, 195 bp, Zea mays
  Peptide Sequence Number=SeqID_61442
atgggcgggggcctcctggcagcggcatccgccctgaggtcatcgctgccgttgtttggccccccggagcagaagtcgtcgtcgtcgccgctgctggagcaggtgacgctggccgaggcctcggggtggccagccgagccgcctgctcgggccgggttctcggagaagacccgagcggcgatggcccgggcgtga

SEQ ID NO: 18068 - DNA, 699 bp, Zea mays
  Peptide Sequence Number=SeqID_61443
atgtcgaaggtgaagaacaataatggttatcatggagtcactgagccaatctcgctgagtgggccgactgagaagtaccttatgcagacagctgaggttgaaaagactgtgaaagcttggattaagaaggctactaggatcagcaggtatggggagcaatttgtgcatgaagcaaatgcaaagatctttacatttggttcataccgtcttaggtggcttaaaggaactgctctgaatatggagtacttcttcagatggcttcatgacatcctagctgagatgccagaagtttctgagttacatccagtaccagatgctcatgtgcctgttctgggattcaaaattaatggggtctcaattgaccttttgtatgctaatcttgctcatgcagtgattcctgagaaggcaggtgcttatgaacatcaggactgccaccggatgcgcgcccgtgccgtcaatggagcgcgagaggaggacgaggcagggcggcgaatccgaggcggaggcacccacgccgtcaacggacgtatcgagcccgcggtggtgcgcacccgcgccgaggcgagagcagtccaatgcgtacaaggtgctgtttttctcttcttttttcgatctcgagttccttcgccattgctggctgccggcgaggaggcgcacacctcgcctctccacgagatcgagttccgctgcatgcgctga

SEQ ID NO: 18069 - DNA, 654 bp, Zea mays
  Peptide Sequence Number=SeqID_61444
atgaaattttccctaatacaggttgccaatttccttgtgcgattcaagtccattcgcagcatagcggagcttgatagcttgaaggtttctggtgacgtctggtttggccctggaattacactcaaggcatgcttgaccacatcatggtggaaccagcacggcctgggcggcgacaacgtgttcggtagctgccgccctctccataacgggctcgtcagcctcatgcactggtctgggaagggcaagccatgggaccgtctcgacgccggcaagccttgcgcactggaccacacctggaaggcgtacgacctctacattggcgagaatgattcatcatcagcatcagcttcatcgggcgacctcgatcagatcgccttaccaaccgaccgaaaacagcgctattcaccccgttccgactactgtgccaaccagcagggtaaaactgacgacagcaggtctcgacctcccccgagttcaacctcggcgcaacaaggagctccgcctcgcccgaccccaggcctcggcctcggcctcggaagaaggtctccgcttcgcccgaccccaggcctcggcctcaggagaagtctctgcctcgcccgaccccggtctcggaccgactacgctacaggggatacatcattaccctactcctag

SEQ ID NO: 18070 - DNA, 495 bp, Zea mays
  Peptide Sequence Number=SeqID_61445
atgaatccatgtttcttacttgtaaaccccgaacaaacaccactagcacgaggcgctcgcgttggcgtcgctcatcgacgacgagaagaagcttggcgactgccagttcgacccctggaagcagtcctacgtggcccatgcgccgctgtgtacggtaagctccggcgcagccaccgcttggacgcggtccagagcggctgcaccgcgctgtccatcgtcaaacagggggacctcatggtcgttgccaatgccgacgactctcgggttgttctgggcaccgcaatccacgacgacgccatcacgccgtctagctcatcatcaaccagaagctcaacctgcgactggtgcaacgaccagttgtactacctcgctgatgagcccggggtgtacttcatttggcagcccagccaagagtcattggtactcaccatgtcgcgcgcgttcgacgactactatatatcaaggattgtggcgtcatctcggcaccggaggtga

SEQ ID NO: 18071 - DNA, 1056 bp, Zea mays
  Peptide Sequence Number=SeqID_61446
atggcgtttcctaaaggctcactagagcaaacaaaagcaagggagacagtcgagtcaaaagcaagatcaagggcgggcagcggcgacaacgaccaaggggcaagggcggccggtggcgatcgctcgctccggtggagaagccaggagccagttggccagggtgttttaaaaaaacaccagggtaagagcgcgagccccacaaggcagagcgcggcatacaggggagggcaggcagcactgggcatgcgccgaggcggctttcgcagggaggcggggggcacaaggatggtcatacacaatggattgtttggatgcggcggcgcatggtctcggaatgctcaagtcaacagcatggactttgtacactgcacctgcgtcctttactcctttgtttgtggccaagacccataccaagaccggctacatatacacgatacagctcgagccggtgacgacgagagcatggaggtccaggtccagcagagaggatcccctgcccctgcggcggagctggaggtctccctccgcgagttcaccctgtcggacgcggacgcggaggcgttcatgtcgtgggcgtccgaccctcgcgtggtccgcttccagcgccgcgacgcctacgagcacgtggaccaggcccgccgctacatcgccgaccacgtcctgccgcacccgtggtaccgcgccatctgcgccggcgcgggcgcgcccctccccgtggtgggttccatctcagtgaaggccgggcccgccgaggacgggcggctgttcagggcgtccgtggggtaccgcctggcgcacgcgcactgggggcggggcatcgcgacgcgcgcggtgcgagcggcggccgcggccgttttcacggcgtggccctggctgctgcggctggaggccgtggcggacgtggacaacccggcgtcgcagcgcgtgctggagaaggccgggttcgccagggagggcgtgctgcggaagtacgtcctgctcaagggccggcccagggacatggtcatgttcagcatcgtcgtcgagacggagcaggacaatccggatgggctgtag

SEQ ID NO: 18072 - DNA, 414 bp, Zea mays
  Peptide Sequence Number=SeqID_61447
atggtgtatgagcaggaccgcggaaaccaccatcagctgccgaggttctgcaccgccggcgcggcccccggcgtggcgcgggcgtccaagaagagcaagcccaagaaggccccgcagcgcggcctcggcgtggcgcagctcgagaggatcctgatcgaggaacagaagaatatggaggagggacccaccaccgccatgccggtaacgacgaggaccgcgcacctcggccccctcctcccgatgcaccctcctcctcctccgccgccgccgctctcgctcagcgccctgccgagggacgccggcgtgcactgcggctacgacccgccggtgctctgggacccggcggcggcggaccctttgaagcacccgtacaaaaagaggagcctgtgcccacagcctccaccacttcccacg

SEQ ID NO: 18073 - DNA, 567 bp, Zea mays
  Peptide Sequence Number=SeqID_61448
atggggggatttgggtgccgtggggaaggagggcgttgtggagaagccctcgaccatggcgggatttgggcgccgcggggaacgagaggccgtgcgctgtcggcgctgtcgaggccacgtagagatgggaaggcagatgaggcagggagggatttggaggacgcggtcatctggaacgtcattgtcgaggagcacgtggggaaggagcgcgttgtggacaaggcaaatgaggtagggctggatttgggggcgacgggggcagcagaggggggagcaatctccgggcggctctcacgggcgcgaaaatcttggggtggggacgcggccgttgcggggagacgaagggggctgtgtcaggcgggcgcgggtgtagagggggcgagcgggggcatgcgctggatggacgacgagcctgtcatgcccacgcttcttgatttctgtctcaaattaacacgtggatggacgacgagccggccctgcaacctcggaggcgacagccaagcaagccagcgggcgttgtgtcaacgtgatgcgagagaatcgggggcagagtggagcgagaattag

SEQ ID NO: 18074 - DNA, 276 bp, Zea mays
  Peptide Sequence Number=SeqID_61449
atgccggcccttctgctcctgctgctgaggaagtgccagtggaactttttactggagctgatcccaatgggtgtgaccctgctgacgctgaccccaatgggtgtgaccttgacgatgctgattccaatgggtgcaatccagccagagctgaccccaatggagaacccggtccccaaggatggcgccagtgattacccagctcccgagggtgctgctggtggtgatccggctccgatgagcaatgcaggctgcaacccagcccccgagggtgtctga

SEQ ID NO: 18075 - DNA, 414 bp, Zea mays
  Peptide Sequence Number=SeqID_61450
atgggcaagagcaagaagggcggaagttcgtcacaccactccggcgacaaacggaagcgcgagccaactcctccctcagaggacttcggcgattccgagtattcggaggaggagttctccgagtccgaaggacgattcctagggattgcagcggaggtgtggacatacatccgggccatcgagcgcgctgggctggagggctcggatgagtcggaggtctcctcggacgagggggactcctctgactcgtccgaggaggggagcgacggtggcgacggcggtgagggctatggcggtgacaggggcgacgatgatggcggtggcgatagtagcaagggcgacgacaagggcgacagaggcagcagcagcggcaacggcaagggtggcagtggcagcggcaaggccagtggctag

SEQ ID NO: 18076 - DNA, 456 bp, Zea mays
  Peptide Sequence Number=SeqID_61451
atggttgccccgcctcctcctcctgcggcgaggaaggtggtgggacaaacccggatgctgctcttccgccacggggggaagacgtcgccgagtccgccgccgctgagcgagctgacggccgtcgttgtcgttgtcgcgctgtgggggaaggagtaccatgtcgtagctgccgtcaagggacatgaactcgagactcctgaaacggagcagcgtcccgggctgaagaggttgctggagactacccatctggagctcgacgggaagttgttcgtcaacacacagcaggcccctacctggcgcgccaactgtcggcgtttcgaccccggggggtccctggaccgacgagtaaaattgtcgctgcgtgtcccagcccagatgggttggcgcgagatggaacacaaggggggaagaacgcggctcgtgttatcctgcgccagggggatgcgcttgcagtag

SEQ ID NO: 18077 - DNA, 383 bp, Zea mays
  Peptide Sequence Number=SeqID_61452
atgaacaccaacttcttggatgatttaaggtacatggaagcagttccatcgacgcacactacacaaccattctttcctttagtcttttgccctgatagtgtggcgccaccgggagaatcatggatggctgccgccgtgtccccgtccccgagcacgagcccgagcgccgccgtccccgagcacccgagcaacgccgtccccttcaccggagcccgagcgccgccgtccccttcaccgagcccgagcaccgccgtccccttcaccgagcccgagcgccgccgtccccttcatcgagcccgagcgtccgccgtccccgagcccgagcgccgagtccccgagcccgaagcgccgccgtccatgagctctttcttcttcctctcgaa

SEQ ID NO: 18078 - DNA, 837 bp, Zea mays
  Peptide Sequence Number=SeqID_61453
atgagcattagctgttctggttctttaacgtggggattgtcggcgaggctacagaccccaaggcaggtgaacacgcatgattcacctgtgagttgcaaaacgcaactaccttcggagagtcctgtagttacatccgcaagtacagcgaaccaccctcggcctcaaggacgactaggtacacacactttgggtgaggctcccagaataccaatgtcaaatgttgttttgggctcgccttgctcgagcgcgagttactccgagtggtcgtcagagcttgcccgccacatcaagagcagcaaggggaacgagcacgagcctgcctgctgctacctcaccttgaacgcgcagccgccgcctgcgccacgcgtgaagcagccggctgcgctccccccgaatcaccgcccggagctccgcgacttcggcggcgtcacgcagcctcagcacgggagcgcttcagcgtcgtcgtcgcggccgttctacaacttcatgccgctgccggttggtccagttcgctgtgagaggcccctgagcgagatcaaggccgacgtctccgacggcgtcgacctggaactgaagctaatctgcgttcgttgcaagattttttcgctcccaataaacgtctggccggagagagtcgccaagagaagcagtgttagatcagagtggttgtgcagtgttgaacaggctctcggaaggctcgtgcacgatcggcattacaggcttgcaggcacgatagagcacaacacagaatgtgatcagacacaacatagtaaaaccactgggccatgtatggcccaccccagggctgtgaccttggctcactcacgccaagagtag

SEQ ID NO: 18079 - DNA, 87 bp, Zea mays
  Peptide Sequence Number=SeqID_61454
atggacatggggaggcgagagcgtgaaagagatgggttttttttgaactctgaaagagatgggttgaaatatgcaaatacaatttaa

SEQ ID NO: 18080 - DNA, 381 bp, Zea mays
  Peptide Sequence Number=SeqID_61455
atggggtcgcaggccatcgaggcgcagcgcgcgggcacggaggtgcgcctgccgctgggcctgctccctctcgccgacatggaggaggtcgggcgccaggtctcgtacgccgccgaggtcactgcctacatcgaggaccgtcggatgcagcgcattaccagggtcaagacgaaggagctcctcatctgggtcaccctctccgacatgttcatcgacggggatgacccgtccaggatcaccttcaagacgcccaccgggctcggcaggacctaccccgtctccgccttcgccaaggaaggcgccaccgacacagaggccaagcccaaggacgcccccgcaactaccgtcgccgctaacggtgaggcagctgccagcaagtga

SEQ ID NO: 18081 - DNA, 522 bp, Zea mays
  Peptide Sequence Number=SeqID_61456
atggagtctttgatcattgaaaaaccttaccttgactcccttataaccagcatacccttgagagtcttttctttagtcggtttatgtaattgcttccgcatttctatatctccaatgttctgtaatgtctgcaagacgggtgaaacgttcctggaaaggaatggtctatgggtcgcggatggtgaaagaataaatgaattgagagcagccatccgctacttgcaagaccaactcgcgaaacgagatctagcgctcaattgggcggttaactctcgtccactcgcctgggctaaggaagccaaagctcgagcccgcgtggaggagcttagctcagccatggataacttgcaagtctattataatacactacatgaagaagtccatgtgttgtattcacaactgcacccgaacgtccctgcggatcctattaggatggaagccggaccttctagagtagcgggagaagcacttggtggtgaactggaccttttcaggaccccctccctctatgaagttggttga

SEQ ID NO: 18082 - DNA, 1317 bp, Zea mays
  Peptide Sequence Number=SeqID_61457
atgtcactcgacacgaagctcatcctcgacgctatcggcaagctgttcgacgacttcgacgctcgttgggagcgctgtcttcccaagttattgaccgcacaggaggcctctccggtcgtctccgttctcaccccgactgtggctgttggggccacaatcatcgccgacaactggggcgggggcttcaacggaggcgagtactcattcgagcagtactgcacggcgccatccatcgtcgccgacaattggggcagattcttcgatggcgaggacgcggctgtcaacgccgagttcgccatcgatccgccagacgaccccgagagattcgtcctccccaacgcctccaccaacgagcccaacatcgaccctgcgctggcccgcaccaactctagagcggcggacgactccgtcaatgcgcttgtcacctccaccgaccccgacgcgctgctcgacgtcgttcccgcggacgcgcttgcgtccttcattcgcagcgctcccttcttccacaacgagatctcgggcgccgttcccgtgctcgcccgcctcacctgtttcgccccccgcgacctcgccgccctacatgagttcgagttgccaccaacagacaacgtcatacggggcctgcgacatcaacagacgatcctacgtcgcgactctgaggacgtgcaggccgcgcagctcgcgcgctccttccacgccctcgccggcttcgtgattccctgcgccctcgccaaggccacgtacaaggcctactcgtaccacgatgtcgccgccgcatacggccccaccatccgcgaggctgccagcagagcccacgcggtcgacgactggctgatgaagccccttgcccagcaccgtcttctggggcgcgcctactgcgaggaggacgaggttctcaacgccttgcccaacagaagcgttgggacacttgtttcaaaggtgatgtcagtcactctagatcaatggacagatgatgggatcaactccatgatagaagttggtggaaactcttatgccaatgctatatatgaagcacttctgccagaggactatgagaagccgcatccaaattctagccaagaagagagagctgaattcatcagatcgaactccagtaccgcaagtgcttccttacaatatgcagcagtggatccaagtgagattgaggaggaccttcaaagtctgcgtgaaggtggaggttggggtgcatggccagttgctcttgctgcttgtggtcacagtggggtggttgtgatgcctagatatttaaatggcacctctgataaaaaaattattatgcaaatgcattttacatag

SEQ ID NO: 18083 - DNA, 984 bp, Zea mays
  Peptide Sequence Number=SeqID_61458
atggatgactctgggtacgtccgttacatggccgaggctcaggctacgctcccgaggcgcattcaatgcgaggagcgcctaacaccttatcctgacacatgtgcctcagttggcaaggtcgaacctcaggcgcaacaggaagctccgcctcgcccgaccttgggcctcggcctcaggaggaggtctccgcctcgcccgaccctagggctcggtttcgccctcggcctcggaaggtggtctccgcctcacccgaccctagggctcggcctcaccctcggcctcggaaggtggtctctgcctcgcccgaccccagggctcgacctcgacctcgggaggaattgcgtcctcgcccgacctcggcctaaggaggagtctccgcctcgccctaccttgggctcggacagaccgcgccacaggggatacatcattaccctacccctatctagctcaggctacagtggaacaagaccggcgtcccatccaggctcaccccgccccgacagctgtgcttctacagggctccagcgctcctccgacggccacgacaccgcgctggcccctcggaagggttcgacggccgacccagagcactcgggcttcaagctcattactgatcaggggttcgaagaagggttcgacagccgccttagagcacgcagagcgagggatgaccctaggtacgtccgttacatggctgaggctcgggctacgctcccgaggcgcattcaatgcgaggagcgctcaccttatcctgacacacatgcctcagttggcaaggtcaaagaggaggtctccgcctcgcccgaccccagggctctgcctcaccctcggcctcggaaggtggtctccgcctcgcccgacccagggctcggcctcgacctcgagaggaatcgtgtccccgcccgaggagtctccgcctcgcccgaccttgggctcggaccgaccgcgccacaggggatacatcattaccctacccctagctag

SEQ ID NO: 18084 - DNA, 597 bp, Zea mays
  Peptide Sequence Number=SeqID_61459
atgcaagatgcagcacgacgggcactttcccagtattgctcgttgttcagcggggtagctgatggcctcgacctgaagtactaccctcgccgttcgaccggcagtgctagaggtgtgattgtctcgcatgttggtgagggcaatcccaggctgaacagcatggtcaacttggtcgctgtgctcaacacagagttggacctcgcccttgatgagttgggcaaggttcgggcggaggttgcggaattgcgtgctgaatgcgcggcacaccactatctggatggtggttctctcgcccctgtcgggattcagcacccttaccattcactgcctcgtggtcgttttgactatggtaccccagactgcaggacccgcatagatttagatccatatatcgatggagtcggaatgtctgagaacaaatgcagaggtgcgaggcgtgcacagccagagcagcaggcaccccaagaagaagcagccccgcagcagcatttgccaccgccacccccgatgaccattgagcagatgttcttgatgcagacccaggcagttcaggcaattggtcaggcattagcagcgatgcagcaggctcagcggtag

SEQ ID NO: 18085 - DNA, 312 bp, Zea mays
  Peptide Sequence Number=SeqID_61460
atgatgagtacgaggaactgcactcacactacaaatgttctgaaattcaggataagaatttccacagatattttcttaaagagcataagatatccaaacaggaaggttgccttaggcagagtacttagccaggaccccaaaaccaaagttggagatgttgctttaggcaaagaattttggatggtttgtgttagtctggtatctgtgcgcgatgaaccactaataaggccatataacaaattcaaggttcttggacaagtaggcaataatccaattgcaaggccttcaagttgtattgaaaaggttaactaa

SEQ ID NO: 18086 - DNA, 141 bp, Zea mays
  Peptide Sequence Number=SeqID_61461
atggccacggctaggggctgtagccgatcgcagatctacgaggtagcatcggatggctttggagggaatggaggcaaggatggaggagtctgcgagggtggcaagaatgaaggcgactatgatgaggcggaccccgggtga

SEQ ID NO: 18087 - DNA, 1485 bp, Zea mays
  Peptide Sequence Number=SeqID_61462
atggccgtcgcctttaattggcactgttgggtcatgcgtagggctgcctcgagtcacggtactggttccatagtcgatgaggcgccgcattcggtggaagtggcggtgcggctctttgcacgtcgtaaccggtgcgccggttacatgacatacgggcccgcttcctttgcgctggtccaccggatgtggtcgaagtcgaaagggcgcacagttccggtgcggttggatgcctgtcgcgtggcagtccaccctttcgaccacctgtttctgcgaagatgggggagcgcttgtaaccgcgaggcagtttcatgcctcgcgtgcggcggttcgcctccttcgcgcttcggatcagctcgtatgacgtgtgggacccagcccccgtgtcgtagggggagaaccctggagtatgtcagtggagactttgcccgtgatgctaaggggtgcaacccggctgcattccctcaccaatggtcagtttggtggggagaagcaagccgggctgcggcctccgccccgccctcagcttcaaggatcttcgtcatctggtctgaggcggaggagcgcaccaagtggggggttgcctccgcgtgggtcggtgaccattttcttcccccagcgtttgggggagaaaggcatcctccagccctgtggaggcgtcctccagccatgcgggggaaggcgaactgctgctctctagccagggtgcagctttccgtccttcatccgggcggcggtcgtgccgcgcgcgggccggccacgtccaggccctcctcgcatcgtcagccacgccgggggtcaccaagcacatcgtacgccacgagggcggtactcgtgttctgggatggcctcggtgaggacgggagcgaggtcctaccggtgcgctttggggcggccgttgttcgccggcgcggtgtcggtgggtttgatcccacggacggcgccctccgactcttcggctttaacggcttgtcctcgcccctcgtgtggggacaggtcgccggcgagctgcttggagttcgttatcccgcgggcccccttaaccctcggctgctctacgatgagccggagccgaaggcagcggtgttggcctggacagaggcagagtcggctcgaaaagagacttcgtcggcctgggagctggcggcttcccaggccgaggaagatgtggcagcaacagctggagcttggccaagacattcgctggcgcggtgctggcgtcctcccttgggtggaggtcccttcgccagggtcgccgtccgaggccgggccaggttccgccgagggtggaaacaacgccgagggtgctgctgctcctcctgccgatacctgaacctacaggaacagtttgtctgtagcatgcgcataatcgtttatccaagcgagagttacttttcgcagaaggtgatgagtgaggattctgttattgatacagtcgagaaggcacgaaagtcgttttctacccgagtgtttggacttgttcggtag

SEQ ID NO: 18088 - DNA, 825 bp, Zea mays
  Peptide Sequence Number=SeqID_61463
atgcaggcggcatgcaactgcaccaagggggcgcaccctttcgacttcgacgcgtccagcatggaggcccaggcccacacgtcatgtaaccggcacaccggttactacgtgcgagaaactgcaccgccactcgcgccagtaccacgccttctcgactgcggaaccggtgccgcgactcgaggcgaccctgcgcatggcccaacagtgccaaccgagcacatcggtcacgggtcagtcagccgcgggagaaggcgcaacgatcgatatggccaaaagtgggccgacaggaccgggaaaggggatactccgaaagggatccttctccgcgaaggaagcgggccccgagcccccctactgatcagaggttcgaaggctggcccctcggaagggttcaacagccacctcagagcactcgggctccgctcccactactggttagaggttcgaaggctagcccctcggaagggttcaacgaccgccttaggccactcgtgctccgcacccactattgatcaggggtttgtaggctggccccttaagggttcgatagccgcctcagagcacgcagagcgaaggatgactctaggtacgttcgatacgcaaccaaggctcgggctacgctcccgaggtaccctaggacatttccgagaccagcgggagcgatttcgtaacggattcccatcagaggaaggcatcgagccctcggaccctatcaaacgggaccgggtctggcaaatcacctgcaggtactttggagcgcgcctctgggccactagccgactcttatcgaacggggcacgggcgtccactcggatcgcccgctag

SEQ ID NO: 18089 - DNA, 456 bp, Zea mays
  Peptide Sequence Number=SeqID_61464
atgtcgcccgaggctggacttagccgctgtcgacctcactctggcgagtggcacgacagtcggagcggggcaggcagcgctgttttcttgtcaggtcggcctttgcagctttgtgctgatgggggttaccagctgagattaggagtcttgggggtacccctaattatggtccccgacagggtcgccgtggtcacaggaggcaacagggggatcgggctagaaatatgcaggcaactggcttccagtggagtcaccgtagtgttgacagcaagggacgcggagcggggcgcgggagcagccagcacgcttgggcaacaacccaacgtcgtcttccatcagctggatgtcggcgatccgtccagcgccgcacgcttagctggttttatcgaggagaagtttggcaggctggatatattaattgatcaacaatgcaggaattactggaacggcaagtaa

SEQ ID NO: 18090 - DNA, 321 bp, Zea mays
  Peptide Sequence Number=SeqID_61465
atgaagctcgaagttgtcggcatgcttcttggcatcgggcacctctgcggagaggttctccagatcagcgatgagggcctcagagttaacgagtgcctcagcgtattcaacacactcgacgtcgcacttgtaggcatggcagtaggtggagccgacggtgataatgcccgcgggcccaagcatcttcagttttcagaaattactgggggtcccaaaacagataggcagatcaatctgcccgaggggatgcacactcttgcctggggtgattccctggaaaggtgtggccccaggtcagatctgagattgcttgacccctag

SEQ ID NO: 18091 - DNA, 1068 bp, Zea mays
  Peptide Sequence Number=SeqID_61466
atggttcttgtgtgcacttacatcaataaggatgtttcaggtgctgggttcctagcaaaagatcttggtttgttggttgaaaatgatacagaggaacaacttggcacagcaaggaaagtcacgatacatcaaactacaacaaccctcatagtagatgcagccagtaaagatgagatccaggcgaggattgcacaactgaagaaggagcttgctgagactgattcagtttatgatactgagaaattggctaagagaattgctaagcttgccggtggtgttgctattatcaaggttggagctgcaactgagactgagcttgaggaccgccaactaagaattgaggatgcaaaaaatgccacttttgctgctatagaggagggcattattccaggaggtggtgcggcatatgtgcacctatctacggttgtccctaagatcaaagaagcaattgaggaccctgatgagcgtcttggcgttgatattattcaaaagatgaaggagaagctggaggcagatacaatcacgatatgttccgaccacccactcagtctgggaacgacaatcaagttcgggattcttgagttcatgtctctcggcatcgagtacgacatggtactcctcctgccaaccactcctgaggatcaaggatctcgttgtcgcccttttcgtcgcaagaggcaaagacagagcaaccgcaatcatgccccaaggggcactttgtgcgcagaagatgcagttgggaatgatgatagcattgagtctctctcaagggacttggccgacatcaacatttcacccggagtgtctgcgccaaccttcccggcaccgcttgctccaacatgggggccactactccccaacggcatcgagcaggggacgtcagcagcacctgccctcccactcgtgggtcaggaggagccagatgctccctggagagacatgggaggagatgggggagaactttccatgttcaaccccatcccattccaaccgcatttcgacaccggctacaacgctcaatgtggtgaaggctacgatccgactcacgagtgcttccacgtcgactga

SEQ ID NO: 18092 - DNA, 111 bp, Zea mays
  Peptide Sequence Number=SeqID_61467
atggcgggcggaattcagctcgccggagctaagggaaagtggctggccggtgaggttacccttgagatttcaaagagacttaaggaacctccacctttggaacaaaggtag

SEQ ID NO: 18093 - DNA, 708 bp, Zea mays
  Peptide Sequence Number=SeqID_61468
atggcgcttcctgttgacgtggcaggtctgtgccctaggcagggtgacgtgggggctcctccgaagccgaggttgagtctgtcctttgttgccgaggccgagcccgagccatggggtcgggcgaggcggaagtcgttcggccgaggccagggcggagtccgagccctggggtcgggcgaggcggagtttcgccgtcttccgggtcttagcccaagtccgagccctggggtcgggcggagcggagttcgcgtcttccgggtcttagcccgagtccgagccctggggtcgggcggagcggagttcgctgtcttccgggtcttagcccgagtccgagccctggggtcgggcggagcggagtttgccgtcttccgggtcttagcccgagtccgagccttggggtcgggcggagcggagttcgccgtcttccgggtcttagcccgagtccgagccctggggtcgggcggagcggagttcgccgtcttccgggtcttagcccgagtccgagccctggggtcgggcagagcggtgttcgccgtggcgcctttggcaaggcctgactgcctgtcagactcactctgtcgagtggcaccgcagtcggagtggcacaggcggcgctgtccttcggtcagcccgctttatgctgatgggggttaccagctgagaattaggcgtcttgagggtacccctaattatggtccccgacagtag

SEQ ID NO: 18094 - DNA, 411 bp, Zea mays
  Peptide Sequence Number=SeqID_61469
atgaagctcgccaagccctcggacccgactggacttcaccggaggcccgagatcaacctcaccggacttcggtcttccgccgccgcgcgtggaccgagctatccagtgagtctccgcccaattcctttcgctcatgtcttctctggcatcccgtggacctccctgacccatttaattgaactatctcgccgtgaccaggccgtggtagtagaaagcaccccttgggctagaaaccttaagaaaaccataggaaaagaattaaaagattgtaatcttgccgacggagagtacgtgctcatccccaagcaaggacctgtccaagaggaggaccaggagcaggcttcagaggctgctattgaggatctccccgcagccccagcagttgaaggcaagccccggttttatgcataa

SEQ ID NO: 18095 - DNA, 285 bp, Zea mays
  Peptide Sequence Number=SeqID_61470
atgcccggcataccgagggatgtcgccaaacactcgctggatatccgggccggagcccgatccgtcaggcagcctctgtgcctcggtcatcaaggaagggtcggcctcgccttggcagagcccgaccctccctcgggggctaaaaagggggaacccctctgcgtcaagatctttttaatcaaaaaaggggcctcttgcgttctcccagctacgttctcccggctatgtcagaagcagggtctcgaggagcgaacgcgggtacatgtaaatggcaaggccgactga

SEQ ID NO: 18096 - DNA, 159 bp, Zea mays
  Peptide Sequence Number=SeqID_61471
atggcgagagtagcgtgtaccctccgtggcaagaggctagatggtggtgtatctgtgctctcggtgaagaagcagcaaccttttgttgcttctgttccaaggtggtaccgaaagaagaaaatcaggactgaagctgcgggaggaagagtcctcagttaa

SEQ ID NO: 18097 - DNA, 828 bp, Zea mays
  Peptide Sequence Number=SeqID_61472
atgggcttaacagaaaccccccggttttctagaatccaaacccgtggtccatttttcaccggaacagtgctagaagcaaagaatggggcggcggggcttaccagcggtggtagtgctctagcgaggggtcaggtggcagtggtcggaggcggctccaaattgctatcaacgacgacggtagggttcgattccactggctggggagcttcatgggaggttgggggtgctactgagggtgaatgggacatagggaagctgacggtggagctcgcgtggttgaagggtgcctgcgcaggtcggaccatggtgtccgacactcgggtgataaggcgggcggtggtgtacattgggggtgtagcagagtgctacgtgtctagtggagggagagctagcgccctgagtacatgccaatgtggcagccggagagatcttgacgccctgctgctgagtgccgccgtcgtcacagggcacgcggggcgccatcattgcctatctggcggagctagccagatgggacaccggtcttgttctctgcggcccgagtcgactcggggtagggtgatgatggcgctccctgttgacgtggcgggcccgcgcccgaggccgggcgacgtgggggctcctccgaagctggggtcgagtctgtcttccgttgccgaggccgagcccgagcccctgggtcgggcgaggcggaggttgttcggcagaggccagagcggagtccgagccctggggtcgggcgaagcggagttcgtcgtcttccgggtcttagcccgagtccgagccctaggtcgggcggagcggagttcgccgtcttccgggtcttag

SEQ ID NO: 18098 - DNA, 942 bp, Zea mays
  Peptide Sequence Number=SeqID_61473
atgtcttcttcctcccttatgcgtcgcgtctttccaccttccaagcccccggatgggggcccggctgcacccctccaccggcggtcacccaagatggtgacctccagcttggtggtgggggaaagtgagccgggctgcggcctctgcccctccctcagcctcaaggattttcatcaccagggctggggaggggagtgcgccgagttgagggaagggcggtcgtcgtccgtggcgctgacagctgcaccgcgcctggctctcgggcgcgagtggcttcagagccgctcgcggcaccggcgcccgccacggcagcttgaagaggttcttctgccggcgagattgccaaggccggccacggaccgaccttcaactctacggccttctgcccgtccttgcctcacgagctttggcttgggcgggggcctcctggcagcagcacccaccctgaggtcagggctgccgctgttcagccccccagagcagaagtcgtcgtcgtcgccgctgctggagcaggtgacggcgcgccgttcgtcggtcttccgttgctccgcaggcccacccccacggagtggggtagttcgtacctgcggagggggaaccggagttccgtttgtgatggcacctcgaatgccagtctcgcctgttgattatctgaaccgcttcaccaagcatgagtcgcccagtgtcaaggtgacgagtgagcacgaacagaggcggagttggctcgaaaatgggaacctggttggccggagcctagccgggttgtccgcaagcgggaccgacgccggagttgaccagccgaggcctcgggtcgggctggcgcccttggaagatggttggccgaggcccctgaggcaaccggccgagccgcctgcccgggccagatccccggagaagtccctggatcgcgtcgctgtccgaggctgggtcggatctcgctga

SEQ ID NO: 18099 - DNA, 546 bp, Zea mays
  Peptide Sequence Number=SeqID_61474
atgggcatccggtcccaagtgggtgtccccttcgtcggcgtgggctgcgccgctctcatggatcatctccgcgcgatctcatggccatccaagttccgaccgcacctgccggaaaagtacgacggatcaatctactcctgggaagagctctgcgcgcggttcgttcgaacttcgccagcgcttaccaacaacacgacgggtggctcgggtaccgtcccccgggacggtaaaaagaaaaagaagaaggaccgcgaccaccagaagccgtggtccaccgctgtagtcgtcgcaaccgcgactggggatcagggcaaccgcaacaaaagcccacggccacagaggggtaacaccggctcatgccctgtgcaccccaacggtcaccatagtgctgcggagtgtcacgagatcatcgacctcgcaaaacgcgtcagcaagcggcacgagcagtcttccaaggacggctccccacctcgtcgccgacctggcaaggaaagggtcgacgacggccccattaacgacacgatggcgaagcgaactacaccctag

SEQ ID NO: 18100 - DNA, 465 bp, Zea mays
  Peptide Sequence Number=SeqID_61475
atggcgcgcatgctgaggtggttgccactactggggaggctgctcggcgcagagaggtggtcatcgccgctggtgaggctgcccggtgcagaggtggtcgccgctgctggcgagctactcggagctagctacccacgcgactttactggcccacggtacgggaccaggctgagcggctacgcctacacggctccggaccaccccaggagacaaagaggtcctaaactgcaagcctggctgttcaattcagatgtcatcatgcctgatgtgatgggaactgcttgggtggaccaacaggccgggcttatgagagcggacctcaccgggctggcgtacacagatgctccagtggtcaggaagaggtactcctttagtcgtagcaagatagtcaccccggtaggagtaggtcctgaccctgggttcccatctgcgtttgatgacggagtcctcgtcctcgtgctgtag

SEQ ID NO: 18101 - DNA, 675 bp, Zea mays
  Peptide Sequence Number=SeqID_61476
atggagctttcggaggagcaggagccggaaggatggatcaccagatccattactcgtgacaccgctcgcggttgtcatttccacaacgctcacgacaccttgctgcgtcgggccttcgaccgacacacttggtccatcgactactgttgtgtagtctaccagcattgtcgcgggttatacccagaccagtgggaggatacttgtttggtgcgccatccggacgatgatctccggggtgcagaggacttctcagagcattattctatcactgagagggacactgccgaggcagccatgcaggatgttgcacggcgtgcgctttcgcagtactgtttgttgttcagtggggtagctgacggtctcgacctcaagtactaccctcgtcgttcgaccaacagcgtcggaggtgtgattgtatcaccttttggtgagggcaatcccatactaagcagcatgatcaacctggtcgccgtgatcaacactgagttggaccacacccttaacgagttgggcaaggctcgggcggaggttgtgaaactgcatgctgagcgcgcgatgcgccaccatcaggaaggtggttcccccgctcctgtcgggattccatacccttatcgctcgctgccccatggtcgttatgcttatggcacccctgactacaggatccaaatagattag

SEQ ID NO: 18102 - DNA, 366 bp, Zea mays
  Peptide Sequence Number=SeqID_61477
atggatgcttggagtggtggtggttggggggtatttatagccccaaccaccaattcaaccgttggggaggctgtctgtcgatgggcgcaccggacagtctggaaaaggtttgaccctatttccctttcagttccccacaatggaaacatccacggcctcctccttgcgctggcgctgcctagttgttctggttggttactaggactagaaggcgaggtgcctggttgttctgccgctggtactgatttcctccatgttggttgttctagcgctactgctgctactgctgagggaactgcctctgatactgctgctggtgttgacgctgatgctaatgctggtgaccttgagggtgactctacttga

SEQ ID NO: 18103 - DNA, 231 bp, Zea mays
  Peptide Sequence Number=SeqID_61478
atggacaaccacaacctcgccgagttgatgcgagaagaccaaatagagctgctcatggagttggtcctcggctacagtaaggtactaagttcaacagcgagagcaagccgatgccccttccacttggtagagaagaagtcacaaggcaagaggaggtctctaatcacttctaaagtaggctacatcagtgagacattgcaacccataatagaagaggtgatccatgattaa

SEQ ID NO: 18104 - DNA, 306 bp, Zea mays
  Peptide Sequence Number=SeqID_61479
atgtcgtcgccgatgccccgtgttctcgatgtcgttcgggttccaagaagaaggcagagagatttgggagctcgtgtggaggcttcaacagtctttaattcgacgagaggagctatgggcccaagggaatcgctggccggagctgtgcagctgcaccacgctgcgggtcggatcacctactgcaccatctctgcctgtggtgccgaggtaacacagctcggcgccataggctatggcgccgagattttttatccggcgagcacagcagctgtatatgcagtaaattctaaaatatatcatccatga

SEQ ID NO: 18105 - DNA, 501 bp, Zea mays
  Peptide Sequence Number=SeqID_61480
atggtgatgcagggggcgtctctagctgaggcgcaggggagggctgcctcccagactctacctcctgttgaggcaagggggaagagtcctactgctcgtgctcctagcgtcggtgctcctacatcccgtgcaggcggcgatgcagtgtctccagtaaccatcatcataaacgtatccaatgttcttctaatcaaagaggatcccaaggctgctcttaacggaagggtgactaacaaaaccaaatcaaaagaacctctgcaaccagcctcggcagagcaagtactattcctagaccccatttatggcccttcggcgaagccgactacacctcaagttcctctaattaatcaactaagggcatcccattccaccctcatggttgtactcttatcccgggtggtcactcaacgaataggtccttatggagaggtactcaggaaacaacttaagtcccctaaagtatcacaagatcatcaccaagataacattatcgtatcataa

SEQ ID NO: 18106 - DNA, 852 bp, Zea mays
  Peptide Sequence Number=SeqID_61481
atggaactccactacataaacactggatttccatacacaatcaccgagagcttcatggatttctttgagggtctcacttatgctcatgctgactttgctctcacggatggctttcaagatcagggtaatccatactgggcaatgatgcatacaaactcgtacaagtatggatactctggtcctgggaactattacagttatgctcatgtctatgacatagacgattacatgcgtagagcggatggtgggcgcagaatatgggataacactacacctgtaaacaatgttgattctgccaatgttgtcctgcagggtggtgaagctccccacacaacgacaaatactattaacaaggaatgcatccaacaggtacaccaaagtccaggtagtcctcaggttgtttggcaagataacattgagcctgataatatgacatatgaggttagtgacacccttgcatcagtctttttttccatggtcttgtcatggttatctaagataattttctttgtgtgtgcattgtatggggctttatcctttataactcaagaactgttggatttgggtgaggcagttggaacccagagccgtggtctctcccaagaacgcatttcatcgcttcctgtcacgaagtataagtgtgggtttttttcaaggaagaaaacacgccgtgagaggtgtgtgatttgccaaatggagtacaggagaggaaatttgcagatgacacttccatgcaagcatgtataccatgccagctgcgtgacaagatggcttggcataaacaaggtatgccctgtttgctttgctgaagttcctggcgaggatcctgaggcaatgagtcaacagttatga

SEQ ID NO: 18107 - DNA, 1131 bp, Zea mays
  Peptide Sequence Number=SeqID_61482
atgtcgagccctcggacccacttgtcaagaacggacgatgggaaaagaaagatagagaaagagacatggtgggtgctccgtgtcccctcctcccctaacctccgccatgttggcgtccaagctcaagctctcgctcttcctacccttctggtcctcctcctcttcatcacccagccccgcgtcctcctaaagatgctcctccgcgccctggtcctcccgtgcgatctcctcccactcctgccctggtccgtaacacagtcgttgctccgttgcctcgcgttgtggggctttgtcgacctgctttcggccttcgtcggagccgcgcgcgccagggtccgacgacacccaacatgtgggtgcctgcttctacgagaacaacgtgtgggtggagttccgcaatggggccgacgggggcttggagacagcatagtccatgtggaggctaccctcgacaccggcttccccttggctagcctcgatgaccggttcccctcggctaccctcggcgagctccagcggccaagaatttctccgtgtatcggttcctcgaacagtcacgatggttctagaacagacgatgggaaaagaaagatagagaaagagacatggtgggtgctccgtgtcccctcctcccctaacctccgccatgttggcgtccaagctcaagctctcgctcttcctacccttctggtcctcctcctcttcatcacccagccccgcgtcctcctaaagatgctcctccgcgccctggtcctcccgtgcgatctcctcccactcctgccctggtccgtaacacagtcgttgctccgttgcctcgcgttgtggggctttgtcgacctgctttcggccttcgtcggagccgcgcgcgccagggttcgacgacacccaacatgtgggtgcctgcttctacgagaacaacgtgtgggtggagttccgcaacggggccgacgggggcttggagacagcatagtccatgtggaggctaccctcgacaccggcttccccttggctagcctcgacgaccggttcccctcggctaccctcggcgagctccagtcggatgagagtgggcagcttggaacctggcagctgacagcctggaacctgacagcgtccctcggatggcagtga

SEQ ID NO: 18108 - DNA, 987 bp, Zea mays
  Peptide Sequence Number=SeqID_61483
atgaacgcactctcccgcgaagggtgccggcacttcgaggtcttcgaccaggcagatgaagattttgagcgagatgtctataaggtcgaagaccccgttgtgaaggaatctgccggggccctctacgaccggatgtggggtctgcatggttgtgaggtggtcagggagcgggccgagactgcgagggctcaggcggagcgcgagcgggtggacgacttcggggctctgaacagcgcgctgccagacccggagccgacccttgcggaggctgtgactggggtcgccctggagccaaccccggagaccgtagcgatcgcgacggctgcctccacatccgctgcggccagcgaagacctgcccccgaaggtggccgaaggcgcccctgatgcccccgcagctgctgtgccgagtgctgaagatcccgcggcggtggcggcggaaacaacggcggaggcagcggcggaaccaacggcggagccaacggcggaggctcccacagcgtcagggccttcgcaggttcaagattttgggcctgcgcacgcaaccgctactactgagtttttggcggcttcgaccgcggaaggtgggaatgaatatggtgggtctgtatctgagttttttgattttactgactctgggagctcggttgagtggactgaggagtcgtcggaggaggacttggattattttgcggccttggacgtggctgcggcggaggcttcgccacacgccgcggacgcgccagacgtgccaggtcctaacaccgggcgccgacggcgaagggcggttgcaaagcgtagggttagtgcggaggaaggggctcggcttcgcgtgagtggggctggtcggcaggagctgttgtctttgccggccgccgcgggtacaggggaaggggaactgcgaagtctttttgcgggtgaggagcttaggataatattatttaattatagggagatgggaattattcctaaggttgagccgatgtag

SEQ ID NO: 18109 - DNA, 1677 bp, Zea mays
  Peptide Sequence Number=SeqID_61484
atgcaagtagtggagttggttccgtgcgcccgcaacaagtggggcaattggaatgaattttggttttacgttgctgaggctactgtcgaaggccatgaaggactccccgtgtctgagatgtgctctcattattactctgcgtatccgccctttgaagtggcagaggaggatgcagacgaaggggcctttcggtgcgccaccggtcagagcagtgggcgtgatttagttgaagagttcgtggcgtacggggtgtggcccctggcgcatggctgggcgttgggcgaagacggggcggtgcgactcgtggggcgttacgtggcgaggacggaaggccagcacagctttgatatccgcgggtcaaatgaccgtttgaacagggtcttcgaattaaatcaattgccgtacgacggctatcctggtcaagacgaagcggaccgccgtgggaagaaaacggcggtggagactggagacgaccctgcgccggtggccgccccttcctcaaaaaagagaaaattaggtactgcgatgggaggacttggggtgtctgatagttttgctagagagttaatgaggacgtgtgcggccccgggggaaaggatgtcttcgcccgagctccgggagtcttcggctcggatgctgagggttaccgggggttgctggcctaggaatgttcctatcccctgcgcggctggcgaggactgttttacatctcgtatggttcgtcagtggagagtttttccttacgggcggaatatcggtgctgttgtgtgggcagtgatggacaaggatcgccaaggcgcggcgcaaaaacgccaggcgactgtcaggctgcttgaagctaggccgaagaggcagcggggggctgcgaaggctgcggcctccggcggaggcaagccgccgctggcggcgaaggcgggcgcctctgcacctagcaaggcgccggaggcaacggcgggcgctggaggctccaagtcaacgaaggtggtgccgccggccagcggagtggcggaggcttcgaaggcggcccgagcgttgtcgttgtcgggcaagcgtgttgccgacttcgacaccgatattactgtagacgactatcttggtgggtcggacgagggccagcttgctatggttgcgcctggcgcggagatcgcgacggcggccatagtgccgagggcgaggggcgaggcccttggcgccggaggcgaggtgtcggccctcgcggtggtcagggacgaggcgggcgcagcgacccgccggctgaagggagtgacggaggcgctgagtcaggcgacggaggcgctgagtcaggtggctgacttcgccagccgtactgcatcgggggccctcacgacagctgtgtccgccgaagttgagagacttcggacacaacatgctgacgctgtccgtgagaaatcagcctccgacagcaagtgccgtaagctgacggacagggtggccgccctggagagggagaaggccgacctccggcgccaactggcggcggagaggagggaggcaaacgaggccatcgccaaagagcaggctgcgcaggcagaggccaaactggcgcgggcggagggcaatcttgccaaggagctcgccaaacatctgcaagagcggcttaccgcccctggagagccgcgcgaagggggccgaggccgcgatgcgtgcggaggctga

SEQ ID NO: 18110 - DNA, 282 bp, Zea mays
  Peptide Sequence Number=SeqID_61485
atggcagcagcaggattcaagagtgatgaggacatctgcggcgcctatggaccgggtgcacgtgccacggaccgcggagagatcctccaacgagggagggccacgtgtaggcacgccctgacattggacgtcacggtcgatccggacccggatgaagagtggtgccgcgggaacaggaaaggccttcctcggctcgacggagagctctgccacgtcggcaatcagctcactacccgcgttccagttccagcactgtaccggcaatgggcataccaattgtaa

SEQ ID NO: 18111 - DNA, 300 bp, Zea mays
  Peptide Sequence Number=SeqID_61486
atgacggtgcggccgcagctgcggccgaggcggcccttcacggccctcagccaagaagaagctgacctcgccctcgcccgcgtcctgcaggaacgggagcgggcgtacatgttgcttcggatgaacgggggcggtggcgagggcagcgactacgagagctctgatgaagggagctacgaatatgatgaagatggagaggaggactacgaagaggaactagagctctcgctggtctcagtgattggcgaacagtggaggtggagcacaaggaggatcatgcgaatgatccataggttgtga

SEQ ID NO: 18112 - DNA, 495 bp, Zea mays
  Peptide Sequence Number=SeqID_61487
atggaagatattactgtgccctactgcttagctattggcattttcacacgcagcaagtcatttattgttgcatttggcaaggacagtaatttttttccctgctggcttcctgctctgcgagaagaagcaagtgacacagcagtacaccctattaaggagtggaagccaaaatcgacaaagaagtcaccgaccatcgatgcagataacagtatagctgatgccacatctccttcagctagcaactgtgaaagtgccaacacactgaatgtaaacgaattgtctgaatttttttcacaaactaacttgcatgaggtggagcatgttattattccgaaacatcttcgtgtgctagaatatgagcagaccaagttaaggtttggcagtttcacatctggtttggattcggaacaagtatcttcctcgaccccacaagacactgagcaaccagaacagttaggtggacctgtcccaattcttttaatcaaaaacagataa

SEQ ID NO: 18113 - DNA, 714 bp, Zea mays
  Peptide Sequence Number=SeqID_61488
atgaagcccaagatgcgccaattgatgctgcttatttcaatgaaccagcagcatcatcactctatccttggagtgcactctcctgataaactggttggggatttacatcttttcgacaatttagttgtgttcactactgaagagctctctcgtgcccctgctgagataattggcaggagctgccatgggacatcctacaaggctacacttgacaacgggtacatgctgacagtgaagtggctgaaggagggctttgctaagagtaagaaagaattttcccgtgaaataaagaagcttggcagtgtaaggcaccccaatcttgtccccttgcgtggctactactggggccccaaagagcatgagaggatcatgatatcagactatgcagatgccacatctctgtctacctacttgtctgaatttgatgagcagaatctcctgtccctatcagctggacaacggctgaacattgcgattgatattgcccgctgtctagattacctgcacaacgagcgggtgattccacatggcaacaacaagtcgtctaacgtcctgattcagaactccactccatctgctctagtgactgactacagccttcataggctgatgactctgatcggcatggcggagcagatttcatgtgaatacttttttaaagcatgccatttgcatgagaaatcatggcgcaagggaggtttacaagctaagtaa

SEQ ID NO: 18114 - DNA, 426 bp, Zea mays
  Peptide Sequence Number=SeqID_61489
atggcggcgacggcgtatgatgtctactccaagagggcgagggaggtcttgctggaagcctctgagaagatgaagatacaggcagacaaagcacagaaggacctcagtgtgatcgccaccgaggttagtcaggagggacaggaatatctggtgatggcagctcggaactccccagactcgatcaaggatattacaacaacgttcagggctcttggaagattgaattggccatcagagtatgaggattatcatgtgggcattccgtttgggggtttcctcaacttcatgttgactggaagtacctatgctcttcgttttggtattgttcttggccttgcattgttgactctgggaatctcaagtttgaggtcacacagagaaagcgaccgtcggcctcgtcttctggtgaaagggcaagctggttag

SEQ ID NO: 18115 - DNA, 603 bp, Zea mays
  Peptide Sequence Number=SeqID_61490
atggcgctccctgttgatgtggcgggcccgcgcccgaggccgggcgacgtgggggctcctccgaagctggggtcgaatctgtcttccgttgtcgaggccgagtccgagcccttgggtcgggcgaggcggaagtcgttcggcagaggccagggcggagtccgagccctggggtcgggcgaggcagagttcgtcgtcttccggggccgagcccgagtccgagccctggggtcgggcggagcggaagtcgttcggcagaggccagggcggagtccgagccctggggtcgggcgaggcggagttcgtcgtcttccggggccgagcccgagtccgagccttggggtcgggcggagcggagttcgccgtcttccgggtcttagcccgagtccgagccctgggtcgggcggagcggagttcgccgtcttccgggtcttagcccgagtccgagccctagggtcgggcggagtggagttcgtcgtcttccgggtcttagcccgagtccaagccctggggttgggcggagcggagttcgccgtcttccgggtcttagcccgagtccgagccctgggtcgggcagagcggagttcgtcgtcttccgggtcttag

SEQ ID NO: 18116 - DNA, 375 bp, Zea mays
  Peptide Sequence Number=SeqID_61491
atggcgctccctgttgatgtggcaggcccgcgcccgaggccgggcgacgtggggctcctccgaagctggggtcgaatctgtcttccgttgcgaggccgagtccgagcccctgggacgggcgaggcggaagtcgttcggcagaggccagggcggagtccgagccctggggtcgggcgaggcggagttcgtcgtcttccggggccgagcccgagtccgagccctggggtcgggcggagcggaagtcgttcggcagaggccagggcggagtccgagccctgggggtcgggcgaggcggagttcgtcgtcttccggggcgagcccgagtccgagccttggggtcgggtggagcggagttcgtcgtcttccgggtcttag

SEQ ID NO: 18117 - DNA, 1125 bp, Zea mays
  Peptide Sequence Number=SeqID_61492
atggctagttgtggcttagattctcaagtgaagctgtcgattttaaaggacatatactcccagttctctggatttgtttggcatgaaagtgatgaaaagcacagagtcaaggcaaaagaaaagcttgacaagtgtgtaaaagaaacgctgttggacctttgttggacccttggcattccaactccaaaagcaaacattagaaaggaagatattgtgtcaaagctgttggactttattgctgaacctcactctgcagctgattctgggctctctgatgaccagggttcaaattctaaaaaacgcaagagaggaggtgaaagtgcacgtaagactcctgatagcacacctagtaggtcaaggaagaaatttatcaatgacagcacttctagtaaaaggcagaaaaaagcgctcgagtatgatactgatgaggatgaatccatgaagtcagacagtgaggaaaacagagatgaagattcagatgaagctggtgacaaacaggaaggtgactatgtatctgggaaagaaaaggcagggaagttctcagaggtaaaagaatcttcaggcaaaaagaaggcaaacacagggagtggccaccaatcaggtcctccaaagaaaattatcagaagtccggtaaaaaaagtatcatccaagattcatgaggaaaaagaaagccccaataatagtgcaaaggttttttctaggaagaagaaacccacagcagaaaaggagatcaaagaaaaaaagtcatcaggcaaaaaggtgacaaagggtaaaggagaatccgttgaagcagttcttcccagcaaggatgatctgaggaagaccattactgaaatcctcaagaaagttgacttcaacacggcaactttcagtgacatccttaagaagcttggtaagatcttcagacatgtttctactgattttctgtggctgatgcgagatgcactaacagacttttatcttgtagacaatcactataaaatggatctggccccaaagaaagaagccatcaaagttatgatccaagacgagttaaccaagttatcagaggaggacgaaggagagggagccggagacaccgagaagaaacagcagcagcctcaggcgaaggagatcgaggcatga

SEQ ID NO: 18118 - DNA, 297 bp, Zea mays
  Peptide Sequence Number=SeqID_61493
atggcgcctcctgtcgacgtggtcggtctacgccctaggttgggcgatgtggaggctcctccgaggtcgaggtcgaggtcgagtctgtcttccgcggccgtggtcgagtccgaacccctgggttgggcgaggcggagaccgtcggctgaggtcagggctgagtccgagccctggggtcgggcgaagcgaagttcgtcgtcttctggggctgagcccaagtccgagccctgggtcgggcggagcggagttcgccgtcttcaggggcttagcccgagtccgagccctgggtcgggctga

SEQ ID NO: 18119 - DNA, 492 bp, Zea mays
  Peptide Sequence Number=SeqID_61494
atgatgaggtcgcccagtcgcttctcgccgagtcgcttctcgccgcagtcctccttgccgttgctccgcctcaaccttcgtggcaaccggttgtcaggccccaccgtgcctcctcccttttctgacgaggccgagcaaggcagggccgcccagatcgagacgccgtcgaggccgagcagagctctgcacctccacctaggccacccgcctgccagagtggaggacgagctcctcccgtgccttcgccagctatgtgctccgagcttcgcggcatgcgttgggcttcacggcatgcggcagcgcatccaccagcgacccaagttggccttccaggagctccggaccagcgagcccgtgcgggccgagctcgacgcgataggcatcccgtacaggtggctcgtcgctcggatcggcgttgtggccaccatcgctggcgccgcggccaggcccatcgtcgcgctccaggccgacatggacgtacttcctgtgtag

SEQ ID NO: 18120 - DNA, 180 bp, Zea mays
  Peptide Sequence Number=SeqID_61495
atggtgtggagcggtcctaagatatggtttctcgcaatcatctacttcattctcgaatgcccccagtgcctactaccattggtaccggccactataccgtgcaatgagattgcaagaacgggactgctaagcaagcctggatcaatctcaatcaacgggaacagagacgtcggtgactaa

SEQ ID NO: 18121 - DNA, 261 bp, Zea mays
  Peptide Sequence Number=SeqID_61496
atgaacaccgagacagcagatcttatggaaaaagctcacaaggaaccacatccggacttctggacagatgaggaaggagtcctttggttcaagaaccgtctgggtgttccaaaaggggaggcacgagaagtcctgcttgacgaagctcccaactcagcttactccatccacccagggaccctcaagcagtcccctgacctcaacggtagctcaggggcggatattgggtctgggctacctgggccgtggctcgggtcgtag

SEQ ID NO: 18122 - DNA, 543 bp, Zea mays
  Peptide Sequence Number=SeqID_61497
atgggcgggggcctcctggcagcagcatccgccctgaggtcatcgctgccgctgtttggccccccggagcagaagtcgtcgtcgtcgccgctgctggagcgggtgacggcacgccttaaaggaacccctcggccgctcttcgatgagccgaggccaggggtagcggtgtcagcatggacagaggcagagttggctcgaaaagaagacttggtcggccggagcctggacgggtcgtccgttagcgggaccgacgccggagttgatcttccgaggcctcgggccgggctgatgtcttcgggggacagctggccgaggcctcggggtgaccagccgagccgcctgctcgggtcggattctcggagaagaccgtggcagcgatggcccgggcgtggtgatgacgtcgtccttcagagtggagagcctcggaccgtgtcaccgtccgaggctaggtcggacctcgccgaaggtgttgtcgacgccgagggtgctgcggctcccttcaactgtccagatccgagcctgcaggatcggattaccctgtag

SEQ ID NO: 18123 - DNA, 2001 bp, Zea mays
  Peptide Sequence Number=SeqID_61498
atggtgagcgccagaattgttgtcctcctcgccaccctcctatgcgctgccgccgcagtcgcgtcgtcctgggaggacgacaaccaccaccaccacgggggccacaagtccgggcaatgcgtgcggcggtgcgaggaccggccctggcaccagcgcccccggtgcctggagcagtgcagggaggaggagcgggagaagcggcaagagcggagcaggcacgaggccgacgaccgcagcggcgagggctcgtcggaggatgagcgagagcaggagaaggagaaacagaaggaccggcggccgtacgtgttcgaccggcgcagctttcgtcgcgtggtccggagcgagcaggggtccctgagggtgctccggcccttcgacgaggtgtccaggctcctccgcggcatccgggactaccgcgtggcggtcctggaggcgaacccgcgctcgttcgtggtgcccagccacaccgacgcgcactgcatctgctacgtggcggaaggcgagggagtggtgacgacgatcgagaacggcgagaggcggtcatacaccatcaagcaaggccacgtcttcgtggcgccggccggggcggtcacctacctggccaacaccgacggccggaagaaactggtcatcgccaagatcctccataccatctccgtgcctggcgagttccagttcttcttcggccccggcgggaggaacccggaatcgttcctgtcgagcttcagcaagagcatccagagagctgcatacaagacctcgagcgaccgtctggagaggctgttcgggaggcatgggcaggacaaggggatcatcgtgcgcgccacggaggagcagacccgcgagctgcggcgccacgcctcggagggcggccacggcccgcactggcccctgccgccgttcggcgagtcgcgcggcccctacagcctcctggaccagcggcccagcatcgccaaccagcacgggcagctctacgaggccgacgcgcgcagcttccacgacctcgccgagcacgacgtcagcgtctccttcgccaacatcaccgcggggtccatgagcgcgccattgttcaacacccgttcgttcaagatcgcctacgtgccgaacggcaagggctacgccgagatcgtgtgcccgcaccgccagtcgcagggcggcgagagcgagcgcgagcgcgacaagggcaggaggagcgaagaagaagaagaagaatcgtctgaggagcaggaggaggccgggcaggggtaccacaccatccgggcgcggctgtcaccgggcacggcgttcgtggtgcccgcgggccacccgttcgtcgcggtggcgtcccgggacagcaacctccagatcgtgtgcttcgaggtccacgccgacaggaacgagaaggtgttcctggccggcgccgacaacgtgctgcagaagctcgaccgggtcgccaaggcgctgtcattcgcctccaaggcggaggaggtggacgaggtgctcggctcgcggcgcgagaaggggttccttcctggccccaaggagagcggcggccacgaggagcgggagcaagaggaggaggaggaacgcgaagaacgccacggcggccgtggggagagggaacgccacggacgtgaggagcgggagaaagaggaggaggaacgcgaaggacgccacggccgcgggcgccgcgaggaggtggcggagacgctcatgaggatgatgctccaagtcataagaatagtgatctccatagagaagggaacgttgagctggtgtttgaggttcacagatgcctcttcagggttggaaattctgggtgggaagctttacaatgctcttccaccagaaagatccaacgcttctattaccagggagacctcgagtaagatagtaattgttccagatcagatggacccaagcgaaggctgtacgcggtggcggcgcaagccacaagagcgcgggagcgggagcgggagggcgagagatgacgagttgcaagggctcggcaaagatgcctag

SEQ ID NO: 18124 - DNA, 537 bp, Zea mays
  Peptide Sequence Number=SeqID_61499
atggcaacgggtaaaatatccgcggatactgtctctggacatccatatccgcgacttatatccgatatccgaacccgtacccgttatccaccatggataacaaacagtatccacatccgttacccgcgggcggccaggcgcgtagggagtcagcgatgcagggagccagggactgaggacaagctacgcagggagtcagcgatgcagggactgaggacgagctggagatctgcgctctatgcccgggagccgcgcagggagccagggacccggaccggtagggggcagcgactgcgggagtctgggagaggtgagatggagtgggcggtggcggtaggagtggccgagtgggagaggatagaggaggagagaatgagaccggagaatggactggccgagcgagggcttcgctggattgctggaagcctggagattggagaacgcttgtggccttgtgggctgtggcgatgtggcccatgggcctgcgggacgggtgtaattttaacggatattcggataattgggtatggatattga

SEQ ID NO: 18125 - DNA, 945 bp, Zea mays
  Peptide Sequence Number=SeqID_61500
atgaatcggattcctcaacgtcttggagtccaattctctgctagccatggaggatcattgactgtcaccacagtcttcctatcttttacatggcttcatgctggtacgaagattggcattcagtgtgcgagatctgtggaatctattttcaacgtcatagaggcaaaaaaggatagcagaattgcagacaaggttatagagttagctgatggtgctgtgagggttaagagaaggaaaggtccatggagaggagaggatttcacactgatgcaagcgctcatcaaggcagatttctggattctgtttttctctcttctgctgggctctggatctggtctcaccgtgattgataatcttgggcaaatgagccagtcattgggttatgaggaaactcacatctctgtgtcaatgattagcatctggaactttcttggacgcatcggtggagggtacttctcagagatcattttcaaagactatgtgtatccaaggacaatcgcgctaggaatagcccaagtcctgatggcgatcgggcacttcaacttcgcgatggcgtggcccgggacaatgtacatcggcacactgctcgtggggggacatgttaaatcattgaacattaagaccgacccgccatatttgctttcggcgagcgacgcgtgcctgtccacggccacgattcggggagcaacaattgtggaccaaattgtgaacataacccctgctgaagattacatctacatccctgttactgaacaacaacttatggtccatgaggtgacaagtagaagttcagcatctactgcagaattggagtactcctcagaggccaatgtcagtcccaatagccgtgtctatgtgagcaaggcccatgatgtcatgacaaatgtgattgcaaagggttcagcaatgagacaagacgcagtaaacaaggctaaaacattttga

SEQ ID NO: 18126 - DNA, 930 bp, Zea mays
  Peptide Sequence Number=SeqID_61501
atggcggtcagagaggggccagctgggctctcgtctcggtcgcgtgatgacgaccggagagggctctccatggacaacttttctcctcccctcggcggagcgtggctgagacgtctgcacatcggcgcctggaggacgagaagcgaggaagaagacccacactctcctggaaaacgcatcacaagacttcagcctccctttccggccggagatccgactcgcgtctccgcgacagatccgggcaaacggcggctgatgcagttcttcggcggttcgtcgctgacgtcgatcgcgccggaggcgaccccagccccggcggcgccccccggcacgggcacgggcgccagcgcgcaggtcctctacgtcttcaaccgtaacggcgtctgcctgctctaccgcgagtggcatcgcccgctccgcacgctcgatcccacccaggaccacaagctcatgttcggactcctcttctcccttcgctccttcaccgccaagatcgacccaaccacacatgacaattcgacagtggaggggctagaggaagagaccgagctgcaggcatgtcatggcgtttcaaatgatcattttatcgaacactatggggtgtccattgagcatttgcagctccagcccaccatcagcgccatgccagtaggggagaggaacaggaaaagagcggtggctagggtgatgctgtgccagggagagaagacagggggagagggtggcagcgtagcgatgggttcattgtggcctctgagtctctacccaggggttgctttgtccttgcgcctccagctcagcagttcgctgtggcttccttgcctaggaggaggcgacctccttgctccgcatctctgccatgcaggagaggagggcaagcgtggtggaggtggcgatttagtagcaggagatgaggagacggaggactag

SEQ ID NO: 18127 - DNA, 339 bp, Zea mays
  Peptide Sequence Number=SeqID_61502
atgggcaagaacaacaagcgcaagcacgactcccaggggctcgcggcggaggtctggacgtacatccgggccgtcgagcgctccgggctcgagggctcggatgagtcggagtactcctcggatgaagaggactcggacggtggcggcgaggacgaggacggcgacgacgacgacgacgacgacgaaggcggtggcggcggtgacggtgacgacagcggcaggggcggcagcaaggacggtgacggcgacggcagcaggggcggcaacggtggtggcggcagcaacaggggcagcaacaggggcggcagtggcggcggcagcaacagggccagtgcctag

SEQ ID NO: 18128 - DNA, 2205 bp, Zea mays
  Peptide Sequence Number=SeqID_61503
atgtcgaaggtgaagaacaataatggttatcatggagtcactgagccaatctcgctgagtggaccgactgagaaggaccttatgcagacagctgaggttgaaaagcgtggttttatttgtgttgatcagtacctttcagatgcaggactctatgagaggcaagatgaggctatcttgcgagaagaggttttaggcaagctggaccagactgtgaaagcttggattaagaaggctactaggatcagcgggtatggggagcaatttgtgcatgaagcaaatgcaaagatctttacatttggttcataccgtcttggggtacatggccctggtgccgacattgacaccctatgtgttggtccaagacatgcaactcgaaacgagtacttcttcagatggcttcatgatatcctagctgagatgccagaagtttctgagttacatccagtaccagatgctcatgtgcctgttctgggattcaaaattaatggggtctcaattgaccttttgtatgctaatcttgctcatgcagtgattcctgagtggttggacctagatctttctcaggactctatactgcataatgtcgatgaacagactgttcgtagtctaaatgggtgtcgagttactgatcaaattctaagattggttccaaacattctggttatgggatttctgggtggtataaactgggcaattcttgtgggtcgcatctgtcaattgtacccaaatgcatcaccaagcatgttgatatcccgttttttccgagtctacagcaaatggaagtggcctaatcctgttatgctttgccatattgaggaaggttatcttggtctccctgtttgggatccaagaagaaattacagagacaggggccatcaaatgcctattattacacctgcttacccttgcatgaattcgagctacaatgtatctgttagtactaggtatgtgatggtccaagaattcacgcaagcatttgagatttgtcaggccatagatgaaggaaaagcagactgggatgcattgtttgagccatatccattttttgaatcatataaaaattatctagaagttaatatcacagcgagaaatgaagatgacctcaggaattggaaaggatgggtggaatctcgccttcgcactcttgtattaaagattgagcgttattcacatgagatgatccttgcacacccatatcccaaagatttctcagataaatccaggcccttacatatcttttacttcatgggtctttggagaaaacaaactacccaagctcaagaaactgagcaattcgacatcaggggaattgtaaatgagtttaagaatactatttgtgcatatcaacaccggaaagaaggaatggacattgaagtgtcccatgtaaaaagaaaagaaatccctttgtttgtttttcctggtggagtgcgtccttctcgtacttctagaacaacgcacaagaacagccgtgccattccaacacgtgatgtttcagctgatgatcaagtgggaaacctattgggcgttgccagttgtagtgatgctcaacatgtaccatgtaaaggcagctatatgaaacaaccagaaccagattttgctggaggctttcagttgccaggaagtatttctctgttgccccctagcttacccaataaagtagttctgaatgggtctgctaattttcatgcagaatctattgagagtgaacatccagaacactatcaggaaagtaagtttgtggctgtgcagaataccgtgtgccttgtagtcaagcaacctaacagtttgctcccaaattcaaacaacaattcacaattgtatggatctgattcctctcttaacagttcaaaaagggaatgtgcaggcagtgctgcaaacaacttgctgaagttatccccagctattccagccacacctgatgaacttgatgagctgatatcctatcaaactaatcagaaagatgtaaatgctgaaaataacttggagatcggttctgaaaataacttggaacaaatatgcagtctgaggccccaagaatctaataataatctgaagcgtaaagccaatcaagagctcgagccacttgagcttgccgtcccatccactggtgctgcgccgcaatcgacaggaactgccccaagaaaaccactcaggttgaggttaacgactttggggaaaccgaagccagctgaaggaacttcctga

SEQ ID NO: 18129 - DNA, 561 bp, Zea mays
  Peptide Sequence Number=SeqID_61504
atggcggcgtgtgatgggagggcggcggtgacgacagatgtagatggggccacggttgcggacggggccgagctgacggcggcgcggcagcggacaggggcgaggcggtggcgtggtggcgggcggacgggggagcgccttcggccgcggatggcggcgttgtggtggacggacgggcccgcggcggcggatgtggatgggcccccggcggcggcgacggacgggaggccgggattaggtatgcagattagggttcaacaggttattaaacctcgtcctgatgttctttctgttaatagttgtgtgcttgagatggcgcagaagatcgatgttgccgacaaggcaatctcaatcatgcaggagtctgctaagcgtgtcctaaagttggatgctgccaataaggttgatgtggaggatgatttcagctcggtgtctagtttcacttggccacaatctccgcgtgaaccacaccctgacgacttcatgtccattgaagagcactttgaaaaatccgagggcgttgaatacgactcggaccagatgcctagttactcggactag

SEQ ID NO: 18130 - DNA, 1674 bp, Zea mays
  Peptide Sequence Number=SeqID_61505
atgagagatgacggttcaagcaagaacaaggtaagcgtgtttccagatcggctgctccatcttcttcgtacccacgtctctgtgcccgtctctgatcctgtttcggtcgtgattggtgcgcaaaaaaagctgtcctggtccaagacccttgttaggaagtggttcaacatcaaaacaaaggcgaaggacttccattcggattatgcagctgaggaagtcggagtgcagtggaggaccagcagcttctctgatagagatgcatgtaaatccaagaaaagtaggacagagaggttgcctaagaggaatgtggagcgagatggtagagtagggaacggatttgatggtgcctatattacaaacacacaggactacaggtttcaggaaattgttcccttgaatgctggtaatgttctattgactgaagacaatggtccagcgaggaaatgggtctctcttgttagaaaaactctgaataatcttgatcagcaaggctctggtgtctataattaccacaccccctcaccagctccggatccaatcgtggagctcaatgttgacttcgagcgatcgtcaagaagacaaaggaactcgtcgtttttccatcggcgttcgttccaatccttcaaccgtagctcaaggatcgacatgatggatccacactcgttagtggaccgtcgattcagtgtctgcgacaggattagcttcgggagcaggccgagtgatgttgacactagcatgaggtgtggtgggtcgtctgatgatgagaacattgacgaggaatcacctagcggtatattcttcccaccgatgccatgtgcatatggtgctccactgtgcactggttctaggtattgcttagttgccagcaagcaaatggttggaattttcctcatggtgtgggtgcgaagcgatataagggagcatgtgaagaacttgaaggtttcatgtgtcggtagaggtctgatgggctaccttgggaacaagggatccatatcaatcagtatgtctctgcatcagacaagcttctgcttcgtttgcacccacttaacgtcaggccaaaaggatggagatcaacttagacgaaatgcggatgtggtggaaatcctgaggaagaccagattcccgcatgtccatggagcaggcgacaggaagtcaccagagacgattctggatcatgatcgtattatttggctcggggacctgaactaccggatagctctttcgtatcgctcagtgaaggctttagttgagatgcacagctggaaacagttgctggagaaggaccagcttcgcatagagcagagatttggtcgggtctttgcaggctggaaagaaggaaggatttactttcctcccacctacaagtactcatacaactccgatagatacgctggcgacgacatgcacccgaacgagaagcgaaggactccggcatggtgtgaccggattctatggtacgggcgaggcctgtcccagctatgctacgtgcgcggcgagtctcggttctcggatcacaggcctgtgtacagcatattcacggcggaggttgagattccgagccagtcagctgctcacttcggcggcatcactcgttccgcgtctctcctggggctggacgagctgccaccgtaccagacttatccacgcagttacatggacataaacttctactga

SEQ ID NO: 18131 - DNA, 588 bp, Zea mays
  Peptide Sequence Number=SeqID_61506
atggtcgttgaggagtcggagacgggtgccgagagccgagagtcggagaccggtgtgttcctcgtcctcgttgtcgaggtcaaggtctcaatactatggatcttgaccccggctgcagaggatgaggaggcggagcgacaacttgaagaccacaatgaggcgatggatgctagacaagccttattgggtgttggtgtcactcatttagatccggtcgacctcgaggatttcatcgcctctagaataggcactgctacggactccacgagcccaccagcatctaccactgcctttgctggtggcggctcaaggaagagatccaaagtttggaacaatttcgacgagttaaccaatctggtaaatggtaggcgtgtaaggcaaaccactgctagggacatggttttgtcttgcataaaagactgggagcttgctgatgctcacctgcagcatactgtggaggaagagacacgggaacttgaagctgaacatgagaacttgtaccttgatgatccagaagaacacaaaacagtagttggtggtggactggtggagtggtggttgcttgctgatgctcacctgctagcttag

SEQ ID NO: 18132 - DNA, 799 bp, Zea mays
  Peptide Sequence Number=SeqID_61507
atgacttcccacggatcctccgatgacggaaatgcactgacccacactgacggacttgcacgagagggctttccccgcattttgtgggaggtacttcagggggccggatacacgacaccccctcagtacgcggtgcagcagttcgagaagcaccgggtgcctcgctgtagagtgaggatgaccttggaacctcatcccctgcagccaggctggcgctctttggactccgagtctttcggataccgagcagaggacacgatcgaggcgatcgctctgcatggattgactactttctgcggattccatcctttggagctggctacccaccccattggtttgttccccgctgagagggaggacgaaccaatgtggaaggatcgggtggaacatgccaaggacatctgggccatctacccaggacagaccgcgcacttgactgtacggtgtatgaatgccctgtaccgtctgcaggtggagcagttatccaccgatattcaggagttggaggagctggtgggcactagggagaacaccattgaggtcctagaggatcagctcattaacactcagcagcagcttgctgaggctaacgagcacctggacatgcatcaccaggagatccaggaccaaggggcaaacgaggacgtcgacattgaggggggagatgagcctgcctccagtatggccgggaggcagcgtcgtggccagaacgagcgcgttcctccaccgccgccaccacctcccactctgcaggagctcatggctcagcagacatccttcctgaggcagctggctcaac

SEQ ID NO: 18133 - DNA, 732 bp, Zea mays
  Peptide Sequence Number=SeqID_61508
atgcaggggcactccgtccccacacacatcaaccgtccccatcgattccctggcaacagatcagggctcaccgccttggcgtacaatgctccactgaccccgactggccgtcgtgcagtgaccgcacttgtacccaccataaccggaatgggagaccacgtctcaggtcgcgtgagggataaagtctgcgggcaggttcactcagtccttcccctaactgaaacagtaaccgcgggaaagaaaaagggtggcgcggtttaccggcggcgagggaggtccggcgaaggatggggtcggctcggggagactctggcggtcacgtcgaggtacggcttgtcgtcggggatggccggaatcgcccggtccacgcgtgcaggcgggtgtcctcgtcggcggcgagtataccggccaaaccacggcgaactggttcaatccgagggcatggtgagcttcacggggtcacgcagcgactgtgtgcacaaggaatcgaaggatggtggagtggtttacccggtccacgtactccggcggggtcgagagctccggcgagcgtggactggcttctccggcgaagtaaactccgattccttgctcggggagcctcacggaggtgtgcacagtcttctccgagggctggacggggtggggaatggctctactggccggtctatggtgacagagggattgggcggccgcggactcgctgcgcacgggcaaacggcgacgagctaa

SEQ ID NO: 18134 - DNA, 891 bp, Zea mays
  Peptide Sequence Number=SeqID_61509
atggtgtctccggtgagctgcaagcgggtaatccgagtggacgtccgtgccccgttcgttgggggtcggctaggggcccagaggcacgcccaaaagtacctgcgggttcccaagctggcgtgtcagaagtcggagaagcgcgtccatctggcgcggttgcatgccgcctgcatggctgcccgccccttctgcccgttggtttgggcgagaatggggggtcgcttgggagggccttggagcgtgttggagaagactcagcccgcggcgcctgggggccccggtcgcaccccttcaccggcggtcacccgagatggcgacctccagcttgatggtgggggaaagcgagccgggctgcggcctctgccccttcctcagcctcaaggattttcatcaccaaggctggggaggggagagtgccgagttggggtcggcccctgcgtgggcggtggcccgctccttcactcagtgatggggggagaagcgggcattgcccgtggcgtccgacagctgcagcgtgcccggtcttcagccgcgagtggcttcggggccgctcgcggcgccggcgtccgccacggcagctggaagaggttcttccgccggcgcggcggccgggaccggccacgggctgacctccaacttctacggccttctgcccgtccttgcctcacgagttttggcgtgggcgggggcctcctggcagcagcacccgccctgaggtcagtgctgccgctgttcgaccccccggagcagaagtcgtcgtcgtcgccgctgctggagcaggaatccctcggcccgttcggccttgttgtctggggctcttctagcttagttaaagagacccctcggccgcccttcggtggaccgaggccaggggtagcgatatcagtatga

SEQ ID NO: 18135 - DNA, 513 bp, Zea mays
  Peptide Sequence Number=SeqID_61510
atggacaaggggatatctatcccccacagacgccttctgccgcgccagagcacgctcgcgcgcgcccccgcatgcccagcgccgcgctcgagccaaaccagcgccgtggcccgcgcccgagcatataaagccctcccaggcttcgactacacccttccgcgcaccctccacacctcaccggagttagctcatcgccgtttgcccgtgcgcagcgagtccgcggccgcccaacccctctgccaccatagaccggccaatagagccatccccaaccccgtccagccctcggagaagcctgtgcacaccttcgtgaggctccccgagcaaggaatcggagtttacttcgccggagaagccagtccacgctcgcccggagctctcgcccccgccggagtacgtggaccgggttctctggaggagatggttgctgggataacttggtcgtccaccttgccaccgggttggactgttgagtgggaccctgcctcggctgaggaggagcatgaggagtga

SEQ ID NO: 18136 - DNA, 1569 bp, Zea mays
  Peptide Sequence Number=SeqID_61511
atgaggccggcgccggagacaagcacgcggcggccgcagctgcgtcgccgtcgtccagtgccattggtgacggtggccgtgtctttggcgctcatctcgctggcgtgccttcctgtcttcgcggatgcaagcagagcgctgcaccgcgaccgggaggagcaccggaggcagcaccaccgcacggaggacaagaagagccgcgtctcgctccctcccgacgctgacggcgactctccgcccgagcctccggactccggcggcgcgccgccgcctgccgacgacagcgactgcggcaacgtgttcgacgtgagggcgttcggcgcgtcgggcgacggctcgtgcgtcgacgacgacacggccgcgttccgcgcggcgtggaaggcggcgtgctcctccgactccgccgcggccacgctgctggtgccgtcggacggcgtgttcaccatcgcatccaccatcttctccgggccgtgcaagcccgacctcaccttccaaatcgatggcgtcctcatgccgccggacggcccggcgagctggccggcgacggacagccggaaacagtggatagtcttctacaaggccgatcgcttgacgctggcgggggaaggcaccatcgaaggcaacggtgaggagtggtgggatctgccgtgcaagcctcacaggctcatacgattcttctcgagcaatgacgtgacggtatgcggcctgcggatcgagaacagcccgcagttccacctcaggttcgacgactgcgagcgcgtgcgcgtcgacggcctcttcgtcagctcgccggcgtccagccccaacacggacggcgtccacgtcgagaacaccaagtccgtccagatcctcaactctaggatctacaacggcgacgactgcgtctccatcggcgccggatgctccgatgtccacgtcgagaacataacatgcggccacggccatggaattaggtacctgtcagtctgtcactcactcactcaccaacgtgcttccatggcgcgcggtaccgtttgtagtgaacctgacgcggcgagctgctgctgtcaccctcgcagcatcggcagcctgggtgtccacaacacccacgcctgcgtgtccaacgtcacggtccggaacgtgcggatactcgactccgacaacggcgtccggatcaagacgtggcagggcggcgccggcgcggtgtcggcggtcgagttcaccggcgtgcagatgcagaacgtgaagaactgcatcgtcatcgaccagtactactgcctcggccacgggtgcgccaaccagacctccgcggtgcgcgtggccggcgtcgcgtacagggacatccacggcacgtacaacccgcaggccggcgcgcccatccgcctcgcgtgcagcgacgccgtcgcctgcacggacatcaccatgtctggcgtcgagctgctgccggccggcggggacgacggagcactgctcgccgacccctactgctggaacgcgtacggggtcatggagacgctcacgctgccaccggtgtactgcttgctggagggcagcccggagtctctccaggatccgctcaccagttgctga

SEQ ID NO: 18137 - DNA, 909 bp, Zea mays
  Peptide Sequence Number=SeqID_61512
atggcagcggcggcggatacctcggaggcgtccgcggcaggaatcgcgctcgcagaggccaatatcaactgggagaggttggacaagacgaggtttcatgtgattggagctatcctgttcacggcccagcaaggtgctctgcacccaacagctgttgtgaagactaggatgcaggttgctgaaggtgggcttgcacatatgtctgggtttgctgtttttaggaggatattgagaagcgatggcatccctggcattttcagaggatttggcaccgctgctgttggagctctgcctgggcgagtgctagctctaacatcactggagatctctaaagaaatgacatttaagtattgtgaacattttgatctgtcagaggcgtcacaaattgctatagcaaatggcattgcaggtctaatgtcgagtatctgttcatgctcatactttgtgcctctagatgtgatttgccaaaggctcatggttcaaggattgccagggatggcaacatacaggggcccattcgatgtgataaataaggttgtcagaacagaagggatccgggggctttatcgaggttttggtatcactatgttgactcagtcgccagcttcagccctttggtggagtgcatatggtggtgctcaacatgctatttggaggagtttgggttatggaaatgactcacaaacaaaaccatctcaatcagaacttgttgttgtccaagcaacagcaggaacaattgctggtgcttgctcgtcgattatcaccactccagtagataccatcaagactcggcttcagcacatgattagcgaccccttcgtctcagtgctccgccagtcctccgacatcctcgcggtgctccacttccacgataacccagtatacgaaggttatggacaactatggtaa

SEQ ID NO: 18138 - DNA, 444 bp, Zea mays
  Peptide Sequence Number=SeqID_61513
atgggcaagaacaacaaacgtaagcgtgagccgactcctccatcagaggagtttggcgactcggagtactcggaggaggagttctcctccgagcccgaggggtctccggctcccgtctctcccccggcgtcgtccgatgactcggacgactcccaggggatagccgcggaggtctggacatatatccgggccgtcgagcgcgccgggctcgaaggctcggatgagtcggagtactcctcggatgaggaggactcggacggcggcgaggagggtgaagacgacgacgacgacgatgacaacgacggcggcagcagtggcgggggcgacggcgacggcagaggcggcaccaagggcggcagcggcggcagcggagacagcaccaggggcagcagcaggggcagcacccggggcggcggcggcggcaggggcagggccagtggctag

SEQ ID NO: 18139 - DNA, 1173 bp, Zea mays
  Peptide Sequence Number=SeqID_61514
atggataaaaacaacactcccctagttgatgttcaaggaatgaaggaaaggaccagcaaggacatggtgaaggacttggaggcatggaaggctagcaaggacgttcggatcaaggcaggaattagccctcgtggcgagctgactaaaccagaaggttccttttgcaacctcaatttgagatttaaggtcagattaccaccagagatagtattaaatataataattgatccagagaataaaagggtgttcaagaatattaagggagtactttttagtggttctagccttcgtgacaccgtggtaaagctaacaatgataacttgtgtcattgatggacgtccactagcagaagggttggatgatgggcaagatcagaaggatactgatttctacaagcaacaagctaaacttctatttaagaacttgtcaaaagggcatcatgaagcttcacggatgtcaattgagacatggccctactatttccaatatccttgtaccatttatgatccttatatgtatatgtatatgtatgtctctattggtccccttagatgttggtcaggtggtttatgcctctcaagatcgattggtgatcaggatgtaggtgaatttattattccggatccttatgtgaagcaaattaagttgtctaatgctggaggtcgtcttattatttcaagcgacggtgtctgggatgctttgattgcagaaatgacttttaaatgtgcacgagggcttcctcctgaggccgcagctgagcaaattgttaaagaagcagttgaagcaaaaggattgagagatgatacaacttgcattgttattgacataatatcaccatacaaaccaaaacgcactatacaatctcaaagaacgccaggaaaaggccttgtgcttctaaaaaatttctttttaaggaaaacaacatctgactcgttgactctccctgatgaggataattatcctgagccagatttggaggaggtctttgaggatggatgcccatccctttcaagaaggtatcattggaattcagtcttcagtttgacaaataacgacttagtagcaccagaaaaagagggggtcatgattccacagtctgtgaagtgtgctggttcagggacatggaatcaccaggcggttgttctggatagtttgaagactaaatatctctag

SEQ ID NO: 18140 - DNA, 162 bp, Zea mays
  Peptide Sequence Number=SeqID_61515
atggggctcgatgtatgcggcttgctctgccaaggtggtgacgaggatgatggttttggttatgactatggtaatggttgtccgcgttgcaaccactgctcaggagaagatgaagtcatggaggaggacttccaggagttccaagagtatgatgagttctag

SEQ ID NO: 18141 - DNA, 324 bp, Zea mays
  Peptide Sequence Number=SeqID_61516
atgctggccgcggccgccactatcaccgtcactgtgcgccccttggaggccaacgtcgctggtggaggtgcgttcccaagtccgaggatctccatctccgatgagatgacgacgcaggcaagcgagagtttcgcgaccttgcaatgtcaacttctcacgcgctgttctctcgctgtttggctatttgcgtgcggacgcgacggccgcgtccagcggcgtgtaccgacggctgaaggagaacccgaggcggcaacagcagccccgcgggcggaggctggggatggcgcagcggcagtgacgttagcgcaggagacgcgaagctag

SEQ ID NO: 18142 - DNA, 1032 bp, Zea mays
  Peptide Sequence Number=SeqID_61517
atggcgactctccccagtcgaccaggcacctcttcgtcctttgggcccgtaccctccgcttcctcgggcgtgtccgccggccatttggacgccgtcaaaccggttggccgtgtccgggtcatctccgcgcccctcctccaaatggccaaaccctaccttgttgtagctagcctacccctccagacgccattatcttcttggtcagtcctgcccactactcgtctcatcaggaagcacggtgctattggcaaattcgttgaattctatggtgttggtgtgggcgagctatctttgcctgctagggccacaattgccaacatgtctccagaatatggagctaccatgggcttcttccttgtgtcgatgattgaagcatacctgcgagctaacaaaatgtttgtggacaagcatgagcctgagacggaacgagttttctcttcatatctggagctggaccttagtgaggtggagccttgcgtttcaggccccaaaaggcctcatgatcgtgtccctttgaaggaaatgaagtcagactggcatgcttgcctggacaacgaagttggtttcaaggtgaagccatgggtaaagacaagccttacccctggatctgtggttgctactgagtacttgaaacatagatatcgttgctgctgcggtgctgtatcctactacctgctcaaccttggggacagcatcaccacggaccacatctcctactcggggaagatccccgagggcacacctgcggccaagtatctgctcgagtatggcgtggagcccaagaacttcagctcctatggtggccgccgcgggaacaatgaggtggtgatgaggggagcgtttgccaatatgaggatcgtgaataagcttcttaatggcgaggctggtccctggacaatccatgttcctaccggggagaagctctacgtttacgacgcggcaatgaaatggaaggagatgctgtcagttttacccaattatcgagtgaaggagtatatgaagaaactttacaagacatctgtacaaccctag

SEQ ID NO: 18143 - DNA, 564 bp, Zea mays
  Peptide Sequence Number=SeqID_61518
atgcgtgagccatcgccggcggagggtgcctgcgcacggattgaattcgggtcaggaaggtgctctaccgggtgctggcaggagactggtgctggaaggagattggtacctttggagcacccaaaaagattctatatagggatgacatttagccatggtgcagataataagttccttggagctgaagattttcctccaactgctcctcaacccttgcatgttcgcttctgcaaagatattgaattacaaggaggaaaactggaacttcctaagaggcttcttcttacatacaaacctgaagaatcggaggacattcctgagcctgcttctgttgaagaggaaaatgcaccagttgaagagcctgttctggtaccacctgttactgaagttgtttcacctcccaagaccgaggtggccgatactggtgacttactgatggggcttccacaactggtaacactgcatttcaagataaggggtttgatcctacatgatgggaactcgcccttgttaccgcaccgagcaacacgacttcatctgcgtctgtcggtcaattgtttgtga

SEQ ID NO: 18144 - DNA, 648 bp, Zea mays
  Peptide Sequence Number=SeqID_61519
atgcccccgcccggacgtcgcgcaagccccgctgcccgcctgcccctggaaatttcgcccgcaccgtgcccccaatctcgcgatgccccgaccgcctcccccaccgtgacagccgcctcgatcttgtctagggctgtttcagccctccaaggactaatagatcatgaaccattaaggtccatgctggtgagtggaatgaggtggagaaatacttgtcaggtttcaccaaggcatgatagagcaaagactatagatattcttgtcaatgatcttaaagttgttgagtttgatgatcttgaagaggacaaattccttaatgctgtcgtcaaggcatcctgctttagtcctcaacaagctaggacttttgttttagaacgtcgcagaagatctcccccaaaacagccactttacagaaacacacacctacacaggccacacagctatcagcgacccaaattataccctaagagcgggttggagagtgaggagctcctgaagagcagaggcacccgcagcacaccaaagggtacattcattggccacaacctgcaaaacagtatgaacaccagatattcaggtgtgtatgagggcttcagcaacattactttcttggtgcatgacttcaatgttgtgcacaagaatcaatga

SEQ ID NO: 18145 - DNA, 312 bp, Zea mays
  Peptide Sequence Number=SeqID_61520
atgagcatactggctaatcggtggaccggcaagcgctgggaatatttattctttttttataacaagctcagggaaggtgtttttcggaccttcggcatttcgaagccttcgtattattcatggatcgagctcgttatgaaaaaacgatctagcaccgcgaaggggctactgttaggggtcttattctccgccaaaggtcttgaagacatagaccatcggcaaagtgatgctgaggatttccctttctctctgccgaagctcctcaagacgaagatctcgtctggaagcaacgatgcatttgagaacaagtga

SEQ ID NO: 18146 - DNA, 807 bp, Zea mays
  Peptide Sequence Number=SeqID_61521
atgcccccctgtgacgtggttggtccgagccctgggtcggaggctcctccgaggtcgaggtcgagtctatcttccgaggtcgaggtcgagtctgagccccgtgtcgggcgaggcggagaccgttgtctgaggccagggctgagtccgagccctagggtcgggcgaggcggagttcgtcgtcttccggagctgaggccgagtccgagccctggggtcgggcgaggtggaagttcgtcgtcttccggagctgaggccgagtccgagccctggggtcgggcgaggcggagttcgtcgtccgaggccgagacgggggccgagccctggggtcgggcgaggcggagcttcccatggcgcccgaggccagacttggctgctgtcagcctcactctgtcgagtggcacagcagtcggagcgatgcaggcggcgctgtcttcttgtcaggcgatcctcgcattaaatgctcctgcgatacggtcggtcggtgtggtagtctggccaaggttgcttctcggcgaagactgggcctcgggcgagccgaagctttgtgctgatgggggttaccagctgaggttaggagtcttggggcccccgagcctccgcacagagcgagaggacggtcagggacaaactcggcttttcgcatatgcccctgcgtcgcctttccgcaaggaggagggcgaaagcgccatgttgccctcggagggcgccgaacatggtgtctccagtgagttgctaacggggctcgatgcctccctctggtgggattccgttacagaatcgttcccgttggtctcggaaatgtcctag

SEQ ID NO: 18147 - DNA, 819 bp, Zea mays
  Peptide Sequence Number=SeqID_61522
atgccgactcatcctcgctcagttccgatgtacgggcccctgcgcgggaaggtcggatcactgttgcgatcatggctcaaatccatcgggccgtctgggcctacgtcgatccagtcttgtgtcgatctgccttactggacgtctctcccaggcccacgaaggcaaagcagaccgaccctcgcacaaatctctgagtccggcctttgggtgcaatctctgcctttgggcgcaatctctgccttgcttgacaccgagtccggccctcgggcgatttctctgcctcgcccgacgctgagttcgacctccggtgaattctccgcctcgcctgaggtcggcctcggctacctgctccaccgcgaatctcgctggtggccactcgaccaactatggtacacatcaaagaattgttcagctaacgcctcgggaagacttccgcctcgcccgagcagggctctgaccttgataaacgcgacaaggaatcacgacgtcactccgcatagggacgttgacggacttcgtaagcaggctttagcctataccccagcactgttacaacaactacggcactcaggtgcgagtaatataagcttcaccccctctgctgaaagtagggccttgcgttgctcgaacgagataagctgcttgtgtcaactcgcacaccatctagactctgggcacgcgacattattcactagttggttaggaccctcactccaaacaccgacagttgacacgccaggtaggggtctgtcgcgtgaaacacttctagttcccgccaagactctagatggcaggctttcatcatccactcaggcttga

SEQ ID NO: 18148 - DNA, 1140 bp, Zea mays
  Peptide Sequence Number=SeqID_61523
atgaatggcggcaaccacccccacggcggtgagccctcctttccgcagctcctccagggccttcagaaggggctggagattcttatgtctgtcgcgcggggtcccgtagcgccagttatcggcggcggcggtcaccactcgctgagaaaacgacgggagcctcccgtcgtcatttcagagataaaaccaccggcgctgccaccctttgttcgaagacgcgaggatggcggggatgtactgcagctcccgcgcctgcctcagctggaggatgcagccgccggcccgcaccgccatgcggacctttccttcccccgtcagcgaggcgaaaagctccgcggagaagagatgggtccacaggtcctagtgagggtcaatccccaagtatccttcacaaaccgctgcgaagatgttggcttgcgagatggagttgggactgaggttgtgcagctccaccccatagacgtgcagaatcgcccgcataaaatggcttgccggcactccgaacccccgctcgtgaaaggaaacgaagctcaccacataccccggcggcggggacggggcggctccgctcggaggggccatccactccggctgcgagtcaccggagagagggcgaagcaaaccctcagcaacaagggccttcaggtcatccaccgtgacggtagagaaaggccacaggtcgcgcggcgaaacaatggtcacccggtcggccatcaccaagcagaagaggtggcggcgaaaaggactggggaccgggaaaggggatactccgaaagggatccttctccacgaaggaagcaggccccaagcccccctactgatcagaggttcgaaggctggcccctcggaagggttcaacagccgcctcagagcactcgggctccgcgcccactactggtaagaggttcgaaggccggcccctcggaagggttcaacggccgcctcaggccactcgggctccgcacccactactggtcagaggttcaaaggccggcccctcggaagggttcaacagccgcctcaggccactcgggctccgcgcccactactgatcaggggttcgtaggctggcccccgaagggttcgacagccgcctcagacgcagagcgagggatgaccctgggtacgttcgatacataa

SEQ ID NO: 18149 - DNA, 318 bp, Zea mays
  Peptide Sequence Number=SeqID_61524
atggaggctcgggcccacgcgtcatgcaaccggcgcgccggttgctacgtgcaagcaactgcaccgccactcgcaccactaccacgcctcctcgactacggaaccagtaccgcgactcgaggcaaccctgcgtacgacccagcagtgccagccaggcgcaacggtcaatacggccaaaaatgggccggcagtaatggcggtggcaggcgggcagaagcagcggtcatgtcgtcagccaagctcacggaccgggaaagggggataccccaaaaaggatccttctccgtgaaggaaacaggccccgagcctccctactga

SEQ ID NO: 18150 - DNA, 180 bp, Zea mays
  Peptide Sequence Number=SeqID_61525
atggcaccgccggcgacccatccacctccgtccggctcctcccaagacaagactgctggtgcgatggatgggagtaggggctcaaccaccgtcggcgcccagctcgacatgagcaacattgtttatggcactagcagattacgtctgcaccatcgattatccaacacacatgatccgtga

SEQ ID NO: 18151 - DNA, 477 bp, Zea mays
  Peptide Sequence Number=SeqID_61526
atgatgtttatgcaccgctgcaacaacgcctcgcacgtaatcgacaaggtatgggagaaaaataattacagggtcgtcaacagcggaggagcagcactttcgcgccacgccagccaccggcgccagccaaggcgtcatcatcttcgggcgtacggacgtccacatcttccgttgtgccttcgggtgttgcagcaaaacctgctacgaccacctcttccacaggccgctcctccgacatcaagtgccaccgctgccagggacttggccatattcagcgagattgccctagaaaacgggcatacattgctactggtgatggtggagacttatgatggtgatgaagaggttcttggtacaacaacgaccgagacctataaggccttgattgtgcaacgagctttgagtgccacggctagtgacgacgacaacagacagtgccacaacctcttcaacatgttcctcatcgtcaaggactga

SEQ ID NO: 18152 - DNA, 129 bp, Zea mays
  Peptide Sequence Number=SeqID_61527
atggcgggcggaattgagctcgccagagctaaggaaagggggctggccggtgaggagatatggagccaggaaatccggtctgtctccctgcccaaacccaaggcaaatccaagtttttgtcatgcctag

SEQ ID NO: 18153 - DNA, 399 bp, Zea mays
  Peptide Sequence Number=SeqID_61528
atgggcaagaacaagaagggtggtagttcttcgcatcactccggcgacaaacgcaagcgtgagccgactcctccctcggaggacttcggcgactcggagtactcggaggaagagttctcctccgagtctgaggagatatggacctacatccgggccgtcgagcgcgccgggctcgagggctcggatgagtcggagtactcctcggacgaggagaactccttggactcgtccgaggagggcggtggcggcgatggcggtgacgacgacgatgacggaggcgatggtgatggcggcggaggcgacggcaaaagcggtgacggcggcggcaaaggtggcagcgacaagggcggtggcggcagcaagggcagcagtaggggcaacaacaaggccagtggctag

SEQ ID NO: 18154 - DNA, 213 bp, Zea mays
  Peptide Sequence Number=SeqID_61529
atggcggcaaccacccccacggcggtgagccctcctttccgcagctcctccagggccttcagaaggggctggagattattatgtctgtcgcgcgggttcggtcccgagacctccaggtgggcgacttggtgcttcggctgcgacaagatgcccgagggcggcacaagctcacgcctccctaggaagggtcgttcgtcatcgccaaggttctga

SEQ ID NO: 18155 - DNA, 795 bp, Zea mays
  Peptide Sequence Number=SeqID_61530
atgacgtggtcggtccgagccctgggtcgggcgaggcggaggctcctccgaggtcgaggtcgagtccgagccccgggtcgggcgaggcggggaccgtcgtccgaggccaaggctgagtccgagccctggggtcgggcgaggcagaccgaggctgagtccgagccctggggtcgggcgaggcagagttcgtcgtcttctggagtcgaggctgagtctaagccctggggtcgggcaaggcagagttcgtcgtcttccggagccgaggctgagcccgagccctggggtcgggcgaggcggagttcgtcgtccgaggccgagacgggggccaaggctgagcccgagccctggggtcaggcgaggcggagttcgtcgtccgaggccgagacaggggccgagccctggggtcgggcgaggcggagcttcctatggcgcccgaggccggacttggctgcttttagcctcactctgtcgagtggcacagcagttggagcgacgcaggcggtgctgtcttcttgtcaggcgatccttgcattaaatgctcctgcgatacggtcggttggcgtggcgatctggccaaggttgcttctcggcgaagactgggactcgggcgagctgaagctttgtgctgatgggggttaccagctgagattaggagtcttgggggtgcaaaggaaaaaggagaagatggcccggctggccgaccttcagaagaagatcaacgaagctgctgaggaatgcacacaagatcatgaggaataccttcaggcgtatgtccgaaggttcttgcgattgtga

SEQ ID NO: 18156 - DNA, 204 bp, Zea mays
  Peptide Sequence Number=SeqID_61531
atgaaccccaagagcatgcctcaggggaccccgaagacacacttttcgggattaagcttcacgcctttcgccttgagacatcggaatgtcgcttcaaggtcggaaaggaggtcggaggccttcctcgtcttgactacgatgtcatcaacggttggcaagccattcgggatggaatacctctttgatgaaccctgccgccagtag

SEQ ID NO: 18157 - DNA, 1038 bp, Zea mays
  Peptide Sequence Number=SeqID_61532
atggcaagcagcgcgaggggaagcggcactttggcggcgacgtggtcctcaggcaggcagtttgaagcacacatagttcgggggactggtcgcgcggtcgcgccgcgcggccctctgggcccgccggctttaggcgagacgaaagccatcgacggccgccacggagcaggccgccccgtactgactctacaggcccagaacgggccgcaggatcgccggccacctgctccaaaaatcaagggggccaagcctctcctcgatcccgcacaggcgcacaccgatcccgctcctatcgcgccccgaaaccctctcgtctggaaaccgtcgcccccgacctcccatctcctcccccgaaaccctctccttgccctcaacgtcgtccctcctgcaatcccgcccctgcccgcgcctgcatcccgcgccgcccccgcgctcccatccgctaccccatctatctcgccgtcgacctcgcccaccctgcctcccacgatggggagcgccatcagcgaccgccacatccgcgacctagcccaccttgcctcccacgatggggagccacatccgcgaccgccagcacgccaagcgtggatctcgcgcaactcccagcgcgcagccgctaatggcgcccagcagccgctgatcccatccccgcgctcccctccgctaccccatccatctcgccgtcgacccgctccgatccaccaccagctcacggcgcgcgccgcgcggagcgggggcgtccaccggcggtactacaagacgagcgggcacggccggtgctacggcaacaacatgggcccgccgtgcgcggggtgggtggagatgatggtgcccgtgttctcgcgcgcggcgtggcggtgcgcgtggcacatgatccagaacgacctcatctacgcctggggcatggactacaagcttagctactgcgcgcagggcgaccggagccgcaacgtccctaagctcggcgacggcggcaaggcgacgatgacggctgccacgtcggcattggggacggcagaccggttagcggtcaggtag

SEQ ID NO: 18158 - DNA, 318 bp, Zea mays
  Peptide Sequence Number=SeqID_61533
atggtgaaggcggcgatgagtggcaagctcaaggagatggattgggaaaagaagatcaaaatctgcgagcttgtggagcaagatcctgggggactccaagctgaacccctcaccttcgggaattctcagaggcgctccgctataattcaccggtctgtccggtgcaccaccggacagtgtccgcggagcaacggctacttcgcgcgcaacggtcgaatgcaacgcattaaatgcgcgcctgcacgcgcagaggagcagagcacgcgcgggtggcacaccggacagcctacagggcctgttcggtgcaccaccggatag

SEQ ID NO: 18159 - DNA, 384 bp, Zea mays
  Peptide Sequence Number=SeqID_61534
atgcgcactcgctgtcggtcgcgctcggctgctcgtcgttgtcctgcctcctcgtccacgccgcagtcgtcatcgaccctctccaacctcgtctgcgttgcgacctccatcctgcctgctcgcgttttccccctctgctcaaacgtcggcgcccgtggtgaagaccaggcgctgagcagacagagtcgcccgtctgtgtcgattaaggaccgtaccgttgactggcctgttgtggttgagactttgcaactagccacataccctggtatgggacagggtaagcttgaatccggctattccatacgtgaagagacaatcgcgcactgggagtggagagatggcgggagtatcatgtaccctcctggcacagcgcacgcctggtag

SEQ ID NO: 18160 - DNA, 396 bp, Zea mays
  Peptide Sequence Number=SeqID_61535
atgtcggcgaactgcagcgtggtggggacgctgagaaccggaaaaaacgccggcagcgacacgctcgcggacgaagtgcaggtcgatctccacatgcttcgtgcgctgatgttgcacggggttggttgtgacagctctcccaagttatcgggcccacgtgcaccaatccttgccttaatggcctcgggtggctgtgcacgtgtaccgggggataaaaccctgagtacgcaattactcagcaagacttacccgactaaagaaaggactctcaagggtatgctaactgattgggaatcaagaaaagcttgctaccagttgatccttaagccaagttttatttcactagttaggttattacctgaatctatatttgcctggtctagttcaagcacttag

SEQ ID NO: 18161 - DNA, 255 bp, Zea mays
  Peptide Sequence Number=SeqID_61536
atgatcccctcgctagcaccaccccagtccccacccagcagctggctccgacgggtcaccttccttctcgtcctctcgctagcacaaccaaaccagcaaggtttgcaggacttctttgctgaactcctcacactggcgaggccttccggcaccaccaccttcccggactgggaaggagaggaaggctgccgtgaagctgtcgaggttccaaacagcagccgcttgagctcgtgcaaaatcagggaggaaactgtt

SEQ ID NO: 18162 - DNA, 327 bp, Zea mays
  Peptide Sequence Number=SeqID_61537
atggactatctgattgaacacaaagctagagaaaagaagatagtgaatgcagacaaaggaaaaattaaatctcagactgagcttgaacctagggaaaaggggaccttatgcacttcagatgaagatattggatgcaaatcagaaatggggagtctgaaccagaacaaagatgtgattctcactatggtttcaactatgcagtattcaagacgcccagcacctacaaattgttggaggggatgctttcatgtcttcaatgctggagaaaagctaaatcttgttgaatttaaagcctactttccatcaagtgtcatccagagttattga

SEQ ID NO: 18163 - DNA, 273 bp, Zea mays
  Peptide Sequence Number=SeqID_61538
atggccgcgataagacacaacatcatcaaaccacgtttgggccatgtctctaagaagacgctcgtcgaggagccgcaccaggttccgagcgtctataaaaggagcccgaggtcgctagggttcaattttgacaccccacctcgatgcacaagaggagacagttccggagaggcgcgcggcggtggcggttcccgagatgcgcggcggcagctccctgaggggcgcgtggtggcggtggctcccccaggcacgcgcaaggcggctgctcactga

SEQ ID NO: 18164 - DNA, 414 bp, Zea mays
  Peptide Sequence Number=SeqID_61539
atggctaccgcccgggggatcgacccctttttaaaggcggctctccccactcgcatcctcaagcgtcacgggcaaagtcttcaccgatgtgctctggggtcctccccctacgacacgggggctgggtcccacacgtcatgcaagctgaccagaaacggaagaagccaaaccactgcgcgtgaagcagggaccgggaaaggggatatttcgaaagggatccttctccgcgaaggaagcgggccccgagccctcctactgatcaggggttcgaaggctggcccctcggaagggttcgacagccgccccagagcactcgggctccaagccctcttattgatcaggggttcgaaggttggcccctcggaagggttcgacagtcgccccagagcactcgggctccgtgcccactactga

SEQ ID NO: 18165 - DNA, 732 bp, Zea mays
  Peptide Sequence Number=SeqID_61540
atgatgaccaccagttcggtggtggggagaagcaagccgggctgcggcctctgccccgccctcagcttcaaggatcttcatcatcctcgctgtggcggagggcgagctgagccggggttctacctcccgcatgggctggcaggtcgcctcttccttcagcattcaagggagagggcgctcaccggccttgtggagggggcgaacttcgacaacgtgggaccggtcggccgcaagcgtcgccagctccagcgtgcctggctcgctggcttagctggctctgtcgcggcctccgacgctgcctcctaccgcttgatccgggcgtggccgtccgtccaccgcacgggcgactgttgctccgtgcgcactgggggatcgtccaagacgtcgtacgtcgcatgggcggcgttcgtgttcttggattgtcttgtcctcactccagcacgacgcctccgcgcggaggtggccactgtcgtcggtgctgaggtggtggtcgctagaggaggtttctccgccgatgagaccgtcggcgccacccgcggtcagacctccgactctttggctttgatgaaccttcggccgctttgcgatgagccaaagccggaggtagcggtgccagcctggacaaaggcagagtcggctcgaaaagaggcttcgtcggcccgggagcatgtggcttccctggccgaggaggtgcagcagcggcggctagagcttggccaggtcgtccgctag

SEQ ID NO: 18166 - DNA, 291 bp, Zea mays
  Peptide Sequence Number=SeqID_61541
atgtggccgagcggtcaattcagagaaaaggacattgacgccaatgacgtcgccgacctcctgccacggccaaaatataaaaagacggaggaggtgaaccaggtgttctgcgacaatgcggccaacgagctccagggcatcccgaggtctacgacgtgccgctcgtgtccatcgacttcaggtgctccaacatctcctacaccatcgacacctccctcactatggtcatgggagacgagtcagatggcaatggggtcccaatccccgatatcccgtggggaatttctctaa

SEQ ID NO: 18167 - DNA, 261 bp, Zea mays
  Peptide Sequence Number=SeqID_61542
atgggtcctatgggtgtactactaacgctccctagccgaagctgtgttcaagtccaggtcctagtcaaggctgcctcctgggagccgttcccaactcttttaggtatgctggcatccagtctcgacacgtcgagcctacatcccacgggggccaggtatggactgctctgcaccagcagggtcgcgttgaaagctagctccaagcggcttgccagcggtggcgaccacctcagcgtgtgcgccatggcgaggaggccctag

SEQ ID NO: 18168 - DNA, 876 bp, Zea mays
  Peptide Sequence Number=SeqID_61543
atggaggatgactcgtgggcctgggaccttgtgccagagactggttcgctgctttcggtggagatgaagaggcgcactaccgcaggcgcggactggtccgctgccttcgacagaaacgaagaggcgtatctactgcgggcagtggcgtgctcctcacgcggcggagacgaagaggcgcatttaccacgggcggtggtgtgctcctcactcggcgccaccatggccttgctagaccctcccgagcgcctccagcccgaggtggcactcaacttggtgcgcaacccgctcggatggggtgtgctggcgtttgccagaaggatccgtgtcggtgtttctcctcacgacgacctcgctaccgaagagtttgtgttcttcgtctccaaactccccagcgggttggcgttgccaaacccgtctttcctcgtgctgctgttggaggggcttggcctccagcctctacatgttacgccctgcttcatccttcaggcagccatcatcgcctacctccgcgggatcgagccgtgctgcggctccatctctttggctttgatggctttggcgccgccttcaacggcgcttcctgccgccaagcagagcgtggctgcccgtcctccgtatgggggacggtcgcgcaggtccgccgcatctgcagcgccccctgcgctgccgcccggggagtcgtacaagacgtcgtacgccgtggtggtggcggggccgtgcttggatggtcttgtcctcactcccgtaggaggacgggggctagggcctcctcgccatggcgcacacgctgaggtggtcgccaccgctggcaagccgcttggagctagctttcaacgcgaccctgctggtgcagagcagtccatacctgtagagtag

SEQ ID NO: 18169 - DNA, 258 bp, Zea mays
  Peptide Sequence Number=SeqID_61544
atgtccggtgtgcaccggactgtccgtttcgccctattcaccccccctctaggcgactttcagcttgtaaccccctactgcaagcgcatccatccgccctgggcgcaggacaacacgaaggccgcggtttccccttactgttctcccccctttgtgtcccatctcgcgccgacccatctgggctgggacacgcagcgacaatttactcgtcggtccagggacccctcagggtcgaaacgccgacacagctatacttag

SEQ ID NO: 18170 - DNA, 657 bp, Zea mays
  Peptide Sequence Number=SeqID_61545
atgtattcgcgctcccttatgcatcgtgtctttccaccttccaagcccccggatgggggatacccgccgtctttccgccttgtcgtcgggggaacaaaactccgcgggagttggtacctttcagccatcgttcggcttcaaggattttcatcagccagcccggctgtacccctccgccggcggtcacccgagacggtgaccaccagcccctgggtggggagaagcaagccgggctgcgatcttggtcccaccctcagcttcaaggatgttcatcatcctcgctggggtggaggccgggctgagccggagctctacctcccgcgcgggtccgtgggtcagcctctcctgcggcgttcgagcgagagggcgctcactggccctgtgggcgggtcggacttcgacaacgcgaggctggtcgacggcgggcgtcgtcagcctcagcgcgtcgggctcgtcggcttggctcccggtgccccctcctgccggaaggcggctgccgcgccgtgtgcacgggaggaccgcccaagatgtcgcgcgctgctagggcggcgttcgtgttctggggcggtcctctttgcacaggtacggcgcctacgcgcggaggtcggtgccccactcgtccgggaggatctgagtggggatctgccggagggctga

SEQ ID NO: 18171 - DNA, 2169 bp, Zea mays
  Peptide Sequence Number=SeqID_61546
atggcgcctcctgttgacgtggctggtctgcgccctaggttgggcgatgtggaagctcctctaaagccgaagtcgagtctgtcttccgtggccgaggtcgagtccgagcccctggttcgggcgaggcggagaccgtcggctgaggccagggcggagtccgagccctggggtcgggcggagcggagttcgtcgtcttctggggctgagcccaagtccgagccctgggtcgggcggagcggagttcgtcgtcttctgagcccaacccgagtccgagccctgggtcgggcggagcgaagttcgtcatcttctggggctgagcccgagtccgagccctgggtcgggcggagcggagttcgccgtcttctggggcttagcccgagtctgagccctaggtcgggcggagcggagttcgccgtcttccggggcttagcccgagtccgagccctgggtcgggcggagcggagccgttcagtggagcggcgaagtgacggcggtcacttcggctctgtcggctggggggcgcgcgttaggataaagctttatgctgatgggggttaccagctgagaattaggagccttgaggagttctgcgcctccaacttggcggacgagctgaggaagcccagatcgttgatggccgcagacgacctcacggcgcgcgatctgatgatggccgcggccgacctcacggcacctcaaacctggtatccttccgcgcgcgccatgcgccgccgcgtcgtgtaccactgcgggccaacaaacagcggcaagacacacaacgcgctcgccagcttctcggcggccaagtccggggtgtattgcagcccgttgcgcctcctcgccatggaaatattcgacaaggtcaacgccacgggtgtcagctgtagcttgcgcactggccaggaggttaaggaggtggccttcgccagccatctcgcctgcaccattgagatggtatcgaccgaagagatctacgaggtcgccgtggttgacgaggtacagatgatggccgaccctgtcaggggctctgcatggacgcgcgctctgcttgggctcagggcggaggagatacacctctgcggcgacgatagcgtgctcagcgttatccggaagatttgtgcagacactggggatgatttattggtgcaccagtacgagcggttcaagcctcttgtagtcgaggaaaatacacttcgtgggtacttccagaatatacgttctggtgactgggtggttgctttctctcgcaagaagatatttgagatcaagctggcaattgagacgtatacccaccacaagtgttgtgttatttatggagctcttccgccagagacacgccgacagcaagcagagctgttcaaccaggagcataatgaatatgatgtccttgtagctaccgatgcagtcggaatggggctcaaccttaacattagaagggttgtgttctataccttgattaaatacgatggagaaaagacggcgtcggtacctgcttcactggtaaaacagattgctggtcgtgctggtcggaggggcagtgcttatccacatggacttgcaacaaccttcaaatatgatctgtgctatttgactcggtgtctggaagagccactcgaagaggcggagaaagtcggactctttcccacttttgagcaactcgagatgtttgcgagtcaattccccgagcttaccttcaataatctgttaaataaattatgcgatacttgtcgcatcgatgacacatacttcatatgccagcatgacaatatgaagaaggttgctgatatgctcgagggagtgcatggtctttcactcaagagtcgctacggtttttgcttggctcccgtgaatacaaggaattcagaagccatggaccatctcttgagatttgccaataactattctgaaagtcattatgttaccatgggattagaaatgccaagtggttatgcaacaaatgacactcagttcctagacctagagacaaaacaccaggtcctatcaatgtacctatggttggcacaacattttggggaagacaacttccctcatgtgcaggaggctcaaaccatgtcaacaaatattgctgatttacttggccagtcacttgcgaaaggatgctggaagcctcaattaagatatcaatttataggacaaccgccagaatag

SEQ ID NO: 18172 - DNA, 153 bp, Zea mays
  Peptide Sequence Number=SeqID_61547
atggacttcgaggagctctgcagcgacttcgaatgcataagcagcccctacgtggagtccataatgaggcaggtcgcgcgggacatctttgagcttcgcgaggataaccgcgcattcagctgctacgccgtccccgtgaagcttttggtttga

SEQ ID NO: 18173 - DNA, 1103 bp, Zea mays
  Peptide Sequence Number=SeqID_61548
acgccgaagaaaattccgaaggaagaaagcttgaggcagccacggcaatggcgtcccgccggttcttcgtctacgacccctacgagtacgagtacaccacagccccgcactacctctacgagccatactatcagccccagtccgtgcccacccgcagccgcagagccaggggcatctttgcgggcgcgggcgccgagtcggcggccgcggaagcgagacgcgcgcccagggaaagggagacgcacacgtcgttctcgatcccagtccacgggtccgactcggattccgagccggagagggagcgaaaggcggcggggtctcgcgcgagaccgatggcgccgccggcgatgtcggcggagaaggccgcggcgaggatgcaggcggcggcgcgcgggctcctggcaaggaagtcggtgcgggcggtgcgccaggtggagcgggaggcggagcaagtccgggcgaagattgcgtgcgaggaggagtccccgctggcggaacccagcgcgcgcgtcgccgtctgggaggcgctgatgaggatgctgctgcgtctcgacacggtgcgcggcgcgcgggattaccggaggcgggtcaccaagcgggtcctcgcgctgcaggacgccgtcgacgcgctcgagaccaagccggcgccggcaaccgtgtctgtggcggaggagacacccgaggcggcggccgtcgaggtggcggaggagagcgcggtcgtagcgccgaagctgccagacgctgtacaggaaaaggaagcggtggacgagccagagggttcggaggcagagggcgagttggagatgttggctgaggaacacgaacacacctcacccgtggcaaccacgtccgacgaccaggagccaccgcgcaaggaaccagcgtgcccgttggagacaacgacggctgcagctgccggcgccgcctccgacggcgtggacgcgaggaagctgatgcagatggtggcggcgttgtgcgagcagagcgcgcagcagtgcgcgctgatcggcacgctggtcgagcgtgtggacgcgctggagcgtaacgtgcgggtgcggctgatggaagacgccgggagcgccggcggcgggccaagaagctga

SEQ ID NO: 18174 - DNA, 579 bp, Zea mays
  Peptide Sequence Number=SeqID_61549
atgacgaaggacgtggtgatcgagcacggggagagctccaaggcgcctctggtggcgccggtggcggcgggcggcgtcagccgcgccgtgtccgtcgccgacgtcttcctcaggttccttgccatcgtcgccaccatcggcagcgccgtctccatgggcaccaccaaccagacgctccccttcttcacgcagttcatccagttcgaggccaagtacagcgacctcccgtccttcacgttcttcgtggcggcgaacgcggtggcgtgcacgtacctcgtgctgtccatcccgctgtccatcgtgcacgtcgtcaggcccagcgcccgctacagccgtctggtcctcgtcttcttcgacgcggctatgctggccctgctgacggccggcgcgtcggccgccgcggcgatcgtgtacctggcgcacaagggcaacgtgcgcgccaactggttcgccatctgccagcagttcgactccttctgcgaacgcatctcgggctccctcatcggctccttcgccgccatggtcctgctcatagtcctcatcttcctatctgccttggcgctcgccagacgccactga

SEQ ID NO: 18175 - DNA, 1955 bp, Zea mays
  Peptide Sequence Number=SeqID_61550
atggggacatgtgcggcccccgggggaaggatgtcttcgcccgagctccgggagtcttcggcgcgaatgctggaggttaccgggggtcgatggccaaagaatcttccgatcccctgggcggagggcgaagacatgtctacgtctcgtatagctcgtggcttgaggattttcccttacggacagaatattgctgctgttgtgtcggcagtgatgaacaaggaccatcaagacgctgcgcaaaagcgccgggcggttatcaggatcgccgaacctaggcgtgaggcgaagaaagcgcgggggagcgtgaaggctgctgcccccagcagtagcaagccgacgacggctgcgaaaccggccgcgcccggatccagcaaggcatcggcgagcgcgaagactgccgttgctggtggaaccaagcctcccccttgcgaagctgcgaaaggatgggagctgccttcgccggggaaacccgctgccgccaaggacgtggcaggctccatgtcctggctgtcgcaacagctgagggaggtgtcacagcagctaagtcaagcggccgagttcgccgaccgcgtggcgtcgggtgccctgactgcagatgtggctgccgaagtcgagagacttcaggcgcagcacgcggatgccgtccgagagaagtcggctgcggagagcaaaaaccgcaggctggcggagaaagtggccgccttggaggccgacaagacggacctccggcgccagctggctgcgcaggcggaggctaaagtggcgcgggcggagggaagtctcgccagcaaacgcgccgaggagtgggaggcaaggttcaacgccctgcgcggccgcatggacaaggccgaggcctctacgcgctcggaggttgagcggacgctcgcacagctcgtggactcataccgcgagctgggtgcacggactgctgacttcgaagtgcccgtccgggaggcggaccttcacttcctcgaatggttgcaggaggagttgctggtgctcccgaccattgtggagggtttcatgtccttcgcctccctcgtcacctgcgagggggccatgaatgcgttgtcccgcgagggctacaggcactacgaggtcttcgaccaatcagacgagaactttgaatgtgagatcttcaaggccgaagaccctgttgtgaagcagtcagcgggggcactttttgataggatgtggggggcgcatggtcgggaggcgatggagcgtgccgaggacgtcgatgaccttggagatctggccggcgcgccacccgaggccgcagaggtcaatccggtgctgccctcggatgccggtgaaggcccctcggctgtgcccgtgcctactgtggccggcaaagaccctgtgtcggcccctgcgccgacggtcgaggatgccctgaaggtggtggctgagccggcagtcgaagaccccacggccgccgccgggccttcgcagggttttgggcctgcgcacgcaaccgctactgacaatgctaattttgtggcggcttcgaccttggttgctgaagatgattctgatgattccgtgtctaagttttttgagtctgatgattctgggagctcggttgtgtggacggaagagttctcggatgaggacttggattattttgcggcattggatgtggctgcggcggaggcttctccgcgtgtgatgggtgctgaagctcttcctggtgcgagtgctgggcgtaggcggcgaagggcggtggcgaaacggagagtgagtgaggtgtcgcgaagtgataggcgtcattgtggtgaggtggagggtggtcgtcttcgtgtggacggggctggcaaacgagaattgttgtcctcgccggctggggcgagtttaggtgagggggagctgcgaaatctttttgagggtgaggagctgaggatgatgctgttcaactacaaggagatgggtatcatcccgaaggttgaaccaat

SEQ ID NO: 18176 - DNA, 511 bp, Zea mays
  Peptide Sequence Number=SeqID_61551
atggcgcatgatgaagaggtcgaggacctcgggggtctagatagcacactgcccaaggcatcgggggtggagctgtcgccgccatccgatgttggcgagggccccttggtgacccccacgctgactggtgctggcgaagaccctgtgccggccgctgcgccgacgggtgaggacacttcgatggtggttccatcgtttgggcctgcgcaagcaaccgctgctggcaatactaattttgtggcggccgcaaccgttgtgcctgccgatgataatttatttggctctggatctgagtgttttgagtctgatggtgagtctgggagtttgttttcctggactgaagagtcctcggatgaaggcttggattattttgctgcattagatgtggctgcggcggtgtccttgccgcgtgtgggggttggcgaggcagctgatcttcctagcgtgaggaccaagtacaggcggcgaagggtggtgtcgaagcatagcttgggtgaggtttcgcgaagtg

SEQ ID NO: 18177 - DNA, 381 bp, Zea mays
  Peptide Sequence Number=SeqID_61552
atggacatctgcgtggatgattaccgcgtaggtggtgtcatgatgtttgatgcgcacacgggccaaggactcgttgggtcggatgctgggcaactggctgttgtcccggctccggtggtggccacgccggttgcgttagtgatcgaggcgaagggcacttcgcaggacccgtggtccagattttgcgccagcggcaagatttcgtcggccgctgccgctgaagacgtggcgggctctgtgtcccagcagctgaaacatgcaacgcagcagctgaagcatgcggccgccttcgccgaccatgttgcgtcgggcgccctgacttcggagtttgctgtcgagaggcagcgactcgagggcaggatcgagcgcctccaagcgtag

SEQ ID NO: 18178 - DNA, 336 bp, Zea mays
  Peptide Sequence Number=SeqID_61553
atgcaggcagcccagcaggagcgcgccgacaacatggtggcgcatgcctccacccgtctggctacgatggagaatgtcaccaaggtgttcgagtcttggcacccaaggatggagggctcggttgagacgattcagacgtctgtagaggcagtgcgctcagaactcgccagagtttctcacatcctggagcgggatgaatcgaacaatcgagcggccacaggtcagttcaagtcgaaggcgcagtgcccacctgcggccatgccatacgtcgatgacccgggacagcaaggctatgttccacatcctcgggagtttggttttggggagtcattgtaa

SEQ ID NO: 18179 - DNA, 237 bp, Zea mays
  Peptide Sequence Number=SeqID_61554
atggtgaaggaggatgagaaggttttaaagaagagaaaatccactcctgagccgaaggtgacagctttaaagaaaagaaaagctaaatccccagagccgaaggccgctgccgaagcaaacatttcggccgaagctgcagctgccgccgaagctgccaacttggagagcacactatctagaattgataaattgttgttggacatgcctacagaagaaatagttgcagctgcaggatag

SEQ ID NO: 18180 - DNA, 1770 bp, Zea mays
  Peptide Sequence Number=SeqID_61555
atgaaggggcccttcggtgctgtccgcatgagcagcgggcgcgaccttgttgaggagtttgtcgggtatggggtatggcccttggcgcatggctgggcgctgggcgaagtatgccctcgccagatgccctcccgtggcgggatgctggtgcgaagtcctgcctttgcgctggatttgcatggccgagatcctgccgcattcgtgcgtgaagcggaagatggtgcggcgaggatcgtgggtcgctacgtgccgaagacagagggtccgcggagctgggatatccgtgggtccaatgacaagctgaatcgggttttcgaattgaaccgtttgccgtacgattgttatcctggggaagacaccgccgaccgccgcaggaagaaaccgatgggcggtaccgaggaagggccttcgcaagaggctgtcccggccactaagaagagaaaattaggtactatattggggagaaagggggtgtctgataattttgctgtggagttgatgggaacatgtgcggcccccgggggaaggatgtcttcgcccgagctccgggagtcttcggcgcgaatgctggaggttaccgggggtcggtggccaaagaatcttccgatcccttgggcagagggcgaagacatgtctacgtctcgtatagctcatggcttgaggattttctcttacggacgaaatattgctgctgttgtgtcgtcagtgatgaacaaggattgccaggatgctgcgcagaagcgtcgggcggtcatcaggcttcccgatcctaggcgtgaagcgaagagagcgtgggggagtgtgaaggctgtcgcccccggcggtagccagccgacgctggctgcgaaaccggccgcgcccggatccagcaaggtgccggagagcacgaaggcggtcgtcaccgacagaaccaagtctgccccgggtggagctgcgaaggtccgggagctgccttcgccggggagacgtgttgccgacttcggcatgaatattagcgtggacgactatttcgttgggtcgggcgaggggcaaatggttgttgtcccgcctgtggtggcagccacggcatcaaccgcggtggttggggtgaggggtgacgctttctgcgcgagcggcgagatttcgtcggccgctgctgtcaaggacgaggtgggcaccatgtcctgccggctaagggaggcgtcgcagcagttgtcgcagcagctaagacaagcggccgacttcgccgaccgtgtggcgtcgggtgcccttactgcagatgtgtctgccgaagtcgagagacttcgggcgcagcacgcggacgccgtccgggagaagtcggctgcggagagcaaaaaccgcaggctggcggagaaggtggccgccctagaggccgagaagacagacctccggcgccagctggtggaggaaaggagggaggccaaccaggccatcgccgaggcacaggctgcgcaggcggaggccaaattggcgcgggcggagggaagtctcgccagccaacgcgccgaggaatgggaggtgaggttcaacggtctgtgcagtcgtgtggacaaggccgaggcctctacgcgctcggaggttgagcggacgcgcgcacagctcgtggactcgtaccgcgagttggggcgcggactactgacttcgaggtgcccgaccgagaggcgggccttcgcttcctcgagtggttgcaagacgagccgctggtactcccgaccatcgtggaaggtttcatgtcctttgcctccctcgtcatctgtgaaggggctatga

SEQ ID NO: 18181 - DNA, 168 bp, Zea mays
  Peptide Sequence Number=SeqID_61556
atgcggaggaatctcggcttctgttacgcgaagtccgcggggaggaaggcttccgccagggcggccccacgcgccagcgagagctcgacccatgtcgctgttccgtggagcgctgaccgcatggcccctcctgtcagtgatcctgtgagttttcaaattccattttaa

SEQ ID NO: 18182 - DNA, 414 bp, Zea mays
  Peptide Sequence Number=SeqID_61557
atgcctaagccctgtgtacatgccaacgtggctgttgggggagagcttgagccctatacacgtgatagcgtggccatcggagaggcgcctgagccctgtaggagcacatctggcagtgcggcaaggatcctgctgacgtctccttactgccgtaaggggctgagagccaccggcgtcatggttgcacgcggggcaccatcattacccgtcgtcgggcctaagctggctagggatagggtaatgatgtatcccctgttggcacggtcggtccgagcccaaggtcgggcgaggcagagacttctcttaaggccgaggccggggtcgggcgaggacgcgattcctcccgagaccgaggtcgaggccgagcccgggggtcgggcgaggcgaggatttccttccaaggccggagcctga

SEQ ID NO: 18183 - DNA, 1281 bp, Zea mays
  Peptide Sequence Number=SeqID_61558
atgccgaccgccgcgcctgtccctgcggctgactggcccgtggccgtcgcctttaattggcactgttgggtcatgcgcagggctgcctcgagtcgcgatactggttccgcagtcgaggaggcgcggcattcggcgcaagtggcggtgcggctctttgcacgtcgtaaccggcgcgccggttacatgacatgtgggcctgcttcctttgcgctggtccaccggatgtggtcgaagccaaaagggcgcacagttgaggtgcggttggatgcctgtcgcgtggtagtccaccctttcgaccactggtttctgcgaagatgggagagcgcttgtaaccgcggggcggttgcatgcctcgcgtgcggcggttcgccttcttcgtgcttcggatcagctcgggagagggcgctcaccggccttgtggagggggtgaacttcgacaacgcgggaccggtcggccgcaagcgtcgtcagctccagcgtgcctggcttgctagctcagctggctctgttgcggcctccgacgctgcctcctgcaacttgatccgggcatggtcgtccgtccatcacgcgggcgactgttgcgccatgcgcaccggggatcatccaagacgccgtcggggcctgcccatccgcgaggacttgagtggggatctgccggtgcaggctggggcatccgccattcgtcggcgtggcgctggcgcgcaggtggccgctgtcgtcggtgctgaggtggtggcagctagagaaggtttctctgccgacgagaccgtcggcgccatctgcagctggacccccggctctttggctttcatggcttgtcctcgccactcgagtggagacgtgggtgaaggcctcatcacagcagcgtctaccttgaggtcagcgctgctgctgtttagccacccgaagcaggggtcattgtcgctgctgaaccctcggctgctctgcgatgagccggagtcggaggcagcggtgttggcgtggacagaggcggagtcggctcaaaaagagacttcgtcggcccgggagctagtggcttcccaggccgaggaagatgtggcagcagcagctggagcttggccaagacatccgctggcgcggtgctggcgtcctcccttgggaggaggtcccttcgcccgggttgccatccgaggccgggacaggttccaccgagggtggaaacaacgccgagggtgctgctgctccccctgccgatgcctgaacctgcaggaacagtttgtctgtagcatgcgcacgtttttcacggccgccgaggcctaa

SEQ ID NO: 18184 - DNA, 482 bp, Zea mays
  Peptide Sequence Number=SeqID_61559
cgttcctgctccccagcctccgttgtgctcgacagcatgtaattcatgtcgaagcagcagctgcgatcccttgcgttgtgatcgtcagatcaagtgtcgcgtcgtcgatctgtgcagatcctgttcggccatcggttttgccggttgtcgatttcctattcgccatggttatcacgtcggttgttcctatccgagctagtctagctcgccagccgtcgcgccctctttacccgttgagccgtgtgttgccgcgttcacctcgttgtgtcgttgtggctttatcggcgtactgctgtggtacctggatcgcgctcgcctcaactcgaacgagtcatactgccatcatcgtcgtcaaatggtgttggggtcgtgcttcggtgcgccgaaggtctcacacgaagaagcagcttcggctgaagtcgtctccaagagatggccgaaggtcccttttcatggagcttcggcgttttaaaccgacatag

SEQ ID NO: 18185 - DNA, 1104 bp, Zea mays
  Peptide Sequence Number=SeqID_61560
atgaatgctgtggtaacttcacacccacctgtttgtttatatagtgctgcaggtaggaaggcgaagcggtggaactgttacaccaggcgcgcagtagctcatacccgctgcgcagtggaccgcaaggatcaaacagtaactctgcaaggtgggaccgacacgcgctcggaagtcggatcgtttctccgcaacgagctcagggaaggtgttttttggaccttcggcttcccgaagctgaagaggcttttttcacgggtcaagctcgttacgaagaacgatctagcaccgcgaaaggggctactgttggggtcgtgcttcgcatttgagaacaagtctccaacaaatggaaatcgtcgtgctggcacatcaatatcgtcgatcgccatcctcgtctacgccaagtcccaagccgtgaagacgctcttgtgctggccacacgtcaccagctcgacaaaaaggaattccatgagtatctggtcaagagtagaagtggtgtgcatcattcgccagacgtgtgtgatcgaagacatcaaccgaaaaccatcgtcgtgctttcgactatctcgtcgaattagtcaggttcccgcggcggaggaaagggtggaggagcttaccagcggcgagattgctccggcgggggagctcgtcggcagcgaggagtccggcctaaccagggcacgattggtcaatcaagtgggtcagtgggcttcactagggatcaaggaaggcgggcggccgaagtccggcgaggacgatcttggttctccagtgaagttctaccgggtccgagagcttgggaagcttcacgagctattggagaagctaaccaagcggctggcgttgcttggaaatgaccagagtgggctggccacagtggccgaggctcgggtggcaatggtgggcagaagagagctcgccggagctaaggagcggcgtctggccggcgaaggcgcgggcgggcacggccgagggcgaggctctgacaagtgctcggggcgtgtgtgggcgaacgccaatgcgcgctctggcgcctggcacggcgtcgagcacgaggcagcgcagagagaggttgagttcaagcgcggattggctccaaatcgttga

SEQ ID NO: 18186 - DNA, 402 bp, Zea mays
  Peptide Sequence Number=SeqID_61561
atgcccgttcttgtagtgtttaaatactacgtcgtctcatggcttcgcgtctctcatcaccattggtgtgaagttctttcacaagtatcagatctggtgataaaccatgacggcggcactccaaagaaagccaaggtggtggtggaggatgaggaagaggcggggttggaggatgaggaagaggcgactgtgacactatccatggagaaggacgcgctggagtgtgacatctgctgcctacccttccagtgcgaagttttcatggcaagtcagattaccatgcatgtatatatacagtacatattgatcggtaggcttcagcatgatgctctgctctgtgtaaaatcagtgcaagaacgggcattctcgatgtgcaaagtgctgcatccgcacagacggtaa

SEQ ID NO: 18187 - DNA, 327 bp, Zea mays
  Peptide Sequence Number=SeqID_61562
atggaggatgaggaagagtcggggttggaggatgaggaagaggcgactgtgacactatccatggagaaggacgcgttggagtgcgacatctgctgcctacccttccagtccgaagatgaggaagagtcggggttggaggatgaggaagaggcgactgtgacactatccatggagaaggacgcgttggagtgcgacatctgctgcctacccttccagtccgaagttttcatggcaagtcagattaccatgcatcagaggttcaagcaagaagctgccctttctgttggtcctgctgaatgtccacatatcaagggctgtgcgcagtag

SEQ ID NO: 18188 - DNA, 729 bp, Zea mays
  Peptide Sequence Number=SeqID_61563
atggcgagagtagcgtgtaccctccatggcaagaggctggatgatggtgtatctgtgctctcggttggcgtgaacccggtctggtggtgcccaaggaagagccccagcagtgaaaccgcaggaggatgttggcctcccactttgaaaacaatatactttcgtgcgggagggtgttttgcctcccagggttgtccaaggagcactagatcagggaggagggagcaccagagcactggagcagggaggagggagcaccggagcactggagtagggaagagggagcaccggaccactggagcagggaggagggagcaccggagttcaccgtgcgccgcgtcgagactccgagaggacctcgagagcaccggagttcgccgagaggaccccgagagcactggagcagggagcactggagttcgtcgtacgccgcaccgggaggagggagcagggagcaccggagttcgctgttgccgcgcacggagaggcaagtgccagggacagagggaccccgaaaccgagagagcagggatcactggagttcgccgtgcaccgcgccgggaggagggagcagggagcaccggagggaccccgagaccgagagccgacacatggagatgcaggagcgagaggacgttagggttagggttagacgatgagacggacgcgcacggcgcggacttatatgcacggtgcggaagttgggccgttaggcaggaccgcaggaggtag

SEQ ID NO: 18189 - DNA, 366 bp, Zea mays
  Peptide Sequence Number=SeqID_61564
atgacgccacagaatggtgccgagctagggcacaacgctgactgcgctatgcccaaaccatcgaaggtctcaacgtacatgatgttgagactgcttcccccgtacatcagcaccttggtgaaggcgctcaccacatcagcgtcggtggcatctaagagagattccaaggctcttgtaggtgtcctggaagttcccgacaaaggcttttcggaggtcgacccaatcatgtatggtgtcggccgccacacgccaggattcatggagccgtcatacatggaaatgttggctggcgcatgtaccttcgaggaaaactgtgctttccgaatcttgcgcccaaaggcgcgtggtcccgccaaggtgggctag

SEQ ID NO: 18190 - DNA, 768 bp, Zea mays
  Peptide Sequence Number=SeqID_61565
atggcgcttcgtgtcaatgtgttgccattgatcatcctcgacttgttgtaccacagttctctccaccaggttgcggaggttctgatacatcgtttttgcctctggcttatctggctcggagatcgatcgaagcataatggccacaacagccatgttttgcccggggttgaggaagtactgcgtgccattgctgctttcagcgatctggtcgcaggtcttcctcgctcagggctttttggcttcgaggcgtatttgctcaatgttgttgtaaacccggtcgtgcctctcgacgagtgcgtcgagctcctccagctactgttagagggtggcttcacgggtgaggatgcgtgcatgacactggcgctagtattccttctcttggatgggggatcccaagttccccgcttcgttgttgcctcgtggtggtgtggccacaaagaaggctctttcttgcgtcccgttggagtccaagtcatgctccatcgaggctctgctcgagtcatcctaaaggagatcgaggatggacacagcaacggtggatgcattgaggcatcgcttaagggcggtagcatgtcttttgagatgctggatagctggccatcagagcaaaaaagtcactttggcatgtttgcggtcccctacctcacgcgccaactgtcgtggttccggaagccgagggacaatagatttgtgttcggtggggatgcaagtgcggactcactccgaatggtggatcgtggggactcgaacaaggacctaagacactag

SEQ ID NO: 18191 - DNA, 2247 bp, Zea mays
  Peptide Sequence Number=SeqID_61566
atggcggtgcgagccacggtctcccgcttcccggccacgccggaggcgctggagtcgtgcgccgtccagtggggcgtcgccgtgacgcccttcgccgccgcggacgagcacggccaacccccgaccaccggcgccggcggggaccgcgtcccacgctgcgagcactgctgggcgtacttgagcagccactgcgatctggagcgctggggctggacctgcgcgctctgtggcacgctcaacggattcgacgacgaggccgagcgacggttccagcgtcccgacgtgtgccccgagctcaagtcctctttcgtagacctcgaaatcctagtggatgaggcagagggcggaggagacggtgtgcaggcgctgcctgtctatgtggccgcagtggatctcgcatgttctgaagagttcctggaactcgtcaagagtgcgcttcttgcggccctagaagctcttgttccgggctccctatttgggcttatgacattcagccacaagattgggttgtatgatgtccaaggcccgattccactcgtgaagaattatgttacaaagctatcagctgaattacaaagagttttagacatagacttattgcctaatggtaagatagttaatgggcaggttgacacatgcaaggatcaaattgctgctgtcctggagacactgcgacctacatcttcatgggagagaggggttgcttctgggcaggaagaggatactgttttgcttggcagacgtggttttgggacagccatgtctgctttaattgagtacctaagttcagaatatggttctacttttgctttaggtagagcagctcgggtatttgcttttctgtctggtgctcctgattatggagctggtgtgctagataccaggagatatggggagcaatatgctagtaaaggggtagacgctgatcttgcgttgctccctgaacagatacctttctacagagacctagcagctgttgctgttcagtcaggagtatgcatagacatatttgctgtaactgatgaatacactgatttggcttcactgaagtttttaagtatcgaaagtggtggatctttatttctttatgcaagtacagatgattcaacagttccccaagacatataccgattgctaagtcgaccctatgcatttggttgtgttctaaggctgagaacatcttcagattttgagccgggcaattcttatgggcatttcttccctgaccctcaatatgaaaatgtgcaacacatcatctgctgtgattcatttgccacttatgcatatgactttgagtttgcccataacgacggtttctccaggcacacagatcctgctgttgtacagattgcttttcagtacagcgtgattgaacctgtcaaggaaacatcaggcaatggatcacaaccatctgcaagttacaagttctgtctgaagagacggttgagaataagaacattgcagtaccgtccaactaataatatcagcgaaatttatgacagtgtagatccagaggttgtcctgcatatccttgttcataaggttattttagaatccttggataaaggggttagagaaggcaggcatcaagtgcatgcttggctatccctccttgcagcccggtataatcaggccctgagttctgatgtgcgaccgctgtcaagcatagacattgacttctcacagtgcccacagcttcaaacgatacctcagcttgtttttgcattgttgagaagtcctcttcttcgcttgcatgaggaaggcgtgcacccagattacaggatatatctacaatgccttttcagtgcactggagccatcatctgtagctaaagccatatatccggttttaatctcgtattcctcgcctgacaagcaagcattcccacggcacactctgagccatgctgctctaatcatgagcgagagcccaatatttcttctcgacacatttaccaaccttattgtttactattcctcaactgctgatccttcagttccttttcctccaccccatgactgccttttgagaaaaacaataaatggactgaagcaggacagatgtataacccccaagcttacattcatccatggagggaaagatgattcaacattgtttgagagctatctcattgaagagcaagatgttgatggatcgggcttaacaactggttcaggttttgtagccttccgtgagagcgtgaggaacgttgcaggagagatcatacaggaagaaattggaagttag

SEQ ID NO: 18192 - DNA, 1188 bp, Zea mays
  Peptide Sequence Number=SeqID_61567
atggcgcgggcggagctccgcaccgtgaccgtgcgctcttccccgcttccgcgctgcgtcctctcccggctgctgccgttgctcctctcagtctcagtcttgattcgttcttatatggatgcaaatccaatagaagccatcggcgctgcgtcggcggcgccactcaagttcgggatcaactacgggcagattgcgaacaacctcccgcagccgacgcaggtgtcgggcctcctgcagtcgctgaacgtgaaccgcgtcaagctctacgacgccgaccccatcgtgctgacggccttcgccggcacgggcgtcgagttcatcatcggcaacgatgacctctacaacctgaccgacgcacgcaaggcccgggcctgggtggcgcagcacgtccagccgttcctccccagcacgcgcatcacctgcatcaccgtgggcaacgaggtgctctccggcaaggacacgaccgccatgcagagcctcctcccggccatgcagaccgtgtaccaggccgtggtcgccctgggcctcggcggccaggtgaacgtctcgacggcgcactcggtcaacatcctggccagcagctacccgccgtcgtcgggcgccttccgggaggagctcgggcagtacatccagccgatcctcaacttccacgccgaggtcggctcgccgttcctcatcaacgcgtacccgttcttcgcctacaaggcgagccccgggagcgtgtcgctgccgtacgtcctgttcgagcccaaccccggcgtggtcgaccccaacaccaacctcacctacgacaacatgctctacgcccagatcgacgccgtgtacgcggccatggaggccatggggcacagcgacctcaccgtcaggatctccgagaccgggtggccgtccagaggggacgaggacgaggtgggcgccaccgtggccaacgccgccgcgtacaacgggaacctcatgaagaggatcgccatgggccagggcacgccgctcaagccgcacgtgcccgtcgacgtcttcgtgttcgcgctcttcaacgaggacatgaagcccggggcaacgtcggagaggaactacggcttgttttaccccaacggcacgccggtgtacagcctcggcttcaacggagcgtccttcagcccatcgccgacgtactcctcttcttccaagctggtggtaaggaaactctga

SEQ ID NO: 18193 - DNA, 603 bp, Zea mays
  Peptide Sequence Number=SeqID_61568
atgccgcgaccacaacgctcgatcccccgcctccccgcggtgaaaccgcccccgcgcctgacgccgagaaacccgctcgcccccggctcgcgatgcccccacgcccgtcgtacccccctggcggtccctgttcccatcgtcgcccgtggcccgttccagcagccggcatcaccctcagccacgacctccgaccaccggctatcgtccgacctcagacccgtgcagcagcgagcaagcggcgcgcggggccccgggcggcctccgcctccgcgaagtcagcgaggcgctggagcacgcgtcgagcgttttggcggatacgttggcgaagcagacgcggaaccaccgggctcgctgcagtggcaggaggagaccggggagacgttgagcccgcgacctagaacgacagcttcctccatagctcaatctctccctcgaacgacgccgcggggcccgaaggcgtcgcatgtcggcccagcagaagagccccgcgctgccctccaggcacgcgacgccggctgccgcaaggcccgccgccagcctgggagtgaaagagtcaacacggccctcgtcttcagtgggattagaaaaaatagattgatttag

SEQ ID NO: 18194 - DNA, 288 bp, Zea mays
  Peptide Sequence Number=SeqID_61569
atggaggatgcgatggggaataagatcgtgcggacgacgcaggcgtcggcgacggagtactacctccacgacctgtcgtccacctacaatctcgtgctcctcgacgtcgtcagccgcggccgcttcctcaagtccgtccgctgcaagcacgacgaagggttgctcctcgtcaaggtctactttaagcgcgccggcgagtccatagacctcaaggagcacgagcggaggctggagcggattaggaatgcattcaaggggatcgaggggtcccacgtatggcccttctag

SEQ ID NO: 18195 - DNA, 624 bp, Zea mays
  Peptide Sequence Number=SeqID_61570
atggatggtggtggcagcgaccgtggcgaacatgacaggctcgtgaaagagggacttggtgtcgtcggcgaggggtgcgtcctggctgaaggagacgaagatgatgtcggcgtcggcgtggatggcagactcaaagcccacaaggacatcgttgacggcgcacaccgccaactagcaaaccttgacgaaatccgtaccaacttggggtctgcgtcttcgcttccaagatcaacaacaaccaagatggattcagcagactccatagccgacaaggcaattggaaggatgcaagagattgcggacaagatattttccgtagctcgggaaacaatccgtccaggacgcgggttgacctcttttgaggctaccaaacttcgtgtagcattggaggacattgcttgcatgcttgagcaagactctctggtgttgcaagagaatctggacaacgtgaacaacgtaaacaacccgggtgacagcaactacgaaccgtcagccttgtcctcaccacccccagctgacgagtacctaagtccagattgggactttgctgagcactttgaaaacttctggggtcttgaatatgactcggaccagatgccatcgtttagtgataatgaagtttaa

SEQ ID NO: 18196 - DNA, 1602 bp, Zea mays
  Peptide Sequence Number=SeqID_61571
atgccctccctgggcgagcagctagtgcgaagtccggccttcgcgttggatctacgcggccgggatccagccgcattcgtgcgtgaagtggaagacggggcagtgcggattgtgggaagttatgtgccaaggactgaggctatgcggagttgggatatccatggatccaacgtccgcttgaatagggtcttcgagttgaatcgtttgccgtacggcggctatcccggggacgacgctgccgtggccgtcgaccgccgcaggaagaaaccgatggccgtgactgaggaaggcccttcacaggaggctgccctaggcactaagaagaggaaaataggtactgcagtgggggacttgggggttaccgggggtcgatggcccaagaatgttctgatcccccgcgcggctggcgaagacatgtttatgtctcgtatggctcgtgacttgaagatttttccttacggacagaatattgctgctgttgtgtcggcagtgatggagaagaatcgtcaagatgctgcgcagaagcaccgggcggtcgttaggatcggggatcctttccgcgaggcgaagaaggcgcggggtggggggcgaagtctgccaccgccggcagcagcaagccggtgccggctgcgaagccggctgcccctgggcccaggaagtctttggcaggtgcgaaggctgctacttctggcgcgggcaagccacccttgggcgagccgactaggtcgtaaccaagatcatggtgcagggtcggatgtggggcaactggctgttgtcctgactccggtggtggctacttcgccgacggcggcggttggtgtgaagggtgcttcgcaggactcgtggtccaccttctgcgcgagcggcgcgattccgtcagccaccgccgctaaggatgtggcgggctccatgtcccgacagctgaggcaagcatcgcatcagttgtcgcagcagctgaagcatgcggccgacttcgctgaccatgtcacgtcgggtgctctgactgcggagtttgctgccgaagtcaagcgtctccgtgcgcagcatgtggatgctgttcgggagaagtcggctgcggaaagtaaaaaccgtaggctgacggagagctcggcgggccttcgcaaccgcgtggataaagccgagacctcgacatgtgtggaggttgagcggacgcacgcgcagctcgtggatgcgtactgggagctgggtgcgcggaccgcctccttcgaagcgcccagccaagaggacccgatgcttaagcggtcggcgggggcgctcttcgacaggatgtggggtcctcacggccgggagacggtccgggagagatccgaccgggcaatggatcagatggtgcgtgacgaggaggttgatgactttggtgacctagacagcacgctgcatgaggcctcgctgccggaggcctcgggggtggatctggcgccgccgtctgatccaggcaagggcccctcattaaccctcgcgccgactggagatggcgaagaccccgcgccagcccccacgccgacgggcgaggacgccttggagtggctgagtcggctgcggaagaccccgcggccgaggccgggccttcgcagtggctga

SEQ ID NO: 18197 - DNA, 666 bp, Zea mays
  Peptide Sequence Number=SeqID_61572
atgctcctctgcttgcgcagctcggccgaccgtttctactcgtcgcgcccctgctccccatggccggcgtcgagctctgcgttcctgcaccctagcctctgtcgtgctcgacaacatgtaattcatgtcgaagcaacaactgcgatcccttgcgtcgcgatcgtcagatcaagtctcgcgtcgtcgatctgtgcagatcctgttcggccatcggttttgctagttgtcgatttcctattcgacatggttatcacgtcggctgttcctatccgagctagtctcgctcgccagccgtcacgccctctttacccattgagccgtgtgttgtcgcgttcaccttgttgtgtcgttgtggctttatcggtgtactgctgtggtacctggatcgcgctcgcctcaactcaaacgagtcatactgccatcatcgtcgtcaaatggaaatcgttgcgctggcacgtcgatatcgtcgatcgccatcctcgtctacgccaagtcccaagccgtgaagacgctcttgtgctggccacgcgtcaccagctcgacaaaaaggaattccatgagtatctggtcaagagtagaagtggtgtgcatcgttcgccagacgtgtgtgatcgaagacatcaaccaaaaaccgtcgtcgtgcttccgactatctcgtcgaattag

SEQ ID NO: 18198 - DNA, 426 bp, Zea mays
  Peptide Sequence Number=SeqID_61573
atggccgctgtgctgctcgaccgagcgccggctaggcagggacatcgccggccggtggcgaggctaggctgcgcctggggtgaggatgggcgtcgcgccgtggctggccaggggacagggccgccaggcgccaggggctcggccgcggctcacctcgcgcgggcgctggtcgcctcgctgggctgcagcgccgcctggggcaggagccaggtggacacggggcagttctggctaatcgacgcctgcaaccaacgggagaaaaagatgtgggagagaaatatggactgtataggagaagataggaaaggtgcaggtcgacgggcggttggacgaggaagagaaacagtagctgataatgttgactggcaagtgggacccggtgcaggcgcgcatccgcgcggtttgcaggacgtgggcgtggcttga

SEQ ID NO: 18199 - DNA, 603 bp, Zea mays
  Peptide Sequence Number=SeqID_61574
atggggagcacccgtgttgccctcttcttgcggctgttggaggagcgcgaccccgcagagcccggctgcagtccctcaccaatggtcatccgtagggatgatcaccagccttgtggtggggagaagcaagccgggctgcggcctctgccccgctctcagcttcaaggatgttcatcatccgggctgggaggagggcgcaccgagttgggaactgcctccgcgtgggccggcaacccgcttcttcctccggcattcgggggagaggggcatcctccagctgtgcggaggaggcatcctccagccatgcgggggaaggtgaactgctgctgcctggccagggtgcaactgtccatcctccacccgagcaacggtcgcgccatgcgcaggcggctgctgtcgctggtgcttaagcggcggccgccgctggagaggcttcccaccgcagtggtggttacttccaccggtgagaccgtcagtgccacctgcgctccgggcctccggctctttggctttaatggctggttctcgtctcccgtgaggggatgtgaacgaaggcctttcagcagtagtgtttgccctgaggccatcgctgctgttgtctag

SEQ ID NO: 18200 - DNA, 496 bp, Zea mays
  Peptide Sequence Number=SeqID_61575
gagatattttcgatcgccggaccccacgcgccccgccggcgccacacgtgtcgacgcgccagggcgccctgacgctgcggtcgtctgtcccggtaccggtccgggcggccaccccgcgggaagcacagaactacagaagcaacccgaagccggttcgaaagatgttgccggcttgccgccggtaataattgggcgccgggtgcgtgcgcccgcggcccccgcgaacccgagggtgagcgccggacacgcgtcctccaccgagggccgcgaaggcacgtggccggcggggcgagcgcgggtgccgggacgcgtgtccggtatacttccgccgtcgcccgtcggcacgtccggttttagcgtggcgtggcgtgtcagcgcgttgaaatcgtccggcgagtgcgtgaggctggtgggaacaacagcacggggggcagtcggccaacgcccaccgtcagtgctcagcgcggcgctcgcacagggagggattagcgcgtaa

SEQ ID NO: 18201 - DNA, 213 bp, Zea mays
  Peptide Sequence Number=SeqID_61576
atgacggtgcattctgtccccgacacgacttcaccaccgtccatcgatcaaaaggtaccgtccgttttccaccccgtgccttttagattcagcttcgatccaccaagcgaccccgcttcgggggtcacgacgaaggcaaccacctcggtatgccggaggatgacgatccccctgggcctgctgcgggggacagatatcccccgggtccactag

SEQ ID NO: 18202 - DNA, 819 bp, Zea mays
  Peptide Sequence Number=SeqID_61577
atgttcttcgacggcgtgacaccggcggcggccgacaacggcggcggaggcgccgtccctccaccggccgatagggcgttggagccggggttcggtggtggatgcgctgtggtgggcgacctagggtgggatttgacgggggatttggaaagcgcgattgccattgctgtgggaatctggagcatcagaaccgttcgtgttgacatccgcccccttcccctcttcgactcacggcccacccactgcacgcgcaagcgagaggacggctccgcctccgtcccatggatggccgccggcgccacctcatggctccctcgcatgggtcgccgtttcctcatggtgttcacggtcgcgctcatcgctcgcagcgcggaggcgtcgatctgcatctatgatcaggagcccttctgcgaggtggacaatgcctcctcctctctggccaatacttctctgccagtcgcctgctcccaaggggaggggcgctggaatacgggcccgcagatggcgtcggctgtgcaggcggccatgatcgacgaagcctcctcagatctgtgctcatcgccaccagggtacaataagccggcgaagtttcgtggtggaatcagcagggtgcccaccggccggcgaggccccggctgcccgaccggccagccagtcggagtcgggccgggtggtctccgtcgcaggagtggtgtgatacgtaatgctcgagtagagttgttgagacgtacctgggatgttgggggaataccagagattttccttcggagcatccaatcggctcagctgagcaaaacctgcgattcgaattcctactga

SEQ ID NO: 18203 - DNA, 651 bp, Zea mays
  Peptide Sequence Number=SeqID_61578
cggcggcgaccacctatgcaccagcggctcaccagcggcgggcgaccacctcaacgcgctcgccaaggagaagaggccctcgctcccgccctcctacgggatgtttaaatactacgtcgtctcctggcttcgcgtctctcatcaccattggtgtgaagttctttcacaagtatcagatctgtcgaatagtcctccctgcttttattttgcctcttcctctgacggcggcactccaaagaaagccaaggtggtggtggaggatgaggaagaggcggggttagaggatgaggaagaggcgactgtgacactatccgtggagaaggacgcgctggagtgcgacatctgctgcctacccttccagtccgaatgcaagaacgggcattctgacggcggcactccaaagaaagccaaggtggtggtggaggatgaggaagaggcggggttggaggatgaggaagaggcgactgtgacactatccgtggagaaggacgcgctggagtgcgacatctgctgcctacccttccagtccgaatgcaagaacgggcattctgacggcggcactccaaagaaagccaaggtggtggtggaggatgaggaagaggcggggttggaggatgaggaagaggcgactgtgacactatccgtggagtg

SEQ ID NO: 18204 - DNA, 378 bp, Zea mays
  Peptide Sequence Number=SeqID_61579
atggaggatgaggaagaggcgggcttctctacgtacggcggcactccaaagaaagccaaggtggtggtggaggatgaggaagaggcggggttgaaggatgaggaagaggcgactgtgacactatccatggagaaggacgcgctggatgcaagaacgggcattctggatgtgcaaagtgctgcatccgcacggacggctatgagctcttttctactagtggacatctacgccggcgtggtgcagacgcactaccaccagacgaaggtttcatcgcaacagtcctacgtgaaagccgaccagcaacaacagcgatcacaaccaattaatgagcgttcacaaccaattaaggccctgtttgggaggctctggctcatctaa

SEQ ID NO: 18205 - DNA, 375 bp, Zea mays
  Peptide Sequence Number=SeqID_61580
atggctgacccaaccatgaaggctaggttggataataagccgttggaggctgctgatgtgcacagacggatcatgtgcataggatacgtttccataagatttaataacgtcccggaccgattacagttcataaaagcccacgccgcaggtgcagacacgctcccgtgccgcacgcgcgagcctctcgctccccacgacgtctccagctccgccaccgtgcgcgcctccagcccgcgtgcatctaccctgccactagcgcgcaccatgcttcggatcgcctccggctccgcccatgcacgcctgctcagccgctcgcgtgcgctgcctccctctccgatggatttgcgagtcacaggatttgcgactcaagactag

SEQ ID NO: 18206 - DNA, 1209 bp, Zea mays
  Peptide Sequence Number=SeqID_61581
atggcgaggaggaagcgcaaggacggtggtggtgggtggtgggcgaaggtcaggatggcagcgaccaggtggacgccgtgtgcgcccgcggtctcggtcgccgagcagaccaaggggaaggaggacgacaagacttggcaggttgtaatcaattttccccattcagtcaatctttgctctggaggttttacaagtcatgctgctttatttgcatcttataatgttcatctactgacagcattggtgttgcagcgtggttctctctctctctctgctgtaataggtgagatgcagtctggtagcaaaaatattttggtgatctcagattcttctggtagtaaaatgggcaaagaaagagcattttgtgctgaaggcgatcttgctgcacttgtccggtcaggattcaccaatgcgagcaccggcagaacagtttcttacaatgagggcacttggtgctccaccgatcatagtagcacttatagcccagattgcattctgtggattcctggatacaagaacatcactgcatactttgggtgctatactttagcccatgctgcgagtgagagaggtgctaagcagacgtcactgtttcgagcaagaaccttaaaggaataccaaccggagatcttactattcatttttgttggttatgcaggtggtttttttctagaacattcattttttgttgatgatgttatcaatgtgaggtactaccgcaacatcactgcaaacactctagcagtgctagaagccatggctgcacacaatgtgaggactctcatctactccagcacatgtgcgacctatggagagcctgacaagatgcccatcgctgaaggaactcccatgttcccgatcaacccatatggtaaggccaagaaaatggcggaggacgtcattctggacttctcaaagtcgaagaaattagacatgatggccgtcatgattctcagatacttcaatgtcatcggttctgacctaaaaggcaggctgggtgaagctcccagacatgaactgcgcaagcatggctgtatctcgggggcatgcttcgacgcgacgctaggaataattccaggcttaaaggctttaactggtcaatttgtggagcgtgttttgtactgcttcagccatgttagatttcagtattacgttgacttcagccatgatagatcactagccatttcgatacctccaactagagtttag

SEQ ID NO: 18207 - DNA, 1293 bp, Zea mays
  Peptide Sequence Number=SeqID_61582
atggcgcggtgcaccgggttcgtggagaaggcgaagccctacgtggccatgatctcgctccagttcggctacgccgggatgaacgtgctcaccaaggtgtcgctgaaccagggcatgagccactacgtgctcgtcgtctaccgccacgccttcgccacgctctccatcgcccccttcgccctcgtcctcgagaggaaggtcaggcccaagatgacgtggccaatcttctggcagatcttcgtcctcgcgatgctcgggccggtgatcgaccagaacttctactacgccgggctcaagttcaccggccccacgttcgcctgcgccatgagcaacatcctgccggccatgaccttcgtcctggcagtcatcttcaggatggagaagctgcagatgaggaaggtgacgtgccaggccaaggtcctcgggacggtgctgaccgtggccggcgcgatgctgatgacgctctacaagggcccgctgatgcagctggcgtggacgaccaacaggcacgcatcatcgtcgcgcgcggccgccgaggcccccgccgccgccgccgcggagatcagcggcagggactggttcctcggctcggtgttcgtcatcgtcgccaccctcgcctgggcctccctcttcgtcctgcagacgcacaccatcaagcagtactcggcgcagctgtcgctcaccacgctcgtctgcttcgtcggcacgctgcaggccgtcgtggtcaccttcgccatggagcgccgcgcctccgtctggaccatcggattcgacatgaacctgctcgccgccgcctacgccgtaagggatccgatccgatatacatatgatcgatgttcgatgctgacggtggcgtggtctggcctggccacccttattgctcttgctgatgattgtgactccgttccgttccagggcatcgtgacgtcgagcatcgcgtactacgtgcagggcctggtgatccagaagaccgggccggtgttcgcgtcggcgttcagccccctcatgatgatcatcgtcgctgtcatgggctcgttcatcctctccgagaagatctacctcggggccgtcctcggcgccgtgatcatcgtggctgggctctactccgtcctctggggcaaggagaaggagacgcgggagaaggaggcggacgccaagacggcgctgccgatggcagtggtggcgtcgtcgtcgtcttccgacgacgacgacgatggagcagcagggatcgccgccgccggcgtcgttggagatggcgccgcggggtgcacaacgtcgggaatgacggcgtga

SEQ ID NO: 18208 - DNA, 399 bp, Zea mays
  Peptide Sequence Number=SeqID_61583
atggctggggagcaccaagagggggaatgttttgtccggtttggacatggctgtggcctgactcctttcggtataaccgttgagcctcctgggactagtaattgtatcacatttgagtcccagaggatctgggacgcttcagaagctataaagaaaaatgaaaaagaatctcatgacgcccgagaagaagctaacttcggtgtttatgtttggcttcggattaacaacttgttcttttctacagctgaactttcaccacccactgagccatatgaccccgaggccaatccagccatgaaagcagcattagaaacaataaggattgccgaagaagccgttgacgaagctgtgaacaaactcctgaatgaagctgacgagaagatattaaaagaagactga

SEQ ID NO: 18209 - DNA, 1392 bp, Zea mays
  Peptide Sequence Number=SeqID_61584
atgaatgcttggatggttggagtggaggtggttgagggtatttatagccctcaaccaccaaacaaccgttggggttgggctgctgtcgatgggcgcaccggacagtccgcggtccagcccgacctctttccaaaccggcaaatcctcagatccgccccctcctccgcctccgcctccgcctcctgtaccctcacgccgtgcttccacagccctcccacctccgaatccagatccgccgccaccaactcctgcttctcacctcctaggctgcttcgcgcgacaacctccgcgaggagcagcaggagcggcggcggcggcatggggcgggacggcggtggcggtgtcgccggcggaatgtctgaatcggtgctgcggaaggtgctcctctcctacttgtacgtcgcggtgtggatcttcctctccttctccgtcatcgtctacaacaagtacatcctcgaccccaagatgtacaactggcccttccccatctcgctcaccatggtgcacatgggtttctgctcatccctcgccgtcgcgctcgtccgcgtgctccgcgtcgtcgacctccccacctctccctccatgacgccacagctctacacctcctccgtcgtccccatcggcgcgctatacgcgatgtcgctctggttctccaactccgcatacatctacctgtctgtgtcatttatccagatgctcaaggcgcttatgcccgtcgccgtctactccatcggcgtcctattcaataaggagaccttcaggtcctcctccatgctgaacatgctctccatctccttcggcgtggccatcgccgcctacggcgaggcgcgcttcgacgtgcgcggggtcgcgctgcagctcgctgccgtcgccttcgaggccacgcggctcgtgctcatccagatcctgctcacatctaagggcatctccctcaaccctatcacctcgctctactacgtcgcgccgtgctgcctctgcttcctcgtcgtgccctgggtcttcgtcgagctgcccaggctacgcgccgtcggcaccttccaaccggatttcttcgtctttgggaccaactcactctgcgcctttgcgctcaaccttgctgtgttcctgctagtgggcaagacctcggcgttgaccatgaacgtcgcgggagtagtcaaggattggctgttgattgcattctcgtggtctgtgatccgggacaccgtcaccccgattaacctgttcggatatgggatcgcgtttttaggggtggcctactacaatcatgtcaagctgcaggcgctcaaggctaaggaggcccagaagaaagccgcacaggctgatgaggaggttgggtcgctcttgcaggagcgcgatggacatggtgatcataagagcgacaatcaggcttag

SEQ ID NO: 18210 - DNA, 231 bp, Zea mays
  Peptide Sequence Number=SeqID_61585
atgggcgcgtttgtaaggagcgcctttaagtttccgagggcttcctcggcctcgggggtccaagtgaagcgctcggccttccttaagaggtggtacaagggtaatcctttctcgctgaggcgtgagcttgtaggaaacggaaacttaaagagcaaagtagagaagcaaactctcgtggatgacgccggtatttttaccgaggtatccggaaccgtgcaaggtcccgactaa

SEQ ID NO: 18211 - DNA, 543 bp, Zea mays
  Peptide Sequence Number=SeqID_61586
atgttggtttatcaagacctcctatctggcgacgagctcctgtcggattcattcacctacaaggagctcgagaacggcgtcctgtgggaggtcgagggaaaggctagaacttctatgttggttcatgagtgtaacctggagtgggtcacccaaggtcctgttgatgtagacattggtgccaatccatccgccgagggtggtgaggatgaaagcgttgatgacacagccgtgaaggtggttgatattgttgacacattccgtctacaggagcaacctccttttgacaagaaatcatttgtctcttacataaaaaaatacatcaagaatctcactgctgtgttggagccagagaaagcggatgagttcaaaaagggtgtcgagggtgcaaccaagtttctccttagcaagctgaaggaccttcaattttttgttggtgagagcatgaaggacgaagcgtccgtggtattcgcctattacaaggatggtgccactaatccgacattcctctatttctctcatggtcttaaggagatcaagtgctag

SEQ ID NO: 18212 - DNA, 336 bp, Zea mays
  Peptide Sequence Number=SeqID_61587
atggaggcaagaaaagcttcgaggtaccaagtgcacgggagaaggtcaaggaggctgaggaacccaaagccaagggtgaagaagaaggcttgcaaagtcaaggccaagactcagctcggtctggcacaccggactgtccagtggtgcaccggacagtgtccggtgcgccaggctggctcgagcgaactggccgctctcgggaattcaccgacgacgtacgactataattcaccggactgtccggtgtgcaccggactgtccggtgagccaacggtcggccgggccaacggtcggccgcgcgatctgcgcgggacacgtggccgagccaacggctag

SEQ ID NO: 18213 - DNA, 1431 bp, Zea mays
  Peptide Sequence Number=SeqID_61588
atggaggcaccggactgtccggtgtgcaccggacatgtccggtgcgccaacggctccaagactgccaacggtcggcttcgccatagaaggaaagaaatcgggcaccggacagtgtccggtgtgcaccggactgtccgatctgagcaaacggaggaaggagttgaaatagactccaagcccagatgcgcagttctctcgcactttcgaaaaaataataatgaaaaacacttattgatgatccatgtgtcgtttctggaaccgggggacaataagctcaaaggtaggttgatccgtagcctgctggtttactcgacagtacttattcagcgagcggatcggtcagctttgcgggtcatcaccggtaggccatttggacttttacgtcgagctgctcagcatgtgagccgcccgggcatgatgcaattggacattcaagttatgtcatggggcaaaacaacctccacaagttttactggttctaccaccaaacatgagcagagcttgcatggaaatgttaagccgttgcaattggcggcaaatgaatcctctcgtttggcttacagaagtccagcacttaaaaaccagtggaatcttcctgctagttcttcctccactaatgtggttaccacctttgatgataacgaacacgtgtcttccagtgttattgaagaaaaagttggagtactgttattaaaccttggtggtccagagacacttgacgatgttcaaccatttttattcaacctatttgctgatccagatatcattcgactccctaggctcttcaggtttcttcaaagaccactggccaaacttatttctacttttagagctcctaagagtaaagaagggtatgcttcaattggtggtgggtcgccgttaaggaaaattactgatgaacagtgccgaagtgaccgccgtcactccgccgcaccactgaccggtctgacagaaggacagcgccgcctgcgccactccgactgcactgccactcgacagagtgagtctgacaggcagtcaggccttgccaaaggcgccataggaagctccgctccgcccgacccagggctcggactcgggctcagccccggaagacggcgaactccgctctgcccgaccccagggctcggactcggggtaagacccggaagacggcgaactccgctccgcccgaccccagggctcggactcgggctaagacccggaagacggcgaactccgctccgcccgaccccagggctcggactcgggctaaaacccggaagacggcgaactccgctccgcccgaccccagggctcggactcgggctaagacccggaagacgacgaactccgctccgcccgaccccagggctcgggactcgggctaagacccggaaagacggcgaacttccgctcccgcccgaccccaagggctcggactcgggctaa

SEQ ID NO: 18214 - DNA, 600 bp, Zea mays
  Peptide Sequence Number=SeqID_61589
atgggcgggggcctcctagcggcagcacccgccctgaggtcagtgctgccgctgttcaaccccccggagcagaagtcgtcgtcgtcgccgctgctggagcaggtgacggcgcgccgttcgtcggccttccgttgctccgcaggccttccccctcggagtggggttgttcgtacctgcggagggggaaccggagttccgtttgtgatggcacatgccagtgtttttgttcattgtggctgtcgaggcctgaacatcttagttaaagggaccccttggccgctcttcgatgagccgaggccaggggtagcgatatcagtacgaacagaggcggagttggctcgaaaatgggaacctggttggccggagcctagccgggttgcccgtcagcggggccgacgccggagtcgatcagccgaggcctcgggtcgggctggcgcccttggaaaatggttggccgaggccccaggggtaaccggccgagccgcctgctcgggccggattcccggagaagtccctggaccgcgtcgccgtccgaggctgggtcggacctcgctgaaggcgtcgtcgatgccgagggtgctgcagcccccttcagcgtga

SEQ ID NO: 18215 - DNA, 951 bp, Zea mays
  Peptide Sequence Number=SeqID_61590
atggagctggtgattgctgagtcattggttgcccctagtggcgtcgcccatggggacggagacggcgtcaacgaagatgatgtgacgaaatttggtgttgtccctggagatgggcacgccgacgtccaggatgtggtgacaaaattgacaggcgatgctgcccatagagatggggacgccggttgccaggatggcgtgacgaagatggtatacgacgcagcccatggagatggggacgtcggttgccaggacgacgtgacggaggtgacatgcggcgcagtctatggagatggggacgccggttgccaggatgacgccgcgaaattggcagcagaagtcgggcgacgtgggggctcctccgaagccgaggtcgagtctgtcttccgtggccgaggccgaggccgagcccctgggtcgggcgaggcggaggtcgttcggcagaggccagggcggagtccgagccctggggtcgggcgaagcggagttcgtcgtcttccgggcctcagcccgagtccgagctctggggtcgggcggagcggagttcgtcgtcttccgggtcttagcccgagtctgagccctggggtcgggcagagcggagttcgtcgtcttccgggtcttagcccgagtccgagccctggggtcgggcggagcggagttcgccgtcttccgggtcttagcccgagtccgagccctggggtcgggcggagcggagttcgccgtcttccgggtcttagcccgagtccgagccctggggtcgggcagagcggagttcgccgtcttccggggctgagcccgagtccgagccctgggtcgggcggagcggagcttcctatggcgcctttggcaaggcctgactgcctgtcagactcactctgtcgagtggcactgcaatcggagtggcacaggcggcgctgtccttctgtcagaccggtcagtggtgcggcggagtga

SEQ ID NO: 18216 - DNA, 1128 bp, Zea mays
  Peptide Sequence Number=SeqID_61591
atgcgccgacagatgctcgaggcagccttggtgacggttgacctcggtacacgggggcgcgacctcaccctgtcggacggccatcagcagcggcaccgggccgctatctccaagtgcgagcatggtacatgtcccacgggcgacgaacttccaactctacggcaacggcgcttgttcaaaacttttaaatctgtaaatctcccaggacatttatatcattacagtgcgaatgctttgaagattgccctggaaaagaaaaaattgaacgcaaacatatatgttgggatgcggtattggtaccctttcacagaagaggccattgatcaaattaaaaaggataagattaccaagctcgttgttcttcccctttaccctcagtactccatatcaacaagtgggtcaagcattcgtgttctccaagacattgtcaaggaagattcatatttttctggtttgccaatttccattattgaatcatggtaccaacgagatggctatgtgaaatcaatgtctgacctaattgaaaaggagctctccgccttctccaatcctgaagaggttatgatattcttcagtgcacatggtgtgccacttacctatgttgaggatgctggagatccttacagagatcagatggaggattgtattgctttgatcatgggggagttaagatcaagaggaatcttaaatagtcacactttggcgtaccagagtcgggtggggccagttcaatggctgaagccatatactgatgaagttttagtagaacttggtcaaaagggtgtgaagagcctcctggctgttccagtaagctttgtgagtgagcacatcgagacattggaagaaattgacatggagtacaaggagttggctctggaatcaggcatcaagaactggggtcgggttcctgctcttggatgcacttcaacattcatctccgaccttgcagatgctgtcgtcgaagccctgccctctgcttcagcgctcgcgaccagaaagcctgacgacatcgattccagcatggacctgacgcattacctcaccaagatgctgtttggctcaatcttggcatttgtcctgctgctatcaccaaggctagtttccgccttccggagcaccatgctttaa

SEQ ID NO: 18217 - DNA, 1056 bp, Zea mays
  Peptide Sequence Number=SeqID_61592
atggagctcaagtcactatctcaaaggatcaaatgcgcgaagttggagtcttggagtcttagaatgtttcttgttagattgggtgactcctccatgcgcctaggggtcccttttatagccccaaggcagctaggagccgttggaggccaacaaggaaggctatccttgccttctatcgggtggcgcaccggattttccggtgcgcaccggacagtcactgtagacggtctggtgctgatctccttcctattctggcgcagacgaccgtgcatcttgggccagatggtgcaccggacactgtccggtgccccctgccgaccgttggcgcgggccacgcgtcgcccgcggattgcgcagccgaccgttgcgctggcgatcgttggctcaccggacattccggtgcaccactggacagtccgaaattgcccaagggcacatttccctttcacctactccactgtgtatagtattgaaagcttgtatgaacttctcaaggggggcacgtacaaggatactgagccccgacatgtgggcctaggggcaaaatggagggaagtaactaatgcctgtagcgcctgggcgatcttcgagtgccataatgtccatagtgcatatagtattgatatgtcgtgctgcttcatcggtaacgcgcaagtcatgatgggtgtagtacacgcggtagcatgggcgtactgcctgccaacggaatggacaggcacgccgccacaggatggcctggtcgccgctcgtcagcagagtggacagggctcattaaatgctgaggcggcacatcgcctgccagtggaatggacatggctcattaaatgccaaggcggcacatcacctgccagtggaatggacaggcggcgcgccttatccgcaataaatgcagaggtcgtgcggcccagaggccttacgtcaggctccgcccggtggcttacgtcacgggcagtaggccacgtggcagcaacgggtctccgcctgagcggggagcagaagcgcacacggtatggtccagacacgtgtcgactccggaccccgcctggccttgattaa

SEQ ID NO: 18218 - DNA, 369 bp, Zea mays
  Peptide Sequence Number=SeqID_61593
atgaagcagtggcgtgacgatgtcgatcgtctgctcggcatggcgcattctggctcagctaggcctaggccttggtcatcccgacttcaacatgaggtgtcggcgtcagtgcgctcaccatcagtgagggccgcaccgactgaggacctacaggcggagctcaaccgcaagcgtgcgggagaagacgctccagtctctctagagaggtctgatgacctgcgggtagaactcaaccgcaagagtgcggccgaggatgcccgcatctctctggagagggcgcgtgagcgtcgacagaacgtcgagggtcgcaacctcgactacgactttgctgcggttgcaccacagactccaacgggcgcccagatctag

SEQ ID NO: 18219 - DNA, 1053 bp, Zea mays
  Peptide Sequence Number=SeqID_61594
atgtcaggcgacggcgacgcgcgcggcctcgaggcagcggcggccaccgcggcagaggcggcgcgggagctgcgcgaggcggccgcggccctcgtcgccacccgcgccgctgaggaggacgcgctgcgccgccgcgccgtggcgctcgaagccgacgtccgccgcctccaggcctcgctccacgccctcgatccctccacgctcgacaaggtcgaggaggaattggagcgtgccagggtggcaatcacggatagtgatgtggcttcgtttcttcccagcaagcggaatggcaagtttcttaagacatttctaggccctgtgaatgtgcgggtggcgaggaaggaagataaactcaaaatcaaggatgagtacaacaattatagggataggacagcctataagtttctgttatttccatctatcctcctcctactgagatggtggatatgggatggatgccttccagcattggctgttcaaatttaccaggcttggttactatacctgtacacaagctttgctttgcgtgagaatgtattaattgcgaatggaagtgacattcgtccatggtggatatatcatcactatctagcaatgctgatggctcttattagccttacatgggagataaagggacagcctgattgttctagcaagcagaggggggtgcaacttttcttgcgctgggcaatcatgcaaggcattgcaatgcatctacagaatagataccagcggcaaagattgcgtactcgaatagctctaggaaaggctaaaagaatggatgtcgttgctggcgaaacagctggtgtggaggggcagctcttgctgctatatcctgtccttttcatattacagggtttcgaagcatatgttggagttttgcttcttcagacggctttgcatgggcttgcttccgaatggcaggcaagaatgattcaacagttatcactattgacagtcgaatgtcttagtctgcgggatcttgctggtggttatggcagtcggcaactttgtccacactatggagacactggtactgaaactgaggtttaa

SEQ ID NO: 18220 - DNA, 423 bp, Zea mays
  Peptide Sequence Number=SeqID_61595
atggcgcctcctgttgacgtggctggcccgcgccctaggttgcgtgatgtggaggctccttcgaggccgaggtcgagtctgtcttccgtggccgtggtcaagtccgagcccctgggtcgggcgaggcagagaccgtcggctgaagccagggctgagtccgagccctggggtcgggcgaagcggagttcgtcgtcttctggggttgagcccaagtccgagccctgggtcgggcggagcggagttcgccgtctttcggggtttagcccgagtccgagccctgggtcgggcggagcggagcttcctatggcgcctgcggccgggcctgactgcctgtcagcctcactctgtcaagtggcaccgcagtcggagcggcgcaggcggcgctgtctttctgtcaggccggtcagtggagcggcgaagtga

SEQ ID NO: 18221 - DNA, 786 bp, Zea mays
  Peptide Sequence Number=SeqID_61596
atgggcgggggcctcctggcagcagcatccgccctgaggtcatcgctgccgctgttcggccccccggagcagaagttgtcgtcgtcgccgctgccggagcgggcgacggcgcgccttaaaggaacccctcggccgctcttcgatgagccgaggccaggggtagcggtgtcagcatggacagaggcagagttggctcgaaaggaagacttggttggctggagcctggctgggtcgtccgctagcgggaccgacgccggagttgatcttccgaggtctcaggccgggctgatgtcttcgggggacagctggccgaggcctcggggcgaccagccgaggcgcctgcccaagccggattctcggagaagaccctggtggcgatggcccgggtgtggtgatgacgctgtccttcggagtggagatcctcggaccgcgtcgccgtccgaggctaggtcggacctcgccgaaggtattgtcgacgccgagggtgttgcggctccctcaactgtctggatccgagcctgcaggatcggattatcttgtagcgtgatgagtgaggtatccgtatcccggaggcgtaggagtccctcggctcggtcggccttaccgcttacgcgcactcttacccgtccatggggttctgtcaccgacgcagtcgagaaggctcgaagaatcgctccggcagaagagtttccgaacgtgaagacttgttcggtccgcggaatcacttatccgaacgtgagttacttatcgcagaaggtgatgagtgaggatccactttcgaagtag

SEQ ID NO: 18222 - DNA, 726 bp, Zea mays
  Peptide Sequence Number=SeqID_61597
atggaggcaagaagagcttcgaggtaccaagtgcacgggagaaggtcaaagaggctgaggaacccaaagccaaggccaaagctcaactcagtctggcacaccggactgtccggtggcgcaccggacagtgtccggtgcgccaggctgaactccggtgaacaggccgctcacgggagaagtctggcgacgatcggctataattcaccagactgtccggtgtacaccggactgtccggtgagccaacggtcggcttgggcaacggtcggccgcgcaatccgcgcgtgacacgtggacgagccaacggtcaagtgggggcaccggactgtccggtgtgcaccggacatgtccggtgcgcgaacggctccaagactgccaacggtcggcttcgccatagaaggaaagaaatcgggcaccggacagtgtccgccgcggttcttgttgtaactcaactcaacatagtgaaaggctctatctgtcatactgacagatctgagcaaacggaggaaggagttgaaatagactccaagcccaggcgacatccagatcctgttcccgggtcaaagggaactttcaaactcgtcgctctcgggaattcatcgtcgacgtacggctataattcaccggactgttcggtgtgcaccggactgtccggtgagccaacggtcggcagggccaacggtcggccgcgcgatctgcgcgggacacgtggccgagccaacgactag

SEQ ID NO: 18223 - DNA, 213 bp, Zea mays
  Peptide Sequence Number=SeqID_61598
atgatccccgggcagaatggggggctctgcttgttggtaaagtgcgcatcctctgctgaccggccgaaagacggatatatcatccgtgctcgcggagatgagcgacctagggagctccagcgattagtgttgcttgatcagagatactttggtacaggtggctctgacgacggatctgtcgacgacatgaagggcgtgaccactcgctactaa

SEQ ID NO: 18224 - DNA, 369 bp, Zea mays
  Peptide Sequence Number=SeqID_61599
atggtccacatcgtcaagcaccaagatttcttgcccgaggacttcatgctggaggaggaggctgcctcttccacaccgtgggccaccaacctccctgcacctggggcgacagctgctgcgcactctgcgtggcagcacactcccgcacagacatccagggcgtctagggctgcgcctggggcgctgtctgcgggcagggaactgttgcgccaccctcctagctccacggcctcgccgggggccatgaagcagtggcgtgacgacgtcgaccgtctgctcggcatgacgcactctggctcaaccagggccaggcctccatcatcccggcgtcaacatgaggtgtcggcatcatgcgctccccctcagtga

SEQ ID NO: 18225 - DNA, 387 bp, Zea mays
  Peptide Sequence Number=SeqID_61600
atggtgagagaacgaagaacacaaacaaacacaatgagcaagaacacaagagacacaagatttatcccgaggttcggtcacaccaccaaggtgccctacttcctcgttgaggcgcccacaaagagacgggtctctttctaccctaatcctccctttgccgaccacaaaggggggtttcggttcactggcggactcagccagagactggaccggtcccaaattcggttgagccggaccaaaattcggttgaaccagttgcaaattcggttgagccgggccaaaattcggttgaaccatttttccaaaaatctgcacatggctttttctaacaggactgactggcagactggcagtgatagaggggaacagtgcagaaaccggttttaa

SEQ ID NO: 18226 - DNA, 135 bp, Zea mays
  Peptide Sequence Number=SeqID_61601
atggagaaccacctaggaaaacagtcctaccacaagggtgatgttgatcctagggcaatagatcttgccatgagaatcgccgaaaggatgttcctcaaaatgaaggaagatgaggcgaagaacaagattgaataa

SEQ ID NO: 18227 - DNA, 312 bp, Zea mays
  Peptide Sequence Number=SeqID_61602
atgcccgcacatgtggcaatgatcattggtgggtcactttacctcgaagtcgctggagatctcattcgtgatggagcaaaggagctcctcgccgtaggcctcggcataagcgcgacagatggcatggcactgcgtggcgtcgcgatggccgaggatggagatgatgagcgcctcgttcgtgcccccaccttgcaagcaaggggggcaacaaacacaccgtcagacggtataaacaatggtgatggtggaggttgcgggtggtggtgcgtctggattagtgggtcgatcgatcgaattaagagcattctctag

SEQ ID NO: 18228 - DNA, 219 bp, Zea mays
  Peptide Sequence Number=SeqID_61603
atggcgccgccgcggttagtagccagtggagtagatgacgagcaagtcactgagaattctggtgcccagcagatagaagttgctgagcaggagctcgttgaagagaagaaagtgaggttcgccaacgggcgggtggctgtgcgcgctcgtacttcggcactcggagccatcggtgtgacgcagccgcttagcttgaggttgggatcggggagcgcgtaa

SEQ ID NO: 18229 - DNA, 894 bp, Zea mays
  Peptide Sequence Number=SeqID_61604
atgtcttcttcctcccttaagcgtcgggtcttcccgtcttccaagcccccggatgggggcccggtcgcaccccttcaccggcggtcacccgagatggcgacctccagcttgatggtgggggaaagcgagccgggctgcggcctctgccccttcctcagcctcaaggattttcatcaccaaggccggggaggggagagtgccgagttgggcgtgcctggtcttcagccgcgagtggcttcgggggccacttgcggcgtcggcgtctgccacggcagccggaagaggttcttccgccggcgcggcggccgggaccggccacgggctgacctccaacttctacggccttctgcccgtccttgcctcacgagttttggcacgggcgggggccgcctggcagcggcatccaccctgaggtcagcgttgccgctgttcggccccccggagcagaagtcgccgtcgtcgccactgctggagggtaaccggttgagccgcctgctcgggccggattcccggaggagcccctggaccgcggcgccgcccgaggctgggtcgggctttgctgaagacgtcgtcgatgccgagggtgctacagctcccttcggcatgaagacccgagcctgcaggatccgatcatcttgtagcgtgtgcttcctgcggccgccgaggccagaagaaaacaccctcgctgtacttgcgaagctgcgccttttttcctcctgtttcgagcatctggacttcgtcggtaacagggatgtttgtgtgagcaagagctgcttttcgcggaagggacgagtgaggtatccgtatcccagaggcgtgggaatccctcggctcggtcggccttgccgcttacgcgtactttcacccgtccatgaggccctgtccccgacttag

SEQ ID NO: 18230 - DNA, 291 bp, Zea mays
  Peptide Sequence Number=SeqID_61605
atgtcttctgaggaggaggagccagaaccacccctctatgtctgcttctctgacgacgacaatggcgatggcgacgacgacaatgtcgaccacgggtccagcggcgccagcagctccagcatcggcgacgtcaacgaaaaggagagcgatgacaccagtggcaatggcgatgatcccaaagctgatgcgtctcctcccccgaagcgccacaagcgcatcggcttctccccctttgtcgccggtaggtatatagacgcgatagttcttttggagcaaccagagtggctctag

SEQ ID NO: 18231 - DNA, 213 bp, Zea mays
  Peptide Sequence Number=SeqID_61606
atggcacccacctcttcctcttcctcctcctttccttacttcgaggatgacatcgatcaggagctaacaccggtgtgggaccctatcgctgattatgagaaggaggctcctctgcatcgggatgcggaggagtgggacttcgcggtggagtccgaggatgccctctccctcatcgatggcgaggacctcgagctcctcctcggcgaggactag

SEQ ID NO: 18232 - DNA, 459 bp, Zea mays
  Peptide Sequence Number=SeqID_61607
atgggcgagagcaagaagggaggaagttcgtcgcaccactccggcgacaaacggaagcgcgagccgactcctccctcggaggactttggcgattccgagtactcggaggagttctcctccgagtccgaagggtcgtcggtccacgcctctcccccggcatcgtctgacgactcagacgattcccaggggattgcggcggagatgtggacatacatccgggtcgtcgagcgcgctgggctcgagggctcggatgagttggaggtctcctcggacgagggggactcctctgactcatctgaggaggggagcgacggcgatgacggcggtgagggcgacggcggcgatggcgatggcggtggcgatggcaacaagggcgacggcagcaaaggcgatggtgagggcgacggcggcagcggcaacggcatgggcggcagtggcggcggcaaggccagtggctag

SEQ ID NO: 18233 - DNA, 633 bp, Zea mays
  Peptide Sequence Number=SeqID_61608
atgatgaccaccagttcctgggtggggaagagcaagccgggctgcgatcttggtcccaccctcaacttcaaggatgttcatcatccttgctggggtgggggccaggctgagccggcgctcaacctcccgtgcgggtctgcgggtcaccttctcccgcagcgttcgggggaggaggcgctcactggccttgcgggcggcgcggactcagacaacgtggggctgaccgacggcgggcgtcgtcacctccagcgtgtcggagtcgtcggctgggctcccggcggcccctcctgccggagggcggctgccgcgccgtgtgcacgggaggaccacccacgatgccgcgcgctgctagggcggcgtttgtgttctagggtggccctgctttttgcactgggatggcgccctcgtgcagaggccggtgccccactcgtctgggaggatttgagtggggatctgccgggggggctggtggcccccgccatcagcgccgaggcggaggcggctcgagaagtcctcgtcgccgacgggatcaccgccaccatccgcgccccgggcctccggttcttcgtacttgtcctcgcccctcgagcgtcggcgtgggcgagggcaagattgcagcagcgcccaccctga

SEQ ID NO: 18234 - DNA, 1083 bp, Zea mays
  Peptide Sequence Number=SeqID_61609
atgtcttcgcgctcccttatgcaccgtgtctttccaccttccgagcccccagatggggaacacccgcaatccttccgccttgtcgttggaggaatgcaacttcgtggaagttggtacctttcagccattgttcggcttcaaggattttcatcagtcagcccggctgcatcccctcgccggtggtcacccaagacggtgaccaccagcctccgggtggggagaagcaagccaggctgcaatcttggtcccgccctcagcttcaaggatgttcatcatcctcgctggggcggaggccgggctaagccggagctctacctcccgcgcgggttcgtgggtcagcctctccttcagcattcgagggagagggcgctcactggccctgcgagaggggcggacttcgacaatgcggggctggtcgacggcgggcgtcgtcagcttcagcgcgttgggctcgccggcttggctcccggtgccccctcccgccgcgagggcggttgtcgtgccgcgcgcacgggaggaccgcccaagacgtcgcgtgctgctagggcggcgttcgtgttctggggctgtcctgcctttgcaccagtacgacacctccgcgcggaggagtccctcggctcggtcggccttgctgtccgaggcttctcttgcttagttaaaggaacccctcgaccgctcttcgatgagccgaagccaggggtagcggtgtcagcacagacagaggcagagttggctcgaaaagaagacttggtcggccagagcctggctgggtcgtccactggcgggaccgacgccagaattgagttgtcgaggcctcgggccgggctaatgtcttcgggggacagctggccgaggcctcggggtgaccgaccgagctgtctgctcgagccggattcctggagaagaccctggcggcgatggcctgggtgtggtgctgatgtcgtccctcagagtggagatcctccgaccgcatcgccgtccgaggctaggtcggacctcgccgaaggtgtagttgacgccgagggtgctgctgctcccttcaactgtcaagatccgagcctacaggatcggattatcttgtag

SEQ ID NO: 18235 - DNA, 797 bp, Zea mays
  Peptide Sequence Number=SeqID_61610
atggcgccccgcacgctctatgacgacagcggctctcagcccccttacggaagcaagaggacgtcagcaaggactcgacagccccgacagctatccttccgccaggctccagcgctcctccgacggccacgacaccacacgaaccggagggttggccacgcggggaaaggacgggacgacgctcgtgtgaggccgctcgctccctcccgcgtggacgcttggaccccccggtctcgaaacgccgacaattattgtgtgggcttgacctttgtggtcggcaaagggaggattagggttgaaagagacccggctctttgtgggcgcctcaacgaggaagtagggcaccttggtgatgttgatcctagggcaatagatcttgccatgagaatcaccgaaaggatgttcctcaaaatgaaggaagatgaggcgaagaacaaaattgaagaagaaaatgatcaatggagaccaaacgacaaatccacctcttcacaagggttgtctttcaaatccacttctcatatgtgctttattgctaatgggagtgacagtgaaagcgaaagtgaggatgaggaggaccaagaaagtgatagtgaagatgaggatgatcttcaacaattcttcgctcagctaagcaagaaacatcggatgagcttgctcaaactcatgaaaagagcggaagaacaaaaagaaatgcttcataagcaagaatacttcctcattagaaaaatcgaagacttagagaagttgaccaaagagcatgagaagctaaagtgctctcatgatgatttagtccaaag

SEQ ID NO: 18236 - DNA, 156 bp, Zea mays
  Peptide Sequence Number=SeqID_61611
atggcggggggccctgatgtcgcgggcttgatcgaggatgatgcggtctccgtcatcacggagctgactgaaaagctaagcgtttggcagtccgcagcagcttttggtggccagaagctccaaaaagctgaaacaaacagtggcaaagttcactag

SEQ ID NO: 18237 - DNA, 1515 bp, Zea mays
  Peptide Sequence Number=SeqID_61612
atggccactaggcaacagatgcgtgtaaagcttgagcttgacggctgccatgagcaccgtgtagctttccgtttgcagccaccgccgcctgtcgccatccggttcgcccacgtcgcgcgaggactaggcttcaaggccccgccggcggtgcggagagaagggaaagaagaagaacacgctgttcttgacaagaacagcaagatcgatctacacatcaacagcaaggtatggagcataccgtttccatgcgcatacgccgtatgcgcgaagttcttcatattgttgatgatgcaatgttggaagcgtacaccgttgggcaagccactgcactcccaccggtgcacgagatccctgaacgccgtgtgcaagtgcaaaatgtgcacttctgcgttctccatggatggacagcggtggttccgctgccggtggtggagtgtggactccccactgcattcccgtcgccacaggcgccggtgtttgacgcgggatcgtctgcatcggccccaatggatgtcgatttggaggcaccaccaccgcctccacccactgcagcggcagttgctcgccgttcgccatctccaccagtgcctgtggtcgtcgggaccatcgctgcccgtcgtgggcagcctgctcgcgctgttgatgccccgagaggtcgcatcatcttcaccggccatcacccaaatggggtggccccatcttcctcctccaatcggagggcctaatggccctcgatccggccgccacgtcggccgtttgggggagggggtggggagtggcgcggcaaaccccggcgcgagcgcgctttgcggtgcacggctcggcgctctgcgcatcagggccggcgctcggcgcagcccccgtcagggcgcgggcgcgggagaaggcaaggcgggcgcgcgcgattcgcgctctgcgtgggcgcggtgtggccccacgcgtggccggcgactgcgcgacccgggcaggcgcggcagcgcgcaacggctccaccaggcggcgctcggcgtgaggcgcgtggcgcagctcctagccggcctcggccaggggcgctcggcgcggcctcctcctccagaggcgcgggaacgaggccccggcgagggcgctcggcgcggctcccaagggcgctcggcgcggcctcctcgggcgcgggaacgaggccccggcgagggcgctcggcgcagcctcctcctccagaggcgcgggaacgaggccccggcgagggcgctcggcgcggctcccaagggcgctcggcgcggcctcctcgggcgcgggaacgaggccccggcgagggcgctcggcgcggctcccatgggcgcccggcgctcgtctcgaggcgcccttcacgaggcgctcggcgctcgtcaggagcgggcgcaggaggagaaccagggcggcggctgggagctccttgctccctggcggcggccaggaacatccctggcggcggctatgcctttctggccgctgcctggctcgcctggcaggccgcctggaccactttcagaggtctaa

SEQ ID NO: 18238 - DNA, 1788 bp, Zea mays
  Peptide Sequence Number=SeqID_61613
atggcagggcaagcagggaacccagtaaaccaccctataagtccccacgtgataagtggcgctttcgttcagcaatattaccacattttacacgaacaaccagatcaagtgcacaagttttaccaagattcaagtattcttggtcgaccagattccaatggaattatggcatatgtaaccactatgcgtgatattaatgaaaaaatcatgtctatggacttcaggaactgcttaacagagatagagactgcagatgcacaattatctcacaaggatggggtgctcattgttgttactggttccttgacttcggatgaaggcgttttccgtaggtttacccagtcattcttcctagcaccacaagaaagtggtggctattttgttctcactgatgtatttagatttatttcggaaaggaaaccagctgagataaatcaagttgctactcaagaaaatgaaatcagtcagaatgttagacctgcatctgaaacatgttcagcactaccagaacctattccagctgatgggagtgtgatctcagaccatgtgacagctgatagtaatgtcacggagaagcaaataagtgatctttctgctaatgggactgccattgaaagtaatgataatacccagccacctgtgcaagtgcccaaagaggatccaaagaaggccctacttgttgctcctccccctccaactcagatggatgttactaagaaatcttatgcatccattgtcaaggtcatgaaggagggcccaccaactccagttgtcaaaacaacatcgtcagtttccaaacagaagccagctcctaaaccagtgtccacggctgtcgaaggcctagagaaaccatctgagaaacctacccaggctattggaaccggtgatgggattgttgcccaaaacaactcttctcgcaatgagcaaggctattcaattttcatcaagaatttgcctttccatgccaatattgaaatggttgaggaggaatttaagaaatttggtactataaagccaggtggtgttcaagtccggcacaataaggttgatcgatttggttttggttttgttgagtacgagtcccagcagtctatgcaagcagcaattgaggcatctccgattcgtatggcggacaaagaagtcggcattgaggcgaaaagagccaattcacgagtcattggactcttgactctgtacaatggtgtaggtggccgtttccaatctggcaggggagtgtaccatggtgataactttagagggcgaggaagtggctatgtggacaacacaaactacagaagcagcggcagcttcaaccgccagaatgaaggggagatgtacaaccgcaggaatgaaggggagatgtacaaccgcaggaatgaaggggacttctacaaccacaggaatgagggggagttctacaaccgacggaatgatggtggcgagaactacaaccggcgcaacgatggtggcgagaactataaccggcgcaatgatggtggcaagaacttcagccgcaggaatgacagtggtaccgagaacttcaaccgcaggaatgacggtggcggcgagaacttcagccgcaggaacgatggtgttggcgagaacttcaacgtcaggaatgacggcgttggtgagaacttcaacaggaggaacaacttcagaaatcagaatgacttccctggacgaggacggggttcacctacaccagggaacagttactaccagaacgggaatgggaggttcagtcgcgtgaacaatggcgccaagcaagctcctgtggccgcgtag

SEQ ID NO: 18239 - DNA, 1152 bp, Zea mays
  Peptide Sequence Number=SeqID_61614
atgccagaggtcggacggctggttgcggcgaagccaagggggcgcgctaccgcgggggcgaagaggcacactaccgtaggcggtggcgtgctctccacgcgtcggttcaccttcaccttctccgcacacaggaaccggcgcgccaggtgcatgacatgtgggtctgggcccccatgccagaggttggaccgctggttgcagcgaagacgagggggcgcactaccgtggggcggtagcatgctccttgtacggcggttcgccttcttgactgttggtcgtagcgaagataaaggggcgcactaccgcgtggcggtggcatgctccttgtgccacgattcaccttcttcgcgcctcgggccagctctcgaggtggcactcaacttggtgcgcaacccgcttggatggggtgtgctggcgtttgtcgggaggacctgcgtctgtgtctctcctctcagcgacctcgccgtcgaagagtttgtgttctttgtttccaaactccccagcgggttggctctgccgatcccgtctttcctcgtgcagctgctggaggggcttggcctccagcctctacccatggtgtcttgtttcatccttcaggcagccatcatcgcctacctctacgggatgtccgtggaggcgacactccttcccgcttcttcctccagcattcggggggaggatgattaccagcctcgtgaagaggtggtcgcctccgctggtgggccgctcagagtagaggtggtcgccgccgctcgcgagccgctcggatatagctacccacgcgaccctactggtgtggagaccagcatacctaagaaagagttggcaatggcccccaggaggcccacggtacggaaccaggctgagcggctacacgggctccggaccaccccaggagacaagctttcggaccaacaggctgggcttatgagggcggacctccccgggttggcatacacagatgctccagtggtcaggaagaggtactccttcagtcgtagcaagatagtcacccctgggtcggcgcattcccgtcgccttgaagggtccttcccagctgggggagagttgcggagcccttcttggtttgaagcctggacccgtggggagtccagaagggtttccgggggaaggcaggcttcggccccgtag

SEQ ID NO: 18240 - DNA, 414 bp, Zea mays
  Peptide Sequence Number=SeqID_61615
atgacggcttggtggcgttgggagcacggtgatcaccttggaggacttgttggtgactggctcgagattaaaagcccaattcaaccccctcttgggcatcgtgatcctttcaccgttgaagttctttgttctcttgcggcaccgaatagtccggaaatgttgaggccatttccctttcaaggtatcatgaaacataatgcttcaactggtacccttgcaggaccaaaagtccacagaaagttgaagcatgaagagcgacctttcaccaggaagactgacaacaaggacgtagactcattctcacaatcaaagagctcattccaggcgcgggaggcctggcaacgggggagctccggcgagcttgaagaacggacgcgcgtagctcaagtgagtgcacaggggcaaagtggatga

SEQ ID NO: 18241 - DNA, 342 bp, Zea mays
  Peptide Sequence Number=SeqID_61616
atggctgagcaccgagcctttatgactcatatccttcagcacaccggtgttcagcttccaccaattcagtctgcccctccttcagctcttcaggtagctgttgtgccagctattcagggaggacccacgcttcctccttttggtccttctccctctccgctctggccggtcactctggatttctcgtcgccggacgtcggacccgtcggtgctcagccgctagtgcctgctgttaccactgttgctgtggcggtgtccgtgactccaccagctccggtggatcctacatcacagcctctgctagagtcagtaccagctctagcttctactacagatccttga

SEQ ID NO: 18242 - DNA, 399 bp, Zea mays
  Peptide Sequence Number=SeqID_61617
atgggatatagagaggccaccactcatattcagttatggctacttggtgccttgatctcacattctgagtttgacgttgttgactttcttatctgtgagatcgaggacacagtcttggatggtcttcgtgctcgccgtcagctgtcgtatgcgcattacctatatcacatcttcgcgcagctgatcaggtcacctcagttccagggcaccctcgagacctctcgcctccagtttggtttgtatcgtccagcccctgatgacccagtcccagtgccagatccagtgccatacattcaggctgaggatgaggcgttcagtttcttacatagcagcaggctcctctggcagccgagcaggctcgacaggcagctatctagcagtagatgtccaaatggatga

SEQ ID NO: 18243 - DNA, 229 bp, Zea mays
  Peptide Sequence Number=SeqID_61618
cgggttgctggccggaacgaagagcttcacttcgccgtgtatcgcgccaatgaggacgctgtaatgatttcgaaccgggctccgagcccccctactgatcagaggttcgaaggctggccctccgaagggttcaacagtcgcctcagatcgcgtgggcccgacacccactactggctggcccccgaagggttcacagtcgcctcagacgccgagcgagggatgaccaggg

SEQ ID NO: 18244 - DNA, 1485 bp, Zea mays
  Peptide Sequence Number=SeqID_61619
atgaacaaaagaccggcattcaaggtgccattacaaacggaactccggttctgtccccgcgggacggatgcggccgccggaacgctctcgttcgcgtccccgctcaagagacgcgaaccagacatcaaagccaaagagcgggccgctccaaagcgcaccggcagcaacagttcgccttccccggtatggctggaggacgcctcctccgcagagctggaggatggtttccaccaccagaagctggaagaggaggtggccagccgacccgcgcgggaggtagagccccggctcgccttgctctccgccccagcaaggatgatgaacatccttgaagctgagggcgggaccaagatcgcagcccgacttgcttctccccatccaggggctggtggccaccgtctcggggcagaagaagccaaaccgccgcgcgcggtgcatgcaaccgcccagcggttacaagcgcccctccactttcgcccagaccagcggatgaaggggcgggcagccatgcaggcggcatgcaaccgcgccaagtgggcgcacctctctgacttccaacacgcccagcatggaggcccacgcccacgcgtcatgcagccggcgcgccggtcgctacgtgcaagcaactacaccgccactcgcaccactgccacgcctcctcgactgcggaaccagtaccgcaactcgaggcaaccctgcgcgagcagcggtcacgtcgtcagccaagctcacgtcccgtccgggggcagcgagagaaccctctctcacggcatgaagacggtgcgcccacgtttcgttcctcgaatggctcgcgcacacgcaacggccacctcacgaaccgcccgctccgtcgcattaactccgcggcacgacagacggcgcctctggcaggagaagcgagcgacgcttcgccttcgccataatgaccgcgtcaaaaaagaggttcgaaggccggcccctcggaagggttcaacggccgcctcaggctccgcgcccactactgatcagggcgggaacaatcttgtaacggaatcccatcagagggaggcatcgagccctcggaccccgtcgacaggggaccgggtccggcagatcacccacagaggctcgggggctgctctcgcaaacccggctccggccaaaccgttgccagcgtcaacataccagcccgagaacttgggacccgaccgtgcacccgggctatggccagctcgcatgagggaacaaccagaccagccgaaagcattgcgcgaggcattaagacctcggaggagtcaaaccactcctccgaggcctcgggggctacacccggcgggtgcgctcgcgcgcacccaccgggacaaaacgcaaccgagaaaggctggtccccttgcaaaaaagtgcgacaaaagcctccaagcgagtattaacactcccttcgaggctcgggggctactgtcggggaccataattagggttaccctcaaggctcctgattctcagctg

SEQ ID NO: 18245 - DNA, 519 bp, Zea mays
  Peptide Sequence Number=SeqID_61620
atggcccaagggcacatttccctttcacaactcgactctcccgtggccaccctcgggcgggacaatcacgaatcactcgaggccatcctcggagggagaggcaatcacgactcgcccaaggccatcctcgggtgggagaggcagtcacgactcacccgaggccaccctcaggcggacgtggcgcctccaacgtcgtcgtccgcgtcggggcgcttcctgccgccggagagccccacggtcacgtggctgaagaagcggctgagtatgtccggcagcaagggcacaacgggcacggtggaggtggacgcactgactttttctgcttttcatttgccttgtgcggatctactcgtcgtgctcatctcgcgcagatctgctcgacgtgtgaaccaccgcctcgccgagaaggagatcgtcgtcgtcctctcctctgcctccgcggcctccatcgagagcagtgttgccgtcgtcgaccacctcacctccctcgtctctcacctccatgacctcaagagcaag

SEQ ID NO: 18246 - DNA, 1014 bp, Zea mays
  Peptide Sequence Number=SeqID_61621
atgtggcatgttcggtgcaccaccagacagtccggtgatgaaagtagtagtgatgatgaaggtttgctagaaaaaatagaagcatttgcaaatttgaattgtgagctatcaactaaaattgaggaattagagtctagtgctacatccacagcttccgatgatggcttcattaaaaagaatgaaaaacttaaggctaagttagctagctcccaagaagctatcgaaaatttgctagggaaaatggaaattcttagcatacacaatgatgagctaactactaagctagaaaacattggtagcaccctaaaagcatctttggttgaaatacctgaaattattgagaaagatgcttctacttcctactttgatttaattgatgattctaacccctgcaatcaagttcttgttaagaatgttattatagaaacttgttcggacgagattgcaatggaaaatgagcaattaaagcaagaagtggctcgtcatggaaaagccttgtatgacaagaaaggcaaagccaaacaaatccaacctccacaggataacaccactgcgggagtgaacaagcctgtggagggcgaaactgtgatttgtaggctatgtcacaaagaaggccacaagtctttccaatgcaaggcgaagaccagtgataagcaaaagcaaaagccaacaagcaaaatctccaacacctacatcaaaaaggtggataaaaaggctgctacaccatatttgatcaagaagaaaaaatggaaatgtgatagcaatcaagtccaacaagcaagccaacaaagggaaaggggccaaatgcatctgggtgccaaaggaaataatttcaaccatgaaaagcgccaagaaggtttggatcccaaaagggaagtgaggagtccaaagaaagatggagaatttggagacttggcaaagtttggatgtatatcatgggatacatcatattggatcaagtttattatcaagtgggttagtgaatattttggacccaaatttccccacccatga

SEQ ID NO: 18247 - DNA, 174 bp, Zea mays
  Peptide Sequence Number=SeqID_61622
atggatcaagcaatctcattagttgtgagaagcagacaattcgaatcgagttttaaccttgtaaggtgtgggtgcagcggggagatcctcggtggcaggttcgggagtaggctcttggacttctccttgctccggaataagaatgtattctccttcggcgaggttgcaatataa

SEQ ID NO: 18248 - DNA, 141 bp, Zea mays
  Peptide Sequence Number=SeqID_61623
atgaaggatgcaaagcccatcaagacacctatggggacaaatggacatcttgatctggacattggaggtaagtccataggtcaaaagtctcatggtgttggaaagggaaatggtgaacttgagccaaaaggacgtttctag

SEQ ID NO: 18249 - DNA, 177 bp, Zea mays
  Peptide Sequence Number=SeqID_61624
atgaagaaagtcatccatcttagcaggaagtatgtctatcaaccctcggaagtgaagattacaggaagcacacatatctatccaagaaggttaagatcacatattcaaattggtgtggggcaagtaagcgatagcttgcagttattgagagcaggtgtgacggaacctcccaagtaa

SEQ ID NO: 18250 - DNA, 363 bp, Zea mays
  Peptide Sequence Number=SeqID_61625
atgcaatgccctaactgtcggaagattgagaaaggtcgctggctttatgcaagcggacatcgcgcctctgttgatattgatatgggtggctgggtgaccagtgacaactatgatatcacctccgagcttgcgagtgctggttccgctgctgggggacgaatgcagagcagagcgaacgcgttcggcagccacgtcgcgctcctgagccgtggtgtccgcctcctgctctgcctgaagagcttgggtgagtgttgcatcgcgccgggcggcagcctggaggcatgcttcatgctcaacgactgtctatgccgcagcgtcgtcgacgataggtggtggcggcggttccagaccagccatggctag

SEQ ID NO: 18251 - DNA, 507 bp, Zea mays
  Peptide Sequence Number=SeqID_61626
atgccggggtccaacgccgacgacagtgctgcgtccactgcccagccgtcagagttggcaacgatcaccaccgcccttgccgaagtccagcgccaactggggctcttcgccacgcagatgtcctcctgcattgccgcggttgaatccacccccggaacatcgggcatggcgccgccaccagactgcccctacggcatgcctggatatggcggactgccaccgtccatgacagcggccgatggctccctcccaccaccacccaccaccatatccgcaccagcacacaccaccacctcacttccactgcatgtgctgccgttaccacattcaccatcacccattccatcattaccaccatcccacacaccacttcgcccaccccatcctttcccctattaccgcacaccataccagtgctctctccaccgtcatatgctggtgttcttcgtttccaccgcttggagtttgcaacctttgatggcaaggaagaccccatgcactggttaa

SEQ ID NO: 18252 - DNA, 561 bp, Zea mays
  Peptide Sequence Number=SeqID_61627
atggggcagagggtcttcttcttcgcagcagacctagatctcgcctcccgggagggacctcgtcggggaggagagatcataggctgcctcttggtggaggttgatgaaccaaaagcatatgaactaagcctgatgcacgtcaccggcttttcaatccaatatgtcctcgtattgttgttgctcatcggccgtcagactttcaacatccttcataacttggaggacttgagtcaaatgaccctggtgctcatgatcgagaaaatagtggcatttgagatgtcacgtaaaatgggtcaagaggaggatccgacttcttcaaggccatatacttttgcaagtgatgaagacaaaaagatgaaaggcaagaagaaggaggatccgacttcttcaagtgaagaggaggaagaagaagaaaaagaagaagaagaagaagaagatgatgatgatgatgatgatgatcaagcctctacattgtcctctgagaacgaagaaatagtcaaacgcatcggaaaggtaatgaggatgattcgtaagatcaatctattgggtgtgtccctgtag

SEQ ID NO: 18253 - DNA, 495 bp, Zea mays
  Peptide Sequence Number=SeqID_61628
atggcataccggcaagtgctgctcttggccgtggccgtggccgtggccgtcgcgtgcctcgcgcccctggcctctgccaagcagtgggtggtcggggacgagggcgggtggagggccaagttcaacgagaccggctgggccaacggcaagacgttcttggtcggcgacagcctgctgttcgtgtaccccaaggagagccacacggtagtgaaggtgggcaaggacgccttcgcggcgtgcgacctgggcgccaacctgcagctcggcaactggaccggcggcaacgacgtcgtgcagctggacaagcccggcaaggcgtggttcatctgcaacaagcccaaccactgcctcaacggcatgaagctcgccgtcgacgtcgccgtcgccgtcgccccggccccgccgccgtcggcggcgcccctcaccggctacacggtcggcggcgcggtcgtggccgtcgcttgcgccgtgttcgcggctgcgctagcgctctag

SEQ ID NO: 18254 - DNA, 105 bp, Zea mays
  Peptide Sequence Number=SeqID_61629
atgtcgctgacaggacagatgtgcaggacgcggacccagatgtcagagacattcctgatgaagaacaatcgggttggatgggagggggcaagcgtcaagacctag

SEQ ID NO: 18255 - DNA, 2619 bp, Zea mays
  Peptide Sequence Number=SeqID_61630
atggccgcgagcttatctctccacgtcactgccggctgcgggtccaagaagaagaagaggtcgatggccgcgaaggggttgagggaggtggggaggaggagggcggcggaggtcgggcggcgctgcttgtctggcgggagcgctgggccgccggcgccggcggcgaagcggaaggagggagggaaggcggtgaacctgttcacggccgtcaaccaggcgctccacatcgccctcgacaccgacccccgcgcctacgtcttcggagaggacgtcgggttcggcggcgtcttccgctgcacgacaggcctcgccgatcggttcggcaagagcagagtgttcaacacgccgttgtgtgagcagggtattgctggatttgccatcggcctagcagcgatgattgtcaatgaagcagctaagttcagatatcggagtggaaatgaatttaactgtggaggcttaacgattcgaactccctatggtgctgttgggcatggtggtcattaccattcacagtcaccagaggctttcttctgtcacgttcctggactcaaggttgtcataccacggagtccacgcgaggctaaggggttgctgttggccagcatccgagatccaaacccagttgtattttttgagccaaagtggctgtatcgcttggctgttgaagaagttcccgaggaggattacatgctgccattatccgaggcagaacttgcggtgctgaaagaagcctgtgaagatgctgcaaaggatggggtgtcttgcgaactcatcgatctgaaaacactcgtaccatgggacaaggaaacggtagaggcctcggtgaagaagaccgggaagctcctcgttagccacgaggctccagtcaccgggggcttcggcgcggagatcgccgcgtccattgccgagcgctgcttccagaggttagaagcacccgtggcgagagtctgcggtctcgacacccctttccctctcgtgtacgagccattttacatgcccaccaagaacaagggcgtgagcctggtgctgggctacgcggacgcgctggcggcgccactcccgcacgccgtgaccgtgagggcggacgcctcggacgagggcagccgcaggcggcgacggatgtcgggttctagctccttgtgggagacgggcgcgccgtcgctcgacacgctggcagagtcagccgcgacgtacgcggtgatgatgtcgtcgcagcagcagcaacagcagcagacggcgggaccgagccggcaggcggtgtacggcgctcctgtcctccccgaaatcccgacgcgcttcgtctacaggccgcaggtggcgacggatgtgatgtcgggttctagctcgttgtggaagacgggcgcgccgccgcacgacacgctcgcagagtcagccgcgatgtacgcggcgacgctgtcgtcgcaccagcagcagcagcagatggcgcgaccggaccgacaggcgatgtacggcgctcctgttctccccgaaatcccgacgcgcttcgtctataggccgcagacggcgacggatgtgatgtcgagttttagctcgttgtgggagacgggcgcgccgccgcccgcggcgtacgcggcgatgctgtcgtcgcagcagcaacagatgccgacgacgcgaccgggctggcaggcggcgccccgcggcgctcccgttcctcctccgatgaacatgcgtttcgtcccaaacacgatgccagcggcggatgccatggacgtcggctcctcggcgcccatggcaccctcggactcctcgtcggagaggacaccctcgccgctccagcgcgtggaggtgcgccaggtgtgggcgcacaacttcgacagcgaggccaagctgatcgagtcgctcctgcccaagttccggtacgtggcggtggacacggagttcccggggacggtgtaccggccggcgggaccagcgtacaagttggagcccgcggagcggtacaggctgctgaggtgcaacgtggacgcgctgcaccctgtccagctcggcctcacgctgttcgacgcggggtgcgtgctcccgggcggtcacggcggggccacgcggtacgtgtggcagttcaacttcagcgatttcgatgtccggcggcaccgtcacgtggtggagtccgtcgcggcgctgcggagcagaggcgtggatctcgaccggacgcggcagtacggcgtcgctgcggcagcggtgttcggcccgcgcctgcgcaagtggacgcgcgccggcctcggccgcgccggcgtcgtcacgtcccacggcggctacgacctcgcgtatctggtgaagatgatgttcgggaccgggttcaggatgtccgggtcggcggcggagttcaatgctgtcgtcaagtcggtcctccaccgtcggagggtgtttgacatcggggagatggcgaggctctgcccgcacgaacacctccaccgcgggctggacagcatcgccggacagctcaacgcggcgcggttcgccgccgacgcggcacgccaggccggctatgacagcctgcggacttgctacacgtttatgaaactgagagaaatatacttcgacgacgatggcaagctggcgggcgtcgatgggatcctggccgaggtaacggcgttctag

SEQ ID NO: 18256 - DNA, 1923 bp, Zea mays
  Peptide Sequence Number=SeqID_61631
atggcggctgtagggagcttgcagccgggggtggagactctacatgtgcaggattacaaggacgcgcctccagccaaggctgtggcggccgcggtagagagcttgcagccggcgatggagagcctacatgtgcaggaattcaaggacgcggctccggctaagggcgtttccgccgctgctgtagggagcttgcagccggggatggagaacctgcaggtgcaggattacaaggacgctagcatgtattatggtgcttacccggcttatccctatggagcaccctatggtggctggggggagtactccacatacttgagccatgatggagcacagacaccaactgctggcgcgtatgctgacatgtactatggccatgctgcatatggtcatatttatgggtctcagaattaccagtatccatcgacctacagcaagcaacagaattccactgccaagctgtcgtccaatggtaaaagtgagaaattggctccagctccggaaggggatgtctccactattgttgttgatgaggtgaaagtcctgaaaaatccaaacccgaccctgaaggcagacaggaatgcaccaggttccaatggttcatatggccgatctagtgtgcgttctggtaactatcagaaccagactagttggtcacactatccatattatagtagtgagatgttctctgacaagcagcaaaagtttaccagcaatcacaattcgactgctcccaatgataaaaccaaggggcagtcgaggaaccaaaacacgagacagtatcctcatctcatgatttttttcttcaagggtctgcaaacaccaacttccccatcagtttactcagctaatggaatatatcggtatgatggcagctatggacctagcctttggtatggatcacacatgtatagttctgggttatatggtggatggaattcactgtatgatgggaagtacagaaccagaggaagatgtaataatggctattatgcttatggtaatggaagccttgatggctttaatgagctgaaaagagggccaagaagtgggatgtacacaaaccagctggggcttggagctactactgaagtaccagcaaaagagcaggaccttctgtctgctaatggttcacatcctgccatgaaggaccagtataatcgggctgactttgcggaaacatactcagacgcaaaattcttcattatcaaatcatacagtgaagacgatgttcacaagagcgtaaagtacaatgtgtgggctagcactccaaatggtaataagaaacttgatgctgcctatcaagaggctaaagaaaaatcaagcgaaactcctgttttccttcttttctctgtgaatgcaagtggccagtttgttgggcttgctgagatggtgggtcgtgttgattttaacaaaacagtagatcattggcaacaggacaagtggactggttgtttccctgtcaagtggcacattgtgaaggatgttccaaacagtttgctgaagcacatcattctcgagaacaatgaaaacaagccagtgacaaacagcagagatacacatgaggtgaagcttgagcaaggccttcaagtgcttaaggttttcaaggatcatgtgtgcaagacatctatactggatgactttggcttttacgataatcgtgagaagatgatgcaatataggaaagcaaagcagcagcagtcactgaaaaaggtcatcgatgtgaaggtgcctaacgccactgacgcagatacaagtctcgtaggaactggatcaacggaactcaccaatgttgaggctgatgtcttgaacaaagagctttcattagacaaagcagtagagaaaaacgaggagaaaggaaatgatgtcgccccacaggacctgaaatcatcagctgagaagtcggcaagcccaaatggctgttaa

SEQ ID NO: 18257 - DNA, 3342 bp, Zea mays
  Peptide Sequence Number=SeqID_61632
atgatggtggtggtgacgccgcaggacgcaggccggccgacggcgcggtcggagcccgcggaggtcaccgatggcgcgtgccgctgggcggcccctatcatggatgccaccaggctccccgccggcaaggacaagatctaccagttcctcgtctatgagaccgggtcgagcaaggcggcgttgctgggggaggccacggtgaacctggcggactacgccgacgcgttgaagccgtcggcggtgacgctcccgctcaagggcagccccggcacgctgctgcacgtgaccatccagcgggtggtgggtggcgccggtgggtacggagacgacgcgagtgagagcggcgacgcctcgccggtggcaaagacgccacagagaagaacgacactgcagaaccagctgagccggtttgaggacgaggacggcgagaaggctagagcggccacggatgcgatgagtcctgtgcaagatggattgttgataacaaaacctccaggcatgaggtttccatcaagaagaaatgtgcctatgtctgttgacccagtgggccatctccacaatggcagcagtttcgatgctgtctcggtgtcaggttcagatgcaagttctgggagatatacccccaaaattagtgcgaccatgcacaactcatatcttcaggatagtagcaatgctctctcaccatttgccaacaatggcactgtgaggaacccattgaccagttcgggtgactggtcaggaagctcagctcctgatgctagtacagatgggtcaacgagcaattctggtgaggcagggttaagaggggaggatgacgacgtggagaagctaagaagtgaaatagccactttaaccaggaaattggatgtctcagatatggagttgcagactctccgaaagcaaattgtgaaggagagtcggcgtgggcaagatctctccaaggagatgagtagcctcagggaggagagggatgcactcagaagagaatatgaaggactgagaggggcaaagaagatgatccatgattcaaatggctcagggaaacggctctcagatgggtatgacccatggtcacaggttgaagaactgaagcaagatctgaatcatgagaagaatctaaatgcagatcttcgtctacaactgcaaaagatgcaggaatctaactctgagctgcttctggctgtgaaagatcttgatgagatgttggagcaaaagaacagagacatttccattttgcaagaggatacacaagaggatccacaggaggcagaatatgagcatgcactgtcaaatgtgcataattctggacgcaaaattgccttatctgaaacgagttcataccaagagaaggaagatgagcttatgctggatgcactggcaaagaagcgtgatgacatctctacctctgagcttgaaaagaaaatccttgagctgagcaatgaaatcgagttgtacaagaaagatcgtgaggatattgagatgcaaatggagcaacttgcacttgattatgagattctaaagcaagagaaccatgacatatcttcgaggctggagcaaacacaactgagggagcagctaaggatgcaatatgagtgttcagctcatttggctattataagtgatcttgaggccaatgtggagagcttggataatgaactccagacacaggctaaaaagtttgaggccgacatagcagaaataatgagtgcaaaggtggaacaagagcaacgggccattaaggctgaggattctctgaggaagataagatggaataatgcaactaccgcagaacgacttcaggaggaattcaaggtgttgtcttcacaagtatcttctgctttcagtgcaaacgaacaacagcttgtgcaagcaagaaaagaggttgcggagctgcagctgcagaagagccagttagaagagttacttcagaaggcccaaggagatcttggatcagttcaggatcagcaccgggtgaaggtccagcagttaataaccctagtggatttcaagtcaaaggagatagacaggctactgatggagctcaaaagcaagagtgatgagttccataaccaaaaaagatgtgatgaggcaaagctgaatgctctgtcagaagaaatcgacctactcaattccaagatcgacaagctatccagtgagagaaatgagctattcgaaaagaatgagcagaaagaaaaggaattagctggaattagcgaaaaggacatgcaattgcaagacaaaactgctgagattacttcactaaataaagagcttgtattcctcaaggaccaagtgaagatgcatttggacgaactgcacagtttaaaacgtttgaagaacgagagggaggaaacaattggaaaactgcaaatagatattgggtcactgaaactccagtgcgacaacttgaaaacttcgctgtccaagaaagagtctgagaaagacagccttgcctctcaggttctgaagctgagaagatcccttgaaacccgggacagggcgaaggcaaatggtcaaatttcagatgtgaaggacaatcagcatgctaataacaagcgcaccaagcacaataccggctccactgggagcattgctgcactgccaggcaccaacagacagggcgaagacggtgactgcaatggtcctgacatgaggaacaccactgaccagtcagcgaaggagctggcctcaatgaaggagaggaacagggccatcgaggaggagctgaaggagctgcacgaacggtactcggagatcagcctgaggttcgcggaggtggaaggcgagcggcagcagctcgtgatgaccgttcggtcgctgaagaactccttgcgctacaaagattttagacgataccggtgggcgttgtacaggtgggcgagcgactggatgggctttttctctccgaagagagaggctccagaccagaggctcggggagaccaggccaggcgagacgggcaccccggagcaaaaactcgtggaagagcttcgctatgttcaagttcaattctacttgatcatagatattgtcatgctctattccgtgggtgactccgatgcaatattcggccggcgtaccctggtgctccggtacttgtacttgaagttgaagcagtggcagtggccctggcacccaagacaagagcgcaattgggagtacagaaagatttccccatacatgtcatcaaagaagaaagaattccgcatgaagcaggccgcgcacaggcacagcccaccggagaaacggtctagtgaagtcaaacaggctgtgcacaggcacacacagcccagaggccacatcagaaattggtcaagcgaagtgaatggaatagatcaatag

SEQ ID NO: 18258 - DNA, 318 bp, Zea mays
  Peptide Sequence Number=SeqID_61633
atgaagcggctcgctggcactccaaacccccgctcatggaaggagataaagctgaccacgtaccccggcggcggagtcgagtcggcctcgctcggggccatccactccggctacggcccaccggagaggggacggagcaaaccatcggcaacaagggcctccagatcctccatgacgacggtggaggaaggccacgggtcgcgcggcagaacgactgtcaccttgtcagccatcgccgaacgaagggatcgggaaagaggatatttcgaaaaaggatccttctcagcgaaggaagcgggccccgagtcctcctactga

SEQ ID NO: 18259 - DNA, 339 bp, Zea mays
  Peptide Sequence Number=SeqID_61634
atgccctcgcggcacccacgcttatataagtcacccggtccctcggacatccttcctcgtagccccctaactctcgcttgcactgggccaccggagaaccgcttgaaaacagagagctccgccgcccgccagagacgaccgaactcgaccaccatggacgggctgctccggtccatccctgcccaagccagctactcatccagcctcccagagtctggtgagacttcccaagccctcaaaccaagtgataccccgctggagacacctgatcgccctcaccagacttcctttgcccgccgaagtaaatggcccagcaaacttagaaaaggcataacttga

SEQ ID NO: 18260 - DNA, 294 bp, Zea mays
  Peptide Sequence Number=SeqID_61635
atgacggcgcaccagggcatgtatggcagggacgcgcacgagcttaggcggttgggggtgtgggcatggcgagcgctgagtgccatggtagaggagctcgccaatggcccaggggatgccgcggtagcggatttatacccaggggcgaggacgagctcggtcaggccacgcgatgggtgcgggagatcctccgcggattccacggcgttagccgaagagggaggagctaaccttgtggccccactggcactgacggcgtacatcggtgaaaggctggcccagggaccccactag

SEQ ID NO: 18261 - DNA, 201 bp, Zea mays
  Peptide Sequence Number=SeqID_61636
atggagatgcgcgagatgggtagtggcgatccaatcacggcacgatcacggaggtcggttgcgcaggtggcgcggcagcggactctgcgcgggcggtttgccaggcagctcagattcgttgcgaagttcacggcgtgggagatgaacctgacaagtggggccgcgataccagatcccccgctcggacagatgggagactga

SEQ ID NO: 18262 - DNA, 327 bp, Zea mays
  Peptide Sequence Number=SeqID_61637
atgaggatcaagaacagtgaaggacctgagcataagtcggacaacgtcgtggtccgtccatctagtgcttccacatttgtctttagaaggaaaaagggtccaaagcccgggcgcgaacataatcaccaggaatcccttgcaggaccgccatcacagcaaaatcctcccgagggcctccccaggaatcccttgcaggaccgccatcacagcaaaatcctcccgagggccttcccaggaatcccttgcaggaccgccatcacagcaaaatcctcccgagggcctccctacactgaccactcccctactgcccttgcccctttcgggtaa

SEQ ID NO: 18263 - DNA, 396 bp, Zea mays
  Peptide Sequence Number=SeqID_61638
atgggcaagaacaacaaacgcaagcgcgagccgactcctccatcagaggactttgccgactcggaatactcagaggaggagctctcctatgagtccgaggggtctccagctcccgtctctcccccagcgtcgtccgatgactcggacgactctcaggggattgccgcggaggtctggacttacatctgggccgtcgagcgctccgggctcgagggctcggatgagtcggagtactcctcggacgaggaggactcgcccgaggaggacggcgaaggtgacgacgacgacaacgacgacgacggaggcgacgacagcgacgacagcgacgacggtgacggcggcagcaggagcggcaacgacggcagcagcaagggcagcaacaaggccagtggctaa

SEQ ID NO: 18264 - DNA, 237 bp, Zea mays
  Peptide Sequence Number=SeqID_61639
atggatgagtacaaccgggctgacaatgacttaaagaagggaggaggcatacagacttatgagaatgtcgaagctacaaagaaatattccttcaggaatgcagagccaaaaatcgcagtgaaagtttcactaaagacacaaaaagtcgttcttaaagagcgcagcggaatgcagagccaaataccgccaaaatataaggcgaagcgcgaaaagtcaacgcgaataccgccgaaatag

SEQ ID NO: 18265 - DNA, 549 bp, Zea mays
  Peptide Sequence Number=SeqID_61640
atggagcaaggtgggccaccatggcccacttggaggtggcgctcaccccctaagggcggcggctgctgtggcacttcttgtgccacctcacctatccgtgggacaggacaagaaacacacccccaagccttctccaccattgattccaagtcggtgcaagatcaaaggccaaaaatcagcatcacatggattgctgactcatcacggcatatgtcggtgctcaaatggaccaaatggtgtcgtacccacactccgctacaacccaaacagccccacaccaaaggaggagggcccactcatcagagtgggggcggccgccaccctacccactgcgcccgccggcccactttagccgaaccgcctcggacaagaattatctacatgagcataagaaatatcaacagaaagcaggccctaaaagataccaaacctatagttgactcgaaagcaatgtctttggaaaatgaaagcgcactacagacggtgcacgtaagaagaggtggaagaaaatgtcaatcctatgggagctatcttactggaaagacttag

SEQ ID NO: 18266 - DNA, 48 bp, Zea mays
  Peptide Sequence Number=SeqID_61641
atggggaagcaggccgcggctttgggcttccagatattacatccttga

SEQ ID NO: 18267 - DNA, 540 bp, Zea mays
  Peptide Sequence Number=SeqID_61642
atgaagggagagggtgagcgcagggagccgagaagggagttcaggttcttcaacgacgaagcacgcaggggcgggccacggtgcttccccataccgcgcgggagtcgtccgcgtccgcgacttcaccgagccggagactggagcatcgctgtcggatcgaagggcaccgtcacgccgagaccttccgtaggcaaccgtatttatgccgacgagcaagtgaccgaggaacccgaagtagcccaagttggagattctgagcaggagctcgcagaaggcaagggcaagcggggtggagaagctgctggtatagggaggttctcgggtcgatctgtctgtgatagctttttggacgagggattcctatatcgtcttcggcccagaaaccgtagcgggttctctcatgctagtggaactttggaaaggcctcgtagtgctaccctgcctcgcctcctcggtagaggtgtatggggtccgtacaaccccgtggcagatgggtatcacgacttgtgggtaaagatgtgcaacctctgcagagtgtaa

SEQ ID NO: 18268 - DNA, 540 bp, Zea mays
  Peptide Sequence Number=SeqID_61643
atgaagttcgacgcggtgcccatggggcgagttggtaggagatccggctgttgtgtgctcggcagccgcaggggaaggcgcgagtaccccaaccatggaggtcggtttgtccatgacagcccgctcccaatgacgcgcaatcttgcccacctccaagcgcagatcatccacgacaccttccatccccacacgccattcgtcgaacgcaccggaggctttctcgagcgccccgacacgatcgctctggtttttggcaaaatcagagaacaccgcctcccagcaagattcttgctccgacgcgcgctgatcccatttggcatcatgatcagcgaatcggcgagcgatctcgtccaagatgatctgagtatatggattcatgagaacttgctgacggcgaaaacgagtgaaatgggaatgaacaccagaaggatccagcgcgagaacgcgaggatcggccaaggatcgttgaatctgataccactgttagcaactcggtatggatacaaggtagcagtagaagagaacagcaataaagagtag

SEQ ID NO: 18269 - DNA, 1182 bp, Zea mays
  Peptide Sequence Number=SeqID_61644
atggtgtgctctgctgtcgttagcgaaacagtgagtaagatcgtctcaagcctcctcgctaaggatgatggcaagtccagtgcagcagaaaacatagaaaggctggagatggcacacatcaagatggagtccgcgctgcacatggctgaaaaatggcaggtcactgatgtgccgctgctaaggtggcggagcaagctgaagcgcgccgcagaggagtgtgacggcgctctgcggaggtgcaagcagcgcgccctggaagaggaagagatccggcagtcctcgtttcccaaacggattgctcatgctaccaagtcatttatctcgtctttccccgccgccggcgctagcagagatgagacaagctcaggcagtagcgatgtccggagattcgagaggtttgcagacagttcacatgaattcctcaagttcgtcgaggtcggtggaaccccctggaagtacacgttcttcaaccctctcatcggccatcttcttgcagggaaatctatgaagtaccacgcagttcacatgaattcctcaaggggtttatatcttggcttcatgctgcggctctctgaaagcactgacatactcggcgtcatcatcaggtgcttgcagtcagtcacgccgcggttgaagcctaccgcagaatgtgtcaagagagagctcattcagctgcctacgcaagatttctcctggttgccgtatggtctccataccaaaaatgagtactggaacaacgtccactgcagtttgactcagtggtatcgtccaaaccctctttgttgcaacgagcacaagaacaacaacaacttgatcacctcctctgttattggtagcacatttccggaggaggttattgtggattcagattttccgccagtgaaagtaggagttttgatcatacctcacgactctccagaggacatggagcctggagctgagacctatgctctagaggtgattgctgaaaaggagaagggaatggtgcacgatttcttcaaggatgctgggctggcgggttcagcaccagcgccagccagccaccagatgctgggcgccaccattttagtgctgctggaggtgcagcaagctgtgagggcagacaggagcggcagcacaagcgagccgaccaccaggccgggtgcgcaggcaggggcatctggaaaggccgcgtctggctaa

SEQ ID NO: 18270 - DNA, 387 bp, Zea mays
  Peptide Sequence Number=SeqID_61645
atggagattcctcgccgcaccgagcgccgtgaaaaccctgtgctcaccatgccgatttcccctgcggcagctttctcgacgtccatttccctgcacgctgtgtcctgctcgatttgccatgccacatcgccaacccctttgctcctcgccattgcgccgtcgttgcctactatgtcaggacacctcccctcgtgctcagacgctcatcagggaacccgtcgtcgacaactttggttctacgtcgccggatccgtgcttcagacagcaggtacgttaattaatcgcgcgatgcggaagacaagccaagtcgaccccaagcgcgggctactccgcatggtgaagctgatggacaaacctgaagatggtcgtcaagtggacgtcatctaa

SEQ ID NO: 18271 - DNA, 606 bp, Zea mays
  Peptide Sequence Number=SeqID_61646
atggcgaacgctgctcgttgcagagaggaacgagagggagaagacaaccaggaaggagagtacaagtgctactatttattacaaccagctattaagcgccgacccacccttcaacggatccactcggcaccggaccatttgctattgggcttccttgttcgccggcccatcacttcatcagttcctgctctcctgtcgtcccccaactccaggtcgcctacaggaatactgacatttctgatggcgaacgctgctcgttgcagagaggaacgagagggagaagacaaccaggaaggagaggtcgcctacaggaatactgacatcctggtccaagctgccgccgcgaaggagcagagccgggcgagcagaaatccggcgccgagcataggaggaacgactgggctgggcgaaacttggaggacggccgagctaggcgagcttcagggagaagaaggaagtctgggcgctagggaatcgagtgccccagcatctgcccgaaacagccgagcaatctgccgcacgagcacgcatagcgcgcatataaagcgaacaggggcggcggcaaaaatatcacgcagtgaggtacggcggctaaggagaggatga

SEQ ID NO: 18272 - DNA, 285 bp, Zea mays
  Peptide Sequence Number=SeqID_61647
atgactaagacatcccctgtgagtgattgtggaacgagaaaggtggatggagtgagtggcccaccattgagggtggcaaccgttcttagaggaggcaagcccttgccatgtaaggaccaagatgggttaacagcgctttgggaatttccgtgcataacatacgccttgtgggtaccggcccaaaaggtggtctcccgtttaggagaggacgagccggagtacgacttcgccaacgacgggtggaagatggctagctgggaggacttcaccatagagcgcacctga

SEQ ID NO: 18273 - DNA, 129 bp, Zea mays
  Peptide Sequence Number=SeqID_61648
atggtgattaaatgggcaggcgacatacccacggcgatgatcggagggaagctgtccacgagtgtgctgatccgcgtcggtgtaaatcttccgttgaggatttctgagtctacggtgaacgatcctcag

SEQ ID NO: 18274 - DNA, 516 bp, Zea mays
  Peptide Sequence Number=SeqID_61649
atggtgattaaatgggcaggcgacatacccacggcgatgatcggagggaagctgtccacggaggtgtgcggatccgcggcggtgttagatctccgccaaagggagcccctgggttccccaatccgagccgggtcgtcggcgagcccggatttgcccgcggcggtatctctcggcgaacgcgattatggtggtggcggcggcggcggtcttcttttgcttgagctcacgggtggatggagggaaggggtcgcggagcttcggcttttatgcaccacggtgaagtccgagcggagtgaaccaaacggcgatcacggcggcgtccgcgcggcgaggatcacgcagcgttctgttgaagacggcactgacgactgggtccaaccggtcagtggcggaggaacggggcgcgattctgggtccacgcgccagcgatcgatcgcggcagcgagcgcacgagaggccgttcggcgggccccgtgcggcagtgagggagcgaggcgtgagcgcgaaggaggctga

SEQ ID NO: 18275 - DNA, 252 bp, Zea mays
  Peptide Sequence Number=SeqID_61650
atggcgcaccggacagtccggcacaccgacatcgtcggccctgccacgtcatcagtgccgttggaatctgaccgttggagttctgacttgtgggccacccttgatgtccggtggcgcaccgaagctcctgttcattgtccggtagccgttgcgcgggatagccgttgcgctggagtcacaccggacagtccggtgcacaccgacatgtccggtgattatagcggacgagccgttggcttttcccgaagctga

SEQ ID NO: 18276 - DNA, 588 bp, Zea mays
  Peptide Sequence Number=SeqID_61651
cgcgccggctccgaggctttcccgaggctgaggagtttattgggaagtctcctggtgcaccggacactgtccggtggcacaccggacagtccggccgatctcggacatacgcccatgccgtctcccaaccctcggctctctacgaagtcagggccgcagggatcacgctacttcaccgtctatggcgtcgtaggcttggactccaaggcagctagccttgccacctcgacgacagtgccgccggccacgcctctacagcgctcaacctcgactcgtctcagcatcgctggccatgcttctacaggactcggacacatctccgttgtccatgttagcgcgatagctatagttcatgtacacctgggccttctccttacacctataaaaggaggagcccagggcccgaacgaaaggcaacacaggcaagtcaacacagaagatgtaacgctgaaacacttctttcacgcatacgcagtcacagtgcaaccttcccaccactacacttcatcacactcaagagacctgggatccgctccctctcttgaacaggcttgtaacccctgctacgagcaccccggtgcgagataa

SEQ ID NO: 18277 - DNA, 1116 bp, Zea mays
  Peptide Sequence Number=SeqID_61652
atgagacagagtcagaggacagggagcccggggtgtccttggcagcggagccccccggaggcggcccccgacgatccgttggaggcagacgtcgagggggcaatggaaggagccccggtgggtggtcctagggaagcggcccccggggttgcccttaaggtgggcactgactccagcacttgggacacggccacccaggcgctatgggttcctacaacgccggaggacaacgccgcctgggccaacaccgagcccccagccctagagctcccccagctaaggcaccgattttctgaggcccggcgagatctatgggacttggaggaccacgtggcctcagagtggggaagcccgagggtcggggctggagagctcgcagctgccaccgcttcgacggagacggcgatggtggagcgggatgccgcagtgaaggcggctgcagcagtggaggagcagcgggacaggatcgcaacgcggttcctaaccatcagggaagacgtggacttggcgctgggccattaccagaaggccaccgaagagtgcaggaccacgcgggccttgcttgaagaggcccagcgggaacaggacttaatgtgggctgcggtgacgtccgagcgggacgccgctcgggaagaggcccgaaaggccacggaagagaaggacgccatgaaggaggccaaggcgagcctcgagtgcttgcaagggcagctggtggagcgcgaggccaccattggccctcgggaagaagccgcaataaaggtgatcgaggagcgggatgctctcttggaggttgcctccaaggtgaactcggttgaggccgagctagcgcaggctcggtctcttcacgaggatcacttgaagatgtgctccacgatgagcctgctggggtggtggtcatactgggaggtccgcgaggcgatcaaggccctaggacttgacccgcccatgcaccccaatgcatccgggaacatgctcagtgggttacggcaggccatcgtggggcttgcccccaccatagccggcgcaaaggccctactaacggaggtcatggagaccgaaggaaaggaggtcgaccttcaatgcgcgcttgatgcgctcgtgttggtgaagagctga

SEQ ID NO: 18278 - DNA, 606 bp, Zea mays
  Peptide Sequence Number=SeqID_61653
atggtcggttttggcaggggagaagtcggtgccgcaatctttagtcgatccgaggtaggctcggacgaaacagagatatgggctgaggccgaggctaggctcgggcgaggtggagagtcctcccgaggccggagccgaggctgttacgaagacttccctgaggccgagatagactcgggcaaggcggaaatcctctcgaggccggagccaagctcgggcgaggcggcaaccactgttgttagtcttcgccacagtcaccggagtggggtaaacagtgccgtttatcttgtcagaacgcatggtctttgtaaatacttcggccgcggcctaggtatgagggcagcccccgagccctcgtgggctctgtttgttggtgataccaacaatttggccgcagcctggtgcaagggcagcccccgagcctttgcacggagcaagaggtcggtcagggacttcctcgacttttttgtgatacgccccttcgtcgcctttccgcaaggaggaaggggggagagcgccatactaccctcggagggcaacgagtacgacgtctccggtgagctgttaacgggtgatccgagtgggagcccgagcccgattcgataa

SEQ ID NO: 18279 - DNA, 192 bp, Zea mays
  Peptide Sequence Number=SeqID_61654
gtgccaaaggttcacagcaagccaataaaaagaacaaagttgggttcaaaattgagagctaaaggcatcccgagaggctatctggtctggcgcaccggactgtccggtgtgccaccggacagtgtccggtgcaccaggagacttcccaataaactcctcagcctcgggaaagcctcggagccggcgcgctaa

SEQ ID NO: 18280 - DNA, 357 bp, Zea mays
  Peptide Sequence Number=SeqID_61655
atggataagcaagagcaccatgaatcctcccaagatcccccgccggagttgtttgagcccctcaccatgaagaagattccagcaccatcccttgaagtcaaggaagaagctacaagcaccccgctagcaccgccgccctctgaggagctacaggagccagtagagatggcaatgggtacccgaaacccgaaacccgatgggtttttaccccattatggtacgggtttgggtcaattttcgtacccatgggagccagtcccgcttgaagaagagttcgaccctgtcctgccatctcagttgctgccagaagaagtcatcaacatcagctccctcttgacccatccaggagatatctaa

SEQ ID NO: 18281 - DNA, 2589 bp, Zea mays
  Peptide Sequence Number=SeqID_61656
atgtcgtcttcttcctcatctgctgcaaatgcgccgccggccaattcatcgtccgaagataccttcagcgatgtggcggcggtggagttacagccgggccatatggtggagtttggcgtttcgaggatttcctcggttcacgtgcaggaaatgcagcagttggggtattttgggaacgatgttgggcgcgtcccgggggcggaagagattcctgagcctgagggcgagttagtcgtgtttgaggcgttcttcatcgccggccttcgcctacctgtgcattgtttcgtggcagaggtcctgcagaggtttgaggtccagtcagccttccgtagaggtcttcgccaagaattattgtctgcactggcaaaagagaaaggttggaacgaagtcaaagacctcccagggctccccgcggccgtaatgtgctcccactgttatgtggcattcccatcatttgaggtggaggaggatgatgaggacgaaggggccctccggtgcgctgcccgcatgagcagcgggcgtgatttggttgaggaattcattggctatggagtgtggcccctggtgcacggctgggtgcttgacaaagtatgccctcgccagatgcctactttgagccagcagctggtgcgaagtccgaccttcgcgttggatctgcgtggtcgagacccaactgcgttcgttcatgaagtggaggatggggctgtgaggattgtagggcggtatgcaccgaggacggtgagtctgccgagttgggatattcgtggatccaatgttcgtttgaatcgggtcttcgatctaaaccgtttgccatacggtggttatcctggagacgacgctgctacggctgttgaccgccgcgggaaaaaaccagtggccgtggctgaggaaggcccttcgcgggaggctgctccggccattaagaagagaaaaataggtactgcatttggggggttgggggtctctgatcgttttgctgtggagttgatggggacttatgcggccctcaggggaaggatgtcttcgcccgagctccaggagtcttcggcgcgaatgctgaaggagcgaaggccgccatcaccggtgcacaccgacgaagcggcggcgggtggtgccgacttcgacacggacatctacgtggatgattacctcgttgctccgatggcgaccacttcgcctacaacggcggttggagcgaagggtactttgcaggacccatggtccaaattctgcgccagcggcgagatttcatcggccgccgccgctaaagacgtggcgggctctatgtcccagcagctgaggcatgcgtcgcagcagctgaagcatgcggccgccttcgccgaccatgttgcgttgggcgccctgacttcggagttcgctgccgagaggcaacaactcgagggcaggatcaagcgcctccgggcgcagcatatggatgctgttcgggacaagtcagctgtggaaaacaagagccgcaggctgacggagaggttggcggctgcggaggccgagaaggaggatctcaggcgtcagttggagttgaagaggaaggatgcaaacagagcctatgctgaggcgcaggctgtacaagccgaggccaaacttgcgcgggcagaggccagtctcgcctgccaatgcgccgaagagatggagacaaggctctgcgtcctacgcgatcgcctggacaaaatggaggcctcgacacgcgcggaggtcgagcagacgcatacgcagcttgtggacacgtaccgggagctaggtgcgtggaccgctcccttcgaagtgtccgatcaggatgtgggcctccgcttccttgggtggctacaagaggagctggaggtgctcccgacaattgtgacgggcctcatgtccttcgcctccctcgtcacctgcgagggggccgtcgaggacccaatgctgaagcggtcggctggggcgcttttcgataggatgtggggccctcacggccgagagattgtccgggagaggtccgaccgggcgatggatcagatggcgcatgatgaagaggtcgaggacctcggtgatctggacagcgccctgctcgaagcatcgggggtggagctggcgccgccatccgatgctgtcaagggccccttggcgactcccgcgccgactggggctggcgaagaccccgtgccggctactgtgccgacggaagcaaccgaggctggtaatgctaattttgtggcgacctcgaccgttgtgcctgccgatgataatttatctggctctagatttgagtgttttgagtctgatgcggagtcttcgccccgtgtggaggttggcgagacggctgatcttcctagtgcgagtacttgcaggcggcgaagggtggtgtcgaaacgcagtgtgggtgagatttcgcgaagtggtaggcgctgtcgtatggggatggagcgtggccgtcttcgagtagaccggattggtaaacgagaattgttgtcctcgccgattggggcgagcataggtgagggggatctgcgaaatctttttgagggtgaggaattaaagataatgttgttcaattatagggagatgggtatcatcccgaaggttgagccgatgtag

SEQ ID NO: 18282 - DNA, 327 bp, Zea mays
  Peptide Sequence Number=SeqID_61657
atggcgccccgcacgctccctgacgatggcggctctcggcccccttacggaagcaagaggacgtcagcaaggactcgacggccccgacagctgtccctccgccagctctcggcccccttacggaagcaagaggacgtcagcaaggactcgacggccccgacagctgtccctccgccaggctccagcgctcctccgacggatccaacgaccaaggctgtctccccatcctcgacggtaagaccggtggcgcccgtgcccctcacggtgacagatcgccgaagatacacgcccctgctcctactgtgctctaaaacaaaccctgactag

SEQ ID NO: 18283 - DNA, 1167 bp, Zea mays
  Peptide Sequence Number=SeqID_61658
atggccgtctccctcctggccctgttctgctgggctctcgtcaattccaggatcaacgtcgccatgccttactctgctttcgtgatgcgcgatgtcgacaagacgcccgcattcacaggcctagaagacaggcagaggcaccccgccggcgacccagcgtggacctcggcggcgccgcaggccgtgccggtgaccagtaacgtcacggcgggctcggtgaaattgggtgatccggtgctccgggagccgctggcaggagaagcggaacgggaacggagcgagaggtgcgacgcggacagcgcggcgctcagggtgtatatgtacgacctgccggcggagttccatttcggcatgctcgggtgggaacggaaggggaagctggcgtggcccgacgtccgcgacgcccacgccgcgccgcactaccccggcggggttcaacctgcagcacagcgtggcgtactggctcacgctgggacatcctgtcctccgccctgccgcccggcagcgacgtggtactcgccggacgttgccaacctcaagaaggacgtcatcgcaccgtacaagcacgtcctccgctccttaggcgatggcgactcgccatcgttcgagcaacgtcccatcctcgcatacttccaaggggccatccatcggaaagctggcgggaaggttcgccagaagctgtaccatctgctcaaggacgagcgcgacgtgcacttcacctacggcagcgtccggcagaacggcatccggcgcgccaccgccgggatgtccacgtcgaagttctgcctcaacatcgccggcgacacgccgtcctcgaaccggctcttcgacgccatcgtcagccactgtgtcccggtcatcatcagcgacgacatcgagttgccatttgaggacatgctcgactactcggagttctgcgtgttcgtgcgctccgccgacgccgccaagaagggattcctactacggctgctacggggcatatcgcgcgaggagtggaccaagatgtggatgagattgaagaaggtgactcaccatttcgagtaccagtacccttcacggtcaggtgatgctgtccagatgacatggagcgcagtggcgcggaagatgcattcggtgcagctgcagcttcacaagcgcgctagattccacaggacggtttctgtatga

SEQ ID NO: 18284 - DNA, 462 bp, Zea mays
  Peptide Sequence Number=SeqID_61659
atggcggccggagagattttggcgccctctttgtgtgatgtcgtggccgtcggaggagcgctggagcctggcggagggacagctgtcagggccgtcgagtccttgctgacgttctcttgcttccgttggggcgatgtggaggctcctccgaggtcgaggtcgagtccgtcttccgtggccgaggtcgagtccgagcccctaggtcaggcgaggcggaggccgttggctaaggccagggcggaatttgagtcctggggtcgggcgaagcagagttcgtcgtcttctggggctgagcccaagtccgagccctgggtcgggcagagcggagttcgccgtcttccggggcttagcccgagtccgagacctgggtcgggcggagcagagttcgccgtctttcggggcttagcccgagtccgagccctgggtcgggcggagcggagttcgccgtcttccggagcttag

SEQ ID NO: 18285 - DNA, 480 bp, Zea mays
  Peptide Sequence Number=SeqID_61660
atgcaggcggcatgcaaccgcgccaagtgggcgcacttctccgactcccaacgcgcccagcatggaggcccgggcccacgcgtcatgcgaccggcgcgccgaatgcttcgtgcgggcaggagcagcggtcacgtcgacagccaagcttacgtcccatccgggggcagcgagagaaccctctcccacgacggaccgggaaagggggataccccgaaaagaacccttccccatgaaggaaccaggctccgagcctccctactgatcagaggttcgaaggctggcccctcggaagggttcaacagccgcctcagagcacgtgggctccacacccactactggtcagaggttcaaaggccggcccctcggaagggttcaacggccgcctcaggctactcgggctccgcgcccactactgatcaggggttcgaaggctggcccccgaagggttcacagccgcctcagacacagagcgagggatga

SEQ ID NO: 18286 - DNA, 951 bp, Zea mays
  Peptide Sequence Number=SeqID_61661
atgcccgttcctcgaacggctcgcgcacgcgcaacggctaccccgcgaaccactcgtcccgtcgcattaactctgcggcaggacaggcggcgcctttggcaagcgaagcaggtgacgcttcgcttccgccataatgaccgcgtcaaaaaagggaccgggaaaggggatactccgaaagggatccttctccgtgaaggaagcgggccccgagcccccctactgatcagaggttcgaaggctggcccctcggaagggttcaacagccgcctcagagcactcgggctccgcgcccactactggctggcccccgaagggttcgacagccgcctcagacgcagagcgagggatgaccctgggtacgttcgatacataaccaaggctcgggctgcgctcccgagaggcttgggggctgctctcgcaaacctggctccggccaaaccgttgacaacgtcaacataccagcccgagaacttgggactcgactgtgcacccgggctacggccacctcgggcaagagcagccgaccccggaggattcacgtctcgcctgagggtcccctcaagcaatggacacaccttcggctcgcccgaggcccagtcttcgccgagaagcaaccttggctggatcgccacaccgaccgaccgtatcgcaggagcatttaatgcaaggatgccaagtccggcctcgggcgccataggaagctccgcctcgcccgaccccagggctcggcctcggccccggaagacgacaaactctgcctcgcccgaccccagggctcgaactcagccctggcctcagacgatggtctccgcctcgcccgacccggggctcggactcgacctcgacctcggaagacagactcgacctcgacctcggaggagcctccgcctcgcccgacccagggctcggaccgaccacgtcacaggggggccatcattatcctacccctag

SEQ ID NO: 18287 - DNA, 1605 bp, Zea mays
  Peptide Sequence Number=SeqID_61662
atggctgctgttttaaaaacaagtggcagtttttgtagtacacaacagcagcattttcagcaatcaagaagggatcagtttttgcatggttcttattcaaatttcaaacattgcaaaagcaagaagataataaagcctgctccactgtgtgctagagtgacttcctcgaaagtggaactagatgttaaggatccatattggaagcagaagtttcaggaagactgggaaagccggtttgatttgccaagtattactgatatatatgatctgaaaccaaggccaactacattctcactcaagaaaaacagcaccatctgctgttgccctagcagaactcttacaggtgatgaaaatgtggatatgtggaatggttatgttaacaatgatgatcgggcacttttgaaggtgataaagtattcatcgcctacttctgctggagcagagtgtgttgatcttgactgtagctgggtggagcaatgggtgcatcgagcaggaccacgcaaggagatatactatgagccagaggaagtaaaagctgctatagttacctgtggaggtctatgtcctggtttgaatgatgtcatcagacagatagtattcaccctagagacctatggtgttaagaatattgttggaattccatttggttatcgtggatttttcgaaaagggcctcaaagaaatgccgctttcacgtggtctagtggagaatataaatcttaatggtggaagttttcttggtgtttctcgcggtggagctaaaactagtgagattgttgatagtatacaggccagaaggattgacatgctttttgtacttggtggaaatggtacccatgcaggagcaaatgctatccatgaagagtgccgtaagagaaagctgaaggtttcagttgtagcagttccaaaaacaatcgacaatgatatacttttgatggataaaacatttggttttgatacagctgttgaagaagcccaacgagccattaattccgcatatatagaggcacgtagtgcttaccatggtattggcttggtcaaattaatgggaagaagcagcgggtttattgcaatgcacgcttccctttcaagtgggcaggtcgatgtctgcttaatacctgaggtcccgttcactctagatggagaatttggtgttttgcggcaacttgagcatttgctaaagagtaagggattttgtgtggtttgtgttgcagaagctgctggacaagatctactccaagaatcaggtgcgactgatgcatcaggaaatgtgatattgagtgacattggtgttcacatgcaacagaagattaagatgcatttcaaggacattggtgttccagctgacgtgaaatacatcgatccaacttacatggttcgtgcatgccgtgccaacgcatctgatgcaattttgtgtaccgtgctcggacaaaatgctgtccatggggcatttgctggtttcagcggcatcacttcttgcatctgcaacacgcactacgtgtaccttcccatcacggaggtcatcacagcaccgaagcgcgtgaacccgaacagcaggatgtggcatcggtgtctcacgtccactggtcagcctgacttccactga

SEQ ID NO: 18288 - DNA, 267 bp, Zea mays
  Peptide Sequence Number=SeqID_61663
atgcagccgaaggctgcctccgtcgacccgaggcttcgtcatgtccctatcgccattcaagcgccccaaagtcctctctcaagggccgtcaatgggggccgggacatagtgctcgctctgctaagggagggtgccgagggtttgatcgacctgagggaaaatggatcacgactcgtgggtaaagtgtgcaacctctacagagtgttagaaactggtatatcagtcatgctcatggttaagagcggccttgggatcctctttgattag

SEQ ID NO: 18289 - DNA, 423 bp, Zea mays
  Peptide Sequence Number=SeqID_61664
atgggcaagagcaagaaaggtggtggctcttcgcatcactcgggcgacaagcgcgagccgactcctccctcggaggacttcggcgactcggagtactcggaggaggagttctcctccgagtccgagggctctccggctcctgcctctcccccggcgtcgtctgatgattcagacgactcccatgggatcgccgcggaggtatggacttacatccgggccgtggagcgcgccgggctcgagggctcggatgagtcggagtactcctcggacgaggagaattcctccgactcgtccgaggagggcggcggcggcgacggcggtgacggcggcggcgacagcggcaagggcggtgacggcagcggcaagggtggcagcggcgacggcagcagcggcagtaagggcagcaacaaggccagtggctag

SEQ ID NO: 18290 - DNA, 1380 bp, Zea mays
  Peptide Sequence Number=SeqID_61665
atgggggatcacgctgagatgctgcatgccactccggccatgtacaacggcgccggcgctgcccctcgtggtggctggtggagtacggcggtgcccgcgaccacgtgctcgacggagctggccggcggcttcaccacgtggtcgtccgccctggctgctagctacgacctggcggcggagggggcaaaggccaacaagagcgccaccaccgcctcgtcggagtcgcccgggaacaacagctccgtgaccttccaagaaccggccggcggcgtcggaaccgccgtggtgcagcagcctcttgctggctgcgctgactggaggcatccctatttgagcagcggcgctgctactttgcatgggtttctgcaagatggtcaccagcaggacatgagctcatcgacaactgagcagagccccatggccgcatcaagcctcatgaacccttcatccaataacctagccctggccctgcaacaaggtcaccatcaccaagagccggaccaccagcagatgctgtccaacttcggcggctccgaggccgagctgctcctgtcgccgacgacctcaccctacgggttccagtcgtctctgctgagaagcctcatggagccgacagcggacgcggcgaagccggctttgccggggtaccagcagcagtatgaccagtaccagcagatgggcatgggccaggcgaggtcgtttgcaccggccggcggagctgccagcagggaggcactccagttcaccaacgacgcgccgtcctggaacccttccgctgcggctgggttcggcgtgccgccggcgccggcgccggcgccggcgccggctgaccaagctagcagcagcgtacgttctgtgaaaccatcgccggcggcgcgtgctactgcaacccttgcattaaagactgcgttggaaggagtaggagagtctgctagctccatcatcaccaagaagaaggcaaacggagagctggtgccggccttcaagaaatcgaggctccagacgccgtcgccgttgccaacgttcaaggttaggaaggagaagctaggggacagggtcactgcactccaacaactcgtcgccccttttggaaagacggatacagcatcggtgctccatgagaccgtcgagtacatcaagttcctccacgaccaggtcggggtccttagtgctccatacttgaagaacaacggccatcaagtgccctacctgaagagatcaagtcctgacaggtccgaggacgacaacagccatgccggcgagagatcactcaagggccgggggctgtgcctggtcccgatatcgagcacgttcgcggtagccagcgaggtgcccgtcgatttcgggtggagtactgcatttgctgccagctttaggtag

SEQ ID NO: 18291 - DNA, 323 bp, Zea mays
  Peptide Sequence Number=SeqID_61666
atggcgatgctccacggcacgggggctcgggacgtacgtttggcgaggcttggggtcctcacctggaccaagcctgtgccagcactggcgctagcccatcggtgggcagatttgagcgggggacagcacacaacggcatgggcgactcggcggggctccgacgaccccttggcgtggtggagctggccaacgcgcgggctgtggcgaggaagaccactaggtggtgtctacggaggagctctggcggtgcggtcgcagcgctgttgctgtctgctggtgctacacagtggtccgacggtgatggcgggctacccggctgtggc

SEQ ID NO: 18292 - DNA, 525 bp, Zea mays
  Peptide Sequence Number=SeqID_61667
atggagccccaagaagggtgggctgaacaagttccatggccagcatgcgctcagggagcgagcgaggaagctcgaccagggcatcctgattataagagtccagaccttgctgaacaaagaggaatgaagaacagagggggagagagagagcagagaacaaagagtgaagaacaggcaaaagcagcacaacatccataccttcagaagagctgctcatcttcggttggactgctcaccttctacggagacttttatcttaagaaatacgaagaacacaaggctgctgctgtaggcagggtactgttgaatgatgtatcaaatttaccgttaatatgtttattggatgagtacttttattggattaataaaagtggctggtttgagatgccttttaacatttggtgtggtggatgcaattccatgatagcgaagggagtaagatttaatgctgagaagaaacaagttggaaattattactctaccaaggtaaaccatattatccttgttataggcttcactgtatag

SEQ ID NO: 18293 - DNA, 336 bp, Zea mays
  Peptide Sequence Number=SeqID_61668
atggcacggtggtttatcccgtggttcggccaagaccaacgcttgcctactccacgttgtggcgtcccaacggacgagggttgcaatcaacccctctcaagcggtccaaagacccacttgaataccacagtgttttgcttgctttactctatcctgtttgcgaggaatctccacactttggagcctctcgcccttacacttgaagttcacaaagaagcacggagagaatcaggaggatcagctcctcatgaggatcaggatctggagctaaagaagcaggagctggagctttgccaaacagtccctaaatcaccaaaatacttagaaatgacctaa

SEQ ID NO: 18294 - DNA, 660 bp, Zea mays
  Peptide Sequence Number=SeqID_61669
atgaccttggagcctcatcccctgcaggcaggctggcgctccttggactccgagtcttttgggtaccgggcagaggacacgatcgaggcgatcgctctgcatgggttgactacctctgcggattccatcccttggagctggctacccacccccattggcttgttccccgctgagaaggaggacgacccaatgtggaaggatcgggtggagcacgccaaggacatctgggccatctacccaggacagactgcgcatttgacagtgatgcgcggtgaggcaatgtcccatctgatggcactgctggaggcaacaaagatcacgctggataacagagaggagctcgtggttggcctatctcaggaaatggtggaaaaggacttgcaggtggagcagctatccactgatattcaggagttggaggagctggtaggcaccagggagaacaccatcgaggttctcgaggatcagctcattaacactcagcagcagcttgctgaggctaacgagcacctggacatgcatcaccaagagatccaggaccaggaggccaacgaggacgtcgacattgagggaggagatgagcctgcctccagtgtggacaccgctggctcgggaagaccaccttcccccgagtcaagtgttgcttcgttcgctcactag

SEQ ID NO: 18295 - DNA, 321 bp, Zea mays
  Peptide Sequence Number=SeqID_61670
atggcgcatgaggtccatggcccagactatgatccgagcaccaagctgatcgaccccgatgtgctcatgagggtgagagcaaggagcacgagctcgagtccagccatacgacctcgacacgacagctcacagcatcgcatacaacaactcgaggcccaactagaagaagagaggagggaacgtcacgagatggaggcgaggattatggcggagcgggaggtggagcgggaggctcgcctgggccaatctggggcggcatccaacaaccctccggaagggttcagcccaacgcagcaccagtcgaaccgcccacctccatga

SEQ ID NO: 18296 - DNA, 114 bp, Zea mays
  Peptide Sequence Number=SeqID_61671
atggggacccttcctggtgggttctttgccgagtgtcccaggtggcactcgacaaagattgattctttgccgagtgatgccgggcagacactcggcaaaggtaagaagaactag

SEQ ID NO: 18297 - DNA, 306 bp, Zea mays
  Peptide Sequence Number=SeqID_61672
atgtgggcgctgcgcgggctctcccttcaaccctccagtgccccgagctccctccccagcagcctccgctcggcgtaccccatctctgctcctttctccatgccgccaagcgatttcctcgtggtcgtcatcaatcaaagcgtgcaagtggccggggagcatcgcgactacgcgtggttcgtgtcttgggtcactgctgtgcgcgggaggcctgggttgttgggcgatttctcgccgaggatgaagctccaccgcgactctgttcccttccgcgggccggcaacatcgcagcgccaccgctggtga

SEQ ID NO: 18298 - DNA, 327 bp, Zea mays
  Peptide Sequence Number=SeqID_61673
atgggccaggggaggaacttttggaaggttggatcaacacgagatcggatcaactctagcccatgcgatggacatcttagcatgtaccaccatgagatggtcaatacttggaagggtggtggaattgatctacctcccaatcaacacactcggaggatatttagacaaccccagcaacaaccagcagagatggatcctccaccaccgcctccaccagtcggagttgacccaactgttgcagctcaaatgaggatgatgcaacagatggtagataccatggcggatatgcactcgcagatgcagcaagaacaccaggagatgcgctag

SEQ ID NO: 18299 - DNA, 149 bp, Zea mays
  Peptide Sequence Number=SeqID_61674
gtggcaatgagactgatggttttggttacgtctatggtgttgggaagtggtattctttccgtttggaaaggcattgcaaccactgcacaggcgaagatgaagctgtggaaggagacttccaggagttccaggactacgatgagttctag

SEQ ID NO: 18300 - DNA, 1095 bp, Zea mays
  Peptide Sequence Number=SeqID_61675
atgggcaaaaggatccagcagcaccccgtgcgtgcggtggttaactcgtcccagatatcggcgcggcgcggcgcctccctcctggccctgccagcgagagcacggtccgatgaagcagcggccgttcctggaccagcgacggccgtcgttcaagcgccggtggcagcagcgggcgtgcatgctggaggaattccagaaaaagctggtgaaattgtctgcttggagaatggcatgagtattgcacaatggttcaaattctgcataggggtcggaggatctattgctaacaccaggtgtgattggccggaatgggcacatatgaaaagttctccagaagaacacatattgaaaagtcttgcatcaagaaacagtggaacaggaaaaatggggttgttaagtagatatggaaaaatcactggacatatgaacaaatcgacttattccagtgatctgtccattgagggtggagggcacactaatgttaacaaaccgacttattccaaagttacagcaagttattactactcatggcaatgcacgggcacatatgaggcaggcgtagaggcaggaggtgggggacggggacacggtggcgcaggggcgagcagcgcgggagctcgcgcgggtcccgccagatctcggggcgggcgagtggggacacgcgtaggcagcgacggaggaagcgcagcgggcgcgaggataggcggtgcgtggcgaggtgcggggcagggcgttggtacggatgtggtggacatcggggaggcgacagaccgaggtgtgctgtggtggggacaacggtggcgggtgacagggtggccgggtcggggtggggggtgcgaccggtggagtgtggcagtaggtggtgcgggggaggtggaggtggtgctctggtactctggtccgatggcgggtagcggtgcagtcgcggtgatggtactcctctacctcgaccagtcggagatctgccaggtggcctcgcctcaacagcgccttccgtggcgcagcctcggctgtgacggaacctcccaagtcattaggcccacctacagttgtccttgtccaacggacctcagacaaccctgcaggtgttcctga

SEQ ID NO: 18301 - DNA, 384 bp, Zea mays
  Peptide Sequence Number=SeqID_61676
atgttgcaccaactgaagaaccagctgaaaataacagagacaacatctaaaaatacagctgaagggtcaataaaaaatgcaaaagaagggacacccaaaagggtagttgaggaactaattgaagaggtagatgaaagtatttccgtctcatcaactgtgctaaaggaggaggaaaacacctcacttgttgaaggaagcagtagagacccggaggaagatcatttggagtctgcagctactaatcttcagcctggcagtgacacttgcattgatttccctccatcagctaccaagcctatagatcagtcggttgctgccttcctcgttgagcaaccaaatttgtaccctagacaagttaccattgccgctcctccagctctgtga

SEQ ID NO: 18302 - DNA, 471 bp, Zea mays
  Peptide Sequence Number=SeqID_61677
atggccagcccctctcccgtcctcctccgtgcgatccaagccctcagagagcttcctgggacccgcgtcaccggaatagcccaatcgtgctcaccggagttcaagaacccgccggcgcacgtggaccgggagccgccgacgacccccgccgcctgtgctcgtggccagggtagctccgaccacctccgacaccaacccgcacatcggcgtgaccgttgcgacctcccggacgtcactgaccaccccgccggagctctactgccgccgggggctttgcgcaatgtcagtgacctcaagccaatagtggaaccaaggggctgttctgtgagaaaagaaaaaggaaaaaacccccaggggcctcggcgttctctagaggagatggttgctgggataacttggccgtccaccttgccaccgggttggactgttgagtgggaccctgcctcggccgaggaggagcgtgaggagtga

SEQ ID NO: 18303 - DNA, 429 bp, Zea mays
  Peptide Sequence Number=SeqID_61678
atggaaattaaggaaaggaaaatgaataatggaaatttatgccatcttaagacctttgtaaattgtccactgaaatctataaagacaacaccaatccactataataatctaaaagaaaacataatcttaaaagactgtaatcttgctgacggagagtacatcctcgtgccggagcaaggagctgctcaggaggtagccccagatccagcacccgagcctgcaccagaggacctgcctgccactgctttggaaggcaagccccgaaattcagctagtgcttttggcaaccaaaccccacagccaaacagttgcatgtctagaggttctctagaggagatggttgctgggataacttggccgtccaccttgccaccgggttggactgttgagtgggaccctgcctcggccgaggaggagcgtgaggagtga

SEQ ID NO: 18304 - DNA, 327 bp, Zea mays
  Peptide Sequence Number=SeqID_61679
atggggtgcaccggaggtgcacccaatgggtgtagcccccgaccttcaagtggatttttgaagataatccattcgaagacgtacatccgggtcatcgagcgctccgggctcgagggctcggatgagtcggagtactcctcggatgaggaggactcggacggcggcggcgaggacgaggatgaggacgatgacgacgacgacgacgagggcgatggcggcggtgacggtgacggcagcggcaggggcggcggcagcggcagcaagggtggtgacggcggcggcagcaggggcggcagcggcggtggcggcagcagggccagtggctag

SEQ ID NO: 18305 - DNA, 570 bp, Zea mays
  Peptide Sequence Number=SeqID_61680
atggaggacggcgtgttctgcggcgtgttcgacgggcacggccgctgcggtcagctggtcagcaagctggcgagggaccacctccccttcatgatcctgagccagcggaacgcgctgctcctgggctccgacgacgacggcgatggcgacggggacgacccggccttcaacgacgcgtcgcccacggcgccgtcgtccacggacggcagccgcagcaggtggtcgtcgccgtcgttggcgccggcgccggcacagatgctggaggtgtggcgggaggcctacgccaacggggaggacctcgtcgtcgccaacctcggtgactccagggccgtgctggcgaccgtgtcggagacgggctacctgaaggtcgtgcagctcaccaccgaccagaagcccaaccccaaccaagagtcatcggtactcgttatgtcgcgcgcgttcgacgactactatatcgaggattgtggcgtcatcttggcgccggaggtgatgcagaggaggatcgacaacagtgatcagttcgacatcctcgccaccgtcaaggtagcttttgtgccggcctacctttaa

SEQ ID NO: 18306 - DNA, 591 bp, Zea mays
  Peptide Sequence Number=SeqID_61681
atggaaaaagagccacttgacatggttgagagctcagttcgagtcatcgagacacatgttgacatcattcgcagtctagtgactgatggggttgtggatactagtgaaccggaatcagtgtacacacttaagaccactttgtttcaaattggagatgtatgtgacatgcttgagaagtgtgctctgtccatcaaaaagtatgctgactccaagagggctaaaattattcaagatgaagccctgcaatatgctgaagatgatgaagctgcagatgatttggaggaactcccaagcccagatctccttactcaagccgacatattggaaaaatattttggaattgagtatgatagcgaccagtcaagggttagacagagaaggcatggctgtgatgttataatgctgaaggaccccaagaagagattaagtcctgtagtctaccacctcccgttatttgtgggcttcaccgatggctggaaacctttggtgatagcaaacgaccttcgggctgaagacgtctgcgagcttgttaaggggccagacgatggtgagccggtgtactatgtccggatgtgtggtcacaaaatttaa

SEQ ID NO: 18307 - DNA, 1686 bp, Zea mays
  Peptide Sequence Number=SeqID_61682
atgccctccctgggtggacggaaggtgcgaagtccgcgttttgctttggatttgcgagggcgggatcccgcctcggttgtgcgtgaggcagaggatgaggcggtgagaattgttgggcgctatgtgccaaagacggaggcccagcggagttgggatatacgtggatccaacgactgcctgaatagggtcttcgagttgaattctttgccgtatggcggttaccctggggaggacgtcgtcgatcgccacgggaaaaaaccagcggccgtgactgaggatgaccccgcgccggaagccaccccagcctctaaaaagaggaagctaggtactgcggtcggagaactgggggtctccgatagctttgctatggagttgatgggaacatgcgcggcccccgggggaaggatgtcttcgcccgagctccgggagtcttcggcgcggatgctggaggttaccgggggtcgatggcccaaggacgttcctatcccccgcgtggccggcgaagacttttttacgtctcgcatggctcgtgacttgagagtgtttccttacggacgaaatattgttgctgttgtgtcggcagtgatgaacaaggatcgccaggaagctgcgcagaagcgtcgggcggtcatcaggctccccgaagctaggccgaaaagggcgcgggggactgcgaaggctacagcccccggcggtagccagccgatgctggcggcgaagccggccgcccctgggtccagcaaggtgccggagagcgtgaaggcggccggcgccggcggaaccaagtctgccccgaacggagctgcgaaggcccgggaattgccttcgtcggggaaacgcgttgccgactttggcacaaatattagtttggacgattatctcgttggatcgggcgaggggcaacttgttgttgttccgcctgcggtggcgaccatgatgtctgtcgcggtgcctggggtgaagggtagcgctcgcagcgctggcggcgagatttcggcggtcgctgccgtcaaggacgaagcgggcactgtgtcccgccggctgagggaggcgtcgcagcagctgagtcaagcggccgactttgccgaccgtgtggcgtcgggggcccttactgcagatgtgtctgccgaagtcgagagacttcgggcgcagcatgctgacgccgtccgggaaaagtcggctgcggatagcaagtgccgcaagctggcggagaaggcccgcatggagagggccgaggcctctacacgctcagaagttgagcggacgcgcaaacagctcgtggactcataccgcgagctgggcgcgcggactgctgacttcgaagtgcccgatcgagaggcgggccttcgcttcctcgagtggatgcaagaggaattgttggcgctcccgaccatcgtggagggatttatgtcctttgcctccctcgtcacatgcgaaggggcgatgaacgcgctgtcccgcgaggggtgcagtcactatgaggtcttcgaccgatctgatgaagattttgggcgcgagatttataaagtcgaagaccctatggtgaaggactccgcgggggccctcttcgaccggatgtggggcccctatggtcgagaggtggttagggagcggtctgaccgggcgagggatcagatggtgcgtgccaaggatgtggaggacttcggacccctgaacggcacgtag

SEQ ID NO: 18308 - DNA, 174 bp, Zea mays
  Peptide Sequence Number=SeqID_61683
atgaggttcgacattgtgtcaggaagcattcagatcttggttgtattgtgcttcaagttgctaaggactcgcaaatccctcaccaagcaaactgctagaaaactttttagagctagagatgatgaagatgatagtgctgatgccggcacaaatgatcatgttgtacctcggtaa

SEQ ID NO: 18309 - DNA, 177 bp, Zea mays
  Peptide Sequence Number=SeqID_61684
atggtggatacaagtgcggtcactgcacggcggcagccgaggtcagacgacaccaccgaggctgcagctatgaagaccctgacaactttctgcggctaccatcccttggagatggtgatgcacccactaggactcttccccgctaagaagagggatgaccccatgtggtgcaactga

SEQ ID NO: 18310 - DNA, 447 bp, Zea mays
  Peptide Sequence Number=SeqID_61685
atgcccgagggcgcctataagtgcccctggtgcgctgcagtccactcttcacttcgcctcacgccccgagcagaaactccaactccggcgagctctccaccgcccgccatcactgcccgagcacggccgccgtggccaacccttcctgtcgacccccagcctcgccctaacccctggacggcttccccgagaggcggtgaagctttcccaagcttgagtcgaggcattgcctcaccggagaagcgagcgcgacatcgtcggacttcggccgaccgccaccgcgcgtggaccgggtcacacaattgcaacctcgctgacggagagtacgtgctcattcccgagcaaggagctgtccaagaggatgtccaggagccagctcccgagcctgccacagagcatcttcccgcagccccagcatttgaaggcaagccccggttttatgcataa

SEQ ID NO: 18311 - DNA, 456 bp, Zea mays
  Peptide Sequence Number=SeqID_61686
atggagaacaacccgggaaaacagtgctaccgcaagggtggaccttcggaagaggaaggcccccaacagaagtatcaagagcttttggtgatcgctagtttaagaaggtttgctgacctttctaaagttatggtgagaagcagcatgaatcctattgttagtgatcaagcaatctgcttggatctcattgctaaatcgagaggcatcgctgttgccaagaggtacgttttggacctcctagaaacttccaagacttattttagatatgacactcttctcaattcttactgcaaagttttgatgattgagaaggccgagtcccttatggagaaaatgaaggagctcaatttcctttcatattttataagagaaaggtggagcacgggaggaactaaatacctagagtatgtgttgactcgtatacattcatgggattataaaaagagggagtcatga

SEQ ID NO: 18312 - DNA, 340 bp, Zea mays
  Peptide Sequence Number=SeqID_61687
caccggggccgaggatactgttgagtccactgctcttcacgtgctgacgaccttctgcggctttcaccccttggaattatcaacccatcccattggcttgttccctgctgagaaggaggacaacccaatgtggaaagatcgagttgagcacactgaggattgcgaggtgaggcaatgtgatgaagctgaggtgcccgatctttcggcgagtagagataattccgatttggcggaagatgacccttgcgatccgactacgacgagcaagcccgaggcgccaatgcaatcgctgaaccaactccctgtggttaccgaccttgctgatgtgagatcggcctga

SEQ ID NO: 18313 - DNA, 129 bp, Zea mays
  Peptide Sequence Number=SeqID_61688
atggcgattgctctgttaatccagccttctaagggcactgtacgggggttggacgaggacgcgggacggggcgacctcgttggatgcgtgggggtgtacggtcgaggccagggtggcttttataactga

SEQ ID NO: 18314 - DNA, 2208 bp, Zea mays
  Peptide Sequence Number=SeqID_61689
atgactgaagaggatccttcgcagaaggccgccccagccactaagaagagaaaactaggtactgcagtgggggaattgggggtcttcgatagttttgctgtggagttgatggggacgtgcgcagcgctcgaggggaggatgtcttcgcctgagctccgggagtcttcggtgcggatgctggaggttactgggggtcgatggcccaagaatgttccgatcccccgcgtggctggcaaagacttctttatgtctcgcatggctcgtgatttgaaggtgtttccttacggatggaatattgctgctgttgtgtcggcagtgatgaacaaggaccgtcaagatgctgcgcagaagcgccgggcggtcgtcaggatgacagatcctatgcgcgaggcgaagagggcgcgggggagcgggaagggtgctgcctccggcagtagcaagctggtgctggctgcgaaagcggctacccccgggcccagcaaggcgtcggtaagcacgaagactaccgcctctggcggaagcaagcctcccccgggcggacccgcgaaaggatgggagctgccttcgccggggagacatgttgctgagttcggcacgaacatcagtgtcgaggattattttgttgccgctgccgctaaggacgtggcgggctccatgtcccagtggctaagggaggcgtcgcagcagctgtcgcagcagatgacgcagcagctgaagcaagcgaccgacttcgctgaccgcatgtcgtcgggtgtcctgactgcggacgtggctgccgaagtcgagagtcttcgggcgcagcatgcggatgctgtccgggagaagtcggctgcggaaagcaaaaaccgcaggctggcggagaaagtggccgccatggaggccgagaagacggacctccggcaccagttggcggaggagaggagggaggcgaatcaggccatcgctgaagcgcaggctacacgagcagaggccaatgtggcgcaggcggagagcagtctcgccagccaacgcgtcgaggagctggaggctaggttcaacgccctgcgcagccacgtggacaaggccgaggcctcgacgcgctcggaagtcgagcggacgcacgcgcagttcgtggacgcgtaccatgagctaggtgcgcagactgctgacttcgaagcaccaggccaagaagtaggccttcgcttcctcgaatggttgcaggaggagctgctggtgctcccgaccattgtggagggtttcatgtccttcgcctccctcgacacctgcgaggggaccatgaatgcattgtcccgcgaggggtgtaggcactacgaggtcttcgaccaatcagacgagaactttgaacgtgaaatcttcaaggccgaagactctgtgatgaagcagtcagcgggggcactcttcgataggatgtggggtccgcacggtcgggaggcggtcagggagcgatccgaccgggcgatagagcagatggcgcgtgccgaggatgtcgaggaccttggaggtctggccggcgcgccgtccgaggctgcggaggtcaatccggtgccgccctcggatgccggtgaaggctcctcggctgtacccgtgcctactatggccggtgaagaccctttgtcagcccctgtgccgacgggcgaagatgccttgagggtggcggctgagccggctgccgaagaccctacggccacggtcgggccttcgcaggggtttgggcctgcacacgcaaccgctactgacaatgctaattttgtggcggcttcgaccgtggttgctaaagacgattctgatgattctgtgtctaagtgttttgagtctgatgattctgggagtttgattgtgtggacagaggagtcttcggatgaggacttggattattttgcagcattggatgaggctgcggcggagacttctccgcgtgtgatgggtgctgagaatcttccgggtgcgagtgctgggcataggcggcgaagggcgatggcgaaacagagagtgggtgagttgtcgcgaagtgataggcgtcatcgtggtgagatggagggtggtcgtcttcgtgtggatgggactggcaaacgggaattgttgtcctcgccggctggggcgagtgtaggtgagggggagttgcgaagtctgtttgcgggtgaggaattgaggataatgttgttcaactatagggagatgggtatcatcccgaaggttgagccaatgtaa

SEQ ID NO: 18315 - DNA, 87 bp, Zea mays
  Peptide Sequence Number=SeqID_61690
atggcgtcatcatgcagtatagctcatcgtccacctcaagcccaacctggcacgctttctcttggaagttcaccgaatttggagtaa

SEQ ID NO: 18316 - DNA, 663 bp, Zea mays
  Peptide Sequence Number=SeqID_61691
atggccggaatcgctcggtccacatgcgcaggcgggtgttctcgtcggcggcgagtataccggccaaaccacggcgatctggttcaatccaagggcacggttatgaagcacactacaacttttatatttggtccaagccttgatcataagcctattcacaatgacccaaatagaatcgtggtgcctggaggtgttgggcaaacccacaatgaaatccatgcaaatgtcctcccatttccaagaaggaatgggaagaggctagtggcgatcttagagtccatggttacacagttgcactgggcttttcgacttaaggcatctgccacaacattggccttgccaggatggctccagctcctctcctacctcgatgtctacatcctcatcggccccttctgcctccatgtcctgaatttcttgacggtgcagatccaagtgctagttggcttcctcaagctgttgctgtgtggtctggagctgatcttccagaacctcgatggtgttttccctggcctccacctggtcttcaagctcttgaatttgggtggccatctgctctacctggaggtccttttccaccagctcagtggatgttgggggccttcggcttacgaaggtcctcaaaaacaggatttaacaatatttctggagtataatgtgtga

SEQ ID NO: 18317 - DNA, 573 bp, Zea mays
  Peptide Sequence Number=SeqID_61692
atggcggactacgacagagttggtcaagagaagtggagtaaggtgtataagctgcggaatggaatgggcaattggatggaatttgtggctgtgatagaagctaagtttggtgttgatgcctatccaaaagctttgaggaagttattgaatctgaggcatactgaaagtgttgaggctgtctgcaagctgatccttggtgttgatgtaacgcgccttgatgctcccttctgccaagcagtctcggatgaagtggtatctcagccggatgtgcttgctccgttcatggaacacgaggttcttggccaatgccagagcggactggctgtccaccctgagttccaccgctccagtgtctctcccgaggagatcaccgagcagtcgagccagccagagcgcctgagtcgaagcagtggacgccgctatgtactcggcctcgcagctggacatggccaccacctgctgcttgaccgactgccagctaatgaggcacttgccgaggaagaagaggatcccgcttgtgctcttgctagtgtcgatgtcaacggcgtggtcgctgtcgctgtatacgacaag

SEQ ID NO: 18318 - DNA, 234 bp, Zea mays
  Peptide Sequence Number=SeqID_61693
atggcgacggcggaaagtcatccctacatggcccgacgcggtcatggttggcgtggcatattagatggatctgagggggtgcagcctgattttgggctttataaatcctacccccttaacagaaatctcgtcctcgagatttatgtaattgtggacattactccacaactcatcacactcaatcaaagatccaaatccaacaagtatcataagaacaagcattcaagcacatag

SEQ ID NO: 18319 - DNA, 1557 bp, Zea mays
  Peptide Sequence Number=SeqID_61694
atggtgaaggagcgggaggagcaagtggccattgtgcgcatggtgcttggcgagggtacaccggagatggacatcatccgtgctctccacatggccggcgacgaccccaccaaggccattaacatcctcctcgacctcaacaaggctgcgccacctctcccgccgtcgccgtctccctttccctgtccatcgccctccccttcgccggggaaacccgccaaagccctcgtcgactcaaccccaccatgcaaagcccctacccggcccatgcccacggcagagaaacctaagtccactacaagcaacggtggcagcgaggagcactggtggctggtggggagcgccgagatggtggggctgtccacctgcaagggaaggcgaattacctcaggggacgtggtcaccttcagcttccccaatgccacaaccgccgtgggcaagagccgtccgagccgtcccgccctagcttcctgctcctccgagatcatgcgcttctccaccccgagccacggggaggtgggtcgcatccccaatgagtgggcaaggtgcctccttccccttctcaaagagaacaagttaaaagtcaagggctcgtgcaaatcagctcccgaggtgcttaccattatggacactgtcctcttgtcagccgcttttactccagaagatctttattccaggaagcggccaactgaaacaaagagcagtatagggtctcctgctgcaaagctgacatccggcagattgaggttgtcttctgatggaaacgaagatgatcatggtgaagaaactgtttcagattcagatttggatgatataattgggatctcagacagctgtgcactagaggaaagggctccccctgattctctgatgtgtgatctacgctcttatcaaaagcaggcacttcattggatgctgcagcttgagaaagtaaaaattaagattctggcagatgcaatgggactggggaagactattatgacgatagctcttcttctttctgattctagcaaaggatgcatcacaactcagaatgctgctcagacccctagagaagctagtgggttgggtgaatcgcatgatgctgtgaagaagcttgctaaccctttctcttttagcaaacacaagaaacctaaggccccacttattggaggaagcaatctaattatctgtccaatgacactaattagtcagtggaaggcagagattgaagctcatactaagccaggcactgcgaatatatatgttcactatggacaaaacaggccaaaagatgcaagcatcattggtcagagtgatattgtcctgactacatatggtgttgtgtcatcagagttttcaatcgatggttcaacagaaaatggggctttgtactctgtacattggttcagagttgtgcttgacgaagcacacatgataaaatcttctaaaagtttgatatccctagctgcggctgctctgactgcagatcggcgctggtgtctcactggtacaccaattcaggattatggagccgacattttactcttatttttcacgcatgtatttgcgtactag

SEQ ID NO: 18320 - DNA, 228 bp, Zea mays
  Peptide Sequence Number=SeqID_61695
atgccggtcagaggggggattcctgcattgctcttcctagaaactgtaccgggttttttgaagctagtggaactttgtaaaggcctcgtagtggatcacttgccattcacctcggaagtgtctaagggccttgcaaaccctggtgacatgggatacacgacttgtggctcagctttaaccctattattgatcaaccttacacttcacatgaactcccacctttggtga

SEQ ID NO: 18321 - DNA, 351 bp, Zea mays
  Peptide Sequence Number=SeqID_61696
atgggggtgccaggggagagcgtgatggccatctccgtcgccctgtgccttggatgttgcccagcacccatagatgggtcaggaccgctcgctggtgtgtatgggtgctcatcggggcttcggcgggctgggagcgctctctggggcggctattcctcaccgtactttctccaccaccgctggccgcacctcatcgggaaccggctctgccacgccattgctgactcatattacataccgtttcatttaaatggcgatctaattcgggccgccggatctggatcgtgcggcctagatgacaagataccccttcggccgacccatctttcaaaagaaaaccctgcactttag

SEQ ID NO: 18322 - DNA, 312 bp, Zea mays
  Peptide Sequence Number=SeqID_61697
atgaactcaagactcccgaaacggagcaccgccccaggtcggagaggttgctggagactgcccatctggagcttgacggtcaacacgcagcaggcccctacctggcgcgccaactgtcggcgttttgagaccggggggtccctcaggccgacgagtgagtgtcgcggcgtgccccagcccagatgggtcgagcgcgtgggcgagcgcgaaggggggaagaagcgaggcggccggcgtaaggagaggatccaggtgtacaatgggggtgtagcagtgtgctacgtgtctagcgggggagagctagcgccctaa

SEQ ID NO: 18323 - DNA, 660 bp, Zea mays
  Peptide Sequence Number=SeqID_61698
atgacaccgacttctctgctaaccttgagccggaagggatgggttgctcgacccatcactcgcgacgctgctcgcgggtgtcacttccacgatgcgctcgacaccctgctacgtcgggcatttgaccgacatacttggtccgtcgagtatcgctgtgtggtctaccagcacagtcgcggggtctacccggaccgctgggaggcaacctgcttggtgcgctgcccggagaacagtctccagggtgctgagcgggactcagctgaggcagccatgcaagatgctgcacggcgtgcgctttcgcactactgctcggttttcggtggggcagctgacggtcttgacctgaagtattacccccgccgttcatctggcagcacaggaggcgtgattgtctcacctgtcggtgagggcaatcctaggttgagcagcacagtcaacctagccgccgtgctaaacacggagctggaccatgcattagacgagctgagtagggctcgtgctgagatcgccctgctgcgggctgagcgcgcggaacgtcgtcacctggaggatggttcccccgctcccgtcgggactcagcacccgtaccgctcacctcagcgtggacaccagtcttatggcaatcccgactgcaagaccaagataactctagaaccatag

SEQ ID NO: 18324 - DNA, 168 bp, Zea mays
  Peptide Sequence Number=SeqID_61699
aggatccggggtgtagttcgcttcgccgtcgtgccgtcaatggggctcggtagacactgtggtacaggtggttatgagatcgatggttctggttatgactatggtgctggcgaagatgaagctgtggaaggagacttccaggagtttcaagactacgacgagttctag

SEQ ID NO: 18325 - DNA, 1641 bp, Zea mays
  Peptide Sequence Number=SeqID_61700
atggagagtagctctctccggacagaaagggaatcacgactcatggatggttcgagatacagatggtctgagataaaatggttctatttatggttttggttcaatgatgctaatgatgtttcctcgatgaggaaatgttgccccaagaagggcaaatcggagtctggcccgcgcaaccatcactctagtcggtgcaagggcaagtactcctccggcaagtacaagtccaagggaggattcaacaaggaggcgctcaagaagaagtaccttcagaaggcaaagatcaaggagcgtgtcttccttgcctccctcagtgacctcgaccacgactccgatgatattgtatcttcctcgagcgacgaggagactgagaggcgagtcgaggacaagctgaacaggttgtgcttcatcaccgacaccgcaggaggcttctgcaccatggcacttggtgaggacgtggtcgacaccaacgacaataaagacatcggcgatgacactacttttgaggtactacctgccgccgacgatctcgctgttgagatagaagagctgaacgctgctttggctagtcaggataagttgcctaggcaggcttctcgtgagaggagagagtttagatccaagtatgagagcatgcttagggaacttgagtctgctagagcttcagttgaggtgtccgacgagactgaatgtgatgagtgcgctctacacatgtcgaacatcaacactttgcagaccaagtactccaccttgctagatgagtgcgatgagttgagatctaggtctatcatgttggaaggattgtcccctcacataaggaccagtttgtcatccttcactacctgtactcatgataagtacaaccactcgagactgtatgggcagtcactcaatctgtactcgtacggtccaaaccctagggttatgaaggctggggagcaccgggaggataagaagggggaatgttttgtccggtttggacatggcggtggcctgactccttcaggtataaccgctaagaaaaaggagatcggaagtcagatggacgttcgctgccaaaccagcttttgccagaatgaagatgatttccccaagttgctgagagcatgcacagtccacctcggaatcaggagccaaccagagtatgatggtcgtgaattcgtcgagcatggcacagagaagtgtgtcgtgactgtatacattggatccagtccacaccatgtggaatggagtgtcactgctggagggcacagattcaaagatacctgccaagtcgtcgcccgcaaggcattgagggccctatgtcagatcaatgaagaagaagtggccgacacaccactcagattcttttcgccctttcaaagaaaccgtctagtttggatggccaggatgtgtgcattggaagtgcagcagttgcttgaggatgacccctcagtcagaagcgcagccgtcagctccatgtggatctcgcctcagctcaagcccgttgttacctgccttggaaaagtcgtgaagtcattgcttgttgaagccctgaagcaagccaaggatgagcacgtccagaagctgatggaggccctacggatccaagagcccgcctcatccaacctagttcaacccatgagagccgaagatccctag

SEQ ID NO: 18326 - DNA, 561 bp, Zea mays
  Peptide Sequence Number=SeqID_61701
atgaacgctcaaacctcaccggagctcaactcaccgccgtttgcccgtgcgcggcgtgtccgcggccacccgagcccctgccgccgtagaccggctagcccagccattcccgaccctgtccgaccctcggagacgagtgagcacacctcggtgaagctccctgagcaaggaatcgaagtctgcttcgccggagatgccagtccacggtcgccggagttcacaaccccgccggagtgcgtggaccggatcgccttgatctggccggcacactcgccgccgatgaagacacccgcctgcgcacactgcaaccttgctgacggagagtacgtcctcgtgccggagcaaggagctgctcaggaggtagccccagatccagcaccagagcctgcaccagaggacctgcctgccactgctttggaaggcaagccccggattccttctgagatggatactagttctctggaggacatggttgctggagtgacttggccgtccatcttgccaccgggttggactgtcgagtgggaccctacctcggctgaggaggagcatgaggagtga

SEQ ID NO: 18327 - DNA, 435 bp, Zea mays
  Peptide Sequence Number=SeqID_61702
atggcggcggcggggccatggccgcgggacctcgcccccgtgtcccctacttggcttggccgccgcgcttggagccagatccgcgacggagatgtgtggatccggtgggctcgaggtcatacctggccatccctcggctcatggttgcggggttgggcgctccggtggcacacgtgctccgtgggctgtgggccacgccagagtgggagactgggagctgcctctattcgggggggggggcgtggtgcggcatggagaaggccgctgccggtggcccaggttggggcggttggtggccgcaacaggttggccttggggcggcagtcagatccggaggtccagtggctggatttgccgtccctgaggccgatgtcggttgtggagcgtcggcgggcgagctccccatggtggtgcggcggtgaggagcgtaggtga

SEQ ID NO: 18328 - DNA, 360 bp, Zea mays
  Peptide Sequence Number=SeqID_61703
atgactcacaggattgctcggtccacgcgcgtaggcgggcgaccgaagtccggcgaggacgatcttgggtctccggtgaagttctgccgggtccgagcgcttggaaagcttcacgggccaacggcgaagctaaccgaagggcaggcgcggcttggaagcgactggagtgggctggccacgatggatgaggcttgggcagtgatggcgggcggaagagagctcgccggagctaaggaggggcgtctggccagcgagggggtcataggattttgcctactggtttcaaagatttggagccctgaagtctggtttgtccccctgctcgagcccgaggcaaatccttggttttatcatgtctag

SEQ ID NO: 18329 - DNA, 426 bp, Zea mays
  Peptide Sequence Number=SeqID_61704
atgggcaagagcaagaaaggcggaagttcatcacaccactccggcgacaagcggaagcgcgagccgagtcccccctccgaggacttcggtgactccgagtactcagaggatgagttctcctccgagtccgaggggtcaccagcctacgcctctcccccggtgtcgtgtgatgactcagacgattcccaggggatcgctgccgaggtgtggatgtacatccgggccgtcgagcgctccgggctcgagggctcggatgagtcagggatttcctcggacgaggaggagtcctccgactcatccgaggaggggagcggtggcgacgatgatgacgagggtgacggtggcgacaaaggcgacgacgacgacggcagcggcaaggatgacggtggcagcggcagggccagtggcaaagcgccgctggtttaa

SEQ ID NO: 18330 - DNA, 47 bp, Zea mays
  Peptide Sequence Number=SeqID_61705
tggatttgtttggcaaattgaacagggatttgtttggcttccaaatg

SEQ ID NO: 18331 - DNA, 324 bp, Zea mays
  Peptide Sequence Number=SeqID_61706
atggatgaacaaagtgcaaatcaagagcaaagaaacagaatgaagaagaaaagagaagagttggcggtgtacagccaagaggctgtttcggtctggggcaccggactgtccggtggtgcaccggacagtgtccgtttctcccttactccgtatttctttgtgaatcttaagtgtaagggcgagaggctccaagttgtggagattcctcgcaaacgggatattgaaaggcaaagcaaaacaccgtggtattcaagttggtctttggaccgcttgagaggggttgattgcaaccctcgtccattgggacgccacaacgtggagtag

SEQ ID NO: 18332 - DNA, 507 bp, Zea mays
  Peptide Sequence Number=SeqID_61707
atggcattgttcatcgcttgctcgatccgtgatagtcgcctccttggcctagagagaaaagggttccttccaatcaaagagttctctcggcgaagattggagaaagaaggtgatgtgccactgccccgagatgacgagggtgacccggtctatagcgaccaactgtatgttggttcggtcaacttccaactccgttctaactggaaggtgggttatctcaagatcctgctccccacctccgtgagttccgagggcgaatggttctatgtcaagaacctggctagcagtgccccgtgctttaccggtcaggagccggtgtctacggaggactggaaccgtgagtcagagctgggtctgaaggttgaggtggaaccttttattggtggcgctcaagacgctgaaggagcaaggtctcactggttcgagattggtgcgcgtctttatgcattgccgagttcagcccttgatggctcgtcagaggtcgatgcacaagtattccagtgttaa

SEQ ID NO: 18333 - DNA, 315 bp, Zea mays
  Peptide Sequence Number=SeqID_61708
atggcccaagggcacatttccctttcaggtgaacatcgtgccaattgtcgtaacatacaacaatcctttgctgatggcgcgtgtatcgacaatgtgtttatgcaatgcttcattgagtgtgtctgcgatgactgttctaaacatattcctccattgaatgctcaccagctcatactagatgttaatgttgggattggacgcatacatgtgttagattccaacccatatggaccagagatgggtgggactatctggaagaattaccattgtatacctatggatatgggtgataggaaggttcatgggccaggttaa

SEQ ID NO: 18334 - DNA, 807 bp, Zea mays
  Peptide Sequence Number=SeqID_61709
atgacgaaggttgatgctttgccgaagactatggaagggatcgtctgctctgcccccgcctcttcctgctcttgcaccgccaccgatcgtcgtcgcagtcgagggcagcttagaggtggggcagccagccctcggcgccttcttgctcaagcgaaggctaaggtggtggccctgcgaacgactcaggtggaggcgaggcaactctgcacgagtgtcgcccgcgccagaagaggaagagcgcgagctttacgacctcttgcttcgagagctgttgcccttcaaggcaaggcatcttccttgcacgcggagtgctacagagctcgtggtgactgggatctccttaaggatgatggctcccgactcaagatggcgctccacagagtgaagtctcacatcgagctggctgaatcatcattgcaggaggtggaggttcacctggtgcaggatggctcggagcttgcaagggagcacgacgcgaccgaagagctccacaagatgctcgttcaagcgtgggatgcgaaggttgtggtggatgaggtgagggcagcggccatagagaaaatgcgcgagctcttgctcgcctacaaaaatgtcgttgcttctgggcaccgggcggacacccttgtttcggagaggaactccgaactccaagagcttcgtatggttgctagcatggtgtgcgcccacctctcccctccaccatcgaccaaagctcccctgattgatcgcctgcgggagctgcccgaccatgtggagcgctttgtcaccgaaggcatttgccgaggtggtggcatcgctcttggctga

SEQ ID NO: 18335 - DNA, 285 bp, Zea mays
  Peptide Sequence Number=SeqID_61710
atgaggcaacaacaaagggcgaactcgggatcccccatccaagaggaggaataccagcgccagcatcaggcacgcatcctcgcccgtgaagccaccctccgacaacaacaggaggagctcgacacactaatcgagaggttcgaccaggtttatgacaacattgagcagaaatgcctcgaagctaaaaagcctcaggcgaggaagacctcgatacaacaagccgaggtcaatcagtggcaacactccggcacgaggagccgtggcacccacatgggttcatcctag

SEQ ID NO: 18336 - DNA, 333 bp, Zea mays
  Peptide Sequence Number=SeqID_61711
atgaagcatgctctttcttgcacctcgtcaaagtccaagcgggctccgttgaggcaatgctcgagtcctcctcaagggttatggtgggaccgcgtctgcccgccatttaatggcaatggcggatgcattgtggcaccgcttgagggcagcatcgcgtctcttgaggcaccgtttcttcgccttggttcgggtggaacgcctgggccctgggcctatggcattggcatcgttgtggctaacgaggcagagttcgccagtctcccgggcaagcaaatcgagggagtcataggcgatccagatctcgggagaaaaagtctcactcctagtggatga

SEQ ID NO: 18337 - DNA, 1065 bp, Zea mays
  Peptide Sequence Number=SeqID_61712
atggccgacgagcagagcgggcttcccctgcggaggtggaggcctttcttcggcgctttcgaggcgatcgacggcgtgattgaggcatgcggctacccgcgctccgagtttcgggacgtgcgtggcgaaatcgtcgtgctgctccgcggcgccacggatgacggcgtggccgagcagctctgtgccgcgctcgacgacgtcatggtcgaatccctcaagacgctgctggtcgcgcccgtcccacacgacctgctggcgtccacagacctggcaaggaccgtcggcgccctcggcagccacgggtcgttccggatccggagcctcgcgcgcgacgtcgtgcgcgggtggagggtggccatcgaagcctcccgcgccactgctgtagcggtgaagaagaagctcgacaatctctgtgctgataagatcccgctcccgcgcgctgccgtcgacgagaagaagctgcacgtaccgtctgccaagatgcttcccgctgctgccgtcgacaacaagaagccgcgcgtaccaccagcaaagatgcttcacgccgccaccgccgccgaggtacacgacaagaagtcgaacgtaccaccagcgaagaggcttcccgccgccgacgacgaggtacacaacaagaggtcgcacgtaccaccagcaaagatgcttcccaccgccgacgaacacaagaagcagcatccaacgaagacgcttccgaccgcagcaattctatcgaatcaacagaagaacatgagtgagaccaataagccggccgtcaccgagagccgagaagatggaggctacaaaacgcaagctacgggagagttaccaagaagccgatggagtcaagcgtcggcgcaacatccaaaccatcagggaggaggaggggaagctgttggagcaggagcaatggaagatacatgcatcccatcgtatgaagagaggctcagtaggatgagctggtttgtagtctggtgtaggaagtcggagctacttagcctcggcgctaagctcggcaacgatgacttgagcaaggctatagggaccgccgacgcggtgcgcgtggagtag

SEQ ID NO: 18338 - DNA, 119 bp, Zea mays
  Peptide Sequence Number=SeqID_61713
atgacggcgcccagcattaagaagaggacaagcgtgtcgaggccactgccgacccggacggcgggacgctccggagggcgaaggagaacgacgaccacccgtagcctagccatagcctc

SEQ ID NO: 18339 - DNA, 1257 bp, Zea mays
  Peptide Sequence Number=SeqID_61714
atggccgacgagcagagcgggcttcccctgcggaggtggaggcctttcttcggcgctttcgaggcgatcgacggcgtgattgaggcatgcggctacccgcgctccgagtttcgggacgtgcgtggcgaaatcgtcgtgctgctccgcggcgccacggatgacggcgtggccgagcagctctgtgccgcgctcgacgacgtcatggtcgaatccctcaagacgctgctggtcgcgcccgtcccacacgacctgctggcgtccacagacctggcaaggaccgtcggcgccctcggcagccacgggtcgttccggatccggagcctcgcgcgcgacgtcgtgcgcgggtggagggtggccatcgaagcctcccgcgccactgctgtagcggtgaagaagaagctcgacaatctctgtgctgataagatcccgctcccgcgcgctgccgtcgacgagaagaagctgcacgtaccgtctgccaagatgcttcccgctgctgccgtcgacaacaagaagccacgcgtaccaccagcaaagatgcttcacgccgccaccgccgccgaggtacacgacaagaagtcgaacgtaccaccagcgaagaggcttcccgccgccgacgacgaggtacacaacaagaggtcgcacgtaccaccagcaaagatgcttcccaccgccgacgaacacaagaagcagcatccaacgaagacgcttccgaccgcagcaattctatcgaatcaacagaagaacatgagtgagaccaataagccggccgtcaccgagagcgagaagatggaggctacaaaacgcaagctacgggagagttaccaagaagccgatggagtcaagcgtcggcgcaacatccaaaccatcagggaggaggaggggaagctgttggagcaggagcaatggaagatgcatgcatcccatctcatggataaactgctctacgcgattaattgccgttgccgaccgatgatgggcataggccgcaagaacattggttcaagggttatgcggcgtgtgttgatgatttgcccacggttgcttgggcccttggcactccgtgcgtctgcttgctctcggtgttgtggctccaagctcgttgatgaagaatcggagttgcctcgcgcgtcgtcgagttcctttggccgtgtgcagcctgtcttgggaactcgaagcaccttgtcccttgtgttgggctcagcaacgatgactcaagatgggcttgttgggtacccaggaaagaggtacctaaggtga

SEQ ID NO: 18340 - DNA, 816 bp, Zea mays
  Peptide Sequence Number=SeqID_61715
atggttgccagttgggtcgcattgcccgcacggcttgtggagggtagcgaagcgaaggcggaggagtggaggcgactcaagtcggcctcagtccgagttaacatggccctagaaactgtgaagcgcatgcttagtggtttcggggatcgccttcttgctcaagcgaaggctaaggtggtggccctgcgaacgactcaggtggaggcgaggcaactctgcacgagtgtcgcccacgccagagaggaagagcgcgagctttacgacctctgcttcgagatctgttgccttcaaggcaaggcatcttccttgcacgcggagtgctatagagctcgtggtgacttggatctccttaaggatgatggctcccgactcaagatggcgctccacagagtgaagtttcacatcgagctggctgaatcgtcattgcaggaggtggaggttcacctggtgcaggctggctcggagcttgcaagggagcacgatgcgaccgaagagctccacaagatgctcgttcaagcgtgggatgcgaaggttgtggtggatgaggtgagggcagtggccatagagaaaatgcgtgagctcttgctcgcctacgaaaatgtcgttgcttctgggcgccgggcggacacccttgtttcggagaggaacttcgaactccaagagcttcgtatggttgctagcatggtgtgcgcccacctctcccctccaccatcgaccaaagctcccctgattgatcgcctgcgggagctgcccgaccatgtggagcgctttgtcaccgaaggcatttgccgaggtggtggcatcgctcttggctga

SEQ ID NO: 18341 - DNA, 234 bp, Zea mays
  Peptide Sequence Number=SeqID_61716
atgatgctccggtcgatccctgagccaggcgagcctaaggcaaagggtagctacaagcgccctgggagcttttgggactacatctacaggttctccaaaaaaggaaacaaactccccgataccaccgacgttgatgtggtgagtgccttcacctacagcaccaccaacgagccctactccatgagctcagacgggggcgaccgaagacagccgccgacctctttgacattgtga

SEQ ID NO: 18342 - DNA, 333 bp, Zea mays
  Peptide Sequence Number=SeqID_61717
atgaagcaggctctttcttgcacctcgtcaaagtccaagcgggctccgttgaggcaatgctcgagtcctcctcaagggttatggtgggaccgcgtccgcccgccatttaatggcaatggcggatgcattgtggcgccgcttgagggtggcatcgcgtctcttgaggcaccgtttcttcgccttggttcgggtggaacgcctgggccctgggcctgtggcattggcatcgttgtggctaacgaggcagagttcgccagtctcctgggcaagcaaatcgagggagtcataggcgatctagatctcaggagaaaaagtctcgctcctagtggatga

SEQ ID NO: 18343 - DNA, 291 bp, Zea mays
  Peptide Sequence Number=SeqID_61718
atggccgttggaagactgctgtcgcatggcgcaccggacagtccgatgtgccactggacactgtccggtgcgccagccacgtcagccagccgttggggttcgaccgttggagctctgacaggtggggcctctgggctgtccggtggtgcaccagacaggtcctatagactgtctggtagcgagttcaacgttgagttccctggtgcaccggacactgtccggtggcacaccggacagtccggtgcgccagaccagggtgcctttgggttgtcttttgctctttttatttga

SEQ ID NO: 18344 - DNA, 1791 bp, Zea mays
  Peptide Sequence Number=SeqID_61719
atggatgaaggaactcccctcggtggtctggagtctgaggacaatgccgagccaagccacgggcttcacaccgttctttctagtctatggggccgaggccatcttgcccatagacttagaatacgtccctgtgacgctaccacgcccgaggggttcggtcccgagacctccaggtgggcgacttggtgcttcgactatgacaagacgcccgagggcgacacaagctcacgcctccctgggaagggtcgttcgtcatcgccaagtctaaccatcaaggaagggtcagccttgcctcggcaaagcccgaccctccctcgggggctagaaggggcgaaccccctccgcgtcaaaattttcctcggaaaaagtctttctgccagaatatctttcgtgcttttcgactacttcggtagtgggatcatgaaaacgacggagtacacctcggataaacgattctgctaccgacgagcaagccctgatactcgaaacaagaggaaaagaaatgcagctttacaacgcgacgacagtatgtttgggcctcggcggccgcaaaaaacatatgcatactacaggcgaaccaatcctgcaggctcagacgtcgatggagggggagcagcagcaccctcggcgtcaactccaccttcggcgaagtccgaccgagcctcggacggcaacacgggcgagggatctccgctccgaaggacgacgtcagcaccacgcccgggccatcgccgccagggtctcctccaggaatccggcccgagcagacggctcggccggccgccccgaagcctcagccagttgtcccccgaggacaccagcccgactcatggcctcgacaactcgactccggcgctggtcccgccagtggacggcccggccaggctccggccgacgaagtcttcttttcgagccaactctgcctctgtccatgctgacaccgctgcctccggctctggctcatcgcagagcggccgagggtggctcaccgccgcccgctccggcagcagcgacaacgacctccgctccaggtggccaaacagcaacggcgatggcctcaggacggacgctgctgcaacaaggcccttgcccacgtccccactcgaggggcgaggacaagctatcaaagccaaagagccggaggcccagagcgtggatggtggtggtgatcccgtcggcgacgaggacttcttcagccgccaccacctccgcgccgccgacggaagccatctgcccaccggcagatccccactcggatcctccctgacgggcgagcaccgacctccacgcagaggcgccgtaccggagcaaaggcaggacagcccaagaacacgaacgctgcccctagcagcgtgcgacgtcttgggcggtcctccgatccttgaagctgagggcggggcagaggtcgcagctcggcttgcttctcccccaccatcaaattggtggtcaccgtcttgggtgaccaccggcgaggggatgcagccgggctacctgatgaaaatccttgaagccgaacgatggctgaaaggtaccaacttcctcgaagttatgttccgccaacgacagcaagatgaaagcgacgcgagtgctccccatccgggggcacggaagccggcgtggactgagtcttctccaacacgctccaagatcctccccctacgacacgggggctgggtcccacgcgtcatgcaagctggccgaggacagaagaagccaaaccgccgcacgcggagcgcacaacagcccagcggttacaagcattcctccactatcgcccggaccagcgggtga

SEQ ID NO: 18345 - DNA, 654 bp, Zea mays
  Peptide Sequence Number=SeqID_61720
atgtccgttgtggcggccgtggggcccggcgccgcggtggcggcgtacgggcacgggcacgggcacgggcagccgctgtgcggcggcggggcgaggaagaggaaggacgtccgggaccatgaggttggattgccgggtagcgacggccgcgcggcggcgcggcgtggggccgggctgttcgtgctggagacggtggaggaggaggaggaggaagaaggggcggacgcggagaggtcgtcgtccgtcggcgcggcgtccgaggacgacgcggaggaggaggaggacggggacggggacgaggtggacagcggcgggacgaggtggacagcagggaggaggaggaggagggagggcggcgcgctcgaggccgccatggacatgggcgccctcgacgacgcgctccccatcaagaggggcctgtccagcttcttctccggcaggtcgcggtcgttcgcgaaccttctggacgcggcgtcggcggtgggcagcgcccgcgacctggcgaagccggagaacccgttcaacaagcggcggcgggtgctccggtgctgctccgtcgtccggagggccgcgtcgaccacctcgctcgccgcgctgccgcccatagccggcgacgacgacaacgacgacgatggccgcagtgtgcctagctga

SEQ ID NO: 18346 - DNA, 741 bp, Zea mays
  Peptide Sequence Number=SeqID_61721
atggcccgcgcccgcgcctataaaaccctcccagacttcgattgtacctttccgcgcaccctcaaacctcactggagtctagctcgtcgccgtttgcccgtgcgcagcgagtccgcggccgcccaatccctctgccaccatagaccggccagtggagccattcccaactccgtccagccctcggagaagactgtgcacacctccgggaggctccccgagcaaggaatcggagtttgcttcgtcggagaggccagcccacgctcgccggagctctcaaccccggcggagtatgtggaccgggtaaaccactccaccatccttcgattccttgtgcacacggtcgctacgttaccccgtgaagctcaccgtgccctcggattgaaccagttcgccgtggtttggccggtatactcgccgccgacgaggacacccgcctgcgcgcgtggaccggacgattccggccatccccgacgtcaagccgtacctcgacgtgaccgccagagcctccccgagccaaccccacccttcgccggacctccctcgccgccgacaatacaactccactatgttatcctaaaagaaaacctaagcttaaaagactgtaaccttgctgacggagagtacatcctcgtgccggagcaaggagttgctcaggaggtagccccagatccagcacccgagcctgcaccagaggacctgcctgccactgctttggaaggcaagccccggttttatgcataa

SEQ ID NO: 18347 - DNA, 624 bp, Zea mays
  Peptide Sequence Number=SeqID_61722
atgggcgcgattaaggtcaaggctcagtccactcaagggacacgatctcgcctcgcccgagcccagcctcgggcaaaggcagccgaccccagaggattcacgtctcgcccgagggccccctcaagcaacggacacaccttcggctcgcccgaggcccagtcttcgcagagtagcaaccttggccagatcgccacgccaaccgacccctcgggcgccataggaagctccgcctcgcccgaccccagggctcgggctcaacctcgacgctggacgacggactccgcctcgcccgaccccagggctcggacacagcctcggcctcggaagacggtcttcgcctcgcccgacctagggctcggacacagcctcggcctcagaagacgacgaactccgcctcgcccgaccccagggctcaggctcagcctcggcttcggaagacgatggactccgcctcgcccaaccccagggctcggacttagcctcagctctagaagacgatggactccgcctcgcccgaccccagggctcggactcaacctcgacctcggaggaatcgccacctcgcctaaactcgggtccagaccggccacgtcgccagtggggccatcattaccctacccctag

SEQ ID NO: 18348 - DNA, 162 bp, Zea mays
  Peptide Sequence Number=SeqID_61723
atggggacggttgatgtgtgtggggccggagtgcccctgcatgtcgtgtgtttaggttctctggaggagatggttgctgggataacttggtcgtccaccttgccaccgggttggactgttgagtgggaccctgcctcggctgaggaggagcatgaggagtga

SEQ ID NO: 18349 - DNA, 303 bp, Zea mays
  Peptide Sequence Number=SeqID_61724
atggcagaagcaagcttccacgtgttcgacccctcagatagcttcctggtgaggccgtgggacttgctcaagcttgacccggggaccctcgtcaccggaatagcccaatcgtgctcaccggagttcaagaacccgccggcgcacgtggaccgggagccgccgacgacccccgccgcctgtgctcgtggccagggtaactccgaccacctccgacaccgacccgcacaccgacgtgaccgtcgcgacctcccggacgtcactgaccaccccgccggagctctactgccgccgatagctaaataa

SEQ ID NO: 18350 - DNA, 428 bp, Zea mays
  Peptide Sequence Number=SeqID_61725
gcgatccttgcattaaatgctcctgcgatacggtcggttggcgtggcgatctggccaaggttgcttctctgcgaagactgggcctcgggcgagccgaagctttgtgctgatgggggttaccagctgagattaggagtcttgggggtgttactcagggtgtccaccccagggttaccccttgttaacccattatcacatgaagtcttgtatgggcaaaatagcttcctggtgaggccgtgggacttgctcaagcttgacccggggaccctcgtcaccggaatagcccaatcgagccgccgacgacccccgccgcctgtgctcgtggccagggtaactccgaccacctccgacaccgacccgcacaccgacgtgaccgtcgcgacctcccggacgtcactgaccaccccgccggagctctactgccgccg

SEQ ID NO: 18351 - DNA, 300 bp, Zea mays
  Peptide Sequence Number=SeqID_61726
atggataaactgctctacacgagaactgagaacaatttttatgatccagattccagagaaacagtcaggcgaccacgacgccatacgtcacacccttccttggaggcgtcgctttggaggattgtgtcgtccgacttgtttggtgatgtgtgttgtggcgaagtcggagctgctttgttgacgaggagttggtttgtagtctggtgtaggaagtcggagctacttagccttggcgctaagcttggcaatgatgacttgagcaaggctatagggaccgccgacgaggtgcgagtggagtag

SEQ ID NO: 18352 - DNA, 588 bp, Zea mays
  Peptide Sequence Number=SeqID_61727
atggggtccaggcacagtgcttgctctgccgaggctgagtgccgaggttctttcgttttgcttttgttagtcaccctcctgcggggagagtatttcctctccgaggagatggctcgtcttagacacactgctcgaaagtcggtgattcctttcctgccgtctcgccttgcggagcgtcctctgcgccgcaccgtgtctggtcagtcgagtcacctggagaggctgcaccaccgcctgcgtgaggagcaagagcgccagcgtcagcagagggagcagcagggctcttcctccccacctgagcaggaggtggagtccgacgccccggctgttggaggagctactggaggaggtcctggaggagaccccgatgacgacgacgacggctcagaccacagcactaagtcctttgagccgcaggaggcggagggatgggtcgctcgacccatcacccgtgacgccgcttgcggttgtcacttccacgacgcactcgacaccttgttgtgccaagctttcgaccggcacacctggtcgatcgagtatcgttgtgtagtctaccagcacagtcgcgagaggtacccggactgctag

SEQ ID NO: 18353 - DNA, 786 bp, Zea mays
  Peptide Sequence Number=SeqID_61728
gcactcctggctggggttgcaacttgcctcactgggcggggaggtgacccatcctttgatcctgataggaggatgtctaggaatgagtccttgatggagcccaatacacctacaacctcgagcttggaaaactttgccgagaacgtgcaaggcccctacctggcgcaccaaatgcccaggacagggtcggccagtggtggcttccccaagaaggagtcgacgacgcgtgcaacgtgggacccaagcaccgtcattcgagctatgccaaggcctggcttccgtagcctagggctcggcgcgccgagcacttatgacggttcggtctcgggctcggtgagggatccactcgagtggtttccttcgtcctaccagaccccctgtctaattccgccacgcccgaccccgggatgggtgtcatgggccaaaagacaaaggctaaagccccccaacgtcaacgtctactatgcaggcatgtggtacttggcttctatgcttcctcttgccttctcgtcgaagcctccgctcacggctgacggctcacgctgtccagcgactcagcgaggcaacgatcgtacgacattgactaaactagcagcgacaagcaggaggtcaggagggattgcccgtcgccgtggcgccgccctgtccgtggctgatggctccgccgtttgcctaggccagactagagtgccttcaaggaatattgaagagaaggagttggcgatagttgtgtgggagcaactagatgaaaggatttcacaagaaaatattgacactaacaacagt

SEQ ID NO: 18354 - DNA, 723 bp, Zea mays
  Peptide Sequence Number=SeqID_61729
atgggttgggttattggaaggcacgcgtggccaggagtcgttgtctccgatctcggacgcaacgttgaggcgcggggacgaaagcaccggcgcggaagtggcgaggaccgcgggggagggtgggcccggggcgaggttgtcgacgtggcgcgggggagggatcatgacgggggagagtcggccggggagaggtcttcagacgccggcggcgaccccccggccgacctctgctgtgacgatggcgccgggaccgcggcagaggggggcaggagctcggacggcgcggaggcgtccggggtgaagaacccgacctggcggatcttgggctccacgccgcccgacgaggagcgtggcggccggcggaaatccatggccgtggacggcgccaagggtttgcttggaagtttggggccggcgggcggcgctcgagacgagtgtgtgactgtgaggagagcgagcgagagagtggggatcctcgcgggctcgcggtcgcggtcgcggctgcggcacacgaccaatggtggtggaccgggtgcagccggcgtgataggctctgacgtgcgcaaaagcgcgcgtcctggccgttggtcggcgtggtctgcggaggtctattcattttttccccgagaagaaggatggaggtgttcaggctggtggcataattgggccgagcagaggtttgcggcacatcgggacgcttttatgtggaccaaaagcccatag

SEQ ID NO: 18355 - DNA, 1251 bp, Zea mays
  Peptide Sequence Number=SeqID_61730
atgcatctgccgccgctgcggcgtgtaccggcggcgctgctagtgccggcgcgcggcctcctcgaggcgcgcgtgccgtgggtgcgagaacgggccctcgaccacgtcgtggagcgggagcgccacctggtgccgtttctcctcgccaaggacgtgctccttgccgccacgccgccgccgcacgccgtgccgctgcactcgctgccctccacaatccctttcccgttccgcccgctgcgcttcctgcggctctacccctcggcgttcgcgctctcgccgcaccccatcgaggtctccccgacgccccggctctcggcgctccacgccgccgaggcgcaggtcgtcgacgccaccgtccccgacgcggctgaccgcctgcttcggctgctcatgctcgccccctctcgcgcgctcccgctccgcctcgtcgcgcgcctccggctcgacctcggcctcgcgtccgacttccaacgctcgctgctccccaactacccggactacttcgcgctctccccggacggcagcctcctcgagctcgtctgctacaggaaggatctcgccgtgtcgtcgatgcagtcctacgcgcagcgcaccggcggctacaaggtcggcgacgtggtcgccttcccactctcgttccccagaggattcgagcttgacaagaaggtgcgcaaatggttagacgagtggcagaggctgccgtacatttcgccctatgaggatgggtcgcacctaacgccaaggagtgacataacggagaagaggaccgtggcggtgctgcacgaggtcctgagtctcacggttgggaagaagatggagaaggaggtgttggtcaagcttggggaggcgctgcggttgccaccaggattcaggaaggtggtggctaagcaccctgggattttctacatatcgcacaagctgaggacacagacggtagttctcagggaatcataccggaggcatatgcttgtggacaagcaccccatgatggggataaggtatcagtatatgcatttgatgcatatggggaaggaggaagttggaaagggcaagggcaaagatcgaaggagtagtcgcagtgaacaaatcatcggggaggagtttggtgccacagtggatgatgatgaaaatgaggagtatgatgatgaagacgacgtggctgaagatgacatggaagtgggtgttgcttctgaggatcaggacagtgacgacgatgttgatgaggatataaaggaacaaatttctcattga

SEQ ID NO: 18356 - DNA, 1431 bp, Zea mays
  Peptide Sequence Number=SeqID_61731
atggacctgggaggcgccagggcccacctgcagtcacaaaggctctgggcagtgacctctgcggccgcctcctctcctctcccagtccgcccctcccgcctcgttctctccgccatcgtcgccgccgcctccattcctccaccagtccaccatcgccacctacgcccaaccaaacccaactccatctcttccgactataaacgcaacccaccaccgctgccgcgaacctctgcgctccgaataccccagacccccgatcctcccaatggccaccgcattttcgctgcgcgctgcggccccggccaccgctccccgcgccgtctcccgatccacctccgcggcgagggtcgtgcccatggcatcggcactggcgggacgcggaaggctggcaaaggcggatgtgccatcgagcacgtccgacgggtaagaacgttttactccctgtctatggcatccatccatgaggtcttgctgtttgaagctcttcgtgaggccttgatggaagagatggaattagatccaacagtgtgtgtgtttggtgaagatgttggccattacggtggttcttacaaggtgacaaaaggtttggctgatacgtttggtgaccttcgagttctggacacccctattgcggagaactcgtttactggcatgggagttggagcgggaatgaaagggctgaggcccgtcgttgaaggcatgaacatgggattcctgctccttgcttacaaccagatctcaaataactgtggcatgcttcattacacttccggcggccagttcaaaatcccacttgtgatccgtggccccggtggtgtgggtcgtcagcttggagcagagcactcgcagcgcctggaatcgtatttccagtccatcccaggcctgcagatggtcgcctgctcgactccttacaacgctaagggcctgatgaaagctgccatcaggagcgagaaccctgtggtgctgtttgagcacgtccttctgtacaacctgaaggagaaaatcccggacgaggagtacgtgctctgcttggaggaggccgagatggtgcggcctggggagcacgtgactatactcacatactcgcgcatgaggtaccacgtgatgcaggcagcgaagacgctggtgaacaaagggtacgatcccgaggtcatcgacatcaggtcgttgaagccgtttgatctgcacactattggcaactccatcaagaagacccaccgcgtgctgatcgtggaggagtgcatgcgcacgggtgggatcggcgccagccttaggtcggccatcgtcgacaatttctgggactaccttgacgcccccatcatgtgcctgtcatctcaggatgtgcctacgccatatgctgcgactctggaggatgcaaccgttgtgcagcctgcccagatcgtggctgcggtggaacaactatgtgcatag

SEQ ID NO: 18357 - DNA, 1032 bp, Zea mays
  Peptide Sequence Number=SeqID_61732
atggatggacagcggtggttccgctgccggtggtggagtgcggactcgccattgcatccccttcaccaccggtgccggtggttgacgtgggatcgtctgcatccgctcccatggacgtcgatttggaggcaccgccgcatcctccgcccactgcaacagcagttactcgtcgttcaccatctccgtcggcacccgtggtcgtcgggaccattgctgctcgtcgtggacagcccccgcgcgccgtcgatgctccgcgcggacgcatcatcctcactggccatcgcccaaatggggtggccccatcttcctcctccaatgggagggcctaatggccctcgatccggccgccacgacagccgtttggggggagggggtggggaagaggctcggcccctgcgcgggcagtggaggagcgcgctcagcgcggcgctgctcctcgacgtggagcagtggtcgggcggcggctcagcaaggcccgaggtcgggcctggcgcgacgtgtccggccgagcgcaggcgacggcaccggccggcggtgcgtggccgcggtggcctggccgagtcggccacaacctccccagcgcggatggggagggcggctccactggcacgcgcgccatggcggccctcgacgctggctaggaccggcacggcgggcccgcgggcctcttcttccaaggcgcgacaggctccctggtggagccacgggcgcgcaggaaaggagccccggcggcggctggagctggccgctcccttctggcgcctcctcctggagggtgcgctgcacccaggagcgcgctcggctccgtggctcgacgaggcgcgcaagccaggcggcctcaggccaggcggcagctgggagctcctccccctggcgacggccaggaaagccctggtggtggtggcggctacaggggtggccagcctggctgggccggcgtgcaggccgccaggccgctgcctgttcggcatggcaggccgcctgggctgcttttcagagcccaaaatggtctacatttacccatttttttaa

SEQ ID NO: 18358 - DNA, 909 bp, Zea mays
  Peptide Sequence Number=SeqID_61733
atgggggaaggcctgcggagcaacggaaggccgacgaacggcgcgccgtcacctgctccagcagcggcgacgacgacgacttctgctccgggggggccgaacagcggcagcactgacctcagggcggatgctgccgccaggaggcccccgcccatgccaaaacttgtgaggcaaggacgggcagaaggccgtagagttggaggtcagtccgtggccggccctggctatcacgccggcggaagaacctcttccagctgccgtggcagacgccggcaccgcgagcggctccgaagccactcgcgtccgaaagccgggcacgctgcagctgccagcgccacggacgacaaccgctcctcccccccatcactgagtgaaggagcgggccaccgcccacgcaggggccgaccccaactcggcacactcccctccccagccttagtgatgaaaatccttgaggctgagggaggggcagaggccgcagcccggcttgcttctccccacccaggaactggcggtcaccgtcttgggcaactgcactgccacttgcgccaccgtcgcgcctcttcggttgcggaaccaatgtcgcgactcgaggcgacccagcgcacgacccagcggcgccagcctggcgcgacggtcaatgcggccgaaagtgggccggcagtaatgacggtggcaggcgggcgggagcagcggtcacgtcgtcagccaggctcacgtcccatccaggggcagcaagagagcctcctctcacggcgtgaagacggcgcacccgtgatccgtccctcgaacggctcgcgcacgcgcaacggccgccccgccaaccattcgccccgtcgcattaactccgcggcgggacagacggcgtttctggcaggggaagcgggcgacgcttcgccttcgccgtaa

SEQ ID NO: 18359 - DNA, 507 bp, Zea mays
  Peptide Sequence Number=SeqID_61734
atggcgcttcccgttgacgtggcgggcctgtgccctaggtcgggcgacgtggtggctcctccgaagccgaggtcgagtctgtcttccgtggccgaggccgagcccgagcccctgggtcgggcgaggcggaggttgttcggcagaggccagggcagagtccgagccctggggtcgggcgaagcggagttcatcgtcttctggggcttagcccaagtccgagccctggccctagaccaccctcggctgggggtctggatgatgctcgagggagatctcgcatcctccaatgctggtcaacacgtgacagcatcggacctccttaagctagaggtttgggtggcccgccatgaggatcaaggctatccccaggggtctggcccccagacgcaagtgctgagagccctcgtcttgaagtcacgtggcgaactcggaccccctccgctgggggttcagagcactggttataggtgttggcctcaagtcgagccagtggccttactgggctga

SEQ ID NO: 18360 - DNA, 1179 bp, Zea mays
  Peptide Sequence Number=SeqID_61735
atgaggcctcggccaaccatcttccaagggtgccagcccgacccgaggcctcggctgatcgactccggcgtcggtcccgctgacggacaacccagccaggctcacatcccatccgggggcagcaagagaaccccctctcacggcgtgaagacgacgcgcccgacaggcggcgcttctggcaggagaagcgggcgacgcttcgccttcgccgaaataaccgcgccaaaaaaggctccgagcctccttactgatcagaggttcgaaggctggccccccgaagggttcaacagccgcctcagatcgcgtgggccctacacccactactgggctcagactcgggctaagtcccggaagacggcgaactccgctccgcccgacccagggctcggactcgggctaagacccggaagacggcgaactctgctccgcccgacccagggctcggactcgggctcagccccagaagacgacgaacttcgctccgcccgaccccagggctcggactccgccctggcctctgtcgacgacctccgcctcgcccgacccaggggctcggactcggcctcggccatggaagacagactcgacctcggcttcggaggagcctccacatcgcccagcctagggcgtggacgtcagcaagggctcgaccgctccaacagctgtccctccgccaggcaccgttgctcctccgacggccacgacatcacaccagtagggtgccaagatctctccggctgccacattggcatgtacttagggcgtcagatctcccccgctagacacgtagcactctgctacaccaccgttgtacacctggatcctctccttacgcctataaaaggaaggaccagggccctcttagggagggttggccgcgcggggacgaggacgggacaggcgctctcttggggccgctcgcttccctctcccgcgtggacgcttgtaaccccctactgcaagcgcacccaacctgggcgcgggacgaacacgaaggtcgcgggattcccacctctctcacgccggactccggccgcctcgctctctcccccctttgtgctcgcccacgcgctcgacccatctgggctggggcacgcgacactcactcgtcggcctgagggacccccggtctcgaaacgccgacagataccaattgaaagttgcctagagggggggtga

SEQ ID NO: 18361 - DNA, 2241 bp, Zea mays
  Peptide Sequence Number=SeqID_61736
atgcctgccttctacacgccaacctacgccgcctgccgcctgccgcctccactccagcgacggcgtgctgcaggatgcccacgacctcgacctcctccccacgaccacggcctcaaccgctccgccagctccgccatttacgtgcgcacgacttcaacctcgcctgattcagcgcacagagaggaggataaatggtgggcgtgcggtgtcgaggtcgctcgtgcggcgccgaggtcgagcgtgcgtcgccgagggagaggaacccaaggcatgcacacgtcgaaaaccactgagcgcctcgaccagctcgacgatgacctgcacatattctgcgtcaagttcgtcggcagggaccacctcctccagttacagaaaaaggattctctaggatctgagaatgttaagcggaatgcaacaaaggcttataaagaatcagctgtcaaaggtcttggaaagcattttgaacaattaaagaaaattaaaaataaagaatgcaacattgacggtaccagttctgagaaggaagaatgtaacagtaacagctcgtcaatgaatggtatgcaagtatcagataagatatctgttgatgaaacgaataagggagctgattccctcgaagagctcacaaagatggcccataatttctatgatgagactgcactcccaaagctggctcagggttctttggatcgtcgaggcgttttttcattggacacacattcaccatcagtctgccttttgattcaattggaaaaggctgctactgaagaagggggagtaacacattctgtttattctcataaagagcctgtgcacttagctgagaaagagaagcaaaagttgcaagtatggtctcgaattatgccttgtaaagagtcatttgcatgggccatgattcctctgtttgaaggtaaccatgcgggtggtcttagtgatgctgcttatcctagcagtcctttagcaacaagtttactaggatcaacttctcaagatagtattgtggaccctattttaaagcttactttagatggaaaagtgaaccattactcgagtggaagctcagttattgtagagatatcaaacctaaacaaagtgaaggaaagctatatagtggactccctccaagatccaaaacggaaagtacataaaccagtgaaaggtgtattgagattagaagtggaaaaacttcatggtggccacaatgatgtggataacacttctgaaggcggaagcatggccaatgatttgaatgatgctggtgacatcaataatggcagaagcaacagaagtagctttgatgggattcacagttttgtgaattctattgccattgcccagaaagatgctcatcataatggaatcatttctaatgctgagaatggtgacaattttgaagcttttgactttcggatgctgacccgaagtgagccgttttcacaactttttcattgcctctatgtgtaccagttgactgttagcttgagccgcaaaagaaacctgtttgttagagtggaactgagaaaggacgattctgacatccgaaagcctccattagaggttccgcatgtgcagcagactttcacatgggactgcggtctcgcttgcgtgctcatggtgctcaggacgctagggattgattgctgcgacggcattgccgatctcgagaggctctgccacaccacgaggtccatcaccgcatacgacattgcttttctactgttatccgggcactgcattgctattgctttagtggacaaatcgaagctaaatttgccttgcatgagtgattatgatgtacaacagcacaacgatgagcctgactacatgggacactatgtcgtaatatgtgggtatgatgctgataattgtgaatttgagataagatatcctgccagtgccaggaaatgcgaacgggtgacaatgaagagcttggacgaggcccggaaatcctttgggacagacgaggacattctcttgtgctgtccaaaccagcggtggtgcactggcgtttcatacaaatcttctcttgcaggtctctctaacaggaaagagtgggatgaagctgtcgctagttatgactgtcgagtgccagtcctgtacgtagctgagaacattctcgcagttacagctgatagcagcagtgtggtagtgagcttagtaagcatcttgtatgttggcccatgccgttcgccaaaccatggccgtgcaaaggagttcagtggcagcaagaggctctgctga

SEQ ID NO: 18362 - DNA, 1776 bp, Zea mays
  Peptide Sequence Number=SeqID_61737
atggccagttatagagaagatcacaacacaaatgcaaaccgatgggatgatacaacaatgtttaggtttaagttacctgcaatattatgggactcgagattaaacacaaagaaaggacatcaaaatcttgaccacaatgtggatgaagatggagagagttcaagtgatgttcaaataatcgatactccattaacatcaacaaacacgcaagaactgatgtttgtattatggacatatatcatggggatagacaacgccaaatatttaaagaaacattggattcagagtactaaaccttatccaatttctttaagtcttcaaaaacttaaagatatattggatgtaaataagccgatggatacagattgttttaacatggctgttcggatgatcgcatgcaatgatgccttgttcttgttggaagacaaataccactacatggatctacagttctgttccataactaaatttggtcgagaccctcgccttcgtgcaaagccagatatcaacatgttggcaaaattattagaatgttggcctgacatggagtacgatgtttcagattgcaaacaaattctattgcccttttctttcatgggtcacttcaccttatatgtacttaacatggacactagaagcatctatataatggactccatgcctataccatcatggtttaagggtgatcatcctagcatgcattatatacataatatacattatattgccaataatatgaatgctgccatggaattggccaatcctacatggaaagacgatatttatatgtggcgtcgtatagtaccaacatgggttccaagaacattaaactgggatttatctggctttcttgttatcaactttatgcacgattggaatggtataaggttaccctgcatttgcactgtatggagggatagggctcatcgcaccttctacctcggggtcggcgtcgcgttcccgaagccaacactactccccagcccctccgggaggtgtgactccacctcctgcccgactgggaggaagccaagcagattatgtggtgcagcattatacattgctgcactctctcatgggtgtaattacaccaaggcagatattgtctctgttgtgcatgtgtgtgaggccactctaacgaagcgattgatagagttcgaaaatacagattctggcagcttaacagatttaggaggtgataataatgtgtgccttatgaataatatcttgcttctattgtcattcttaatatgtgaacatgcctatatcttcatgcccctttgttacattgaagaatttctggcaacaactgatgaatctaatgaagagcctgtttcaaaacattcgcccaagtctggagaaattatctgcaaacacaaggataaaggttttgagcattttgctcatggactttgtgaaaaatgctacaataagttcactaaactgtcgggtggactagaaggtggttctgtccctccagcattccaacgagctgaaaagaaaagacttgaagctgctaaaagggctgaagaagctgcagcagctaaggaggcagcgctggaagaatctctttgcgacacacagaattctgaggttgagagtgccatgactcctagaaagggtttaagtggagataaatcttcaaaaatgggatctgagggactcataaatgactctatgccacccaaggatcctgaagagggagggttacagaggagagagaaggttggtgctctgatcctcatgtccccccgtgcgctgggtttgttgaaataa

SEQ ID NO: 18363 - DNA, 1686 bp, Zea mays
  Peptide Sequence Number=SeqID_61738
atgcaggcggcatgcaaccgcgccaagtggacacgcttctccgactcccaacgcgccagcatggaggcccaggcccacgcgtcacgcaaccggcgcgccggatgctgcatgcaggcaactgcaccgccacttgcgacaccgtcgcgcctcttcggttgcggaaccaatgccgcgactcgaggcgacccagcgcacgacccagctgcgccagcctggcgcgacgcggctgccccgccaactactcgcctcgtcgcattaactccgcggctggacaggcggcgcttctggcaggcgcagcgggcgacgcttcgccttcgccgtaataaccgcgccaaaaaaggggttcgaaggctggcccccgaagggttcacagtcgcctcagacgccgagcgagggatgaccaggggggaccgggtccggcagatcacccgcaggtacttttgggcgtgcctctgggcccctagccgacccccaacgaacggggcacggacgtccactcggattacccgcttgcagctcaccggagacaccatgttcgatgcccatcgagggctcgggggctgctctcgcaaacccggctccggccaaaccgttgacagcgtcaacataccagcccgagaacttggaccccgaccgtgcacccgggctacggcctgctcgcatgagggaacaaccagaccagccgaagcattacgcaaggcattaagacctcgaaggagtgaaaccactcctccgaggcctcgggggctacacccggcgggtgcgctcgcgcgcacccaccggaacaaaatgcaaccgagaaaggctggtccccttgcaaaaaagtgcgacgaaagcctccaagcgagtgccaaaactcccttcgaggctcgggggctactgtcggggaccataattaggggtaccctcaagacgcctaattctcagctggtaacccccatcagcataaagctgcagaggcctgatggggctcggacttgggctaagccccagaagacgacgaactccgcttcgcccgaccccagggctcggactccgccctggcctctaccgaacaacctccgcctcgcccgacccaggggctcgggctcggcctcggccacggaagacagactcgacctcggcttcggaggagccaccacgtcgcccgacctagggcacaggcccgccacgtcaatgggaagcgccatcatcaccctaccccgagccgactcgggccgcagagaacaagaccggctccgttgctcctccgacagccacgacatcacgacagctgggtgtcaagatctctccggctgccacattggcatggccttcttagagaaggttggccgcgcggggacgaggacggggcaggcgctctcttggggtcgctcgcttccctcacccgcgtggacgcttgtaaccccctactgcaagcgcacccgacctgggcgcgggacgaacacgaaggccgcgggattttcacctctctcacgcccgtctccggccgcctcgcttccccccttcgcgctcgcccacgcgctcgacccatctgggctggggcacgcggtacactcactcgtcggctcagggaccccccggtctcgaaacgccgacagatgctatcatcatgactcctattgttgcccacacgttaccgaggcgaagggaaacatgcagagaagacaggacggcaccgcctga

SEQ ID NO: 18364 - DNA, 429 bp, Zea mays
  Peptide Sequence Number=SeqID_61739
atgaggcgagtcgggggctgcctccgcgggggtcggttgccctcttctttccttggcgcccaggggaagaactgcatcctccggctccacggagacttcctccagccatgccgggagaggcgggccgccgtttctctgccaggacgcaacgctacgtcccccgcctggtcgatagttgcgccgcgcaccgtgggggcagcgcccacgctctgggcggtcctgggcgaagacctgccggcgcgctttgaggcgttggcaggcggagatggcttctctatcgatgagattgccaactccgctagtagccctgggtctccgtctcccgggctgaatggctggctctcatcctcggtgggtgagagtccttctgccgcggcacccgccccgaagccgctgctgaagctgcttcgtcgctcggggcgagggtag

SEQ ID NO: 18365 - DNA, 1002 bp, Zea mays
  Peptide Sequence Number=SeqID_61740
atgaggataaatgtgggcgcgacgtctccacgctcttctttcccttcttcctgccacgcttgctctcgccgtcctccttgccggcagacttgcccgcggggacgcgcttctccgccttgggcttcttcccggcggtcgtcttctccgccgcgggcttctcctcagaagaaccatcaatttgtcttagctgacaataacatgacacccaagcttactacacaagattactcacgtctaagctcttcagtaatagctcacgagctgcaactaaaaaatggagaaaccagatgggtggttgataccattgttggtaaagaggatggacttggttgtgagaatctccatggcagtggggcgattgccagcgcatattctaaggcatacaaagagacctttactctgacatttgtgactggaaaagctgttggcattggggcttatctggctcgtttaggcatgaggtgtatacaacgtcttgatcaaccaattattttgactgggttttcggcactaaacaagctcctggggcgggaggtgtacagttctcatatgcaattgggtggccccaaaatcatggctacaaatggcgttgtccaccaaactgtgtcagatgaccttgaaggtgtttctgctatcctgaaatggctcagttatgttcctccatatgttggtggtcctcttcccattatgaaacccctggacccacccgaaagaccagtaacatacctccctgagaatgcttgtgatgctcttgcagccatctgtggcattcaggatggtgaagggaggtggttgggtggtatgtttgatagggaaagctttgtggaaacattggaaggttgggcaaaaacagttatcaccggaagagcaaagcttggtggaataccagttggtgtcatagctgtagaaacccagactgtgatgcaagtcatcccagctggtccaggtcagcttgattccgctgagcgcgtagtccctcaagcaggtcaggttagccaatga

SEQ ID NO: 18366 - DNA, 732 bp, Zea mays
  Peptide Sequence Number=SeqID_61741
atggagaaaagagcaaaaggattgagaaagttgccttatgtctgtccagtcccacactttatagacaaaaacctattgctaccttggagcacccaacagtttgcaaccactttgtacacaataagtaaaacactcttcgcaacaaataaaaacaacacagttactggaaaacataaagtttctcttaagcagttgcacgcagaagagttactgagaactggtggtggtacgaccacagatacttcacagaaaccgagcagtggccgagaaagggtccagattgaatctctcagacaagaactggagggggcaaaacgacagataggggcactcaaaagtgagaagtcccagattgaagctgaagctaacaaccaaagaaacctttcagtaaaactagagtctgatctcaagagcttgtcagaagcttacaacagcatagagcaggccaactaccgcttggatgccgaggtaaaagccttgcggcagggaggcagcgtgccatatcctgacgtggaagcaataaaagcgcaagctaaggaagaggctgagaaggacagtgaggcagaacagaatgatctactcgtctgccttgggcaagagcaaacgaaggtcgagaagctgagcacaaggctgacagagctcggcgaagatgtggatacccttctgcagggtattggcgatgacactgccattccggatgatgacgatgaagatgaagatgatgaagagtga

SEQ ID NO: 18367 - DNA, 212 bp, Zea mays
  Peptide Sequence Number=SeqID_61742
gagaaaatgctgaacttggactgccagaaacaagccttgctattatacttggaactttcccactgcatgctttgactatggtaattgtacatgcattttttgatgtacttaaattaaaaggcttagcaaactactgtgttccagcaggagaggcttaccagaaggctcttgacattgcctttgagataactcagaagtgccattttaattga

SEQ ID NO: 18368 - DNA, 558 bp, Zea mays
  Peptide Sequence Number=SeqID_61743
atggtggggatgtaccagcaccaactccgcgacgaccccttcgacaccctaagcggcggccactgcggtgagcagccacgcgttgccggcggcggcgcctcctcctcctcaccctcggctgttcatgacccgctgtctgcagaggtacatggcggcggacagccgcggcagcgggtcgaggcgcttgccgacggaagaagcatgttgcgcggcgggggaagcggtatagttggcgccgcgggtggagatctaggggtgctagtgcggtggatgcgggaactcgcagcggatcccgtgggtccacttccggcgccatcagagcacagggtgaggaagcggcacgtgctggcctggcggcgcgctcgctacctcagattggaggacgtggcggacgcagaagagcttcccagcttctccaaggtcgtctgtggggcggcagcggctgcttgtggggtggcagtgtctggctcaaggttttcttatcggctgatcatttctgatcgccagagggccgatcagccgatcagatcaattactatggcgatcagacccgattaa

SEQ ID NO: 18369 - DNA, 306 bp, Zea mays
  Peptide Sequence Number=SeqID_61744
atggcccatggtgaaattgtcaaatcagatggtataacaaacattagtcaacaagagtacgatgtgacattctcgttcaaagctatgaagacgtctaaccccaacccgatgcaaacatttgatcacactcatttgaaagcttcagtgacttcctcttcccctagccatctatctttcgtttcaataattgttggtgccttcgccatggcttcaaggaggttgtttcctcctattggcgtagcaggtcccctctccaccgaccctttgttgcgcctcaagaggttacggagggccgctaggtcctag

SEQ ID NO: 18370 - DNA, 894 bp, Zea mays
  Peptide Sequence Number=SeqID_61745
atggtggggttctcgtactctgctctggttggttatgttgtagggcatggtgtacccatacccaggggcgctgacaggcgtcaatttcactacaaggcatctgacattggccttcaagtaacctggtttataatcaaacgattttcatttcacataatcccacaattcattgacaaaagaattattggtggtggacagttgtacatgtggggaaagatgaagaatacaggcgatgattggatgtacccgaaacctgtgatggatttaagtggttggaacattcgctgcatggcttctggtaacatgcaccacattgttggtgctgatgattcttgcataagctggggtgtcgcccagaatggagagcttggttatgggcctaacgggcagaaatcatcagcaaatcccaaaaaggtggacattcttgagggcatgcatgttacaagtgtcggctgtggatttggactgtctctgattgttgtggacagagcaaatgttggtgatcgacttggtcagctggaaatttatgatggtgacaccggtgctgaagtagagaaagtggaggtgcaagtaaccaagaaggcatctgccagcaccaactcacgtgccaacaagcgcaagaaaacgaaggatgtttctgaatctgaatccgaagaggatgatgatgatgatgaggatgaaagcggagacgatgaaaatggtggtgtagaagagtcaaagggcaggcgtggccgtaaacccgctaatagagggagaggcaggggaggcaaaaaggcgacccctgaggcaaagccatctggaaggggcagaggccgccccaagaaaaccgagagttctgctcagaaagccggaggaacctcgggcagaggaaaaagaggacggccacgcaagtga

SEQ ID NO: 18371 - DNA, 366 bp, Zea mays
  Peptide Sequence Number=SeqID_61746
atgtccatcgtcctgggcgccgagccgccgacccagaacgcgctgggcgctggccccatttgcggcagcgtccgaggagagctctgccctgtcccagtggccactggccagtgtccagtgcaccccctgcagtgcacctgcccgcgagcgcgagtgaggacgggcacgggcgggcggaggagccgtctcgtcacgccttggcgtggcgtggcgcggccgcgggtgacgcgcaacgcgacgaccgggcggcggtctggtactgggaggacagggaaggcagaggaggagtggtactcgcgctcagctctcgcggtctcgcaggacggacggacggggaggaccgtggaccttcttcctcgtgcctga

SEQ ID NO: 18372 - DNA, 3615 bp, Zea mays
  Peptide Sequence Number=SeqID_61747
atggcctcctcgcaggagaaggccacgtcgggtgtcctgaggaacgcggcggcgctgctcgacgaaatgcagctcatgggagaaacgcagggtgcgaagaaggtgatcaactccgagctgtggcacgcgtgcgcggggccgctagtgtgcttgccgcagcgcgggagcctcgtctactacttcccgcagggccacagcgagcaggttgctgctaccactaaaaagataccgaattctcgcatcccaaactacccgagtctcccgccgcagctgctatgccaagtccacaacatcactttgcatgccgacaaagaaactgatgagatttactgccagatgaccctgcaaccgttacactcggaaacagacgtcttcccaattccaactcttggtgcctataccaaaagcaagcaccccaccgaatacttctgcaaaaatctaaccgcgagcgatacaagtacgcatggcggcttctcagtgccgcggagagctgccgagaagctgtttccgcaactggtacgagcttcagctcagacccgtgttttcaacccccaggattactcaatgcagcctcctaatcaggagcttatcgtccgagatttgcatgataacatgtggacgttccgtcacatttatcgtggccagccaaagcgacatcttctaacaactggatggagcctttttgttggggcgaaacggcttaaagctggagactctgtcttatttatcagggatgagaagtcacagctccttgtcggtgttaggagggccacccgacaacaaccggctttgtcttcatccgtcctgtctactgacagtatgcacataggcgttcttgctgcagcagctcatgcagcatcaagtggtggctcatttactatttactacaatcctcggacaagcccgtcgccatttgtgattcctcttgcgaggtacaataaggccacgtatctgcaaccatctgttggaatgaggttcgcgatgatgtttgagacggaggagtcaagcaagcgcagatgcacaggtgctattgtgggaattagcgactatgacccgatgcgatggccaaactcaaagtggcgcaacttgcaggtagaatgggatgaacatgggtatggagaaagacctgaaagagttagcatatgggatatcgaaactccagagaacatggttttctcttctcctttgaattcgaagcggcaatgtcttcctagctatggagttccgggcctacaaattggatctgtaaatatgtcatcaattccaagggcacaaggaaatcctatcggtaacttgcagcacatgccagggatgggctcagaattggctctactgcttctcaatcaatctggccagaacatcggaagtccaatcgcttgtcaacaatcatcattttccagcattattcaaaatgctaagcacagctatttccctccaaagacgtttggtgcttccactgcttcaatgaagcaagaaagcatgccttcgactgaagcccagccacagttgaatgctcttggtattcagagaagtgatcgagtaagctgtgaagttcagacagctagtgattcaaatcctgcacaggagatgagtgttaaaccaagagcaccaagaagcacagattcacactcaagccaaagcatttcggatcaaaacagcaagggtgagcctagaacaaaaactcgaaggagcaagaagagctcgtatcagaaaaccatttcagataaatctgagctttgttcagtaccttctcagatttgtgacgacaagaagcatggttcagagccaagactggctgactgtgaagccgaacaagctacctgtgggaataacgaagaatcatctggagcacttacacatggtgattttgctggagagctccaagttcagcagcaggttgaacagcatgaactacttgcgccaccaaagatagaatcatcaaagtcacctgatggagggaagtccgtcagttcgttcccaaaccaagggtgtatcccacagttctttgagggtctggactggatgattccaccttcctattaccaagactccaatggcatccaatcagttaccgcgtcggataacatttttaatccatctgaaggtataccttccaccatgaacgctgatgccttggatgcgtttcaaacatcttgcctttctgagtgctttcctagctccattcaagagttcatcggcagtccggatataaacacactggcatttatgtcgcctgagatgcaacaattggatgccggcagcaacttgccgagcacatccaactcctatgtgcagatgagtttctcggaggagagccacagcgcatccttgagtggccttcacatggaagccatccatataaacagctcgtcatgctctcagccactggcgacggggagcttcgatgcaggggcgttcccgaaactgtcaaacataagagaatgccaacccttgcctctgcaagagatccacaccagttccatgggaacaccttcatgcagtatggacgcggcggcagagtacggcacggatagaagtgcgaagcaaatgaaaccaccggtccggacctatacaaaggttcagaagttaggatcagttggaagatgtattgacgttacacggttcagagattaccatgagttgaggtcagccattgcgtgcatgtttggactccaggggaagctggaacatcctggcagttcagattggaagcttgtttatgtcgactacgagaacgatgttcttctcgttggagacgatccatgggaggagttcatcaactgtgtgagatgcatccggatcttatcaccttcggaagtacagcagatgagcgagaacggcgtgcatgtggggcattaccttagccttccggatgagctggctcgacaacagaccattccattcatagtgagggggcggtacatcgtattatcgatgatgggttgcaagggccctacacccatagagctagacctcaaaactgtctacgtgggaagaccagctcagcgaacacaaggttctgtcccagaaaaccaattccgccgcccacgtccgggcctgcacggcgggaggttgacggagatactagagccgctgccggagccgagggagacgtccacggcaccaacccgagaagacgaacaccgcgcagcagggagcccagagaccaggccacggtggacagagaccagagaatcaacgagcagcaccaaggcacggcgtcaacaacaccacaccaccaccaccgagaacaacacacaaccgacgatacggacgagaccaggacacccggaatcgagcagatcgaaagatttctcgccggaacagtggataggatggaaccgtagagccctctgtctctgcgtttccttaagagacagagaacagaggaaggggatccacttaaggagccgagggaaagtccgttaccgagaagagggtagagagctgcggtcgttcaacgaggaagcgaagaaaacggagctacagttgccgccgccgcccacctccgctcagccatctgctcctttccgtctctgcggtttcttaccgaggcaactagtgcccaggccgtgctgtccgctggctgggccgctcggcctccgggccttgtag

SEQ ID NO: 18373 - DNA, 345 bp, Zea mays
  Peptide Sequence Number=SeqID_61748
atgaggaaagtgggctcgtgctcacgaaccatacttggctccggatgtgtgcagtgtgctcttagcggcgtcggtcagaccatccgcctctctccttccagcatcaaggatctagatgctgtggagcggtctgaggggtggcgtttcacggaccgtcatgacgctgcgctccagctaaacctactccagctccacgacgctgaccagatcatcttatgcaattatttgtgtgctgtcgcaacacacaagtatttgaatctcacggcttggttagctaccatatcactcgctatctacaaggcttttgatcatctcgacatgttaaagaagaagaaatgcttctag

SEQ ID NO: 18374 - DNA, 2208 bp, Zea mays
  Peptide Sequence Number=SeqID_61749
atgcagctttacaacgcgacgacagtatgtttgggcctcggcggccgcaaaaaacatatgcatactacaggtgaaccgatcctgcaggttcagacgtcagcagggggagcagtagcaccctcgacgtcaactccaccatcggcgaagtccgaccgagccttggacggcaacacgggcggaggatctccgctccgaaggacgacgtcagcaccacgcccgagccatcgccgccagggtctcctccaggaacccggcccgagcagacggctcgaccggccgccccgaagcctcagccagctgtcccccgaggacaccagcccggctcgtggcctcgacaacttgactccggtgttggtcccgccaggggacgacccggccaagccccggccgacgaagcttccttttttgagccaactctgcctctgtccgtgctggcaccgctgcctccgtctccggctcatcgcagagcggccgagggttcctttaactaagcaagagaagcttctggtggcaaggccaactgagccgggggactcctacgcctccgggatacggatacctcactcgtcaccttccgcacgaggcaactcccgcttggttaagcgccgcaatgaacatacgccagcactcaaggtgccattacaaacgggactccggttccgttcccgcgggtatgaacaacctccataccaggaggcccgtgggacgacgaattccaagcggctcaccgccgcccgctccgacagctgcatcaacggctttcgggcaaacgctgcggcggaaaggctctcgcccacaaaggacgagaaccagccattcaagccagggggacggaggtccagggctgcaggcggagttggcgatctcgtcggcagagaaaccttctccggctgccaccacctcagcaccgacggcggtgtccaccagcccaccaacaccgcaccagcgagcgacggccgccccaaagcgcaccggcaggtcctcactcccgtcctcgccacgaaagcggggacagaggacggaatgttgcatcctagctgggcagcaacagttcgccttccccggcatggctggagggcgcctcctccgcagagctgggggatggtttccaccctcagaagctggaagaaggagagggacgccagcccacgccgaggcaggccccggctcgcctcgccctccgccccagcaaggatgatgaagatccttgaagctgagggtggggcaaaggccgcagcccggctcgcttctccccaccatcgaactggtggtcaccgtcttgggacagaagaagccaaaccgccgcgcgcggagcgtgtaaccgcccagcggttacaagcattcctccgtcttcgcccaaaccagcgggtgaaagggcggaccgccatgcaggcggcatgcaactgcaccaagggggcgcaccctttcgacttcgacgcgtccagcctggaggcccaggcccacacgtcatgtaaccggcgcgctgattactacgtgcgagaaactgcaccgccactcgcgccagtaccgcggcttctcgactgcggaaccggtgccgtgactcgaggcgaccccgcgcatggcccaacagtgccaaccgggcacatcggtcacgggtcagtcagccgcgggagaaggcgcgacgatcgatatggccaaaagtgggccggcagtaatggtggcggcaggcgggcggaagcagcagtcaaatcgcctgcaggctcacgtcccctcctgggacagcgagagagccctctcccacggcgtgaagacgacgcgcccgtgttccgttccttgaacggcccgcgcacgcacaacggctgccccgccaaccactcgtcccgtcgcattaactctgcggcaggacagggaccgggaaaggggatacttcgaaagggatccttctccgcgaaggaagcgggccccgagcccccctaccgatcagaggttcgaaggctggcccctcggaagggttcaacagccgtctcagagcattcgggctccgcgcccactactggtcagaggctggcccccgaagggttcgacagccgcctcagaacacgcagagcgagggatgactctgggtacgttcgatacacaaccaaggctcgggctacgctcccgaggctcgggggctgctctcgcaaacccggctctggccaaaccgttgacagcgtcaacatactagcccgagaacttgggacctga

SEQ ID NO: 18375 - DNA, 216 bp, Zea mays
  Peptide Sequence Number=SeqID_61750
atgccgtcgcaagtaaatgtaaagagttctgaagaggttgctggaatgtggaagcactccatcaaagtttcttatgaagcaacaaaggcagcatttcctggtggtgaagttatcgcacatcttgatcacaacgcgcctgcttccagcaaagtttcagagaaggaaaagatggaatgtaactcaaattttggtggccgcacaagtgtggagacttga

SEQ ID NO: 18376 - DNA, 1101 bp, Zea mays
  Peptide Sequence Number=SeqID_61751
atggtgtccgaccaggagatcgccagctgcgtcgagtccgtcctccgaggctccgccggcgggcccggggaggtctcgctcaccgccgtgctgcagcaggcggaggccacgctcggcgtcgacctctcccacaaggcgggctttatccgcgaccagatggacctcttcttcggcccgcgcctccagccgcagccgctgaccacgccacagctggcgcctcccccgcctcaggccgtcgttgcccccgcggacgccgtgcctcagcctcagcctcagcatcaggttctgccgcaggcaccgccttcggctcagcagatgcagccgcagcagctcgcgccgcttcagccgcagctcatgttccagaccattcaccagctccccgccatctctcccgtccctgtggtctccgcgccgccggccatggcgttctacccgccgccgccgctcgccttccgctacaccaccggcctcgctggggccgccacgggtgggaccgtctccttccagcagccagcccctggggctgggggcactgcttcccccaccgctgcaccgcaggtcgccggcgacaacaaggaaagttcttctaagcgaaaaagaggtggacctggtggtttaaataaagtttgcgcaatttcacctgaacttcagaccattgttggtgagactgccatgtcaagaactcagattgtgaagcagctctgggcatatatcaggcagaacaatcttcaagatcctgatgacaaaaggaagattatttgcaatgacgaacttcgtgtggtttttgaaactgacaacaccgacatttcagtcctggaatttgctcaagtgcttcctaatgacattgcagaaggtcaacttcatgaagtaaaaagaatgaaggctcccaccatgtctcctcaacctggacgttccattgatcaaccctccatagttatttctgacgcactagcaaagttcattggaacagatggaacatttcctcacgattttgccctgaaatatctgtgggattacataaaagcaaaccaacttgaggctgcaatggctgatgcagagcgttgtgggtggcattgtgtagatatttgtttattggactag

SEQ ID NO: 18377 - DNA, 186 bp, Zea mays
  Peptide Sequence Number=SeqID_61752
aggtcagagctctgctctactgctctgaagcgcatggaagatggcaatgttgaagaagcttgcgtaagtgatatagatccaataccggtcacagggaacattgttgagttgtatgatgagggagtcgatatccctatggtcgggggcagtgggataatccccacacttatgaagtgtctgatgtaa

SEQ ID NO: 18378 - DNA, 2370 bp, Zea mays
  Peptide Sequence Number=SeqID_61753
atgcagcggcgagcagatcagctcgcacccagcgccagcggtggacgaggacgacgccgtcttcatcgggctggcctccgagctgaaggaggaaggcacgaggctattccagaccagggactacgaggggggcggcggttcaagttcgacaaggcgatcaagctgttgccgcagggccacaacgacgtggccttcctccactgcaacatcgcggcatgctacatgcacatgaacccccgagggagtaccaccgtgccatcgacgagtgcaactcggcgctggatgcgtcgccggcgtacacgaagggcgctgctcaagagggctcggtgtttcgaggcactggataggctagatctagcttgtagggacgcggagaaggctctgagcctggagccgaacaacgtgacggcgtcggagctgtacgagagcatcaaggaggtgatgcagatggaggaggacgtgtcgtcgctggagagacaggttgcgtcgtcgtcggtccaccacgagcctgctgctgccatcagtagtctcgccaaggagaggatacagaggagggtgtcgcggaaatttaggaactcaatcgtggaggaggaggtgtgggagatgattcagggggaggaagtggacgacgatcatgggaataacgacgatggccaagaggaccatgctgggagtaacgaggatgatggcgacaaagagagacacagcggcagtagcacggggcaccaccctgaagagaaagagacgaaaatcttcaagaacgccgccgagcagtacagcaagcagtgtggtgccagtgccacgaacgaagctgcagggcagcactctccggggaggaggcatggccaagatgagcatgagaagcatctcaacgagatcctggtgaaaggcatccagatgcctgctgagaagggaaagcacacggcgacgacgacggcacagaataatcaagccagcgtcgtggagaggcgtaataagaagcattttgaggtgggcagccatagcaggcatacgacgacgcaggaaagatacgagagatacgccaacgccagcgccagcctgccggggaagcactccttactggacgaaaagtacatgccgccagaacggcaaatcaccatcaggacatcgaactacggtggtgctagagaaaagcatccaaaactatacgccggcagcagcagcagggagaaccatgaggctgccagagaggtggtgaagaagaagttcaagttcgttcacggggacgacataaggatcgtcctaatccccgagaactgcagcctgttgcaggtgatggacatcgcccggtacaagtacaacccgcacctcaagtcgttccttctcaagttcatggacaaggagggggacctggtgaccatcacctccaccgaagatctgaggtgggtggaggacctctacccgcaggtgcccgtccggctgcacatcaaggaggtgagccccgagcgggagatcaccagggacctggtgatgccccagcagctgtcctgtctccctgagcgagagccgaacctgaaccactacagcgcccacactacctccgacgagtacgagtgcgggagctcgaggagggacgacgagcggagtcaccctccttgcgccaccgacgagtggatggacacctccagggagtccatactcgcccaggtgaaggccgcgtacgagtgggcctgcaccgagtacgtcaaggccggcaggaagttcgaggactccatagacgtgaagcccgacttctacgagggcctcatcgcgctcgggcagcagcagttcgagcaggccaagctctcgtggcgctacgccgacacgtgcaaggtggacatgggaaccgaggtgctggagctcttcaaccacgctgaagacaacatggagaaggggatggagatgtgggaagggatcgagtatctgcgagtcaaagggctgtccaagtcgaggaaggggaaggcggccgcggtggtggacaagctggtggccctcagtgagcagggaaaagatctgtcgccggatgaagcctttgagcaggcatccaacatgcgctcgcagctcaacatctcgtggggcaccattctctacgaacgctccgttgtggaattcaagctggggctttctagctgggaggaaagccttcaggaggccattgagaagtttaagaccggaggcgcttccgtagcggacatcagcgtcatggtgaagaaccactgtgtcaacggaaacaatcaagaaggattaagcttcaacatcgatgagatagtgcaggcatggaatgaaatgtacgatgcgaaaaagttaaaaaacggtacggttaatctattctctcatctatcagcaatagtttgtgcacttattccttaa

SEQ ID NO: 18379 - DNA, 1629 bp, Zea mays
  Peptide Sequence Number=SeqID_61754
atggacatggcactgttggactgcgtgtttcctgaagagccgcttcctgtctataaaaggttatctggcccgcgtcaagtagaccgcgcgccgccaccgacggtacgtagcaatgtcttcctcctcatctgctgcaagtgcgtcgtcggtggatccgtcgaccgaggataccctgagcgatttggcggtgatggagttatagccgggccacacggtggagttcggcacctcgaggatttcctcggttcacgtgtaggagatgctgcagctgggaggtcttgcagaggttcaaggttcgatgtccaggtccaccagttgacacctaacgacgtggttgccctggcaaagtatgtatgggcggtgacttcgtacggcggtcagccgtccgtagaggtcttcgtaaagaactattgtctccattggcaaaagaggaaaattggaaataagattgcacaatttggatcgtgcactttcacgccgaggaacggaaagacttcgacggaagttgtggaaatagttccttgcgctcggaataagtggggcaactggtgggactattggttttatgtttcgggaggggaagtcgaggacctcccagggctccctgcggtcgtcatgtgctcccactgttatgtggcattcccatcgtttgaggtggcggaggacgatgaggacgaaggggccctccggtgtgctgcccgcatgagtagcaggcgtgatttggttgaggaattcatcggttatggattggtgcgaagtcctaccttcgctttagatttgtgcggccggaacccagccgcgttcgtgcgtgaagtagaggatggagcagtgaggattgtggggcgatatgtgccgaggacggaggctttgcggagttgggatattcgtggttccaatgttcttttgaaccgtatcttccagttaaaccgtctgccatatggcgctgaggggttgggggtctccgatcgttttgctgtggatttaatgggaacttgggtggccctcgggggaaggatctcttcgctcgagctctgggaatctttggcacgaatgctggaggttaccgggggtcgctggccgaggaatgttccgatcccccgggcggccgacgaggacatgtttacgtctcgtttggcccgtgagatgaagatttttccttatggacggaatattgctgctgttgtatcggcagtgatggacaaggatcgccaagatgcaacgcggaagtgtcgggcgttcactagggtcagggaccctagtcgcgaggttaagagggtgaggggaatcgcgaagtccgccgcccccggcagcagcaaaccaccgctagctgtgaagccagccgtctccgggcccagcaaatcttcatcgggtgcgagggctgtcgcttccagctcgagcaagccgccttcggctgagcccacgaaggagcaagggccaccgtctccgctgtgcaccaccgaggcggcggtgggtggggccgacctcgccatggacatctgcgtggatgactaccgcgtgggtggtgtcatgatgttcgatgcccacacgagctggggacttgttggtgttaccatggctagggcacaccttgacactaaggactgtgagatatatgaggtaaaggcttag

SEQ ID NO: 18380 - DNA, 1398 bp, Zea mays
  Peptide Sequence Number=SeqID_61755
atggaagaaacacacctccacgtgttcgacgcttcctgcccgcgccaaagcacgctcgcgcgcgcccccgcatgcccagcgccgcgcccgagccaagccagcgccatggcccgcgcccgcgcctataaaaccctcccaggcttcgattgtacccttccgcgcaccctcaaacctcaccggagtccagctcgccgccgtttgcccgtgcgcagcgtgtccgcggccgcccaatccctctgccaccgtagaccggcccgtagagccattcccaaccccatccagccctcggagaagactgtgcacacctctgtgaagcttcccgagcaaggaatcggagtttgcttcgccggagaggccagtccacgctcgccagagctctcaaccccgccggagtacgtggaccggtcgctacgttaccccgtgcaccatgcccttggattgaaccagttcgccgtagtttggccgagtctccccgagccaaccccacccttcgccggacctccctcgccgccgcagattgccctcctcacgcgacctgagacgaggtctcccattccggttatggtggttacaagtgcggtcactgcacgacggccagtcggggtcagtgaggcattgtacgccaaggcgttccgccacattggacaagattatggtgcagggtcgaatgctgggcaactgactgttgtcccggctccggtggcggccgtgctggctacggcggcggccgaggcgaaggctgaagcatgcaacgcaacagctaaagcatgtaagtcgtcttggacttcgtcagtttgttgtgtttatgtggttgcgaatttgatggacctttcatggcaggcggctgccttcgccgatcatgttgcgtcgggcgccctaacctcggagttcactgccgagaggcaacgactcgagggcaggattgagcgcctccgggctcaccatacggaagctgtgcgggacaagtcagctgcggaaaacaagagccgcaggctgatggagaagttggcggctacggaggccgagaaggaggaccttagccaggtcgaccggacgcatgcacaactcgtggacgcgtactgggagcttggtgcgcggaccgctccctttgatgcgttcggtaaggaggtgggcctccacttcctcggatggctgcaggaggagttggaggtgctcccaatgattgtgacgggcctcatgtccttcgcctcactcatcacctgcgaaggggccgtgaatgccctgtcccgcgagggatgcgggcacttcgaagtgttcaaccaatcagatgaagacttcgagcacagaatcttccaggttgaggacccggtgcagaagcggttggccgaggcactttatgatagaatgtgggcccctcatggccgtgatactgtctag

SEQ ID NO: 18381 - DNA, 252 bp, Zea mays
  Peptide Sequence Number=SeqID_61756
atggatcttatcttcgggctcttgcatctgtttgaaggccttagcaaatatgatattcgctgcactgcctatgtcaaccagaacattgtggaccacaaatactttgatgacacaagaaatgaccatagcatcattgtgaggctaatccttgagctgaaggtcctcttgagagagaagctggctctgaacatgaaccgtctgttattgggactaccagcttcggagccaaagcagctccagcttggttgttga

SEQ ID NO: 18382 - DNA, 450 bp, Zea mays
  Peptide Sequence Number=SeqID_61757
atgaagctcacagatccaagaattgagctctacctcgccggagatatcagatcaacgtcgctggacttcaccagatcgccggcgtacgtagaccgagctccacgttcaaaaatacttaataagaagcacaatagggagaaaatgggaattttgggagaacaaggttatgtacaactaaaaccttctaagaatcctataaaacctaaaggtgtaattaaaaattactgtaatctcgatgatggagaatatgtcctcattccggagcaaggagttgctcaggaggtagcccaggagccagcaccagatcctgccatcgaggatctgtctgccccagctttggaaggttctctggaggacatggttgatagagtgacttggccgtccatcttgccaccgggttggacaatcgagtgggaccctacctcagcagaggaggagcatgaggagtga

SEQ ID NO: 18383 - DNA, 525 bp, Zea mays
  Peptide Sequence Number=SeqID_61758
atgggccttctccacgcgcaagtggtgctccgcttccgactcctctcggatgctccccggcgtcccactatcgagcttctagccaaaatgatgcaggcctcgttccctctggtacacagtggcggccgtgacaaaaactcggttgtcacggtctcgcaagactcacgccccacttggtacaattacaatgactcacataagagccaaggggttatggctcccacaccttcaaatgaccggttgggtgaggtatatataggccacaactcaaaactagccattgtagaaaagctggtgcttctctacggcacaccggacactccggtggtagggactggacagttctgtgccctgtccgccttgcaccggaaagtctggtgccacaccggacagtccggctctcctccaaagtgccaccaggaagtagctgttggctactgttccctggtgcaccggacagtccggtgctctcagcagacggctcaccagtggcaacactttcttgatgtcttggactttgcttga

SEQ ID NO: 18384 - DNA, 429 bp, Zea mays
  Peptide Sequence Number=SeqID_61759
atgcggtcgggggcggaggcggcgcttgggcgcggcggcgaccctcgaggaggcagcgacgacgctccgagaggcggcggcggcggcgtttgtgagcgcgatgggaggcccggcggcgatgtgggcggtgtggggcacggcggagacgagcgagggcgggcacggccgcgacggacgggcggccgggctcgcggcggcgctgatgggcgcgcggcggtggggcagctgggcgctcggcgccgcgagagggcgggcggcgccggggcggccgggtgcgcgacgtggatgggcggcgctccgaggggcggcgtcgggctcggccgggaaggcacgccggcggtgaggggcggcggcgcggcggcggttagaggcggtgacggtttagaggcggtgccgagaatagggcggcggctgcgtctagtagtttga

SEQ ID NO: 18385 - DNA, 468 bp, Zea mays
  Peptide Sequence Number=SeqID_61760
ggggtgtccctccccccggtggagaagatgatcacgtcctcctccgagccgtggaacccgtccacgggcgacaccactccccaggcggatcgccttcctcgtgtcaatcgactctgcgcacaagttcagcagatcagctcgacggatcgaacggcgcttagcgcttgcgtgaagggcatgctcgccaacgcagatagagcggagcgcagggggcattgggcggcggcggcggagctcaactgcaactccgcacctgtgaggtgccgtgcatccattctgattgttgtccaccgtggcctggtgcttgggctccctgctgcgcggtgttcctcttctcgggctggtgccgaggacgtctccctcggctccggcagcggctccagtatctccgtcaacctcccgccgtgcagcgttggagggctgtctattgcagcaacccgctattttgagagcaatattttaatataa

SEQ ID NO: 18386 - DNA, 2040 bp, Zea mays
  Peptide Sequence Number=SeqID_61761
atgtatgtggcggagacggtgggccaccatgaggatgaggagaaggagggtcagaaagaggatgaggagcagcatacgctactggagttcatggccgcgtcgttcccagacaagatggagacagtcctcgaccgggccctgctgccggtcgtccaagggttcgatggccaagaagtgccctgcggctccgacggcggctgcgcgcatgtctcggaacgcagctgccttgtctctgctgtgggggtcgtgctcagctgcacgcagggagtgccgcttgagaggatcagcatggcggatgcggccaccgagttgcgctccatcagggacgcttcaccgtgcccccgcccgcgatgccaaaccgcctctgctccccgctgcgcgctgccccgtgatacccgccgacaaactctcgtgcgatacccgtacgcgtgctccgccggtagcaccgccccctgccttctcgcctacctccccgccctcctcctgctatcgctcctccccgctgtcgcctccgtctacaccaagcgcaacactctcaccttcccacgcgtcctcttcgttcctctcgggcctactccgccccagcgccccctccccgaccgcctacctctcaacccttgcccccgcccagtgcagcagccggcctgctccgtgcgcctcatctggggcctccgagacggcaagacgaagaccatcagcgcgctcctgtggtccatgctgatcgagaaccagaggacggtgacctgcgccccgactaacaccgctgtggcggaggtcgcgtcacgggtccttggtgttatcgaagagtccggcggcggcggtgctgcaacgaagtgtttctttggcgatgtcgtgctcttcggcaacgaggacaggatggctgtggaccggaaactagaaaatatcttcttagacacgcgtgttcgccgtctgcgtcagtgcttgatgccaatcacagggtggacaaagtccctgagctccatgattgcacttcaggaggatccgatggttccgtatgaaaggtatgatgaggccatacaaggttgtgtattggatttggtttcagaagaaatcaagctaagaaatgtaatagttgtctgttctttacggacgatggatgacaaaaaagttaaggagatacagaaagatttactggaagtgcagaaaaaagcacgagaggtagagcgagagaaaatatcattcgagacctacttccagagtaactacaagaagctcgctaaggatttgcgcacttgtgtggagactttcgtcgatgatcttcccagatccgcaacatcagaagaaaacttttgctgcatggcggaggtgctgctcttgctcgatgcgtttggagtgctcgtgcagtctgaaccagtcgaacagcttcaagcgctgttcaaaaggcactccgatgttaggttccggctgagggaggcgatatcctcgtgtcttcgcaagctatggctcctttcttctaactttaagcttcccgaaatgtatgacagccgaacgatcgatctagagttcttgcttcagaatgctaagatcgtgctctgtacagcttcgagctcgtaccgcctgctctacatgcagaaggcccagcccttggaggtccctgtcgtggacgaggccgcgcaacttaaggagtgcgagtcactgatacccctgcagctgcctggcgtccgtcacgctgttctcatcgatgatgagtacctgcttcccgcattggtcaaaagcaaggtcgctgaattctcgagttcagataatggtcaagatggtgctactttactgatcctgctcttggctaacgagaaggagaaggccactgctgttgatgatattggctacggtcttgacaaaagggcaccaattcagtgttactcacacaatctttgcttatttcacaccaggtcatcttctcagattctcagattgggagacatagcttctaaagacgcgggagaagaaaaggcgtgttcagtcgtatgtgtcttccgaataagcgtgttcatgggccagagcgtgccaaatgagttctag

SEQ ID NO: 18387 - DNA, 201 bp, Zea mays
  Peptide Sequence Number=SeqID_61762
atggcggcagatcgtggacgacgcaaggagaggggctgcttcttggacgccaaggacgaccaggacctcgcatgcgccataatcaaggcctccatcgagctggacggagtggagaatctactcaagtttgacatgctgcggatcggcggctccagaagtgtacccgcgctctactcgtcaattgttctaacgtttcattag

SEQ ID NO: 18388 - DNA, 644 bp, Zea mays
  Peptide Sequence Number=SeqID_61763
atgagactgaggtacgaccaccttgctgcggatcccagactttttgaccttcagcgtgctacagcggcacaggtacgtaggttcagatacgtacccgtggagtcttggttaccggctcagagggaccctgctgtagttgaccttttcagcacccgtattcaggagtccttttttagagctcagatgtctgcccagattgctctgtgtgcgcaccggcttttggaccttccagcttttctgttagccgccggtgctgactctgaggtgcacctcacatatctgcctggccttctgactcttttgactaccagcggcagcttatgctacgacacctctgatcctcctagtcgccctcacggcggtgtggctccgggtacagctcacgtcgcggctctgttccacctgcccttctcagatgggtcgcgacgctcaccggcagatttcactacagcagcaaagttcctatttgagcttatgagacggactcttctgccgcgtatggggtacagggaggctaccacacatatccagctctggctccttggtgccctggtctctcactccgagtttgacgtcgtggatttccttatttgtgagatcgaggacactgtattggatggtctgcgtgctcgacgccagctacc

SEQ ID NO: 18389 - DNA, 219 bp, Zea mays
  Peptide Sequence Number=SeqID_61764
atggagaagtgcaaaccaatcaagacccccatgccaacaaatggacatctcgacttagatgagggagatcctctcactggcgaccaccgtgcaccggcgtccaccgtgctccggcgacctcctgcgctcatcccttctccctctgtgaccttgactgcccgtgtgccgtctcctgtcctgctcgtgcagcggcagcagccgctgcataggccgagctag

SEQ ID NO: 18390 - DNA, 417 bp, Zea mays
  Peptide Sequence Number=SeqID_61765
atgggcaagaacaacaagcgcaagcgtgagccgactcctccatccgaggacttcggtgactcggagtactcagaggaagagttctcctctgagtccgaggggtccccggctcccattcctctgcgtgagtcgtctgattcccaggggcttggggcggaggtctggacttacatccgggccgtcgagcgctctgggctcgagggctcggatgagtcggagtactcctctgacgaggaggactcgtccgaggaggacagcggcggcgatggcgaggacgacgacgacgacgacgaaggcggtggcggcggtgacggcgacggcggcggcaggggcggcagcagcggcagcaaggatggcgacgacggcggcagcggcggcagcgacagcagcaagggcagcaacaaggccagtggctaa

SEQ ID NO: 18391 - DNA, 216 bp, Zea mays
  Peptide Sequence Number=SeqID_61766
atgcctgttgtcttcaaggttcaagcatttttggctgaaagtccactcgacagtttcctgagttcccttgggcttgagaagtactcaattaccttccaggcagaagaggttgacatggcagccctaaggcatatgacggacagtgatctaaaagctttgggcattccaatgggtcctcggaagaagattatccttgccttggaatcgagagcataa

SEQ ID NO: 18392 - DNA, 222 bp, Zea mays
  Peptide Sequence Number=SeqID_61767
atggattcgtggcttctaccgtggcggtcattcccggcgatcaacggagagtcactaaggcttacggcgatgcggtgggagatactcaggcacgtggcacaaggccggaaggcggcggttcactggcgagcctatcgctccagccgcaaagcagatgggaaggcaggggaggccgtcggagtggtgtccagctcaccagcggttacaattttgatgtggtga

SEQ ID NO: 18393 - DNA, 243 bp, Zea mays
  Peptide Sequence Number=SeqID_61768
atggcttcgcttgctgagggaaaaagaaaaatcacggccgggacatatgaatggaaagccaagacgaagacattccgagatacttacccgctccgggccatgatccaccgtgcctggggggaagtctcttggatcccggcccccgaaaccgctgccaaggtccgcttcgccggcaacttcggcaccacccttgctttggacgcccggggggcagattgcccaggcactgtcacggtgacctga

SEQ ID NO: 18394 - DNA, 222 bp, Zea mays
  Peptide Sequence Number=SeqID_61769
atggccaccgagcaccccaactccttctcagttttccagcgcctgcttccctgctcggattcagggccgcgcgcacgaatccctgctcaccagcgtgctctagattcagccatggagtgttccctgcgtctcctcgccggatctttttccagctcgtgcaggggaaaagttagagctgaaagacatcgtccatttcatgatttcaagccggatttaattatg

SEQ ID NO: 18395 - DNA, 492 bp, Zea mays
  Peptide Sequence Number=SeqID_61770
atgaacaggcttgggccgaaaccagcccaggtcggcccaacagcagcagaatcgcgcccgcgcccgcgcgcgcgatggcggctttgcagaaaagccctcgaggttttatctaacaggaagcgggttcggttactatttcctggggtcactgacatttcacaaaaaggtcctctggtttctgtctattctgtgtttcacgtcctcgacggcgttcaagcgcggccgtgctccggcgagcaactacgccggccgattgaggctaagaccggtgctaatctttggctgagaccaaatccgagtccccatgaacgttttccccaacttaattgcactattggtggactagggagctccggccacggtaaccgtgcggatgaattcaagaactacgcgttcccggtgatgggtggtcacacagttcaaattgatgacttgataagcatcacgaagctatgcaagtgcttaaacaagaaagcaggggacgggggctga

SEQ ID NO: 18396 - DNA, 417 bp, Zea mays
  Peptide Sequence Number=SeqID_61771
atggcggcttgcagaaaagccctcgaggttttatctaacaggaagcgggttcggttactatttcctggggtcactgacatttcacaaaaaggtcctctggtttctgtctattccatgtttcacgtcctcgacggcgttcaagcgcggccgtgctccggcgagcaactatgccggccgattgacgctaagaccggtgctaatctttggctgagaccaaatccgagtccccatgaacgttttccccaacttaattgcactattggtggactagggagctccggccacggtaaccgtgcggatgaattcaagaactacgcgttcccggtgatgggtggtcacacagttcaaattgatgacttgataagcatcacgaagctatgcaagtgcttaaacaagaaagcaggggacgggggctga

SEQ ID NO: 18397 - DNA, 489 bp, Zea mays
  Peptide Sequence Number=SeqID_61772
atgggcaagaacaataagcgcaagcgtgagccaactcctccatcggaggagtttggtgactcggagtacttagaggaggagttctcctctgagtctgaggggtctccggctcccatccccctgcgtgagtcgtctgacgactcagacgactcccaggggctcgcggcggaggtctggacgtacatccgggccgtcgagcgcttcgggctcgagggctcggatgagtcggagtactcctcggatgaggaggactcggacggcggcggcgaggacgaggacgacgacgacgacgacaacaacaacggcagtggcgacggtgacggtgacgacagcggcaagggcggcggcggcggcagcaaggacggtgacggcggcagcagcaggggcagcaaccggggcggcagcagcaggggcagcaccaggggcggcagcagcaggggcagcaccaggggcggcagcggcggcggcagcaacagggccagtggctag

SEQ ID NO: 18398 - DNA, 967 bp, Zea mays
  Peptide Sequence Number=SeqID_61773
cgagtctgcggccgcccactccctctgccaccgtagaccggccagtggagccattcccaactctgtccagccctcggagaagattgtgcacacctccgtgaggctccccgagcgaggaatcggagtttacttcgccggagaggccagtccacgctcgccggagctctcaaccccgccggagtacgtagaccgggtaaaccactccaccatccttcgattccttgtgcacacggtcgctatgttaccccgtgaagctcaccgtgccctcggattgaaccagttcgccgtggtttggccggtatactcgccgccgacgaggacacccgcctgcacgcgtggaccggacgattctggccatctccgacgtcaagccgtacctcgacgtgaccgccagagtctcctcgagccaaccccacccttcgccggacctccctcgccgccggctctccgcaagggtcccggcccgagcggacgcctcagctggccgctccgtagcctcagccagctatcccccgaggacctcagcctggctcatggcctcagcagcgtgactccggggttggtctcgctcgtggatgatctggccaagctccagccgccgctgctgcacttcctcagcctgggaaaccgcctgctcccgggccgacgaagcctctatttcgagccgactccgcctctgtccacaccgacaccgctgcctccggctccagctcatcgtagagcggcagaaggtcctaaaactgagcgagagaagcctcgagcggcaaggccgaccgagccgagggactcctacgcctccgagatacggatacctcactcgtcacctttcgcgcaaggcaactcaccctcggttaagtggaatgaacaacctccacacctgagggcctgcgggacaacaaactccaggtggctcgccggtgaccactgcaccaacagcgcgacaacgacctccgtctcgggcggttag

SEQ ID NO: 18399 - DNA, 318 bp, Zea mays
  Peptide Sequence Number=SeqID_61774
atggaggcacgctttgctcggaagagagtcaagttcccactgcaaaatgcaggcaaagatggtgagtcctccctggcacaacatgagtgtcccaacaagccgttgcgtaaaaatggcaagattacagtcacgacagcaaccaagctgatgccagatgggaaacgaaggcgaaggcttcatgggcaggatgatcctattagcctttctagctatgctgccgacgcgttaagtaccactggtgaggatatgatagagtgtggcggcctcccgaagccgccgcaggtatcattggaattcaatcttcagtttgacaaataa

SEQ ID NO: 18400 - DNA, 309 bp, Zea mays
  Peptide Sequence Number=SeqID_61775
atgcacgacttctgcttcaccatcccctacgggttcgccgtgctggccggcggcgtgctgggctacctccgccgcggcagcaccgcctccctggcggggggcgccggcgccggcgcgctcctcctcctcgcgggcttcgtcagcctcaaggccttccagaagcgccgcaactcctacgtcgccctcgcgctcgagacgccgactgcggcggaggcctcgggcgaagggtggcgtctctgccttcgccccaacatttgccctccgagggaccagttcgacaaagtcacctggtgccgaagacgtcgctag

SEQ ID NO: 18401 - DNA, 1551 bp, Zea mays
  Peptide Sequence Number=SeqID_61776
atggagcagctggtgggagttcaccatcaccaccactcgctctcccctcgggctcctcgcaccccgacccgcccgcagccgcagccgcagccgcacccgctcctccaccatctcccgtccaacaggttccgggatctccactcccagattcacaatcacattcaccccgcggtccccgcggccagcagggtgctccgcgccaccccgcccttcttcctcatcctcctcgccgccgtctacctgcttgcctccgtcaccatcttctccgcccccacgccgctgctccgcctccgattggcctctcccaggccgctgatcctcccgaagcccgcgccaccgccgccgccgcctgcgccggagctctttgatttagacggcgggagtgtccgggtccgcctcaccaatgtcggcgccgccgtcacctcgttcctcgtcccggacaagaacggtgcgggttctctttggtacctgccttctgtttgcttgtgctctacagcggctctgactcttctgtttcacgatgctcggctcgtcttcctcccaggggttctcgctgatgtggtgctcggattcgactcgctggatccgtacctgcttgaatcacattttgccaaactgcattatggtggccagctggcacagctagccaagagtcagcatttagaagtaaatgctttttcattgcttgataggaaccaggaattgaatggaacctcaccttactttggctgcattgttggtcgagttgcaaatagaatcaaggatggaaagttcactctaaatggggtgcagtacaatctgagtatcaacaacccacctaacactcttcatggtgggtttaaagggtttgacaaaactatatgggaagttgccgagtataacaaaggggacaagccctcaatcaccttcaagtattacagtaaagatggagaggaaggtgatgtttctgtcactgcgagatactcgcttctcccaagcgcgacactgaagcttgagatggaagctataccactgaacaaggccacacccatcagcctagcacagcacacctactggaacctggcaggccacagctcaggagacgtgctctcgcactcggtccagatctggggctctcagataaccccggtagaccagacctcaatacctacaggcgagctcatgccagtgactggcacccccttcgattttctgaccgggaccaggatcggaagcaggatcgaccgggtccccggcggttacgatcacaactacatgctcgactccggcgaagtgaggtcaggcctgcggcatgtggcgcacgtcgtggacccgtccagctcgagggccctggacatctgggccgacgcgcctggcgtgcagttctacaccggaaattctcttggtggcgtcgtgggcaaaggaggcgcggtctatgggaagcacgctggcctctgcctcgagacgcagggtttccccaacgctgttaaccagccgaattttccctcggtcgtgtttggccccggtgagaggtacagccatacgatgctgttcgagctctctaccgagtga

SEQ ID NO: 18402 - DNA, 447 bp, Zea mays
  Peptide Sequence Number=SeqID_61777
atggctgtgtacagccaaaaggctgttcggtctggagcaccggactgtccggtggtgcaccggacagtgtccgtaaatgcttattatctatttgatgatgaggaagaagagtttgacactgaagaaagcagtagtgaagatgatggtggcaacgatttccatggagacgatggagatgacagtgatggtagccacgaggatggtggaggtgatgtcggagcatatgatgtcgggggtatccatgctggaacatatgacgctggagcatatggtgctggagtagccattatggaacatataacgctagagcatatggtgttggagcatatggtgttgggggtagccatgcctcccgagattcaagaatgtgaccatacccagatgcttcaaacatgtctaaatattatgactccggttgaatatgtggatacattatcattcacctag

SEQ ID NO: 18403 - DNA, 2288 bp, Zea mays
  Peptide Sequence Number=SeqID_61778
cagccgaccacggagccctcggcagcccgccgccggaccccgtgcagtgctcgtccggcggcggcacggccgactgcaccgtgtcgagcgcctacggcgtgttcccggaccgctccacgtgccgcgcgtccgccgctgtgtacccggcgtcggaggacgagctggtgcgcgccgtggccggcgccgccgcggccgggaccaagatgaaggtggccacccgctactcccacagcatcccgccgctggcgtgccccgggagcggccgcggcgagggcctcgtcatcagtaccaggcggctcgaccgcgtcgtgtccgtggacccggcggcggggcgcgtcacggtggagagcggcgtcacgctgcgagacctcgtcgaggaggccgccaaggccgggctcgcgctgccctacgagccctactggtgggggctcaccgtcggcggcatgctcggcacgggcgcgcacggcagctcgctctggggcaacggcagcgccgtgcacgagtacgtcgtcgggatgcgcatcgtcacgccggcggccgccgccgagggctacgccaaggtgcgcgtgctcaccgccgctgacccggacctggacgccgccaaggtctctctcggcgtcctcggcgtcatctctcaggtaaggtgcgagcgggacgacgacgacctggcggagcaggtgggcacgttcgggtaccggcacgagttcgccgacatcgcgtggttcccagggcatgggcgggcggtgtaccgcatcgacgaccgcctgccgctgagcgcgcccgacgacggcgccatggacttcatcggcttccgcgccacccccacgctcgcgatccaggcaacccgcctcgccgaggacctcttcgagcgcgccgacaacggcagcggcaagtgcctgacgtcgcgggtgacgcacgcgacgctgtcggcggccgggtacgggctgcagtggcggagcggcgggctgttcgcggggtaccccgtgaccaccttcagcctccccgtgcgccgcgccgtgctgttcgtcgccgaggtgcgccggcttcgggacctggagcccagggcgctgtgcggcgtggagctctacgacggcatcctcatacgctacgtgaaggcgtccacggcgcatctgggcaagcccgcgccgcgcggggaaccgtccggggacatggtggacttcgacatcacctactaccgcagccgtgactccgggcggccgcgcctgttcgaggacgtgctggaggaggtcgagcagatgggcatcttcaagtacggcggcctgccgcactggggcaagaaccgcaacctcgccttcgtcggtgccgcgcgcaagtactccggcctgccgcgcttcctgcgcgtcaaggacgcctacgaccccgatggcctcttctccagcgactggagcaacatgatgctcggcatcggcgggaggtcgcccacgacggacgcgcccgggtgcgcgctcgaggggatgtgcgtgtgctcgcgggacgagcactgcgcgccggagcagggctatgtctgccgccccggcaaggtgtacaaggaggccagagtctgcaccagggccgaaatggtggacacaggccgaaattacacacttccggcccacgaatggtgggcagctcgacgactcatctcttctttccacactaccaggcaacgcaaagcccggagcccggcggcttcccccaacgctatccggcaccgccgctggctgctccagcaaaagcccgagctcagttcatcaatgtcggcactgccggccccaccgccggcgccaccggcacgctcctgcggcggtatcctcgactcccagaaccgtcttgctcctctttgtgctctagaaagcgccgggtctatccttcgccacctctgcggcctcctcctcctccgccgcctgccaggcgacctccgctcctttggatgctacgcgtcgccacaggcatcctcgatggtcgccaaccttgtggagggcgtgtcgtaccccttcttctactcgctcgccgacatgggtaccctccccgaccaccccacaagaacatcgctcgcctcctcaaggccaagcgcttccgcaagcccgacatctccgagaccatccaggagctgctcggcggcaaggtggggagggggcaactatccgcccgtgttcgagaatctgcagcggatattcgacggggtgtacctcaaccgggtgcagcaccgcattgtggtgtatcacgctgcgtggctgcagcttctgatcgagttgggactattacgatgcacagggtactggttctga

SEQ ID NO: 18404 - DNA, 1947 bp, Zea mays
  Peptide Sequence Number=SeqID_61779
atggatatctccagttacttggctataggtggctggttcatccaggttatcttcgacaaatacttgtcctaccagctccggcaatgggcggccgactgtggcatcgagcatgagctggacaggcttcgtgttgctttgcttcgcacgcagtcagttctccatggtgccgagctggtacccgcactctcctacagctcccttccatggatgcgagagctccgagatgttatgtatgatgcagaggacctcctagacaagcttgagtacaaccgtctccaccatgaggtagaagaatcaagtgcaaacgagagcagtagcccaatcagtgccttcatgctctcccggtttcacagccaaggtgtcgctgcttctagccttgaaccatgttgggatagatcagcaagggtaaagaataagatggtaaatctgttggagcgtattgagcaggttacaagtggagtaagtgaagtactcagtctacccaggaacatcggaagcagcaatcgcaacgccatgacaagctcaataccctacgggagaatcaccgggcgggacttcgaagcccaacagctggtaactgctctgataagtggcataggtaagactgctctagcacagcatgtgtacagcaacgctagaataacagagagctttgatgtgaggatgtggatttgtgttacttctctcttggacgagttgagaatcacaaaagaaatgctggagtcagcttccagcagtcggtttaggcatggtggcatagcaaatttcaatagacttcaagtcgccttgaaggcaaggcttgcttcaaaacgtttcctccttgccttagatgacgtttggaacagtgacaacaaaacaatagcaatagaacaagagaactggcagaagctgctagcccctctgaaggacggagcaaaggggagcaagatacttttgacaactcggtcaagtatagtagcagagatgctacaatcatcctctataattaatctggagaccttgcaagttaatgattgttggtccctgataaagacttatgtgtttgatgagacaaaacataccatcgactcaaaactggagaacattggaaggaaaattgctgagacactcagtggccttcctcttgccgcaaaggtggtagctggacacctgaaaccatcttcccccagaaactgggaatttgaagctgagcagctgattctgctgtggttagcacaaggttttgtgcacccagatggttgcaggagattggaggacattgggaaagaatacataaatgatctatgtaataagtcattcttcacgatacagaagaaagaatttgtcagctattatgtgatgccacctgtaatttatgagctcgcaaaatcagtggcagctgaagaatgcttcagaataggaggttgtaggcttggaaaattgccttccagaatgaacaacttggtcaatctacggaatctcacagcagctaatcagattatttcagctataacagacattggcaggctgaaatgccttcagaggttgccaactttcaaggttaccagagagaaaacacaaagtatagttcagcttgggtacctactagaactccaaggatccctacagatcagaaaccttgagaatgtcgaagctccaattgaggcaaaggaagcaatgctttgcaagaaacgccagctctctgtgctgcagctaatgtgggcatctgatcgagatgagcatttgaaaatgttgagacagataggcccagaggcatatggcagtggcagccaaatgaagccattccaatcactagaagagctggtgcttgatgacatgccagaactcaatgagtggttatggagtgaccagacaatgaggaatctacagaatgtcgtgatcaaggactgcaataagctaaaagcgctgcctccagtgcctcctaaccttacagagataacaaattaa

SEQ ID NO: 18405 - DNA, 162 bp, Zea mays
  Peptide Sequence Number=SeqID_61780
atgagggttgaaggaggcaagaggcatgggcggtactggattgctgatggggcaatcgactcattgtccactcccactctgtctcagctccggcttaggcgtcggagagctctaggagactcaggggaacttggtggtggctttggtaaaggtggaacatag

SEQ ID NO: 18406 - DNA, 672 bp, Zea mays
  Peptide Sequence Number=SeqID_61781
atgaaactcagatctgaagtgtctaggcttcgatttgattgtgaagagaaggaaaaatctttcaagatcctggaaaaggattttattgacagttgggccagagtccacaaaatgcgcgaagagaagaataagcttgaagcttctaacactgaaaaggacatgcgaattgcgttgctcgaagctaagctggaacgagtgaaagaagagcacgaagctaaaacaacaaagctgatgcaagcattcgccgaagtggctatcaaccttagcagcgctcaggtgaagatcgatgacctgaaggatgaaataaatcataagaagggtgagaaagaattaagtattgaagaatctataaagaatagggagaaggcacaacaagcagaaaaggttgtggacatcaggaaaaagcttcaaagcaggaaatccgaagcgccgcccgtggccgccgccgcccggggggctcgcgcgccagagccgacgccgccgcccgtggccaacgccgcggtggacgccgccgcctccccgcctctggccagcgccgcccgtggccgccgggacctccccgccgtcgtccacagcctccgcggccgttgcccgaggccgcagcggcccgccgccgcgttacccgaggacgcagccgtccccgagcccgaggccgtcgtcgagtcttgtcac

SEQ ID NO: 18407 - DNA, 1284 bp, Zea mays
  Peptide Sequence Number=SeqID_61782
atgacgggtcctcgccgggagccgtggcgccggagcccgccgccgctgtcgaccaggggagcccctatcccgcggcgtctccatctagagccgatccagcaccgccggcaaccgtgcccccaacactggatctttgagatctcgattcttaaagatttcgtggagcacaggcaggagagaggcgagatgcgaaggctagaggtccttgcatggtcttgcgccattgccacggtggtgctagctctcgcgccgggtgtggctgcggccagcgaagcaacgcatgacgtggacgacgtcagcctcgccgtctcaaggatcggcaccgcagcaccgtcgccgaccagcaacgtcacggcgatctgcctgtcgacgccgtacccgagcgcgtgcgagacggcgctctcgtcgccggcgcagggctcgtccggcacggacgacccgttcgcgacgtccgtgcactacgcgatggcccgggtcgcgtcggcgcgcgctgtggcgcggaacctctcggccgcgcatctccgcggcgcccgcccgccgccgggcgtgcaggactgcgccgagctgctcgacatcagcctcgaccagctgggcgacgcgctcgcggcggccgcgcgcgacgcggacggggtgaccacgtggctgagcgccgcgctgacgaaccaggccacgtgcgacgacagcctcgcggccgacccggactccgcggggcgcggggccatccgcgcgcgcctctccgcgctcacccagttcatcgccacggcgctggctctgcacgtcaacaagtccaaggctcaccacagcggcggcggctcaccgtcgtcaggctcgctgccgactccagcatcgccgttcccgtcctgggtaacccagcaggacaggaaactcctggagtcgtcccacgcgggagccagtggcggcctcgcggtggacgctgtggtggcgctggacggcagcgggacgcaccggaccattaacgaggcgatcgcggccgtgacgacgaccgcggcgaacggcggcggcgcgaggaaggtgatacacgtgaaggccgggcggtacgaggagagcgtgaccgtctccagcaagcagaagaacgtgatgcttatgggcgacggcaagggaaagagcgtcatcgtcggacacaagagcgccggcgaaggttacaccacctacgcctccgccaccgtcggtacgacgtctgatgcgcgctatacgtctgcatcaagttattcatcttttcatcacccgcggcagcatgcatgcacaaaagctacatacccttag

SEQ ID NO: 18408 - DNA, 1464 bp, Zea mays
  Peptide Sequence Number=SeqID_61783
atggggggatctccacagttcacagtagttccaggtggtagtatcttgtgtgtatcagaggatgagatatccaatataatatcacgagctcttgctgtatccgaggaacgtcgacacttactgatggatgctatcgctgagactgaaccagcagataccacaaggagtaaaacaatggacaagtcttacaactctttatctgaaagttcatctacttctctgtggtcttcagattctgaggcaagcatttcgtctgacgacctctccagctatgatacctcgcttcttctatcgtcctctctccatccagaaatagatgtcaacgggacaacaactctcaaatggaggtactcagtcatctgtgtacactctaaccagttctacaacctccgaaggaaatgctgcccatcggagcttgcatacgttgcctcattgagccgttgcaagaggtgggatgctcagggcgggaagagcaaggcattctttgcaagaacaattgatggcaggctcatcataaagcaaataaagaagacagagtttgattccttcataaaatttgcgcctgattacttcaggcatgtcaaccattctctggacacggggagccagacttgccttgccaaaatcttagggatctatcagcattatgatgagcctgctggttcagtcatggagctgctggagcacttggagggggaggcgaggtcagacacgcggaagctccaccccctcgtcgacgagttcatccccaccatcgacggcgagaacggcatctgctacacgcacccggagaggctccccgctacgtgtgagcaaggacgggcttgtccggcacttcttccaccggccgtccagggcgtacacgacggggacgaggaagcggcggaaggtgcacagcggcgacgacggcggcaagacgcggtggcacaagacgggcaagaccaggccggtgctgtccaacagcaggccccgcgggtacaagaaatcctggtgctctacacaaactacggcaagcagcgcaagcccgagaacaactgggtgatgcaccagtaccacctcggctccgacgaggaggagcgcgacggcgagctcgtcgtctccaaggtcttcttccagacgcatcctaggcagtgcggttacaccatggccagggagtccgccgtcattgtccctgccgccgccgcagtcaccggcagcagcaacgcgtttattgccggccatcaccagagtggcggtggtggtagtagcgtcctcagagaagcaaacggcggagctgatcagctctacagcccaggagcaatgatggggtatgaccaggggggcctggaaacagggcacctcctgcccctgctgtgcctccccacttcatgcctaactttactgtccatgcagcaagggctagctttgccccttgaaccgagaattcaggacaagatacaaacctatcaaatttgccagatataa

SEQ ID NO: 18409 - DNA, 339 bp, Zea mays
  Peptide Sequence Number=SeqID_61784
atgaagaatcgcctaaaacatatcgaaatcgcgcagcaggaaaaaatcaataaagagatctcaagagcggtgacagcggcggcggcggcggcagcagacccctcaaaggctcggattcagccaccagcaacgctgccggacgggacaccaacagccggggtgcgcggaagaaaacagagagcgcagatgggaggtgcggagggagcagagggggatccggtgatagcgaagctgatatctcccgtgacgacgccgactcgactcctggctgcagctcctgctcccgggggggaggatggagatggaaacgggaactgggggaaactggagagagattaa

SEQ ID NO: 18410 - DNA, 807 bp, Zea mays
  Peptide Sequence Number=SeqID_61785
atgaggttggattggagaagtttggctaagtccagccagacttgcatcagccttcggtgtaccagattgtccggtgtgcaccggactgtgtccgatgctcatgctggttcaaagacgaactcgctgctcttgggaatcgtcgagggtgctgcagctaaaactcatcggtctgtctggtgctctcaagtatggagattacaagtgagctttgtggatgctcaggtgttgtcgatgagggtgggtgtcagttgcatcagtgccaggcagtgggtcgcgcgctgccagtccccgctgatgagcaccccaagatctaccgcatggagcttgcgctaccaacgagatctgctccaaatccaagctctggtactatctgaggaagctcaagtctcaagaaggtttaagagcaacggtcagattctcgccatagacgagctgtaccagactaatgaggatgaggttgcagtcaacctaattgtcctccaagagacaatagggaaatgggatgatctagagatatctgagtgtaaccctacaaaaatcaagaactgtggcatctggctgtgttaccagtgcaggacaggttaccacgacctgcacaaggagtaccgtaataccatcctgaatggtgccatggagcagatgtacaatgagacggcttcctgtttgtcaccctacgtacagatcatcaagacggcaacaatcaactttaagctttgcaagagggacaacaccaagcagttccacaattcaaagttcaagtttcctttggtttactgcaacaagtcaggccacaaaataggtagctga

SEQ ID NO: 18411 - DNA, 198 bp, Zea mays
  Peptide Sequence Number=SeqID_61786
atgggtccgggcacagtacttgctctgccgaggctggttacaaaggttcttgatttggttttgttagtcacccttcctttggggagagaatgggaatcacgacttgtgggtaatgtgtacgacctctgcagagtgttagaaactggtatatcagccgtgctcacggttatgagcggccttgggatcctctttgattag

SEQ ID NO: 18412 - DNA, 591 bp, Zea mays
  Peptide Sequence Number=SeqID_61787
atggatcatggtgccctcctcggtgtcaggggatatgcttggatcagagtagggaacattcatgctatggacacaaactcaagtggacgtggtgttcgacaattcaaaacatacctattgcatagattggaaaaggtactatgttgcatggtatcccattcccctgggcaatggattcatcagagcagctcagcagatggggctgctgttttaccagtcataggcctacaatcttacaatgccaaagttgtgcgatgctttgaggatgacgatatagttcatgtcgatggcaaggtcgatcccagatcagacattgatgtcattaacctagagctgatattttcagatcttgaacagatagagaagaggttagataagcttagcaagagcaaaactaaagatacacaagtaaaagtgaagaatcttatcttgctgaacctgatatcaatcctcatgacaaagaggtggctaaacgagcatcagacttgcagtctggttgaaactgaactcactgaggacacatttcgaaaacatccagtcaagaagttctggcagcactttcatttcatccttattgcagtgcctccatag

SEQ ID NO: 18413 - DNA, 1584 bp, Zea mays
  Peptide Sequence Number=SeqID_61788
atggacaggaaggtcggccgagggcctctgcccacggccgagcaagaggaagcaagtgaatcccgtgcagtgcagcccctcatggtcctgcggccaccaatgaaggccagcgtcgaacggagcgttgcagaggggcgccatgtcttgcagccccttgtacgcggaggtgaacaaccaccacgttgctcgggcgcgctggtgcagctacgactcccccgcaatggagcacccccatcatctgcttcacccgccgacgcgctaggaaaccgcgtgctgcagcctgcagcggggatggctgtccctgatgacgggggtggtgtcgacgatgagggcacgacaaacgtggcagcagaagtcgccactgctgcgagcgaaccaaagcgctgctggcacatgatcttgaactatggccacccgttgaacccacccccagagggtcaccgctgccgtcgtagatggggaaggagggggtgctacagtcgtcgacatggtagcagcagcgagggcgccgccaggggctggtacaccggtcctggtatggttgcccctagcgtcgtcagccatgcaactagtgatgaagacggccctgagggtgcaacgcaactgcttttggataataaacaggttgatgatttatcaatggaaccacaagttgaaagagaacttatgcttataaaagtaaatgcagagcgagaaaagttacctgagataatgggtttggttcgcattttcaaagcagaagtggttgatctttcagactacacactaactattgaggtaactggagatcctggaaagatggttgcaatacagaagactctgagcaaatatgggatcagagaaattgctagaactggcaagatagctttgcgccgtgaaaaaatgggagaaactgctccattttggaggttctctgcagcttcttatccggatctcgaagtggcaataccttcaaatttccagcaaaacactggtgtgaaggcaatcaatcagaatccggaagaatcttcagggggtgatgtttatccagtggaatcttatgaaagcttctcatcaacaagtcaaattctggatgctcattggggtgttatgactgatggcgatccaacagggttttgttcacatactctatcaattcttgtgaatgatgtccctggagttctcaatcttgtaacagctgaaaaagaaggaacttctcgcatcactactgttgttcctggaactgatgaatccattgccaagctagtacatcaactgtacaagctcattgatgtttatgaagttcaggattttacccacttaccatttgctgctagagagttaatgatcataaaggtcgcggcaaatgctacagctcgaagggatgtcttagatattgctcagatttttgaggcacagaaagttgacatatcagaccacacaattacactactgctcaccggagacattgacagaatggttagattgcaaaagatgctagagcagtatggcatctgtgaggttgcacggacaggccggattgctctgctccgagagtctggagttgactccaagtacctccgcgggttttccctcccgctgtaa

SEQ ID NO: 18414 - DNA, 879 bp, Zea mays
  Peptide Sequence Number=SeqID_61789
atgcaggggcactccgtccccacacacatcaaccgtccccatcgattccctggcaacagatcagggctcaccgccttggcgtacaatgccccactgaccccgactggccgtcgtgcagtgaccgcacttgtacccaccataaccggaatgggagacctcgtctcaggtcgcgtgaggggatatgtctgcgggcaggtcctctggtgcaggctcgggtgctggatctggggctacctcctgagcagctccttgctccggcacgaggatgtactctccgtcagcaagattgcagtctatcgaaatgcaatgaacattaaccgcgggaaagaaaagggcggcgcggcttaccggcggcgagggaggtccggcgaagggtggggtcggctcggggagactctggcggtcacgtcgaggtacggctcgacgtcggagatggccggaatcgcccggtccacgcgggcaggcgggtgtcctcgtcggcggcgagtataccggccaaaccatggcgaactggttcaatccgagggcacggtgagcatcacgggtcacgcagcgactgtgtgcgcaaggaatcgaagggtggtggagtggtttacccggtccacgtactccggcggggtcgagaggtccggcgagcgtggactggcttctctggcgaaggaaactccgattccttgctcggggagcctcacggaggtgtgcacaagcttctccgagggcaggacggggttggggatggctctgctggccggtctatggtggcagaggggttgggcggccgcggactcgctgcgcacgggcaaacggcgacgagctaactccggtgaggtgtggaaggtgcgcggaagggtgcagtcgaagcctgggaaggctttataa

SEQ ID NO: 18415 - DNA, 165 bp, Zea mays
  Peptide Sequence Number=SeqID_61790
atggacatccatctacaggaagatgaccgaggtatcactagactagcatccatggagttcagcatcataacttcatctgcaacttctgatcaaaatcaagcaagggtgagctcaattatggttggggctcagcaagtgggggaaatgcaaggagtgactgcataa

SEQ ID NO: 18416 - DNA, 714 bp, Zea mays
  Peptide Sequence Number=SeqID_61791
atgcaggggcactacgtccccacacacatcaaccgtccccatcgattccctggcaacagatcagggctcaccgccttggcgtacaatgccccactgaccccgactggccgtcgtgcagtgaccgcacttgtacccaccataaccggaatgggagacctcgtctcaggtcgcgtgaggggatatgtctgcgggcaggtcctctggtgcaggctcgggtgctggatctggggctacctcctgagcagctccttgctccggcacgaggatgtactctccgtcagcaagattgcagtctatcgaaatgcaatgaacattaaccgcgggaaagaaaagggcggcgcggcttaccggcggcgagggaggtccggcgaagggtggggtcggctcggggagactctggcggtcacgtcgaggtacggctcgacgtcggagatggccggaatcgcccggtccacgtgggcaggcgggtgtcctcgtcggcggcgagtataccggccaaaccatggcgaactggttcaatccgagggcacggtgagcatcacggggtcacgcagcgactgtgtgcgcaaggaatcgaagggtggtggagtggtttacccgaggggttgggcggccgcggactcgctgcgcacgggcaaacggcgacgagctaactccggtgaggtgtggagggtgcgcggaagggtgcagtcgaagcctgggaaggctttataa

SEQ ID NO: 18417 - DNA, 231 bp, Zea mays
  Peptide Sequence Number=SeqID_61792
atgcggcttcatacccttagagatgatggggttttataccctcagaggtatgaagatagaggattccttttccattcctatgcatacattgaagtgatatttgcaggtgcttattgctcatcaaggggagtgggaagtagcagcacatacactttcactctcataataacgctgcccaggcgcagttatgatttaattagaaacttcttgtcaaaggatgtttgtttttaa

SEQ ID NO: 18418 - DNA, 270 bp, Zea mays
  Peptide Sequence Number=SeqID_61793
atggggtccaggcacagtgcttgctctgccgaggctgagtgccgagatggttcgagatacaatgattatgtttatgggtttggttcgactatgatgatggtgttcctcgatgaggaaatgccaaacggggcatttgctgagtacgttgatgtgtactcatccttgctttaccaccaaacaccaggttgcccgcattgtaaccactgctcaggagaaggcgaagccgtggaaggagacttccaggagttccaagactacgacgaattctag

SEQ ID NO: 18419 - DNA, 579 bp, Zea mays
  Peptide Sequence Number=SeqID_61794
atggaatggatcaaaggtgaagtagtagccttcaacaaagttttgactggtcgagagaatgaccccgagttgaaggatactttggctgaacttgaagtagttcataagacaatagatgaagctattgatgaggggaagagaaggttgaaccgagtttttgatgctattcgctttgtatatcctaattactctttcctagttcaaggtaaagggaaggagaggaagagcgctttgaaaccacctttggctgtaatgaagcaaaagagattaaaagttttggcgaagcgaccaaagtcttattctgaggatagagcaatggtgttgtctgcgcttatgacttctattgaggatgtttttactcaaactgcgccaactgttggtccgaaggttcgctctcctgtacttacaaaggaggagaagaaggatgaagaagaaattaacaaggtactaattcaggatgaggtgcctctggccagcttgcaactagaagcacaaccaaaagtagaggctcagccaaagcctaaagcagcccctgggagtacaccccaggagggaaaacaaggatggctaacattttga

SEQ ID NO: 18420 - DNA, 770 bp, Zea mays
  Peptide Sequence Number=SeqID_61795
gctccttccgaggtgaggtcgagtctgtcttccaaggccaaggtcgagtccgagcccctaggtcggggcgaggcgggagaccgttgactaatgccagggctgagtccgagccctggggtcgggcgaagcagagttcgtcgtcttccggggctgagcccgagtccgagccctggggtcgggcaaagcggagttcgtcgtcttccggggctgagcccgagtccgagccctggggtcgggcgaagcggggttcgtcgtcttccggggctgagcccgagtccgagccctggggtcgggcgaagcagagttcgtcgtcttctggggctgagcccgagtccgagccctggggtcgggcgaagcggagttcgttgtcttccggggctgagcccgagtccgagccctggggtcgggcgaagcggagttcgttgtcttccggggctgagcccgagtccgagccctggggtcgggcaaagcggagtttcccatggcgcctagggccggacttggctactgtcagcctcactctgtcgagtggcacagcagtcagagcggcgcaagcggcgctgtcctcttgtcaggccggtcagtggagcggcgaagccacctttgcattaaatgcccctgcgatttggttagttggcgtggcgatttggccaaggttgcttcttggtgaagactgggcctcgggcgagccgaagctttgtgctgatgggggttaccagctgagatttagtagtattgagggtacccctaattatggtccccgacagtag

SEQ ID NO: 18421 - DNA, 300 bp, Zea mays
  Peptide Sequence Number=SeqID_61796
atgtctgaagataaaaaggctgttgctgaatcgaagctaagcctttctgaggagatgcatcttggctttcttcaatcaatggcaaagacaaatacagagaagattaccagggaaattttagaaggtgccaaaggttcatctacaactagactaaatcgactgtccggaataccaagcgcggaccgtccgggcccttgcggcggaccgtccgcaacaccagttgaccctcggacagaaccaatgcaaaaatccaagtctgcactacggacggtccggaggaaaagcaaggaccgtccgtga

SEQ ID NO: 18422 - DNA, 114 bp, Zea mays
  Peptide Sequence Number=SeqID_61797
atggagtccaaggctttgataccacatgtaggatctaggacaccggctagaggagagtttatgctctatgaggcactaagttttacaccgatcaagttcaatgacccctcttaa

SEQ ID NO: 18423 - DNA, 420 bp, Zea mays
  Peptide Sequence Number=SeqID_61798
atggcggcggctgtctccttctcccgggtgcgagctctcccgacgtggtccagctcggtttccggcgacgaccaccacgcctactccgtgttggcgacgtcgtcggtgtcagccagacctcggtctggcgcgcgaccgctgcggtcgccggcgcagatgatgggcaacgtgaacgatggcaaggggctgttcgcaccgctcgtcgtggtggcgcgcaacatcattgggccgcaaacgcttcaaccagctgagggggaaagcaatcgcgctgcactcgcagatcatttgccatctcatatctcgtcgttcgatcaggtcatcaacgagttctgcaagaccatcggcgccgactctaagcagcggcagggcctcatccgcctcgccaagaagaacggagagaagctcggattccttgcctga

SEQ ID NO: 18424 - DNA, 159 bp, Zea mays
  Peptide Sequence Number=SeqID_61799
atggcgcccaagaggaagacctcaatttcatctgctgtggtgattcctccaatcgaccccaacagccagttgcctttcacagaatattcaaccattgaaagacagggcctacccagcttatctgtatcgagggctagccgactcaactcgggttactaa

SEQ ID NO: 18425 - DNA, 453 bp, Zea mays
  Peptide Sequence Number=SeqID_61800
atgggcaagaacaacaagcgcaagcgtgagccaactcctccatcggaggagtttggtgactcggagtactcagaggaggagttctcctctgagtccgaggggtctccggctcccgtccccctacgtgagtcgtctgacgactcagacgactcccaggggctcgcggcggaggtctggacgtacatccgagccgtcgagcgctccgggctcgagggctcggatgagtcggagtactcctcggatgaggaggactcggacggcggcggcaaggacgaggacgaggacgacgacgacgacgatggcgacggtgacggtgacggcagcggcaggggcagcggcggcggcagtaaggacggtgacggcggcggcagcaggggcagcaaccagggcgacagcaacaggggtagcaccaggggcgacagcggcggcggcagcaacagggccagtggctag

SEQ ID NO: 18426 - DNA, 597 bp, Zea mays
  Peptide Sequence Number=SeqID_61801
atgtactgctcgtctacacaagatgtgaagtttatacaattccaactaacggtcaacgtcgcagctctgataatcaatgtagttgctgctgtcagttctggaaacgtgccgttgaatgatgttcagttgctgtgggttaacctaattatggatactttgggtgcccttgcattggcgacagaaccacctacaaaccatcttatggagagacccccagtagggagaagggagccattgattataaatatcatgtggagaaacttaattatcatggctttgtttcaagtttcatttctcctcactctcaacttcaagggaataagcctcctgcagttgaaaaatgatgatccagcacatgcagataaagtgaaaaataccttcatattcaacacatttgttttctgccaggtgttcaacgaattcaattcgtgtaaaccagatgagctgaatgtattcaagggcatttcagagaaccatctgtttattggcatcatagctataacagttgtactccagttgaatttaaggttcctcttcccttgtttggaagaggttatgatcattgtacgctcccggctcaatgttgaacactcttga

SEQ ID NO: 18427 - DNA, 258 bp, Zea mays
  Peptide Sequence Number=SeqID_61802
atggccgccgctgctccaggtccaggaccatctcctcatcaacgaccgctccgctgcttcctactgctggtcctgctcgtctcttctccgcattattcctcgggggctcgcacatcaccagacctcgccggcggcacactccagtacggtgcacggaaactcatcagcatcgacaacccggtcactcctccgccgccggcgccggtatcgggacctccaattggccctggatttgtcaggccgccgcaggaggtgtga

SEQ ID NO: 18428 - DNA, 501 bp, Zea mays
  Peptide Sequence Number=SeqID_61803
atgaagaatgacttccgcactcgcctctatggatcattgcgagcaactcgcgaccctcttcctagcgggtacatggtcttcaggaagcatgttgtcattcaggtagtcctggatctcggagatccttgcatcgggactgccctgagcatctggatgggggcgctaagaggctgggtggaaggtatcaacaaccgtctttcgaaggtgcccttatgcatgggtgtgcaatttggtgccctcatggagagttcatctactgctgagttgcttctgccacacacccatgagccacatggcggcactggaatcctgttcgagcagagagtgggaccaagggcacgagctagcctgaagacttgggccccgcctgctgggagcctagatgttagacgaggaggtctgggcccctataaggggagcagaggggcacgtggcggcaccgaacctactcctgagcagggagcaggtcgcgaggtcagtgaccctattagacaggtctag

SEQ ID NO: 18429 - DNA, 1335 bp, Zea mays
  Peptide Sequence Number=SeqID_61804
atggacgccggggagatggaggacgtgcgggccgccgcggccgccgaggaggtcatcagcagcaggggcggctccgtgctggggaagaagaccatcctcaagagcgaccacttcccgggctgccagaacaagcgcctctccccgcagatcgacggcgcgcccaattaccgccaggctgggtcgctgcgtgttcatggtgttgcaatgcccacgatggaagggattgctaatgtgctaaatcatatcggagcacacaagaaaggaaagcaaacccggattctatggcatagtcttcgggaggaaccagttatctacatcaatggtcgaccctttgttttgcgggatgttgaaaagcccttctcgaatcttgaatacacgaaatctacaaagctcataaaccacaagggaattaaccgggagagagtggaacaaatggagtttcgccttaaggaagatattcttcaggaagcttcaaggtatggtaataagatactggtcactgatgagctgccaagtggtcagatggtggatcagtgggaatcagttgtgtatgatacagttaagactccacttgaggtatatgaggagttgcaacatcaaggctacctagttgactacgaacgtgttccaattactgatgagaaagcaccaaaggaaggagattttgacaacctggtacgtcgaatctctcaagttgatatagaaacagaaattgtgtttaactgccaaatggggagggggcggacaactactggtatggttatagctacattggtttacctaaaccgaattggagcttcaggtatccctagaacgggctctattgggaaggtcttctatgctggaaatgatgtagacgattatatgcctagctcagaagaagcaatactcagaggcgaatatgctgtcattaggagtttagtccgagttctcgaaggtggtgttgaaggcaaaaggcaagtggacaaagttattgacaaatgcgactccatgcagaacctaagagaagctattgctacttaccgcaataacattcttcggcaacctgatgagatgaaacgagaggcatcactttccttctttgtggagtacttggaacgttattacttccttatatgctttgctgtctatgtgcattcggtgagctctgctcaccaaacaacattatcagtagaagttagtttttctgattggatgagagcaaggcctgaactgtacagcattcttcgaagactttgccgtgtttcaaccaagacgttttgtcttgaaggctccctggcctccaccaaatggtacattgacctttgcgcaagattttttcttgatggtagttaa

SEQ ID NO: 18430 - DNA, 1239 bp, Zea mays
  Peptide Sequence Number=SeqID_61805
atggcggggagaggcggcggcggcaaaggcgccgcagggaggatgatgtcgctgcaggaattcgtgtcctgcatgcagccgctcatcgatctcgagaaggcggcggagatatcggcggagtccgagacgagcgctaagagcctggagaggagggggtgcgtcattgccaacctcaagtgcactgatgcccagtgtgacgtaggaaagactcgcaagttcctttatattcacaggatgtttattgaaaacatgttcatgttcactgggactgataatgctagctttcccttttttattccactccagtttggaacacatgatgtggttgccctgaagccaaataaggcagatgctggatctgcttcacttggtcaaggtgtagtttatcgcttaaaggattcttccattactgttgcttttgatgatattcctgaagatggcttaaacagccctctgcgtcttgagaagcttgcaaatgaggtcacttatcgcaggatgaaggatgcactaattgaacttagcaaggctgtccaaacaggaccttgtgcaaaccttgttcctgttttatttggagagaaggcacccatgcgctccaaggatgctatgaaattcagtccattcaacaagaacttggatgattcacagtgttttgcaaagaaagaggctatttcgaaggctcttggatcaagggatgttttcttgcttcacggacctcctggaactgggaaaacaacaactattattgagataatattgcaggaggtcaagcgtggatcaaagattcttgcctgtgctgcttccaatattgctgtggataatattgttgagcgacttgcacgatacagaacaaaattggtgaggttagggcaccctgctcgtttactgcctcaagtgctcgacagcgctcttgatgcacaggttttacgagctgataatagtagcttggcaggagacattcgcaaggaaatgaaggtgctcaatagcaaattgctgaaggctaaagataggaacactaaacgggacatcaggaaagagctcaaaacgcttgcaaaagaggagagaaaacgacagcagcttgcagtcactgatgtactgaaaaatgcagatgttgtgctgaccactctgactggtgcatcttcgaaaaagttaaacggaattacatttgatttggttgttattgatgaagctgcccaggcacttgaggtggcatgctggatagccttgttgaaacatgcatga

SEQ ID NO: 18431 - DNA, 297 bp, Zea mays
  Peptide Sequence Number=SeqID_61806
atggcgtttctcttggacattatgtcgaacagtttgagggcattgcggagaacagcgaggagcgctgactatgggctgcaggaaatggtggtgttcgccgcgggggacctgcgcaggcggatgggggagaaagagggcctgctcgccggcctagggaagaagggcgccgccaagcagggccagggggacggcggcagagggagaaccgagagggaggttgtcgcgtggagcggaaggtcggggagtggcgtgggtggacagagtcacgaacgaacggtggagattcacaggggctaa

SEQ ID NO: 18432 - DNA, 432 bp, Zea mays
  Peptide Sequence Number=SeqID_61807
atggcgagtggtcattgttgtcggtccacctctgctcacctccggtgtcgagatgatgccacaatccttgatataatagtcgtcgaacgcgcgcgatatggtgagtaccgatcactcttggctgggctgccaaatgaagtgcaccccgggctcatcagcgagaacaacccgagagtcgtcgacattggcgacgaccatgaggtccccatgtttgacgatggacagcgcgaggtcgaactggcagtcgccaagtttcttctcgtcgtcggtgagcgacgccaacgcgagcgcctcgtgctagtggtgtttgttcggggtttccaacttatggctcttgccctcacctccgactccagcgccagaccggtcctccgctgcctcttcacgctctgtgacgcgctactgctgctcgactacttagacgacgactag

SEQ ID NO: 18433 - DNA, 336 bp, Zea mays
  Peptide Sequence Number=SeqID_61808
atgcagaagcattttgtgttcgtgtattttctttatcccttactggtaccgcttttgcatgaacccacatgcaaaaaggtctcggttcggcacgaagtggccgataaaggcaaaggcaaaaacgttctcattggcgatcctcacacatcaaatatatcacaagagattgctcggaaggctctggacaagaagactaacaagtccggaggcaccagggggcagactcaattgaggagtcgagcacggcaacctaacccaagcatcgcggatggtccaacacctttgtgcgaacagtccgatgctttgatagatggtccagttgactcaaccagatag

SEQ ID NO: 18434 - DNA, 738 bp, Zea mays
  Peptide Sequence Number=SeqID_61809
atgagacacctcgccgtggccagccatccacagaaaaagaggaagaaactatggttgaagaagaagttgtcactcaagctgataatcctccagccgagaataacttctactttgacatttgcggagtggaccctgaacctcttgcaacacaaggaaagccccgaaaacaaatgtaggcttgatgatcgaggatcatttaactggccacatgcctcgtcatgggtaaactttgcctcggtcggaccaataccagaaaggccaccacacaatgggagtggagagatggcgagagtagcgtgtaccctccgtggcaagaggctggagatcggcgcacctggacacggtcagaccgtccaagcttttgcctggacagtccggcccttacgcagaccgtccgactttctctaccggacagctcgggaccacaccagggctaccgcgtggtgccccaataatagcgaacacaactggccagctcgggtgtaccaccggacacacaggatacgcagaacctactgtcgcacactatgcaccaaattattacacaccacaacagcagtacgttccgcccctattaggggtctgcttcatagccgaaggtcctgtaagaagaaacaccttcggaagatcagcatggaaataatgccgaagatgccttacagggaacttcggcataatgtcatgcctaagacgaagagttgcaccgacttaaagatgaaaagacagattgacccataa

SEQ ID NO: 18435 - DNA, 219 bp, Zea mays
  Peptide Sequence Number=SeqID_61810
atggccaggtcctcacacgggcacgcttccctgtgctcgatggaggctccctctttaactctggtggcttctggcgcagctcctgaccccttgcgccgcatgtggactggggacacggtctgcaagtatgccccgcaggacaacctcgcctcggtggcctccgccttcggccaaaatcctgcttctatcgccatcatgcaccacgttattttcacataa

SEQ ID NO: 18436 - DNA, 162 bp, Zea mays
  Peptide Sequence Number=SeqID_61811
atggggctcggtgtatgcggctcgctctgccaaggtggcaatgagattgatggttttggttatgactatggtgctggttgtcagcattgcaaccactgctcaggcgaagatgaagctgtggaaggagacttccaggagttccaagactacgacgagttctag

SEQ ID NO: 18437 - DNA, 2043 bp, Zea mays
  Peptide Sequence Number=SeqID_61812
aagaggatgattggagatgaagttgcccagtttgggtcctgtacgtttacgccgaagaccggcaagaccacgatgtcggtagtcgagttagttccttgcgcccgcaacaagtggggcaattggaatgagttctggttttatgtcgcggagggtaccgttgaagaccatgaggggctccccgtgtccgagatgtgctcgcatttttactcagcgtacccgccctttgaggtggcggaggaggatgcggacgaaggggcccttcggtgcgccgccggcctgagcagtgggcgtgatttggttgaagaatttgtggcgtacggggtatggcctttggcgcatggttgggtgttgggtgaagtgtgccctcgccagatgccttcccatggtgggaagctggtgcgaagtcccgccttcgtgctggatctgcaaggccgcgatccggccgcctttgtgcgtgaggtggaggatggggcggtgcagatcgttggtcgaattgatgaggacatgcgcggccccggggggaaggatgtcttcgcccgagctccgggagtcttcggcgcggatgctaaggtgatggacaaggatcaccagggagccgcacagaagcgccaggcggttgtcaggcttcaagaagtcaggccgaagaggcagcgaggggctgcgaaggatgctgcccccggcagaggcaagccgccgctggcggcaaagtcggccgtccctgcgtctagcaaggcgccggaggctgcggctggcaccggtggctccaagactgcgaagactgtgccggcgcccagcagggtgccggaggtcgcgaaggcggcccgagggttgccgtcgtcgggcaagcacgtcgccgacttcaccaccgatattagtgtggacgactatctgggtgggtcggacgaaggccaacttgttgttgttgcgcccgccgcggcgaccacggcggctgccgtggtgccaaaggcgaagggcggcgctcttagtgccggaggcgagatgctggcactcgctgccgtcagggacgaggcgggcgctatgttccgccggttgaaggaggtgaaggaggtactaagtcaggcggctgccttcgcagaccgcgcggcgtcgggggcgctcacggcagttgtgtctgccgaagtcgagaggcttcggacgcaacatgctgacgccgtgcgggaaaaatcggccgccgacagtaagtgccgcaagctggcggacaaggtggccgcactggagggggagaagactgacctccggcgccaactggcgggggagaggagggaggtcaatgaggccctcgcccaggcgcaggctgcgttggtggaggcaaaggccgaggccgcggcgcgcacggaggctgagcggacgcgcaaacagcttatggattcataccgtgagctgggcgcgcagaccgctgagttcgaagtgccggaccgagagcccggacttcgctgcctggagtgggtacaggaggagttgcaggcactccccactatcgtggaggggtttatgtcttacgcttccctggttacctgcgagggggcgatgaacgcgctctctcgcgaagggtgccggcactatgaggtcttcgaccaggctgatgaagatttcgagcgagatatctacaaggttgaggaccctatagtgaaggaatccgccggagccatctacgaccggatgtggggtccgcacggtcgagaggtggtcagggagcgggccgagacggcgagggctcaggcggcgcgcgacgagagggtggatgatttcggggcgttgaacagcgcgctgcctgacccggagtcgaacctggcggaggccgtgcccgagtccgccctggagccgccaccggaaactgccgaaagcgctcctgacgtccttgcatccgctgcggccggcggaggcccgcccccagagacagccgaaggcgctcctgatgctcccgcagccgctgcgccgagggctgagggtcctgcgacggtggcggcggaggcaccagcggaggcaacagcggaggcgcccgcgacggctgggtcttcgtag

SEQ ID NO: 18438 - DNA, 495 bp, Zea mays
  Peptide Sequence Number=SeqID_61813
atggtgggaagcaaggacgacaaaggcaagatgagaggcaagggaggcaataatgacaagaggaggcatcctccgactccgctgttggaggacttcaatgactcagagtactcggaagagaaatcctcctctagagatgagaggaccccagtgccgactcctcaatcgtcgtcgtttgtctatacgaacgactccatgggctttactgtggtggagagagcctacatccgggccatcgagcgagcagggctcgatggctcgaatgactccggggagaaagaggagtttaaggacgaggaggaggatgacgaggccgggtatgatggcgtcgacgagggtggcgatgacgacaaggttgacagcgatggtggtggtggcaaggttggcaacgacaagggcggcagtggcaaggtcgacagcggcgtcgatggtgacgacggcagcggtggtgatgttggcagcagcagtgttggtggaaggtcaccaccagcttag

SEQ ID NO: 18439 - DNA, 201 bp, Zea mays
  Peptide Sequence Number=SeqID_61814
atgctcgcggttatgagcggccaagggagctccattgataagagatacttgatcagagatgtttgggttacaggtggtgataagaatgatggttttggtattgactatggtgatggttgtccatgttgcaactactgctcaggacaagatgaagccatggaggaagacttccaggagttccaagattacgacgagttctag

SEQ ID NO: 18440 - DNA, 459 bp, Zea mays
  Peptide Sequence Number=SeqID_61815
atggcgcgtacaaggaaaactgcatgcaaatctactggacctcttggcgtgcctcatcatcagctagcccccagacatgaagggagtagtagcggcagcaatgacccaatcggagacttggaggccaaggattcggccattgattgggccgtcaactcgcgttcgatcacttgggaccgcgaagcaaaagctcgagctcgtgtggcagagcttagtacggccctcgacagcctgcaagtgtactgtaatactctacatgaagaagtacatgtactgtatgctcgactgcacccggatgtaccttccgacgctgctgcaatgggaactggaccttcaggaacaacaaatgaaggacctgatgaggacttggacctttttaggccccctccttccatgaaccttgctaacgaatggtctcctgcaggaggaaatgaagaaaccaaggatgatgaagactag

SEQ ID NO: 18441 - DNA, 570 bp, Zea mays
  Peptide Sequence Number=SeqID_61816
atgcctcttttgccgaggcgtgaaatgaaacggctcagccctaccatgcagccgacgtccacctctcataagtgccttctggaggatggcctagacgaaggtcgagtcattgaactcgtggtagaaatcctttatcacgaccgccttggccatgtcgggaatgtggttcattatgaggtcatccaaattgtcgatgtagtggcgagggagatgttggagccattgaagtgcatcctccccgagcacgatcggcaaccactggatcaccccgagctaggggaaagggctcagactctacatgtccccgagcctcggggtggtccccctaggtgtggtcgcggcggtgatcccatagtagagactaatgttgtgggtcctgcagcctttctcggaccagccgacctggcactgggctgttcgtcgaggcgacaatggtgttcattctcgcagcacggctccgctctggtgcgctgtggtttcgatcgtactcctcccgccacctcagttcactctcgtgatgacggtcgcatgaagcatcgatattgcttcgcgcgtctcgccaacttttga

SEQ ID NO: 18442 - DNA, 222 bp, Zea mays
  Peptide Sequence Number=SeqID_61817
atgcaggaaagggatctgaagtggggaaacctccctagcattgaagatgattgtggtgttgaaggtgacgccaatggagctgtcgtgaatcgacgtcgcaccccctacctggcacgcaagctgttggagtttggtacaggctgtgcactacgatgtagcccatgcagtgcttttgggaggacgacgacgtcgatctctactcgatggttatccttcgagtaa

SEQ ID NO: 18443 - DNA, 717 bp, Zea mays
  Peptide Sequence Number=SeqID_61818
atggcgtcgtcgtcgtcctaccccagcagtgcggtccttgcagactctgtgctcggccagaaagctggcgtcatcgtcgacgaggtgtcggcgcctgagagttcaaccctgggggctaggactgggaggtatgccatgatctttgacgccggcagcatagggatccgtgtacacgtcttcaggttcgacaggaagctcgacctcctcgagatctgcgacgatggcatcaaggtgttcgccaaggtaaagcccgggctgagctcatacgctggacaaccccaagaggctgcaaattccatgctgcctcttcttgacaaggccaagagtgtcgtccctaaacagctgacgaaaaggaccccacttagactcagagtcaggaaccttatccacattaagagcaaatttcagtacaagcccgagtggatcaatgttattgagggatctcaagagggatcatacctatggaaacattacaagttgcctgaaggagatactcatacggaacttgtgacggaacctcccaagtcattaggtccacctacagttgtccttgtccaacggacctcagacaaccctgtaggtgcccctgaatcacttgacaagttcggtatctgcttttcttacctttcccaagagcgtttcacccgtcacgcagacattacaagcatcggagttacgagaatgcggaagcaattacatgaacttacctttgtttaa

SEQ ID NO: 18444 - DNA, 615 bp, Zea mays
  Peptide Sequence Number=SeqID_61819
atgggagtcggggtcagtgaggcattgtacgccaaggcgataacttctcacggatcctcggacgaagggaatgcacagtcccacacggacgggcttgcacgagagggtttcccccgtatcttgtgggaggtactgcagggagctggttacacgacgcctccccagtacgcggtgcagctgtttgagaagcaccgagtgccccgctgtaggccaggcttgcgttcgctggactttgagtcttttggatacagggctgaggatactatcgaggcgattgctcttcatggactgaccaccttctatggtttccaccccttggagccgtccactcaccccattggtttgttccccgtggagaaggaggacgacccaatgtggaaggaccgagtggagcacgccaaggatatatgggctatctacccaggtcagactgctcacttgacggtgcggtgcatgaatgccatgtatcgtctgcaagtgatgcgaggggaggcaatgtctcacctaatggcattattggaggctaccaagatcaccttggataacagggaggaacttgtggtagacttgtccactgagatggtggaaaaagacttacaagtggaacaattgtga

SEQ ID NO: 18445 - DNA, 297 bp, Zea mays
  Peptide Sequence Number=SeqID_61820
atggggctgtctgttgcggtgcgggcatactggaaatccaacgagcgcgccgggctcggtgggtcggatgactcggaggaggaggaggcctccttggaggaggtggaagattcctccgactccgaggagtggagcggcggcgagggcgacggcggtgagggcgacgccagcagcggcgacaacgacggtgagggcagcggtgacggtgacgacgacgacgaaggcggcgatggcaacggcgaggacaatggcgatggtgacgacaagagcgacgacaaatccttgatgaagttgtag

SEQ ID NO: 18446 - DNA, 453 bp, Zea mays
  Peptide Sequence Number=SeqID_61821
atggccgcgatttttttccgggttggcctcgatgccccgcttggagacgatgaaccccaagagcatgcctcgggggactccgaagacacacttctcggggttgagttttacgcccttcgccttgagacatcggaatgtcgtttcaaggtcagaaaggaggtcggaggctttcctcgtcttgactacgatgtcatcgacgtaagcctcgaccgttcgaccaatgtgttcaccgaacacgtggttcatgcacctttggtacgtcacacccacattcctcaaaccaaatggcatagtaacgtagcagtacatgccaaaagggttggcaagccattcgggatggaatacctctttgatgaaccctgcgggccatcagcttgtggatctcctcgcctatggctctgcgcttttctttgtcgaatcggcacaaaggctgcttcacgggtcgggctctag

SEQ ID NO: 18447 - DNA, 288 bp, Zea mays
  Peptide Sequence Number=SeqID_61822
atggaaatcactgaagagaagacatcaccaccctcggattctcaggcaggaaactgcttctactttgatatttgtggatccgagccagactcacctactaacgaaggcaagccccggcgtgctgatcgaggaccctttaactggtcacatgcctcgtcatggcatacccttgagagtcttttccttagtcgggtgaggaaacaacaaacttttgttgcttttgctccaaggtggttccaaaggaagaaaaacaagactgaagtgctggaggaaaggatcctccattag

SEQ ID NO: 18448 - DNA, 402 bp, Zea mays
  Peptide Sequence Number=SeqID_61823
atgggcagaggcaagagaggcaagggatggcctcaccgcactgacgggaagcgcaagcgtcctctgagtccacccttggaggactttggtaactcgaagtactcggaggaggtttcctttgagtatgattggtcgcctgctccaacgtccctcacggcatcgtctgaggactcggacgactccatggggttgtctgttgcggtgcgggcatactggcgatccattgagcgtaccggcaaaggcggcgatggtgatggcaaggacaatagcgacgacaaaggcgacggcgacggcaagggcgatggcgacggcaagggagacggtgacgacgacaacagcggcgacggcgacggcaagggcgacgatgatggcaaggtcggcggcataatgctgttggcataa

SEQ ID NO: 18449 - DNA, 1263 bp, Zea mays
  Peptide Sequence Number=SeqID_61824
atggcggcggagcaggggcggtcgctggcggagacgcccacttggtccgtggcaaccgtcaccacgctcatggtcgctgcctgcttcctcgtcgagcgctccctctcgcgcttcgccaagtggctgcgcaagaccaagcggaaggccatgctcgccgcgctcgagaagatccgcgaaggtagtggtgcactactatgtctttcactgcctaaactaatgaataagcccatcggaaattctaagcgctgtcagtacaagaaactactcctgaagcattgttctatcaattccatggctgcacgttgtggctatgagggttctgtgaacgaggccatcaagatgtttaatcccatggttcacgctgggttcatccagaacatgtggcatgtgcctgcaatatgctttgttgcagtttacaatgaactatgtttcttacaatgtttatatcttcctgcgcaattgcacctagcagttgaggagtgcctctttggctcttttcgtctaaccactaggtcatgtgggtttctttttaggcacatgagaggcgcacaaccgaatcaacagcaatcaaaagatgtcgtcaaggcactgaagaaatggattggccacaggaatccaaaagttcaacttcttgctctaagtgtgtggaaggctattgtctggcagcgtgctagagctgaattccacaagagacccgagaaacatgcactttgtttgatgatatattcttcaattctaaaagatagttacatatgtcctttacctgagagtgtagtcccttttgatgtttatggggtggaagacttcaagatagaagatacaaatgttcacaaccctactactcacaaatttcaggaagatccaaaaagtgatcctagacactgtaagcttcaacatgagtatgagattactgggttaacaaacaactcatactttgatggagcacatgaggttcgacattatctcaggaagcattcggatcttggtcgtattgtgcttgaagttgctaaggtctatgtctcaactgtacaagccaataattatccaatcacttgcacgcaatggcatcctgagaaagccatttttgagtggaggaaaccaatgatcccacacagcgaagatgcaatacaggctttaacttctattattatacaattcaagttggcagtacttcatgttggtttaagcatatgcaagaaaggaccttggtttgatgaaacttgcaagagtggtgaaagaaaaatggagttcatgcttacctag

SEQ ID NO: 18450 - DNA, 432 bp, Zea mays
  Peptide Sequence Number=SeqID_61825
atgggttggactcgggctttcgggtacaaatatcggggctcgcgcccgctttcgccctcggccaacatctcgctccacctcgtcactgccacgcacacatccgagagagctccaccgggcaagatcggtcgccactaccgtatttcgggccaccgtcaatatgggccgaatgggtggtcgaggaggctcgccgagatatggggaaaccaatgccccccccaatttggcgatgtgatgctcggggtggacgaaatctctcgccgagatcgtacccccgccgcgcggccgccattcaacgtggactggagctttggcgctaacaatgaagggtcgtggccaaccatggcttcgccgtggctggttgctggcgtccgcgctgctggctggggaagaagagaagaatgggggatccatgcgagccataggatgtaa

SEQ ID NO: 18451 - DNA, 252 bp, Zea mays
  Peptide Sequence Number=SeqID_61826
atgacgaatggcaaggaagaaggggtgggcgggatctcaccttgtgacgacgacggacgacgaggcttgtcggacgtgaagaactcgcaggggatccttggccagcctgagcgatgcttgccaccgctgctgctacatgacactagggaggtgcgaccatggggaggagttgtggtctgcgacctccgtggctgggcgctgcaggagggcaacgtggtagtgagccaggcaagatcgtgggtggtttattga

SEQ ID NO: 18452 - DNA, 765 bp, Zea mays
  Peptide Sequence Number=SeqID_61827
atggccgcctttcccccgtgctccatcacccgggaccggcttgaggatttggaggcgaaaggcctgcgggcgggcctcagccgtggtggtcggccgttcgtcggctctttcaatgtccagctacatgggtcacggatggcgtcctacctctcaatcctccttctgtcctccgttcatggctatgagcgggagtggttctttgtttggaaccttgaggggagtgcacccgcgttcactggccttgtccctgcgggcaagcccaagtgggattatggtgcgaaaaagaagttcaagccaaagatatctttcatactggatgttgtcgccaagcagcagaggaagaggcagcgggacgcagaggaggcgtccatgatagcatggaagaaacagagttactggaggaaaggggaaaagaagagggagcgcttgacccgtgtcgggtcagggaggagcatcaccctgctgaccaatacgaaatatatgacctcctcaacttccagtggggtgcagcgttctgtatcgaagagcgtctctcgtcgtcctgatgatgcggcgaccagctccggcgcccttcaaaaagcggacgctgatgccggggtcggtgcctccgtcgtgctggtggggcctttcgagggggaaccggtgctgcctggtcttcttcttctcccactgcggcgactggggctggtgaggcatcacttcttcctgaggcaccagactcgcaagggggcccgtccggtggccgtcttgccctctgtttctcac

SEQ ID NO: 18453 - DNA, 171 bp, Zea mays
  Peptide Sequence Number=SeqID_61828
atgcaggcggcatgcaaccgcgccaagtgggcgcacttctccgacttccgacacgcccacacgtcatgcaaccggcacgccggtcgctacgcgacccaggaccgggaaagggggataccccgaaaaggatccttctccgtgaaggaaataggctccgagcctccctactga

SEQ ID NO: 18454 - DNA, 1296 bp, Zea mays
  Peptide Sequence Number=SeqID_61829
atgtcttcgcgctcccttatgcatcgcgtctttccaccttccgagcccccgaatgggggatacccgcagtccttccgccttgtcgttggaggaacgcaactccatgagagttggtacctttcagccatcgttcggcttcaaggattttcattagtcagcccggctgcatcccctcgccggtggtcacccaagacggtgaccaccagcccttgggtggggagaagcaagccgggctgcgatcttggtcccaccctcagcttcaaggatgttcatcatcctcgctggggtggaggccgggctgagccggagctctacctcccgcacgggttcgtgggtcagcctctccttcagcgttcgggggagagggcgctcactgaccctgcgagaggggcggacttcgacaacgctgggttggtcgacggcgggcgtcatcagcctcagcgtgttgggctcgccggcttggctcccggtgccccctcctgccgcgaaggcagttgtcgcgccgcgcgtaagggaggaccgcccaagacgccgcgcgctgctagggcgacgttcgtgttctggggcggtcctacctttgcaccggtacggcgcccccgcgcggaggtcggcggaggcggctcgagaagtccccgtcgccgacgggatcaccaccaccatccgcgcttcgggcctccggctctttgtacttgtcctcgcccctcgagcatcggcgtgggcgagggcaaggtcgcagcggcgttcgccctgaggccatcactgctgcagttcggccactcgcagagggggtcgttgtcgctgctgctggagcgggcgacggagtccctcggctcggtcgaccttgctgtccgaggcttctcttgcttagttaaaggaacacctcggccgctcttcgatgagccgaagccaggggtagcggtgtcagcacggacagaggcggagttggctcgaaaagaagacttggtcggccggagcctggccgggtcgtccgttagcgggaccgacgccggagttgatctgccgaggcctcgggccaggctgatgtcttcgggggacaactggccgaggcctcggggtgaccagccgagccgcctgctcgagccggattcttggaggagacccaggcagcgatggcccaggcgagatgatgaagtcatccttcagagtggatatcctcggaccgcgtcgccgtccgaggctaggcctgacctcgccgaaggtgtagtcgacgccgagggtgctgctgctcccttcaaccgtcaagatccgagcctgcaggatcgaattatcttgtag

SEQ ID NO: 18455 - DNA, 460 bp, Zea mays
  Peptide Sequence Number=SeqID_61830
atggcgcctcctgttgacgtggctggtctgcgccctaggttgggcgatgtggaagctcctccgaagccgaggtcaaggctgagcccaagtccgagccctgggtcgggcggagcggagttcgccgtcttccgggacttagcccgagtccgagccctgggtcgggtggagcggagttcgctgtcttccggggctgagcccgagtccgagccctgggtcgggcagagcggagttcgccgtcttccgggacttagctcgagtccaagccctgggtcgggcggagcggagttcgccgtcttccgggacttagcccgagtccgagccctgggtcgggcggagcggagccggtcagtggggcggcgaagtgacggcggtcacttcggctctgccagccggggggcgcgcgtcaggataaagctttatgctgatgggggttaccagctgagaattaggagccttgagg

SEQ ID NO: 18456 - DNA, 459 bp, Zea mays
  Peptide Sequence Number=SeqID_61831
atgacatgcgggtcgtgcgcgggcggttcggagtggaagggtccgacagacttgacccaccggtcagcgagagcgggcgagcgaacgggcggccgggctgacgagcgggacccgtgggacagcgaaagaagatgcgtgtgcgtggaggagatcggcgccgacaagtcggacccactgggcagcaagagggagaggggaagaggtgttacagacgccaacgccggaactggcgccgtaacgttcagcgtcatcatgaggccggagaatgggaccccacgcaacctgtatcccgagaccaggcatctgaagcaagagatacttctcacgacagggcgctccacgagcgccgcaattcctaatgccgcgatcgtcgccacacctaggatcgagagcgggaaagagtggagcgcaacgccaggcaccaacacgcgaacccgtcccttccctgaaacctactga

SEQ ID NO: 18457 - DNA, 114 bp, Zea mays
  Peptide Sequence Number=SeqID_61832
atgaacgtatggtgtgacaccttccactcccagctccgagcgattcaatggccgcctaacttcaagatctcgaacgtcgataagtacaagcccaagcaagatcggggcagctag

SEQ ID NO: 18458 - DNA, 3333 bp, Zea mays
  Peptide Sequence Number=SeqID_61833
atgccgtcctcttcctcttctgctgctgatacaccgccggtcggcgcatcgtccgaggatacactgagcaacgtggcagcggaggagttgcgtcctggtgataccgtggagtttggcgtctcgcggatgtcctcggtccgcgtgcaagatatgcaacaacttggatattttggcagcggagtggggcgtgtcccgggagcggaggaggtcctgcggagattcgaggtccaggtccaccagctgacgccaaatgccgtggtggccctggcgaagtatgtctgggcgacgacttcgtatggcggcacagtcgaagaccacccagggctccccgtggccgtcatgtgctcgcattattacatagcgtacccgcagtttgaggtagcggaggatgatgaagacgaaggagcccttctgtgcgctgcccgcatgagtagtgggcgcgatcttgttgaggaatttatcgggtatggggtatggcccttggcgcatggctgggcgctgggcgaagtatgccctcgcgagatgccctcccggggcgggcaactggtgcgaagtcctgccttcgcgctagatttgtgtggccgagatcccgccgcactcgtgcgtgaagctaaagacggtgcggtgaggatcgtgggccgctacgtgccgaagacagagggtctgcggagctgggatatccgtgggtccaatgataggttgaatcgggtcttcgaattgaaccggttgccgtacggtggttatcccggggaagacgccgccgaccgccgtgggaagaaaccgatgggtgggaccgaggaagggccttcgcaggatgctgccccggccgctaagaggaggaaattaggtactacggtggggggaatgggggtgtctgataattttgctgtggagttgatgagtacatgcgcggcccccgggggaaggatgtcttcgcccgagctccgggagtcttcggcgcgaatgctggaggttaccgagggtcgatggccaaagaatcttccgatcccctgggcagagggcgaagacatgtctacgtctcgtatagctcgtggcttgaggattttcccttacggacggaatattgctgttgttgtgtcggcagtgatgaacaaggaccgtcaggacgctgcgcagaagcgtcgggcggttatcaggatcgcagatcctaggcatgaggtgaagagagcgcgggggagcgcgaaggctgcagcccccggcagcagtcagccgatgtcgactgcgaaaccggccgcgcccggatccggcaagtcgtcggcgagcgcgaagacagccgccgctggcggggccaagcctccccggtcgaggctgcgaaagtacgggagctgccctcaccgggaaaacgtgttgccgacttcggcacgaacatcagcgtggaggactattttgttggtaagtttttttggaggtcttctgaccggtgatgtattgcagggccgggcgagggacaaatggttgttgtcccgcctttggtggcgaccacttcgtgcatcggcggtggtaagggcgaagggaaccgcgcaggacccatgggccgccttctgcgtaagcagcgagattctgacagccgttgccgctaaggacgtggcaggcaccatgtcgcagcagctgagtcaacacgcggatgccgtccgggagaagtcggctgcggagagcaaaaaccttaggctggcggagaaagtggctgccttggaggccgagaagacggacctccggcgccagctggtggaggaaaggaaggaggtgaaccaggccatcgctgaggcgcaggctgcgcaggcggaggccaaagtggcgcgggcggagggaagtctcgctagccagcgcgacgaggagtgggaagcgaggttcaacgccctgcgcggccgcatggacaaggccgaggcctctacgcgctcgaaggttgagtggacgctcgcacagttcgtggactcgtaccgcgagctgggtgcgcgtactgctgacttcgaggtgcccgatcaggaggcgggccttcgcttcctcgagtggttacaggaggagttgctggtactcccgaccatcatcgagggtttcatgtcctttgcctccctcgtcacctacgagggggccatgaatgcgttgtcctgcgagggctgcagacactacgaggtcttcgaccaatcagacgagagctttgaacgcgagatcttcaaggccgaagaccctattgtgaagtatttttgctcagtgaatgtgcttttgctgcagatggagcgtgccgaggacgtcgaggaccttggaggtctggtcggcgcaccgcccgaggctgcggagggcaatccggtgctgccctcggatgccggtgaaagccccttggccgtgcccgtgcctgctatggccagcgaagaccctgtgtcagcccctgcgccgacggtcgaaggtgccccggaggtggtggctgagccggcagtcgaagaccctatggccgtggccgtgccttcgcagggttttgggcctgcgcatgcaaccgctactgacaatgctaattttgtggcggcttcgaccgtggttgctgaaaatgattctaatgattccgtgtctaagttttttgagtctgatgattctgggagttcggttgtgtggtcggaagagtcttcggatgaggacttggattattatgcggccttggatgtggctgcagcggaggcttctctgcgtgtgatgggtgctgaagttctacctggtccgagtgctgggcataggcggcgaagggaggtggcgaaacggagggtgagtgaggtggagggtggtcgtcttcgtgtggacggggctagcaaacgggaattgttgtcctcgccggctggggcgagtgtaggtgaggggggagttgttaatctttttgagggtgaagagctgaggataatgttgttcaactacagggagatgggtatcatcccaaaggttgagccaatccaagtccagcctgaggcgccacaggaagctccgcctcgcccgaccccagggcttggcccccgccttggcctcggcaggcggtctccgcctcacccgaccccagggctcggcctcaacctcgacctcggaaggcggctacgggggaacaagaccggcatcccatccaggctcgcctcggtgacaagtaatgatggttccccgcgtgcgcccatgacgacggtggctctcagccccttacagaagcaaggagacatcagcaaggtcccgacagccccgatagctgtgcttctacagggcccaagcgctcctccgacggccacgacatcacatgcacagggctctagcacctctccgatagccacgttggcatgtacatag

SEQ ID NO: 18459 - DNA, 399 bp, Zea mays
  Peptide Sequence Number=SeqID_61834
atgagacatgagccatggcatggcgacgcgcgaccaggggagcgagatggcgaggagcgagcatgggtcgctgtagggcgaggcgcgccgccggctcaccggaacgacgatgcagctgcgagggcatgcagtgacgattgtgttgaccatggccgggacgtgaggccagggtacttagggcatcgcacacaggggccacggtctggcacgccggcgaccaggacggctcaaagcagcgcgacgttgcaatacagagaaagagagggaaaggtagaggattctcacctatgcatgtcgattgacgtagaggcaaggacacgacgggcgcaaggtttgtcggaggcgcgtgacttgtcgaagcacgaccggacaccgaggcctgccggcggtagtggctga

SEQ ID NO: 18460 - DNA, 81 bp, Zea mays
  Peptide Sequence Number=SeqID_61835
atgacggctatggccgagcccagcgcgcagtcgtcctccaggactgagcccctgttcagccactaccgccggcaggcctcg

SEQ ID NO: 18461 - DNA, 375 bp, Zea mays
  Peptide Sequence Number=SeqID_61836
atgggagttgagggagctggtgggggaatttataagcgagtgggggtgctcgggtgcggagtggcgatgacggagcaggtcacacgcggcagcaggtgcgacaaaggggtgggggggctgttgccggcgacgatggtggtggagggtacgctgcaaaggggaggtgggcggcggtactgccctgccaagggggcatgggcggtggtggcgcgcatggaggcgggcactcccgcaggggtccaaatgactggcggggtcgatgaccctgatgtttgtggtatctggttcccagaatctttgcctctctgtatgcttgttctaggcttcaagggtaagcttcccggtatcttcttgggtaaggcacttttctcttga

SEQ ID NO: 18462 - DNA, 282 bp, Zea mays
  Peptide Sequence Number=SeqID_61837
atggggattagctctccccgggtagaaagggaatcatggctcatgggtaaaagatacagatggttcgagatacaagaattacgttatggttttggttcgactatgatgatgttgttcctcgatgaggaaatgccaaacgggacatttgctgagtacgttgatgtgtactcatccttgctttaccacaaaacaccaggttgtccgcattgcaaccactgctcaggagaaggtgaagccgtggaaggagacttccaggagttccaagactacgacgaattctag

SEQ ID NO: 18463 - DNA, 69 bp, Zea mays
  Peptide Sequence Number=SeqID_61838
atggcgcgacggtggcccggggcaacggtggcggacctctgcggctgcacggggaacggcggggtttaa

SEQ ID NO: 18464 - DNA, 1101 bp, Zea mays
  Peptide Sequence Number=SeqID_61839
atgtccaccgccggcgaccccgccggcgcagcagcagcggcagcagctgctgctgcggcggcggcggcggcgcccgccccgtcagggcgcgcgccgaggctgccgcggtggacccggcaggagatactggtgctcatcgagggcaagcgcatggtggagggccgcggcgggcgcgctgggaggggccgcctggcggcagcggcggcggcggccgccgccgcagcgtcgggggaggcctcggcaacggcggcggcggcggcggcgctagagcccaagtgggccgcggtggcggagtactgccggcgccacggcgtcgagcggggccccgtgcagtgccgcaagcgctggagcaacctcgccggcgactacaagaagatcaaggagtgggagcgggccgcgccggccgagcgcgacccgtccttctgggccatgcgcaacgacgcgcgccgggagcgccgcctcccgggcttcttcgaccgcgaggtgtacgacatactcgagggccgggcccgcccagtcctcgacgaccgcgccgcccggaatgccgctgcggcggaagaggctgtggctgtggcggtggcggtgcacgtcgaggaggaggacagggaggcggaggtccccgaggccgtctttgacagtggccgcccggccacggaggaggccttgttctcggaggatgaggaggaggaggaggtagaggacgcaccggcggtggctcctcctccccctgcaccatcggttgtcgccgtgcctgtatctgagaaacccgaggcatcaaggcaccaacagagcgctgaacaaggcacatcgaaagacacacagcctgagcaaagctctgagagggacgcaccggctgagcagggtggacagaagagaccgcggaccgacgaagcggctggagaaggagaaggcacagcatacctgcagagcaagctgatcgagatcctagaccggaacagccggttggtggccgcacagttggaggcgcagaaccagaactgcgagctcgacagggagcaaaggaacgaccaggccaacagcctagttctcgtgctcggcaggctggccgacgcccttggcaggatcgccgacaagctatag

SEQ ID NO: 18465 - DNA, 1308 bp, Zea mays
  Peptide Sequence Number=SeqID_61840
atggaggtggttgagttggttccttgcgcccgcaacaagtggggcaattggaatgagttttggttttacgtcgcggagggtaccgtcgaagaccatgaggggctccccgtgtccgagatgtgctcgcatttttactcagcatacccgccctttgaggtggcggaggaggatgcggacgaaggggcccttcggtgcgccgccggcctgagaagtgggcgcgatttagttgaagaattcgtggcgtacggggtatggcccttggctcatggctgggcgttgggcgaagtgtgccctcgccagatgccttcccatggtgggaagctggtgcgaagtcctgccttcgcgctggatctgcaaagccgcgatccggccgcctttgtgcgtgaggcagaggatggggcgatgcggatcgttggtcgggtttttgaattgaatcgactgccgtataacggttatcccggccaagacgacgtggaccgctgcgggaagaagccggtggtagagtctggagacgaccctgcgccggcggccgccccatcctctaagaagaggaaactagttatggacaaggatcgccagagagccgcacagaagcgccaggcggttgtcaggcttcacgaagccaggccgaagaggcagtggggggctgcaaaggctactgcccccggcggaggcaagccgccgctggcggcgaagtcggtcgttcctgcatccatcagggcgccggaggctgcggctgccgccggtggttccaagtctgcgaaggctgccccggcgcccggcaaggtgccggaggctgcgaaggcggcccgagatttgtcgtcgccggtcaagcacgacgccgacttcgccaccgacatttgcgtggacgattatcttgttgggtcggacgaaggccaacttgttgttgttccgcctgccgcggcgaccacggcggctgccgtggtgccaagggcgaagggtggtgctcttagtgccggaggcgagatgccgacactcgctgctgttagggacgaggcgggcgctgtgtcccgccggctgaaggagatgaaggaggcactaagtcaggcggctgacttcgcagaccgcgcggcgtcgggggcgcttacgcggttgtgtctgccgaagtcgagagacttcggacgcgacatgctgacgccgtccgggagaaatcgaccgccgacatgtcacacccggattttaggggcaccaagatccgggcgcgaacataagttggtcaaaattttaggatggttagagctgagcattgcttttaaagttggtcaaaattttattagtaattactaa

SEQ ID NO: 18466 - DNA, 708 bp, Zea mays
  Peptide Sequence Number=SeqID_61841
atggacaaggatcatcaagatgcggcacggaagcgccgggcaatcactagggtcgaggaccctatgcgcgaggtgaagcgggcgcggggaggcgcgaagtccgccgcccctggcagcagcaaaccaccaccggcagcgaagcctgccgtccccgggcctagcaagtcttcggcgggttcgagggctgctgcttctggcgtgggcaagctgccctcggctgagcccgcgaaggagcgaaggtcgccgttgccggtgcgcaccgacgaagcggcaacgggtggtgctgacttcgatacggacatatgtgtggatgattacctcgttgctggctattgtcccgtctccggtggcggccacttcgcctgcggtggcagttggagcgaaggatacttcgtaggacccgtggtccaaattctgtgccagtggccagatctcgtcggccactgccgccaaagacgtggcgggctctatgacccagcagctgaggcatgcatcgcgtcagctgaagcatgtaagccgtttgggacttcattagttcgttgtttttatgtggttgcaagtttgatggatgtttcgtggcaggcgaccgccttcgccgaccatgttgcgtcgggcgccctgacttcggagttcgctgccgagaggcaacgactagagggcaggatcgagcgcctccgggcgcagcatacggatgctattcgggactag

SEQ ID NO: 18467 - DNA, 282 bp, Zea mays
  Peptide Sequence Number=SeqID_61842
atggatcttgatccagacgccgaggcggtggagcatgagcttgaggatcacaatgagcgtctggatgaaatggccttgtttggaactagcactggcagtaatgcaggtgcagccatagatatgtttgaggtcttatcctgtattaaggattgggagctagcaaataagcatatgcagaataccgtcgagaaggagaccaagagcaaagtagagaagcaaactcttgtggatgacgatggtatttttaccgaggtatccggaaccgcgcaaggtcccgactaa

SEQ ID NO: 18468 - DNA, 411 bp, Zea mays
  Peptide Sequence Number=SeqID_61843
atgtcggagatatttatgtgctacatttttattatagaggagttagacgaagagtgtcattacttgtgtttgggctctaactcattttgtagagaaaattcacttttggggcttgtgtttgcacattctgtgaatcctattgaagtaaagtggcaaagagaacttttcaaatcaagccagaaggagacaaagaagttcagcacaaaagaggagaagttgggccagattgggagccactggatatcatccgagaacaaggaccaacattggcgcccaccgttggtaaactcattcgaccaccttcggcaagcatcgaccttcgtcatgccaccaaagaagacagcagcgccaggggctgcactgcagccactggacgttaatcaggagatgctacacgaagctagaagctag

SEQ ID NO: 18469 - DNA, 84 bp, Zea mays
  Peptide Sequence Number=SeqID_61844
atggcgccgccgcggaagtctgccgccgccgtgtctagtgaggggaattttatccccgagacccctgcacttttcagtaaatga

SEQ ID NO: 18470 - DNA, 165 bp, Zea mays
  Peptide Sequence Number=SeqID_61845
atggcacctaagagagctagttcgaaggcagccccatctgtcgatgaagcagcaaaggcagctgttgggggccttcggcttccgaaggtatcttcggactcgaatcggtaccacagtgggagaagcccaaagagtacgaaggtcaacacagcatcgaagctgtaa

SEQ ID NO: 18471 - DNA, 279 bp, Zea mays
  Peptide Sequence Number=SeqID_61846
atggcacggtatgaatttagctcggtccaaacacggcccgacacaattggttacgggtccggaccggcacgcacttcacttagggaattgtcggcgttccgagaccggggggtccctaagccgacgagtgaatgtcgccgcgtgccccagcccagattggtcgacgcgaggccgagcgcgaaggggggaagtgaggtggccggagatgggcgtgagagaggtggaaatcccgcggccttcgtgttcgtcccgcgcccaggtcgggtgcgcttgcagtag

SEQ ID NO: 18472 - DNA, 570 bp, Zea mays
  Peptide Sequence Number=SeqID_61847
atgggagttggtacctttcagccatcgttcggcttcaaggattttcatcatgcagcccggctgcacccctccaccggcggtcacccaagatgcttcaaggatgttcatcatcctcgctggggtgggggccgggctgagccggagctctacctcccgcgcgggttcgtgggtcaccctctcctgcggcgttcgagggagagggcgctcactggccctacgggcggcccggacttcgacaacgcggggctggtcgacggcgggcgtcgtcacccccagcgtgtcgagctcgtcggcttggctcccggcggcccctcctgccggagggcggctgccgcgccgtccggagggctgatggcccctgccgtcggtgccgaggcggaggcggctcgagaagtccccgtcgccgacgagatcaccgccaccatccacgcttcgggcctccgggttctttgtgcttgtcctcgcccctcgagcgtcggcgtgggcgacgacaagatcgcagcagcgcccaccctgaggcctgcgctgctgcagttcggccatccggagcgggggtcgttgtcgtcgtag

SEQ ID NO: 18473 - DNA, 401 bp, Zea mays
  Peptide Sequence Number=SeqID_61848
atggggaggaagcaatccctggaggttgtatgggcgtcgggtccgccatgcgacgccgccagccacccgcccgccgcagctagcggcacaacggccaggcgtacgaccacgcacgcaggtcacagcaccggcagtccgctgggaccagccttgctctgctactctggactcgatttcgccatcgcacgacctagccaccaaccctgtcgcactccaccactggagaaaggtcgacggcgaaacgagcgggaggacgggagggagcggctgcagctgcgggatccgtgggggatgcgggatctgggggcggggcgcgaagggagcacgggagggagcggctgcggcgcggctgcgggatccgtgggggatgcgggatctgggggcggggcgatgcgtggggg

SEQ ID NO: 18474 - DNA, 450 bp, Zea mays
  Peptide Sequence Number=SeqID_61849
atgaagcaatatactaatcactacaggagaagatcggagcaggatagagctcatactagatggagttctgagcgagaggctaacaatgatactgaaaagctctatccaagctcttccttgagtatggaagacataaagatcgacactgaactccacgagatcactgtcttgtacaagcctgaccagacaggtcccagggaccttattgaagtcatcgagtcagccatttctggtgttgttacagcatcaattatatgcagaagcagaatgaagggagcatcacagagccatgtgaatgaaagcatgattactggagaatcactcccagtagcgaagaggaagggtgacactgtaatcggaggaacagtgaatgagaatggcgtgctccatgtccgggcaacatttgtcggatcagagactgcactggcacagatcgtccggctagtttga

SEQ ID NO: 18475 - DNA, 231 bp, Zea mays
  Peptide Sequence Number=SeqID_61850
atgtccggtgcaccaagaccgtacagggctgaactggccactcttgggtttcttcaggcgctctccgccataattcaccggactgtccggtgtgccaacggagtaacgactatccagcgcagcggtcgactgcaacgctacagtgcgcaacagtgcgcggcagagtcagaggcacatcggacaatgaacagtggatgtccggtgtggcgccggactgtccggtgccactag

SEQ ID NO: 18476 - DNA, 588 bp, Zea mays
  Peptide Sequence Number=SeqID_61851
atggcccaaaggcacatttccctttcaatacttggagcgtactcgaaggctgaagatgaagctatgatggttgccttcggcgcttgcagcaagaagaggttaaatagagtgtttgatgttattgggcgcatcgagacggcctatgtgccgaagctaagtgaaagggtggaaacaacccccctagccatagagattgttcatgttgtacctattgaagctattgcagtcctggctagagagccagagccagaaaaggtagcagaaaaaatgccagagccacagaagatgattgtgacagcactgccgaagctgccagttaccataggaactccaaggaagaggaggatggctagtgtcttggaagctgttctagaatctatgaaaacgccgcctcctccttcttccgaagcttctggcagcaaaactgaagatgtcccagagatgattactgccagtacctctgctcacgctgaggcgggaccttcggaagctatacttgaaaatattgcggaagagagccttccaacgattccctcggtgcctgctcccgaagcaccttccagcagcgatttgaattttattgtgtga

SEQ ID NO: 18477 - DNA, 273 bp, Zea mays
  Peptide Sequence Number=SeqID_61852
atggcagagcacaaccttccccagcgcacaacgtcgcgtgtaagtacgtcagccggctctaaggtcatcatgctcaaagctcaccatgccgccgtcgttggcctagctcgtaccgatgttcgggacgtggcatacaagaatctggctgtggagagaatctggctgtgggaagaatctgagggcctgtttggcaaagctccagctcctgcttctttagctctagatcctgatcctcgtgaggagctgatcctcctgattctcctaaaaaattag

SEQ ID NO: 18478 - DNA, 105 bp, Zea mays
  Peptide Sequence Number=SeqID_61853
atggtgacaagatcatgggcgagggggtggcgtgcgggaggtgatatgctgcagctgacggcgctgtccttccacctagtccttgggtatatgagaagaatttag

SEQ ID NO: 18479 - DNA, 1014 bp, Zea mays
  Peptide Sequence Number=SeqID_61854
atgagcagcccccatggcggcctcgacgaccagatcgagcggctcatgcagtgcaagccgctcgctgagcccgaggtaagggctctgtgtgagaaggcaaaggagattctgatggaggaaagcaatgttcagcctgtaaagagtcctgttactatatgcggtgatattcatggacaatttcatgatcttgctgaactcttccgaattggtggaaagtgtccagatacgaactacctgtttatgggagattatgttgaccgtggttactactctgtcgaaactgtcacacttttggtgtctttaaaagttcgatatcctcagaggatcaccattctcagaggaaaccatgaaagccgacagattactcaagtttatgggttctatgacgaatgcttaaggaagtatggaaacgcaaatgtctggaaaacatttacagatctatttgattacttccccttgactgcattggtcgagtcagaaatattttgtttgcatggtggattatcgccatccattgagaccctcgacaacatccgcaacttcgaccgtgtccaagaagttcctcatgaaggtccaatgtgtgatcttctgtggtctgatccagatgatcgatgtggttggggtatttctccacgtggtgctgggtatacctttggacaggatatatcagagcagttcaaccataccaatagcctaaggcttattgctagagctcaccaattggttatggagggtttcaattgggctcatgagcaaaaggtcgtgactatatttagtgcacctaattattgctaccgctgtgggaacatggcatcaatcctagaagtggatgattgcagggaacatactttcatccagtcccttgagattagtcctttgacagtctgtctttctgtccgggccattgagagctcgtgggacagtgtgcacattgatttcgtatttttgttccttcgtctgctatcttgcttcatggttactgtggcgtctttaatgggttctgcaaaggtttga

SEQ ID NO: 18480 - DNA, 1365 bp, Zea mays
  Peptide Sequence Number=SeqID_61855
atggattccaaaaaatttgcaagcgaaggggcgcctcccgcccacagccgaataaccaccccaaccctaggaatccacaaggaccatgacaacacagaatccccgagacccgacgcccccgacgagaacgcgacaagccatcggcagcattcggatcgggcgccgccagcacccggccgtaccgatcgccctcccttcccgcgggagccccgcccggtaaaaacgaagctcgagcagtgcatttttccaatctcaggagaggagaggtgggatgaccgacctggttctcgcgcggcgcgctttgcccggatctcgggaggaggggaggaggcgaggagatgcgattttgtcttcttcggtctcgagcgagggttcttcggcgaccgcgacccggacgcggaagggacccggtcctaccggcccacaggagcgggcgtccccgcgacgccacgactcccgccaaaccatagccacgagttccctgctcccccggcccccgctaccccgccaatcctgtcccgggtttctgccgccggccgccatcacgcgatggatcccctctccctcctgcagctccctcgcgcctcgcgcccaccgatgcccctggccgcggccgccgcgccattggtctccgcgaggctaagcgtaagcggcggcgcgcgctccgttcggaggcggcgacggcgccgcgccgctgggctgtcggtgttcgccgtggcgaccgagacgccgcggaccgaggagcagcagccgtcgccgtccggggaggagcggttcgactggctggaccagtggtacccgctggcgcccgtgtgcgacctcgacccgcgcgcgccgcacggcaagacggtgctggggctcagcgtcgtggcctggtacgaccgcggcgccggcgagtggcgcgtcttcgacgacgcctgcccgcaccgcctcgcgccgctctccgagggccggatcgacgacagggggcgcctccagtgcgtgtaccacggctggtgcttcgacggcgccggcgcctgcaagttcatcccccaggcacccgccctcggcccgccggtgcacacgagcagcagggcgtgcgtggcgtcgtacccctgcgtggtgcagaacaacatcctgtggttctacccgagggctgaccccgagcatagcgacgtgctgcagaggaagcgcccgccgctcatccctgagattgacgacccggacttcgtcaccgtctatggcatcagagacctcccttacgggtatgatattttggttgagaacctcatggaccctgctcatgtcccgtatgcacacaaggggatcatgcgtggcattcgcaagaaggaagatcctggaagatatgtccctgatcttacatga

SEQ ID NO: 18481 - DNA, 366 bp, Zea mays
  Peptide Sequence Number=SeqID_61856
atggccgttggctgtcaagcgtcgagcgatctccaagcgagcaagccattcaggatcaggagacatgacttttcgtttcaggaatcacgcgagagccttttcgggatctccctgcgaggccgcggctgccggccctggtttcctccgcatggacaggagatttgcccggcaggcggcagcggcatctctgcgcaaaggcgacaagcggactgcggcgcgcctgtgcctgctggctgctgcgagatgaaaacaccagcaaactccattccagcattcccggcacacgtacagacccgacgagtactcagtagaaaagtgctaactaatcgatctcggcgcaagatggtggtggctattgcctactag

SEQ ID NO: 18482 - DNA, 1989 bp, Zea mays
  Peptide Sequence Number=SeqID_61857
atggcggcgagcgcgagggggagcgtgtgggagatccagccgcgcgacgtggaggccgcggggctcgccgcagccgacgcggccgcgttccacgccgcgctccgctccgccgcgggctcggcagccgcctccggggacgccgtgtgggcggccgtggccgcggcgggggtgctgcggccggagcacccgcacgcgctccaccagctcgtctactactccgcctacgccgggtgggaccgcgccgcccggggcccgccgccgtactggttcccgtcaccaactgactgtaagcaaacgaacctggggagattgatggaagtaaatggaccaaagctgttaggatcatcatacagggatcctatatcaagttttaaccacttttacaggttttccgtagagaaccaagaggtctactggtcaatggtgctaaagcaactcgcagtcaagtttaaacaagaaccaatgtcaattctaagtacgtcagatagatcaaagaaaggggggacatggcttcaaggtgcagtgctcaacatcgctgagtgctgtctgttgccttgtccttccctgaagaggacagatgacagtacagctatcatttggagggatgaaggccttgatgattatccagtgaaccgaatgtcactgaaggagcttcgcagtcaagtgataactgtcgcacatgccttagatgccatatttgagaagggggacccgattgcaatagacacgcctatgacatgcaatgcagtcatcatatatttggcgatcatccttggtggttttgttgttgtatctatagcagatagttttgcacctcaggagattggtagtcgtatgggtgtctccaaagcaaaggcaatttttacccaggatttcattgttagaggagggaagaaagttccattgtacagccgtgtcatacaagggacttcatctaaagctgttgtgattcctgcaattggagattctcttggaattatgctaagggatggtgatatgtcctggaaagattttctttctcacgctgctggaaggtcatcttcatattctccagtttatcaatctgtggatgcactaactaatatactattttcttcaggaacaaccggggagccaaaagcaataccgtggacacaactttctcccataagatgtgcatccgatacctgggcacatttggatgttcgtccgtgtgacataggttgctggcctactaatctgggctgggttatgggaccaataatcatctactcatgctttctgactggggcaactttggctttataccatggatctccacttggacgcgatttctgcaaatttgtacaggatgctggtgtgactgtattaggaagtgtgcctagcttggtgaagtcatggaaagctgggaactgcgctgaagggcttgactggaccaaaatcagagtactaggcacaacgggggaggcttctgatattgatgacaacctgtggctaacttcgcgtgcctcatacaagcccattgttgagtgctgtggaggcacagagttggcatcctcatacattcaagggagtcttctgcgaccgcaggcctttggagcttttagtggcgcatcaatgtccactgggtttgtcatacttgatgaacagggaactccgtatcctgatgatataccttgctctggagaagtgggtctcttccctttgtattttggtgctactgatcggcttctcaacgctgatcatgacaaggtttacttcgatggaatgcccatttataaaggaaggcaactcagacgacatggagatataatccagaggacagtaggcgggtactatattgtacagggaagggcggatgacaccatgaacctcggtggaattaaggttggaggcccctcttccaaagtgttcaatcatttaatatcatccttgtgttacatgaaggaaaccataacctgccaacatataccattacaaattagtggttctttaccgaaaggcatttga

SEQ ID NO: 18483 - DNA, 1614 bp, Zea mays
  Peptide Sequence Number=SeqID_61858
atggcatttgcatcccttacgtcatcacaaaatcataacgcccgcccgaccctttccagcaaaagaagtagtactggcccgtccagctccccccgcgatcccgacgaccccgtccgcctcggcctgcgcctccccgctacaagggtccgcccgcgggcgccgcggtaccagcgagcccctcctcctccacactctgcggcgcggagatcctgtccctgtgccccggaccgagaggagccagacgccggcgtctggaattcggacatggaagcggcggcggcggtcgtaggcttcggcgctggcgcgggcctgaccaggtggcaggcggcggcgctgtcggcggtggccggctgggtgtgggcggcctccttctacgacctcacgcgccgggcgcgcgcgctcgtccagccgtgggtcacgcgccgggtgcacgccgagacggcggccattctcaggttccagaggctggagcacaagttgctggacaatatcttctctgtgctgtcatgcgttgtctccgtgcccttctacacgggattcctccctctcctcttctggatgaccctcctcatggctttctgtgactacctcggcaactctgtcaaggatatagtgtcagccgctcggccgtgctctcctcctgtaagacgagtgacggctacagaagacgagaaggaaaatgccatggaatatgggcttccatcatcgcatgctctcaataccgtttgtttgacgggatatttactacactacatcctcacgtttggagaacatggtagtgttacagttgctgcgggtttatctctagctttcttgcttgtcatgctagttggcatcgcgaggatatatctgggtatgcacagcttgaccgacgttgttgctggaattggttttggcgtcgtcatccttgcgttctggttggctgttcatgaccgtgtcgatgccttcgttgtctccggggaaaatggtacctccgtaaacctcagcgctttgggtgcttcaaattttgtggaggaacacgaccacgaggtgtggcgttggaaatcgatcaagtatcatcctaacagctttccccgccttgcagttgcgaccttctgggcaggcctttctctgttgctgtgctttgcgtacccgaagccggagttccctactcctagcttcgaataccacacagcattcaacggggttgctttcggaatcgtgtacggcatccagcaaacatacttccacttccacacccctgacgccccggtcgtcttcagcgccgagctgcccctgctcacgttcgccgggcgcgtcctcgtcgggatcccgaccatcctggccgtgaaattctgcagcaaggcgctgtccaagtggctgctgcccgtggtgtgcagcaccctgggcatccccaccgtgtcgtcctgctacgtcccggccctgagagccgacagcggcagcggcagcggcaagaacaggcagggccccgggcacctgcagcggctgctgttctcccacttcccccggaaggcgtacgacgtggacacgggcatcaggttcgtccagtacgccagcctcgcgtggtccgtggttgacttggtaccggccatgttcgcccatctgaatctgtag

SEQ ID NO: 18484 - DNA, 990 bp, Zea mays
  Peptide Sequence Number=SeqID_61859
ggcgacgtgggggttcctccgaagccgaggttgagtctgccttttgttgccgcggccgagcccgagccaaggggtcgggcgaggcggaagtcgttcggccgaggccagggcggagtccgagccctggggtcgggcgaggcggagtttcgtcgtcttccgggtcttagcccgagtccgagccctggggtcgggcggagcggagttcgccgtcttcctggtcttagcccgagtccgagccctgggtcgggcggagcggagttcgccgtcttccgggtcttagcccgagtccgagccctggggtcgggcggagcggagttcgccgtcttccgggtcttagcccgagtccgagccctggggtcgggcggagcggagttcgccgtcttccgggtcttagctcgagtccgagccctggggtcgggcggagcggagttcgccgtcttccgggtcttagcccgagtccgagccctggggtcgggcggagcggagttcgccgtcttccgggcggcgctgtccttctgtcagactggccagtggagcggtggagtgacggcggtcacttcggccctgccgggggcgcgtgtcaggatagaggctcgggcgaagcgtgatcgagttcactcgtgtggactgatccctgacttaatcgtgcccatcaagcctttgcagctttatgctgatgggggttaccagctgagaattaggcgtcttgaggcgctctcgggtttctgcgactgggaaggctctgctgtgaaccagcctggtcccacctggcagagggaggaggtgacgggggcgcatccggtcgaggtcgaggtagcagagcaaacgccgacggagggcagcgctgcaggagctaccggagcagaagcagtcacagatactgccacagcggtagtggaaacagcagatgctggtggcactggcggctgcgggcagacagagctgagaactggtgaagtgaacgcctttgtgaccggccggagcggcgag

SEQ ID NO: 18485 - DNA, 381 bp, Zea mays
  Peptide Sequence Number=SeqID_61860
atggagagaggcgaggtcgccggcgatgatggccggagatggtggccgccggagaggtcgccggactaccgcaaagcagagacgaggcgcctggagacagagagcttgcggctgggagaagaaatgagacagagcccctggctcggtcgggctgggggcgattttttaaaacgcgagatgggcacaccggacagtctacagtggctgtccggtgcacaccggacagcgcacagtagatgtccggtgaaccaccggacagcgcacagaaaaaaaggaacttcgcgcgcggctgccggtgcaccggacattgcacagtgcagtgtccggtgcacaccggactgtccggttagacaagccctagatgcaatacaaggaatttaa

SEQ ID NO: 18486 - DNA, 282 bp, Zea mays
  Peptide Sequence Number=SeqID_61861
atggcgcttggaagtcgggcgcgcgcgacatccgtcgattcggcttgggcgctcgcgcgcgggtgctcgcgcgggacaccggccggcggctcggcaacgcggggaggaggaggccgggcgcggcctgggctcctgcgcagggctggcgcgcggtcgtctgctaacggccgttcggccgtctgcccgcgtgagagagagaggagcggtatggccaaggttgcttcacaacgaagcatgcccgagccaggcctcgggagagcagagggggcgcccaccgtctga

SEQ ID NO: 18487 - DNA, 78 bp, Zea mays
  Peptide Sequence Number=SeqID_61862
atgggcaaaagggggagcggaaaacaatgccgcccgctccgcttcgactgtcgtgccagccaccccgacaacgactga

SEQ ID NO: 18488 - DNA, 99 bp, Zea mays
  Peptide Sequence Number=SeqID_61863
atggtggtggccccctgggtgaagtaccttagccaagtatacgaccccatgttaacgtgggtttttgcacctaccgctcccccttttgcccatcttcag

SEQ ID NO: 18489 - DNA, 1206 bp, Zea mays
  Peptide Sequence Number=SeqID_61864
atgccagggaaggcgaactgctgctgcccagccagggtgcaacattccgtcctctgtccgggcgacggtggccagccgcatcggggggtctcacaacacatcgtacgccgcgagggcggtactcgtgttctggggcggtcccattctcgttctcgtggcgaggacgagaatgaggacctgccggtgcgctttggggcggccggcgcccgctggtgtggtgttggcggacaggtggacgccgccgttggtgctgaggtgggggaagccggagaaggtttctctgccgacgagatcgccaactccgcctgcacccctggacctccgtctccctggcttaaatggctggttctcgtcctttgtgggcgagagcttttccaccgcagcgtttgcccggaagccgttgctgcagctgtcttgccgcccaggacggaggtcgttgccgctgctgtcggagcgtgcggcggtgagccgcttggagttcgttgtcccgcgggcctcctggaacaatttgtctgtagtgtgctgtcggcgtttcgagacaggggggtccctaagccgacgagtgagtgtgctgcgtgccccagcccagatgggtcgagcgtgtgggcgagcgcgaaggggggagaggcgaggtggccggagtcgagcgtgagagaggtgcagggcgacgtgggggttcctccgaagccgaggttgagtctgccttttgttgccgcggccgagcccgagccaaggggtcgggcgaggcggaagtcgttcggccgaggccagggcggagtccgagccctggggtcgggcgaggcggagtttcgtcgtcttccgggtcttagcccgagtccgagccctggggtcgggcggagcggagttcgccgtcttcctggtcttagcccgagtccgagccctgggtcgggcggagcggagttcgccgtcttccgggtcttagcccgagtccgagccctggggtcgggcggagcggagttcgccgtcttccgggtcttagcccgagtccgagccctggggtcgggcggagcggagttcgccgtcttccgggtcttagctcgagtccgagccctggggtcgggcggagcggagttcgccgtcttccgggtcttagcccgagtccgagccctggggtcgggcggagcggagttcgccgtcttccgggtcttagcccgagtccgagccctggggtcgggcggagcgtag

SEQ ID NO: 18490 - DNA, 720 bp, Zea mays
  Peptide Sequence Number=SeqID_61865
atgcaggtggcatgcaactgcaccaagggggcgcaccctttcgacttcgacgcgtccagcatggaggcccaggctcacacgtcatgtgaccggcgcaccagttactacgtgcgaaaaactgcagcgccacttgtgccagcgccgtgccttctcgactgtggaaccggtgccgcaactcgaggcaaccatgcacacggcccaggagtgccaaccagacacgctagtcacgggacagtcacgcgcgggagaaggcgcgacggtcaatacggccagaagtgggccgacaataatggcggtggcaggcgggcggaagcagcagtcaaatcatccgcaggctcacgtcccctcctggaacagcgagagagccctctcccacgggaccaggaaagggggatactccgaaagggatccttctccgcaaaggaagcgggccccgagccccctactgatcagaggttcgaaggctggcccctcggaagggttcgacagccgcctcagagcactcgggctccgtgcccccaactgatcagaggttcgaaggttggcccctcggaagggttcgacagccgcctcggagcactcgggctccgcacccactactggtcagagaggctcggggacccggctccggccaaaccgttgacagcttcaacataccagcccgagaactcggaacctgactatgcacccgggcaacgaccagttcgcatgagggaataa

SEQ ID NO: 18491 - DNA, 720 bp, Zea mays
  Peptide Sequence Number=SeqID_61866
atgaggtggggcccaagcgatttccacactccatgcatcaccgtggaaacaaaaagaaaagaaaatctgcatgtggagcccacggttgttcttctccagcatagcctgggcgggactacgtctctgcgacatgcgtgggtgtgcgccggcgagagaacgcatctggctttccgcgcgcgaggggtgtctcttggtggcgcgcgaccgttggaggcacgaagcgccacttccacgacggcgaaggcggactgcgattggggcacatgcctgcgcggctcgccggtgactagccagacggggctggtcgggcatggagcgaggacggtcatgtgggctgctcatgcgaggaggcctcggccacgcatcggcctgctgcgcgtggatgggaaagagaaaccagaggagagagggagaagaagagggggctcacctcacgctcgcgacaacggccaggacggcgaggtgctccgacgagggcgtgggcaacgtcggggcgagctcgcgacggaagccggacgcaacactagcggcggcctgatgcacgcatcatggcgcggcgggcgctggcggtgctgggcgcgagtgggcgagaaaactgctccgagggctctcttcggggaagatgaacaggggctgggcgagatcgtggcggcgagcgcagctacgcgcggggacgagccgtgggaaggggcgcgctgggtggaccgcgggggcgcgtga

SEQ ID NO: 18492 - DNA, 268 bp, Zea mays
  Peptide Sequence Number=SeqID_61867
atggcggtggcaggcgggcaggagcagcggacaggcggcgcctctggcaggagaagcgagcgacgcttcgccttcgccataatgaccgcgttaaaaaaggctggcccctcggaagggttcaacagccgcctcagagcatgtgggctccacacccactactggtcagaggttcgaaggccggcccctcggaagggttcaacggccgcctcaggctactcgggctccgcgcccactactgatcaggggttcgaaggctggcctccgaagg

SEQ ID NO: 18493 - DNA, 990 bp, Zea mays
  Peptide Sequence Number=SeqID_61868
atggaggcccaggcccacacgtcatgtaaccggcgcgccggttactacatgcaagaaactgcaccgccactcgcgccagcgggcggaagcggcagtcgagtcgttagcaagctcacgtcccctcctgggatagagaaaggaccttctcccacggcggaagacgacacgacagacgacacctttggcaggcgaagcaggcgacgcttcacctccgccataatgaccgcgtcaaaaagggctagcccctcggaagggttcaacagccgcctcagagcactcgggctccacgcccactactggtcagaggttcgaaggccggcccctcggaagggttcaacggccgcctcaggccactcaggctccacgcccactactgatcaggggttcgaaggctggcccccaaagggttcgacagccgcctcagacgcagagcgagggatgaccctggtcgacagagtgaggctgacagcagccaagtccggcctcgggcgccataggaaactccgcctcgcccgagcccagggctcggactcgggctcggccccggaagacgacgaactccgcttcgcccgaccccagggctcggactcgggctcggccccggaagacgacgaactccgcctcgcccgaccccagggctcggactcgggctcggccccggaagacgacgaacttcgcctcgcccgaccccagggctcggactcgggctcggccccagaagacgacgaactccgcctcgcccgaccccagggctcggactcgggctcggccccggaagacgacgaacttcgcctcgcccgaccccggggctcggactcggccttgacctcggacgacgaactctgcctcgcccgacctggggctcggacacgacctcgacctcggaagaccgactcgaccccgacctcggaggagcctccgcctcgcccgacccagggctcggaccgaccacgtcacaggggaggccatcatcaccctatccctagctag

SEQ ID NO: 18494 - DNA, 303 bp, Zea mays
  Peptide Sequence Number=SeqID_61869
atggcgtctagcctcaatgttgaggaagacagtgccatctacgtcgctccgactgctgtgccactcgacagagtgaggctgacagcagccaagtccggtctcgggcgtcataggaaactccgcctcgcccgaccccagggctcggactcgggctcggccccggaagacgacgaactccgcttcgcccgaccccagggctcggactcgggctcggccccagaagacgacgaactccgcctcgcccgaccccagggctcggactcgggctcggccccggaagacaacgaactccgcctcgcctga

SEQ ID NO: 18495 - DNA, 489 bp, Zea mays
  Peptide Sequence Number=SeqID_61870
atgggcgcaattccggaaaacagcgccgcctgcgctgctccgactgctgtgccacctgctagggtgaggctgacagcagccaagtccagcctcgggcgccataggaatctccgcatcgcccgaccccagggctcggactacacctcgacttcagacgacggtctccgcctcgcccgaccccagggctcggactccacctcaacttcagacgacggtctccgcctcgcccgaccccagggctcggactccacctcgacttcagacaacggtctccgcctcgcccgaccccagggctcgggctcaacctcgactcggaagacggtctccgccttgcccgaccccagggctcgggctcaacctcgacacggaagacggtctccgcctcgcccgacccccgggctcggactcaacctcgacctcggaggagtcaccactttgctcgggccgaccacgccacaagggggccatcattaccctacccctagctag

SEQ ID NO: 18496 - DNA, 879 bp, Zea mays
  Peptide Sequence Number=SeqID_61871
atgtcgggcgtgttgggagtcggagaagcgcgcccacttggcatggttgcatgccgcctgcacggctacccgccctttcgcccgctggtctgggcaaaagtggagagccgcttcccacgacggctggggacgcaagttgggagagtcgcctttaaaaggagggtgaccctcttggaaggcgaccgtgtcttcgcgctcccttatgcatccccggtcgcacccctccgccggcggtcacccaagacggtgacctccagcccctggatggggagaggcaagccgggctgcgatcttggtcccaccctcagcttcaaggatgttcatcatccccgctggggtggaggccgggttgagccggagctctatctcccgcgcgggttcgtgggtcggcctctccttcggcgttcgagggagagggcgctcactggccctgcgagcgggtcgaacttcgacaatgtggggctggtcgacggcgggcgtcgtcagcctcagcgcgtcgggctcgtcggcttagctcctggtgccccctcctgccggaaggcggctgccgcgccgtgtgcacgggaggaccgcccaagatatcgcgcgctgccagggcggcgttcgtgttctggggcggttctccctttgcaccgctacggcgcctccacgcagagaggaaaccctcggccgctcttcgatgagccgaggccaggggtagcggtgccagggcgaacagaggcagagttggctcgaaaagaagacaagagcggagacccttggaccgcgtcgccgttcgaggctaggtcggacctcgccgaaggtgttgtcgacgccgagggtgctgctgctccctttagccgtcaagatccgagcctgcaggatcggattatcttgtag

SEQ ID NO: 18497 - DNA, 720 bp, Zea mays
  Peptide Sequence Number=SeqID_61872
atggcgcctcctgttgacgtggcggtctgtgccctaggcagggcgacgtggggggcggagtccgagccctggggtcgggcgaggcggagtttcgtcgtcttccgggtcttagcccgagtccgagccctggggtcgggcggagcggagtttgccgtcttccgggtcttagcccgagtccgagccctggggtcgggcggagcggagttcgccgtcttccgggtcttagcccgagtccgagccctggggtcgggcggagcggagttcgccgtcttccgggtcttagcccgagtccgagccctagggtcgggcggagcggagttcgccgtcttccgggcggcgctgtccttctgtcagactggccagtggagcggtggagtgacggcggtcacttcggccctgccgggggcgcgtgtcaggatagagctttatgctgatgggggttaccagctgagaattaggcgtcttgagggtacccctaattatggtccccgacataaggtgatgagtgaggtatccgtatcccggaggcgtaggaatccctcggctcggtcggccttgcctgcttacgtcgggatcccttatctgagcgcgagttacttatcgcagaaggtgatgagtgaggattccactttcgaagtagtcgaaaagcatgaaaaatgttctggcagaaagattttttccgaggaaaattttgacgcagagggggttccccccttctag

SEQ ID NO: 18498 - DNA, 351 bp, Zea mays
  Peptide Sequence Number=SeqID_61873
atgggtcgacgcgaggccgagcgcgaagggggaagtgaggtggtcggagatgggcgtgagagaggtggaaatctcgcggccttcgtgttcgtcccgcgcccaggtcgggttgggcgatgtggaggctcctccgaggtcgaggtcgagtccgagcccctaggtcgggcgaggcggaggcagttggctgaggccagggcggaatttgagtcgaagcggagttcgtcgtcttctggggctgagcccaagtccgagccctgggtcgggcagagcggagttcgccgtcttccggggctgagcccgagtccgaaccctgggtcgggcggagcggagttcgccgtcttccggtgctga

SEQ ID NO: 18499 - DNA, 645 bp, Zea mays
  Peptide Sequence Number=SeqID_61874
atggtgtctccggtgagctgcaagcgggtaatccaagtggacgtccgtgccccgttcgttgggggtcggctaggggcccagaggcacgcccaaaagtacctgcggcaactggcgcgccggttgctcgacgcgtgggcctgggttcccaagctggcgtgtcagaagtcggagaagcgcgtccgtctggcgcggttgcatgccgcctgcatggctgcccgccccttctgcccgttggtctgggcgaaaatggggggtcgcttgggagggccttggagcgtgttggagaagactcagcccgcggcgcctgggggcgcaccgtcgtgtcttcccatcttccaagcccccggatgggggtatccgccgcctttccgcctcctcgttggaggaacgcaactccatgggagttggtacctctcagccatcgttcggcttcaaggattttcatcatgctgcccggctgctcccctccgccggcggtcacctgagatggcgacctccggcttgatggtgggggaaagcgagccgggctgcggcctcttcccctcccttagcctcaaggattttcatcaccagggctggggaggggagtgcgctgagttgaggttggcccccgcgtgggcggcggcccgctccttcactcagtga

SEQ ID NO: 18500 - DNA, 76 bp, Zea mays
  Peptide Sequence Number=SeqID_61875
atgaaccctgttctatggctccagatgacaaacatgatctcatatcagggacttgttcgcgccttccctagacctc

SEQ ID NO: 18501 - DNA, 156 bp, Zea mays
  Peptide Sequence Number=SeqID_61876
atggtgactaacagagctcttctaaactttgtcaccaagggacgactaaagggcccgtttggcaaagctccagctcctgcttctttagctccagatcctgatccttgtgaggagctgatcctcctgattctcctagagaatcagaatcatttttaa

SEQ ID NO: 18502 - DNA, 207 bp, Zea mays
  Peptide Sequence Number=SeqID_61877
atgtcaggagatcacgccaagagggagatcgtgaccggcggcgacaagtccgcaagctcgggaagaacccattcgagggagtccggccacaagcataaggaggaatctgcttcctccatcaagtcacaacgaagaggtgacaagaagaagaagatgaagaaagttgtcggcgtttcgagaccggggggtccccgagccgacgagtga

SEQ ID NO: 18503 - DNA, 333 bp, Zea mays
  Peptide Sequence Number=SeqID_61878
atggatggtatcagaggagtatcagaggaggcaacccctatagcgcgagggtatttgctggcgatggcagcagacaacctagtgagactgaacttgcccttgcagagcaccagggcaagtgaaaaacaagaagatggaaaatacaagcacactgtggatctcctgaaaacaacatttgagctgagagcgaattctgtacagcgggagctagagctccaaaaattatgggacgataatcaggttctgaaaagggtttctgaaaggaacactgggggtatttttataggtcacgttgttggagatgctctaacccatgctaatagagaagattaa

SEQ ID NO: 18504 - DNA, 315 bp, Zea mays
  Peptide Sequence Number=SeqID_61879
atgagcaagaacacaagagacacaaggtttatcccgaggttcggtcacaccacaaaggtgccctacttcctcgttgaggcgcccacaaagagcttggtctctttcaaccctaatcctccctgtacttaccacaaagactgttggtcagaagtcaaaggggtcagaggccagttgaactaccccttagtaccagttcagctggtcttgaccagagagtttaggagagaaaaccccggctcaactgcccggaggcaagttcagctggtgtatggtcaaagaggttcacagctgaagttgaagttcaactggagttga

SEQ ID NO: 18505 - DNA, 891 bp, Zea mays
  Peptide Sequence Number=SeqID_61880
atggacgaagccgcctccgcctccgctgccgccgcgcgcctccgcgcctccaccccgcgctccaagaaacgcacctcccgctccaagtcccgcggccgctccccgaaccctaaccctagctcccgtcgcgagcgcgccgcggaccacggctccgccgcgccctcgcgcaagagcgaccgcaagccgaaccgctccttcccggattctgccacgctcgccacggccatggcctcggtccccgccgcctcggccccgtcgtccggcggggggcgtggtagtgcgggcgccgtccagaagctctggagcgaggtcgatgaggtcgcgctgctcacgggcgctgccgccttcaaggaccgcactggcatcgcgccgcgcctcccggacatgggcgaactgttcgagtccatcaggggctccctcgcgccgcacctcgatcaggccaaggtgtactacaagctcaagcgtctcaagagcaagttccagcactccgtgctgggcgactccagtaccgcgcacgagcaccggctgcgcgacctgggcgcagccctctggggcgccgagctcacgcgccctgaagagaacgccgtcgtgacggctgaggagaccaccgatcccgatgagggattcattgacgaagatagggaggggtccgtgaagcttcctatggttaaggaggtgcttggagagtactggaggttgaacgggcagaccatgtcaggtgtgtcactggagaagggattggtgctacttgggtcgcagcaagctagtgtggttgaggttaaatggaggcgacagcttgaggcagatatgcgcatgcagatgcgccgacatgatctggaaaaggaggtctatggcctactcatcgatgccatcaaaggcctagggccttag

SEQ ID NO: 18506 - DNA, 285 bp, Zea mays
  Peptide Sequence Number=SeqID_61881
atgccgacaagggcatcaaaccaggttcgttggatgcagcacgtgcaaatcggtgcccgtagcctggcgtttgcgtttcccgcgagcctcgcgcgcccgcttggcctgtgcatgaggggcggacctagtgagggcacaggccctcgctcatttctttgttatagcgtgcgggcacttgcttcgttccaaaagaaggtgcatcttgttgaccagtttctcaatcatgcaagcaaacaaactggcactagaataccaaacccatcacgttcaccagtcatacgatag

SEQ ID NO: 18507 - DNA, 792 bp, Zea mays
  Peptide Sequence Number=SeqID_61882
atgcggcagcacgccgagataagcttcgcaaaggtgaacgaaaatggagatttggagaatggaattagggttcaaatgagtcaggttgatgtgataaaaatcaaggaggccacggaaaaaaggagagatgggaaggccgaggccgcggagaaggaacggagcgtaaactacagactcgtgggtatcctctgttgggacagttgtcccgtggcaaatccgccaagaacagagttcccgcggaggaagaaccccgatggagacgaggcggagaagctcagcttcagaaattacagacatgtgtggcgtttagccactggccctgccgccgctgcccttgccgccgccgcctccggtgctgcccacgctgctgctgcccttggtgccgcccttgccgccgctgcctccgccgccgttgccgccatcaccatcgccgtcgcctccgtcgtcgtcgtcgccgtcgtcgtcgtcgtcatcttcgccctcgccgccgtccgagtcctcctcgtccgaggagaactcagactcatccgagccctcgagcccggagcgctcgacggcccggatgtacgtccagacctccgccgcaagcccctgggatcagacgactcacgcagggggatgggagccggagacccctcggactcagaggagaactcctcctctgagtattccgagtcaccaaactcctccgatggaggagtcggctcacgcttgcgcttgttgtttttgcccatggtggaagcagacagaagggaggagaagaaggcagtaaagagcagcgaagagatgtga

SEQ ID NO: 18508 - DNA, 426 bp, Zea mays
  Peptide Sequence Number=SeqID_61883
atggctaaagcgcatcagatgcgcgtacattcttctgacagcaagaagaggctccacactgccacactgccactgtgcccggcccactccacccaacaggactacggtgaggtgtatggagtggactccacaaatgaggtttctctcacctactctaactttagcgtatggcgtgaggtgcatggctgcgatatttttttactgcacaacgaactggatacttgtagcgcagtacatggctgcggacagccttacatcgggaacaccgagtatcgatattggaacttgaatggcgtcggtaaggcagccctaatgatgatgctgaccaacatgcaccatttcaaggatgggcgaattattattttggttagggtgcagatcgacgagctagatttcacagtatggtcactgctggccactgggtga

SEQ ID NO: 18509 - DNA, 117 bp, Zea mays
  Peptide Sequence Number=SeqID_61884
atggactacatggtgtttgaggttgctgaattggatggcgcaacaatgatttatcacactaacaacaaaatgaaagatgcaattgcacccatagggaaggcaacaaagtccccatag

SEQ ID NO: 18510 - DNA, 1020 bp, Zea mays
  Peptide Sequence Number=SeqID_61885
atggccgggtaccgccgcaccatctcgttcccggccccgaagcccggagccgacgccctcgctctggcgaccgcgagcgacaagctggcggcgtaccgcatccggtcgtccagcctcccctgccgcttccacccgctgctgctgcagctggacgacgacgtggccgcgctgcgcctcgtgatcggccagtccccgccctgcccgtccgcgccgtcgccgtcggcgtcgtccgtgtccgcggcggcgtcgcaggtgtgccgggtgctcgtctcgctctcggagctgctgcgccacccgcaggtgcgggagccgctgcgccgcctgctgggccggtcccgcctcgcggagcggctcctggacgacctcctccgcctcgccgacgcgcacggcagcttccgccaggcgctggtcgcgctggccgcgctgcaggccgagacgcgcgccgcgctgcgccgcggcgaccccacgaggctggcgtccgcgtcgcgcgcgcagcggcgcgccgggcgcgacctcccgcgcctcgcggccgccgcgcgcgccgtggccgccagggcccccgcgccgctccccgagggcctcccgcccgacgccgcggcgctcgcggccgcggtcgccgacgcgaccgccgccgtggcctccggctccgccgccgtcttctccggcgtctcctcgctctccaacgccgccgcctccgcccgcgtcgaggtcgcctccacgccgtgctgggtcaccgccccccgcgagaccgtcggacgcgccggggaccagccgccaccacatatgcggcgctccgccgagaagcagaaaggcgtcgacgaggacgaggagtcttccaccgcgcagttccggcccgaggcacgcgtgaagcccgaggagagggcgcggaaggcggcgttcgagcgccacgagaacctggagcgctgcatcgccaacgtcgacggtagcggcgagaaggtgttccgagcactggtcgacaccagagtgtcattgctcaacatcctcagcccgggcttctga

SEQ ID NO: 18511 - DNA, 1083 bp, Zea mays
  Peptide Sequence Number=SeqID_61886
atggcgcgcccttcaccgccaggtcatgccgccacctcctggccacgcatcccgctgcaggcacccggatctgtgccaccaccggcccatccgaggcagcgacgaggtaccccggtcacctgcgtcgaagacctcccaccaccgctgcgacttgaggtccccacgcctctgagtttcgccctattcaccccccctctaggcgactatcagcaggcattgttgtgccttcaacaccgtcgcgttgtcgtcgacgcggctcatctgaggcagagacgtggtacccccgtcgccgaggtcgaagacctcacgccaccacctcgacttgaagccttcaccctgtcgaggtacccatcccctagcctgccgtcgagttactttgagttttggggacagggcttttctactgggcttcctgagagattgcaattgtcccttgtgcgaactataccagggctggagaactgcctaatgctaagacctgcatatgcagttgaatatgattacttacccgcatatcaatgctcaagatcacttatgacaaagaagattgagggtttattcttctctggccagataaatggaacaacgggatacgaagaagctgcagctcagggtataatttctggaatcaatgcagctaggcattccgatgggaaatcattaattattcttgagagggaaagcagttatatagaaactcttattgatgatcttgttacaaaagatcttagagagccctatcgcatgctaacaagcagttcagaacaccggctattgcttcgatcagataatgctgatagtcgtttgacccctttgggacgagagattggtttaatagatgatagacgttgggagctttatcagtcaaagcaagcccgcattaagcaagagaaagaacggttgagatctacaaaagttccaggaggtgaatttgctgctgaagttactgcagtatccaaccaacctgtaaaggattcatctacacttgaagccatattaaagaagccacatgtacaatataaactcctgacgagcatggatgcggaaatgaaaatttatctcgaattgagaaggaatgtgtag

SEQ ID NO: 18512 - DNA, 330 bp, Zea mays
  Peptide Sequence Number=SeqID_61887
atgatgcgtgaaggagaaagcagagaaacaggcttatattactctattgcgcagaagcagtacactgcccttatatggacttctcgtgatctgacagatgatgatcttcataatatttctattatgaaggaaatggaaattgtacagaagaccccaataagagtacttcatcgtagaagccccttagagcggaagcgcatcatacactggatggagattgagaaaatcacaggcagctcaaactactacttgctccatctatgcacacaggctggaacatacatcaaggaatttgtgcatggtgatcttggacgcacgcatcccaggtag

SEQ ID NO: 18513 - DNA, 1233 bp, Zea mays
  Peptide Sequence Number=SeqID_61888
atggaggcggaggccaggaacatccttgaacgcgccgcggagtcttccttcccaccgctgcacgccgtccaccacctcctttccgtcgggtgcttttcgtgtgctcttggagcatttagttctatcggcttggtctgtgtgcgttgcatccttcgcctgcttggagcctatagcagtgcctgctcatatgcatgtcttacggcatcagttttgcattcgttccttgaagaacacgatgagtccataaaaggagggtcatgtccatgtctatcgatgaatgatgcatattgctctgtctgcttgggagtattgctcccaaccttccatcgagatgaaggtctggagacacctaatggcatttctcatattgacaacatgtcttcagtaatatctcaagcagtgcacggggagagttaccaagttgatgagttttctctagaaatttcactaccgccggttatagccgccaatgagcgtgcagttagattatatatgaaacaaaaatatggcaatgagaattggttcaaggacaaaatgtttgcacaacaaacaatgtcagtgaaggaagccttgcgacttttgatagcaccatcactcgagaaactaatgaatgctaaacatggtaacaattcatttagaatccgcttaacatatactcatggtgatgcttcacaaaagcttcatagtttattgccaaatgagcacagccgtaaaaggaaaccagattcaagaaaaggaggtgatgcttcgaatgaggcccataaaaggaattcagcagatggcaaccctatacaaacaagtgaatcagattcattcatctacaagagtcttgagggcatccaagatcaagaattctgtaatgcatttcagttgcctcctgaaaaggtgtttaaaccctgccatcttttaatatcgtgcttgagatcacctacatatcttggtggaagatatttgaagctttcaaggaacgtcagtcagtcatgttggataatagatgatgagagaatgggtgaagcttcagttgaggagataattggggagaatgttcgtgccatctgcagaggtgatagctgcaagttccatgctgctgggagagaagacattgatgtacggatgcttggatctggtcgtccatttctagttgaagtactgaatgttcgatccattccatctgaaactgaagttcaacaaattgaagagagaattaacaactctgaaaaagaaaatatgtga

SEQ ID NO: 18514 - DNA, 1092 bp, Zea mays
  Peptide Sequence Number=SeqID_61889
atggccagccgtggcggcgcatccgtggtgctcgttgtcctgtgcagctcgctgctcgggttcgcgccgcggccaggtgcggccgggaagccgctcgtgccggcgatgttcgtgttcggggactccctggtggacgtcggcaacaacaaccacctggccagcgtcaacgacagctgcaaagcgaactaccggccctacggcgtcgactaccaccccgggcagtcaccgaccggccggttcagcaacggctacaacttggcggaccatctaggccgcttggttgtgttgctggtgatcgtcgtcgacgcactccgtccatcgatctgtggcggcgcggtggtttccatggccgagcaagtcggcaacttcacgagcctcgttcggacgacgacgtgggaaggcagcaagagacgggagcggacggcgcccggtctcgtctccgagtcgctcgtcttcatcagcgtcggcagcaacgacctgttcgagtacagcgacttcttcgcagaccctaagaaccgcaacgttagccgcaacgacaccgcgtttctgggagggctcgttgctctttacgcgacctacgtgaaggatctgtacgccgccggggcaaccatgttctccgtcgttagcccgtcgctggtcgggtgctgcccgtcgcagaggaagatagcggaggacacgcacgacgtggacggcttcggctgcctcggcacggcgaacaacctctccaggcagctgtaccccatgatcggctccatgctggagagcctcagccaagacgagctgcccggcatgaagtactcactcggagacgccgtcgcgatggcccagtggatattcacccacgctagcacacctcccaacaacttcactacgcccgaccgcgcgtgctgcggctcaggggatttcggctcgggcgcgtgcaacagttcggctccgctgtgccccaaccggagcagcttcttcttctgggacaggttccaccccaccgagacgttggcggcggtcacggcgcagcagctcttcagcgacaacgggaccttcgtccacccgatcaacgtgcagcagctggtggcgccgtcgtcgcggccatga

SEQ ID NO: 18515 - DNA, 1323 bp, Zea mays
  Peptide Sequence Number=SeqID_61890
atgtcctgggggagtatcaaggattcaaggataaaggactcaccagtaatccccttcaccagaagttccagctcctcccaggacagatcggtcctcggcctgcgctggatcctaccgatgtcatttgggccggtgaaccagcagcacagacgtgacctcctctacagcggcatgacccggcgcttcaggaaatcgtcgaccacgtgcatcgaggccagaccaccggctgccaagcccttgatcctatccaacacgggcaggagctctggcacttcaccaacacgaagaaatggtagaagagaaaagtgcagggggccacccccacgaacatctcacagaggtggacgaagatggccgcctggaggatggagtgggtgtgaggtgctggtgctggagctggagcccgaactgctccagcagcagcaggaagaagggcgagatcggcagtgccaacccgcaagagatgtaggagacgaacaaaacgaactccccggcggcgaggttgccgagggggacggcgccggcacgaattcttccagcgagccctggcgtgctctaccgcaggccgcgcaccagattgagtgccgcctcagactggaagtggtcaggatggccaagcgaagtcatggcgtcggtggcggcacgggtgtagagcaggagagcgtgaatgcaaaggggcatagagagctcgaaggcgaaagggcgcagcgattgggagagaatgcgaaagcgtccacaagtcatacagctggtgtgctggtctccgagtgcgaagaaagcaaaccgccacgcagggagcgaaccgccgcgcacgatcatgcgccgcttcggggccgctgcagagggatattttttaaccaaggcggcggcaatgaggcgccctgcgcgtggcccgatggaaccgctagacgtggggctgtgagtcagtcagccgcggggacagatatggcagttgatgctcgcatcctcccgtgtggcggccctgggggccactgtcggtaccctgaaatcagggccatggcttgctccagtcataggagactgctctgggtccacagcagcgcacgactccaccacatgggcgggtccggagccgccacgtgtccagagaaggtgatatactccaaggcgtcaacaataagtccagacccccatggagagcgccagacccctagatatgcaatccggatctccaaggttggttcaggaccaccacatgtgcaagccggacccctgggatgggatttagaccctcccgtatgggatccagaccgcccacaatggggtcccaaggtcctaggacagaacatacacgggccttga

SEQ ID NO: 18516 - DNA, 432 bp, Zea mays
  Peptide Sequence Number=SeqID_61891
atggttgcgccgcgccgacaggtcgcttgcttcagacccccccagaagcgccagaggactgttggcggggccgaggaggctggctcccaggcccagagcgcggcttcttccacctctgctcccaaggtcgcgcctcctccgccagatactatgcccgctggcgggtctggctctcagcagcaggcatctgctgggagtggtgccggcgatccgcccccggctgctgccaccgagacagcgccaccgggctcccgtgctccagctggggggtccggcagcagcggcgccaatgccaagcagcgccgcagcggcgggggagagcccaactgcactgacgactaccgcagcctcaatgatggtgatgtcgtcgagtacaccgtcggcagcggtggaggaggtcccaacagcgcccactcctgccgtcgagggtga

SEQ ID NO: 18517 - DNA, 861 bp, Zea mays
  Peptide Sequence Number=SeqID_61892
atggacgagagttgcactcaactcctctcaagtgatccaatgatcaacttaaataccacggtgttcttcttttctttactctttcccgtttgcgaggaatctccacaacttggagtctctcgcccttacaataaggatcaaagtgaaagcactagaccgaccattgaagatttggagccgttggcgcaccggacagtccggtgcccccatctgaccgttggctcagccacgcgtcacgcacggattgcgcggccgaccgttggcccagtcgaccgttggctcatcggacagtccggtgcaccaccggacagtccggtgaattatagccttggaggagtgcaccaaggcggcatcctaccagtttgccttcgagcggtccaagctggagcgggaccgcaaggattacaaaagagacctccagaaggtgtatgcccgagagctagaggcgagccggaaggagaggaggttggccaagagggaggagaccttgagccagggggaggctcttacaacagagctccaggccaagctgaaggccctggaccaaaccctagaggcccagcgaacccagcaggtggaggccgtagaaaaatcagaaaatgggaggaaaagctggaggccaaggccggcgacattgccctcgccgaggagaacctcaaggataaggatgcatccctagacaggcgggcggcgaacctcgctaggcgagatgcagacctcgccttccaggaggaaatgcttgaaaggcggggcaagttgctggtcgagcacgagctagaggcgaaggagaaggagaaggagaagaaactagaggagcggatccagcagttccaggcagcgcaggcagcaccgggcccctag

SEQ ID NO: 18518 - DNA, 103 bp, Zea mays
  Peptide Sequence Number=SeqID_61893
atggtgcagccgcatgttggcgatgacggggcggtgatgagcggtagtatacccggcccctacaagtttgttggggcagtcagatgccctgaaggagatagtg

SEQ ID NO: 18519 - DNA, 498 bp, Zea mays
  Peptide Sequence Number=SeqID_61894
atgggcgcaattccggtcaaggctccgtccactcaaggggacacgatctcgcctcacccgagcccagcctcgagcaggaacgggctcggactcatcctcgactccggaagacggtctccgcctcgcccgacccccgggctcggactcaacctcgactccggaagacgatctccgcctcgcccgaccccagggctcggactcgacctcgacctcaggacgatggtctccgcctcgcccgacccccaggctcagactcaacctcgactccggaagacgatctccgcctcgcccgaacctagggcttggactcgacctcgacctctggacgacggtctccgcctcgcccgacccccgggctcggactcaacctcgacctccggacgatggtctccgcctcgcccgacccccgggctcggactcagcctcgacctcggaggagtcaccacctcactcgggccgaccacgccacaagggggaccatcattaccctacccatag

SEQ ID NO: 18520 - DNA, 321 bp, Zea mays
  Peptide Sequence Number=SeqID_61895
atggagcttcgtcccgggttggagaggttgctggagactccccatctggagcttgacgggaagctgttcgtcaacacgcagcaggcccctacctggcgcgccaactgttggcgttttcgaccccggggggtccctggaccgacgaagaggagccagagccctatgtacatgccggcgtggctgtcggagaggtgttggagccctgttcatgtggcgtcgtggccgtcggaggagcgcttgagccctatagaagcacagctgtcgggggtttcggatccctgcgaccagatggggacgccggtcttgttccctgtagcctag

SEQ ID NO: 18521 - DNA, 222 bp, Zea mays
  Peptide Sequence Number=SeqID_61896
atggtgggtacaagtgcggtcactgcacggcggcagccggggtcagtggagcattgtaccatacatgaattggttgatggtgtgacttggcctaccaccctgccaccgggttggacggtcgagtgggatgttgctccggcaggagaggagcatgaggagcagtgggctaggccttgcctatttcctcattaccggcgacatcgattatccgttgcactttaa

SEQ ID NO: 18522 - DNA, 969 bp, Zea mays
  Peptide Sequence Number=SeqID_61897
atgccatcctcttcttcttccgccaccgccacgccgccggccgccgcctcgtctgaggagacgttgagtaacgcgatggtggaagagttgcgcgccggcgactctgttgaattcggtgtgtcacggatgacgtcaggccgtattgaagatatgcagcggttgggctactttggcggcggagtcgctcgtgctccggggacggaggaagtccccgagccggagggcgagttggttgttttcgaggcgttcttcgccgccggactccgcctgcctgcgcaccgggtctttgaattaaatcaactgccgtacgacggctaccctggtcaggacgaagcagaccgccgcgggaagaaaccggcggtggaggccggaggcgaccctgcgctggcggccgccacctcttcgaaaaagagaaaattagtgatggacaaggatcgccaagcggtggcgcggaaacgccaggcgaccgtgagggttcatgaagcccggccgaaaaggcagcggggagcatcgaaggctgaggcctccggcggaggcaagccgccattgccggcgaaggcgggtgcctccgcgcctggcaaggcgccggaggcgacggtgggcgccggaggccccaagctgtcgaaggtggtgccgtccgccagcggagtggcggaggctgcgaaggcggcccgatcgctaccgccgcccggcaaacgcgttgccgacttcggcactgagattgatgtggaggattatcttggggggttggacgagggccggctcgctctagttgtgcctggcgcggcggtcgcgacggctgcgccagcgccgaaggcgggggtagagacccttggcgctggaggcgaggtgactgccctcgcgttggtcagagacgaggcggacgcggcgacccgccggctgaaaggagcaatggaggcgctgagtcagccgtactgcgtcgggggcccttacggcgacgatgtctga

SEQ ID NO: 18523 - DNA, 540 bp, Zea mays
  Peptide Sequence Number=SeqID_61898
atgggcgtggccggtgcgtgcccagctagcgccctagctgagctgcttctagcctgctattttacggtgctagtagtgcgcagcaccagagagagccacacagctgcagcagagctcagcaaacgaggagtaaaaagctcgcgaccagcgttcatgtgcatgcagcatggtctatggtggggtggtggcggggcggcgcaggctacgcgcagccaggtacagcaggaacgtacccacgcggccttcgcccgtctctctcttcgaccccctggtttttctccggttccggtcgtgccggtgcgcgcctgcgcctccctgaatgaaaaagcttacaggtccggccggccccggcactgcctcctgcaggcaggcgaggcgatgttatctgggctgcagcctgcagagcgcaggcaggcttgcgcggccgccggccgacagggcaaaggcaaaaggcgaagccatcctttggaccgcgactcccggaagaccgacgacgactaccgcgcgtccgagccagacacccgtttccctgcaatgtaa

SEQ ID NO: 18524 - DNA, 323 bp, Zea mays
  Peptide Sequence Number=SeqID_61899
atggtgctggatctgtggagccgtcagaggtgtcgcacgctcgtcgccgccgtgccttatggacgaggagggggcgtgcaggagcgtatcctgcgactatgtctcccgcatccgacagcaccaagtgatgggaactccatggggaggaaggagacatactcgcggtggcgcgaacagagattagggtgtggcacggtggcggcggctggcgaagagatgcgcatcaatgttgtcttcggggtcgtgcgggacagggtgagggcccagcccgaagcagagatcgaggcgtggtgtggtggcatcgacgtcttcttcggggtcgt

SEQ ID NO: 18525 - DNA, 162 bp, Zea mays
  Peptide Sequence Number=SeqID_61900
atggaggaggggaagcacaagtcctcaaaaacactagagaattctgaacacaacataaagcctcaaagctttgatgtggccaaggttgatgaaattctcaaaccacttgctggaaagacattatcttacaagatgtttgcacctgatacacaggcttcatga

SEQ ID NO: 18526 - DNA, 291 bp, Zea mays
  Peptide Sequence Number=SeqID_61901
atgaacgtatgtgagctcactcttgctgtctcacatacaccacaggtcaagaccaggtactgcaggatgatgctcatggaggatgctgcgatgagttcaactcctgttatatataaagatgtgacattcgatcctgtgccactttacatcatatgtgtgagacttggtcccagcatacctgggcgcagggctgctctccgactccgtctccggtcgcggtcgcgctggagcctggccgccttggaggctgagacggcggccggatgcccggatgaggatgggagtcgctag

SEQ ID NO: 18527 - DNA, 399 bp, Zea mays
  Peptide Sequence Number=SeqID_61902
atgtggtccaccttgccaacgtcgtccccagccgccgacctcccgccgtccctcgtctactccctctcgaccacgccgcatgcgttgtactacccatggctcggacgtgtagcttggcgatggttcgacatcttctgctccatgggtggggacagggacggggaaggcggcgaggccgtcgagctcagcatcgtcgagagctccaacgacttcgacgacgacgacgagcaagcgcaagagagaatggaaggagttgatctgtgctttctgagagtaagagaaaacaagatcacgcagaccggtattctggcgatgtatggttcattcaaaatccatttcctgctggcggcgccaaatatcagcatgattggattgtgcagagctaaaaatcacggctaa

SEQ ID NO: 18528 - DNA, 1125 bp, Zea mays
  Peptide Sequence Number=SeqID_61903
atgactgcgtcaaaaaaggtgcgccacgtcattcgatttcgtatccttttccttttcctctttctctctcttacaacagggaccgggaaaggggataccccgaaagggatccttatccgcgaaggaaacgggccccgagcccccgtactgatcagaggttcgaaggctggcccctcggaggggttcaacagccgcctcagagcgctcgggctccgcgcccactactggtcagaggttcgaaggccggcccctcggaagggttcaacggcctcctcaggccactcgggctccgcgcccactactgatcagggaggctcgggggctgctctcacaaacccagctccgaccaaaccgttgacagcgtcaacatacccgcccgacaacttgggacccgaccgtgcacccgggctacggccagctcgcatgagggaacaaaccagatcggtcgaagcatcacgaaacgcattaagacctcaaaggagtcaaaccactcctccgaggcctcgggggctacaccctgcgggctcggactcgggctcagccccggaagacgatgaactccgcctcgcccgatcccagggctcggactcgggctcggccccggaagacgacgaactctgcctcgcccgaccccagggctcggactcgggctcggccccagaagacgacgaactccgcctcgcccgaccccagggctcggactcagccctggcctcagccgacggtctccgcctcgcccgacctaggggctcggactcgacctcggcctcgggagacagactcgacctcgacctcggaggagcctccgcctcgcccaacccagggcttggaccgaccacgtcacaggaggcgccatcattaccctaccccaagctaactcaggctacggggaacaagaccggcgtcccatatggctcgccccgagtacgctcgactgcgagggtgacccgtgaaggggaggagtctgaagccactgagacagctccaatctctaaagtcatgagacaatcgggattagttgtgacagagggagccattgacgaaggtgcacctactgccgaagctgaacaagctgacatcgagaaaaaaatgttgatgaagaagaggaagactataacactctga

SEQ ID NO: 18529 - DNA, 543 bp, Zea mays
  Peptide Sequence Number=SeqID_61904
atgtcgctcgcccacgcgccccagctcccttttgagcctcgcccgcacccgctctctctcccctgcctcatttcgcacacgctcgccctctctcgcgctctgtcatcgtcgctcgcgatcgccgccctcacgggcaaccccaggtcccccgccgaccgcgtctgccttgtcttcggcgacttcgccgccacggacaggcaacaccggtcaccgagctgcaaagcctccgcgcaccccatcacaatcgtccgtcccagatccaacgccaagatcggcctcgggcgccataggaaactccgcatcgtccgaccccagggctcggactcgggctcagccccggaagacgacgaactccgcatcgcccgaccccagggctcggactcgggctcagccccggaagactacgaactccgcctcgcccgatcccagggctcggactcgggctcggccccagaagacgacgaactccgcctcgcccgaccccagggctcggactcgggctccgccccggaagacgacgaactccacctcgcccgatcctag

SEQ ID NO: 18530 - DNA, 309 bp, Zea mays
  Peptide Sequence Number=SeqID_61905
atggaggaagggagtaatggaggagagtgggggaaggagaaacagtgccaaagacaagcggatggctgcagggtcggcgtcttggcttgctcgggcgcggtcgattcctggccgcgcgcttggcgcggctgggcttcctgggcgcggggtgtgcggggtggcgcggggaaggggcgtcggggcggcgtcgagtctggccggtcggggctgggcaggggcgtcggggcgtggggtcacgcggcacaggggcgcgaggtcgcgctcggctggggcggcgtgggacagggaaggccgggtggggcccactga

SEQ ID NO: 18531 - DNA, 2052 bp, Zea mays
  Peptide Sequence Number=SeqID_61906
atgggagaaggggaggggaagcggcagggaggaccagaggagaggtgccggcggcagcaacagatgtatgggctgcttggtggtctcttgggctgggctttaacatctaaggagatatcagaccttgaaggggaactgttgtcaattagaaatctgcttaatacacaggcagctttaattcacggtctatctgaaggagttcagatagattcattaacttcaggccctgaaggttctgcagaagacgacatatccaaggttgaagatcaggagccttcagaaattcagaaatggtctgcagattttcctgacatgcttgacgttttgctagctgagcgaagagtggatgaagcactggatgcactggatgaagcagaacgggttgctgttgatgcaaaacgaaaacagactctaactgcagctgaagtttcggctttgaaaagatctatctctgataatcggcagaggctggcagatcagcttgctgaagctgcttgtcagtcttctactcgtggtattgagcttcgagctgcagcttctgccctcaaaagacttggtgatggcccccgagctcacagcctcttactgagtgcacataatcaaaggcttcaatgcaatatgcaaactatacatccatctagtacttcatatggtggggcatacactgcggcacttgcccaacaggttttttcagtcatagctcaggcactaagtgactctgtggatgtttttggtaatgagtcatgttatgcatctgaactggtaacgtgggctaccaagcaggttatgtcctttgcgctcctggtgaagaggcatgtgttgtcctcttgtgcagctgctggaggcttgagggcagctgcagaatgtgttcagatatcacttggccattgttttttgctggaagctcgtggtctgtctgtttcctctgttctcctcaaacaattcaagcccagtttagtgcaagcattagatgctaacttgaggagaattgaggagagtactgctgcactagcagcagctgataactggatactcacatatcccctaactggtattcgtccattaactagatcgtctgctgctaatttggcacttcagccaaagctctctagtagcgcacaccgtttcaattcaatggttcaggatttctttgaggacattgcaccactacttagcttgcaattgggtggttcatcaatggatgggatcacacaaattttcaattcatatgtaaacttgcttataagtgctttacctggttctatggatgatgaagctaacttagatggtttaggtaataagattgttagaatggcagagactgaagagcagcagttagctttattagctaatgcatctttactagctgaggagttgctacctagagcagctatgaagttatcgtcaataaaccagtctatggatgatttgcataaaagaggaacagataaacaaaaccgtgtgcctgagcaacatgaaggtgatactcatctcagtgcagaaatgtatatcagtatggacaatactgttgaagaaccagaatgggttccgtctccaattttccaggaactgtatgtaaagttaaacaggatggcaagcattgccgcagaaatgtttgttggtagagaaagatttgctactttactgatgatgcgcctcactgagacagtcatactgtggctctcagaagaccaggccttttgggaagagattgaacaaggagcaaagcctttaggccccctaggtctgcaacagttctacctggacatgcaatttgtcatcatatttgggcaaggtcgttttctctctagacatgtacatcaagtcattttggatgtcattgatagagcaatggctgcattttctgctactggaatgaaccctgatagtgtccttccgggcgacgattggttcatggatgtctcccaagaagttgtcagcatgatcagtggaaggggtagagttgctaatggtgacagggaagtaaacagcccaacggcctcagtttcagcgcactccatttcttcgttcaaatcccatggcagctcctag

SEQ ID NO: 18532 - DNA, 2640 bp, Zea mays
  Peptide Sequence Number=SeqID_61907
atggcgcagccgctcgtcgtgaagaaggacgacgacctcgacgaggaagagtactactcgccattcctgggcatagagaagggcgccgtgctgcaggaggcccgcgtcttccacgaccctcagcttgacgctcgtcgatgctgccaggttatcaccaagctcctgtacctgctcaaccagggtgacacctttaccaaggttgaggctacagaggtcttctttgcaaccaccaagctgttccagtctaaagatgtgggccttaggaggatggtgtacctcatgatcaaggaactctcaccttccgccgatgaggtcatcatagtaacaagctctttgatgaaggacatgaatagcaaaaccgatatgtaccgtgcaaacgctattagagttctttgtcgtattatcgactcaactcttctcacccaaatcgagaggtatttgaagcaagccattgttgacaagaatcctgttgttgccagtgcagcccttgttagtggcatctacttgcttcaaacaagtccggaagttgtaaaaagatggagcaatgaagttcaagaggctgtgcagtcaagagctgctcttgtgcagtttcatgcccttgctctccttcaccaattttgcaacatggagcactttgatatgctcaagttctttgttaatgcacaaataagttatattctcatctacctgatgtttcagattagacaaaatgatcggctggctgtcagtaaacttgtcactagcttgaccaggggttcagttcgctctcctttggcccagtgcctacttattcgctacactagccaggtgattagagagtctggtgtgaaccaaggtggagatcgtcctttctttgatttccttgagtcctgtctccggaacaaagctgaaatggtcatacttgaggctgcaagagcaattactgaactgaatggtgtcacaagccgagagcttacacctgcaattactgtgctgcagttgtttttaagttcatccaaacctgttctcagatttgctgctgttcgcacgcttaacaaggttgcatcaactcatcctttggctgtcacaaattgtaacatagacatggagagcttaatctctgatcagaacaggagcattgcaacccttgcgattacaacactgttgaagacaggcaacgaatcaagtgttgatcgtttaatgaaacagatgaccaactttatgtcagacatagctgatgagtttaagattgttgttgttgaagcaataagatctctgtgcttgaagttccctctgaaatatcgctcattgatgaacttcttgagtaatattctacgggaagagggtggattcgagtataagaaagccatagttgattcaattattatactcattagagatattcctgatgcaaaggaaagcggtttatttcacttatgcgaattcatagaagattgtgaattcacctatttgtccactcagatacttcactttttgggaaatgaaggcccaaaaacatcagatcccagtaaatacatacgctatatatacaatagggtgatacttgaaaatgctacagttcgagctagtgcagtcagcacattggcaaagtttggtgccttggttgactcactcaagcctcgcatatttgtgctcctgagacgctgcctgtttgatggtgatgacgaggtgcgcgacagagcaaccctttacctcaaattgttaggtggggaagctacagttggtgagacagagaaggatgtgaatgaatttctcttcggctcacttgatgttccattagtgaacatggagacgagtctgcggaattatgtatttcttggccacttcaatttgatgcttcgtatgagaagcttctttcgtccattcccgaattcgctgatttttggaaagctttttaagtcatctgcacctgtagaattgactgaagctgagactgaatactcagttaatgttgtgaagcatatttttgatggacatgttgtgctccaatacaactgtaccaatacaattcctgaacaattgcttgaacaggttattgtttttgttgatgcttctgaggctgatgaatttttagaagttgcttcgaagcctttagaatcattaccatatgattctcctgggcagacctttgtcgcttttgagaagccagaaggtgtcattgctactggcaagttctcaaatatcctgaaattcattgttaaggaggttgatccatccacgggtgaaactgaagatgatggtgttgaggatgagtaccagcttgaagatcttgaaatagtttctgctgattatatgttgaaggtgggagtatctaacttccgaaatgcctgggaaaacatggatccagagactgagcgagttgatgagtatgggcttggagtaagggagagcttggctgaggctgtaagtgctgttataagcatccttggcatgcagccttgtgaggggactgacgtggtcccaagcaattcaaggtcgcacacttgtctgctctctggtgtgtttattggcaacgtgaaagtcttggtgagactttcatttggaatcagtgcaccgaaggaggtggccatgaagctggcagttagatctgatgatccagagatcagtgacaagatccacgaaattgtcgctaatggctaa

SEQ ID NO: 18533 - DNA, 876 bp, Zea mays
  Peptide Sequence Number=SeqID_61908
atggccgccccgcgaactactcgccacgtcgcattaactccgcggcgggacaggcggcgcctctggcaggagaagcaagcgacgcttcgccttcgccataatgaccgcgtccaaagaggctccgagcctccctactggtcagaggttcgaaggccggcccctcggaagggttcaacggccgcctcaggctactcgggcttcgcacccactactggtcagagccgccttagacacagagcgagggatgaccctgggtacgttcgatacataaccaaggctcgggctacgctctcgaggcagccaggcccgacctcaggcaccataggaaactccgcttcgcccgacccagggctcggactcgggctcagccccggaagacggcgaactccgctccgcccgacccagggctcggactcgggctcagccccggaaggcggcgaactccgctccgcccgacccagggctcggactcgggctcagccccggaagacggcgaactccgctccgcccgacccagggctcggactcgggctcagccccggaagacggcgaactctgctccgcccgacccagggctcggactcgggctcagcctcggaagacgacgaactccatttcgcccgaccccagggctcggactcagccctggcttcagccgacggtctccgcctcgcccgacccaggggctcggactcgacctcggcctcggaagacagactcgacctcgacctcggaggagcctccacatcgcccaacctagggcacggaccgaccacgtcaacaggaggcgccatcattaccctatcccaagctgactcaggctacgggaaacaagaccggcgtcccatctggctcgctccgccagacaagcaatga

SEQ ID NO: 18534 - DNA, 378 bp, Zea mays
  Peptide Sequence Number=SeqID_61909
atggagaaatgtcattctctagtagcgagatcgattctggactcccggagtggtctcggaccccacgtgtgccatccggacctcaaaccaggcgaggtccggtatcgccacatgtcctggccaaaaggctgggggtctgaccccttcaagcatgatccggatccccagtcagggagggcccagaggtgtcgcatcgccacacacctcgggcctgctccctgtccaggcagaagtccggtgccgacacgtggccggacacacctaacacgggacaagaggataagcctccaagggccaacacaacaacaaagaagagatacatgcccagaagatctagcatcgccagctctacccgacacttcacgcttcgtattatag

SEQ ID NO: 18535 - DNA, 456 bp, Zea mays
  Peptide Sequence Number=SeqID_61910
atggaacagctaccgcgtaccgctaagtaccgaatgacccgtaatgatgaaatccgaatacctgtgaggggctacacgcaaaacacgccagctcagcagcatcagtccaactccaggctccggctccggctccagctccagcttccaccaaaaggttacagatacacatacaccgcgtctaccacgtgcgtcgccagtgccaggtatcctcggactaaagtcggcattgcagtagaccgaaataatacgaaggtagatacagagccgaaggtgcgagcaggaaagcttcggcgcgacagcaaagagtggaaccgacttaaagatgaaaaggctattcagacctcgatagactactatagagttattatcaaatgtgaacagtatccccgtactgttcacgctgacttggcattcactttttgcgtcacgcctgtattgtcatcccttctcgactaa

SEQ ID NO: 18536 - DNA, 672 bp, Zea mays
  Peptide Sequence Number=SeqID_61911
atgacgacggtggttctcagccccctacggaagcaaggagacttcagcaaggtagttgtaactgttgccactttatccttcttttgccatcggccaactgttattgcaatcatggaatttatgaatgccatcaaccttgcaaatgggtctgatactgataaagataaaagcacttatcttgctactaaagaagataatgcaattgaggaatctaagtctgatctggaaacagagccatcaataaagcccttactggctaaaggtaaaagcagaatagtttttcatcttacatccagcatggcagaggcacaaatattactggtgaatgaaaatggcgactggcttgctactttatcacaaaataacctctcgactgatataaaggtgttcacatcatcattcaacataaaggttgcactcagaaaccttaaaataagtgatgataaccttcttagcagccacccttacttttgggtttgtgatatgcgaaatcctggaggtcgttcatttgtggagttgtcggagagcaaatctccggccgggtggcggagtgcacccgccctaaatcctgagatgaggaggggcttaggcgttttgcttgatcgttggaatgaacgggaagaactcaagaacacacaaggatttagagtggttcggaccgctggagcgtaa

SEQ ID NO: 18537 - DNA, 1038 bp, Zea mays
  Peptide Sequence Number=SeqID_61912
atggaggttcgctaccaaaccagcttttgccagaatgaagatggtttccccaagttgttgaaagcatgcacagtccgcctcggaatcaggagccagccagagtatgatggtcgtgaattcgtcgagcatggcacagagaaatgtgtcgtgactgtatacattggatccagtccacaccatgtggaatggagtgtcactgctggtgggcacagattcaaagacacctgccaagtcgtcgctcgcaaggcattgagggccctatgtcagatctacgaagaagaagtggccgacaccccgctcagattctttccgccctttcagagagaccgtcccgcttggatggccaggatgcgtgcattggaagagcagcagctgcttgaggacgaccccacagtcgtgtacctcactgcatacctgctcacccttgatgcacagtatgatttcttggctcggcaccaccgtcagatgattgcccgagcagaagatgcagagaagctcaaccgtaagctccatgtggatctcaccacagctcaagcccgtgtagctgccttagaaaatcgtgaagtcattgctgttgaagccctgaagcaagccaaggatgagcatgtccagaagctgatggaggcctacttggtaacccataaccaacgagagctgaagaccccccagattcttgaaggtcacccggtctctatgagaggagagaagaaggcttgggaactcccggaaggagccatagtcttggaaggaattccagtcttccctcaggctatggataagcaagagcaccctgaatcctcccaagatcccctgccagagttgtttgagccccttgccatgaagaagattccagcaccctcccttgaagtcaaggaagaagctgcgagcaccccgccagcaccaccgccctctaaggagctacaagagccagtccagcttgaagaagagttcgattgcgtcttgccatctcagtcgccgccaaaagaagtcatcaacatcagctcgctcttgacccatccaggagatgtctcagattga

SEQ ID NO: 18538 - DNA, 1200 bp, Zea mays
  Peptide Sequence Number=SeqID_61913
ccgctgcccatcggtgcagaggtggtcgctgccaccggtggggctgatgtggtcgcctccgctggtgaggctatccactgcagaggtggttgcctccgctggcgggaccgtcagtgccacctaccgccggacctctggccctttggctttaatggcctcactgtcaccccccgtaggaggacagggcgaggacctattcgtagcagcgctcaccctgaggtgatcgctgctgttggcgagccgctcggagcagagatcgttgtcgctgctggtgcagaggtggtcaccgtcgttggtgggctgtccggaaccagcttccagcgtggctcttgctggtgcagcgtagtccattcctgcaaaaatggagctaggatcccgcttgtaagggaatgctcacggtacgggaccaggctgagcggctaccactacaagaaactgataaatgtcgccgccgcgcgtgaagacggctcactcgagctctggctcgtctccccgggctccgtcggctggcacaaccaactcactatacaggggaacgacgagtcgagggtcacatcactggtgtgggggcgaagaggaggtgaagcgaccggccggctgctctcgtccaacgttgatgggtcggtttgtgaatgggatctattctacctgcagcaaaagattgttctagatactgttggaattccaatctggcaaatggcaatggagccttcagttgatgctaaaaatactgaaaataatagctcagagtttgttgtcaatggccatccagaccaaaatgactacagcgattctgacttaagtaacattgatgatggtgacaactctgaggatgaagatggttctaccaacacaatatcttcatatcatgtgaatgatttccagcgactggctcttgcgtgtgatgatgagcttgtgaaggcaatgtacctaaacgttgaaagcttcccttgtgtgaggctgttgaatctttctggtgaaattggctgttctagtgagtctgcactctacatggtatccaatgatccagaacttcaccagaaggtgactggtgtattggttgagtcaaatggtgtcaacaatgacttacaagagttgtctcctgatagaaaatttccaaaagatgattttgcaccctactcaaatcacagccatgattggaatcctgctaagagagtacaaacactcttcaaaaggtag

SEQ ID NO: 18539 - DNA, 771 bp, Zea mays
  Peptide Sequence Number=SeqID_61914
atggaggatacccgccgtatttctgccttgtcgtcaggggaacgcaactccgcgggagttggtacctttcagccatcgttcggcttcaaggattttcatcacacagcccggttgcacccctccactggtggtcaccccaagacggtgacctctagctcctggatggggagaggcaagccgggctgtgatctcgatcccgccctcagcgtcgagggtgtatgtcatcctcgctggggcggggagcgaggcgagccggggctctacctcctgcgcgggttcgtgggtcaccctctcctgtggtgttcgagggagagggcgctcgctggccctgcgggcgggtcggacttcgacaacgcggggctggtcgacagcgggcgtcgtcagccccagcgtgtcgagctcgtcggcttggctcccggtggcccctcctgccggaaggcggctgccgcgccgtgtgcacgggaggaccgcccaagatgtcgcgcgctgctagggcggcgttcgtgttctgggcggtcctgcctttgcaccggtatggcgcctccgcgcggaggtcggtgccccactcgtccgggaggatctgagtggggatctgccggagggctgacggcccctgtcgtcggtgccgaggtggaggcggctcgagaagtccccgtcgccgacgggatcaccgccaccatccgcgcttcgggcctccggctctttgtacttgtcctcgcccctcgagcgtcggcgtgggcgagggcaagattgcagcagcgcccaccctga

SEQ ID NO: 18540 - DNA, 297 bp, Zea mays
  Peptide Sequence Number=SeqID_61915
gaggtggcgaccagcaacggcgcgtgccacaacccgctttcgccgaggtcgcgggagtgcctcatggtcacctcggtaggggacccctcttcttatggagaacctagaggaggccccactagtgctgcgatatacaccgtaacttccgccctgcttcgattcgacctgttatcccaggaactgtcctcgggacaaggcttcactaagggcggtcgaggttccataaccaggaggtggggctgccacgacgtcgaacggtgtgactgcgacgtagtttttggccaacacacgccatag

SEQ ID NO: 18541 - DNA, 531 bp, Zea mays
  Peptide Sequence Number=SeqID_61916
atggtggctctgtctgagtctgaggcagcgacagaggaggtcaacccaactcgcagcgccgcctccgatggaccacagacggacggcatcgacacgttcgttcgtcgatgcacgatgcggaacgcaagaaacaaaagagccgtcaggtcagtcagcatgaacgacgaagaaaacgcgtcaggaatggtgaaaattaaaggagtgtggtgtggctggcatgtggcggccgcgcgcaaggatcttacgtacgtcaacgaacaagagcaaagcaacagatctgcccgcccgactatacttactgcccccgccggtggacttggtcacttggccgacgacctgcacatgaatccaatgaaaacaaccaaccaaccattcattgcaagggccaaggatccttttgctggcgtgatcgccgagtcggaggcattatcgacaggtgctggttcggtgtgttcacaccagctgaacaaacgccatggtgcctgctcacgcgtattaattgatgttactgctattttggttcgtggctaa

SEQ ID NO: 18542 - DNA, 414 bp, Zea mays
  Peptide Sequence Number=SeqID_61917
atggcggacgcgcgccggcaatcagcaggctgctggccggcggaggagcacgacggtgacgatgcggcagcggagacgaccggcggtgccttgtccggtgactcgtcgtaccaggctctcgagacgtcgacgttggtgcgggctctggcccacgtcgtcgctggcggcggcgaagggtaccagccgccgtgggccggcgcccggccagagaatagtccgcctacggcaataatggcgacgcccggcggcaccggcaccggctactcgcctgccgcaccgacacggccgggccactacttcttcgaagcagaatcaagagtcggtgcactatattacgcagaatcaagagtcggtgcactatattatgcttgtcagcttgtgccaaagacgaatgctacgtcagagcgtccatga

SEQ ID NO: 18543 - DNA, 255 bp, Zea mays
  Peptide Sequence Number=SeqID_61918
atggcgcctttggcagggcctgactgcctgtcagtctcactctgtcaagtggcactgcagtcggagtggcgcaggcggcgctgtccttctgtcagaccgctttatgctgatgggggttaccagctgagaattaggcgtcttgaggcctcatactctaagactattgctcagatggatgtcaaaaatgattttcttcatgatgttgatgcttcgtcagggatgtttgtcatctttgttgtgcattatatggtttga

SEQ ID NO: 18544 - DNA, 264 bp, Zea mays
  Peptide Sequence Number=SeqID_61919
atgacgaaacagccatcaagcatcagcatctctgcgaagccatacgggatcaacttgctaggactgggactgatctttgatctccccacccgatggttcgctctaggcggcggcagcgaagatgctgatcctcactctcaacaccatggactgctctgttatgagtcggtggagctctcaaatgcggcgacagctctacaagcagtggccggcagcagtttatatggccagaggcccaaccgaaaggagcaacaaactccataa

SEQ ID NO: 18545 - DNA, 612 bp, Zea mays
  Peptide Sequence Number=SeqID_61920
atgtgggcccagggacataaggaatatagtgcttggagttttctaatgtctgttgtcgagacaatcttcttgtgccctgacacccgagatctccgtatcctcggcgtgcaggggaagcttcttgtagaagggaggatgagtatagcgtgctgcctgctggatgaccttgacgccgtatgccagctgatgggacgggacacattaaatgctgagagggcacgtcacccgtcagcgcagtggcaggcgggcaaggcccggacacgtgtcagcactggacccctgctcatactagggtcctcctcgttctgggaccctgctgagggtatcgatctggctagtcttgggcttccacacgacttcgatggaggccttctcggtgttctcccccttacggtccctggcttgggcccatacacggcggctagcacgacgattccgccctgcgcccaccgcgcgcagtcgtgggcgcggtggaacaggttcccggtgcaggtgaacagccggagctggttcgggttctatccatctgtgcggctacctccctccatcatcccttaccactacgctccggtcaggggcgtcccagagtgcgaaatgaaagtagaggcctaa

SEQ ID NO: 18546 - DNA, 1644 bp, Zea mays
  Peptide Sequence Number=SeqID_61921
atggccagcgcgtttttggtgtcgaaagggagagggggagcggggaggggaaccaaccacggaggcgaagacggcggcggtggcgaacaacgagctggcgaacccctcctacaggccaacggcgacagcgagcgctgtgacggtggccgagtgcgaggacggtatcccgccggagcccaccagctgcttcgcgtcccaccggttctccttatacctgcacgtcggtcgcgcgcgcggaggaggggtgggcagatgcagatcccgttagggagggagctcagatccgggcaccgcgtggagatagagagggggggagagggcgtaccaggtggtgaggaccttgatggactgcgcgatggcgaaggtgagcaccgcgacgatgagcgagcagttggagaacacggccagtgcgggaggatgtcggagccttccaaggtaatccacatccgcaacgtcgggcacgagattgccgagtctgatctccttcagctgctgcagccgttcggcgtggtctccaagatcgtcatgttgcgtgccaagaaccaagctcagactcttctgcagatggaagacatacatgcttccgtgagtgcgctgcaatattacacttccgttcaacctagcataaggggaaggaatgtttacatgcagttctcatctcaccaagagcttaccacagaccagagctcgcatggaaggaattctgatcaggagtctgaacccaaccgaatcctcttagttactatccaccacatgatctatcctataacggtggaggttctacatcaagtattcaaagcttatggatttgtggagaagattgtcacatttcaaaagtcagctgttcctctttctttcctcagagatttcacaaatccatcattacctacagaacaacgccctagggcctctcagcaagcttatcctgatccagctaatctctatgccttccaacaagctggagcttcatatgcacagatggggagggctgcaatgattgctgccgcatttggtggaactttacctcatggagtgactggtaccaatgaacggtgcacactcatagtcagtaatctgaataatgataaaattgatgaggataagctcttcaatctgttttccttgtacggaaacatagttcgtatcaaggtactgcgtaataaaccagatcatgctcttgttgagatggctgacgggttgcaggctgagctagctgtgcattatttgaagttcacaatacctatctcattgcagggggctatactatttgggaagaagctggaagttaactactcaaagtaccctaacattacacctgccccagatgcccacgactacttgaactcgagcctaaaccgattcaacagcaacatggtaaaaaactaccgacattgctgctctccaacaaagatgatccacatctctgccctcccccaagagatctctgaggaagcaatcctgaaccatttgtctgagcacggtactgttgtcaacaccaagctatttgaggtgaatggcaagaggcaggctctcgttttatttgagactgaagaggcagcgaccgaggccctcgtgtcaaagcatgccagcacacttgagggtaacacgatccggatctctttctcccagatgcagagtatataa

SEQ ID NO: 18547 - DNA, 237 bp, Zea mays
  Peptide Sequence Number=SeqID_61922
atgaccgttgctccgctggcacaccggacagtccggtgcacaccggacagtccgcttgtgttcgctgtttttaatggtgaggcctggggttatcttggtagtcggaaattcttacaggaattagatgaagccgctgcttctgtgaatggaattagtagcttaatgattgaccaggttttagtccgggtggccaagttgcgtgtccagacccccttgggtcgcggttctagatactag

SEQ ID NO: 18548 - DNA, 369 bp, Zea mays
  Peptide Sequence Number=SeqID_61923
atggcgctccctgttgacgtggcgggcccgcgcccgaggccgggcgacgtgggggctcctctgaagctggggtcgagtctgtcttcggttgccgaggccgagcccgagcccctgggtcgggcgaggcggaggtcgttcggcagaggccagggcggagtccgagccctggggtcgggcgaagcggagttcgtcgtcttccgggtcttagcccgagtccgagccctgggtcgggcggagcggatcggagtggcgcaggcggcgctgtccttctgtcagaccggtcagtggtgcggcgaagtgacggtggtcactccggctctgccggggggcgcgtgtcaggataaaggtgtcaggccacctttgcgttaa

SEQ ID NO: 18549 - DNA, 195 bp, Zea mays
  Peptide Sequence Number=SeqID_61924
atggagcaaaagatggcagtgaagtgtgacggaaagagcgctgcaactgcaaggaaagaatggaagcgagcaggaggatctgtcgcggttggcggttgcaaacaaagccccaagaaaaatcggaaaaaatttcgttccttgcaagtgcaaccaaaacggagagggcggggcgcggaagaggccgatggtgaatag

SEQ ID NO: 18550 - DNA, 197 bp, Zea mays
  Peptide Sequence Number=SeqID_61925
atgtccaatgtgctggccgaccatgcctcgatgcctttcaaagaccaatgctccatcctggggaagataccgagtggtgtgatggcaactcttcttgtattcctgtccgttggtttagttggtgctactgatgtatttccgaacatctaccagtcaatgtctgatcactctaagttccctgtggcactattcgtatg

SEQ ID NO: 18551 - DNA, 1089 bp, Zea mays
  Peptide Sequence Number=SeqID_61926
atgggggacgcctgcaatccttccgccttgtcgttggagggacgcaactccgtgggagtcgatacctttcagccatcgttcggcttcaaggattttcatcaggcagcccggctgcatcccctcgccggtgcttcaaggatcttcatcatcagtgctggggaggggagtgtgccgagttggggtcggtccctgcgcgggcggcggcccgctccttccctcagtgatcgggggaagggcgtccgccgttcatggcatgggcagctgccgcgtgcccggctctctgagccgagcggcttcggagccgctcccggtgccgccttccgccacggcagctggaagaggttccgccgccgacgagctagccggcgccacccacggactgacctccaactctacggccttctgcccgtccttgcctctcgagttgggggcatgggcgagggcctcatggcagcagcatccgccctgaggtcatcgctgccgctgttcggccctccggagcagaacactgagactcaccttgtcgattatctgaaccgcttcaccgagcgtgagttgcctcgtgcaaaggtgacgagtgagagttggcttcgaaaaggaggtgtagttggccagagcctggccgggttgtccactggcggagccgacgccggagttgagctgccgaggccacaagccgagctgatgtctttggggagtgggggccctccgaccgcgtcgccgtccgaggctaggtcagaccccgccgaaggtgtagttgatgccgagggtgctgctgcgcccttcggctgtcaacgtccgagcctgcaggatcagtatccggactcatttgtcggtaacagaattgtttgtgcgggcgagagttgcttttcacggaaggcgatgagtgagggttctgttaccgacgcagtcgagaaggcccgaaaaatcatttcggcagaggagctctcgagcatgaagaattgttcggtccgcggagtcacttatccgagcgcgagttacttatcacagaaggtgatgagtgagacttggtgtgtgaacgaggtatacgagcaacttgaaagcatcttaagggtagaagcgacgtag

SEQ ID NO: 18552 - DNA, 441 bp, Zea mays
  Peptide Sequence Number=SeqID_61927
atgactctgggtacgttcgatacatggccgaggcttgggctacgctcccgaggtaccctaggacatttccgagaccagcaggagcaattctgtaacggaatcccatcagagggaggcatcgagccctcggaccctatcaaacgggaccgggtccggcaaatcacctgcaggagaagtcttcgcctcgcccgaccccagggctcggtccccgcctcggcctcggaagatggactctgcctcgctcgaccccagggctcggcccccgccttggcctcggaagatggactccgcctcgcccagggcttggcctcgacctcgacctcgggcggaatcgtgtcctcgctcggcctcaacctcgacctcggaggagtttccgcctcgcccgaccttgggctcggaccgaccacgccacagaggggatcatcattaccctacccctag

SEQ ID NO: 18553 - DNA, 1030 bp, Zea mays
  Peptide Sequence Number=SeqID_61928
caggagtacgagtagagcagactcggcgaaggaggctatggcgggttcaacggcgttgggaagggaaactagcgcagcgcaggactcggtgtcgcgggacacgacgaggtggatgtcggcagcgcaggggagtgagctccggcgcggaagagtgcgcggacaagagcgagagcgaggggaaacagaagctctacggggtgcagtggattttattgtgccgagagaaggtggatcggcgccgaggagaggaacggagaggttggccaccattgacacgacatcggtaacagtgggaaggggatgcgtcgcggcagtggaggacgggcaacggttcacagaggtggtggcgcactcagctgatgggcggacggagggatgcgaagggtcggccggcgtccggcagcggcggcacgcgagcgtccaggcccatgcggctgcgaagacgagacccaagtccggcctcgggcgccataggaagctccgcctcgcccgatcccagggctcggactcggccttggccccggaagacgacaaactccgcctcgcccgaccccagggctcggactcggcctcggccccggaagatgacgaactccgcctcgcccgaccccagggctcggactcggcctcggccccggaagacgacgaactccgcctcgcccgaccccagggctcggacttggcctcggccccggaagacgacgaacaccgcctcgcccaaccccagggctcggactcggcctcggccccggaagacgacgaactccgcctcgcccgaccccagggctcggactcggcctcggccccggaagacgacgaactcagcctcgccagaccccagggctcggactcggcctcggccccggaagacgacgaacaccgcctcgcccgaacccagggctcggactcgacctcgatctcggaagacagactcgacctcgacctcgacctcggaggagcctccgcctcgccctacctagggctcggaccgaccacgtcacaggaggggccatcattaccctacccctag

SEQ ID NO: 18554 - DNA, 2109 bp, Zea mays
  Peptide Sequence Number=SeqID_61929
atggagcttttccaaggcaccccaagcccgcatccgctcgaaaggcttgtgatgctctacctcctggagacagacaagaagtctcggctgcgagaaccaagggcaatccgacgcaaggagaaagaaggagtggacactcaccagggacacaaacccgcggtcaggacgcatcaagggctaggaaagggcgccggcgtccggcttccccaacgtgacggctacccgcctgtggaggtcgtcgacgggaaggggatccgaggacatccgcaaaccttccaagtcggcctccggcgtcatctcccaaagcggcagccgccgctccgtcaagggaagcaccctccggtgatgaatggcggcaaccactcccgcagcggtgagccctcctttccgcaactcccccagggccttcagaaggggctggagattcttatgtctgtcgtgtggggtctcgtagcgccagttatcggcggcggcggtcaccactcgctaagaaaacgacgagagcttcccgtcgtcatttcggagatagaaccaccggcgctgccaccctttgttcgaggacgcaaggatggcggggatatactgcggcgcccacgactgcctcagctggaggatacagccaccagcccgcactgccgtgcggacccttctctcccccatcggcaaggcaaaaagctccgcggagaagagatgagtccacaggtcccagtgagggtcaatccccaagtatccttcacaaaccgccgcgaaaatggcggcttgcgagatggagttaggactgaggttgtgcagctccaccccgtagacgtgcagaatcgcccgcataaaacggcttgccggcactccgaacccccgctcgtgaaaggagacgaagctcacgacataccccggcggcggggatggggcggctccgctcgggggggcatccactccggctgcgggtcaccggagagagggcgaagtaaaccctcagcaacgagggcctccaggtcatccgccatgacggtggagaaaggccacgggtcgcgcggcggaacaatggtcacccggtcgaacatcaccaggcagaagagatggcggcggaaaggactgggcgagcggtttcctttctctggctattccctcgggttgagaaaacctaagaaggaggcaagtagcagagcaaagaaccgtcaccggtccctctcccgaatatataaaggcccaggcgagacccattcaacacttcacccgaacccgccgcggggttcaaaactcaaagcgaaacgcccgttcctcgaacggctcgcgcacgcgcaacggccgccccggaccgggaaaggggataccccgaaagggatccttctccgcgaaggaaacgggccccgagcccccctactgatcagaggttcgaaggctggcccctcggaggggttcaacagctgcctcagagcgctcgggctccgcgcccactactggtcagaggttcaaaggccggcccctcggaagggttcaacggccgcctcaggccactcgggctccgcgcccactactgatcaggggttcgtaggctggccctcgaaagggttcgatagccgcctcagacgcagagcgagggatgaccctgggtacgttcgatacataaccaaggctcgagctacgctcccgaggtaccctaggacatttccgagatcaaagggaacgatttttgtaacggaatcccatcagagggaggcatcgagccctcggaccccgtcaaaaggggaccgggtccggcaaatcacccgcagcgccgcctgcgccgctccgactgctgtgccactcgacagagtgaggctgacagcagccaagtccagcctcgggcgccataggaagctccgcctcacccgatcccagggctcggactcggcctcggccccggaagacgacgaactccacctcgcccgaccccagggctcagactcggcctcggccccggaagacgacgaacaccgcctcgcccgaccccagggctcggactcgacctcggaagacagactcgacctcgacctcggaggagcctccgcctcgccatacccagggctcggaccgaccacgtcacaggaggggccatcattaccctacccctag

SEQ ID NO: 18555 - DNA, 751 bp, Zea mays
  Peptide Sequence Number=SeqID_61930
atgagccatagccatagcactaagacatcgtggccggaggtggaggggatgcctgctgaggtggcgaagcgcaagatccaggaggaccgcccggacatccaggtgatccttgtgcctgtcgactccgccgtgaccgatgacttcaacaccaagcgcgtccgcgtcttcttcgacaaggccggcaacgtggcacaaaaatcttggtgtgcagactctccatcccgccgccgcctccctacgtccgcctgcctaaccccgccgcgaatatccacgcccgccgctaccgctctgcacgcccgccgcgaatctcgccgcgcgaaccgcccgcccgcccgcccgccagccagccgctccgcacgcccgcaacgcccgccgcccagccgccgcaggaggatcgccctcctcccgtcgtgcttctctggccccagcaatggcggcggtgaagaggagcaggagatcgacggcaaggagcggttcgagttcatggtcgagccgatggcggcgagctccaaggactgtgtgggcacgtacgagtacctcgcgtcggagctcgtgagcgggagcggctacgacaacggcgtggaccggtgggccttcgacgtcttcctctacgagctcgtctacggccgcacgcccttcaagagccacaccaaggtggccaccctcaagaacatcctctccaacgccaccgagatcaagcggcacccgttcttcgctggcgtggactggacgctcatccactacaacactt

SEQ ID NO: 18556 - DNA, 465 bp, Zea mays
  Peptide Sequence Number=SeqID_61931
atggggcctcgacatagtccacccacctcccacagtctagggcaatctcaaggccatgaccgcacggaagaagcaaaggctaagcaatggactccgaaggcgacggggtccgcgcccttcggctcaggcgacgaagacaaccagatggactcacctacgagggggtggcctttgctcagcatgcgaatacttagcaagatcaagtccacgcgccatctggcacgtcatgtatttctgctgctctgtcaatttgtaaattacctagaggtggtccgcttaccagtttactatccttctgagcaagaaaaggatgatcctaagctctatgcaaacaatgtacggaaactgatggcagtggagggaaacttgattctttcagaccttgggctggcggagaagcgagtgtaccatgccgcactgaatggtaatagtctagctcgtgctttacatcagaaagatgattga

SEQ ID NO: 18557 - DNA, 894 bp, Zea mays
  Peptide Sequence Number=SeqID_61932
atggagagagatagctctatcttgcccagcgagaacgttcctttgcctccgaagccgtacaatgggttgtcggctgtttatgaccagcgcgtctgcatggggcgcgcagcgagggtcaacgtctcttgcatcaaaggtgagtgggacatgggaccacttcgtctggactactggtctcgtgacagcaacgtggttgacccttcgataatggcggtggttgacggggttgctggtttgcttgggggagcggtgggcgtgggagtggtagcctttcttgatattggagttgtgggtgttgggggattctttggttgtagtttggctggtattgggggtgggggactgctccagtcatgcggtctttggcctctttggttactaggcgttctctggttgattgacctacatcttcgccttggaagacgcagtaaagcttcctttgttgtcgggggcctctcccgcgtttcctgcccctcgctgctccgccaacgcagccttgctgcggagggtaatcacaacgccgaggggggacttcgcctggttgatgttggtttgctatattgtgaacttgcagttgttgttgacccctttcttggcggggatattcttgctgcggacccctggtccatggcttgctggtctgcgaaggctctttcggcttgcactgccattccacctttaggtagtggagctcttcggactgggcgtacttctcgaagagttggtatagttcctgaagagtggatggtggatctctggtgcaatgcatgtatagttgtccggcgcaaaggccacttatcgcagagacaactcggccaatacgtcggtaaaagacctgtaaccctggaagttgagcaggaatttgccacggagggtcttccaggaatcaattga

SEQ ID NO: 18558 - DNA, 321 bp, Zea mays
  Peptide Sequence Number=SeqID_61933
atgggtgcaaatccaagtggcgggtcatcgcaggggaggtcttcggagccgcacgtgtggatgttgccttctaggatggggtggggggtcttcgtgctgagggtgcttgttgctgactgcctcggccccgctgttctcagctgccgcatgcaaggtgttgtctacgagggttgctttgccttgtcagcgagggccgccttgggggcctcgtccagagaggagctagccctggtggtcactttcttgggagccatcgtgggactcggtgttcggaacacgaacggtgggcgccaaatgttgggacggaaaatcgtaacctag

SEQ ID NO: 18559 - DNA, 606 bp, Zea mays
  Peptide Sequence Number=SeqID_61934
atgtcggcgccaagggtccactgttgggccgcacagaggagggaagatgggccgagggtctgctatttcggccaagtacaggctgcagctgagctgaacttcagcttagttgagctttctcaagtccagctgaacttcaacttcaaccggggtctaggcaagttcaaccggggtccagaaaggttcaaccgggatgttgatcctagggcaatagaccttgccatgagaatcaccgaaaggatgttcctcaaaatgaaggaagatgaggcgaagaacaagattgaagaagaaaatgatcgatggagaccaaacgacgaatccacctcttcacaaggtttgtctttgaaatccacttctcatatgtgctttatcgctaatgggagtgatagtgaaagcgaaagtgaggatgaggaggagaagcaagaaagtgatagtgaagatgaggatgatcttcaacaattcttcgctcagctaagcaagaaaaatcggatgagcttgctcaaactcatgaaaagagcggaagaacaaaaagaaatgcttcataagcaagaagacttcctcatcagaaaaaatcaaagacttagagaagttgaccaaagagcatga

SEQ ID NO: 18560 - DNA, 135 bp, Zea mays
  Peptide Sequence Number=SeqID_61935
atggttgcctttggtgcaatctatgctcagttatcggagcgttcgtgccgtttcgtggaggctggatctgcaagtctacgccgggcagtggagcaagaagccagttccgtgagctctcaccccttcgccggataa

SEQ ID NO: 18561 - DNA, 450 bp, Zea mays
  Peptide Sequence Number=SeqID_61936
atggctaagctgaacttcaactggggtccaggcaagttcaaccggggtccagaaaggttcaactggggtccaggaaaagttctgccggggtttttcccccggacctcactgctttggtactacatcgagttctttgtggattcattactcttggagcttctagctcctagacgactaggtgtctcttatgttgatcctagggcaatagaccttgccatgagaattgccgaaaggatgttcctcaaaatgaaggaagatgaggcgaagaacaagattgaagaagaaaatgatcgatggagaccaaataacgaatccacctcttcacaaggttcgtctttcaaatccacttctcatatgtgctttatcgctaatgggagtgacagtgaaagcgaaagtgaggatgaggaggagcaagaaagtgatagtgaagatgaggatgatcttcagtaa

SEQ ID NO: 18562 - DNA, 1437 bp, Zea mays
  Peptide Sequence Number=SeqID_61937
atgcaggcggcatgctaccacaccaagggggcgcacactttcgacttcgacgcgtccagcatggaggcccaggcccacacgccatgtgaccggcgcgccggatactacgtgcgagaaactgcaccgccactcgcgccagtgccgcgccttctcgactgcggaaccggtgccgcgactcgaggcgaccctgcgcatgacccgacagtgccaaccgagcacatcagtcacgggtcagtcagccgcgggagaaggcgcgacggtcgatgcggccagaaatgggccggcagtaatggcggtggcaggcaggcggaagcagcggacaggcggcaccgttggcaggcgaagcaggcgacgcttcacctccgccctgatgaccgcgtcaaaaaagggaccgggaaaggggatactccgaaagggatccttctccgcgaaggaaacgggccccgagcccccctactgatcagaggttcgaaggctggcccctcggaagggttcaacagccgcctcagagcactcgggctccgcgcccactactggtcagaggttcgaaggctggcccctcggaagggttcaacagccgcctcaggccactcgggctccgcgcccactactgatcaggggttcgtaggctggcccccgaagggttcgacagccacctcagacgcagagcgagggatgaccctggcacaaagctgcaaaggcctgatgggtgcgattaaggtcaaggctcagtccactcaagggacacgatctcgcctcgcccgagcccagcctcggacaaaggcagccgaccccggaggattcacgtctcgcccgagggccccctcaagcaacggacacaccttcggctcgcccgaggccatgtcttcgccgagaagcaaccttggccagatcgccatgccgaccgaccccaagtccggccttgggcgccataagaagctccgcctcgcccgaccccagggctcggactcgggctcggccccggaagacgacgaactctgcctcgcccaaccccagggcttggactcgagctcggccctggaagacgacgaactccgcctcgcccgaccccagggctcagactcgggcttggccccggaagacgatgaactccacctcgcccaacccaatctccacctcgcccgacccggggctcggactcgggcttggccccggaagacgacgaactccgcctcgcccgaccccagggcttggactcagccttggcctcagacgacggtctccgcctcgcccgacccggggctcggactcgacctcgacctcggaagacagactcgacctcgacctcggaggagcctccgcctcgcccgacctagggctcgggccgaccacgtcacaggaggggccatcattaccctacccctagctcgctcaggctacgggggacaagaccggcgtcccatctggctcgccctg

SEQ ID NO: 18563 - DNA, 1047 bp, Zea mays
  Peptide Sequence Number=SeqID_61938
atgtcctcgcactcccttcatgcatcacatccttccaccttccgagccccggatggggagcacccgcggttcttccgccttgtcatcgttggaggaacgcaacttcgcggaagttggtaccgttcagccatcgttcggcttcaaggattttcatcagacagcctgactgctttccctcgccggtggtcacccaagacggtgaccaccagttctagggtggggagaagcaagccgggctgcggcctctgccccgccctcagcttcaaggatcttcatcatccttgttggggcggagagcgagctctgcggaggaggcgtcctccagccatgccggggaaggcgaactgttgctgcccagctaggatgcaacattccgtcctctgtcctcgctttcatggcgaggacgggagtgaggacctgccggtgcgctttggagcggcctgcgctcgctggtgcggcgttggtggacaggcggacgcagccgtcggtgctgacgtggtggtagctggagaaagcttctccgccgtcgaggccgtcagcgccgcctacggaccgacctccggctctttggctttaatgtctggttcgcgtcccttgagtggggatgcgaacgagagccttccggtggctgcgtccatcctgggaccatggctgctgctgcagaggtcgctggcgagtcgcctggagcttgtcgccccgcaggctctccggtgtggaggttgttcatacccacgggggtggaaccggagttccgtttgtaatggcaccttgagtgccggtgtctgttcattgtggctgtcggggcctgaacatgattctgctatcgatatagtcgagaaggcacgaaaaatcattttggcagaagagtttccgagcattaagacttgttcggtcagtggaatcgcttatccgagcgtgagttacttatcgcagaaggtgatgagtgaggatcccactttcgaagtagtcaaaaagcacgaaagacgttctggcagaaagacctttttcgaggaaaattttgacgcagagggggttcgccccttctag

SEQ ID NO: 18564 - DNA, 1428 bp, Zea mays
  Peptide Sequence Number=SeqID_61939
atgtcgtcgtggcagccggagaggtttcggcaccctgttcatgtgatgtcgtggccgtcggaggagcgctggagccttgcggaaggacagctgtcggggctgtcaaccgaggctaagtccgagccctggggtcgggcaaggcggagttcgtcgtcttccggggccgagcccgagttcgagccctggggtcgggcgaggcggagttcgtcgtcttccggggccgagcccgagtccgagccctggggtcaggcgaggcggagttcgtcgtcttctggggccgagcccgagtccgagccctggagtcgggcgaggcggagcatcctatggcgcccgaggccggacttggctgctgtcagcctcactctgttgagcggcacagcagtcggagcgacgcaggtggcgctgtcttcttgtcaggccatccttgcattaaatgctcctacgatacggtcggtcggcgtggcgatctggccaaggttgcttctcgacgaagactgggcctcgggaaagccgaagccccactctgatgatatgtcccgagttgtgggccaactcttaaagttgatcgccacctttatagaggattggggcgcttcaggtggtatcagtgctgttaggttggccgcagggataagtcagatggaggtccgctgccaaaccagcttttgccagaatgaagatggtttccccaagttgctgagagcatgcacagttcgcctcggaatcaggagccagccagagtatgatggtcgtgaatttgtcgagcatggcacagagaagatgcgtgcattggaagggcagctgctgcttgaggatgaccccacagtcgtagaagctcaatcgtcagctccatgggatctcacctcatctcaagcccatgtagctgccttagaaagtcgtgaagtcattgttgttgaagccctaaagcaagccaaggatgagcacgtccagaagttgatggaggcctacttggtaacccgtaatcaacgtagagccctatggatccaagagcccgcttcatccaacccagttcaacccatgaggggtgaagatccccagattcttgaaggtcacctggtctctgtcagaggagaaaagaaggcttgggaactcccggaaggatccatagtcttggaaggaatgccagtctcccctaaggctatggataagcaagagcaccccgaatcgtcccaaggtcccctgccagagttgtttgagcccctcaccatgaagaagattctagcactgtctcatgaggtcaaggaagaagccgcaagcaccccgccaacaccgctgccctttgaggagctacaagagctagtcccgcttgaagaagagttcgaccccgtcctaccatctcagtcgctgccagaagaattcatcaacatcatctccctcttgacccatccaggagatgtctcagattga

SEQ ID NO: 18565 - DNA, 723 bp, Zea mays
  Peptide Sequence Number=SeqID_61940
atggcgcctcctgttgacgtggctggtctgcgccctaggttgggcgatgtggaagctcctccgaggccgaggtcgagtctgtcttccgtggtcgaggtcgagtccgagcccctggttcaggcgaggcggagaccgtcggctgaggccagggcggagtccgagccctggggtcgggcggagcggagttcgtcgtcttctggggctgagcccaagtccgagccctgggtcgggtggagcggacccgagtccgagccctgggtcgggcggagcggagttcgtcgtcttctggggctgagcccaagtccgagccctgggtcgggcggagcggagttcgtcgtcttccgggacttagcccgagtccgagccctgggtcaggcggagcggagttcgtcgtcttctggggctgagcccaagtccgagccctgggtcgggcggagcggagttcgccgtcttctgggacttagtccgagtccgagccctgggtcgggcggagcggagcttcctatggtgccttcggccgggcctgactgcctgtcagcctcactctgtcaagtggcaccgcagtcggagcggcgcaggcggcactgtccttctgtcaggccgctttatgctgatgggggttaccagctgagaattaggagccttgagggtacccctaattatggtccccgacaactctgttcctatggaccaagaccagcacccaacataagacttccctag

SEQ ID NO: 18566 - DNA, 2799 bp, Zea mays
  Peptide Sequence Number=SeqID_61941
atgcctgccagaactgttgcctctgacaccccaacaagagcaacccacagggcttcttccgtctcccctccaacacgccgaggaggtcacgctgggcgtcagtcctcggctatctcacttatgtctggaaccagttcaactccttctgtcttgccaggccaatgcattcctgtattgctctttgtctttgaggatgatgcggttgatgtttcaagtgctgcagcaagtcccgatgatataggtgatgcatcttcatcaaatcagggttctacccctgatggactaccaaaacagagcttagcttcaaaaagttctggttcagtaattatgctttcccgggcagcaaacaaatctgagggcagttcaggcaaaaaactgcattcgtcactggagggacagatccgtgtcttgatcaagaagtgcagggtgcttgcaggcatggagcctggacatattggcccaaggggcgtaagtaacatgagtcatcatttacccctgttctcactcgatacctcgagggtagttgcactgttggaacggtatattaataagaaacaggaaccactggacaccattgcaggactatttgaagattctttgtgctccaaatcgccattggatattctttcgctcgaaaacaactaccatccaacaaaccatgatgactttcagttgatcaaggattttatatttcggcagtctgatgcgctgagagggaaagggggatattcaagcaatgcaagtgccgggtctgttgcaggtgttggcatggtggctgctgctgctgcagcagctgcagcatcagctgcatctgggaaaccagttaatgcacctgacctccctacttttgataaatggttgtccataagtacctctattctaactgcactgttgagtggaagaaatgtgctgagatgtcagtctgaaagcaagactcatacaagtcctactgagaagaatggccaacttcctgtaggatctaatgctattgagatcgcattatcgtgcttggaaagtaacaatgggctgaacatgaaattttcttcatcatggtgtcaaagggtgcttccagctgctaaggagatatacctgaaaggtttgcctgccttttaccccacaagaatgcatgaagtgcagctacagaaggcattgcggtcctttggctcaatggttaaaggaccagcagtcagggtattctcaaagaagctagaagatgagtgccgggcaatatgggaatctggaaggcagcaatgtgacgctgttagcctaactggcagaccatgtaagcaccgcaggcatggcgatttcttttcatcagatgcaatggagcaacattctagtggatatgtcttcctccatgcatgttcctgtggccggtcacgccgccttagagatgatccttttgactttcagacagccaacgtgtcttttaattgtttccaaaattgcgatgacctattacctacccttgcgcttccaagaggcagcaatgatggttcattttcagtatcctcttggtgcttggtgcgtcttggaggagcaaggtactacaagccaacaaaaggactccttcaaagtggatttagctccaaggagaggtatcttctaaggtggattgtatctgttcataaggggcaagtgagaaatgacattcgttctaatactattacttcatccgcaagatctggtatgaacccgcagactcccccaatagtcactggtgaagtaaaatctgccataacccaagtcacagcacaaattaaatatgcaaagcttgaaaattctggaaaacaagctgaagttgaaccagtgagcaacttaggcattaattttggtaaaggtctgccaaattttactatgaaaaagcccttttctgaagttgttgctggcaccacatcaaaagataccgagtttcctgctcttcagcagacaaggccaccaaaacctggtggtcgaaaagatgagcagcgtcaaatgaatatagtagaccagactaatggccgaggtcatgtggctgtcagccaagggtctgtagctgaaactgaatcggcaaaagcaagcagaaacaagagtagtgaaaatgctgatgggaagccctttttacagatagggagcaatatagtaccagtgattgctggaaatgagactagagaaactagtcagccagtacaacagtttgttgtgtatattggatttgagcatgagtgtccctatggtcatcgcttcttactgtcagagaaacatatgaaggagatcgagtcttcctgtttgcagtatcaaagacctcatctaaacaaagaagcagaagtcaagcatgcacaaaagttgctccaaaatgcatctggtttaatagcatctgcagtggacataaacagtgcacggaaaaacagtaagccattggaatcatcagggagaaacagccagcagcaatcactgcagctgaggattgatgcagagacctcacagccttctcctcggctttcagatccacagaatgccaaaaggtgggagcattattttcgaagcgttacaattgatgatggtggagaagcattttcactgatgaacagaaacttgccaatatatatgcgctgtccacattgcaaggtctcagaaaggaaggaacatcaagatgtaaagtttgctggtgttgtgtctcaacttcagcggattttcattgtgacacctgatttccctgttctgttggcaagctgcccacttgtacagtttgaggcaagcacagccctgcaaatcgtgtcggtaggggatgtcactgagaaagaaaccgttatgaagtga

SEQ ID NO: 18567 - DNA, 420 bp, Zea mays
  Peptide Sequence Number=SeqID_61942
atggagccgccttcgcctccggcgacccactccgcggccgtccgtgtcctctcccgcactcctccgccgacctccccgaacccctcctccacgggcccggcggccccgtcgcccgcctcccgcgacggggtcgtcgccgtcggcttcgtgggcgccgcggggaccgcccgcctcgcggaccggatcctcgacgcccacgtcttctctcccggtggctcggcggggagcctcgcgggaagggtaaggtaccaccgcgacgccggcaagaggatggtgttccttcacctcacgccgccgccgcccgcgccgctcgaggcggtggcaggatgctgcgatgacggcgaactaccggagatgctcttcatgttctctgtgagctcggattcttaccctccttttgctcattacattatacggtag

SEQ ID NO: 18568 - DNA, 273 bp, Zea mays
  Peptide Sequence Number=SeqID_61943
atggagagtcatgatctccgggcagaatgggaatcacggcttgtgggtggttatgagattgatggttttggtcatgactatgatgctgcttctggagtagctgctggaggagacccagacgacggaggaggcgacgacagctcgagccacgacaccgacttctctgctaaccttgagccggaaggatgggttgctcgacccatcactcgcgacgctgctcgcggggtgtcacttccacgatgcgctcgacaccctgctacgtcgggcatttga

SEQ ID NO: 18569 - DNA, 480 bp, Zea mays
  Peptide Sequence Number=SeqID_61944
atggggaagccgccatggggagctcgacagagcaccggatcagggggagcagggaaggcgccgagcagaggcacgggtgaaacgccggtgagccggagagctgcgtggctggggaaacgaagctccacggcgagcttgagggagatgagggaagcttggccaggcgccgttggagggagaggagttgcagagagatccggccaggcgcaggagctggagccgctcggtatggagatgagcgcagggaggaaggggatatgtccgagcgctaggaagaagaccgagcagggcgccgcggtccgagcgcagggggctgggcggagcacgcgacgcagagggccgctcggcgagcgcaagagcgcgacgcggctggaaggaaatggagggagaagagaggagcgcgcgcgggagaagaagcgcgcgcggcgagatttttatccagggcggcgactgataaaaatcgaaggagaggcggcgtga

SEQ ID NO: 18570 - DNA, 318 bp, Zea mays
  Peptide Sequence Number=SeqID_61945
atgatggcagcggccatcaaacgatctaccctaaacgcgtctatagagaagaatacgacagctatggttggggttctcttaccatggataggacagttgcggtgcagatcagatgatcatcctaaccccgaagcagatgcccaggagcacatcaagcgcgactatcttcctggtggctccaagttttctctcccatctccccagcccgaggcccccagcatccgctctcttggtgtttatgggataggcatggtggccaaggaagggaagctgaaggagaaaggtcgtcgagtcacgccaagagtcggccagctctag

SEQ ID NO: 18571 - DNA, 411 bp, Zea mays
  Peptide Sequence Number=SeqID_61946
atggcccgtgcctgcgcctataaagcacccagggacttcgaccgtacccctccgcacgcgctcgacctcaccggagcccaaaaccaccggcgtttgcccgtgcacggagaagccagtccacggtcgccggactccacccgaccgccagtgagcgtagaccggcacccgccgccgacgagagcactcgcctgtgcacgtggaccggacgattctggccacccccgtcgtcgagccgtacaccgttgtgaccgccagaacctcccggagccaaccccgcccctcgccgggacctctctcaccgccggttctttggaggacatggttgctggagtgacttggtcgtccatcttgccaccgggttggactgtcgagtgggaccccgcctcggctgaggaggagcatgaggagtga

SEQ ID NO: 18572 - DNA, 453 bp, Zea mays
  Peptide Sequence Number=SeqID_61947
atgaggatgaccagcgacgaatctccaccgcaccaaaatcttgcacaccaatctgcatcttccacgctaccggtcaacccgaaccgttctccaggacttctccctagagtctgggcggcgatgaaggcacacgacggtgacaacacccctatgcccactcggcgggccgctgagccaccctcgcgagttcggtatgtggagttccccatgataaaggtggccagggagggggtaagcggggcaaggctatttatggtctgggaaccatgtgccagccgtgcgaatctcgacgtccggcggcgattggttaagctgaccagggagcaagcgcagcggtggtggacctctggatcgtacttagtacaacttcaaatccccgatgaaggcaagtacttgaaccttgcttgggaaaaggagggaagtagcaacacgttcacttacacttctaaataa

SEQ ID NO: 18573 - DNA, 714 bp, Zea mays
  Peptide Sequence Number=SeqID_61948
atgacctcccacggttccttggacgaagggaatgcactgtcccacactgacgggcttgcacgagagggctttccccgtattttgtgggaagtacttcagggggccggatacacgacacctcctcagtacgcggtgcagcagttcgagaagcaccgagtgccccgctgtagggtgaggatgaccctggagcctcatcccctacagccaggctggcgttcgctggactctgagtcctttggataccgggctgaggatacgatcgaggcgattgctctgcacggattgaccactttctgcagattccaccccttggagctgtccacccaccccattggcttgttccccgctgagaaggaggacgacccaatgtggaaggaccgagtggagcatgccaaggacatctgggctatctacctaggtcagactgctcacttaacagtggagcagctgtcaaatgagatcgaagagcttgaggaattagtggggaccagggagaacaccatcgaggttctcgaggatcagcttatcaacacccagcagcagctcgccgaggctaacgagcacatggatatgcatcaccaggagatccaggacatggaggccaacggggatgtcgacattgatggaggagaggagcctgcctccagcttggacactgctggctcaaggagaccaccttcctccgagtcgagtgttgcctcgttcgctcactag

SEQ ID NO: 18574 - DNA, 315 bp, Zea mays
  Peptide Sequence Number=SeqID_61949
atgatgataagcattataaacacaaatcagagagcactgggcgtgtctatgcgtgttgaaagggcatcacttgaacaggtccagaaaaggtttgaggcacttaagaaaaggaaggatctaagtgcctttactgaagaagatttggatgagagaataatgaaacaacagcaagaggaggaggaacggaagcggcagcgcaaagaaaagaagaaagagaagaaaagagaacaggcaacccaacatgaacctgaggacgttgatcctgacatcgctgccatgattggttttggtgggtttggttcctcgaagaagtga

SEQ ID NO: 18575 - DNA, 447 bp, Zea mays
  Peptide Sequence Number=SeqID_61950
atggagaatgtgtataaagcaacagttggagctatagcacaaaatggatactatgtagcctatgatggctggggaaacagggaagaggttctgaagcgagatattccatgggagcattacatgtcaactaagcttatctccggaacgtgccttcagcttttacggcgatatgaccacaaaccggagagccagcgagctcctttgcttgaggagttcaagctctgcaaggtgagttctgctcagtttggccagaaaggcatcccctacctgaacacctacgacgaccgcaccatccgctaccccgaccctctcatcaaggccaacgacaccatcaagatcgatctggagaccagcaagatcatggacttcatcaagttgtatttgccctttcatggacttcaccaagttatatacttagttaggctcaatgttagcacaaacagttga

SEQ ID NO: 18576 - DNA, 531 bp, Zea mays
  Peptide Sequence Number=SeqID_61951
atgtcgctggcccgcgtgcaagatatgcaatggttggggtattttggcggcggggttggtcgggtcctaggcgcggaggaggtccccgagcccgagggagagttggttgtttttgaggaatttttcatcgccggcctttgcctgcctgcgcatcattttgtgtcggaggttttgcagaagttcaaagtccaggttcatcagctgacaccaaacgccgtggtggcgttggcgaaaagagaaaaattggacataagattgctcaattcagatcgtgcaccttcacgccgaagtccgggaagacttcgatggaagttgtggagttggtcccctgtgcccgaaataagtggggcaactggtgggactactggttttatgtttcggaggctaaagtcgaagatcacccagggctccctgccgccattatgtgttctcattattatgtggcgtatccgtcatttgaggtggcggaggatgatgaaaatgagagggcccttcggattgttgtccgcacgagtagtgggcgcgatctag

SEQ ID NO: 18577 - DNA, 183 bp, Zea mays
  Peptide Sequence Number=SeqID_61952
atggtgagagtagcgtgtaccctccgtggcaagaggctagacggtggtgtatctgtgctcttggttggcgtgaacccggtgaggaaacaacagacttttgttgtttttgttctaaggtggtacccaaggattagccccagcagtgaagccaagtcgagggaggatgttggcctcccactttaa

SEQ ID NO: 18578 - DNA, 513 bp, Zea mays
  Peptide Sequence Number=SeqID_61953
atggcacgtacaaggaaaacatcacacaaatctactggaccttttggcgtgcctcatcatcagttagcccctagacatgaagggagtagtagtggcagcaatgacccgattggagacttggaggccaaggtggaacaacttcggacagagctacgtcaccagaattgggcttgggcgcaggacaaccaacgtatagctgaattgtcagctgacatcagccgcttgcagtacgagatatctgaatgggatttggccattgattgggccgtcaactcgtgttcgatcgcttgggaccacgaaggaaaagctcgagctcgtgtggcagagcttaacgcggccctcgacatcctgcaagtgtactgtaatactttacatgaagaagtacatgtattgtatgctcgactacacccggacgtgccttccgacgctgctgcaatgggagcgggacatcgggaacagcaagtgaaggacctgatggggagttggatctttttaagccccctccttccatga

SEQ ID NO: 18579 - DNA, 300 bp, Zea mays
  Peptide Sequence Number=SeqID_61954
atggagagtcatgatctccagacagaaagggaatcatggcttgtgggtaaagtgcgcaacctctacagagtgtttgaaactgatatatcagccgtgctcgcggttgtctgcattgcaaccactgctcaagagaagatgaagccgtggaaggagacttccaggagttccaagattacgacgagttctaggcgtgggttagcggcaacccccagtcggctgcctgtgaaggccgcgtgtatctacgtttcttttccgcactttgattattgtaaagactatgtggatgtctcagacatatga

SEQ ID NO: 18580 - DNA, 219 bp, Zea mays
  Peptide Sequence Number=SeqID_61955
atgggcttgatggcggtgttctactcccaagaccccctacgcagcgttgtggggtcagctacgccttcggggagcgggatggagaatcctgctaaagcgtctccgggcccacagccgaaaggagacgacgaaattaaaaagatggctgaagccattatggacgaagtcgtcaatcgactcctgaatgaggctgcagaagttgttctgagagaagattaa

SEQ ID NO: 18581 - DNA, 441 bp, Zea mays
  Peptide Sequence Number=SeqID_61956
atggccgacaacccctgctcttctgtggtcgagctcgacccaggtgctcgccttggctgtgtggccattgccaccggtccaaccatggagctcttctctggtgcccagatacgtcttcctcagcttcgctctagccgtcggagcagcagccatggctttctgcgctcggtcttggtcgtctcctctgcctccgatctgcggcgccatcgcgagctcgcaagccgctgtggtcttgtccgcgccagcacgcgtccatggtcacgtccgccaagttcgccaacgctctattaccaaatcgactattgtcgctgcggcgtgccttgctgcgcgctcgtcggggtgccatttgttgtgcccctgcacccgctcttgtcgcttgtgtcaactccggccatcacaggctccgtccggcgtagttccctgctcagccttcactgctag

SEQ ID NO: 18582 - DNA, 375 bp, Zea mays
  Peptide Sequence Number=SeqID_61957
atggggatcagcccagaaaaatctattgcttattttgtggtgaggacaagggtcacactacaagaacgtgccagatcactattcttaaacaaaaagagattgtcgaagcagaagctcggcagaatcagccaaagtaggtcctacacacagcttcgtgccactctccctacataccagaatatgtgggcaaccaacctaaagcttctgtcgcttcggcaagccattcataggcctcttggcctcagctcccaccgccaccactactgcagcctacctattctcgaagccagcagcaagaagggcgccaacactcccaacaacaacgtgacttcagggaggagtccaaagctcgtacagtcaatagtattgtactag

SEQ ID NO: 18583 - DNA, 516 bp, Zea mays
  Peptide Sequence Number=SeqID_61958
atggcggaggctccctgcccggactgctttcccatggccctcgccagccatcgaaactccaccggcctcactgccagcttgcctcgccaaatcgccaggatcacgacgccccacctgcgaccgccggcggacccaggacggcattcggggaatggattcgccgaagtcgccgtgggggaaacaccctaccgccgtcgttcggacgtccgtgaaggagccaggggtgttcgcccaatcgtgttgtgcgtcttcgcgaacttgtggtggccggagatcactacggcggtggaaatctcttggatgaagggctcgggaatcgtcaaatccagtgccggtgcatcttcgactctacgattccggggaacatcgatcgaacgcgggtcgccggtggggaagggagaatcactcaactccggtgagctcatcggagtttgggcggagctttgccgcctgggcactcggttaggaagagacattgtgggcggtcgatggacagatcgacggtccagggcatga

SEQ ID NO: 18584 - DNA, 506 bp, Zea mays
  Peptide Sequence Number=SeqID_61959
atggccgtgatgggttcaacatcggacaagatgtacctctgccaggtaccaaactttgggattttaaatgataaagctgagaccgggcgggtgactttcacgagaagagagtctcgggtagtgtctccatctgagtcgattaaggaccatgttgatgtaggcttgatgatcgaggaccttttaactgccgctctgtcttccgcgccgccagccgccagcgcgccccgcccagcctcgccttccctgcgagcccgcccactcgccgccagcgagcgctgctccggccgccgccccgccggcctccccggcgcgtcccgccgccagccgcccagcctgcttccctgcgcgctgccgcggccgccgccccgaccggccttcccctgcgcgctgccgctgccccgacgagccccagtcgcgctcgcccttgcccgcgcggcagccgccagcgccgctcgtcgtcctggccgtccgacgccgccagcgccgctcgccgtcgccaccgtccg

SEQ ID NO: 18585 - DNA, 291 bp, Zea mays
  Peptide Sequence Number=SeqID_61960
atggaacagtggccgcggaggaagaaaggggcggaggggcttaccggcggcgagactactctagtgaggtggtcgaggtccacgcgcggccgcgtgcgaccgaagtccggcaaagatgatctcgggtctccggtgacgttctgccgggtccaaggacttcgggagcttcacgggccaccggcaaagctaaccgaggggcaggcgcaacttggacgcgactggagcgagctggccgcggtggccgaggcttggggagtggtggcgggcggaggaaaagctcgccggagctaa

SEQ ID NO: 18586 - DNA, 204 bp, Zea mays
  Peptide Sequence Number=SeqID_61961
atggctgatgatgaaatgaggacacttaatgttccaactctgcaaactgatgggacgagaacgacttcatcattgcttgatgcactgggtttgccatgccccatgcatacagggaagagggaacaaaggatggtacttagaacactgttgaaggaaacaacaacaaaaccatcaggctttcacttcgacaagagtcagcattag

SEQ ID NO: 18587 - DNA, 624 bp, Zea mays
  Peptide Sequence Number=SeqID_61962
atggaaggtcggagtggccggaggggatggcaggagcgcgggagacggagcgagcggatgaagagggaagggggacggctcgcgggaatgggtcgagatagactgatgaagacagcaggcagatgcgtcgatactctcgatgcccacgatggcgatcgatttgcctccgagaaggcagctgagaaaattgttgagaaaatatatcaaacagaaagatttaagctaacaagagaagaggaaaatgctattttccaaacaacattcaaggaaacaacaggatgtaaggcaaacagacttcatggtcatgggtacctatcaagatatccaacaagaagtcaggtgatggaatcaaagttcctcgaacaagctcgtgccacggttgcaaccaaccaaaagaacattgaactcgaaagtcagaacgagaaagaatactacaggaaaaaatgcaagcactgcaagaagaagaagaaagaaaaagacaagtgcaagtgtttaggtcggtttcattttccactgttaagccgaagcttctccatccgtagcttcggaactggttcgtccttctaccagattgcgcctttcataccatgcgcaccttcatctcaaggccgaaggttcctgtga

SEQ ID NO: 18588 - DNA, 912 bp, Zea mays
  Peptide Sequence Number=SeqID_61963
atgctgacggtaaacaccaacaagtttattgagttctatgatgtaagagcagcagaggctgctcttcggtcactgaataaaagtgagatagctggaaaacgaatcaagttggaaccaagtcgtcctggtggaacacgcagaaacttgatgcagcagcttggtcacgatttggaccaagaagagccaagaacctacagacattctcatgttggctcacctattgctaactctcctcaaggggcatgggctcaatacagtagtccaacagatagcaatatgctgcaagctttcaccagatctccaactggaaatggaatgagtcctatcagaattccttccctgatttcaaatgctccaaagattgctcctattggcaaggatagcaaccggtctaatccctgggagctgcatttcagcactcccactcataccaagatcacaacagtaaccaggaatcgggggaggtctaaagccatattcagaactcctgagcatttcagcactcctgggactttatcagggccccagtttctctggggcagtccaaagccatattcagaacattcaaaatcccctatttggcatccaccaggaatcgggggaggtctcctgctgggcatggctaatcgtgcttctgtgaatcctggttcttctctaattggaagtctgacagataacacacaacagcaagatccaaaacgcacaagccaaaacagtaaccagacctggcaccgacgcgtgcaagctgccaacaatagagaaaaaaaaagagacagccgatgcttcagagatgaacgacggaccagggagagtgtgtgccggtgcgtgcctgctcggtcccaggtcggcctggagagtggagccgaacgacggacggcgaacagagattgggggacggagctcggagattag

SEQ ID NO: 18589 - DNA, 681 bp, Zea mays
  Peptide Sequence Number=SeqID_61964
atggcgggttctatttctataaagcctagggttgcttatgctaaagtgctagggcgaagggctctaatcgcatctgtcacccggggatccaacggacagagggccatcacctaccttgtgaccaaggctgagcaggggcacagagcccgcgcgacaacatcctcgccggagcaacgcgagccagcacccagcgctaatgcttctgcccacggagcagggcgggtccgtggcggcgttggacccacggcgagaaattgcggcaccgttggtccccaatcgcgcctggaatgtcctcgtgcaccatcagtgtatctccccgaagcgctctggcccagatccgaggccgcaacggtaacgatgccgcgggtcgatggtgatggtgacttggacatgcacagcggcgattccaccacacagacagtgaaggcggtgagttctaatgaggcggattactcacggaggcacagggctatgggtggcggcggccgggttttatatgggcgaagaacgagctcgaggtgctttatcgcgcgccgttgcaacgaatccccgaagaagcggcggcagatacgggtattgcgcgcggtagttgagctcggcgcgaatttggggaagaagagcgggagaaacgtggccagcgcggtggttgtggatctcaacggaatcccgagctctcgccta

SEQ ID NO: 18590 - DNA, 309 bp, Zea mays
  Peptide Sequence Number=SeqID_61965
atgccgcaggtcgatggtgatggtgacttggacatgcacagcggcgattccaccacacagacagtgaaggcggtcgatcttctcttctctggtcttggtctcattgattcgaggtttcgtcctacagtcaacattcctctgataccacttctgtcacacccggatttcggggcaccaagacccgggcgcgaacataatcaccaggggtgtgagacagcaagagtgagctcacatacgttcatcgctcaacaagttgtggggaataatgtgcatgaactcgccaaaggtgggagctcacgtgaagtgtaa

SEQ ID NO: 18591 - DNA, 564 bp, Zea mays
  Peptide Sequence Number=SeqID_61966
atgggtcctaccacagctcgcctccttcccctcctgcccttcgtcgccgtgttcctcctcgcctcccccgtggacgccgactccgccctggacgcggccacgcggtgcgcggccacgatcgtgtccatctcgccgtgcctgccgcacgtggcggccgtggcgccaccgctggctagctgcccgcctgccccaaccgacgcctgctgcgtcgccttcctccgcgctgtatccccgttggcagcgggaggcggagaggagggctgcctgtgccacctgctccgcaacccgcttctccttggctttcccatcgacgccgcccgcctcgccgcgctcctccctgcctgcgctgcgggaaatgccttcgccgccgccaacgtggaggccgccaccctcttcgctgacgcctgccgtgctgctgtccctgaattgatgtccaagccaaaggaggcggttccacttccaccagctggatcaatggttcgttcaggcactgaggtcaccagttcccgtggtattcctactgcagcattgatcctcgcggcagcaggagctgttatcacatag

SEQ ID NO: 18592 - DNA, 249 bp, Zea mays
  Peptide Sequence Number=SeqID_61967
atggtgagattcagctctgatgatgctaaggaggtagtccattaccaaacaatctcatcaaagagcttagctaaatctgttctcgaggaaggtggctggtcaaacttcatgtgctcaagggaggatactcagaataatgttgatgttgccattgtttttattggctcaaagctgcaatcgtcagacatatctaaagataagcaagttgatccagctttagcagacacactgaaggtggatactgtctag

SEQ ID NO: 18593 - DNA, 1085 bp, Zea mays
  Peptide Sequence Number=SeqID_61968
cggctcgcgcacgcgcaacggccgcctcgccaaccactcgccccgttgcattaactctgcggcacgacaggcggcgcttctggcaggagaagcgggcgacgcttcgccttcgccgaaataaccgcgccaaaaaagggaccgggaaaggggataccccgaaaaggatccttccccgtgaaggaaccaggctccgagcctccttactaatcagaggttcgaaggctggccccccgaagggttcaacagccgcctcagatcgcgtgggccctacacccactactggggttcgaaggctggccccccaagggttcacagtcgcctcagacaccgagcgagggatgaccagggacgtccactcggattacccgcttgcagctcaccggagacaccatgttcggtgcccatcgaggaggttcgggggctgctctcgcaaactcggctccggccaaaccgttgacagcgtcaacatactagcccgagaacttgggccccgaccgtacacctgggctacggccagttcacatgagggaacaaccagaccagccgaagcgttacgcaaggcatcaagacctcgaaggagtgaaaccactcctccgaggcctcgggggctacacccggcgggtgcgctcgcgcgcacccaccggaacaaaatgcaaccgagaaaggctggtccccttgctaaaaagtgcgacgaaagcctccaagcgagtgttaacactcccttcgaggctcgggggctactgtcggggaccataattaggggtaccctcaagactcctaattctcagctggagcatttaatgcaaaggtggcctgacatctttatcctgacgcgcgccctccggcagagccgaagtgaccgccgtcacttcgccgctccactgaccggtctgacagaaggacagcgccgcctgcgccactccgactacagtgccactcgacagagtgagactgagaggcagtcaggccctgccgaaggcaccataggaagctccgctccgcccgacccagggctcggactcgggctaagtcccggaagaaggcgaactccgctccgccagacccagggctcggactcgggctaa

SEQ ID NO: 18594 - DNA, 345 bp, Zea mays
  Peptide Sequence Number=SeqID_61969
atgtcaaaaacccccgcggaaccacttcgagcgagggcagcgtctccgccatctagcgacgtcttcggcaccagccgctggtctgacagagacaaaacgggcagggacacccttcgccagattcgacaccagacgaagacctgcgacgacgtcatcccacagtgcggcctcgtccagctcagaggcccacctacgagcaggtgggtgaagccctcgagcgccttcttgaagggcccaaccaagtctagtccccaaaccgcaaatgcccaggtgacggattattacaggaggcttcggctcccgaataaaagaccttctctaaaggcgaaggtagtcgcggcataa

SEQ ID NO: 18595 - DNA, 459 bp, Zea mays
  Peptide Sequence Number=SeqID_61970
atgaggacgacacccgtgccgcttctggtcttgagttctagggatgtagttgatgtcgagcccactgaggttgaggggccattttgtcatgcgactggacgcatcccgattattgatgatttcaccaaggggtgccatggacaccacctgcacgaagtgtcggtcaaagaagtggatcaactcccacttggcaatgaggactgcatagagcagtttctagatctaagggtactgtgtcttggactccatcagcacctcactaacgaattaaatggacttctgcaccttgagcacgtttccctcgtcctccctttccacaaccacctcaacgttgaccacctgggtggtggctgcaacatagaggaggagtgtttcacctgggtcaggcacgaccaagaccagtggcgagctcaagaacacattattcggtcgagggcctcttggatttcaattgtctaa

SEQ ID NO: 18596 - DNA, 2241 bp, Zea mays
  Peptide Sequence Number=SeqID_61971
atggagttggatgctacactcctatcgatctcccttgttctcataggcctgctactacacaccactcaagccaccacccaagaaaattgtgaaagatctggcctatgcacgtatattgtacgtgtgagccctcatctgaatatttccatggatatgagccgtatggaccttgaaagctggtatagatcattcctcccaccacgtatggacagatcacctcgatcaacatctccattcatccacacctataaagaagccattctggggtttgctgtagacctcacaaaggacgacgcggagtatgtcaagagcaaagatggggtcctcatggtgtacaaggacatccttcttccgctcttgacaacccacacgccagatttcctaagcctacgaccaaacggaggggcttggagcagcttaggcatgggcgagggaagcatcatcgggctcctagacacggggatcgactccgcacacagctctttcgacgatgagggcatgtccgcgccgccttccaggtggcgtggatcctgcaagtttgctactagtggtggtcactgcaacaagaagctcattggcgcaaggtcattcatcggtggcccaaacaatcctgagggtccactggatgatgtcggccatggaacacacaccgccagcacagccgccggcaggttcgtgcagggtgcaagcgtgcttggcagtggcaatggcaccgcggctgggatggccccacgcgcgcacctcgccatgtacaaggtctgcgacgagcagggctgctatggctcggacatactcgccggactggacgccgccatcgtggatggcgttgacatcctgtccatgtcgctcggcggccctcaacagcccttcgatgaagacattatcgccatcggaaccttctctgctgtaaagaagggcatatttgtgagctgctctgcagggaactccggcccgtttcctggcacgctgagcaacgaggagccatgggtcctgaccgtgggcgcaagcaccatggaccggcagatggaggccatcgtgaagctaggcgacggccgctcgttcgtcggcgagtcagcctaccagccacctagccttggccctctacccctgatgctccagttgtctgctggaaacataacggggaatgttgtcgcctgcgagcttgatggctctcaagtcgcaatcggacagtctgtcaaggatggcggtggtgccgggatgatactgctggggggtgatagtactggtcacacgactattgcggcggcccatgtcctgccggcgtcgtatctgaactcccaagacgccgccgccgtcagacagtacatcaacacgtccagcaagccgactgcctccatcgtcttcaacggcacggcgctgggcaccgctccagctcccgtcgtcgcctacttctcatccagggggcctagcactgcgagccctggcatcttgaagccagacgtcattgggcccggcgtcaacgtcgttgcggcatggccgttcaaggtcgggccaacaacaaacaccgccggccgtgaccgtgacgacgacgaccaacatggagcagcagcagctactttcaactccgtatctggaacatccatgtctgcacctcacctcagcggcatcgcagctgtcatcaagagcgcacaccctgactggtcgccggcggtgatcaagtcggcgatcatgacgacggcctatgtcgtgtatggtaacaacaaaaaccagccgatcttagacgagcagctcagtccggcgagccatttcagcgttggggccggacatgtcaacccttcgcaggctgtgagcccaggcctggtgtacgacaccgacgtggagcagtacgttctgtatctctgtggcctaggctacacagactctcaggtggaaacaatcacgcaccagaaggatgcttgcggcaagggacgacggaagatcgctgaagccgagctgaactacccttcggtggcgacaagggcgagcgtaggagagcttgtcgtgaaccggacagtcactaacgttggagatgcggtgtcgtcttatgccgttgagattgacttgcccaaggaagtcgaggccactgtgtcaccagcgaagctggagttcaccgagctcaaggagaagaagacgtttactgtgaggttaagctgggatgcgagcaaaaccaagcatgctcagggatgctttaggtgggtctctagcaagcatgtggtgaggagccccattgtaatattctag

SEQ ID NO: 18597 - DNA, 477 bp, Zea mays
  Peptide Sequence Number=SeqID_61972
atggaggacgctatgagggagcagaaagaaaggtttcgtgaagaactgcggcaacaacaaataacattcctccaacagcaattagagtacatggttgcttacaacgcacaggcgcaacaagcaatgaacggatccggggtcatgggccacaacacgccaccaccggtgatacgagcaccaggaggagcttatgcaggggagggagctactacaagagagaatccaaacccgttacacgacttcgtcaacgagttttttgcttatagagctactgggaggtgggcaacggtggctccaagcaccacagaacaacagataggagatgagaagaaccgagctgtggtagatgctgagaaaggcaagcggcaaggagataaaagatctccagttaagcggcagcaggagatgaggatgagcgtgcgggaggataagaccagtacatggaaaagattagtacgtagtaaagaaatggtttga

SEQ ID NO: 18598 - DNA, 744 bp, Zea mays
  Peptide Sequence Number=SeqID_61973
atgagggttgaagatccagtcttcatatccgagaagttcggcgatccgaatcgattaatacccagctggggatctccaaccacacgacatatgcttctcttaactcttttgcacatgtctaccattcccacggatcctccaccacatgaacaggtccgcgccacccgagagcacaccaccccttttaggtggtcctttgccaggagggtacgtgccactctcgccatctctccactcccagtgcgcgattgtcttttcatgtttggaatagccgggttcaagcttacccatgacgagggaaggcacgggccgggctcggccatcggcgcggcaatccgaagcttcggccagcaggacgccgagcagaagttcaacgcgcgcagggagatgctccatgtcgatgagactcagccggcagaggaaaacggatcgccggccatgggaatgggaggacagcagggcgcgacgctgggagatccggccgggctaggagagcgacggccaggagcagggcgagatctgagctgggcgccatgggagaccagggagaagcttggcgcgcagagctccacggcgagctcgcgtggcaacagagctggagcagggcgagcagggcacgacgtagaggaatccggctgggtgccggtaggagaaaacagagcgcgcgcgcaggaactccccggcgagggagcgggaaccagggacgcgcaggtctgggcgagcgcggacgtggagagggactga

SEQ ID NO: 18599 - DNA, 780 bp, Zea mays
  Peptide Sequence Number=SeqID_61974
atgaccaatgcaaggacctccagtggggaagtacttttaagtggtggtgcagcctaccattggtacttcaacccatcaattgaagaagctactgctttttacaacaagattgaatctgagaagataaacatagaattacccagccttgacggacaagaaattacacctccacaacttccacaacgagaacatcatgaccttaaatacatattacctctaaacccacatgatgtaccggatgaaggatatgaatgcacagtaaccattacaaatgcatcagctatcccacctgaaattacagcaatcgtttcacggaaatacacattcattgtagtgttcaacaaccaatcatacagatttctagaaaaagcattgctcataaaaggaattgtagcatcatatggaagaatgacatcactaccaagagttcaagaaaaacttgatgtgcaccttcctcccaatccagccaaaaacaaactgataacaacagctgctcaatctccctctacagtcatgtctagactttccacggcggactcaccaagtgtgagtcgaaagctaacctattctccagcaaaggataaacctgagacaaaccctcttgatgctgataaaaatagagctcctgcaacaacacttgaatcacctacaaaaagatctcattgtaatcagcacagtggtgcaagcaaaattgtaaacgaacactctgataaaaagctatgcttttcgaagtatgaaatacacaacaacaaaaaaatcgtactgggcctgatacagtga

SEQ ID NO: 18600 - DNA, 471 bp, Zea mays
  Peptide Sequence Number=SeqID_61975
atggcggtcccactgccccatccgagcatgcagctccttcaacggaaagagaaggcgattgttatgcatggcattttttcgctatggcagtgggtggaccagacgtgcacgatctttttgcatattaccgtctcgtcatgcatgcgaatccctgcaaccactgtgaaatcgaagcctgtcgcgtatgacagttcggctaggctagagacctgccggattgatgaagaggtgatgcagatccgatctcgcagcaacatcaaggaaagggggggaattttttcaggatatccagtgaattatggcaactttatccatggattaatgaaggagaacatccaactcaacaggaaggtgctctcagagctgtcgatgcatgaaccttacagctttaaggcacttgttgatgtatcccgcacagggtttccagggaacaggcctgtcaaaaaggagggtctagcagctatcttgtga

SEQ ID NO: 18601 - DNA, 678 bp, Zea mays
  Peptide Sequence Number=SeqID_61976
atggaacctgccgtggagctatgttcccagaagttgtccgcggccgttgatgccgcccgtgacacaatgaaagcttcatctaccgcctgtatggttgatggtgattattgcgccacattttccttaggtaacgatgtggtttctactcttgatgttcttgaatccgctgtggcggcggaaaaaagtgctatgagttcttacagccaggcgagtgcagccgtcgattgtgctaaggagactattgccaaatattgtgaggttaaccaaaaacttgcgcaagcactcagatattctctgtctctaatgagtgatacagctaagaaactacaagagactgcctctttgtgctacacagatgaagatgttgtcgacggtttcaagctgactcaagtggctcgttccttggacgagttagctgaaacgatagaagttactgcaattgactgtcaggtctcgatgatggatccaacaactatattagaagctggctatggtagcgaagatagtgcggtgtgggaggacgtattccgtgaccgagaaataatgaatcagccattggaagtggagacactagctgagcactgtgctaagtggggcttaattacaatgagatcagggatagatctgtgtaacatcttcttttgtagtgtttttgtaacactggctatgcttttgtaa

SEQ ID NO: 18602 - DNA, 606 bp, Zea mays
  Peptide Sequence Number=SeqID_61977
atggacgccgcagagcgtgtgggccgcgaggcagaacgtggcggctgcccggccgtcgacgtgctctccatggacagcttcgatcccagtcgcttgccgagcgagcggttcgtggtatttgtcgtgtccaccacggggcagggcgaccccccagattccatgaaggggttttggagatatatgcttcggaaggatttggatagacaatggcttgaggggatccatcatgcagtgtttggactcggggattcaggctaccagaagtacaattttgctgcaaagaagcttgatagaaggcttttacatcttggtgcagaaccagttctagagataggtcttggagatgaccaacacccttcaggatatgaaggggctttagatccttggttgctatctatgtggaagtctctgaatgaaattaatccgtcactcttacctagagtgtctgatatcaatgatcctaatttgagttttttgggggatccaaaagttcatgtcatttattactcttccaatgaagttacacaagatcctatacttttgggtatgaatgatgaactgggtattatttactgctatgctccattttgcagtatccgttcatga

SEQ ID NO: 18603 - DNA, 318 bp, Zea mays
  Peptide Sequence Number=SeqID_61978
atggcacaccggacagcgaatagtgcctgtccggtgcaccaccggactgtctggtgccccagaagacagaagctccaacggtcagaatccaatggccaagtgacgtggcaggcgcaccggacagtgtccggtggcgcaccggactgtctgattaggcctgtaacacaaaggcggtcacgcagggcccgttacaatgggccagatcacacgtgggcctcagagctgaacgaggccgcgctgtgggatgacttcgtcgccggtcttcgtctggtgccgaatggagcgaagggtgtccctgcctgttctgtctctgtctga

SEQ ID NO: 18604 - DNA, 1656 bp, Zea mays
  Peptide Sequence Number=SeqID_61979
atggctgaaaggtaccgactcccacggagttgcgttcctccaacgacaaggcgaaaggactgcgggcatcccccatccgggggcctggaaggtggaaagacacgatgcataagggagcgcgaagacacagtcgcctttcaagggggtcaccctccttttaaaggcgactctccctacttgagtccccagccgtcgtgggctgagtcttctccaacacgctccaaagtcctccccctacggcgcgggggctgggtcccacacgtcatgcaagccggcccagagcagaagaagccaaaccgccgcgcgcggtgcatgcaaccgcccagcggttacaagcagttctccacttttgcccagaccagcgggcgaaagggcgggcagccatgcaggcggcatgcaaccgcgccaagtgggtgcacctctccgacttccaacgcgcccagcatggaagcccacgcccacgcgtcatgcaaccggcgcgccggtcgctacgtgcaagcaactgcaccgccactcgcaccactgccacgcctcctcgattgcggaactagtaccgtgactcgaggcaaccctgcgtacgacccagcagtgccagccaggcgcgatggtcaatgcggccaaaaacgggccggcagtgatggcggtggcaggcgggcgggagcggcggtcacgtcgggaagcgagcgacgcttcgccttcgccataatgaccgcgtcaaaaaagggaccgggaaagggggataccccgaaaaggacccttctccgtgaaggaaacaggctccgagcctccctactgatcagaggttcgaaggctggcccctcggaggggttcaacagccgcctcagagcacgtgggctccacacccactactggtcagaggttcgaaggccggcccctcggaagggttcaacggctgcctcaggccactcgggctccgcgcccactactgatcaggggtttgtaggctggccctcgaagggttcacagccgcctcagacacacagtgaggagcatttaatgcaaaggtggcctgacacctttatcctgacacgcgtcctccagtcgacagagccgaagcagtcaggcccgacctcaggcaccataggaagctccgctccgcccgacccagggctcgaacttgggctcagccccagaagacgacgaactccgctccgcccgacccagggctcggacttgggctcagccccggaagacggcgaactccgctccgcccgacccagggctcggacttgggctcagccccagaagacggcgaactccgctccgctcgacccagggctcggacttgggctcagccccagaagacgacgaactccgctccgcccgacccagggctcggacttgggctcagccccagaagacgacgaactccgcttcgcccgaccccagggctcggactcagccctgggcctcagccgacggtctccgcctcgcccgacccaggggctcgactcgaccacggccacggaagacagactcgacctcgacctcggaggagcctccacatcgcccaacctagggcgcggaccgaccacgtcgataggagacgccatcattaccctaccccaagctgactcaggctacggggaacaagaccggcgtcccatctggcttgctccgccagataggcaatga

SEQ ID NO: 18605 - DNA, 909 bp, Zea mays
  Peptide Sequence Number=SeqID_61980
atggcgggggaaagcaagccgggctgcggcctctgcccctccctcagcctcaaggattttcatcaccagtgctggggaggggacagccgcgtgcccggctatcggacgcgagtggcttcggagccgctctcggtgtcgccttccgccacggcagctggaagaggttcctccgccgacgagatagccggggccgcctacggaccgacctccaactcaacggccttctgcccgtccttgcctcacgagtttgggcacgggcgggggtctcctggcagcagcatccgccctgaggtcatcgctgccgctgttcggccccccggagcagaagtcgtcgtcgtcgccgctgctggagcgggtgacggcgtgccgttcgtcggtcttctgttgctccacaggcccccccagcgagtggggttgttcgtacctgcggaggagtccctcggctcggtcggccttgctgtccgaggcttctcttgcttagttaaaggaacccctcggccgctcttcgatgagccgaagccaggggtaccagtgtcagcacggacaaaggcagagttggctcgaaaagaagacttggtcggccggagcctggccgggtcatccgttagcgggaccgacgccggagttgatctgccgaggcctcgggccgggctgatgtcttcgggggacagctggccgaggcctcggggtaaccagccgagccgcctgctcgagccggattcttggaggagacccgggcggcgatggcccgggcgtgatgatgaagtcgtccttcagagtggagaccctcagactgtgtcgccgtcggaggctaggtcggacctcgccgaaggtataattgacaccgagggtgctgctgctcccttcaaccgtcaagatccgagcctgcaggatcggattatcttgtag

SEQ ID NO: 18606 - DNA, 465 bp, Zea mays
  Peptide Sequence Number=SeqID_61981
atggagaactgtagtaggagcgtagattttttctactccgtaactgatgtaggtgaggacaagtgtgtgaacaacaaagtgattcgtggcaaagttcggttccagcaaaagacaggatctcggagttacattgcacatatgcatgccgtgaaacaagccaaatatggagatgcaccaccaagtgcaagtgatctttttaaagagtgccattgtagcagcaagactagttttgctgagcatgtaaaggaagcaattgacacaatggaagcacttgtggctgaacctggagtagaagggaaagaatctaagacccatacagaagcagttgctcaagtgttggcttcatcaaaatttcttcaaaatattggtcttgtacctgccacaaagaaaagcagcaatggttctgatcctacacgtgtggcagaactcgaggcagaacttgaatcagagaagcaaactcattag

SEQ ID NO: 18607 - DNA, 486 bp, Zea mays
  Peptide Sequence Number=SeqID_61982
atgccgccacgcacaaggctaacagcacgcaagtcaactggaccaatcggtgtgccccggcatcaactggcccctcgacatgaaaacagtagcagcgggagtaatgacccaataggagatcttgaagcccgagatcagcttgctgatcgggacttagcacttgactgggcagtacagtcccgtttgctggcatgtgctaaggaagcaagggctcaggcccgaatcaaggaacttagctcaactgtcgacgacctgcaggtctattgcaatacgttgcatgaggaagtccatgtactgtactcgcaattacaccctagtgcacctgcacaccctgctgaggcggaagccggaccctcccacgttgcgggacgcgcgctgggtggggagttagacctttttgagcctcctccttccatgaggttggttgacgtctggactcccacacctgacgatgaggccgccaagagtaatgggaagcaggactaa

SEQ ID NO: 18608 - DNA, 234 bp, Zea mays
  Peptide Sequence Number=SeqID_61983
atgcaggcggcatgcaactgcaccacggggatgcaccctttcgacttcaacgcacccagcatggagacccaggccaacacgtcatggaccgggaaaggggatactccgaaagggatccttctctgcgaaggaagcgggccccgagccctcctactgatcaggggttcgaaggctggcccctcggaagggttcgacagccgccttagagcactcgggctccgcgcccactactga

SEQ ID NO: 18609 - DNA, 1461 bp, Zea mays
  Peptide Sequence Number=SeqID_61984
atggctgaaaggtaccaacttccgcgaagttgcgttcctccgacgacaaggcgaaaagactgcgagtgtaccccatccggggggctcggaaggtggaaagacgtgatgcataaggggagcgcgaagacatggttgcctttcaagggggtcaccctccttttaaaggcaactctccccacttgcgtcctcagccatcgcgggctaagtcttctccaacacgctccaaggtcctccccctatgacacgggggctgggtcccacgcgtcaagaaagctggccaggggcagaagaagccaaatcgccgcgcgcgcggtacgcgcaactgcccagcggttacgagcaatcctccactttcgcccagaccagcgggtgaaagggcggaccgccatgcaggcggcatgcaaccgcaccaaaggggcgcaccctttcgacttcgacgcgtccagcatggaggcccaggcccacacgtcatataaccggcgcgccggttgctacgtgcaagaaactgcaccgccactcgctccactaccgcgcctcctcgactgcggaacctggaccgggaaaggggataccccgaaagggatccttctccgcgaaggaaacgggccccgagcccccctactgatcagaggttcgaaggctggcccctcggaggggttcaacagccgcctcagagcgctcgggctccgcgcccactactggtcagaggttcaaaggccagcccctcggaagggttcaacgaccgcctcaggccactcgggctctgtgcccactactgatcagggcgggaacgatcttataatggaatcccatcagagggaggcatcgagccctcggaccccgtcaaaaggggaccggctcactggagacaccatgttcggcgccctccaagggcaacatggcgcttttcccccctcctccttgcggaaagacgacgcgggggcacaagaggacagcgccgcctgcgccactccgactgctgtgccactcgacagagtgaggctgatagcagccaggttcggccacaggcaccataggaaactccgcatcgcccgaccccagggctcggactcgggctcagccccggaagacgacgaactccacatcgcccgaccccagggctcggactcgggctcagccccggaagacgacgaactccgcctcgcccgaccccagggctcggactcgggctcggccccggaagacgatgaactccgcctcgcccgaccccagggctcggacttgggctcggccccggaagacgacgaactccgcatcgcccgaccccagggctcggacttgggctcagcccaggaagacgacgaactccgcctcgcccgaccccagggctcggactcgggctcggccctgaaagacgacgaactccgccttgcccgaccccagggctcggactcgggctcggccccggaagacgaagaactctgcctcgcccgaccctag

SEQ ID NO: 18610 - DNA, 918 bp, Zea mays
  Peptide Sequence Number=SeqID_61985
atggccacgcctggccaccaccccacccggagggaccaccatgggaggacccaccaccaccgcggccgcccttgcgggagtgacaaccgccgtcagaggtggaaggttgacaaggagccgaggggacggtggaagtcccgaacgacggaggacgggtggcctggcccccggaaggcgcctgactgccgggaggagtgctgtagagcgctggggccggagcaggggcctcagacgccatgtcctcttgatgagagtcttcaggtggccataataagggctgaggccacgcagaaggttcaacaccaaggtccggtcagcgacaggctcgccgaggtcgcagagggagtccgccatgcccttcatctggtggcagtactctcccacggagagctcaacggtgatggtgccgtggagccacgagaggacaacattgtccatgaggcaccaggagggagtcagcggagcgtcgaggtcgtcgaggatgtaccgctacagtgtgagaaggacctgtcattgccaacgggggtagtgggaggacgccgggtccaacaccacggacacgaggggccagatgttgtgaagtccagcggcttgagcatggagagcggcgatgtggtcgacgtcgaggccaggggcggggatggcctctgggatcaccgggggtcctcacgagtgaccgacgggcggctgaggagaagacgctacgtggtggccatctgggtggtcaaggcagcgcccagggcatgctcttgctccagggtgagggacgtggtgcgctcgcgctcctgcgaggcagccacgacgacctggatcatggcgagggcagcaaagagtgaggagtcggtggtggggagcgcgaaggatgcaacaatgtcagtcccggtgggtgccacgagggcaggaaaccctggtgggtag

SEQ ID NO: 18611 - DNA, 369 bp, Zea mays
  Peptide Sequence Number=SeqID_61986
atggatgggatgttttcaaaaataaaacttgatggtggatccatcatggccatgatgggttcaacatcagaaatgatgtacctctgccaggaagccaaagctcgtgctcgtgcgaccgagcttagtgcggcccttgacaacttgcaggtatactacaatactctacatgaggaagtgcatgtactgtattcgcgactgcacccagacgtgcctgccgaccctgttgcaatgggagttggtccatcaaggacaacaggtgaaggaaatgatgaggagctagacctttttaggcctcctccttccatgaacctggctgacgatcggtctcccatagtaggaaatgaagaaaccaaggacgacgaagactag

SEQ ID NO: 18612 - DNA, 801 bp, Zea mays
  Peptide Sequence Number=SeqID_61987
atggggtggcgcgaaggtggagacataaggggggagagagaagaaagcaggatggcgaacgaggtggcggcaactgaggggaggaccatcattatcatgcggagacaggtcccacttctgttcttcttctacgttcttcacagtgatcgagttgtcgcttggcctcgctgtaacggcacggtcgccgagtgccgccggctcttctgtctcctcgcctctcgcctcctcgagcatcagaagccgcacggctgcgctcgctcccttcttccactttgcacgctcgcctctcccagccctactgctcccttgccactgaatggagaagccctgcagctcgccgccctcccctcgcgcttctgcccgttgttgtcgtcgaagctacgccgctactattactcagcactgtcgcataccgatgttgctcgctgcagtgctgcgctgcacctcgctagagctccgtcgctggcgccgcatccagagccctctgccctccaccccgcagtcaagagccctctgcctcctgtcgtatgtgctgcgagggaggagcacggccaggagctgttgctgatgcctggtggtggctacttctctcgtgcgttactttcgccctgcgatgatgatgccgtcatcatatttgccaagatccttcgcggccgtcgcaacgccgagcacataagtgttcattgtggcgtcagccaccgccgatctccatccttgtgcaccggtggtattgctttgagtactgatcaggatgagtcggcgttctatgttacaacaacaattggaatcctcctcatctga

SEQ ID NO: 18613 - DNA, 678 bp, Zea mays
  Peptide Sequence Number=SeqID_61988
atgaatccggatactcaggtgatcttggatgagattgcgcggcgcttctcggagcacgatgtgaagtgggatcggtgtctaacggagcaggaatcccgctgggatgcggcgttctctgacttcaccaaaggtcaggagcgacgcgttcaagcgttggagcagaatacaagtctaatcgcggactggcgctcttccatggaaggggtggtcgacgatcttcgcttggaggtcggcaaggtctccaaaaattgggaacgcgccgtggtggacaaatcgacttccatggcgggagttctcgcgccttcacctccggttgtcgagcgcccagctgcccggtttacagccgaaccgccccatgggcatcacatcgaattgttcaccgaggaggatggatttgggtcagtcaccaccctactccatccccccggtcaaagcattttgtggatgggttacgtgctgatattcgcgcagctgtgtttgttaatcattcctcgtccttcgatactgcgtgaaggcaggaagttttctcgggtgcgcatgagtgaggacaaagtgcgcacaaaagatttgtgttggtctgtggggacaatatatgatcctagcgagctgccaggagtaagtaccgccagtccagggattggacagggtgttacaagtggtatcagagccgacctttga

SEQ ID NO: 18614 - DNA, 555 bp, Zea mays
  Peptide Sequence Number=SeqID_61989
atggccggtgctcggctgagcatcccggccagccccccatccccctccggttgcttgaccgcaagcgagccccagccggctctctctccctctctttctcttcttcccccttcctcgagccctctccctcgccgcggccgtggccgcacgccgaactcccctcccctcgtcccccttcccggcccggccgtggcgcggccatggcatgtggctagggcgctcgcggtcaccggctcggcccgcggcgcggctcacggcctgtgcgcccttgccggcgcagctcacgcggtggtcggtagcagccccggcgtggctgcctgcattcccaagcagtgtgcccccgacgcggttacctgcgcgaccctgcgcagcgtgcctcggcgcggcgtgcccccggcgcagtccctcatgctcttgtgcgacgtgttcccgcacggcgcgttcgtcgaaccgcgcgtgctcggtagcccgaagcccgcccttacaacttgcacttgtattcgcgtgcgcgtagcacgtcgtctagttttcgacgaccccatctaccccccatag

SEQ ID NO: 18615 - DNA, 672 bp, Zea mays
  Peptide Sequence Number=SeqID_61990
atgtcgtcttttccttatgcaatcttggtgaacaaactgtcgaagacctccttcagcttcttccagcttcgtcatccatccccatatgatgctatcccgaagcttgtaccttcattcgtaactgctacattcaaaggaggcgcccatgcaccaccactaggcgtcccggtcactggaggggaccccgacgacaaagacaacgacaacagcaaatcaagccacaacatcgacctctcagaggagcaggagctggagggatggtcgctcgacgcatcactcgtgacgccgctcctgggtgttacttccacgatgcgctcgacaccatgctatgccaggcactcgaccgacgcacttggtccatcgagtaccgctgtgttgtgttctagcacagtcgtggggcatacccagagcgctgtgaggcgacttgcctggtgcgtcgtccggataatggtctccggggtgcaaaatgtctgctcggagcattattctgtctccgagcgggacacaatcgaggcggtcatgcacgatgctgcacgacatgagccttcgcactactgctcagtgctcggtggggtggctgatagcctcgacctgaggtattacccccgccatccgtctggcagcacaggaggcgtggttgtctcacttgttggtgaggacaatcctaggtag

SEQ ID NO: 18616 - DNA, 864 bp, Zea mays
  Peptide Sequence Number=SeqID_61991
atgaccccctacctccgctcgtactatgccaccacccgaaccacccagaaccggatcaccgacgaagaactaccatcgagacgccgaatcccccccgagaaatgttttcaaaaagtgtatgatgaagggtattcacccttctcaacaactgagagggatgatcagggactccctggtttaggggagggcctaaggtgttggctcagccgggttaggtgtgagcttgaaagattgtcccctcatataaggactggtttgtcatccttcactacctgtactcatgacaagtacaaccactcgagactgtatgggaagtcactcaatctgaacttgcacggtctgaaccccagggttatgacgactggggagcaccgggaggataaggaaggggaatgttttgtccggtttgggcatggtggtggccttgttccttccggtacaatcgttaaggatcgggacgcttcaacatttgaggcatctgcacttgcatctgaggatgaggtgggggctgctgctgttgcacttgctgcatggcggccaaagtctgaccaatcgcctggactgcctgagtctgcattagaaacatctgctctattgtcatcgggggcggtggtggcaactactactgaggtgcctcatcttgcggtgtctgttgctcctgctgagcatgcctccctcctctgcgcctgttgtctgacatctacagaatgcaatcacatatcagaactggtctcgcaaatcttgcagcataagaaaagggggtacccacactctggtgacagtcattacaaagatccaaatccatcatacttcatcatgataagcataaaaacacaggataagcaaactatcctgactaactaa

SEQ ID NO: 18617 - DNA, 207 bp, Zea mays
  Peptide Sequence Number=SeqID_61992
atggggtaccgaattcccagaaaaatacttaatcctgctctgataccagctgtggcagaacctcccaagttattgggcccacatgcacctgcccttgtctcaaagacctccgacggctatgcatgtgcaccagataacttaacaggatctgtccgagtgtcccagggaccccggataaaccacgaacaaccaggatcacaagattaa

SEQ ID NO: 18618 - DNA, 657 bp, Zea mays
  Peptide Sequence Number=SeqID_61993
atggttgataaaccagttgacaccattttgctcaagcttcgtggtttatatgcacgtgcaaaggagctctctgagaatgaaatcagtgcctcaaatgctttgattggattattagatggtttgttgcaatctggagcttcaactgcacaaaagaaaaagataggtgagtattggaatttagaaccaagattttgcaagataggatcatgctttttaactcggagcatgcagtacagtaccgtagttgctttctacatttcagaagttggtgagcagaaaaagaagaggatcaagtctgatacagattctgcacgattttctgctgcatctatgaggaatcaacttgaccaagctgcaagccttaaaggagagcagcgtggtggggacgctgagaacccgaacgtcaacggcggcgacccctcacagacagtgcaggtcgatctccacgtgtttcgtgcgctgatgctgcacgggattggtggagaggtagacctcgctgacgttgtcgcaatagatgaggctggcgcgctggagagggctgtggagctcgtgaagctgacacaaccaggaggcctctgccacgctgttggccacaacgcagcactcggcctcctcgctggagtgggagacgacgggctaccgcttggcggcccatga

SEQ ID NO: 18619 - DNA, 198 bp, Zea mays
  Peptide Sequence Number=SeqID_61994
atggcgatgacatctccagcactgaatctcagcattatagtaaataagaaaaggaggaaaagtgggcattgcatttatcatgtagagaggaggtatgaagtacttgatgaagaaccaggtgatgacgaagagagcactcaaaagtatgtgagggtcaagttccttcctatctgtccttttttagttccttgtatctga

SEQ ID NO: 18620 - DNA, 210 bp, Zea mays
  Peptide Sequence Number=SeqID_61995
atggatattggcattacagtagacgcgctgaaaatatatgttgaaagtcaggaatcaaacccaggacttggaggtgctactcggaagtccttaaccgctaggctgaccatcattgattacgagtatgcaagcttcaacccagttgcatatgacattgctaacatttctgtgagctggcaacagactatcattcatcaaagcctcatatag

SEQ ID NO: 18621 - DNA, 336 bp, Zea mays
  Peptide Sequence Number=SeqID_61996
atgggcaagaacaacaagcgcaagcgtgagccaactccttcatcggaggagtttggtgactcggagtactcagaggaggagttctcctctgagtctgaggggtccccagctcccatccccctgcctgattcctttgagacagtaagcgcatcacttgggcatcaaactgatgcttttagaaatagctgccgagtaacttgtagacggtgtcggcgctttagaggtaactgccgagtgaccgaacacaatatcggagttttagagataactgtcgggcgacttgagacaatctcagagggcgacgtcagcgttttagaggtaacaccgagcgactga

SEQ ID NO: 18622 - DNA, 657 bp, Zea mays
  Peptide Sequence Number=SeqID_61997
atgacgctgcgccagggaacgagttccacggctgcggcaggaggagctcggctggcggcgatgaggctgagggagaagatgaaacgttcagattccaatcgagtccgtgagatggaaaagagcgagggggtttccaacatcaaagatggtgggctaagatttaatatgtgcacatgtgcaccaagatggcatgtgcaccagatatgctccctccaccaagcccccgactccccgaggccccgacctgcgcacccacgggatccctacctatccggccgtcacccctccccctgcccctcccgagttggattgttcgcggaattggcggaggggcagccggatatgtcgtcgtcggttgggggcggcagcgcgggcggcggcggagtggacatggtcagcctgctggagaaggccaaggatttggaccagctaaagaaggaacaggacgaaatcgttgccgatatcaacaagattcacaagaagctcctcgcatgcatcttgggctgtgccgccatagatgtgaaccatgtcttgcagcttgacagtgatggcgccaaagagccaagacagtacaatgatgtccatatgtcgccatacaagggtgacggcgtcggcgatgtcgaagaggacgtggctattgagggcgtagcactatag

SEQ ID NO: 18623 - DNA, 234 bp, Zea mays
  Peptide Sequence Number=SeqID_61998
atggcatgtgcaccagatatgctccccttggtggacgcgtgcagattcaaatttacatacatgcatgagtatgaaatttgtgggaagattgtcaatgatgctaaggtatataagataaagatatacctttgtaatatgtataccacttgtcgtggtttcgaaaacctggggacaataagatttatgttcggtgggggtgctatcgcggactcacttcgaatggagaatcgctag

SEQ ID NO: 18624 - DNA, 516 bp, Zea mays
  Peptide Sequence Number=SeqID_61999
atgggagaccagggagaagctcggcgcgcagagctccacggcgagctcgcgtggcaacagagctggagcagggagatgggtaggagcgaccggcgctggagagggcgagcagggcacgacgtagaggaatctggctgggtgccggggggccggggcaagcaggcagcgagcaggcacctgggcgcgcggcgcggagggagatggagcagggagggcgcaccgccagaagaagcacggcgtgcaggatctgaagaagaggatgagctcaagcgttgggaaatatcgtgggcgttcggaaaaatccacggacgaagggcggcggctactgggaggtgggcaacggtggctccaagcaccacagaacaacagataggagatgagaagaaccgagctctggtagatgctgagaaaggcaagcggcaaggagataaaagatctccagttaagcggcagcaggagatgaggatgagcgtgtgggaggataagaccagtacatggaaaagattaaacacatga

SEQ ID NO: 18625 - DNA, 816 bp, Zea mays
  Peptide Sequence Number=SeqID_62000
atggattgctacaattgtggagagcttggtcatcttgctcatcaatgcacaaagcccaagaaaaataaatccaagggcaagaaagatgatgaaagtgaagatgagaagaaggaaaagaagttcttcaagaagaaagaaggcaagcaaaagaggttccacaaaagaaaaaatgggaaagcatacattgttggtgaacggaaggtacaaaatgatgttaccaatgttgatgaatgtgatagtgattgtgatgctgaatatgcttcccctacctatgatgagctagctgacttgcttaaagaatacactcaaatcattagaatgtccaaagcaaaatatgacaagctaaaagatgaaaatgagttcttaactgctaagtatgacatagttattaaagctagtgatgaaatgaaggaagaaaacaaaactatgtcatctactagaaatgagctcaagatatcccttaaagatgctaaagaaaaatgtgaaaaaatgagtgaagcaaatagggagctaaatgatagacttgtcaatataaaagaagattatacaaaaattaaaattgatcatgataatcttgttgttgcatatgagcttttatcttgtgatacacatgaggctattaacccctttgttaagcttgatgtagcaccctcatgtgatgatttgagcaatggtgatcaatctagtcttcacgatgatttggttgaaaaacttgaagtcatgacactagagaacaagaaattaaaaaagtacttgaccgatgcaaccaccaagggaaaatttgccatagaaagcaaggactttaataatgagttg

SEQ ID NO: 18626 - DNA, 249 bp, Zea mays
  Peptide Sequence Number=SeqID_62001
atggtctcccattccggttatggtgggtacaagtgtggtcactgcacgacggcagtcggggtcagtgaggcattatacgccaaggcggtgagccctgatctgctggcggggaatcgatggggatggttgatatgtgtggggacggagtgcctcgccacgtcgttctctggaggacatggttgctggagtgacttggacgtccatcttgccaccgggttggatagtcgagttggaccctacctcggctga

SEQ ID NO: 18627 - DNA, 129 bp, Zea mays
  Peptide Sequence Number=SeqID_62002
atggccttgctctccacagtggaaacatgccctgcttccgccttgaactcgtgctgcttgactgttctactggtgctggaatgtggggaaggtatgattcatcagctaatactgcagagggtagactaa

SEQ ID NO: 18628 - DNA, 297 bp, Zea mays
  Peptide Sequence Number=SeqID_62003
atggccgaacgagaagaagagatagaagtaactgaagaggagacaccaccaccttcggagtctcaggccgggaatcatttctactttgatatttgtggatctgagcctgattcacctgtgaacgaaggcaagccccggcgtgctgaccgaggaccctttaactggtcacatgcctcgtcatgggtgaggaagcgacaaacttttgttgcttctgctccaaggtggtaccaaacgaggaaaaacaagaccgaagtgcgggaggactcggtcctccacttaggatcttttgtttattaa

SEQ ID NO: 18629 - DNA, 3366 bp, Zea mays
  Peptide Sequence Number=SeqID_62004
atgccatcctcttcttcttccgccgacgccgcgtcgccggccgccgcctcgtctgaggagacgttgagtaacgtggtggtggaggagttgcgcgccggcgactctgttgaatttggtgtgtcacggatgacgtctgcccgtattgaagatatgcagcggttgggctactttggcggcggggtcgctcgtgctccggggacggaggaagtccccgagccggagggcgagttggttgttttcgaggcgttcttcgtcgccggactccgcttgcctgcgcaccgttttgtcagcgaagtcctgcgtagattcagtcgttcaaatacatcagctgacaccgacccccatagtggcgctggcgaaaaaaggatggttgagaacggagttgcccagttcgggtcatgcacattcacgccgaagaccggcaagaccacaatgccagtagtggagttggtcccgtgcgcccgcaacaagtggggcaattggaatgaattttggttttatgttgctgaggctactgtcgaaggccataaagggctccccgtgtccgaaatgtgctctcactattactctgcgtatccgccttatgaggtagcagaagatgatgcagacgaaggggcccttcggtgcgccgccggtcagagcagcggtcgagatttagttgaagagttcgtggcgtacggggtctggcccttggcgcacggctgggcgctgggcgaagtatgccctcgccagatgccctttcacggaggaagggtggtgcgaagtcctgccttcgcactgaatttgcgaaaccgtgacccgactgcctttgtgcgtgatgcggagggcttggcggtgcggctcgtggggcgctacgtgccgaggacggaaggccagcgcagctttgacatccgcgggtcaaatgaacgtttgaacagggtcttcgaattaaatcaactgccgtacgacggctaccctggtcaagacgaagcggaccgccgtgggaagaaaccggcggtggagactggaggcgaccctgcgctggtggccgctgcctcctcgaaaaagagaaaattaggtactgcgatgggaagacttggggtgtctgatagtttcgctagagagttaatgaggacgtgtgcggcctcgggggagaggatgtcttcgcccgagctccgggagtcttcggctcggatgctgagggttaccgggggttgttggcctaaagacattcctatcccctgcgcggctgaggaggactgttttacatctcgtatggttcatcggtggagagtttttccttatgggcgaaatatcggtcatgttgtgtgggcagtgatggacaaggatcgccaaggggcggcgcgaaaacgccaggcgactgtgagggttcacgaagctcggccgaaaaggctgcggggaacggcgaaggcggaggcctccggcggaggcaagccgccgctgccggcgaaggtgggcgcctctgcgcctggcaaggcgccggaggtgacggtgggcgccggaggccccaagctgacgaaggtggtgccgtctgtcagcggagtggcggaggctgcgaaggcggcccgaacgttaccgccgcccggcaaacgcgttgccgacttcggcaccgagattaatgtggaggattatcttggggggtcggacgagggcccgcttgctctagttatgcctggcgcggcgatcgcgacggctgcgccagcgccgaaggcggggggagaggcccttggcgccggaggcgaggtgtctgccctcgcactggtcagggacgaggcgggcgtggcgacccgccggctgaagggagcgacggaggcgttgagtcgagcgacggaggcgctgaatcaggtggctgacttcaccagccgcaccgcgtcgggggcccttacggcagctttgtctgccgaggtcgagagacttcggacgcaacatgctgacgctgtccgtgagaagtcggcctccgacagcaagtgccgcaaactggcggagaaggtggccgccctggagaaggagaaggctgacctccggcgccagctggcgggggagaggagggaggccaacgaagccatcgccaaagagcaggctgctcaggcggaggccaggctggcgcgggcggaaggcaacatcgccaaggagctcgccggagagctgcagcggcggcttactgccctggagagccgcgcggagggggccgaggccgcgatgcgagcggaggccgaacggacgcgcacgcagctcatgactgcatatcgcgagctgggtgtgcggacgggtgacttcgaggtgccggagcgagaggccggactttgctgtctggaatgggtgcaggaggaactgcaggagctccccactgtcttggcggggttgatgtcgttcacctccctggtcacctgcgaggcagcgatgaacgcgctctctcgcgaaggctgccggcactttgaggccctcgaccaggcagatgaggattttgggcgagatatctttgaggtcgaagaccccgtggtgaaggaatccggtggggccctctatgaccggatgtggggttcatacggttgtgaggtggtccaggcgcgggccgaggctgcgagggctcaggcggagcgcggcgagcgggtggacgacctcggggcgctgaacagcgcgctgcctgacccggagacgacccctgcggaggccgcgactggagtcgccccgggaccgaccccggagactgcggaagatgcgccaggcgcccctgcacctgctgcggccggcgaagaccttcccccaaaggtggccgaaggcgcgcccgatgcccccgcagctgctgtgccgagcgctgaagatccagcggaggtgggggcggaggcagcggcggaggcctcggcggaggctcccgcagcggcagggccttcgcaggttcaagattttgggcctgcgcacgcaaccgctactactgagtttttggcggcttcgaccgcggaagatggaaatgaatatggtgggtctgtttctgagttttttgattttactgactctaggagctcggttgagtggactgaggagtcttcggagggggacttggattattttgcggccttggacgtggctgcggcggaggctgcgccacacgctgcggacgcgccagacgtgcccggtcctagcaccgggcaccgacgacgaagggcgattgcaaagcgtaggattagtgcggaggaaagggcccagctgcgcgttagcagggccgggcggcaggagctgctgtctttgccggccgccgctggtgtaggggaaggggagctgcgaagcctttttgcgggtgaggagcttaggataatgttgtttaattatagagagatggggattattcctaaggttgagccgatgtag

SEQ ID NO: 18630 - DNA, 369 bp, Zea mays
  Peptide Sequence Number=SeqID_62005
atggaagttgagattgaagagctccatcccatgggagctgaagaagcaaaaattgaagaagctatcgacttgatagcacataaggttaagcctttggagatgcttccagagagtgacgaagaagaagatgacggggagcgaatagctctacagtttgttcaagttttgccctattcaagttctgccctatttggtgcagcagtgactatccttctgaagaaaagattagtcaaggcagcagttcgaatagcagctgaagacacgggttcctccatgcctgccctggcggaggggaagggtaaagggaaaaggcctactgaagttgaggaagccaaaatggctatcgaagatgacacactgcttggttaa

SEQ ID NO: 18631 - DNA, 357 bp, Zea mays
  Peptide Sequence Number=SeqID_62006
atgagaaaggagtatgaatttgaaatgatgaagctaaggcaatcgtctgccgaagtggctgtcaatcttagcagtgctcaagtaaatatgaatggcatgaaggctgaaataaaccatggagggcaagcagccgaaaaggctgtagatattagaaaaaagcttcagagcaaaaaatccaaagtttccacttcacaggtcgtgattgaggtaaaacataccgaagttaaagctaaggatgctgctgctgaagccgaggccatttctgccagagctatagagaaggctgaagatgatgcaatcttgaagatctgcgaacagatttatgatgaagctatgcgaaatgacctagtaaattga

SEQ ID NO: 18632 - DNA, 177 bp, Zea mays
  Peptide Sequence Number=SeqID_62007
atgaaggaggaaagggatgacatgtgggtcccatacggtactggcaggtggaagcgcgcgagggcagtgttggtcgtgggccgcctgtcaggcgatgagggaaagatggactacgtgaagggaaaggtcactgccctaaccaaggccaaagggaggtccctaggtatggggccctaa

SEQ ID NO: 18633 - DNA, 219 bp, Zea mays
  Peptide Sequence Number=SeqID_62008
atgcgccgtgcacaaccagctagggaaattttgggcgctgcgggtgaactgcactcaacgataaacggctggtcgctaggattcgtcctcgctgcgcaggctccatcgacaagccatcgcccagctcggtcggagggaggtggaagaaggtcgcgcataccttcgcgagatttaaaccaggccattgaatcggatcggacggctgagaattatcaataa

SEQ ID NO: 18634 - DNA, 1641 bp, Zea mays
  Peptide Sequence Number=SeqID_62009
atgccccctttgcacgtccccggtagtagtactcctcgcaagttctatcacctggtgctgttccatgtgcacccgttctggatccaagtcctgtacttccttttgatctccgttttgggtttcttgatgctgagagtcctgcccatgaagtccagctccgtgcctaggccctcggctctggacctactcttcacgtcggtgtcggcgacgacagtctccagcatgatcgccgtcgagatggaatccttctctaacgcgcagctcctcctcatgaccctccttatgctcctcgggggcgaggtgttcacaagcatgcttggtctccacttcacctgcaccaagctcagaaacaagagagaaacacctcataataatctccatggtaatagcttagagcagagtcgtcgtcgtcaccgtcccatggagatggaagcccaggccgccgccgtccaaatggagcttgcagggttcaacaaggacggccatggcgatttcgcatccatggctaggttgctaatgtttatcgtgctgggctacatcttggtcgtgcacatcgccggctacgcgctcattctaatctaccttagcgtggtcggcagcgcgagagcagtgcttgttaggaagaggatcagcctgagcaccttctccgtcttcacggtcgtctcgtcgttcgcaaactgtggcttcgtgccaaccaacgaggggatggtgtccttcaagtccttcccgggcatgctcctcctggtcatgccacacatcctgctcgggaacacgctcttccccatcttcctcaggctctccattacggcgctcgagagggtcacaaggtggcgagacctctgcgagctgctgagagacagaggacccggcggcgggccagctgcggctgccgccgccgccgctataggctacgaccacctgctcccgggaccgcgcacatggttccttgctctcaccgtggcggtgttcctggcggtgcagctggtgctctactgcgccatggagtggggctccggtggccttggagggctcaacgcgttccagaagctcgttgcagcggtcttcatgtccgtcaactccaggcactccggcgagatggtcgtcgacctcgccaccgtctcctccgccgtcgtcgtgctgtatgtgctcatgatgtatctaccgccttacactacatttttaccggtagcagtggaagacgaccagcagcagcaaaatgaggcacaaccccacgacaatagcacgagcaagagcagcacaagtattagcatctggcacaatctgctcatgtcgccgctctcgtgcctaaccatcttcatcgtcgtcatctgcatcaccgagaggcggcagattgctcgtgacccaatcaacttcagcgtcctcaacatcgtcgtcgaggtcatcagtgcgtatggcaacgtgggattcagcaccgggtacagctgcagcaggcaggtgacgcccggcggcggctgctgcaaggacgcgtgggttagcttgtccggcaagtggagtgtggaagggaagctcacgctcatggccatcatgttctatggcaggctcaagaagttcagcatgcttggggacggaaccggatcatatgacaaatccatctgcgaggagtttggctgcattctgtaa

SEQ ID NO: 18635 - DNA, 357 bp, Zea mays
  Peptide Sequence Number=SeqID_62010
atggccgtccttgttgaaccctgcaagctccatttggacggcggcggcctgggcttccatctccatgggacggtgaagtggagaccaagcatgcttgtgaacacctcgcccccgaggagcataaggagggtcatgaggaggagctgcgcgttagagaaggattccatctcgacggcgatcatgctggagactgtcgtcgccgacaccgacgtgaagagtaggtccagagccgagggcctaggcacggagctggacttcatgggcaggactctcagcatcaagaaacccaaaacggagatcaaaaggaagtacaggacttggatccagaacgggtgcacatggaacagcaccaggtga

SEQ ID NO: 18636 - DNA, 549 bp, Zea mays
  Peptide Sequence Number=SeqID_62011
atgaagagcaagctattggctgggaagcacaaccaccactctggttggtgcaagggcaagcgcgagtatacctcgagcaagcacaagcccaaggggagtgacctcgaccacaacttcgacaacacttcttttccctcaagtcacaaggagctcaagaggcaggttgatgacaagctctatggactcttcttcttcattgacactataggagacctctgcaccatggcacttagtgaggacacgttgggcaacaacgacaaggacattagcaacaactccacctccgaggtatcactttctgtcaatgatctcaccactaaggtagatgagctaacaactactttggctagtcaggacatgttacttaggcttgcttctcgtgagaggagagaatacaagtgcaagtacaagactactcttagggagcttgagtgtcctagagcttctatggtggtgttcgacgagactgagtgtgataagtgcgctcttcacatgtcgaacattatcacattacagatcaacgtgcactctgtgagggtttgcagttag

SEQ ID NO: 18637 - DNA, 1833 bp, Zea mays
  Peptide Sequence Number=SeqID_62012
atgcccgacgcctacacgttcccgcccctgctcaaggcggtggcgcgcggctcctccgcggcgccggtgcgcgccgtccacgcgcacgtggtcaagttcgggatgggccgcaacgcccacgtggcgacctctctggtcaccgcgtacgcggccgggggtgacggcgcggcggcgcgggcgctgttgagcgagcgcgagcgcgacacgcccgtcgtgtggaacgcgctgatctccggccacaacaggtgcaggcggttcggggaggcgtgctgctcgttcgtggacatggccagggccggcgccgcgcccacgccggtcacctacgtctcggtgctgtctgcttgtgggaaggggacaggagacgtgctgctcgggatgcaggtgcacggtcgtgtcgtggggagtggggttctgccggacctcagggtggagaacgcgctggttgatatgtacgctgagtgtgctgacatggaatcggcttggaaattgttcgacggcatgcaggtgaggagtgtggtgtcctggacgtctttgctttctggcctcacgaggttgggccgggttgatgaagcgagagacctgtttggccgtatgcccgagagagatacggtctcatggactgcgatgattgatggttatgtgcaggctgcccggttcagggaggcattggagatgttccgtgagatgcagtgtagcaatgtgagtgcagatgagttcaccatggtgagcgtgatcacagcctgtgcgcagctaggtgctttggagatgggagaatgggtgagggtttacatgagcaggcaagggattaagatggatgctttcgtgggtaatgcactcatagacatgtattccaagtgtggaagtattgagcgcgcattggatgttttcaaagacatgcaccacagagataagtttacttggactgctatcatacttggtctcgcagtgaatggttatggggaagaggctattgaaatgttccacagaatgatcggggtttcagaaactccagatgaggtgacattcattggtgttctcacagcctgcactcacgctggcttggttgacaaaggacgggagttctttctcagcatgagagagacctataatattgccccaaatgtggtgcattatggatgcataattgatctttttggcagagctgggaaaattaccgaagctttggacgcaatagatcaaatgccaatgacacccaactccactatttgggggaccctgctggcagcttgtagggttcatggcaattcagagataggtgaattggtaaccgagcgcctccttcagatggatccagagaacagcacggtgtacacccttctgtcaaatatttatgcaaagtgtaacagatgggaagatgttcggcgacttaggcacacaataatggagaaaggaataaagaaagaacctggttgcagtctgatcgaaatgaatggtattattcatgaatttgtagctggtgaccagtctcatcctatgagcaaagaaatctactgtaagttggagagtataatcaatgatttaaataatgttgggtattttcctgacgtaaccgaggtctttgttgaagtcgcagaagaagaaaagcagaaagttcttttctggcacagcgagaagctggcgattgcttttgcattacttagttcagaacctaatactgtgataagaattgtgaaaaacttgaggatgtgtttagactgccataacgcaataaaattgatttcaaggttgtatggaagggaggttgttgtgagggacagaacacgcttccatcattttagacatggattctgctcttgtaaagactattggtaa

SEQ ID NO: 18638 - DNA, 1731 bp, Zea mays
  Peptide Sequence Number=SeqID_62013
atggagaagtgcaaaccaatcaagactcccatgcctacaaatggacatctcgacttagatgagggagtgaccttgtttgaccgtgtgccgtctcccgtcctgcctggatcgtcacctctcgtacatcagatcaggatgccgcgcacgaagaatgcgtcggcgccagggggtggcgatgatgaggaccctcgtcgccccttcaggcaggtcaaggggaaaactgtttacttggagcagcaggaagaccgcaagaagcggcgtacggacagagaagcccgtgcagcggcagcagctgtagcagccgctgcgcaggccgcacttggagatcagccgcagattccatccgatcagattgcattccgtgctcgtcgtctcacctcccggactcgctcctcctctcacacctccgcttccactccgccacccactctgcctgctcccgtcactcccattgctccatccacctccacagccatacccactacctcctctacgccagcttccactgcttcccctgctcccgctcccgcttcagctccccctgtccctccacctcgcttccgggagcgtgatgagactgaggtccgtcctctggtttcggatcctcgtctgtttgatcttcagcgtgctactgcggcacgggtacgtcggttcaggtacgtacccgtggagtcttggctaccagctcagagagacccagcagcaggtgatcttttcagcacacggattcaggagtcattcttcagagctcagatgtctgctcagatagctctgcgagtgcaccgccttttggatcttccagcttttctgcttgcagccggtgctgactctgaggcgcatctcacctatctgcctggccttctgacccttctgactatcagcggcagatatgttgaggagtgggtccgagtcttctacgcctccgtttggattgacccggatcatcactggatgaggttccgctttgagcgagaggatgtcacgatcactgccagtcagatccgtcagctatttggattcccagagtcgacgactcgccttcacagcctctgctacggctcttctgaccctcctcgtcgccctcacggcggtgtggctccagggacagctcacgtcgcgggctctgttccgcccgcctttcacagatgggtcgcgacgttcaccagcagactttactacagcagcaaagccgaggatgcagcttttcgacagtttgacactcagggtacagcagctgatgatgatgatgatgattttggggacaggcaggatgctcttcagcagcagttacttcaggatcgggcagagagtagggcattcatggcccttatgcttcagcattctggtatctcagcacctccggttcagtctgctccaccacctccgcttcacgctccagtggtgccatcgattttgtcaggaccccctgttggtacctctccgctccggccggtcactttggcgttcacctctccggttctcaactctgtctgtccgcagccgccagtgccaccagcatctgctgttaccactaccgctgtggcagtatctgtgatcgcttctgttctggtagctcctgcagcgcggcctcagtctgagtcagtaccagctccagcttctaccgtagatcctggatccgagactgactctgaccctccgccggcgttcgccctgctacctcgacctcgaccggatgcgcccccgcagcctcctcctgcttcaggtgtttag

SEQ ID NO: 18639 - DNA, 102 bp, Zea mays
  Peptide Sequence Number=SeqID_62014
atggcgcaccggacagtccggggcctagatgctttcaaggtgctccgggtcgacaggtcacccggggcgtccccagacgacgtggagtcgcctaggaattaa

SEQ ID NO: 18640 - DNA, 1107 bp, Zea mays
  Peptide Sequence Number=SeqID_62015
atggtgatctgcgaccatatacgaaaaagggaagacaggtctagcagggagtacagtacacgatgctctgcagagaagcctgtgctcccaaacgccgaggcccccccgtgccgcacgcacagattcccccgcgcccaccgcgccatgcgaccctcaccccaccacccaaaaaggcgcacccctttcccgccgcccaaatccccacttttccccgatccccaagcacccgtcgccgctccctcgcacgcacgcgcgcgccgcgtcgcctttatctgcccccccgctgcccggaactcggacgctgagccgtcgttgtcgctgggattgcagcagcgttggcggaaaaggggtggaggcgcggcgattgttcgcgggatgagctacggcggcagcagctccctcgcgcccggtgccaagaggccgttcgagtacgggagaacgcatgtggtgaggcccaagggcacgcacaaggccaccattgtctggctccacggccttggtgacaatggaaccagctggtctcaactgctggaaacgcttccccttcctaatataaaatggatatgcccaactgcaccttcaagacctgtgtcattgtttggcgggttcccctgcacagcatggtttgatgttgctgacctttctgaggatgctcccgatgacactgaggggatggatgcctcagcagcacatgttgcaaatttgttgtcaactgagcccgctgatatcaagcttggtgttggtggctttagtatgggtgctgctactgctctgtactctgcaacttgctttgctcatggaaaatatgggaacggcaatccataccctgtgaacctaagtcttgccgttggtcttagtggctggcttccatgtgccaggaccttgaagaacagaattgaagcctcaccagaggctgcacaaagggcttcaacaatacctcttttgctctgtcatggaaaaggtgcatatatgttttactgtgtatctgttgacgccttttcggagcgccaaatactcaagaagaaccggcggcggtgctctctgcacaggggcggacggtccgcgcgcggggccggacggtccgcggcctggtgcgaggcgcggtga

SEQ ID NO: 18641 - DNA, 219 bp, Zea mays
  Peptide Sequence Number=SeqID_62016
atggaggatggctgccatagggggagggggcgtccagccaagggggagaaaaagggggtggcggccaagagggggggaggccttcctcgtcttgactacaatgtcatcgacgtaggcctcgaccgtccggccaatgtgttcgccgaacacatggttcatgcaccgctggcatcgaggaaagacagggtttcgcacccagcagtggaatccacgatttga

SEQ ID NO: 18642 - DNA, 636 bp, Zea mays
  Peptide Sequence Number=SeqID_62017
atggcaagatcactctccaccgccctcgtgaggggacttatgagatcgtcccgtgcatcgacatcagctgctgtgtcacgaccagctatccagcagtttatgaactattcatcaggtcttagtggcactcctaatgcaaatggggactcagtgacaacacgagtagctgctgatcacgacacccatcaagattttcagccaacaagtaaaagttcagatatgtctttcagtgacattgttgctcaggatgtgaaggagcaccctgttgtcatctatatgaaaggttatcctgatgctcctaggtgtggtttcagtgcattagcagtgaaggtcctccagcaatatggtgtccccatcagtgctagagatattctttcagatctaaagctcaaagagagtgttaaagcatacagatattccgtagtaacagcttgtgtctccaaagggaattccaccaaaagaagggagacccgtagcggcaagtgccagtttggcatcatcggggcccgtaactctaaggacaagccctcgaagcgggcatcagtgcagccaagctcgtggcgcaggcaagccaacgccactatgcaagacgtgcaggcgcaactatcgttggcctgcggtggcaggcatacctga

SEQ ID NO: 18643 - DNA, 300 bp, Zea mays
  Peptide Sequence Number=SeqID_62018
atggcgcggattatcccgccgccagacgactcgacgatacaagttgaggaggaggtcgacacatacgacctctatgtcattgtgcacatgacgctacacgggtcaggcatgagcgtcgagaaggtgcccaagattggtggaggctacaattatcagcctaagcaactgtttaaaaggtactggaatgttgatatgtggcagaagctcttctcaaacgacagtgacgtggccacgctccagagcctccggagcgtctttttgggatacatgtgtagcaaccaggagctaacgacaagttga

SEQ ID NO: 18644 - DNA, 396 bp, Zea mays
  Peptide Sequence Number=SeqID_62019
aggcagggagctaacgtctggcggttccttcaggcaattagcaggcggcatgacttaccggaatcgctgaagaagctcaagtgccggacgctgatctttgttggagaaaactcacagttccatgccgacgctgtgcacatgaccacaaagctggaccggagatacagcgctctagtcgagttacttgacaagaggcagggagctaacgtatggcggttccttcaggcaattagcaggcggcatgacttaacggaatcgctgaagaagcacaagtgccggacgctgatctttgttggagaaaactcacagttccatgccgacgctgtgcaaatgaccacaaagctggaccggagatactgcgctctagtcgaggtagtggaactacttcaaggctaa

SEQ ID NO: 18645 - DNA, 420 bp, Zea mays
  Peptide Sequence Number=SeqID_62020
atggagttccaagtaacacttgaggagtctgtggatcctaggcgcactcgatgttctaggattttgattcgagattctgaagaattccagccagttgtgcctgttgtgaaagccgagccacttaaaaatcagtgggctgatgaagatgttgaagaagatgatgtaaaagaatcatgggaagaagaggaggaggaggctcctgactgccaaaagtttgacaagattaacgcaaagcttggcattcggaaggaggatcttcctaagatcgagcaagaacttgaattggagattgccaaaagtgagctgactgaacttaagaaggaatgtgttgaagcaatggagactcaactaaagagggaggagttccaagatgaggagatgcctgatgtcaggaaacaggacatccgaaacttcctgtag

SEQ ID NO: 18646 - DNA, 1062 bp, Zea mays
  Peptide Sequence Number=SeqID_62021
atgaaccccaatggaaatgaagtaaatgatgccaacgataatattcctaccttaacaactatgaacgagaaaaatgagtcacagagatattcgatgaatggaatgaagaacaacaaaaggaatagaaaaatatttggatacatgattagtccacctcaaccacaagcaaaagccacgaaacatatggatacccaaacagaagaatctagtcaggctcagctatatgagatacaaacacctaatcaaccctcaccccctgctggtcaagcaaagttgtctcgcaaagaactcaaagcaagaagtgcttgctactactgcaaaaatgaaggacatcttattggcgaatgccccaaaaagcgtctagaccgaataaagaagaaagctgccaagcattacctaagcaatagtttagaagacccaccattttatgagtatgatgatgaaggacgcttgattaatagccccgccagcagttttaactcgttgctgcctcttcgtcaaccctgtgctcgtccagctccagtggacagcataaagcctgtgtcgagcccgttactctcccctccactactactgcagcctccattaaccgacagtttctctctcgccattaatggccattacctgcagtttctcatctcccagacctcttcactccttcgccaggcctataaattgtgtcgctgctcgcttgcgctctacctcgccctcgccacgccatactgctccctccgtcgcgccctttgtccactgctgctcgccaacgtcgtcatgccttgctgctctgcttccctgcccagttcccagcgtgaggttctatgttgccgtcactcgcctccggccgtcattctcgtccacgcccggagctcgtcgctggtctactcgccggagtcggtgtcctacgcgccgcgttgtttgctgtcgtcatttcggcctcccgagcttctctcgccggagcactctatgctgctccgtcagttaccttgcttctcgtcgtacgaagcactggtgactcgcgtctcgtcggagttcgctgctgcgacatcgagtccctacgcctag

SEQ ID NO: 18647 - DNA, 1098 bp, Zea mays
  Peptide Sequence Number=SeqID_62022
atggcggggaagttgtcggaaccactgcaccgtgtcctacccaagaatgatgggcagaggctactgcaaactccatcctcgtcatgtggttgcaagctggagcgccatgatcccgataggctcgagcgaagtcgggtagcaggttctagagaaggagcgagttgtcacgccagtgtctgcatcgtgtttcgctcattcccgctcgcactcctgggtgtggcggcgatcacggcgtcgagaattgtgacgcttctaaaacgccctatcatcaggagtttctcctgcttcggatgcctcatcctaagatacgagctgagcggggtcctattcttcgacctcgtgatgacgacaaacattatggcgcctgtttcattattggcgcacctcgctctgcaggggatcctcccccacggttacgctggtgccagggcttttggcaccttttcttcatgtgatctgggtccacacccggaagagggatccaaagcgaaaaacctcctaggtgttgaagatgatcggggtgctaaagacaaatgccatggagtcgtcatgaatcaacattgcaacccatacctgatagcgccgccagcagttttaactcgttgctgcctcttcgtcaaccctgtgcccgtccagctccagtggaacagcataaagcctgtgtcgagcccgttactctcccctccactactactgcagcctacattaaccgacagtttctctctcgccaataatggcgattacctgcagtttctcatctcccagacctcttcactccttcgccaggcctataaattgtgtcgctgctcgcttgcgctctacctcgccctcgccacgccaaactgcaccctccgtcgcgccctctgtccactgctgctcgccaacgtcgtcacgccttgctgctctgcttccctgcccagttcccagcgtgaggttctatgttgccgtcactcgcctccggccgtcattctcgtccacgcccggagctcgtcgttggtctactcgccggagtcggtgtcctacgcgccgcgttgtttgctgtcgtcgtttcggcctcccgagcttccctcgctggagcactctacgctgctccgttag

SEQ ID NO: 18648 - DNA, 786 bp, Zea mays
  Peptide Sequence Number=SeqID_62023
atggcagctgatgcattatccaagctagggtcaagccaggcgcaggccccacctggtgtctttgtccaagagggaaatagccctttcatcgtggtatatgggtcggaagcaatattgccaggagaccttgcctttggggcacctagggtaaccttcaaaagcatcgcagaagcagaagcacccctgctcgagagatttggtgctccgtcgcatacaattagcgggaggacgccacaagctatcaccaccttgagaaggacctttcatagtcacgaaagcgtccaacgggatggcgcacgttctgccgcgcacgcatcccgcatcccgcgtacacccgcagctgtcccagctgccccgcgacgcatcctccccgctccttccatcctcgtcggctcccgcctccccgcccccgcctccacgcagcagccccacgcggatcagagcagaaatcccgtgtggatcagagcaacgcggatccgagcacccgctccttccatcctcgctggctcccgcctccccgctccttccatcctcgctagctcccgcctccacgcagacgccccacgcggatcagagcagaaatcccgtgcggatcagagcagccgtgcggatcagagcagcgcggatccgagcacccgctccttccatcctcgcgtctccgagcagaaatcccacaaccgccccacgcccacgcgcgcatcccgcagccgcgcggatccgagcacccgctcattccatcctcacgtctccgagcagaaatcccgctgccgccccatgcccacgcgc

SEQ ID NO: 18649 - DNA, 726 bp, Zea mays
  Peptide Sequence Number=SeqID_62024
atggccagatctaggctccccagggaccgctggaccctctggtgttgccgctcaaggcttctacggcccagcagtagccgcagccggagagggagacagctgagcccctcaacctctccgtggctcctcaagtcaaatcagaagttacaaggtttaagggaagaattgaatgtgattgtcccatacttggaggagatgagaaagaaggaagttgaaagatgggaccaatttgttgatgtcatagagcaaattaagaagagtgatcggctgaagcaagtcatggaacatcctaacactttgcattcgttatgcgaggtgcttggtgtagacttcaaacaaacagtaaatgaggtgcaccctagcctgggtgaggctgatggatcaaagaacctaagcaactgtacaattgaaagccttgcatcagctgcaagcagactgcgtgaattgaaagtcaagaggatgcaaaagctattggtgagtacttaccgctatgatggacaagacttttatcagttcttttttagccagattatgaacgcattggcaaagatcatgtcgttctctcagcacatcacacgcggtttgcatccattcagcaaatggcaccatatcaaaagcaacgcttcggcaatctgctacttcaggtggaatggtgacatacgaggtccaggttgtaacagctgtatcagcaaagactactattccttgtatattagaggccagtga

SEQ ID NO: 18650 - DNA, 381 bp, Zea mays
  Peptide Sequence Number=SeqID_62025
atgggtgtgaccaaggggtgtcttggcggcttgaattgcttattgaatatttgcgactgtttggcgagcgtggtaagaagtgaacgatcactcccagcctctataaatagcatgcttgcaccgttgttctcttcactcatccttcgatcatctgttactttcttctccctttatcctcttctctatccggccatgggcaaaggcaagagaggtcgaggctcgccccgtcgtgctggcgacaagcggaagcgcgatccaagtcctccctcggaggacttcggcaattctgagtactcggaggaggaggtctcctccgagtccgagggatcgctagctttcgcctctcccccgatgtcgtccgatgactcggacgactcttag

SEQ ID NO: 18651 - DNA, 267 bp, Zea mays
  Peptide Sequence Number=SeqID_62026
atgcggcggtcgtccaggctgcggagcagtccgcgccatggtgctctcctcagccgtgaccttaccgagtttcgcccctgctccaagtctcctggtcgggctctcgttctgcgcctaacgccgctgttccctaatgctgagtccctctctgctcatctcccatggcgtgtcgacttggtgctcgccggtgacggcagggtcgaccatcggcagctccccagcctccgtcgtgctcgtctgcttcggcagttcatatttgtggagtag

SEQ ID NO: 18652 - DNA, 834 bp, Zea mays
  Peptide Sequence Number=SeqID_62027
atgcgcggggcttggggaggtcatgacttcgtccgatctctgggaaacgtcttcgcgaatgctgaaggtgaccagggaagaaatattggtgatgttgtgtcaacaatgatggaaaaggaccgtcaggagtccctgcggaagaagcggaagaccccgcttcagctagtggacccgcaacacgacgctaggactggagggacatgccaggagttgtccgttgacgactatctggtaggaggtgtcaccatgtttgatgccctgacagggatgccgcctgctgggactgaaactaggcagttggtggtagcaccggtgaggccacccgttgacacaggggcttcagcgaagggcgtggctgtgaccttgccggacccatgggcacacttttgcgccattgctgatgggggcggagaaattgccggcacttccgcgactgaaggtgtggtggcggtcgtcttcgccgaccaagttgcgtccggagcgctggttaatgttgcgacctcgcagcttcgttctgagaggagacgactggagggaaaaatagagcgccttcggatacaacacatcaaagttgtcagggacaattccgtggccgagaacaaaagccaaaaccttctcgataaggtggctgcgcttgaaaaagagaatgaagatctcgatcatcggctcaatgacgagaaggatgccgccgctgaggcgaagacggaggccgaaaatgcaagcgcgaaggcccaagctacccataagcgtgctgctgagcttgagctcgaggtgaagagtatgcgcgcctaccgcgagagaatggaggccgccacgcatgtgggtgtggactag

SEQ ID NO: 18653 - DNA, 1188 bp, Zea mays
  Peptide Sequence Number=SeqID_62028
atgggaagcagtggagcagatacatcgtctaagccaaacaaggcatccgccccacaggagcagcaacaacctgctacctcaggtgctgcaacaccggctgtttatccagactggtccagcttccaggcatatcctccaatcccaccacatgggttcttcccctcacctgtggcatcaagtccacagggtcatccttacatgtggggagctcagcctatgattccaccatatggagcaccgccatatgtcatgtaccctcctggagtgtatgcacacccatctatggcctcgggtgcacatccatttactccttatgccattacttctccaaatggcaatgctgatgctactggaactactgctgtagcttgtgatactgatggcaagccctctgaaggcaaagataaaagtccaactaagagacccaaaggaactttgggcagcttgaacatgcttactggaaagaaccccagtgaacatggtaagacctcaggtgcatcagctaatggagccacttctcaaagtggcgaaagtggcagtgacagttcaagcgaagggagtgaaggaaattctcataatgattcatacaagcatagtggacaggaacaagatggagacgtacgaagttcccagaatggtgcatcacgttctccatctgagggaaaatttaaccaagctatggcaatcatgcccatgccatcaagtggcccagtaactggtccaactacaaacctgaatattgggatggactattgggccaacacagcaagctctgctcctgtaattcatggcaaagtgaccccaacaacagttccaggggctgtggtcccagcagagcaatggatacaggatgaacgtgaactcaaaaggcaaaaaagaaaacagtctaatagggagtctgcacgcagatctaggttgcgtaaacaggctgaatgtgaggagttggctcaacgtgctgatgttttaaagcaggaaaatgcttcacttagagatgaagtaaaccgtatcagaaaagagtatgaggaacttctatcaaagaataattcactaaaggttgacctgcaacttttcaattttattatgctgaagtatgaaaaacttgaaggcaaacaacacaaaactgatgaggcaggacttaacaacaagctgcaacattctggcaatgacatccagaaaaaaggaaactaa

SEQ ID NO: 18654 - DNA, 357 bp, Zea mays
  Peptide Sequence Number=SeqID_62029
atgagcagcgaccgggatttggttgaagaattcgttgcctacggtgtgtggccgctagctcatggctgggatccggacgaagtcaagattcgcccgatgccctttttgggtgatcggatggtgcagagccctgccttcgccattgatttgcgaggggggggggatgcggccaccttagttagggaagttgagtcggagggtgttaaaattgttggtaaatatttgtcgaaaacagagttagttaggagttgggatatacgaggttccaaagtcaggttgaaccgagtttttgagttgaatggtttgcggtatggtccttacccggaggggggttctgctgatgttggggatgactga

SEQ ID NO: 18655 - DNA, 558 bp, Zea mays
  Peptide Sequence Number=SeqID_62030
atggagtgtggagacttagaattgcttagtgaatgcttgggtgactcctccatgcgcctaggggtcccttttatagccccaaggcagctaggagccgttggaggccaacaaggaaagccaaagtttccttctgtcgggtggcgcaccggacagtctggtgccctaccagacagtcactgtagcatgtccagtgtggatctccttcctaatttggcgcagccgaccgttgcaacttcgggctggttggcgcaccggacactgtccggtgcacaccggacactgtccggtgcacaccggacactgtccggtgcacaccggacagtctggtgcccccagccgaccgttggcgcgggccacgcgtcgcccgcggattgcgaggccaaccgttgcgctggcggccgttggctcaccggacagtccggtgcaccaccgtacagtccggtgaattatagtcgtacgccgccaaaatcttccgagagtggccagttcgccgaaagccagcttggcgcaccggtcactgtccggtgcaccaccggacagtctggtgtgccagactga

SEQ ID NO: 18656 - DNA, 453 bp, Zea mays
  Peptide Sequence Number=SeqID_62031
atgggggagaatcccgagaaaggcctcacacagatgtacgaagatggaaatttgcagaatggaattagggttcagatgcatcaagttcaattcgtagaaatcaaggagaccacagaaaaagggggagacgggaagagcaagaccacgaataagaaaaggaacataaacgacagattcatgggtatcctctgtcggaacggtgacgccgcggcaaatccgccaagagtagagctcttttggaagcaaaaccccaacgtcaacgagatgaaggaggtcagattccgaaatgatggacatatggttaccagcgaatggcagctggctgttggggtcgataggtgggatgatcgcagcaacggtgctctgcctcttacgcttcggtgccatcgcaatcttttcggcggaacgagcaggatcgagacctcagggaagcagaggagtggttcgaggtga

SEQ ID NO: 18657 - DNA, 2241 bp, Zea mays
  Peptide Sequence Number=SeqID_62032
atggcggcggggcgcgcgccgtggctcgccgccggcctcgtggcggtgctgatggtggtggccgcgcgcgcgcggttcgtggtggagaagagcagcgtgcgggtgctggcgcccgagcacatccggggccaccacgacgccgccatcggcaacttcggcgtgcccgactacggcggcacgctcaccggcgtcgtcatctacccggacaccaagcccacggggtgcgacgacttcgacgccaagttcaaggccaagtcccgccgccccgtcatcctcctgctcgaccgcggagaatgctacttcgcgctcaaggcgtggaacgcgcagcgcgcgggcgcggcggcggtgctgatcgcggacagcgtggacgagcagctgctgacgatggacagcccggaggcgtcgccgggcacggagtacatcgacaagatcaacatcccgtcggcgctggtgaaccgcgcgttcggcgagtccctgaaaaagatggcgcagaaggtggccggcgcgggcagcgaggaggtggtggtgaagctggactggcgggagtcgatgcctcacccggacgagcgcgtggagtacgagctgtggaccaacagcaacgacgagtgcggcgcgcggtgcgacgagcagatggcgttcgtgcgcggcttccgcggccacgcgcagctcctggagcgcgccgggtacgcgcgcttcacgccgcactacatcacctggtactgccccgaggcgttccgggcgacgcagcagtgccggtcgcagtgcatcaaccgcggcaggtactgcgcgcccgacccggagggggacttcggcgccggctacgagggcaaggacgtggtggtggagaacctgcgccagctctgcgtgcaccgcgtcgccaacgaaacgggccgcccctgggcctggtgggactacgtcatggactacaagatccggtgctccatgaaggagaagaagtacaccaagacctgcgccgaggacgtcgtcaccgcgctcggtctggatctcaagaaggtgctggagtgcatgggcgaccccgaggccgacgccgacaacgccgtcctgtccaaggagcaggaagaccagatcggtagcggatcgcgaggcgacgtcaccatcctgccgaccctggtcatcaacaacgtccagtacagagggaaattggagcggacggcagtgctgaaggccgtgtgcgccggcttcaaggaagggaccgagccccgcgtctgcctcagccatgacatcgagacgaacgagtgcctgcacaggaacggcgggtgctggcgcgacgaggccaccaacgtgacggcctgccaggacacgtaccggggccgggtgtgcgagtgccccgtggtgaacggcgtccgctacgagggcgacggctacactgactgcaaagctattgggccgggcaggtgcgctctcaacaacggcgggtgctggtcggcgacgcgagggcaccagaccttctccgcctgcacggagaccgcgctgacagggtgccggtgcccgccggggttccatggcgacggccacaaatgtgaagacctggacgagtgcagggagaagctggcgtgcacgtgcccggactgccagtgcaagaacacgtggggcaactacgagtgcaagtgcaagggcaaccagctctacatccggggcgaggacgtctgcatagctaacagcatgtcgaagctcggctggttcatcaccatcgcggccgtggcgtgcgtcctcggcgtcggggtcgccggctacgtcttctacaagtacaggctcaggtcgtacatggactcggagatcatgtccatcatgtcccagtacatgccgctggacagccagaacaacgagaaccagcctctgcggcagcacgattcggaggctctgagggcgaccgctaggagaagtagggacggcagcgtggcgaccacaagacgaccgtcccccaaatccaacgaaccctcaacgaatcgagacagtgctgaggaggacgaacctttatatctgagggagaggggggagattcggatgggacgacgccgcccgcaacagccgggcgcggatgccgcgggcgcgaggtcggtggtggggacgaaaggggaaagggtcagggtcgggatggcgcagcggctgttgcgcgaggtcggtggcggagatggcgcgagggctggcatgtgcagcggctattgcgcgaggccggtggcggggacggcggggacgacaggggcaagggtcagggtttag

SEQ ID NO: 18658 - DNA, 150 bp, Zea mays
  Peptide Sequence Number=SeqID_62033
atgggagactacgtctcaggtcgcgtgaggggatatgtcgactgccaggttcactcagaccaccatcattacgatatcaaatggatacaaccaattcctgacctcgcgcgagtgctagaaaaatcactcgacttctaccgagatccctaa

SEQ ID NO: 18659 - DNA, 198 bp, Zea mays
  Peptide Sequence Number=SeqID_62034
atggcgcttctcgggtgttcgatgaaatgctcgggtgaagcagtatgtcgtggacagcatgctatgatgcccgctggatgtttattgtgctgcgcagccccgtccgcggcgtcgtcgaccctcgccaccgtcaaagtcgcgctccgcgccttgcagttcgacgaaatgctgagccatgtggacagcccatgcgtctag

SEQ ID NO: 18660 - DNA, 600 bp, Zea mays
  Peptide Sequence Number=SeqID_62035
atggacagggagccaactgcgctgcatggaagaggaacagggagggcgtggctggaggaaaggggcgagctgctcgtggccatgggggagaagaaaggggcgccgtcgagggagcttcaacagtggagcgctcggctgctggactgctcgctgtggacagcagaggaaggcagatgcagtggagaagggcactcaagactgctggccagagctagagctcggtttgtaggtgagggcgcagggaacttggaacgactgcgcaggggagggacgctgtccatgggagggagccgccagcttggaggaatggagctcagcggccatggagtttctgcccctgcgcacgcacaggaaacagagagaaggagctgctgtgcagagaaggctgaccaggggatggagaagggcaccgagcacatgggctctagacgccatggccgtggctgctggccgagcagggaggaacagggggagggctgggcgtccatggcaggagcgtcggcggggggaggaagaagactgctggtggcggctgaaaaaaagaacaggggtgggagtgaaaagttgccaatttgcaagggagagaggtcctatttatag

SEQ ID NO: 18661 - DNA, 387 bp, Zea mays
  Peptide Sequence Number=SeqID_62036
atggactaccccaatcgattgtatctgacagagacctgtgccgatcaagattctgcaacaccgcacaatgatgaaagggctacaagcatgtgcacatgtcttggtccaatggtctcacatgtcaccagaactcgctacgtgggaagatattcaagatctacgacaacaatttccatatgcgcctgtttgggggcaaacagccaacttaccagggggaatgtcagtgacaaaggcgaggcactggaggaacaaagcaaggagcgggagcagtttggaccagatgatggacccgatgggtcgaggcggtcgaccaggccccgacgcagcaataagatggtgactgggccgacgtggatcaacttcatggaagtattgcgtgagacttaa

SEQ ID NO: 18662 - DNA, 411 bp, Zea mays
  Peptide Sequence Number=SeqID_62037
atgcggcggcggatctcctgtcggccggtggagtcggccccggcccccctcggttgcgcagaagaggacctcgacttcgtgaccacgcagtgccgttcgcgaccgaagacgaagaggagtccaatccgcttccggcgaggagatgcagacggcccctacaatttatcagttcacccgtacttgccaatggaaccaagccaagaatctgctgagtctgggagcaccagactgtccggtggtgcaccggacagtgtccggtgtaagggcgagagactccaatttgtggagattcctcgcaagtgggataaagataagcaaagcaaaacatcgtggtattcaagtgggtctttggaccgcttgagaggggttgattgcaaccctcgtccgctgggacgccacaacgtggagtag

SEQ ID NO: 18663 - DNA, 558 bp, Zea mays
  Peptide Sequence Number=SeqID_62038
atggcgggcgatcccccgacggccgcggagaaggagaccctggtctcctctttcctcgagatcgccgctggccagacccctgagactgccactcagttcctcctgatgacgagctggcacctggaggaggcgctgcagctgttctacatcgacggcgagtccgccctcaccccggcgcatccggtggccccgccgcccacgtcggcggccgcgtcggcgttggcggcagcggccggggcggaagaggcgatgaggttcgctccacccccggcggctgcactgggcgatgcaatgttgcatggatttggggtcggggaggacgacgacgtccgcgcgcctctgcctgtgaagagggagactctgtacggcgagggcatcgtatccgttttctatctgaacctgccgtggtggagagcaatcctatggtctcaggtgcttcgtggaatcgtggcagtgtcactgcttcacctggtgtctgacgcttcaaacagtcttgtgttcttctgtggagtcggtcattcgacagcagcacaaaaacatgcaatatacagactgtag

SEQ ID NO: 18664 - DNA, 1089 bp, Zea mays
  Peptide Sequence Number=SeqID_62039
atggctgcagcggcggcgtggaccggcgccgcatcccccaactcgctgctgctctcgcgctcgcctccccacgccgccgcgctcgcgccttcgccgggaagctccatgcggaggcggctcctcctcggcgtcggcaccccggccgtggcggcgctggcggccgcggcgccgccagcggtgctgcaggacggagcggtcactgtgctcatcaccgccggcgcctactctcttgtgcgcgtcttcgacgagctcaccgagcggcggctcatcgaaaagagcttgagcaggaaggttgtgcacgtgctatccggcgtcctgttcatgtcatcttggcccctgttcagcaattcgacagaagcacggtatttcgccgcggttgtcccgttcctgaactccatgaggcttctgatatatggactccgtctctacactgatgaagctctggtaaaatcagtgacacgtgaaggaaaaccagaggaattgctgagaggtccactctattatgtcctggtgctgctgttcagcgttttagtcttctggcgtgagtcccccatcgggatcgtctccttgtcgatgatgagcggtggcgatggttttgctgacattgttgggaggaggtatggctcagcgaagctgccattcaatcggaagaagagctgggccgggagcatctcgatgttcatttctggtttcctgctgtccgcgatgatgatgctctacttctcaagcctgggttacattgatgttatctgggaagaggcacttggtaagctggcgcttgttgcactagcagcgacagtagtggagtgcgttcctgtgaccgaagttgtagatgacaacatatctgttcctttggccaccatgctgggattagaagagggagccgtcattatagatggccaaccgtcacgatcccgcatgggctcgggcaagcacgacccaacaaccaacgagccaatatggcacatcgtgttttacgggtcgtgcttgagtgacccgtcggcccaggcaccgcccttcgggctggggcctgaatggtacacacttggatctggacagtccatagtacaagagcttgaatcagcatag

SEQ ID NO: 18665 - DNA, 669 bp, Zea mays
  Peptide Sequence Number=SeqID_62040
atggacgggaaacacacgctacaagacaatccgatcctgcaggctcggatcctgacgcttgaagggagcagcagcaccctcggcgtcgacaacaccttcggcgaggtccgacctagccttggacggcgacgcggtccgaagatctccactctgaaggacggcgtcatcaccaagcccgggccatcgctgctagggtcttctccgggaatccggctcgggcaggcggctcgactggtcaccccgaggcctcggccggctgtccaccgtggacatcagcccgacccgaggcctcgacaggcctcgacagccacaatgaacaaaaacactggcattcaaagtgccattacaaacggaactccggttccacctccgcagcagggaccgggaaagggggataccccgaaaaggatccttccctgtgaaggaaccaggctccgagcctccctactgatcagaggttcgaaggctggcccctcggaagggttcgacagccgccttaggtcgcgtgggccctacacccactactggtcagaggttcgaaggtcggcccctcggaagggttcaacggccgcctcaggctactcgggctccgcgcccactactgatcaggggttcgaaggctggcccccgaagggttcacagtcgcctcagacacagagcgagggatga

SEQ ID NO: 18666 - DNA, 777 bp, Zea mays
  Peptide Sequence Number=SeqID_62041
atgggattactcggcatctacagtctggggtcggacccctatgagacggacctagaatcctacgtgtgccatatagaccttcgaccagggaaggtccgctgctaccacgtgcccgggacgaaacaggtggaacatgtacctccaagtgccattcgggcccccaacttggagaggtccaggggcgccacgtatgtgtactcttcctgccccttctctccgcttaggcggaggtacggccgacgggagttattcaaaataaccactgtcgtgcctttcttcttcctttctgtttctttcaacgcgctctctctacgctgcgcccgcgccgccgttctgcccaccgccgtccgcacgccgccggccgacgtcgccgccccgccgccatcccgccgccgccccgctctcccgccgccccgctcgcccgccgcaccgccgccgtcacgccgcccagccgccgtcccggcgccgccgtcacaccgctcgcccagccgccgcaccgagcccacggccgtcgcccccgcccacggctgccggtcccacgccgcgccgccccgcgcccacggccaccgctcccgcccccgcccgggcgctcgacgaccgccgccgaacgccgtcgcccgcccaacgccgtcactcgccgccgtccacggtagccgcggcttccccacatcgacgtcgtccaccgacgtcgtacaccaccgtcgtccgcgcaaagcattcaaggctataaggtctggtatctccatggtgaagatgttgaacgagcagcagaagtag

SEQ ID NO: 18667 - DNA, 756 bp, Zea mays
  Peptide Sequence Number=SeqID_62042
atggcggcgacggcggagagcccctcgaccggcggcttcgtgctgtggctgcacggctccggcgggtcgggcgacgagagccgcgcgcaggtcgcgccctacttctccgacccgggcgtcgcctcctccgtccggctgtccttccccaccgcgcccacgtccttcatcccttgctacggtgatgtggtgatcacggcttggttcggcatctcggaggttcctattaccgcgaaaactgttagagatgagaaagaagtccttaaagctgttgagtatgtgcatgaattgatagacaaagaagtagctgcgggaacgagcccgtcaaacatattcgtttgtgggatgagccaaggaggtgctctagctatagcgagtgctctactctacccaaaaactctgggtggctgtgctgtcttcagtggctcagttccgccgaataaatcattcgccgataaggtgtcacctgaagctagaaagacaccggtgttatggtttcatgggatggcagatggggtggtcctatttgaagcaggacatgctgggtgtgcatttttagaggagcttggcatgtcctgtgaattcaagttttcccaatcatctactcaggcttatcctacccttggacattcattggttgacgaagagcttcaatactttcagcaatggatcctgattcgtctagggatggctgcatctggagcggctgaaaccgcaaggccatcatcgtcatctaaccacaacgaccatctccaatag

SEQ ID NO: 18668 - DNA, 891 bp, Zea mays
  Peptide Sequence Number=SeqID_62043
atgagtagcctgatccgcttgctcttcaccctcgccgcggccatcggcgcggcctcgctcctcgtcgcctcactccgccgccgcgcgccgcctcccgggcttcccgccaagctcgtcccctcctcccacatggcaggacgcaaccggagtttcgtgctgtggctgcacggcctcggcgactcaggccctgccaacgagcccatccgcaacctcttctccgccccggagttccggctcgccaagtggtcgttcccctccgctccccgcgcccccgtatcatgcaacagtgagcttcctccaccatatactcttcttaacccctgtatgtacaattgcttcaaatcaacgtttgctgataaggagagtctttccccccggacagatggttttgtcatgccgtcgtggttcgatatccacgagcttcccatgagcgctggctctccgcaagatgagactggggttctcaaggctgtcgaaaaggtgcacgccatgatagacagggaagtagccgatggcatccaccctgagaacatatttgtttgtggattcagtcaaggaggtgctctgacattagctagcgttttgctttatccgaagaagttaggtggaggagcagtgttcagtgggtgggtgcctttcagttcatcagtcactgagaggatttcacctgaagcgaggaagaccccgtttctttggtcacatggaatggctgacaaagtagtattgtttgaagctggccaggctggtccaccgtttttgcaaagcgctggtgttaactgtgagttcaaggcatatccagatctgggtcattcgctttcccaagaagagctactttatcttgagtcgtggatcaagagtcgtctaaatgcctctcaagagaaggacggttaa

SEQ ID NO: 18669 - DNA, 303 bp, Zea mays
  Peptide Sequence Number=SeqID_62044
atgcaaacgaatggatcagctaagggagcagaatgcctgcgctcgggtggaggcactagtagcgctgtagtaggagcaggtgcatttccattggccaggaaagatggtgtgactgtccggctcgactccaggtcactcacttcactgcggtcgcttggacagtgggcactggcgctggcgtcgcagcaggtcgaggtgcagggcaggagcagcacggaattgatgggcacacatccaatgctcggagggattggctgccttctgcggctctgcagcctgcgggagggagtgggggtggaatag

SEQ ID NO: 18670 - DNA, 171 bp, Zea mays
  Peptide Sequence Number=SeqID_62045
atgacgctcggtggtgttgggactgacagttcgatcaaagttaaaggggacacgtccatcgagtcaaccatcaggaccaaggccactgcgtaccatcctactcgtgtcaccgccgcttgggcccgggtcatcagggcctccgtcccctacagaatcgcgcacgtcctgtag

SEQ ID NO: 18671 - DNA, 459 bp, Zea mays
  Peptide Sequence Number=SeqID_62046
atgggcaagagcaagaagggcggaagttcgtcgcaccactccggccacaagcggaagcgcgagccgagtcccccctcggaggacttcggcaactccgagtactcggaggaggagttttcctccgagtccgaggggtcgccggtctacacctctcccccggcgtcgtccaatgactcagacgattcccaggggatcgctgctgaggtgtggacatacatccggaccgtcgagcgctccgggctcgagggcttggatgagtcggaggtctcctcggacgaggagaactcctctgactcgtccgaggaggagagcagcggtgacggtgacgatgagggcgacggcgacgacggaggcgacggtgacggcggcaagggcgacgacaagggtgatggcgacggtggcggcgacaagggcgacggtggcagcagcaaggccagtggcaaggcgccactggtttaa

SEQ ID NO: 18672 - DNA, 751 bp, Zea mays
  Peptide Sequence Number=SeqID_62047
ggagcgggccgagacggcgagggctcaggcggcgcgtggcgagcgggtggacgacttcggggcgttgaacagcgtgctgcctgacccggagccgaccccggcggaggccgtgtctggggccgccctggagccaaccccggagactgcggaagacgcgccggatgcccccgcatccgctgcggccggcgaagacctgcccccaaaggtggccgaaggcgcgcctgatgcccccgcagctgctacgccgagtgctgaagatcccacggcggtggtggcggaaacaacagcggaagcaacggtggagcccacggcggaggctcccgcaacgtcagggccttcacaggttcaagattttgggcctgcgcacgcaaccgctactactaaatttttggcggcttcgaccgcggaaggtggtaatgaatgtggtggatctgcatctgagttttttgattttgctgactctgggagctcggttgagtggactgaggagtcgtcggaggaggacttggactactttgcggccttggatgtggctgcggcggaggcttcgccacacaccgcggacgcgcgagatgtgccagtcgtggagatggttgccagcgacgctcctggggcgaattgggtcaccgcaccttgggatccctcgccggagttctccttctgcgaccgtccgccccacgccgtggctggcccccttcgcgacccaatcaacaggggatgggaccctgtaattccgccgccgctgcggtag

SEQ ID NO: 18673 - DNA, 399 bp, Zea mays
  Peptide Sequence Number=SeqID_62048
atggcgctttggttcgtgtctgtggtcggggaagctcagaggttgggctggcgcgcgcgcgagggaggttttggtatgtgggccgaaatggtgcagtccggcccaggtaaggcacataaaatgaggataactctctattattctttgtatacaattttgagtattacaaatcctaccccccttaaaaataatctcgtcctcgagattagtaagcagaagggttataccgaggtaagaagagagatggtcagagtgaggttagctgatggtaagaagaacttggtaagggaagactccgtccaaggtgatgcaattgtggacattactccacaacttatcacactcaatcaaagatccaaatcaaacaagtatcataagaacaagcattcaagttcatag

SEQ ID NO: 18674 - DNA, 60 bp, Zea mays
  Peptide Sequence Number=SeqID_62049
atggtgaagaagcaaaaaggaagggggtttttcgcaaaggtgataggagttgtgtgctaa

SEQ ID NO: 18675 - DNA, 315 bp, Zea mays
  Peptide Sequence Number=SeqID_62050
atggaccgggcgattccggccatctccgacgtcaagccgtacctcgacgtgaccgccagagtctccccgagccaaccccacccttcgccggacctccctcgccgccgacatatcccctcacgcgacctgagacgaggtctcccattccggttatggtgggtacaagtgcggtcactgcacgacggccagtcggggtcagtggggcattgttctctggaggagatggttgctgggataacttggccgtccaccttgccaccgggttggactgttgagtgggaccctgcctcggctgaggaggagcatgaggagtga

SEQ ID NO: 18676 - DNA, 525 bp, Zea mays
  Peptide Sequence Number=SeqID_62051
atgacttctcacggatcctcggacgaagggaatgcacagtcccacacggatgggcttgcacgagagggttttccccgtaccttgtgggaggtacttcagggagctagttacccgacgcctccccagtacgaggtgcagctgttcgagaagcatcgagtgccccgctgtagggctaccaagatcaccttggataacagagaggaacttgtggtagacttgtccactgagatggtggaaaaagacttacaagtggaacaattgtcaaatgagatccaagagcttgaggagctggtgggaaccagggagaacaccatcgaggttctcgaggatcagctcatcaacactcagcagcagcttgcggaggctaacaagcatctggatatgcaccaccaggagatccaggacatggaggccaacgaggatgtcgacatcgagggaggagaggagcctgcctctagcttggacactgctagctcaggaagaccaccttcccccgagtcgagcgttgcctcgcttgctcactag

SEQ ID NO: 18677 - DNA, 165 bp, Zea mays
  Peptide Sequence Number=SeqID_62052
atggggaagcctgtcccatcactcctcatgctcctcctcagcggaggtttgaggttcttgcctaagcataatggattaagacttggattgccccttaaatattttagtaggcactcaaggcgttttgctagtttggttaggggtgggtttgaactacaattgtga

SEQ ID NO: 18678 - DNA, 177 bp, Zea mays
  Peptide Sequence Number=SeqID_62053
atgaccgggatgacgggcgggacccagcccacagcgacacacgcgcaacgccgagtccgacaggtagggcccaatcgccagtgctccacctgcgcagccgcgatgttggccgcgtgcgtgctccgaagactgggcagtgggccccacgcaccagtcaggtacgattatggcaagtag

SEQ ID NO: 18679 - DNA, 531 bp, Zea mays
  Peptide Sequence Number=SeqID_62054
atgctctgcgtccgccttaaactagtgctgcttgagtgttctgctgggtggctggggcaggaagacgaggtgcctgctgattctgcctctggaactgacctcctcctgactgattgttctggtgattctgctgctgatgatgagggtactgcttctgaaactgctgatgctgagacctactggaacatggtactaacggaagctatctctgaattcttcccacgtgatggcgtcggggttggcatgggtggtgagataggacttccaccaagactgagggtggtggctgctgttgctggtgctgctgaatggtggctagagtctgatcgatggcttgaactgcctgagtctgcatcaagaacatctgctcgatggtcatcgggggcgagggtggcagctgctgttgctggggtgcctcatcttgcggtgctgcctgctcttgctgagcacgccttcctcctctgcggctgttctctgacatctgcagaatgcaatcacacatcagaactgatcttgcaacttgcagcataa

SEQ ID NO: 18680 - DNA, 834 bp, Zea mays
  Peptide Sequence Number=SeqID_62055
ggaggtccacggaatgccagagaagatatgagcgcaaggaattgggcggagactcactggatagctcggtccacgcgcggcggcggaagaccgaagtccggtgaggtcgatctcgggcctccggtgaagtccggccgggtccgagggcttggcaagcttcacgggctactggcggagctagccgaagcactggcttgcccagaggatggctggaatgggctggccacggtggctgaagctctggcggcaatggcgggcggaattgagctcgccggagctaaggaaaggtggctggccggtgaggccaccgtcgaacacgtgttcccgttgcctctgcccctgttcaagcgccgattgggagcaaatcttcgcgaatttgggtggtacccggagacgatcagcgcagcgaaaagggggagcgccacgaagaggagcaccccgaggccgtggcgggcggaaactactgccaaggcgacggcgtgcgagcgggatccacatcggcggcccatttctgtacatcttcccagcaccttcaccattccagacgagcccccctgctccctctctcttggctttgtccgagcatggcggcgattggtgagcccagggccgcggatcgggtacttataccggcggccatgcctacattggcggcagattctgttgcgcccggagcttcacgcggcggagaagacggacccgcccagagcagtggacgagtacggctgggtcacgcaagggcagaggcggcgcagtgcagatgaagaggagacagggtcgtggaaggtggatcggcctttatcaccctgggtcgcggagtcggagttcagctag

SEQ ID NO: 18681 - DNA, 273 bp, Zea mays
  Peptide Sequence Number=SeqID_62056
atgaccgtctggccacgtcgctgcgcaagtgggtacggcgactggggcagtaacagtgccccgacttcatcccctgcgcgagatctttcactttacatagggatccacgtgccactgggcatgaatcgcaacgccggcgaggatcacaacgcgggatcaccggtggcgggaagtgttatagaacctattgtggttgttcgaggaaatgagatggtgcttgttgctcatccagggaagtgggaagtagcagcacatccaccttcactctcataa

SEQ ID NO: 18682 - DNA, 285 bp, Zea mays
  Peptide Sequence Number=SeqID_62057
atgggctgccataccacgtgggcctccaggttgggtgaggacgtgggatggcgggacttcatcgtgggtcttcgtcttgcagtgagaaggacgaagggtgacctgcgccggtcatctagcttccgttgtgcagttaaaataatttcaccctccctattcctttacggtgatgtggattacagggttattgttgaccattgctctttgtggagttttggcatttcttcgacgaactgtgccgggcagaatgttattggcttcttgccggctttattgctccattag

SEQ ID NO: 18683 - DNA, 291 bp, Zea mays
  Peptide Sequence Number=SeqID_62058
atgccgaaggcgtcctcaacggagctagttgagtcgcaagctaataaagggaaaatcgccgaggcttcgaaattgcaaagcgaagctgaaacaaaaccggccgaagttgaaactgcagcgagctgggctagtgccgaagccgggccttcagagcctgctgataaacaaccttcggaatttgaagagaaggcagcagaggaagaggctatagagcagagttttcctgagaaaactcccgcgtctggtcaacggcagaagaacgagaagctcaacactatgcccagaagctga

SEQ ID NO: 18684 - DNA, 429 bp, Zea mays
  Peptide Sequence Number=SeqID_62059
atgcgcctcatcctgcggtacctgttcttgacctgtggggggtgtgagacagcaagaaggttgcgcatctttacccacaagtcatgttacccatctgccaagagatggccaatcccatacacctctaccgaggaggcgaggcaggagggcggagggacagggacggagcagacacaagagccgcctagcgacgtggagaagaaggtcctgccagaggaggccaatgggctggggcgctctcggttcttgggtccgccctcgctcatctgttgcaatctgaggagcaagggggaagaagcatcgactcgatttttatacccactgtacgagagcgttccagccgaggaagagaacgaccccccgcaagatcgccgtggtggttcagatatgggtgtatggctcagctcgagtccgtggggaggttggtag

SEQ ID NO: 18685 - DNA, 384 bp, Zea mays
  Peptide Sequence Number=SeqID_62060
atgccgcgccggggacgagccggaccgagcaggttgcggggggccgcgccacgccggggcccgaccgcacagggggccgaccgtgccgcggacacgcacaccgcgcacgagggccacaggctacgcgccatggccgcgccgtgcgcagcaaacacgcgagaggagtcgtgcgccagggcagcagggtggccgtgtgggcagggagctacaccggacggggccgctgtgagcagcagcgtcgggcgcgcgccgcgagcagccgcgggccgagcgacatgccaggctgcgcgcgaccacgcagaggaggtgagggaaaagggaagggaaggggaagggaggggaggattcacctcgacggcgcaggcgagctccgcggtggattag

SEQ ID NO: 18686 - DNA, 180 bp, Zea mays
  Peptide Sequence Number=SeqID_62061
atggagaagctcaaaagacgtccccaaggggatgcagagcatgacgaagctacaaaaagtcgttcctcagggagcgcagcctttgatgacaatgcttcggtcagcataaagaagcaaagatacgcttcgttgtgtacaaaaagaagggaaggtgtttttcgccttcagctcaaaagatag

SEQ ID NO: 18687 - DNA, 210 bp, Zea mays
  Peptide Sequence Number=SeqID_62062
atgggtatttggtcaagaatagaaactgtgtgcctcgctcgccagacatgtgtgatcaatgacgtcgaccggaaaccgtcatcgtgcttccgactatcgcgtcgaattagtcagggtacgttaattaatcgcgtgatgcggaagacgagtcaagtcgaccccaagcgcggactactccgcatggtgatgttgatggacgaacctgcctaa

SEQ ID NO: 18688 - DNA, 426 bp, Zea mays
  Peptide Sequence Number=SeqID_62063
atggaaaagacccgagctaggctgtgggagctccaagctaagcgcgcacagggaagctgggcgcgagctcagaacagaggccgagaagggagagaggaagcaggcgcggtggccaggagatccagggcgcgacgagcagagggcttcgcgcgcagccatggaaggactcgcggcagcacacgcatggagatgagcgcgcatcgaggaagaagtagagggagggagagaagcagctgggcgcacagggagaacgcgccatggctgagggagctcgggacacaggagcgccgcgcagaggaagctctacgagctaggatccgacgccggggaaggaagaaagaagagcggctgtcaggaggggaggagacacggctggggagggactcgagctggcaccggcgcacgccatgggagcagtggagctag

SEQ ID NO: 18689 - DNA, 78 bp, Zea mays
  Peptide Sequence Number=SeqID_62064
atgacgtcgaccggaaaccgtcatcgtgcttccgactatcgcgtcaaattagtcagggtgataggagttgtgtgctaa

SEQ ID NO: 18690 - DNA, 483 bp, Zea mays
  Peptide Sequence Number=SeqID_62065
atggaaaagacccgagctgagctgcgagagctccaagctaagcgcgcacagggaagctgggcgcgagctcggaacagaggccgagaagggagagaggaagcaggcgcggtggccaggagatccagggcgcggcgagcagagggcttcgcgcgcagccatggaaggactcgcggcagcacacgcagggagatgagcacgcaacgaggaagaagtagagggagggagagaagcagctgggcgcgcagggagaacgcgccatggctgagggagctcgggacacaggaatgccgcgcagaggaagctctgcgagctgggatctggcgccggggaaggaagaaagaagagcggatgtcaggaggggaggagacgcggctggggagggactcgagctggcaccggcgcacgccatgggagcagtggagctgggcactagggagcttggccggctgggataaacaccagagaagagcggcagatagataa

SEQ ID NO: 18691 - DNA, 2802 bp, Zea mays
  Peptide Sequence Number=SeqID_62066
atggccaccgccgccaccgcttcccacccggcttccgcctccacctccggccgcgacgctctcgccgccgcctcctcctcccccgccgccgtctgcctcgtcccgttcaggtggtgggcgcgggtgcgggaggaggaggcggcgggcggggtgcagtacgcggccaccgccgccgcgtcgccctcctactacggcctcaggctgcttcacagcttgctgcacccggatctcgtcctgcgcctcgagcgcggggagtgccgcgccggtggcgggaacggaggcgggcgcagctacgcgctcgtcccggccgacgagctctccagggcgctcgccaggttttcagtgttcacacgtgtctctagcaatgtcttaagcttgagcgcacttccccaagtccagtctcggcaaaactctggtttgggtttacaaaataagcactcctttgctggagatagtgctggtgcttatcctttggtgcttaggatctctgtccgagaaacaagtatcttgacactgaagatcagcaaaaaggacaatccatttgagaattacaaacgggctaacaagatttttaatgtggattctcaaccagttcatgtttgggatttttcagggcagacaaacctaatattaatgaatgaatggaatagactacatgactgctgccatgcagatcaagagaatcttctggaagtgcaagtctatgcaatgtctgactccttaacatccaaaattggtggtaccaacaaagaaaattatggagatattagtgatatgaattctgattcgtcttacagaagttttggaagagctggttctatggggttaataggattggagaatctcggaaatacttgctttatgaacagttcaattcaatgtttggctcacacaccaaaacttgttgaatacttccttggtgattatgccaaaaatataaaccggactaatccattgggattgaacggtgaacttgccttggcgtttggagaactgttgaggagcttatggaccactgacggaaaaccagttccacctcattatttcaaggaaaaaattgcatgttttgctcctcagtttggtggctttaatcagcatgattcacaggaacttcttgcttttttactggatggtctccatgaagatcttaaccaggttaaatgtaaaccgtatgaagaagcaaaggatgcaagtggccgtcctgacgaagaagtagcagatgagtactggagcaaccatttagctcgaaatgactctgttatagttgatacatgccatggacagtacaaatctacattaacttgtcctacttgcagtaaaacatctgtcacctttgacccatttatgtacttatctttgcctgtaccttccacggcaaagagggtaatgactgtaacagttttcagcactgatggtagcagagaaccatgctcgtatgacgtcagtgtgccaaaatttgggactctgagtgatcttgttcaggctttaagcattgtttgcctacttggagatgatgagatcctgctggttacagaggtctataataactgcatcatccgatacttggaggagccttcagattcagtttcattgctgagggatggagataaactagcagcataccgtctacccaaaagacatgagaaatccccccttgtggtttttacacaccaacattttgtccagcattctagtgatggtaatttaactccacaaatgagggagtttgaggccccacttttggcagcacttccagaggaaattagtggattatctcttcaggatatctacctaaagttgttgagtccatttcaactttccaacggggctagttcgcttaatgattgtatggagtctaatagtgactccgtcgatacgccttctgattcaggcagtatcaattttcagaacagccaattggaagatggccctgaaagcaaccactgtagtgctagtgaatgtgaagtaacaaaaggacctgatgatttatacgatggggtttctggttctaacaaggaagcacatatggacttcgaattttatttaaaaagtgaaaggggcgagggccagcaacagaagatagaaattaatgagctccatttattattggagacagcaccaagccggttgcatgtgaatgtccactggctacagaatgcttcaagaaaatatgccacctcaatgctgaacaatctacctgagatccacaagctcgagcttatcccgaaaggaactgaagattctgttgcactacatggttgtctggaagcctttctaaaagaggaaccgttggggccggaggacatgtggtattgcccgcgctgcaagaagcatcagcaagcgatgaagaaactggatctgtggaggctgcccgaggttctggtgatccacctcaaacggttctcctacacccagttcacaaggaacaagctggagacgttcgtcgacttccccaccgtcgatttggacctgtcgtcctacgtcgcggacaagagcgagcagccgagcagccattatcgcctgtacgctgttagcaaccactacggaaacatgggagggggccattacaccgccagcatctatgtgagtccctccacccgctccgttgaatcgttgtctgtgctgagtcctcagactgtctttggttccgttttgattcctcggttgacgatcaaggctggttgttggctgcatgaggaagggaaggggtggtacaagttcgatgacgactgcgtgacccctatgagcgaggacagcataaagaccccggctgcctatgttctgttctacagacgagagtga

SEQ ID NO: 18692 - DNA, 1122 bp, Zea mays
  Peptide Sequence Number=SeqID_62067
atgactaccagccttgtggtggagagaagcgagtcgggctgcagcctcccccctgccctcagcttcaaggatgggagaagggcgtccaccagccttgcggaggaggcgaacttcggctacgcggggtcggccggctgcaggcgccgtcagctgccgcgtgtctggctcctcggcctggatggctttggtgccgcctccggtgctgcctcctgctgcttggtcggggtgtggctgtctgtccaccgcacgggcgacggtcgcgtcgtgcgtaggtccgccacatccacggcttctcccgcgccgccggccgtactaggggttgtacaagatgtcgtacaccgcgggggcggcgaccgtgttcttggatggtcttgtcctcactcctacagtgaggacgagagcgacgacctcttcgcgcatgctgaggcagccgccgcccaccggtgcggagaggcggccgctgccgtcggtgctgaggtggtcgcctccgctggcgagccgctcggcgctagctatcccacagccctactggtgtggagggtggtggagcgtgcaggcccacgatacgggaccaggctgagcggctacacgggcttcggaccaccccaggagactaatgctaagcggccacacaggctccggaccaccccatggaacggggtcccgttctctagagccggctcccaggctgtcggaccttccaactttcgtatcgggggccctaaactgcaagcttggctgctcaattcggatgtcgtcatgtcaagacagatgggaatccctggacccattggaaatctagaagggtttccggaggaaggcatgcttcagctccgtagaccggggagcacgggtccctctggggtccgtctagttgtctccaccggagtaggagcctccagcgaagacatccttcaggtccccctcgggcgactgatacccgaggtcccgttcagccgcggccacctcgccatcatccaccttttctttgccaagtcagcgacgaggtggggagccatctttggaagactgctcgtgtcgctcactgacacattttgcgaggtcaatgatctcgcgacactccatggtgctgtggtgaccgttggggtgcacagggcatga

SEQ ID NO: 18693 - DNA, 459 bp, Zea mays
  Peptide Sequence Number=SeqID_62068
atggcgattgcaacaaacgtccatgaccacagaggggtaacagcggctcatgccctgtgcaccccaacggtcaccacagcaccatggagtgtcgcgagatcattgacctcgcaaaatgtgtcagtgagcgacacgagcagtcttccaaagatggctccccacctcgtcgctgacttggcaaagaaaaggctgccgacagggtacatgcaggagtggccacagccaaagacgagggctcccatgtcaaatgcagatggggacctagggttggtacctagccctacgccaagcttgcagtttagggcccccgatacgaaagttggaaggtccgacagcctgggagccggctctagagaacgggaccccgttccatggggtggtccggagcctgtgtggccgcttagcctggttccgtacccgaaagcctgcacactccaccaccccgtgatgggtacctag

SEQ ID NO: 18694 - DNA, 78 bp, Zea mays
  Peptide Sequence Number=SeqID_62069
gaaatcgttgatgaagcctttctcccaccattcagcaaaggctcaaaggatttcgctccaatgaaaaaagctctatag

SEQ ID NO: 18695 - DNA, 1203 bp, Zea mays
  Peptide Sequence Number=SeqID_62070
atggaggccgtcctacggcatccatcgctctcgcgcaccaggcctccgaacctgaaccctcccacaacgccatctccatctcttcatgcaccatctcttctccgcctccgcgcgcgccggctcatcgccgccgcggtgttccaggaccagaagccgaaggagccagcaagcaagggaggtgatgacgaggaggaggcgtacggcgaggtggaccgcatcgtctccagccgcacagtcagcagcccggtgttcgcggaggacggctcggccaccgccgccgtcgccacggagttcctggtggagtggaaggacgggcacgagccgtcgtgggtgcccgcggaggccatagccgcggacgtggtggccgagtacgagacgccgtggtggacggcggccaagaaggcggactcggaggcgctggcggcgctgctcgcggacgagacgttgcggcgggaccccgacgcggaggacgcgcaggggcgcaccgcggcgcacttcgccgcggggctggggtccgaggagtgcctgcgcgcgctcggcgcggctggagcggacgtgggccgtcgggagcgcgcggggggcgggctcacgccgctacacatggcggtcgggtacggccgcgcgggcgccgtgcgcgcgctgctggagctgggcgccgacccggaggcccccgacgggcagggccgcacgccgctggagctggtccaggaggtgctcgccagggcgcccaagggcaacccggcgacgttccagcttcggcaggggctggaggcggcgcagaaggagctggagaaggccgtgtacgagtgggccgaggtggagaaggtgatcgacggccgcggcgaaggcaagtggcgggagtacctggtggagtggcgcgacggcggcgagagggagtgggtgaaggcggcgtgggtggcggaggacctggtgagcgacttcgaggccgggctggagtacgccgtggccgaggccgtgctcgacaagaggcaggcggcgacagcgacggcggaagaggaggacagctgggagtaccttgtcaaatgggtcgacattgaggaggccacgtgggagcccgccgagaacgtggacaccgagctcgtgcagaagttcgagcagcagcagtcggggtctgcaggcgaagttgacgaagttgttgacaaagtagtcgactactttggcaacaacttcgtcaacttctaa

SEQ ID NO: 18696 - DNA, 1467 bp, Zea mays
  Peptide Sequence Number=SeqID_62071
atgccttcgcactcccctttatgcattgctcccttccaccttccgagcccccggatggggagcgcccgcgttgctttcgtcttgctgtcgttggaggaacgcaacttcgtggaagttgaagcaagccgggctgcgacctctgccccgccctcagcttcaaggatcttcatcatccttgctggggaggaggccaaggcgagccggggcctgccttcgcgtgggccggcgtcccgcttcttcctctggcttctgggggtggaaaccatcctccagctttgcggaggaggcgccctccagccgtgctggggaaggcgaactgctgctgcccagtccagggtgcagcattccgtcctttgtccgggcgacggtggccagccgcaccgggggtctcacaacacgtcgtacgcctcaagggaggtggacgtcaccgtcggtgctgaggtggtggcagctggagaaagcttctccgccaacgagaccgtcagcgccacccgcggaccgacctccggctctttggctttaatatctggttctcgtcccccgcgaggggacacgaacgagagccttccagcggtagcgtccgtcctgggaccgtcgctgctgctgcagaggtcgccagcgagtcacccggagtttgtcgtcccgcaggctctccgatgtggaggttgttcatacccgcgggagtggaaccgaagttccgtttgtaatggcaccttgagtgccgatgtctgttcattgcggctgtcggggcctgaacattggggtgccaaaggttcacacttagccaataaaaagaccaatgttgggttcaacaaaagagcaaagggacaaccgaaggcacctctggtctggcgcaccggactgtccggtgtgccaccggacatgtccggtgcaccagaagactccagctcaaactcgttgccttcgggaaaatccagaggcaactccactataattcaccggactgtccggtgtacaccggacagtgtccggtgctccaaggaagagcggcctcaggaactcgccagcttcgggaaactgcaacggttgctccactataattcaccggacatgtccggtgtacacaggactatccggtgtaactacggagcaacaactatttcggcgccaacggctacctgcagcgcatttattgcgcgccagagcgcgcagaagtcaggcacgcgcgtagtggcgcaccggacactctacagtacatgtccggtgcgccaccggacatccaggcgggcccagaagacagaactccaacggtcgaatcccaacggctttggtgacgtggctgccgcaccggacatgtccggtgtacaccggactgtccggcgcggtgctgacatcttccttcgagggggagatcttccgaccgtgtcgccgtccgaggccgggttggattccgtcgaaggtggagtcgaccccgagggtgctgctgctccccctactgatgtctga

SEQ ID NO: 18697 - DNA, 645 bp, Zea mays
  Peptide Sequence Number=SeqID_62072
atggcgagagatgatgatgcggtgggaggtgaggtccagacactgggcgaagtgaggggtagggtggcgcaccgccttcgagggaagacggttgaggaggtgggtggcagtttgcagggcctctgcccagtagctggcagggagagacgcctggaagaggaggcagcggagcatattggtggtggtgcggatcatgcgttcggctcggccgttctgtgcagaggtgtaggggcacgagagacgcaactggacgccgtgagtgaggaagaaagagcgagaggcgttgttatcgaactcgcggccattgtcacactgcagagcatggaccgggcgacgaaactgagtggatacccaggtgaagaagtgtgtgagggtggtgaatgtgtccgacttcaaccgaagcgggaaggtccagagaaaatgggaaaaatcatccaaaattaccaaatagtatttataaccagaaagactgagtacaggggaggtccaaagatcacagtgaaccaggtcaaaagcctgctcagcccgagaagaagtagtaaatgggagacgagatggccgagacgacgatgccatgtggtggaggtggtggagaccaggacaggaggtggtgacacgctggcggtagagggctggagcgtgtag

SEQ ID NO: 18698 - DNA, 202 bp, Zea mays
  Peptide Sequence Number=SeqID_62073
atgcccagctatgacttcgtcgagctcgtcaatctccccctcaatatgttcgaagcttccgccaacgaaccttgggaaggtgttttttggaccttcggctccccgaagcttaaaagacttttttcacggatcaagctcgttacgaaaaacgatctagcaccgcgaaaggggctactgttgggtctatgcttcgtcgccgaag

SEQ ID NO: 18699 - DNA, 378 bp, Zea mays
  Peptide Sequence Number=SeqID_62074
atggcgggtttattccaagaaaaggcagggtctcttttagaaagtggccacggcgaaggggtatcaagggtttctggccgcacgatccgatttggacgatgcagattagatggcatcaacaccgaaccgagcaagacgggcgcgcacaccatccttcaagaccagcgaagccccggggccagtaccacagcaatggcaacggcgacagagcaatttgggctggcggcaatggtgtccgacgaggattcttccgccgcgcgtacaaatactatagcggtaacgacacctaggaggattggcgcgggtgagataggagggagaacacccgggattgatttatacccaggccacgcccccacgctcaccggaacaagctag

SEQ ID NO: 18700 - DNA, 588 bp, Zea mays
  Peptide Sequence Number=SeqID_62075
atgccaccggtggcgcaagaaggagcgccgacgtggtcgttgtcacctggcagcggcgcggcttcgtcagcatccgcctcttccaacccgtcctcctcgctctcgctcccgcccccggtccctaccagcagcagcgcgccgtcgtcctcatcacccccgccgtcgccgccaccgtcgcctacctcgccgtgcgccgcgtgcaagcaccagcggcgcaggtgcctgccggactgcctcctgaagccctacttcccggccgacgagcccgacatgttcaagaacgcgcttcggatgttcggcgtcaggaaactgcagcacatggtccggtcagtccgaccagagaggcgggacgcgtgcgcgcgcgccatcgccttggagtccaagtcgcgcgcggaggaccccgtgcgcggctgcagcggtgtgatccaggacctggaggagcagctcatggacacggccgtcgagctcgaggtgctgctgcggcggctggactcgtaccggcacgcgcgcgactcgttgccccagcgtccaccgaaccctcatgacgctggcgcggccgcggactattccccggcgacgctgcagtag

SEQ ID NO: 18701 - DNA, 648 bp, Zea mays
  Peptide Sequence Number=SeqID_62076
atggctttcttctaccttgggctcgtgtgcacagggagctcgacgagggagaggggaatgggcgcgcaggggcagggcggacgacgaggcgcagccgtgacggggtggtgcggcacggcgaggctcggccgcggacgactctggcgagcagggctcgacgcggtcggcggcgagatccgggtggctcggtgggcggtatatgaagccattagagattgtatggaaagaggaacatccaatgcacctccaacattggatgaagactcacctagcagtgacactcatctttctagcacgctatttacatcacttgtacacgaacaaggaggcacaaaggaagtgcaagaatgggccgatgaaacagttacacccaccttggcaagcggaagacaagacttggtccatcagataggaaacgaaaaaggggtcaaaatcatcgatcaaatcgaagatggagaagaggatgatgacaatgatgatagcacaaccgaccctagtgcaggtgatgatgacaaccatggtgatgctggattatatggtgcagttgagagtggtgcaagagggagtggtacaggagattggaggtccagtggaggaagtcggttcacccatgccacagaagattcttaccatgatgcacctcattaa

SEQ ID NO: 18702 - DNA, 159 bp, Zea mays
  Peptide Sequence Number=SeqID_62077
atggggctcggtgtatgcggctcgctctgccaagtttgggttcgccccttggggaggagtggcaatgagattgatggttttggttatgactatggtgctggcgaagatgaagctgtggaaggagacttccaggagttccaagactacgacaagttctag

SEQ ID NO: 18703 - DNA, 744 bp, Zea mays
  Peptide Sequence Number=SeqID_62078
atggaatctgtcgccgagctttgtgcccagaagttgtcctcggcggttgttgcagcccgtgacacactgaatgcttctgctgccgcgagtgtggttgctggtgatttctgcgccacaacatccttaggtaaccatgtggtttctacgcttgatgttcttgaatccgctgtgaaggcggaaaaaagtgctatgtgttcttatcaacaggcgagtgcagccgtggattgtgctcaggaaactttggcaaaatactgtgaggacagaatactacatatgatacttttttttaaaaaactgagggcaaatgttgtcttgttcatccgagttataagttcagtttatcagtttattctggcagaacagcaaaagatgaacaaaaaactctcacatgcactcagatatgccatgtctcaaatgagtgacacagcgaagaaactacaagatactgtctatttctgctacacagatgaggatgttgtggacggtttcatgatgactcaagtagctcgttcaatggacgagttagctgaaatactagaagtaacttcaattgactatcaggtttcgatgatggatccaactactatattagaagctggctatgcaagtgaagacagtacgttgtgggaggacatattccgtgatcgagaaattatgaatcagccattagaagcggagacgcttggtgagcactttgctaactgggggcttagtttcaatgagatctgggatagatcagtgtaa

SEQ ID NO: 18704 - DNA, 870 bp, Zea mays
  Peptide Sequence Number=SeqID_62079
atgacttctcacggatcctcggacgaagggaatgcacagtcccacactgacgggcttgcacgagagggttttcctcgtatcctgtgggaggtccttcagggagccggttacacgacgcctccccagtacgcggtgcagctgttcgagaagcaccgagtgccccgctgtagggtgaggatgaccctggagcctcatcccctacagccaggctggcgttcgctggactctgagtcttatggatacatggctgaggatactatggaggccattgctcttcatggactgaccaccttctgcggattccaccccttggagctgtccactcaccccattggcttgttccccgctgagaaggaggacgacccaatgtggaaggaccgagtggagcatgccaaggatatctgggctatctacccaggtcagactgctcacttaacggtgcggtgcatgaatgccctatatcgtctgcaagtgatgcgtggagaggcgatgtcccatctgatggcattgttggaggcgaccaagatcactttggataacagagaggaacttgtggttgatttgtccactgagatggtggaaaaagacctacaagtggaacaactgtccaatgagatccaagagcttgaggagttagtgggaaccagggagaacaccatcaaggttctcgaggaccaactaatcaacactcagcaacagcttgcagaggctaatcagcacctggatatgcaccaccaggagatccaagacctggaggccaacgaggatgtcgacatcgagggaggagaggagcccgcctccagtttggacactgctggctcagggagaccaccttcccccgagtcgagtgttgcctcgtttgctcactag

SEQ ID NO: 18705 - DNA, 330 bp, Zea mays
  Peptide Sequence Number=SeqID_62080
atgacagaaggcaaggatggccttccagatttgctctcaacggctcctagctgccttggggctataaaagggacccctaggcgcatggaggagcacaccaagcattcctacaacattcctaagcaccaagacatcgatctcacacattcgttcattgtgatagcatctagagctcttgttgagtgcgaactccttgagttgtgttgcgagctcttgttgcgactttcttgtgtgcgttgctcattccccctttgctctgtgttctttgtgaacttcaattgtaagggcgagaggctccaagttgtggagattcctcgcaaacgggattga

SEQ ID NO: 18706 - DNA, 528 bp, Zea mays
  Peptide Sequence Number=SeqID_62081
atggggcaggcagatcctctggggcaggctctggtgctggatccggggctacctcctgagcaactccttgctccgacacgaggaccttcaccgaggcatgcacggtctcttccgatggtcgggcacggctgggaagggctctgctggccggtctacggtggcgggggatcggctggccgtgggcacgtcgcgcgcggggcgaacaccggtgatctctggctccggtatggcgagactgatggttatccttctcagaaagggatcacatatgatgcacataggaaggacattgacataaccaggatagtaatctttggaagatctttaggaggtgttgttggagcagttctttccaaaaacaatcctgataagcatcgtgttccccatcgacaacgtggagctagatccctcaacctaaagcaacccgccatcgtgcctcctcaacccagtgaagctacagaaagcgtggaaggctcctgcagcgtcgtgttccccgacgacaacgtggagctagatccctcgatctaa

SEQ ID NO: 18707 - DNA, 927 bp, Zea mays
  Peptide Sequence Number=SeqID_62082
atggagctcctagagaagctagcgcagccagaaagcctcaaccacgccattggccataacgcggtactcgacctcagctttggagtgagagacaacagactgtctcttggcggcctaggagacgaggttggtgcccaagaacacgacgctgagctgggggaggatagctgcctgaaggatcatggggaggaggatatgaagaggattgacccggatccccctggtggggaggcggggcaaactgctcacaatcatcaaaaggcacatcaggcgagcggggagcaaatggcatacccatggaagaagcttgacgacagaggttgtcgtcagtctcccgctgacgcctcgccaactcatgcacatcggaatatatgttcctacacatggagaagaatgctacaataccatgggcctgtcgagcgcccatctcatgaccacgacctcgaccacgaccacgaccacgtggtgtgggagatccgtgaccaggagatggacgcgaggggccggcagcagcaggtccacgagagctggagggagctttccttagatgccctgctggattgtttggatcaatccagaaggggagatatgaagatccctggcttcatccttggtgggaggacgaaagtcatgaatcttaatcttgtcgccaaaaatatcgccatcagaaaatccaaggatgtgagcaaacctccggtagctcaccttataccagctgccttcgatatagaaattgagataaggaaagttataaggactttcctcatcagccagcttgatccaaagggtagaatagaactgagcaataacttcatcattccaatcgatatgctgatgcttcttggggagaatcatagaattataaaaatcgacatgttagagggtccagaaccgattaccatcgatcctagcatcacgaatgcgtaa

SEQ ID NO: 18708 - DNA, 1116 bp, Zea mays
  Peptide Sequence Number=SeqID_62083
atgcacccgcaacaaccaggcccgcggatctccgcgctcatcgttccctcgcacacgattgcacagtgggcacccacagtggataccgtgagctcgcccccgcctccatggtccatcctccgctcgcgattcccccatgcccgttgcgcctgcctcctcccgccccgtcctccgcacctgccccctgccctagccctcgcgctcgccgctgtcaccatatcaaggcgctatggtgctacccccggtcgagatagccttctgagcatcgaggtggtggtcgaatcgagggaggtctctcggttcctcatccctggctgggtttcgttcggatcacgcagcatcgtgcagcagcaacatggcaactacgtcatcgcgaggcgaagcatccagttcatctccaccgcgaaaaacactgagtttgagaactgccgggagatgcagttcgctgcaatgaagcggggagacctgttggagctctgtcggcagcacggcttcgccacccgcggctccaaatttgtcctcacatgcgcgctcttgaatttaaagtgcaacgtgctgattctttatataacccttccctttatgcaactcaatgctatgtcctcattctcagctggccatggacaccgacccaagaagaaggtatatcaccgtgaacctggtcttgacagggccatggatcttcaaaagaagcctgcccttctcctttgtctgcgtgacctcattttggcacaaaagacaggatcactacttgtgcgtgaccttgaaaaggaggttggttttgtccaaaaatggaactttctttcacttatcgagcgtcaccctaatatcttccatgtctctggtggaagtgcttcccaagagcccatttctgtcacacttacggagaaggccagaaagatatccagtgaagaggctgaagcgcgagagttaatggagccaatcttggtgagaaaccttaggaagttactgatgatgtcgatggactgccagattcctctggataagattgaactaatccagtctgaactgggcttacctaacaacttcaagagaaacttgattccaaggctgagagagatacaatgcctctacattgagcagcaaaggttttga

SEQ ID NO: 18709 - DNA, 105 bp, Zea mays
  Peptide Sequence Number=SeqID_62084
atggagaagccgccgcggtatccacgaggtcgaccgtcgtggtggggtggatctcttacggggatgaggcgcgaccggcgagaatggcggctccgtcgcggatga

SEQ ID NO: 18710 - DNA, 543 bp, Zea mays
  Peptide Sequence Number=SeqID_62085
atggcggcggaggtggccggaggaggagctgttggtgcgccgtcgtcgtccccgcggcgcgtggtggtggcggtggacgagagcgaggagagcatgcacgcgctctcctggtgcctctccaacgtcgtctcggcgggcaaggccgccgtggcgccacccccgtccgtggtgctcgtccacgctcggtccccgcgcccgctctactacccgaccatcgatggcaccgggacagggtacgtgatgacccagcaggtggtggactgcatggagcagtacatggcctccgccgccgacaccgtcgtcaccaaggccaagaccatctgcaccgccttccccgacgtgagggtggagacgtgcgtggagaagggcgacccgcgcgacgtgatctgcggcgccgccgagaaggccggcgccgacatgctcgtcatgggcagccacggctacggcttcctgcagtgggcgctcatgggcagcgtcagcaaccactgcgtgcagaactgcaagtgccccgtcgtcgtcgtcaagaggcccgactctgcttga

SEQ ID NO: 18711 - DNA, 399 bp, Zea mays
  Peptide Sequence Number=SeqID_62086
atgtctggtgcgccaacggctctctggctaccaacggtcgacttcgccgtagaaggaaagaaatcgggcaccggacactgtccgcctctaccggcgctgaatgttgtccgcatgtggtgccgtccgccgagggccgaggccgactggccgagtgatgtccgctcgtacctgtccggcttccgcccgcctgctggtcaccacactccaaccagcgaccaagcacccccgtcggccaccaccagggcaccagtgacaactcacaagtgccccacggcccgcacgaccacgcctataactgtaaaatataataattatgtcaaatcaaagggaaagatgacacagacagagaaaaggaacacatggaagtcacaaattcctaaatttgaagagctattttag

SEQ ID NO: 18712 - DNA, 225 bp, Zea mays
  Peptide Sequence Number=SeqID_62087
atggctgccccgccaactactcgccccgtcgcattaactccgcggctggacaggtggcgcttctggcaggagcaacgggcgacgcttcgccctcgccgaaacaaccgcaccaaaaaagtgtcaacataccagcccgagaacttgggccccgaccgtacacccgggctacggccagctcgcatgagggaacaaccagaccagccgaagcattacgcaaggcattaa

SEQ ID NO: 18713 - DNA, 504 bp, Zea mays
  Peptide Sequence Number=SeqID_62088
atggcgcttcctgtcgacgtggctggcctgtgccctaggttgggcgacgtggaggctcctccgaagccggggtcgagtctgtcttccatggccgaggccgagtccgagcccctgggttgggcgaggcggaggtcgtcagtagagaccgagtccgagcccctgggtcgggcgaggcggaggtcgtcagcagaggccgagtccgagcccctaggtcgggcgatgcggaggtcgtcagcagaggccgagtccgagcccttgggtcgggcgaggcggaggtcgtcagcagaggccgagtccgagcccctgggtcgggcgaggcggaggtcgtcagcagaggccgagtccgagcccctggtcgggcagagcggagttcgccgtcttccggggcttagcccgagtccgagcccttggtcgggcagagcggagttcgccgtcttctggggcttagcccgagtccgagcccttggtcgggcggagcggagttcaccgtcttccggggcttag

SEQ ID NO: 18714 - DNA, 771 bp, Zea mays
  Peptide Sequence Number=SeqID_62089
atggacaagtactgggaggagacgcagcgctacctggagtacgaggagctcagcatctacttggaggcgcaggaggacgccatgtcttgctacgactccagctcgccggacggctccatctcccactcgtcgtcgtcggcggcggcgtgcggcaacaagaacatcctgatggagcgcgaccgccgccgcaagctcaacgacaagctctacgcgctccgcagcgtcatggacaaggcgtcgatcatcaaggacgccatcgagtacatccagcagctgcaggtggaggagcggcgggtgctgcaggagctgcgcgtgctcgacgacgacaccgccgccgccgccaccgcgcaggtggagtgctgcgacgtcgacgggggcctgctgcgacgggaagccgagcgcgcgaagaagatgaagcgcgcgcagtccgtcgccagcggcgcgcagtctgctccgcctccgcccccgccgccgcacgtcgaggtgctggagctgcgcgtgtcggaggtgggcgaccacgtgctggtggtcagcgtgacgtgccgcaagcgacgcgacgccatggccagggtgtgccgcgccatcgaggacctccggctccgtgtcatcactgccaacgtcacctccgtcgccggctgccacgtgcacaccgtcttcgtcgaggtagataaaatcgaccacatccaagtgaagaacatgattgaggctgctctcacgttgctcgacgcccccggaagcccccacagctcgatgagctattacgagacctaa

SEQ ID NO: 18715 - DNA, 375 bp, Zea mays
  Peptide Sequence Number=SeqID_62090
atgaaggagccaggctactttgcttttcatatcctaactgacgctcagaacttctatgccatgaaacactggtttgccaggaattcgtataaaaatgcagctatccgtgtcataaactacgaagcaattattttggagaaacttccaaagtatactatccggcagctgtatttgccagaggagttccgtgttctcattaggagcattaagcggcctactgaaaacacaagaatgaaatacctgtcactgttcagccactcaaatttcgttattccagaaatattcaacacctacctcggcgtcatagcctatggcgccgagctgtgttacctcggcgccataagctatggcgccgagcaaagggtccaaaaatga

SEQ ID NO: 18716 - DNA, 825 bp, Zea mays
  Peptide Sequence Number=SeqID_62091
atgaagatccttgaagctgagggcggggcagagattgcagcccggcttgcttctccccacccaggagctggtggtcaccgtcttggggcggaagaagccaaaccgccgtgcgcggtgcgcgcaactgcccagcggttacgagcattcctccactttcgcccagaccagcgggtgaaagggcggaccgccatgcaggcggcatgcaaccgcaccaagggggcgcaccctttcgactttgacgcgtccagcatggaggcccaggcccacacatcatgtaaccggcgcgccggttactacgtgcaagaaactgcaccgccactcgcgccactaccgtgcctcctcgactatggaaccagtaccgcgactcgaggcaaccctgcgcatgacccaacagtgccaaccaggcacatcagtcacgagtcaatcagccgcgggagaaggcgcgacggtagatacggccagaaatgggccggcagtaatggcagtggcaggcgggcggaagcagcggtcaagtcgtcagccaagctcacgacaggcgacacctttggcgggcgaagcaggcgacgcttcacctccgccataatgaccgcgtcaaaaaagggaccaggaaaggggacaccccgaaagggatccttcttcgcgaaggaagcgggccccgagccccctactgatcagaggttcgaaggctggcccctcggaagggttcaacagtcgcctcagagcacttgggctccacgcccactactagtcagaggttcgaaggccggcccctcgaaagggttcaacggccgcctcaggccactcgggctccgtgcccactactga

SEQ ID NO: 18717 - DNA, 654 bp, Zea mays
  Peptide Sequence Number=SeqID_62092
atgattttatctactggctgccctctgaaggtgccggagggcgcggggacggtgaaggtgcgggagggcaagatctgccgggcgctggagccgctgtgcctcagggtcgtcgccgccatcatcggggccgccggcgatgccatcgtccacgccatgttcgtcgagactattcttgaattaggcccaaccatcccaatttttggagtttgcatgggtctgcaatgcattggagaggcatttggaggaaagattatccgtgctccttctagagtgatgcatgggaaaagctctccagtttattacgatgaggaattaggaaatgcattgttcaatggcttgtcaaatttatggtacgtactcctgagtaaagccttccgagttgacgccgccttggcaccctttgcttccatggacaacccttttactgccgtgaggtaccacagcttggtcattgagcaagaaaccttcccacatgatgctttggaggctactgcatggactgaagatggacttatcatggctgctcgccacaagaagtacaaacacatccagggtgtccaattccacccggagagcatcatcacccttgaaggcaagaaaatcgtcctcaacttcgtcagattcattgaggaactggagaagcagcgttcatag

SEQ ID NO: 18718 - DNA, 1059 bp, Zea mays
  Peptide Sequence Number=SeqID_62093
atggatggcggcaaccactcccgcagcggtgagtcccccctcccgcaacactttcagggcctggagaaggggttcgaggttcttctgtctctcgtgcggggtcccatgacgccaggcgtcggtggcggcggtgactacctgctgggagaacggtgggagcagctcaccgtcattccggaggtagaaccaccggcgctgccaccccttgttcgaggacgcgaggacggcggggatgtactgcgacgcccgcgactgcctcaacaagagggtgcagccgccggcccgcaccgctgcacggaccttcctctcccccgccggcaaggcgaaaagctcgacgaagaagagatgagtccacaaatcccaatggggggcgatccccaaatacccttcgcacaccgctacaaagatagcggcctgcgagatggagttgggggtgaggttatgcaactccaccccatagtggaacaggatggcccgcataaagcggcccgtcggcacgccgaatccccgctcgtgaaaggagacgaagctcacgacgtaccccggcggtggggatggagcgactccgcccatgggaggaatccattctggccgctgctcatcggtgagagggcgaagcaaaccctcgccgaccagctcttccaaatcgctcgccgtcaccgtggaaaagggccacgggtcgcgcggggagattatggtcacccgatcagccatcaccagaacggaaagggtggcggcgcaagggggcaggaaagggcgttttcctctttgaaagggaaatgtgcccttgggccatttctaagtattttggtgattgaatgtcaacacaagtgcttcaatgtgaatcaatgcccatggatgaacaagtgcaaatctacaacaaagaaacagatagaagaagagaagagaagacttggctgtgtacaaccaagggactgtttcggtctgggggcaccggactgtccggtggtgcaccggacagtgtccggtggtgcaccggacagtgtccggtgcgccaggctccctcggccgaagagcctgctctcgggaatttgctga

SEQ ID NO: 18719 - DNA, 1737 bp, Zea mays
  Peptide Sequence Number=SeqID_62094
atggcgtcccccgcgcgccccgctgccgcctccgtctccggcgccttcggcctgcccccggacgcgcgctgctcctacgatcagcccctgccccgccgccgcgaggccgactcgcgccgggcacagggcttgcaggacgggaggctggtgcggacgttcgtggccgcctacggccagccgccgccgccgcagcagcagcagcagcagcaggacggtttcttgtaccccaaggacgccgtggtggcggccgtggaggagtgcacgcggaagcaggccgacgcactgctgcactcgctcggcgccatcgggggcaggctctcccagctcgagctctactgctacaagctcgagaggtccatcggggagctgcgcagcgacgtcatggactaccacagcgacagcaacgccaacttcaaatgcatcgacaggaacctcagacaggtccacaaatcgctccagcttcttcaggatagacaagacttagccgaaactgcaaaagaactcagcaagcttcagatagcacacgaggcgccttctcagacgaagggtgaggccgccggtttccccatgctcgcggcaagggaaaacggccacagcacgcgagccccaaaacacgaggtcgcccttttgccgcttcaccaggtcaatgggacgatgcactcccctgccgtgcccgtgcaggtccagaccagcaacggcttcgttctgcagcacctggtgcccgtcgctttgagcacgcagcagcatgagcagcagcagctgaaccaggctcccgtgttctacgtgcaaagccgggaccgtgctaaatgcaccgagggcaaggcggcgttggagcctctggttcaggttgtgcagccgcttgcgcacagccctgatgccgtggtgcaagtcgagctgcctcagaaagctagtcaagcagcagcagctgaactgtaccctcagcctcagactcagagtcacaggctgcagacgcctacccagcaggttgatctgcatacatggcatccccagcagcccatggtgcaagtgcaacagcagcagtacagtatccaacaagtttcacgacatatggtggtggctcagcagccgtcctcgtctcctcagtctcagctgagcgctccacaagccacacccttgtttcctccattcagttccgtgaaaccttcgagttgtaacacggagacaattacaagaagaatggctgggcagcctccatactcttcatcacagcagcaataccagcagcagcagcatgaagttgcccattcattctatggccaaggcaacacagtattgcttcctgtagcagatcataacgctcagcatcagcaaccgcaaccagtgcagctacacagccagggcccctcctgtccacctcagccaggcaagcccagtcactgcagcgccgcaccctatgctgttcaaggaaacggccagacctacagctccgcatacaagaacccttctaactgccctgcaactgcagccgttgtagctcttctgcctcagcctcctgccatcgcctgtatggcgtaccatcccttgggaccacaggtcgtgcacaaccatccatttggaaatactatggttgaaacgtccaggtccagcgtggtagggtacccacgggatcagtttgagatgctcccggcgattactgccgcccaacctgtactaccggttgataagctcaatgctggcagcaatgtaacatcgtcccctagggaatggtcagcatag

SEQ ID NO: 18720 - DNA, 807 bp, Zea mays
  Peptide Sequence Number=SeqID_62095
atggaatctgcgctgccgcgctggtatggtctttcccgagcccagacgcacggaacgggagggcgcttccatgagccacacggtttccagcgcgccgcggaccctgcggctgatttccgtgtgcgttttcaacgtggcgtccattcggaaacggtgctcacagagctctccctcgacgacaactatttcaccgggatcccgacgacctgctccatccctgatgtctttggagagatgaggagactagacttgaggaacaactcgctctctggtgagattgctatcgactccagcttgctgccgaagcttaatacttttgatgttggaaccaactatctgagtggcgctatagctcctggcatcagtgtcttgcaacacctgcgcaacctgacaagcttggtgctgaccaggaatttccgcggcggtgagacaatgcaggtgctcatcctgacaaactgtctactcatcggcgtaaatcccacgtggctgcagagcttgggaagcctcaatgtgctggaaatttcatgtaacaagttagatgggaatatcccgccatggctggggaagctagacaactgcttcaacattgacctctcaaacaattctttcagcggtaagctatctgtcagcttcacacagatgaggagcttgaattcaaataatggctcgagcaagcggtcacccacagagggttcccattgttcagcaataaaagcaaatccgccatcgtcgcccttggactgggaactgtggtcggggttctcctcttgttgtgcttatgtgaccgtgtcaaggattgtccattga

SEQ ID NO: 18721 - DNA, 810 bp, Zea mays
  Peptide Sequence Number=SeqID_62096
atggccgacggcgagccttccctcacgcgctggaccttcgaggatttcgtggtccactacgaggcgcgcttcggcctccggcgcgaggccgacggcgacgacgcacccccgccgcgcggatccgatcatggggccagccgccccgccactgcccgcgccaacggcggcgcggacctcgccgtcttcgagcagttcgagcggatggagaggaaggtggagataagcaatggagcaatagaggatggtccactgcagaaatctctacttccttcatttgaatctgcagaaatgcgcaacttagctgagacattgttaagggatataattcgtggaagtccagatgttaaatgggaaagcataaaaggtctggagaatgcaaagcgtcttctcaaagaagcagttgtaatgccaattaaatatcccaaatacttcacaggtctattatcaccttggaaaggcatattactgtttggtccacctggaacaggaaagaaaagttttgcttattctaatagtccgagtgatgcaggtgactcggagaaactagtgaaagtgttattcgaacttgcaaggcatcatgcaccatctactattttccttgatgagattgatgctatcattagtcaacgtggtgaagctcgtagtgaacatgaagctagccggcgattgaaaactgagctattaatacagatggatgggttgactaagacagatgagcttgtttttgttctagcagcaacaaatttaccatgggaattggatgcagcaatgctgcgtcggctggagaagcgtgtatccttttctaaataa

SEQ ID NO: 18722 - DNA, 318 bp, Zea mays
  Peptide Sequence Number=SeqID_62097
atggcgttcgacttcacgccccgtgcaaccctcctcaccgtgtcggcacgctgcccgtcttcgtctcatctcgttggtgctcctccctccctccctccctccctcggggcctgcttcctccccatgattcagtctgttgcaagatatgtaagtatacacactggtcttagtattgtctatgcatggagtcagggtgtcaatcatgctataatacgtcataaccagcctgaagtttgggcattttgcttgggaaatggctatgctggattgaaggatgctcttggttcaaatgattccagacttcaaagaatttgctaa

SEQ ID NO: 18723 - DNA, 411 bp, Zea mays
  Peptide Sequence Number=SeqID_62098
atgtactcggcttcggcggtggaaagagcgaccgaattttgcttctttgaagcccatgacaacaaggatcttcccaagaactggcaagtccccgatgtgctctccagtattcttatacctcgtttaatcggagccgaaagaccgtccaacacagaggtcccagagggaccaggccgttccaggagaaaggccgaggccccagaaaggaaaaggacgaagggagggacccaaaaggacggaaggaccggcaacagcaagaggagagcagaagacagggagagagccaaagaagagcgaggccgtctcggaggagacccaaggccaggacaagttcacgagacgaggtcgagacgcccattagttcctaaggtgattgacgggtttagcatccgtcattttttacttgcttaa

SEQ ID NO: 18724 - DNA, 945 bp, Zea mays
  Peptide Sequence Number=SeqID_62099
atgccaaatcgggaggggctccccagcgactgcatgtgcacagatgtgagtagtgttcggcctcgccacccggcgcgcgcgcaggcaggcccgctcggcctccgcgtgggcacgagcagagaattgctctgcctccgggcaagggcgcggcctcggcctcggatccggcgcaggggcgggcgcggtctggccccagcacccgtgcatcccggcacggtgcgtgcccggccgcccgacctcggcggtcctcctcgggcgcggctccacgactggctcctcggcgatcctccaggcaagggcgcggcctcggcctcagatccggcgcaggggcaggcgcggtctggccccagcacccgtgcatcccggcgcggcaagggcgcggcctcggcctcggatccggcgcaggggcgggcgcggtctggccccaacacccgtgcatcccggcgcggcgcgtgcccggccgcccggcctcggcggtcctcctcgggcgcggctccacggctcctcggtgctctcatggatggaagggccccctgccagtgcggggcgaggtgctccatcgttggaagggccccctgcctctgcggggcgagccatggatggaagggccccctgcttgtgcttgcgtgctctcagcgatgggatcttgggagaagaggaagcgagagagagggcaggggcagtgatccggaaagggcgagagagatggagcgcagtggcgaggaaaccgcggtcgaggatggaaaggagcgccatagaaggaagccgcgactgctcgaggatggaaaggagcgccgtgggcgggcgggatgcgaggaaaccgcggcggcggggggaggagggtggcagaaccgtgcaccactggttgtggacgtctacactacatacttatgtagtggtagagataaacacataatgacttgcttatggattatcataatctag

SEQ ID NO: 18725 - DNA, 702 bp, Zea mays
  Peptide Sequence Number=SeqID_62100
atggccaacagcaacctcccgcggcggatcatcaaggagactcagcggctgctcagcgagccagcaccggggatcagcgcgtcgccctcggaggagaacatgcgctacttcaacgttatgatccttgggccggcgcagtcgccctatgaagagtgtttttgggcggtattatggctgatgagtctcagcttctatttgcagaattctgttagctatgttgaagggcagtggaaaccggttcttaaggtggcaaggggatacatggcgagccatcccttccaatcatctaggcctaggcacctcaatcaccacatgaccacaatacctttgcttgtactggggatatttgtgacacctaattggtttccttgtggagtttttaagcttgaactctttttacctgaggaatatccaatggctgccccaaaggttaggtttctgacaaagatttatcatcccaacatcgacaagtccaggacttcactgttgcagcttggtaggatatgcctcgacattctcaaggacaaatggagcccagcacttcagattcgaacagttcttttgagtatacaggctctactgagtgcgccaaatccagacgaccctctttcggataacattgcaaagcactggaaagccaatgaagtagaagctgtcgaaacagctaaggagtggactcgcctgtatgcgagcggtgcatga

SEQ ID NO: 18726 - DNA, 666 bp, Zea mays
  Peptide Sequence Number=SeqID_62101
atggactcggagcactggatctcgcgcctggccgccgccaagcgttactacgcggcgcagctcggccacgtcgacgatgtgcccgggatagggacggaggaggtggagatggagattgaggacgacgggggcttggagatggagatggagatggcgctggggctcggggacgcgacgtggccggatgtcgcctgcccctactgctacgaggaccatgacgtcgcgtccctctgcgtccacctcgaggaggaccacccctatgagccccactccgcgaacggtcacaggtctcgcagatacattattcccgagagccatgcaatttctgcattgagccgagatctacggggtactcatttacgggctcttctagggggtggtcatggccacagatcaagcaatgcagtgactacaaacatttccagcgatcctcttctttcgtcgtttggcctgggcttctcaccatcagatgcaccagaaccatcaaaatcggcgtcttctattccagatggcgcctcaatacgtaaggagacaccggttcagccttgggagtcgagtattgattcatctctcacaagcgaggaaagggagcaaaagcggaaacaggccaccggcagagcaacctttgtgcaaggcctagtgctctccactctatttggagactga

SEQ ID NO: 18727 - DNA, 1764 bp, Zea mays
  Peptide Sequence Number=SeqID_62102
tcctttgattctttagtggctgcccttgatacacgtggcacccgggaagcacagctgcgttcaatgttgcaaatgatcgagacaacctttaaggaagctattaaaaggagaagtgcaagtatagaattatctgctacagtgtatccaaagaatggagctactgacatgataagggcaaattatcatagagaggttggaagctcaagcagtactccttttaatgatacatctgatagtgtaacagcatattctgattcttttaaagtagagcttgggcgtaatgattttgagaaggcagctatatcaaaaagggcagatatatttttaaaatggatgtggagggaatgctacaatcaggaagagacatgtgccatgagatacggcaagaaaagatgctctgaattgttgcattcttgtaattgctgctatcagatttacctagccgaagaaagacactgttcttcttgccataagactttcaaatccatttacaatttttctgatcatacaacacaatgcgaagagaaatggagaactgacccttactggaagatgcaaatcgctgattattctgttccaataggaatggcatatataccatcagaagcacttcaaccattttggactgatgtgtatcggaaatcttggagtgtgaagctttatgctaccaaatctattgctgagacattccagcttttgactgttctggaaggtgcaataataccagatcgcctctcttctgattttgaaacaacaagcgaatgtctaaactcacaggttatcgcaccccaaaatcctgtgttaccagctggatttgcttctgtccttccatgggttcctgacactacttctgctgttatgctccgagtgttagaccttgactcagctattttgtatgtgcaaaatcaaaagatggagagggatgatggaggttttatgaaatttccatcaaggtatacagttgttaagagcaaacaagaaacaattccactcgaaccaactggtatggatttgtatgatggaaggtggcttcctggtagtggccgtaggggacgtggccgtggaagtagaggaggtagcaggggaggcaggggccgaagtcgaggtggaaggatcccaagaggtgttagcagctcatcaaggatcgagttcaaggatggcattgctgcttctggtagagcgccaaggaagaatgcacgtcgaggtcgaggtcgaggtcgaggtcgtgggcgtcgaactgtcagacctcggcagccatctgtgggcagaggcagatcaattccaaaggaaaatttgatgggaagctttagcatgcttaccagctcaaaggctgccgacattgaggagtctccacgaagctctggcgcagatgagtggggcttggagaccagaatgacatacactgagcgtgacgagaacagttctggatcacgctatgaagataacgaggaaaacggccagcccatggacgaggattatgaagagcaggttccagattactcaatagactattctagtgggtcgaggcaccatgaaatgatgtccatgatggatcacgagactgacgaggaagatgaagatgctgaaggtgatgagaatgtggaagaagatgatgcagaccacgcagttgacgatgccgatgttgagatggacgaaggtgatgatgaaattggtgatgacggagaggatggcggcgttggcggggagatgactccggatgaggatccagatgctacttcatattcatctgactacagcgaataa

SEQ ID NO: 18728 - DNA, 336 bp, Zea mays
  Peptide Sequence Number=SeqID_62103
atggtccgtatcgccgaacatcgtggcgagacctctgaagacttccccatggaggaagaggccgcatcttctacgccacagagctctcgccacccgacgcttggtgctggagccgtgcgccccgcacgacggcgcacgccagtacaggcgtcccgaactccgtcagaagatgcccccgccggagcgctctctatggccagagagttgttgcaccacttaccaagccccatggcctcgctaggggctatgaggcagtggcgcgatgacatggatcgcctccttagcatggcgcacactggctcgatcaagcctaagtgtaacaccctgaatttgggg

SEQ ID NO: 18729 - DNA, 477 bp, Zea mays
  Peptide Sequence Number=SeqID_62104
atgcagtcggcatgcaaccgcgccaagtgggcgcaccccttcgactccaacgcgcccagcatggaggcccaggcccacatgtcatgcaaccggcgcgccggttgctacgtgcgagcaaccgcaccgcccctcgcgccactaccgcgcctccttgactgcggaaccagtaccacgactcgaggcaaccctgcgtatgacccaacagtgccagccaggcacatcgatcatgggtcagtcagccgcgggaggagggaccgggaaaggggacaccccgaaagggatccttctccgcgaaggaaacgggccccgagcccccctactgatcagaggttcgaaggctggcccctcggaggggttcaacagccgcctcagagcgctcgggctccgcgcccactactggtcagaggttcaaaggccggcccctcggaagggttcaacgaccgcctcaggccacttgggctccgcgcccactactga

SEQ ID NO: 18730 - DNA, 507 bp, Zea mays
  Peptide Sequence Number=SeqID_62105
atgaacaagacaccggcactcaaggtgccattacaaacggaactccggttccgtccccgcgggtatgaacaacctccacaacggggagcctgcggggcgacaagctccgtgcgactcgccagcgacctctgcagcagcagctatggcggcgccgatggcctcgacggtggggaagcttcctctagctgccaccacgtcagcaccgacggcggcgtccgcctctccaccaacgccgcaccggcgagcgcgggccgctccaaagcgcaccggcaggtcctcactcccgtcctcgccacgaaagcgaggaggaggacggaatgttgcatcctagctgggcagcaacagttcgccttccccgacatggctggaggatgcctcttccgcagagctggaggatggtttccaccaccagaagctggaagaggaggtggccagccgacccacgcgggaggtagagcctcggctcaccccgccctccgccctagcaaggacgatgaggatccttga

SEQ ID NO: 18731 - DNA, 1248 bp, Zea mays
  Peptide Sequence Number=SeqID_62106
atgacattgttggaaattttggtgagggggattactggtgaggcttttatccccgaatccttgatacctccccagggcatttcgccgctctacgacaacccagggttgcggtcagcggtgctggccctactgccgacccttgatgagagtggtgtggcggtccaccagactggcggccgagacccccaccgggggatccacattcctggtgcaccggttggaggctcccagtcagctgacgtggccccctgggcttctcctgcggtccctagttcctcggacaagggtaagggacctgcaagcagctcctccactccagacgccgccgggaggtcggaggaaaccgaccgccgtctccgcaggggcagtggcagcaacaacagcaggggtggcagcagcagcagcaacgacaacgagcgccctgcttccaaggccactggaaggttcacggtcccaagtcttgatccgccctttgcctgtcagggcctcttcttcttcggcatccgtggacgctccttccctgccgaccgccatgcccaccggatgacgctggtgctgaggtggcgccgtaggacccccaggatccgcctgtcaccgtcaaggcaacaccttcagattcccaagttccaggaaatcgaggcggctatccggcgagagtgggaggcgctcgagaccgagcaccagcgcctcggcgactggtgcacccaactagagaagcgcactaaggcggcgtcctggcaatttgcctcagagcgggccgagcttgagcaggagtgtgagaacttcaaggaggacatccggaaggtgtctgaccgagaggaggaggtgacccggaaggagagaagcttggtcaaaaagaaggaacacttagaccaaaaggaagaggctgttacagtgctccatgataagctgaaagcttataacacagtgctggagaaacagcgggacaagcaggttgcggcagaggcgaagctgcagaagctgcagcaggaacttgccgacaaagacagcgacattgctcgtgccgaggataaccttaaggcgagggaagcttccttggcgaaatgggcaactgacctcacctggcaggaggaggacctcgccttcagggaggagatgtgggcaaggcggaacaagctactggatgagcttgagctcgaggtagaggagaaagggaagcgtttggaggggaaagagcaggcactggaggagcaggtctgccagttccaggcagcgcaagctgtatag

SEQ ID NO: 18732 - DNA, 717 bp, Zea mays
  Peptide Sequence Number=SeqID_62107
atgggcaggcctaagggtaccacgtggcgaggaaggataatgcctcccaggaagcaccatcgggtccggacctccgcagaggaacaccggacccctgtgagtacgagtccggagctcccgaggagacatgacggatcccccgggtgggtcccaggtccccccgagagaggttcgggcctcggcaaggtcctgggacagggaggaccccggcacaggcaagggtccggtgccgacacgtgtccagactttgctctacgctccccgctcaggcggagacccgccgcggtcgcgtggcttgtggctcgtgacataagccaacgggccgagcctgacgcaaggcccatacggctgtgcagtctttgcatttattgtggagaggacacgccgcctgctaccacactgacgagcgatgcgccctctcagcatttaatgcgtcttgtccaatccgccggcagacggcgtcagggtcacccagcagatggcgcgcctgaccagtctgttggggaacagtgcgcccgtgccgagcggcgcacaacactcatcatcccttctacaagaagtttcccctgcacgccgaggatacggagatctcaggcgttagggcacaagaagattgccccagcagcaacatttgtagctccaagcgctatattctttatgtccctgggcccacatgtcggggcccagtacctttgtgcatgcccccttcagctataa

SEQ ID NO: 18733 - DNA, 138 bp, Zea mays
  Peptide Sequence Number=SeqID_62108
atggttcaagcactaatttgtgcacctagttggataaggggctctcaacatgagaaaagtgcacctattcttgtggagggagatgatggtgatatcgagattgtggagttccctaagggtgtggtggcaagcaattag

SEQ ID NO: 18734 - DNA, 564 bp, Zea mays
  Peptide Sequence Number=SeqID_62109
atggtggcgttgctgggccggcggatcggggtggctgcggcagctgccgcgttcatcgccctcgtggcgttcggatccgcctcatcctcgcccaagtccttcgtgaagtccaccgtctccgcccacgacgtcgtcatcttctccaagtcatactgcccgtacgaaatccacaacttggattggatcctataccaaattaagaaaagcccagcacagttctatcctagcaaccatgtgacagttattgtcctttatgtgttcctgtaccaaagcacatactcttatcagcactttatttgtctggagagctacaggtactgcaaaagagcaaaggccgtgtttaaggagcttgagttgaagaaagagccatatgttgtggagcttgatcagcgagaggatggctcagagattcaggatgccttacttgagatagttggcaggcgtactgtccctcaagtttttgtccatggaaagcacctgggtggttctgacgatactgttgactcctacgaaagtggaaaactggctagacttctaaacatcggagtcaaggacgacctttga

SEQ ID NO: 18735 - DNA, 171 bp, Zea mays
  Peptide Sequence Number=SeqID_62110
cccgagtccgagccctgggtcgggcggagcggagttcgccgtcttccggggcttagcccgagtccgagccctgggtcgggcggagcggagctttctatggccggccagtggagcggcgaagtgacggcggtcacttcggctctgttggctgaagggcgcgcgtcaggataa

SEQ ID NO: 18736 - DNA, 369 bp, Zea mays
  Peptide Sequence Number=SeqID_62111
atggaatacctctttgataaaccctgccgccatcagcttgtgaatctcctcgcctataactctgcgcttctcctcgtcgaatcggcgcagaggctgcctgacgggtcgggccccggcccgaatatccagcgagtgctcggcgacttctctcggtatgtcgggcatgtccgagggactccacgcaaaaacgtcggcgtttgcgtggagaaagtcgacgagcactgcttcctatttggggtcgagcccgaaaccgatccggatctgcttggaggcgtcgccgctggggtcgagagggacggccttaaccgtctccgctggctcgaagttgccagcatgtcgcttcacgtctggcacctctttggagagtga

SEQ ID NO: 18737 - DNA, 435 bp, Zea mays
  Peptide Sequence Number=SeqID_62112
atggcgcttcctgtcgacgtggctggcctgtgccctaggctaggcgacgtggaggctcctccgaagccggggtcgagtctgtcttccatggccgaggccgagtccgagcccctgggtcgggcgaggcggaggtcgtcagcagagaccgagtccgagcccctgggtcgggcgaggcggaggtcagcggagttcgtcgtcttccggggcttagcccgagtccgagcccttggtcgggcggagcggagttcgccgtcttccggggctttgcccgagtccgagcccttggtcgggcggagcggagttcgccgtcttccggggcttagcccgagtccgagccctgggtcgggcggagcggagttcaccgtcttcccgggctttgcccgagtccgagcccttggtcgggcggagcggagttcaccgtcttccggggcttag

SEQ ID NO: 18738 - DNA, 432 bp, Zea mays
  Peptide Sequence Number=SeqID_62113
atggatgttttgatgattaggaaccttggagaggaccagcaaggacttgggaaaggcctaggtgttgaggaggagcagcaagggtgcccacaacaggaaggagatcaagtccgactcggctgcggctccatctcaggctgtcacaaagaaggccacaagtatttccaatgcaaggcgaagaccggggataagcaaaggcaaaagctcaatcaaaagtcaacaagccaaatctacaacacctacatcaataaggtggacaaaaaggctgctacaccatatttaatcaagaagaaaaagaatggcaaggtgatagcaatcaaggctaacaagcaagccaacaaaggaaagggggtcaaacacatctgggtgccaaaggaggttatttcaaccatgaaaagcaccaagaaggtttggatcccaaaagagaagtga

SEQ ID NO: 18739 - DNA, 342 bp, Zea mays
  Peptide Sequence Number=SeqID_62114
atggacctccctcatcttcgtgtggacaacggagttgttctggaggatagcttagaggagtttctgtcgacgcccaccccattggcagaatcactagcctttgcagctggagtgtcatttgcagcaccgccagcaccagcagtccaagcccctgcccctgaaggcgacgatccagatgattctggtgacaatgatgaagatgacgaggatgaagaagaagaggaagataacaacaatgaggaagccaatgaagaacaagaggacaaattcatggggatatggcctgtcactgaacattatacctcaatgttcgagacagggcacttccctaacctgctgtag

SEQ ID NO: 18740 - DNA, 459 bp, Zea mays
  Peptide Sequence Number=SeqID_62115
atggatgtaggggatagagggttcaggactctatcagctcatgagtctctgacgccgctatccacctatgctgcttcggtcagcaatgctgctaggcgagctctgtggtctctcagccatacttaccggcaacagctgcatgacatgaagtgcaagcatcttcctctacgtctttgtggagaaagccataccaacattgtttcaggtgaggctggagaagatcgcctcaacacccttgttggtgtggtggcaggtcttaacaccgacctggacagtgctaccctagacctctccaaggtacatttagagctggaggacacacacgcaaggattgcagccctggaagctcaactggaaggaagggatccccctgaagcccaagtccctgccatggctttatcccctcctcgtaagaggatccactatggagaaccaggatccatcaccaggctgctataa

SEQ ID NO: 18741 - DNA, 435 bp, Zea mays
  Peptide Sequence Number=SeqID_62116
atgtggaattatgataccctcataagccctaatggcataaatttgaaaggtttaggtgttactgatccgtcgcgggcccatgccgccctcccctcgtcggcggcgccgaggggtctccgtgctcgcttcgcggcggcactagaagccgcgcgcggtgccccacccgctacgaggcccgagaagctgattgtagtcttctcccatggtgtcagcgtggatatcgcacgggggctagccgaggggttcgaggccgtggaggatgacttgctcgagaagttcattagcgactccgacgaggagaatgagcacgggtgggttgtcgtcagcttgggctcgagtgaggagctcaggaatttcagggcgttcgagagattgatgtcgtggagggtgctagcgaggttttgcttccatcagacgtcgcggtggacgaggtaa

SEQ ID NO: 18742 - DNA, 324 bp, Zea mays
  Peptide Sequence Number=SeqID_62117
atggacgtgaagagcgccttcctcaacgtgccaatcaaggaggaggtgtacgtggagcaacccctaggcttcaaggatgataggtacctcgaccatacctcctcggacctccaggagagtttggctgccaccaacactacgcttgcgattctcgatggcgagctggaggacgccaaccttcatgagggtgtagacgaggtggttggctttgtccttgcccagggcgccgatcgaggagagcgcctcctcaacttccagtcgggctacgagtttggcactggtgacctgccggatgatgtcgcgggtggccctggaggattttga

SEQ ID NO: 18743 - DNA, 177 bp, Zea mays
  Peptide Sequence Number=SeqID_62118
atggatcctaaaagcaaggggaaggtgaccgacaagaaggagaaggagatctcctccaatgaaacacctaagggagcgaccatcgactccgggtctagcaagaaggacgagaagaaggatgaatacaacaaggttagtgacttggacaatgcgaaggaaatatgggataccctctag

SEQ ID NO: 18744 - DNA, 603 bp, Zea mays
  Peptide Sequence Number=SeqID_62119
atgcaggcggcatgcaaccgcaccaagggggcgcaccctttcgacttcgacgcgtccagcatggagacccaggcccacacgtcatgtaaccggcgcgccggttactacgtgcgagaaactgcaccgccacttgcgctagtaccgcgccttctcgactgcggaaccggtgccgcgactcgaggcaaccctgcgcatggcccaacagtgccaaccgagcacatcggtcacgggtcagtcagccgcgggagaaggcgcgacggtcgatatggccaaaagtgggctgacagtaatggcggcggcaggcgagtggaagcagcggtcaagtcgtctgcaggctcacgtcccctcctgggacagagagagaaccctctcccacgggaccgggaaaggggatactccgaaagggatccttctccgcgaaggaagcgggccccgagcccccctactgatcagaggttcgaaggctggcccctcagaagggttcgacagccgcctcagagcactcgggctccgtgcccactactagtcaggggttcgaaggctgacccctcggaagggttcgacagccgcctcagaccactcgggctccgcgcccactactga

SEQ ID NO: 18745 - DNA, 702 bp, Zea mays
  Peptide Sequence Number=SeqID_62120
atggggagtgcccgcgttgcttttgtcttgctgtcgttggaggaacacaacttcgcggaagttggtacctttcagccatcgctcggcttcaaggattttcatcaggcagcccggctgcatccccttgccgatggtcacccaagacgggtgcaacattccgtcctttgtccgggcgacggtggccagccgcaccggggggtctcccaacacgtcgtacgccgcgagggcggcgctcgtgttctgggatggtcccattctcgttttcgtggcgaggacgggagtgaggacctgccggtgcgctttggggcggccggtgcccgctggtgcggtgttggtgggcaggtggacgccgctgtcggtgctgaggtggtggcagctggagaaagcttctccgccgatgagaccgtcagcgccacccgcggaccgacctctggctctttggctttaatatatggttctcgtcccttgagtggggacgtgaacgagagccttccggcgacagcgtccgtcatgggaccatcgctgctgctgcagaggtcgctggcgagtcgcccggagtttgtcgtcccacaggctctccgatgtggaggttgttcatacccgcgggagtggaactggagttccatttgtaatggcaccttgagtgccgatgtctattcattgtggttgtcggggcctgaacatcgatgtatttgggcgtaa

SEQ ID NO: 18746 - DNA, 2526 bp, Zea mays
  Peptide Sequence Number=SeqID_62121
atggaccatggtgcggtcgtgtcatcgcgtggctcgcctccccttcccacgggcacgacgaggatccagcccgtccctttcgtaacagacgccccagatcccgccaagctgtccctcccaagcgtacgatcccatcgccatccaccactggtcggtccactccaccgcccgtcccccgtgccgttccgtgcgtcgcatgactgtcgccgcactccgcttgccgccgcccgccgcagctccctccggccgcgcgcgcctcgtgggggccgccgcgcaccgctgctcccccagctgctgctgacgcggagcggccggacgaggacgacggcggcggcggcgtacccgaagatggcgcggccgccgatcctatccgtcgcgctgccgtctgacaccggccgtgtgctcagcatccagtcccacaccgtccaggggtatgttggcaacaaatcggccgtctttcccctgcagctccttggctttgatgtggatccaataaactctgtacagttttctaatcatacaggatacccaacatttagaggtcaggttcttaatggcaaacagctctgggaccttattgaaggactggaggaaaatcagttgcttcattatacccatttattaacagttgcttcaatgcttacacctaaccaatttgaagttgaactacttactggattgaggatcacctccgaagaagatggtttgacagcttgtaataccctccacagtgccggaccacagaaggtggttataactagtgctcttattgaaggtaagctgctccttatcggaagtcacaaaaaaacagaggaacaacagccagaacaatttaagattgagataccaaagatacctgcatatttcacgggtattattgccattaaaattggtggcatcaagaatggcagagacgagagagacaatcacacaatcaagtgcgcaacatctgcaatgaactgtttcaggaaggtggtgtcagaggtgtttggagtgaccaaagggagcagcggtgaacttaagagtacttggtggtggaccgaggatgttcaaaaggcaataaaggagaagaaagaatgttacaggagcttgttccatgacaggagcgcggtcaacatagagagaatccaagaatcagaggtcaaagaagctttaaagaggatgaaagggggcaaggcgatgggcccggatggtatcctaatagaggtcatggagcgatataaggagcaaaaggacttgcacatggtttttatcgacttggaaaagccctatgataaaatatctaggaatctcatgtggtgggcattggataaggagcggtcactcatgtggggccgcacctatgtgcgccaaaagcgagaggccgcagggggcgctggcagcagcgcgcgcaaggaaggcatggcaaaggaaagcgcgcacaaggaagacatggcaaaggaaagcgcgcgcaaggaaggcatggcaaaggaaaaaccaagcctgcggcagaggggtataacctcgccggagaagacagctatcctcatggaccgaaggtccatgacacctggtatcagctccaggttattctcaccaccaccagccgcccatccctcaccaccaccagccgccgcgccatcagccgccgcaatgccctcccacccgccctctccaactccagatgcattcactcggctcaaagagagttttggccgcttcgcagagcagtgggatcagttcgttgtgatgttccaccgctacaaggagaagacagagaaggaactccaagcagcggtgcagcttcagacggcagcgcgagggttcctggcacgccgccaggtacagtcccttcgtggggagaagcaccttgctgtggcctccagggccaccccatggccgtcatcacacgagcaggccgtggtgcgcctgcaagccgcagtgcgcggcttccttgttaggcgggcggtgcggaagctgcacttgctgatcagctcatcgctgcaccaactagcagcctgcgcgcccaaccaccaggtctcgtctatactttttgaaccccctgcagaagtcgagatctgggtatgcagcccccctgcacggccaaagagggtcgtctccttcattcgggcacctgccttggtgctggacagacccaacataagaacgagctggttcctcctccacctttcatccaacgtgaaggccgcagttcagctctttccttgggatccaggaggacaggaggacatagctgcagttcaaatttatattttagttccacaattattttctcgaggacgagctggtcctcaagggaaggggagatgtcatgggcatcatagggagcggtcactcatgtggggccgcacctatgtgcgccaaaagcgagaggccgcatggggcgctggcagcagcgcgcgcaaggaaggcacgggcgctggcagcagcgcgcgtaaggaaggcatggcaaaggaaagcgcgcacaaggaaggcatggcaaaggaaagcgcgcgcaaggaaggcatggcaaaggaaagtgactga

SEQ ID NO: 18747 - DNA, 576 bp, Zea mays
  Peptide Sequence Number=SeqID_62122
atggcgtctcctgttgacgtggctggtctgcgccctaggttgggtgatgtggaagctcctccgaagccgaggtcgagtctgtctttcgtggccgaggtcgagtccgagcccctggttcgggcgaggcggagaccgtcggctgaggccaaggcggagtccgagccctggggtcgggcggagcggagttcgtcgtctcccggggctgagcccaagtctgagccctgggtcgggcggagcggacccgagtccgagccctgggtcgggcggagcggagttcgccgtcttccggggcttagcctgagtccgagccctgggtcgggcggagcggagttcgccgtcttccggggcttagcccgagtccgagccctgggtcgggcggagcggagttcgccgtcttcctgggttcagcccgagtctgagccctgggtcgggcggagcggagttcgccgtcttccggggcttagcccgagtccgagccctgggtcgggcggagcggagttcgccgtcttccggggcttagcccgagtccgagccctgggtcgggcggagcggagttcgccgtcttccggggcttag

SEQ ID NO: 18748 - DNA, 429 bp, Zea mays
  Peptide Sequence Number=SeqID_62123
atgcgatggcgcgatcccgcggcgaagacccaaccacgacaaagaattcctgttcagccgatgccttgttctcccggcttctcccccgaaagcgacccgtgcacactcacgaatgtcagggaccatgttcccggtgccgagcggcgagaatggtgggattcgacggcggcggactctcgctattcctctctggtggtggctggaagaaaggggcaaagggaggagcacgaggtggggttgggtccgcatttgaagcccgggcgatgtagaatcctgagtagcgaggatcacgcgcggcgcatcaactcgcgccggattccaagcggagaggaggaacatggccacccgacatgtgggcccgcgcaggtcaggggtttctcgcgcgatgaatgggtgacaggtggggtcacggaaccggttattggttaa

SEQ ID NO: 18749 - DNA, 321 bp, Zea mays
  Peptide Sequence Number=SeqID_62124
atggctcaccggatagctcggtctatgcgtggtggcgggcgaccgaagtccggcgacggtgatcctactgttccggtgaggcagggcttcgatccttgcttggagaagcttcacggctcctcaaggaagctgtccaagggctcggttaaagctgagggtctctggaaatggctggccgcggtggccggtgctcgggggctcgggcgggtggcgcagagctcgccggagctaaggacgatgtctagccagcgaaggcttatgggttttgctgactggagccaaagatatggtgtgatgaagtttggtttgtctcactgctga

SEQ ID NO: 18750 - DNA, 495 bp, Zea mays
  Peptide Sequence Number=SeqID_62125
atgggcgcgattccggtcaaggctccgtccactcaagggacacgatatcgcctcgcccgagcccagactcgggcaggaacagtagaccaaggcagattcacgcctcgcccgagggaaaacagcgccgcctgccctgctccgactgctgtgccactcgccagagtgaggccgacaacagctaagtccagcctcgggcgccataggaagctccgcctcgcccgaccccagggctcggcccccgtctcggcctcggaagacggtctccacctcgcccgatcccagggctcggactcgacctcgacctcggaaggcggtctccgcctcgcccgaccccagggctcgaactcagcctcgacctcggacgatggactccgtctcacccgaccccaggcctcggactcagcctcaacctcggaggagctaccgcctcgcccgacctcgggctcggaccgaccacgtcacaagggggcccatcattaccctacccctagctag

SEQ ID NO: 18751 - DNA, 216 bp, Zea mays
  Peptide Sequence Number=SeqID_62126
atgtggtcgttggaaggctgtctgtcgcatggcgcaccggacagtccagtgcgcaccgggacactgtccgactgcaatctagctgacggagagtacgtgctcatccccgagcaaggaactgtccaagaggaagaccaggagccagctcccgagactgccactgaggatctccccgcacccccagcatttgaaggcaagccccggttttatgcataa

SEQ ID NO: 18752 - DNA, 246 bp, Zea mays
  Peptide Sequence Number=SeqID_62127
atgaaacgagctagccacgacgtggactcttttgctgtggtggaaactcgatttgggggaaatgagcaatttgtggactctggtgaacaattggaggcaagtgctggtgctttggatgggtcccttgagtggtggccagtgaatttgagctcgcgcggtggcggtcggaaagaaggaggtgtactggtgcacgcgattggtggcaactaccgtggcaagctcaccggcgatcaccggatgggctaa

SEQ ID NO: 18753 - DNA, 783 bp, Zea mays
  Peptide Sequence Number=SeqID_62128
gcggcgcgtggcgagagggtcgacgacttcggggcgttgaacagcatgctgtctgacccggagccgaccccggcggaggccgtgtcgggggtcgccctggagccgaccccggagactgcgggagacgcgtcgggtgcccccgcatctgctgcggtcggcgaagacctggccccagaggtcgccgaatgcgcgcctgatgcctccgcagctgctgcgccgagtgctgaagatcccgcagcggtggcgacggagacaacagtggaagcaacggcggagccaacagcggaggctcccgcaacgtcagggccgtcgcaggttcaagattttgggcctgcgcacacaaccgctactactaaatttttggcggcttcgaccgcggaagatggtaatgaatgtggtggatctgcatctgagttttttgattgtgctgactctaggagctcggttgagtggactgaggagtcgtcggaggacttggactattttgcggccttggatgtggctgcggcggaggcttcgccgcacgtcgcggacgcaggagatgtgccaggtcctagcaccgggcgacgacggcgaagggcggttgcgaaacgtagagttagtggggcggagggggctcggcttcgtgtgagtggggctggccggcaggaactgttgtctttgccggccgccgtgagtacacgtgaaggggaactgcgaagtctttttgcgggtgaggagcttaggataatgttatttaattatagggagatgggaattattcctaaggttgagccgatgtag

SEQ ID NO: 18754 - DNA, 249 bp, Zea mays
  Peptide Sequence Number=SeqID_62129
atggcgcagtggcttacccggtctacgttcgccggtggtcggagggattccggcgaccgtggactggcctctccggcgaagcagacttcgattcctcgctcggggagcttcaccgaggtgtgctcagtcgtctccgagggtcggacggggttggcaaaggctgggctggccgatctacggcgacaggggctcgggtggccgcggacacgccgtgcacgggcaaacgacagtgagtttgagctccagtga

SEQ ID NO: 18755 - DNA, 342 bp, Zea mays
  Peptide Sequence Number=SeqID_62130
atggcgcagtggcttacctggtctacgttcgccggcggtcggagggattccggcaaccgtggactggcctctccggcgaagcagacttcgattcctcgctcggcgagcttcaccgaggtgtgctcagtcgtctccgagggtcggacggggtttggaaaggctgggctggccggtctacggcggaaggggctcgggtggccgcggacacgccgtgcacgggcaaacgacgctcgcccaagtcgcaaacgtgcgaatcttaggaaaaatccggcgcgagtcttttcctggcacctagggatgtctctcatccgtgagtcgccatggcagatatgccctaggtag

SEQ ID NO: 18756 - DNA, 1251 bp, Zea mays
  Peptide Sequence Number=SeqID_62131
atgcaggtagtcgagttggttccttgcgcccgcaacaagtggggcaactggaatgaattttggttttacgttgctgagggtaccgtcgaaggccatgaaggactccccgtgtctgagatgtgttctcatttttactcagcgtacccgccctttgaagtggcggaggaggatgtggacgagggggcccttcggtgcgccgctggcctgagcagtgggcgcgacttggttgaagaatttgtggcgtacgggatgcctttccatggcggaagggtggtgcggagtcccgccttcgccctgaatctgcaaaaccgtgatccggccgcctttgtgcgtgaggcagaggatggggcggtgcggctcgttggacgttacgtgccgaggatagagggccagcgcagctgggatatccgcgggtcgaatgaccgtttgaacagggtttttgaattaaatcaattgccatatgacggctaccctggtcaagacgatgtggaccgccgtgggaagaaaccggtggtggagactggagacgaccctgcgccgacgaccaccccatcctctaaaaagagaaaattaggtactgctatgggaggacttggggtttctgatggttttgctagagagttgatgaggacgtgcgcggccccgggggaaaggatgtcttcgcccgagctccgggagtcttcggctcggatgctgaggggtttttccttacgggcggaatattgctgctgttgtgtcagcagtgatggacaaggatcgccagggagctgcacagaagcgccggcggctgtcaggctcgtcgaagccaggccgaagaggcagcggggggctgcgaaggctgcggcccccggcggaggccggcctccgctggcggcaaagtcgggcgtccctgcatctagcaaggcgccggaggcaacggcaggcgccggaggctcgaaaccggcgaaggcggtgccgccgtccagcggagtggcggaggtcgcgaaggcggcccgagcgttgccgttgtcgggcaaacgtgtcgccgacttcgccaccgatattagtgtggacgactatctcggtgggtcgggcgaaggccaacttgctatggttgcgcctgccgcggcgaccacgacggctgccgcagtgccgaaggcgaagggcggggctctcagcgccggaggcgaggtgtcggccctcgcggttgtcatggatgaggcgggcgctgcgtcccgccggctgaaggaggtgacggaggcgctaagtcag

SEQ ID NO: 18757 - DNA, 315 bp, Zea mays
  Peptide Sequence Number=SeqID_62132
atggagagtcatgatttccgggcagtaagggaatcacagcttgtgggtggcaatgagaatgatggttttggcattgactatggtaatggtaagtggtattctttccgtttggaaagggttgtctgcattgcaaccactgctcaggagaggatgaatccgtggaaggagacttccaggagttccaagattacgacgagttctaggcgtgggttagcggcaacccccagtcggctgcctgtgaaggccacgtgtatctacttttcttttccgcactttgattattgtaaagactatgtggatgtctcagacatatga

SEQ ID NO: 18758 - DNA, 492 bp, Zea mays
  Peptide Sequence Number=SeqID_62133
atgggcatgagtaacaaacgcaagcgtgagccgactcctccatcggaggacttcggcgactcggaatactcggaggaggagttctcctccgagtccgaggggtctccggctcccgtctctcccccggcgtcgtctgatgattcagacgactcccaggggattgccgcggaagtctggacgtacatccgggccgtcgagcgctccgggctcgagggctcggatgagtcggagttctcctcgaacgaggaggactcggacggcggcgaggacgaagatgacgacgacgacgacggcgacgacgacgacggtggcgacggcgacggtgacggcagcggcagcggcgggggcagcggcggcaagggcagcaccagaggcggcagcagcacaggcagcaccagaggcggcagcagcaagggcagcaccaggggcggcggcggcaacgacagcaccaggggcggcggcggtggcagcagcagcaaggccagtggctaa

SEQ ID NO: 18759 - DNA, 441 bp, Zea mays
  Peptide Sequence Number=SeqID_62134
atgggccgtggctcgtccgcgccaccatcaacagctacatgcgcggcctgtctgcttgggcacacgctcacgtgccactaccacaggggtgacgactacctcgagatcgacatggacataggcagcttggcgatcgccagcgccgttctgcaccttgcgctcggcgccgtcatgttggtcaccatcgaaatggggttcctcgtcgagtcccaacctgaggaggagcttccctggaggctgttcgtcgccgtgcatatcactcagatggagatggacgcagccgagtacgtgaagttgcctcccgatgaggccatgccggagacggcccatagggctagagccggtttcagggcacctgataggctatcatcactggccttagagataccttcaattggatgtgaagaagggcatgaccaaagcgacaacaaagataactaa

SEQ ID NO: 18760 - DNA, 594 bp, Zea mays
  Peptide Sequence Number=SeqID_62135
atgagggaactcatccaaagatttgcattacgcaagcatgggatcatcaagaagctagaagtcatggcccctaagcttgaaatgttggtcgtatgtgatgccactaaggcatatatctctgccccaaacctctccgtggtaagttgggacagtgacactggctacaaccctctgtgccaccacttcgccaatgctgcccgtcacctccacctgctacacttgggctcaaagtgtgtatccgcttctctgatgcgtcaattcgatgaagttgatgtgctgaagctgaagctgaacctcctcaattttaaggagatcgccagttgcgtaaagtccgtcctccgaggctccgctggcgggcccagggaggtctcgctcgtcgtggtgctgcagcaggcggaggccacgctcggcgtcgacctctcccacaaggtgggctttatccgcgaccagctggacctcttcttcggcccgcgcctccagccgccaccgctgaccatgccacagccggcgcctgtcggtgttttgggtccgaccgcacacccggggttgcccctcaaggtgtttttaggagtaggacggtgtcgacgactgtag

SEQ ID NO: 18761 - DNA, 525 bp, Zea mays
  Peptide Sequence Number=SeqID_62136
atgaaggctggggagcaccgggaggataaggagggggaatgttttgtctggtttgggcatggaggtggcctgactccttccggtataaccgttaaggttaggacgtgcgaggaaagaaagagattcggcattcgggtctcacgacgaagtcagatggaggtccgttgccaaatcagtttttgccagaatgaagatggtttccccaagttgctgagagcatgcacggtccgcctcggaatcaggagccagccagagtatgatggtcgtgaattcatcgagcatggcacggagaagtgtgtcgtgcctgtatacattggatccagtccgcaccatgtggaatggagtgtcactgctgctgggcatagattcaaagacacctgccaagtcgtcgctcgcaaggcattgagggccctgtgtcagatctatgaagaagaagtggccgacaccccgctcagattcttttcgccctttcagagagatcgtccagtctggatggccaggatgcgtgcattggaagggcagtag

SEQ ID NO: 18762 - DNA, 3687 bp, Zea mays
  Peptide Sequence Number=SeqID_62137
atggcacacatttttaactctgcaagactgcaacttattggctcttgcactattcaaacaattaactatgtgttgtacaggaatattcttgattccatggctggcacaacaactgttgtaggatgggttgtttcacctattcttaggaaaatgctttctctggtgcagtcctatgtatcaagtcagtacaactggaagtctaatatggtgtccgacctcaagaatttggaggctacattaatggaggtactcctggtagttgatgaagctgaaaggcgacatttaaaggacaggaatcaggtagcattgttgtgccaaatgagagaagcagtttgtgacacagaagatgtgttagataagtttgactataaacttataagagaaaaagttgagcaccaaagcatggctaggagcatagttgcctcttcgctttctcttggtaagcgtttagttggccttgacaagttgagatcagaactacatatggttatcaaaagcatggccagagttaaatcttgtgcagagatgtttgcaagtgttatggcagttgagagcactaactccattaagccttctgattgtgttggaactagagtcactgggtcttttccacgtgaaggaaccatttttggacgaaaggaggaggttgatgaactagtcagttggttgctgcacagaaggaatataaatccatcaaatgatgaaggatcattcactatacaactgcattctatacattcaaaaaaaaatatagagttgcattctattgttggtattggaggcatcggcaagactacagtagctcaaagcatctataacgatcagagaatagtaaacgcttttgataagaggatgtgggtttctgtttcacataactttgacaagattaatctaattaaggagataattgcgcatgcatctgatgataagaacatcaaattgatacatttcaatttcaatatgctccaagaagaacttcaaagaataatttctaacaagaaatttctattagtgttggatgatgtgtggtatgacgagagttatggggaacacattaacagagagaagtggtgggaactgatagctcccatggaaaatgcagtggcaggaagcaagatactagtaacaacaaggatggaattagtagcaaaagtgctggacagcagcagatcattcttacatggccttggacaggatgatagctgggcactcttcagacattgccacaattctattttaagttcttcaacactagagagcattggaatgcaaattgttcggaaacttaatggttcacctctagctctgaatgtcataggaaggcatttatacggcagacacaaagtggcagagtggaatgaagttcttcatagcaatatcctcaattcagacgacatgttaacgatattgcggccaagctatgaaggtttaccagtacatctccagcgctgcttttcttattgcagtttattcccaaaaggttatcacattgatccggaaaagctgatatatatgtggatagctcaggattttattgacactaaaggaagcacaaacaagtctttgaaagattctggaagaagctacttcgatgaattgctgtctagatcattttttcaaatgcttaaacctggcagcgaaacattttacgttatgcatgatataatgagtgacctggcacttcatgtttctcagggtgaatgccttagggttgagtgtgagtctatggagccaatgcctctttatactcaacatttgtccatttatagtgaaaacctggaaaatcttgtgaattgtgatctgccaaaattgcgttcattgatagttttgaacaaatcctggttttgctccaaaatctgtctgaatcatgctatacttggcaagcttaagagtgtccgggtgttggatataaccggttgttgtttagaacaattacccgatgctgtcaatcggttgattcaccttcgttacctagagaaggcatatgttcttatgttatccagcactctcaagcttccatttgttgagtgtgctggagaattccatgtcaatgatgagggaagtctactaggtctgaaggaccttaacatgatccgaggacatctcacacttctgtccctagataaggtgcaaaacaaagaggaagcttctaaggctcatctacaccataaggagcacataatgaagttggagctacaatggggatcgcttaattttgctagttctaccaaacagggtgttgaggtgctcgatgtcctgaaaccacactctgatcttgaggagctaactataagtggatatcctggtgctaggtctccttcttggctggagtctggttggctgagcagactacaatttatttgcctacgtgattgcaacagatgggaggtacttccacctttaggggatctgccattactgaaaactgtcgaaatacggcgaatgcaagggcttagaacacttggtcagaaattctttggccgtgctggatttccatctttggagagattgctactagagcggttaccagaattggaatggtgttgtgtcgataacgaccaagtgtttcagaatctaagacatctatcagttgctggatgtccgaagttaagagaatatcctacatatccttggacacttgaacatatagctattctggacgaggaacgaattcaagttaagacttttattcctagtgctagagtatcaagaactttttgtatcttggtatcaagcttcttccatgtcttacgtgcacatcacctagaatttgtcgaagatatggagatctatgttaaccatgtggtatgcatgtccagagaagtgctagaaaatctgaaatctctccagaatttgaaaatatatggcatacatagggccaacacttgctctgtgattgcaaaattgtgggatgagaatgggtcagctgtgtttccttcatcacttaggagccttcagttagtgcagtgctacctgaaaccatcctatttctccaagcagttgaataacctctcatcacttgagactttgcgcctaataaattgtgacaccattgagatgccctgtccaccagtaaacatgtggcacttgaggatactaaaacagttggtcctttataaatgtgattggatcacctttttggaggggtcagaagcattggtttccctggaagaaatggccataagtgactgttatgacttgaaatatgtaccagatttaaacaatatgccatctcttgagaaattgcatttgagacgttgccctcaagttatgcgtttgtccagtgctgattaccagacaagattgaaggaactggtcatagaatcttgtgatgcactatcatcacttagagagttgcaaggccttgtctcccttactaagcttatcgttgcaaactgctctaagttggaattgctgcctggtatggattccttctgtgcacttgggattctgattattgaggattgccgtcttctgaggtcactaccagagagaggtcttcctgtatcgcttagaacttttgtattggatggatgccatcaagcattagacgagcaatttcagaagggggaaggtccagactggaacaaggttgctgcacttccaggatgcatgcgctatgaacatatggcagatgtcgaagatgagtctgtctggcattcattctataacctttattacttctag

SEQ ID NO: 18763 - DNA, 561 bp, Zea mays
  Peptide Sequence Number=SeqID_62138
atgaccggatggaaaacggccctgcgctttaggcgggcgcgtcgcagcgtgcacggcgtggcggggaaatcggatcgtgaaatcgttattcgcgtacctgaggagagaaagagagagcgagttcgccggcagtcgccgatcgccgtcggtgcagccattctggcagccggcgccaacaccgacgccgacgcaaaggccaaggacgcccctgtcatctcgccgcccttcgagagcatcccggagctccacgagggcgccatgaagggaaacttggtagaggacaagatgaactactccaaggagccgtctcagcaggacctccagccggagccagcagcggcatcggcggaggcggccaacaaggccgtgccaacaccggcagaagctgaagcgagggcagacggcagaggcgcagccgcagacgagcagcaacccggaggcgactccggttccgggagcaggacgaaagggcggcttgttctcaagcttcccctgctgctgaatgctgataagcgagcaacatgcagtggccagcatggtatctctgtaaatcaccactag

SEQ ID NO: 18764 - DNA, 1281 bp, Zea mays
  Peptide Sequence Number=SeqID_62139
atggcccgtcgcgccgtcgccttgctcgtcgccgtcgcgctcgcgaccgtgctcctgcatacggcggaggttgcggcggggcagaagaagccggcgacggccgcgaggcgggaggacatcccctacatccggtgccaggtgtgcgagcggatcgcgcgcgagatctccgcgcaggtcgccaagaagcaccaggctctcccgccctccaagaaggtaccggagatcgagatcatcgaggtcgcggagaatgtctgcaacctaaagaagcaggaggcggattggatgcttcggatcgatatcgtcgagaaaggcgacaagctcgagcttgttgagcaagatgaggaagggcattgcaatgcagaatgcaagaccattgagcgtgcatgtcaggaggtgataggatatgctgataccgatgttgctgagtttgtatacaaaaataacccctcggtcgatcagcttatgaaatttctctgcaaagatctttcgaaagcatgtgccaaggacccaccgccagttccaaaagatcgtgtccctggggaaccatttgcaaggaagccatcaaaggatgctgagatggaaaagatattgagatcaatggagggtatgccgggagccccaagcatgaaaatgtactccagggacgatctgatgaaaaataactttggtactgaagacgacgacgaggaggatgatgaagatgaggatgacaacttcccaaagaacttggggaaagctctgaaaaacaagggctctcaaaagaaagatttgaaacagcaagtcgtgcagcagttcaaggataccagcaagaagttgaaagggcatgtaaacaaggtgtccgccgggacgggctccgtctccgacggcggcggaagccaggaggctagcgccgaggaggcggaggaggaggtggtgagactgtcaccggagctggcgacgcacgacgccatcgacccggtgacgctgccgtcgtcgacgtcgaagcggcgtctgtccatcagcgtgagcaagaagctgagcatgaacatcccggacaagctgcggctgagccggcggaagcacaaggaccaccaccacaaggtggagtcggaggacacgctgtggaagaagggcattatccctggggagaagtgcaggatcccgggcgagagggaggcggagcccgtcgaccccgccacgagatcgccgccggcagcttccgccggcgtcgaaggggagaaggatgctactatgcctgcggggtgtaacgtgcattcaaattcagatgtaattgctctataa

SEQ ID NO: 18765 - DNA, 348 bp, Zea mays
  Peptide Sequence Number=SeqID_62140
atggcgtcgcccttgcaggacagcgcctgcgccgagctacccggcagcaaggcgccggccacgccgccgccgacgcagcccacggagcggctctcgtcgtggggcttgggcagcagcggcggcgccgaggaggaggaggcgggcgaccccggccggatcccggcggcggtgttcgagcgggacgtgtccgagtccaacaaggactggagcatgatgtccacggagtcgatgttcggcctccaggtcgcaccgtcaggcgacttcaccggcttcttcctggcgcacccggaggtcatggacagcggcacgccgccacgcagtaacagcagcagcggggccgactgttga

SEQ ID NO: 18766 - DNA, 2433 bp, Zea mays
  Peptide Sequence Number=SeqID_62141
atgaacaaaaacactggcattcgaagtgccattacaaacggaactccggttccccctccgcaggtacgaacaaccccactccgagggggaaggcctgcggagcaacggaaggccgacgaacggcgcgccgtcacctgctccagcagcggcgacgacgacgacttctgctccggggggccaaacagcggcaacgctgacctcaaggtggatgccgctgccaggaggcccccgcccatgccaaaactcgtgaggcaaggacgggcagaaggccgtagagttggaggtcagtccgtggccggccccggctatcgcgccagcggaagaacctcttccagctgccgtggcagacgccggcgccgcaagcggctccgaagccactcgcgtccgaagaccgggcgcgctgcagctgccagcgccacggacaacaaccgctcctcccccccatcactgagtgaaggagcgggccaccgctcgcacaggggccgaccccaactcggcactctcccctccccagctttggtgatgaaaatccttgaggctgagggaggggcagaggccacagcccggctcgcttcccccaccatcaagccggaggcgggcgggagcagcagtcacgtcgtcagccagtctcacgtcccatccagggacagcaagagagcctcctcccacggcgtgaagacgggaccgggaaagggggataccccgaaaaggacccttctctgcgaaggaaccgggctccgagccccccctactgatcagaggttcgaaggctggccctccgaagggttcaacagtcgcctcagatcgcgtgggcccgacacccactactggtcaggggttcgaaggccagcccccccgaagggccccatggccgcctcaggctactcgggctccgcgcccattactgatcagggcgggaacgatcttgtaacggaatcccatcggagggaggcatcgagccctcggaccccgtcgccaggggaccgggtccggcagatcacccgcagctcaccggaggcaccatgttcggtgcccatcgagggtaacatggcgctctcccccctcctccttgcggaaaggcgacgcaggggcgtatgtaaaaaagccgagtctgtccctgatcgtcctctcgccctgtgcggaggatcgggggctgctctcgcaaactcggctccggccagaccgttgacagcgtcaacataccagcccgagaccttgggccccgaccgtgcacctgggctacggccagttcgcatgagggaacaaccagaccagccaaaagcattacgcaaggcattaagacctcgaaggagtgaaaccactcctccgaggcctcgggggctacacccggcgggtgcgctcgcgcgcacccaccggaacaaaatgcaaccgagaaaggctagtccccttgcaaaaaagtgcgacgaaagcctccaagcgagtgctaacactcccttcgaggctcgggggctactgtcggggaccataattaggggtaccctcaagacgcctaattctcagctggtaacccccatcagcataaagctgcagaggcctgatggggctcggactcgggctaagacccggaagacggcgaactccgctccgcccgacccagggctcggactcgggctaagacccggaagacggcgaactccgctccgcccgacccagggctcggactcgggctcagccccggaagacgacgaactccgcctcgcccgaccccagggctcggactccgctctggcctctgccgaacgacctccgcctcgcccgacccaggggctcgggctcggcctcggcaacagaagacagactcgacctcgacttcggaggagcctccacgtcgcccgacctggagcacaggcccgccacgtcaacgggaagcgccatcatcatcctaccccgagccgactcgggtcacagagaacaagaccggtgtcccatctggccagctccgccagatgggcaatgatggtgccccacaagctctgtgacgacggcggctctcagctctcttacgaaagcagccacgacatcacaccagcagggtgccaagatctctccggctgccacattggcatggccttcttagagaaggttggccgcgcgggaccgaggacgggacaggcgctctcttggggccgctcgcttccctcacccgcgtggacgcttgtaacccccctactgcaagcgcacccgacctgggcgcgggacgaacacgaaggccgcgggatctccacctctctcacgcccgtctccggccacctcgcttctccccccttcgcgctcgcccacgcgctcgacccatctgggctggggcacgcggcacactcactcgtcggctcagggaccccccggtctcaaaacgccgacaatatgtttgctattgctatacttggttatttggtaatcgtgataccagattga

SEQ ID NO: 18767 - DNA, 1026 bp, Zea mays
  Peptide Sequence Number=SeqID_62142
atggctgctatattactatcttcatacatgaacaaaagaaggggatatccaatatacaaatatgataaagaagttcatactggaagcccctctgatgttgagatattagatagcccaacaaatcataagaagaggaaactactccatgtgcttgataatagcgaggtattgatggaagatgaggatggccccattactcaagcagacttacaaaggtggtttgttgatgaatgggataaaagaactcctacaaaagtctcggcggatgggtgcacagacgactttttaatgagtggtctctccacaaaagacatgccagtgactaaagccgatttaatagatgtgctatgtgattacattatgacaatccaagatgataggacattagagatgatatgggtgcgaagtttcaatccttttaagatagaaatatctgtcaaagacctgcagaacatattaagtataaatctagatatgactctaaaatgttttgatatggctgttcgattgcttgccaataaagagtcacgtaggctgaaaggtgaaatcataaagaatagaaagcattatatggacatgcgcttctggagaatgataggttttggtaaactgccaaagtaccatcaggaccctacagcagaagagttaacaaaaacactcgattgttggccatcaatgaactattatatcacggcttgtaaatatgttcttatgccatggaaattcaacggttgctacgcccttttcgtaatagatcatggtaaaaaatacgtcacttttattgactttgcacctattcaagattggtgtaagcatatgccatacaagaggcttaacaccagctaccttatcctacaagctatgaccatgtgggggaatgatagtccaatgaaatttgttagggatgcaaaggtttttcggaggaactttattattgaactgttaagttacgaggaaaattcgtgcagatatgccatcccggcaaatatacaacagagagttaacaatattattaaaaaagattag

SEQ ID NO: 18768 - DNA, 942 bp, Zea mays
  Peptide Sequence Number=SeqID_62143
atgaacaaaaacactggcattcaaagtgccattacaaacggaactccggttccccctccgcaggtacgaacaaccccactcgataggggtgggcctgcggagcaacagaagaccgacgaacggcgcgccgtcacccgctccagcagcggcgacgacgacgacttctgctccggggggccgaacagcggtagcactgacctcagggcggatgctgctgccaggaggcccccgcccatgcccaaactcatgaggcaaggacgggcagaaggccgtagagttggaggtcggacaggcggcgcttccggcaggagcagtgggcgacgcttcgccttcgccgtaataaccgcgccaaaaaagggaccgggaaagggggataccccgaaaaggatccttccccgtgaaggaaccaggctccgagcctccttactgatcagaggttcgaaggctggccccccgaagggtttcgacagccgcctcagatcgcgtgggccctacacccactactggtcagagaggctcgggggctgctctcgcaaacccgactccggccgaaccgttgacagcgtcaacataccagcccgagaacttgggccccgaccgtacacccgggctacggccagttcgcatgagggaacaaccagaccagccgaagcattacgcaaggcattaagacctcgaaggagtgaaaccactcctccgaggcctcgggggctacacccggcgggtgcgctcgcgcgcacccaccggaacaaaatgcaaccgagaaaggctggtccccttgcaaaaaagtgcgacgaaagcctccaagcgagtgctaacactcccttcgaggctcgggggctactgtcggggaccataattaggggtaccctcaagactcctaattctcagctggtaacccccatcagcataaagctgcaaaggcctgatgggtgcgattaa

SEQ ID NO: 18769 - DNA, 1701 bp, Zea mays
  Peptide Sequence Number=SeqID_62144
atggcgccgccgcccgcgtcgcctgctgactcggcccctgatccaaggccgaccgccagcgcgcccgtgcccatcaccgtgccgagcccgcgtgaccacgcgcaccaccaccacctggtagatcgtcgggacacgccgcggggccgcgcgtgggaaccggagcggaaccggcgcggagaggcgatggacggtgctgcagcggtcaagctggtacccggtgaggccgggtacgtcttagaagacgtgccgcacgtgtcggactacctccccgatctcccgacctactcaaatccattacaagataacccggcatactctgttgtgaagcagtactttgtaaacccagatgacaccgtctgccagaagattgttgttcacaaggatgggcccagaggtaaccatttccgtcgtgctggacctcgccaaaaggtatattttgaaccggatgaggtccacgcatgcattgtcacttgtggaggattgtgccctggacttaatactgtgattagggaaattgtatgtggcttatctgacatgtatggtgtcaccaagatacttgggattcagggtgggtacagaggcttctatgctcgcaataccatcaccttgactccaaagagtgtaaatgacattcacaaaaggggtggaactattcttggatcatctcgaggaggtcatgacaccgtgaagatagttgacagcatccaagatcgtgacataaatcaggtctatgtaattggtggagatggtactcaaaggggtgctggagtgattttcgaagaagttagaagacgcggtctcaaagtttctgttgctggcattccaaagactattgacaatgacatccctgtaattgacaagtcatttggtttcgacacagcagtcgaggaggctcaacgtgcaataaatgctgctcatgtggaggctgtaagtgctgagaatggtataggtcttgtcaagctaatgggtcggcacagtggttttattgcacattatgctactctggctagcagggacgtggattgttgcttgatcccagaatcaccgttctatttggaaggcgaaggcggactttttagatacatagaaaaacgtttgaaggacaatggtcatatggttatcgttgttgctgagggtgctggacagaaacttattgctgaaaccatgcagtcaattgggaaagatgcttcaggcaacgagctgcttcttgatgttggcctttggttatctcagaagataaatgaacatttcaagaaaaacaagatgaccattaatctgaagtacatagatccaacgtacatgatacgtgccatcccaagcaatgcttctgataacgtctattgcacactgctggctcacagcgtggtccatggagccatggctggatatactggttttaccattggccaagtgaatggtcggcactgctacatcccattctatagcacgctgggttgcgcgcgtggcgtggcccgtgacgactcaaaaaggcccatgtggaaacagaaagttccgtcagcggtgaccggtgagcagtcgcgttttagcgggacgtttgtcccacctcggaagcggaagacggggaggcagggggaggcgggcataagaaacggcggtgggctacctgctgaagacatctttgcgcttggggcaatgacgcagcttatgaggtcataccgaggcgcgtcaattgctggttga

SEQ ID NO: 18770 - DNA, 1425 bp, Zea mays
  Peptide Sequence Number=SeqID_62145
atggtgtttgttcaacagcagatctcttacagcaaaactgaacacattttacacctgcgtgaaaatattgctcaagatcaagaaaagtcagatgcctcaaaatctcagatggagcaactgaaggaaaagatctgtggtaccgagagagaaatcctgcaaatggaaacaagtttggatgaactgagaagacttcagggacaaattgacatcaaggcaacagagagaagtacattacttacgcagcagcatgaaaagcttgctgcactttctgaggaaaatgaagataccgatgaggaactaatggaatggcaaacaaaatttgaagaaaggattgcgttactagaaacaaaaatcagtaaacttgctcacctgactatgaagcatgaacgagactcagacataaaaaatatatgcactaaacataatcttgggccggttcctgaacatccctttacgaatgatgttgctatgaaccttacaaacaggattaaagcgagactatcaagtcttgagaatgatttgctggataagaagaaatccaatgaagatcagttagatgttttgtggaaacactatcttaaaataaatgctcgctactccgaagttgatggtcagatacaatctaagattgaatccatggcaccatttcctaatatattgagtaattttcagtcaggcattttaagacggagaaaagataaagagaaagaacgcgatgctgcagaagtggagctttcaaaatttaatctatcccgtatcgatgagagggagagacatatgtttcatcacaactgcttagagatgtggcgtttaatggatcttgcatacttgacacctgcattcctttacattctctacttactctttggagtatggaattttctttttttagttaatgagcataaggataaaatcaaaaaggtacttagggggaggaatccttttgagaaggatatgaagaaggagatcaatcaagccttttggagtagcgacagagttgttgggatagcacgcacacccgaagatgcgaaggtgctcataagaggcggtggtgccgaagagggcgatgaacggagtgggatgagggaccgccttggagggaagatggttgaggagtgtgcgggtagagaagttggtggtgctacaaatcatgtgctcggctcgaccacttggatgggaggtgtgaaggcacaacagccgcagctgcacaccgtgggagagaaagaaggtgcgagacatggagttatcaaacttctgtccattatcacactgaatagcctagatagtgtgaccgaactgagtcgacacccacacaaggaagtgagaaagactggtgaaggtgtaagacttaccgtggagaggaaaggtccacaagtagtgagagaagtcatacaagatgaccagatagtatctgtagaagagtga

SEQ ID NO: 18771 - DNA, 1137 bp, Zea mays
  Peptide Sequence Number=SeqID_62146
atgatccagggtgatttattctacttgacaatcgtagaagctcccattctgggaaattccaaagtttgttacaaaggagcagtttgttactgctccgcaacaagatttgttactgctccgcagcaagatttgcttgtaagttcaaagcatggagcaggcaataagtctgagaaggataattccacattattagataaagctggcaatgctcctgttgtcaaagaacaatcaattgatgcccatgcaagcaaaagtagagctcaaaatggaaagaccatgcctaataatggtggatctctagctaacatgtggggccgtgcatcagctaaacctaagccttcaagtaccactaattctatagctgtagaaagtgtttcagctactcttgatgcacaaatatgtgcaaaggaagaagcagatggagatagcaacgatgatgaacagggaataaagtacaagggggaatccaccaatgcaaataacagaaagcgaagagcagtatttgatttttcggatgatgaggaagttgataatattataagcattgcatctcctgaggtaccaaaacagcataccccagaccctgttattgaaactgctgaagacactaaagtaaatcaaaagaacttggaaaataaagatgatgtaccgaacactgaaaaagaaaatagcagcgatcctcctgtcagtaacaagaaacaggattctgcagttgagcctgcctccaccgcaccgaagagaataaaggttttgaagacacgcatagatgagaggggaagggaaggagaccgtcgagttggtgatggtcgaggagacgtcgaggccgagcttgggctatggtgcggcggcgcggcgttctggcggcgacgcgacggcgagctgggtggtggaggcaccgaggccgacgagattgggcagggcagcgacgcggcggagctggcgaaaagaggagaaagggcgacggggcggcgagccagcgcggcggcgcggcctactggcggtggcgcggcgacgcttttttgttgcggtggcacgagggtgatgctggagactttgatggagattttaacgacgacgaattctaagtctaacgatgcgccggttatcttcctgtgggagattgcccatgttatttaa

SEQ ID NO: 18772 - DNA, 690 bp, Zea mays
  Peptide Sequence Number=SeqID_62147
atgagcaccgttgacaagatgctgatcaaggggattcggagcttcgatccggacaataagaacgtcatcaccttcttcaagccgctcaccctcatcgttggccccaacggtgctggcaagaccacgatcatcgagtgcctgaagctttcttgcaccggcgagctgccccccaactcccgctctggccacaccttcgtccacgaccccaagcaaaggaggctttgctttatctctggtgttggggcgcaggcgtttcagaaattgagaactgtggttaatgtagctggcgagacggaaacaaaaggacaaattaagttgcggtttaagactgcagcaggaaaggatgtggtgtgcatccggtccttccagcttacccaaaaggcatcaaagatggagtttaaggcaattgaaagcgtcctccagactataaatccacacacaggggaggttgacggagaggcagacaatgttgacgttattgcagtagacgagggttctccttgtgagtgggctgtggagctcctgaaggagctgttggagccagctcaccttaggcacgccattggctacaacgcgatactcatccttagcattggatcgggagaccacgggttgacgcttggaggactaggagatgaggttgtctccaaggaacacaacgtagtcgaaggtggaccgacagatgtatag

SEQ ID NO: 18773 - DNA, 471 bp, Zea mays
  Peptide Sequence Number=SeqID_62148
atgtgggcatggtgcgctggtcgcgtccacaacgagggagattgccacatggggggcgctggcatcagggaaggaggccgcgatcgcgagggagggggcgctgacagtggcgttgtcgtgggggatggtggcagcgcgcagggcagcgagggcggctgcgatggcggtgccagcactgcagacaatagggacggcgtgcaggacgatgaccgactcatgttgcgggatgacagcgagtgctgggtgcagatcgaggtggggagcaacgccgtcgctagagaagaggaaggccacatgcagggcaacattggcattgcgagagaggtgggccgtgtgcggtgtgccggcggcggcagacagaagcaggggaggagcaggcctgtttgccgacggggagagcacggggaggacgacgacacgtgtgacgacgctggcgccaggaggggcgcgggctgcggtcggtggacatga

SEQ ID NO: 18774 - DNA, 615 bp, Zea mays
  Peptide Sequence Number=SeqID_62149
atggtaccgatccggggaaggagagtcgcgccgcctgtagaggccgcgatctccgacgactcggtcgccgccgccgggagcaccgtcagcgtgtctaagaccagctgggctgccgccgcgtgcgccctcgcccggagcgccgtcggcgcggcggtgcctatctgggctgccgccacgtgcgcccccatggggatgcgcggctgcccactgtgccgcctgctctcgcgctgcttcccttgccagcctgagctcttcgtcagtgttgtcgtcgacagaagcagagctgtcggctctactgccgcgcagagcctcgagctctgctgccgccgcacgtgctgcatccgtcgcctccgctgctgctacttccgctctcgctgctgccagttccgccgccgccagccgtgctgccctcgccgctgtcgctgcagccgctgctgctgctcgcgttcttgtgccgcggcgacctcggcctcctgctggcgccgcgcactcgaagtgaccgagtgtagggacatggcaaccttcagggcaaccttctggtgtcacttctggtcacagctacagcttaagatggaggaccaagagttaataaagtcttcatgtcgtagtatgtag

SEQ ID NO: 18775 - DNA, 900 bp, Zea mays
  Peptide Sequence Number=SeqID_62150
atggagggtttcatgtcctatgcctccctcgtcacctgcgaatgggccatgaatgcgctgtctcgtgagggctgcatacactacgaggtcttcgaccgatcagatgagagctttgaacgcgagatttttaaggctgaagaccctgttgtgaagcagtcagtgggggcactttttgataggatgtggggggcgcatcgtcgggaggctgttagggagcgatccgaccaggcgagagagcagatggagcatgccgaggacgtcgaggactttggaggtctggtcggcgcgccgcccgaagctgcggaggtcaagccggtgctgtcctcggatgccggtgaaggcccatcggaagcgcccgtgcctgctatggccggcgaagaccctgtgtcggcccctgtgccgacggtcgaaggcgcccaggaggttcagggttttgggtctgcgcacgcaaccgctactgacagtgctaattttgtggcggcttcgaccgtggttgctgaaaatgattcggatgattccgtgtctaagttttttgagtctgatgattctcggagttcggttgtgtggacggaagggtcttcggatgaggacttggattattttgcggcattggatgtggctgcggcggaggcttctccgcgtgtgatggatgctgaagttcttcctggtccgagtgctgggcgtaggcagcgaagggcggtggcgaagcgtagagtgagtgaggtggagggtggtcgtcttcgtgtggacagggctggcaagcgggaattgttgtcctcgccggttggggcgagtgtgggtgagggggagttgcgaagtctttttgagggtgaggagctgaggataatgctgtttaactatagggagatgggtatcatcccgaaggttgaaccaatgtaa

SEQ ID NO: 18776 - DNA, 252 bp, Zea mays
  Peptide Sequence Number=SeqID_62151
atgagcaggccggactcctcgccgccgacgagcatccccgcctgcgcacgtggaccagcaaactccgaccatccccgacggcgacccgcacaccgttgtgatccccgagacctcccctacgtcctcgaccacttcaccggagcaatctcgccgccggaaatggttgatggtgtgacttggcctaccaccctaccaccgggttggacggtcgagtgggatgttgctccggcaggagaggaccacaaggagtag

SEQ ID NO: 18777 - DNA, 318 bp, Zea mays
  Peptide Sequence Number=SeqID_62152
atggaggagtcaactaagcatactatgaacattctaagactcccgcactccatcctcgcacactcgattgacattcttagtgatttgagctccgttctagtggtgtatgtccaaaggttcttaaggctgagggctcaagcacctacagtgcctaatgagatcgtcattgaggccatgatcaagcatgttggacgaagggtggaaactgccggccgctttgcctctgttggttcggtgagatcggcgaaggcatcgagcgaagggtggcgtcttcgccttcgccccaacatttgccctccgagggaccagttcgactaa

SEQ ID NO: 18778 - DNA, 866 bp, Zea mays
  Peptide Sequence Number=SeqID_62153
atggactatggggaaggtggaaccagaggaggtcgatctccagtcgagcgccgacaattgctggttaaggtgcgaaattcagcgagccgcctctatgtccctgacattgacatcgctctgccttggctcacgacagatgttggactgtggataggcttgctagaagggggctgcctcatcccatccactgcccgttatgtgatcagcaatatgagacaatcaaccacctgctggtgggctgctcctttgcgcggcagctttggtttgagctgttcaggccctttgggatgcagaaccttcacccaggaccaggggtgtctgcttgtgctgtcggtgttctccctcctgctgctgctgctagtttggagccagcaggggtggggaaccctggctcttatgcggttccacagcatgaagatggaggagataaataaaataatcaaggaactgtggcaacagacatacagaggccaggatattgattacataagcataaattctgattctgagggtgctggcactcgatcatacagctaccgcgttgttatgcaaactggtgatgctgagctggaaatgcgagggcgctgcagtgctggtcagaaggttcttgcttctcttataatcagactagcacttgcggaaactttctgcctgaactgcggtatattggctttggatgagccaactacgaatctagatgggccaaatgcagagagtcttgctgctgcgctgttgagaataatggaagccaggaaagggcaggagaacttccagttgattgtaatcactcatgatgagagatttgcccatcttatcggtcaaaggcagcttgctgagaagtactatcgagtctccaaggatgagaa

SEQ ID NO: 18779 - DNA, 291 bp, Zea mays
  Peptide Sequence Number=SeqID_62154
atggacacagcggcagcaagtcagagccagcgaattatatccacatcgtctacaacaccattaagtgtagtgccaattggtgctgcaaatcgtgatgacacaattaatgtagatgtggacatggacagtgatgacgatgacgatgagccttctggcaaaagggcaaagaagagcacatctgaagtctggcaatatttcaccaagtattgggtgacagtggaggtggatggcaagcaagagagacagaggtgggctaccagtctgaaattgacaagtttattggtgtcctaa

SEQ ID NO: 18780 - DNA, 633 bp, Zea mays
  Peptide Sequence Number=SeqID_62155
atggcctctgctgcgacacctgcgcctttgctccccgtgactagcacgcctgcccggctggacccgccccgcgtcctccgccatgggctacttccgcgtcaaccaggccgccgttgtcgacttctccctcgcggcctcgctcctggcgcaccctttctccctcctcgtccactgaccgacgagaccctagtgctcgcgcgggcctacaccgcacgccgcctcgccgtcggccgggagcacctgcccctcgcgctccccggtgtgcgacgggagctgctcacccgggtcatctcccacctgcaggcgctggcgcagtgcgagctgacgctcaacgccatgggcctcaacgtggcccgcgaggccttcgacgacaccgcgggcgccgccgagcacatcgccgtagggggcctccgggacaacgccgccatagcgtccgcgcgcgccgccgagctgggttcttttccgtccggcactcaagccgccagggcctcgctcgggctcgccctaagcccagccgccatctccggtcacctctcccccgcacctcggaggcgcgaccacctctccccctacacctcgacgtctgcccagatccgtcgctgggctcgctcctcggccttgctgccgctgtag

SEQ ID NO: 18781 - DNA, 480 bp, Zea mays
  Peptide Sequence Number=SeqID_62156
atgcccagattagagaatttcgcaaatggaatgcgggaaatgcttgcaccttttgaacatttggctcggaagaatcatgtatgcccatgctgtgaacgtgctttcacacctgatgaggaggatgagttcgtgaagaaacaaaggatgcaaaactcaagtactgcagagagatctaaagctctggcaatggaatcatcaaatgctgaagctctttttcagcaattggataaacttcggactatctatgatgcttatgtgaagctggtagaagaaaccatacctctagcagagaaaaacttgaatcaacatttggcggatgaaagtcagaaggcgcaggcatttgatgatcctgaaattcgctcccacggggagtcgaacccaggacctgaggagtgctactcagaccacctaaccaactcagcacagagaacaactcgaccaaaccacacattcaacctggctggtccaaggcttgaataa

SEQ ID NO: 18782 - DNA, 1680 bp, Zea mays
  Peptide Sequence Number=SeqID_62157
atgcgcggccccagggggaaggatgtcttcgcccgagctccgggtgtcttcggcgcggatgctgaggtgatggacaaggatcgtcagggagctgcgcagaagcgccaggcggtcgtcaggctgcatgaggccaggccgaagaggtcgcgagggactgcgaaggctgcggcccccggcggaggccagccgacgctggcggcgaagtcggccgcccctaggtccagcagggtgccggaggctgtgaaggcggccgccgccggcggtaccaagtctgtcccggcgggagccgtgaaggcccgagagttgcctccgccgggcaagcgtgttgccgacttcgccaccgatattagcgtggatgattatcttgttgggtcggacgaaggccaacttgttgttgttccgcctgccgtggcgatcgcggcggctgccgtggtgcccagggcgaagggtagtgctcttagtgccggtggtgaaattccggcactcactgccgtcagggacgaggcgggcgctgtgtcccgccggctgaaggaggcattgagtcaggcggctgacttcgcagaccgcgcggcgtcgggggcccttacggcagttgtatctgccgaagtcgagagacttcgggcgcaacatgctgacgccgtccgggaaaagtcggccgccgacagcaagtgccgcaagttggcggataaggtggccgcgctggagggtgagaggactgacctccggcgccaactggcggaggagaggaaggaggctaatgaggccctcgccaaggcgcaacagcgcgcccaggagttggaggagcggctcaacgctctgcagacccgtgtggagagggccgaggcttcgacgcgctcggaggctgagcggacacgcaaacaacttatggactcataccaggagctgagcgcgcggaccgctgacttcgaagtgccagaccgagagcttggacttcgctgcctcgagtggctgcaggaggagttgctggcgctccccgccatcgtggaggggtttatgtcctatgccttcctggtcacctgcgaaggggcgatgaacgcgctgtcccgtgaagggtgccgacactatgaggtcttcgaccaagctgatgaggatttcgagcgcgatatttacaaggttgaggaccctgtggtgaaggaatccgcgggagccctcttcgaccggatgtggggccctcacggtcgggaggtggttcaagattttgggcctgcgcacgcaaccgctactgctaattttttggcggcttcgaccgtggatgatgggaatgaatcggatgaatctgcgtctaagttttctgattttggtgactctgggacttcggttgagtggactgaagagtcgtcggatgaggacttggattactttgcggccttggatgtggctgcggcggaagcttcgccgcgtgctgtggatgctgaggttgtgcctggtccaagtgctgggcgcaggcggcgaagggcggttgcgaagcgtagagtgagtgaggcggacggcggtcggtttcgtgtgggcagagttggcaggcaggagctgttgtccctgccggccgctgcgagtgcaggtgagggggagctgcgaagtctttttgcgggtgaggagctgaggataatgctatttaactatagggagatgggaattattccgaaggttgagccgatgtaa

SEQ ID NO: 18783 - DNA, 252 bp, Zea mays
  Peptide Sequence Number=SeqID_62158
atggtagagctcaatcaaggtgctcggggagcttcacaggaagtcagtggtgccgtgggtgcaatgaatttgaaaatggctcaccatgaagctcggtccacgtgcggcgacggtcggctggagtccggcgatgggctatctgtcttgtgtgagttccaagtgaagatatggtcgggtgtgggagatatggtggcgccaagtcaagtctgtctggactgttcagcccgagacaaaacccatgccaattcatga

SEQ ID NO: 18784 - DNA, 264 bp, Zea mays
  Peptide Sequence Number=SeqID_62159
atggatatggtcagcccctcgccgacgataagaacgccaccgcagcggatggtcgtcggcggctgcggtaaagttctggcagagacttggctctacttcgacaactgcgagtccgagcctgactcacctactaacgaaggcaagccccggcctgttgatcaaggactatcttatctagccacatgccctgagaatgggacaggtggaggatccgtgggaatagtagacatcaaggtttacgagaaacatatgtcgtgtggttag

SEQ ID NO: 18785 - DNA, 1035 bp, Zea mays
  Peptide Sequence Number=SeqID_62160
atggcggtggcggcggcgctgatgattgtaatggcgacggaggctccggcaggcgtggcgctgctgaaggacgacattggattcatgtggggcccggaccacagcttcttctacgacgacggcaacgcgctcgcgctgtgcctggagaagtcccacggctcggggttccgctccaacgccgccaacctctacgcccgctacgacatcgacgtgaagctcgtcgccaacgactcggccggcaccgtcaccacggtctacctgacgacggacgacgtgcggccggggtaccatgacgaggtggacatggagttcctgggcaacgtcaccggcgagccgtacacgctgcacacgaacatcttcgtgaacagcgtcggcaaccgcgagcagcaattccggctctggttcgaccccaccaaggaattccacacctactccgtcgaatggacgcccaagaacatcatattcctcatcgacggcacgccgatccgcgtgtacaagcacgagccctcgctcggcgggacgttcccgacgcagcggcacatgcggctggacgggagcctgtggaacgccgacgactgggcgacgcagggcggccgcgtcaagacggactggacgcgtgctcccttctacgcctactaccgcaacttccgagtcacgccgtgcgcgccgtcgtccccgtctggcgtcgcgtcgtgtagcgatgagccgccggcgccagcggtgctgcaaaagggttttgtgtgggatgctagggcggaggcaacggtggatgttgcatgctttgcctcgaggtcctggcttggtgatatgctgggggacatcttaggcgaaagcctcaacgacggtgatgcccgcgggtgccgcttccctgttgagggcgtcacattccccggtgctgtcttccatggacgaaagcctagtccatctcggacaagcgacggtgacatcctagacgtcactccctttttgatggcgtcgctattgaagtttgtctcggccacgacgtcgacttcatttgatgcttttgcttcttag

SEQ ID NO: 18786 - DNA, 219 bp, Zea mays
  Peptide Sequence Number=SeqID_62161
atggcgcggtcggtccgagcccaaggtcgggtgaggcggagacttctcctgaggccgaggccggggtcggggtcgggcgaggacgcgattcctcccgaggccgagcctcaccctggtgggtggcacagcagtcggagcggggcgagcgacgctgttttcctgtcaggccggtcagtggaagggcgaagtgactgcggtcacttcgcccttgctgactga

SEQ ID NO: 18787 - DNA, 318 bp, Zea mays
  Peptide Sequence Number=SeqID_62162
atggaggcgatcgcgagacagaaggtgggcttacttccaaggatcgtggcattcggagtcctgcccacggtgtggcgtggaacaccggcccctccccaagtccgacgagaaattgggtcaagaacggtggtcttccctgccagccaacgtcacgatgagcactcacgcaccctggcggccctcctcgagcacaccgcggacttcaaacggcgatggaggccaaggacagctgcggcggaggtcgggttcacgctgctctctctgcttcgtttgcctccctgcatgagctggtgtttgcggcgccctgcacttatatag

SEQ ID NO: 18788 - DNA, 114 bp, Zea mays
  Peptide Sequence Number=SeqID_62163
atgcggggcagcaagcgccggatggccgagcaggtttgccagcggctagtctggtggcagcggcgtgccggggatgcagtgccgggcggtgctgggcatggccgcagcgactag

SEQ ID NO: 18789 - DNA, 531 bp, Zea mays
  Peptide Sequence Number=SeqID_62164
atggtgtctcacacgcgtcacacctacgggcgggcccttctcgccagcacccttgatcattcacacgcgcgtgcctggtggctgccctgtgggccccgtctgtcaggagtgtcttcttccgcccgttatgacctcttctgggcgcaccgaactccgagatcctcagtcacgagacaccatgggcccagtcgcgccacccctccaacacggtcgctcgctatgctgaccatgtgggaccgcctctacggggacttcttccccaaccaaacgtcggacattccgagcggattccctacatccgtaaccaatgttggtgtttcgggctacgtccaccaccctcgtagcctttccctggtgcatataagcaagcccctgcactctcccattgggcataggcgagcagaagcactggatttcgcagtgagtactctcgccgggcaaacagagagaaagaagccgccgccatgggtccgtgtccctgttgccgttcgaagcatgacctcgaccttgggtgcttcaacccgcccctag

SEQ ID NO: 18790 - DNA, 741 bp, Zea mays
  Peptide Sequence Number=SeqID_62165
atggggagcacccgcgttgccttcgtcttgctgctgttggaggagcacgacctcgtgggggatgatgaccaccagtttggtggtggggagaagcaagccgggctacggcctctgccccgccctcagcttcaaggatcttcatcatccgtgctggggaggagggcggggcgagtcggggcctgcctccgcgtgggccgacgacccaattcttcctccggcatttgggggagaaaggcatcctccagctctgcggaggaggcgtcctccagccatgcggggttaggcgaactgttgctgccgggccagggtgcagctgtccgtcctccacccgggcgacggccgtgccgcgcgtgggctggctacgtccaggtcctccctgcgtcgtcggctgcacaacacgtcgtacgccgcgagggcggtactcgtgttctgggacggtcccgttctcgttcttgtggcgagaacgggagtgaggacctaccggtgcactttggggcggccgccgcttgctggtgcggtgttggtgggccctctggtgtggaggttgttcatacctgcgggagtggaaccggagtcccgtttgtaatgaaccttcggccgctctgcgatgagctggagccggaggcagcggtgttggcatggacagaggcggagtcggctcgaaaagaggcttcgtcggcccaggagcaggtggcttcccaggccgaggaggtgcagcagcggcagctggagcttggctag

SEQ ID NO: 18791 - DNA, 951 bp, Zea mays
  Peptide Sequence Number=SeqID_62166
atgcaggtggcgtgcaaccgcaccgcggtgacgcaccccttcggcttcgttgcatccggcatggaggcccaggcccacacgtcatggaccgggaaaggggatatttcgaaagggacccttctccgtgaaggaagcgaaccccgagccctcctactgatcaggggttcgaaggctggcccctcggaagggtttgacagccgccccagagcactcgggctccaagccctcctactgattaggggttcgaaggctagcccctcagaaggccgcctcagagcacgcagagtgagggatgactctgggtacgtccgttacatggccgaggcttgggctacgctcccgaggcgcattcaatgcggggatcgcctgacacctcatcctgacacgcgtgcctcagtcagcaaggtcgaacctcgggcgcaacaggaagctctgcctcgcccgaccttaggccttgacctcggaaggaggtctctgcctcgctcgaccccatggctcggcctcaacctcggcctcggaagaaggtctccgcctcgcccgaccctagggctcggcatcaacctcggcctcgggaggaatcgcgtcctcgcccgaccccggcctcggcctcaggagaagtctctacctcgtccgaccttgggctcggaccgaccgcgccacgggggatacatcattaccctacccctagctagctcaggctacgagggaacaagaccggtgtcccatctggctcgccctgggctcaggcactcctccgacggccacgttatcacgtacacagggctcaagcacttctccgacagccacgttggcatggccttcatgcgcgggggcacgcgggggaacgagctaacgaacaggctcactctctctcccgtgaacgcttgtaacccctactacgagcacacccccctgggaccccccgggtccgaaacgccgacaataatgtaa

SEQ ID NO: 18792 - DNA, 207 bp, Zea mays
  Peptide Sequence Number=SeqID_62167
atgaaaacttcggactggaagggtaggcagcagatgtcgcactccagcgcgtccttctccacggatagtgtcacagtcgcctcttcctcatcctccaaccccgcctcttcctcatcctccaccaccaccttggctttctttggagtgccgccgtcagaggaagtcatggtctttttcccggtcatggtttatcacctagaacgcgag

SEQ ID NO: 18793 - DNA, 1608 bp, Zea mays
  Peptide Sequence Number=SeqID_62168
atgcatattgatgacttaagggctttagcacctctgtggctctcaaaaactgaagaagtgaggcaagataagtcccattggtcaaccaatattactggcgatatatatggcatgggttggatcagtgagatgtacgggtattcatttggtgctgcagaagtaggtctacggcacaagataaatgatgacataatgatctacccaggttatactcctagacctggcattgagccacttatcttgcactatggtttgccatttaaagttggaaactggtcattcagtaaattagaacaccatgaagatggaataatttatgattgcaaccgcttgttcaatccacctccttttcctagagaggttgagatgatggaatctgacccaaatataaaacatggcttatttctaagcatagagtgcattaacaccttgaatgaaggactcttgttacatcatgcatctgctggatgccctaaaccacagtggtcaaaatacctgagttttcttaaaagcaggaggttttcagagcttacaaaaccaaaatactggaagggcgaacaggttgacatcataatgaccatgcaacatgttgcattgtccaaggcaaacaatgaatatccaaaaatacacacccttttctctatcgaatgttcatcatattttgactggcaaactgttgggcttatgtacagcggacagcctggtaacatcacgcgcttattgagctgtacggatgaggacttaaagaaaggacatgatcttgctcccacacattatgttccatctatgagccgacatccattgacaggggactggtaccctgtaattaacaaacctgcaggagttctccattggctcaatcatgtgcagactgatgctgagttccttgttatcctagatgctgataggatcatgagaggccccatcaccccatgggaatatggtgcaaaacgtggccatcctgtttctactccttatgagtacctcattggttgtgataacatacttgcaaagatacacactcgcaatccctccgcgtgtgataaggttgacggtgtcattatcatgcatatagatgatcttcggcgttttgctctactgtggcttcacaaatcagaggaggttcgtgcagacaaagatcactatgcaaccaacattactggcgatatatataattctagctggattagcgagatgtatggctactcttttgcagcagctgagattaacctgcgacacatcattaggagggacataatgatatatccaggttatgttccactgcccagggtcaaagcaggagactggagacggtacatagctaagagtggcatccttgaactgggctcaacgcagcacatagctgagagttctggtactgttcagaccataaggtctgtatttgcagtaacaagtggtaataaatctgcagtgcagaggcacgaggctgaaaggtcacccggtttggcgaagatctttgggaaggatttgaaccttgtccggccttcagtcgggctggcgatcggtgtatctaattctaaggtggatgagaggacatgggagcagaggagtgctgttggtggaacctcattgctaccgagtgtctag

SEQ ID NO: 18794 - DNA, 459 bp, Zea mays
  Peptide Sequence Number=SeqID_62169
atgcggcttcatatccttagaggtatgaaggcagaagtcatccttgcatttgcagacatttgcactcatgaggagttctacgcccgagagcgggatgaacgggatcacgacagtggggagcaacggcggcacagccggatgggtgtcggacggcggggggtggcgcaaccgaccgggggtggggctgggtgggacgatggcggtgcggttgtggtggaggccgggggagggcgggggagacacggcggggcagaggaggaagatatgacttatggagagggttttacggtatataggggggtcagggccatagatcttggcgccgaccccccgccacgtgggactcgccgtcggggggtcgacacccaagatctatggcgccgaccccctggcacctgccacgtcccctgccacgtaggaaaaattgatgccaatgatgttggtgccgctttgcgttag

SEQ ID NO: 18795 - DNA, 393 bp, Zea mays
  Peptide Sequence Number=SeqID_62170
atgcagtacctcaacaagtttgatcatttatcccaatatgcaattgaccaagtaaacactgacctgaaaaagaagaactgcttcatgagaggactcaatgatcggctccaaaggaaaatggctacctgcctggatcttacgtacagcaaagctatcagcacagcgctggcagtagaagacaagaatacatgccaaggaaaatccaagggatttggggtgacaggtccaatcagggacctaagaagcgaaccagtcggtgcagtccttcttcttgagacatgccactatgccgaagctttatggatgatagcttcggcactgcttttgagaggatctgtcgaaggtgtttcttcttacaggatcttcggcgacgaagcatacccccaacagtag

SEQ ID NO: 18796 - DNA, 723 bp, Zea mays
  Peptide Sequence Number=SeqID_62171
atggggttgtccaagatccgttggacaaggacaactgtaggtgggcctaatgatttgggaggttctgtcacagctggtatcggagcgaagcctatctcttcagatatgccacgtacgaggaaaaccgcgcgtaagtccactggacctattggcgtgccttgtcatcagttggctccaagacatgaagggagcagcagcggcaacaacaatccaatcgaagacttagaagcccaagtggaacaacttcagacagagttacgtcaccgaaacagggtgtgggaagaagatggtcagcgtataaatgagttggcagctgacgtcagacgcctgcaagacgagcttgctgaacgaggtctggcggtcgattgggccatcaactcacgttcggttgcttgggatcgggaagccaaagctcgtgctcgtgtgacagagcttagtgcgacccttgacaacttgcagatgccatcaaggactcgtgcgcatgacggtgcgggtactttccgtggtcgggaagatactcctaatccaccacctgtgccaccaacgctcgccgaggctatcactgccttggtcaacgcgactgcagataatacccactttttacgtgagatggcgggtaatcaatttcagcagcaaggcggaagggctcctccacagggaccgcgtgaaacttcatatctggacttctccgaaacgcgtcccccactctttgttaaagcttaa

SEQ ID NO: 18797 - DNA, 915 bp, Zea mays
  Peptide Sequence Number=SeqID_62172
atgtcactactgatgatgagtagtaggaaaccaaagcgcactgctagggggtttcttaatgcggctagcaggatactccctggtgcacgttcccttttccaagggagttcttctagccagagcagacaggaggcgttgctgagacacgctcggccagaactacgtgatacacctatcgctctacaacggactaccgatgaagaggaggacgacgaggaggaggtgcaacaccatgaggaggaggacgagcaggcccatgaggaggaggaggtgcaggcccatgaggaggaggacgagcaggcccatgaggaggaggacgaggtgggcatagatgctgaggcggatgacgataccaccgaggctcctgtcgttcgacgaaggggcactcggaagggccactttgtcctacctccgtcagcgcctgcacaatctgaagctcgagtactgatcatctcggttggtgatagccaatgggaagacacgtcatttgacggtcgaggtcaccatagacaggttaatcaagtcttagatgtctacttgactgtagaccagtacatggaggtaactcttccatggatggaacaccggccgcaggcttacaaggctttgtgtgagatatgggcttcgcccgagtggattgagaagtcaaacagaaatcgacataggcagcgccatcagcaggacgaggacgatgatgaggtcgtagtcaaccatacctatggggctgatggacacattcggttggctaagcgaatggagacatacgggcaggagatggttaagaagtatggagaagactacgattggcgaggagcgcctaccatcgacgctgaggttgtgcattcacttggaggcaaggcgcatggacgagttgcgttctcgtggcggctcttcgtcgcaggcgggctgtggtag

SEQ ID NO: 18798 - DNA, 1017 bp, Zea mays
  Peptide Sequence Number=SeqID_62173
atggcctcgtcggcgacgagagaggttctcatgcttgaggcgcctccgccgtccgaccccgctgcggggccctggcgcgcggtgccggacgcggaggccattgacgcgctgccctacatcgacggcgactacggcgatgcggcggtgaagcgggaggtcgatcgcctcgtcgaggaggagatgcgccgagggaagcgcaagcctgcagacttcctccgggacctgccccctgttcccaccgccggattcgaggtgcgatctgcgtttagggttcaaaggagggtcgtgcgggagctagggtttgcagttgtagaggtcacagtgaaccaaaatcatcctatgctttctaaagaatatgaacgtgttagggctggcaaacctccttttatgctagatatgtctcgctatggtttggagccacctccaatgaacaagaggaatgatgttggcgcttggaggcaggctctacggaatgctcagagccagttgcagcatcaaattataaggatagagaatctcgagcttatgctgaaatatggcgtagatgtttggaagctccagaacagacaaatggaatcagttctgtctaggatgcaaaagatggctgtagaatacaatgaaaggatagaaaatgtcaatcgcgagaggaagttccaccagcaaaatactggaggacagctgcatgccctgaaaatggaatggcaggagctgtgtcaaaaaaatatagctattcaggctgcttgtgttgacctgcagaatcatattgatcagcttaaacttgaagcaaaagaactgtacgtgtactctcttcttcccccctccctctccctaggcctgttcatagtctggttacaacccagcccaacccaggaagaccatagcaaaccgcacatagaggcaatgtacatgctggtttgcatcgtgtccaaaccacttaacccgtgggttcatcttcttcctgctgtcggtgcaccttcctatcttattgaagttgctgataccggtcctgccaattga

SEQ ID NO: 18799 - DNA, 174 bp, Zea mays
  Peptide Sequence Number=SeqID_62174
atggagagtcatgatctacgggcagaaagggaatcacagcttgtgggtggcaatgagattgatggttctggttatgactatggtgctggttgtcagcattgcaaccactgctcaggagaagatgaagccgtggaaggagacttccaggagttccaagactacgacgagttctag

SEQ ID NO: 18800 - DNA, 261 bp, Zea mays
  Peptide Sequence Number=SeqID_62175
atgtgcgaccacaggagccaccacaagagcaagatcaaccttcatcctctacacgggcgcaacccgcagctcaagatgaggagcaaggagctcaagatgatagctatgattaagggggagctcatgaagaacaggataaggaggaggaagaagaaggtccatatgtgccacacccatgagttcgcaccaccatacaaagaggtcatctgggttaaagatgcattggaggatctggactgggtgatggctatacaagaatag

SEQ ID NO: 18801 - DNA, 201 bp, Zea mays
  Peptide Sequence Number=SeqID_62176
atggggcagaaggtatcagagctcgaagcttctaagaagaacaaacatattacgtcgctcgaagctaaactgaagcgagagaaggaggaatacgaagctgaaattaataagataagacgaacatctgccgaagcagctgttgaccttagcgctgctcaggtgaaaataggggaccttaatgatgaagtaaatcacatgtga

SEQ ID NO: 18802 - DNA, 462 bp, Zea mays
  Peptide Sequence Number=SeqID_62177
tcacctagagaggctacaccaccgcctgcacgaggagcaggaatgccgacgacaagagcaggagcagcagggctcttctttctcgctccagcaggagatagagtctgtgaggagctgctccctcgtgcttccgctggaggcgcccctgcaccaccactgagcgccccagcccctggagtagctgctggaggagacccggacggtggaggtggcgatagcagctcgagccacgacactgacctttccgccgaccaggagctggaaggatgggttgctcgacccatcactcgcgacgctgctcgcggtcgcggggtctacccggaccgctgggaggcgacctgcttggtgcgccgtccagagaacagtctctggggtgcagagcacccgtaccgctcacctcggcgtggacaccagtcttatggcaaccccgactgcaagcccaagatagacttagaaccatag

SEQ ID NO: 18803 - DNA, 372 bp, Zea mays
  Peptide Sequence Number=SeqID_62178
atgtggtggcacattgaggaaaatagaaggagcgagcgtggcggtgcgaggggaggaacagcaaggagcgagagagttccaagcgacgcgtggatgcagatggcaaggaggacaacgagggaggcagagcaagcgagcgtcgacgtgagggcgtgcaacgcaggaggaggtggccctagaggtcgagggcgaatgacgatgcgagagcgacatcgagggtgcggccacttacagctggtttatagcaggtggagtgaaggcgaagagcaactgttcgttgccgagtttgacgacacaagaagcagagggtgcggttcacggatggatgaagacgtgtggttgattgaaagagagataaagagggaggcatga

SEQ ID NO: 18804 - DNA, 267 bp, Zea mays
  Peptide Sequence Number=SeqID_62179
atgaagccaattgggaaagagaagatgaactcagagcaggattcccccagtttttctgagaggatccttaatctcgaggacgggattctttttaaggggcgccacctcctccctccctctctcaccgccaaacggggcccaccagtcaggcgctccttccacctcgcgccgccgcgccaggcgcgcgccctcgtcagccgtgccgccaccgccacttcagccaccggagagtcgcctaaagccgacgttgtgccctccaacgactag

SEQ ID NO: 18805 - DNA, 435 bp, Zea mays
  Peptide Sequence Number=SeqID_62180
atgggcaagaacaacaagcgcaagcgcgagccgactcctccatcggaggatttcggtgactcggaatactcggaggaggagttctcctccgagtccgaggggtctccggctcccgtctctcccccggcgtcgtccgatgactcggacgactcccaggggatagccgcggaggtctggacgtacatccaggccgtcgagcgctccgggctcgagggctcggatgagtcggagtgctcctcggatgaggaggactcggacggcggcgacgaggatgaggacgacggcgatgacgacgatgacgacgacgacggcgacggtgacggcggcggcagtggcaggggcggcggcgacggcagcaggggcagcaccaagggcgacagcagcgaaggcagcaccaagggcggcggcagcggcaggggcagggccagtggctag

SEQ ID NO: 18806 - DNA, 87 bp, Zea mays
  Peptide Sequence Number=SeqID_62181
atggcgggcggaattgagatcgccggagctaaggagagggggctggccggtgaagattcgaagggcaggaggaggggttgggtgtga

SEQ ID NO: 18807 - DNA, 165 bp, Zea mays
  Peptide Sequence Number=SeqID_62182
atggagagtcatgatctccgggcagaaagagaatcacggcttgtggagacattttggtttacaggtggcaatgagattgatggttctggttatgactatggtgctggagaagatgaagtcgtggaaggagacttccaggagttccaagactacgacgagttctag

SEQ ID NO: 18808 - DNA, 342 bp, Zea mays
  Peptide Sequence Number=SeqID_62183
atgaggactcagataatatgtgttggacatctaatcaccaaaatacttatagaaatttgcctaagggcatatttccctttcaaagcggccaacaacgactacttaatgcagtactacaactatgaagaggccaaggtggcgcaggtgttcgacgatgagtgtgatgacgaccgcatgctctttagcagcgacgttgtcctggtgtcggtgccgagcacctcctctgcgatgttgtctcccatgcaggcgtcgctcctacgtctagtgggggtcactgcagtaggcactaattcgacgcgcatcgccgccgggtcatcgttggtgggaacctatttatcctga

SEQ ID NO: 18809 - DNA, 546 bp, Zea mays
  Peptide Sequence Number=SeqID_62184
atgaagaatttgagaacaagtccccaacagtcgcgaaattcaaactcgaagggcaagcgacacctctggcaggcgaagctggcgccgtttcacctccgccatgataaccgcgtcaaaaaggctggcccctctgaagggttcgacagtcgccccagagcacgaagagtcagggatgaccctgggtacgtccgttacgtggccgaggctcgggctatgctcccgagtcacttcgaccctttactgaccgttctgacaggaaaacagcgctattcaccccgttctgactactgtgccaaccacccgggcctcggcctcagcctcggccacgggagaaggtcttcgccttgcctgaccccaggcctcggcctcagcctcggcctcgggaggaggtctccgcctcgcccgacctcgggcctcggcctcggtagaagtctccgcctcgcccgacctcgggcctcggcctcggtagaagtctccgcctcgcccgacctcgggctcggaccgaccacgccacagggaatacatcattaccctacccctagctag

SEQ ID NO: 18810 - DNA, 422 bp, Zea mays
  Peptide Sequence Number=SeqID_62185
aagacgaggaggtgaccgatgtggggcaacatgtggtggaggtgctcgctgctgttgtggaccttcagggtggcgagggagatgatgagtactacaactatgaagaggccaaggtggcgcgggtgttcgacgatgagtgtgctgacgactgcatgctctttagtagcgatgttgtgctggtgtcggtgctgagcacctcctctgcgatgctgtctcccattcaggcgtcgctcctgcgtctagtggtggtcactgcagtaggcactaattcgacgcacattgctgccagccaagagtcgtcgatactcgccatgtcgtgcgtgttcgacgactactatatcaaggactatggcgtcatcttggcaccagaggtgacgcagaggaggattgacaacaatgaccactcgccatcgtcggggtag

SEQ ID NO: 18811 - DNA, 249 bp, Zea mays
  Peptide Sequence Number=SeqID_62186
atggggtacatgtccggtgatcaagggagtaactgctacgctccccaatttgggattgcccccaaatcggttgaagaacgccgcaaaatcaagctcgtcgtggccagcccaaatcaggggaaacgagccttaggtcctggattcggcttcggccaaactcaagcgccagttgttgaacgaattgggcagtgcgcgagcttgtcggagctctgtgcgtcgccgtccttcgtcgagggcgccgagatgtga

SEQ ID NO: 18812 - DNA, 261 bp, Zea mays
  Peptide Sequence Number=SeqID_62187
atggcggtcaagctaatgcgtcgtaacgtgccaattaagagcatcatgtgtaactctaaatcaccgagcaaactagccatgctcatggtgttattttttctgtattgttacagagtggagaaagttcattgctcgacggttcatgaaaacaaccaagattttcactctctgctcgatttcaagaacaatatcaccaatgatccaaaaggagtcatgaacagttggaccaacaacacccacttctgcagtggaacagtgtga

SEQ ID NO: 18813 - DNA, 1314 bp, Zea mays
  Peptide Sequence Number=SeqID_62188
atggagaagtacgagctgctcaaggacatcggctccggcaacttcggcgtggcgcggctcatgcggaacaaggacaccaaggagctcgtcgccatgaagtacatcccgagggggctcaagattgacgagaatgtggcgagggagatcataaaccaccgctcgctgcggcaccacaacatcatccgcttcaaggaggtcgtgctcacgcccacgcacctcgccatcgtcatggagtacgccgccggcggcgagctcttcgaccggatctgcagcgccggcaggttcagcgaggacgaggcgaggtatttcttccagcagctcatctgcggtgtcagctactgccacttcatgcaaatttgtcaccgggacttgaagctggagaacacgctattggatggcagcccggctccgcggctaaagatctgcgactttggctactctaagtcatcgctgctgcattcaaagcctaaatccaccgttggaactccggcgtacatagctccggaggtgctctcccgccgggaatatgacggcaagatggcagacgtttggtcttgtggagtgactctttacgtgatgctggtcggtgcgtacccttttgaggaccccgatgatcccaagaatttcagaaaaacgattgggagaatagtgtcaattcagtaccagataccagagtatgtccacatatcccaagactgcagacagctcctggctcggatcttcgtcgcaaatcctgcaaagagaatcacaattagggagattaggaatcacccctggttcctgaagaatttgcccagagagcttacagaagctgcgcaagcgaagtactacaagaaggacaacagtgcccccaccttctccgatcaaaccgttgaagagatcatgaagattgtagaggaggcccgcacgccaccccagtcatctactccggtggctggttttggttgggctgaggaagaagagcaggaagatggcaagaggtctgatgatgacgagcagtatggggaggatgaggactacgatggcgaggacgagtatgataaacaggtgaagcatcaaccactcggccgcaacgatcgccacggctgcgcgaatctcgcccagtccggtgggcacagtggggagctcgagctgcgccgccaggggaccgtggagatccactttcaccgcaccggtcatcgacctccgccgtggtgcgctggtctacgtgggcgcgggattctgtatcttgatctcgggcgggtgcactaccaggcgattcgcgggatgtcctcgccgtctgcgttaggggggagaagaagcctctgccgttag

SEQ ID NO: 18814 - DNA, 441 bp, Zea mays
  Peptide Sequence Number=SeqID_62189
atgggcaagagtaacaaacgcaagcgcgagccgactcctccatcagaggacttcggcgactcggaatactcggaggagttctcctccgagtccgaggggtctccggctcccgtctctcctccggcgtcgtctgatgattcagatgactcccaagggattgccgcggaggtctggacttatatctgggccgtcgagcgctcctggctcgagggctcggatgagtcagagtactcctcggacgaggaggactcttcggactcgtccgaggagggtggcggcggtgatggcggagacgacgacgacgacgacggaggcgacggtgacgacggcgacgacagcggtggtggcggtgatggcggcagcaagggcggcaacggtggcagcagcaggggcagcaacggcggcggcaacagcaagggcagcaacaaggccagtggctag

SEQ ID NO: 18815 - DNA, 225 bp, Zea mays
  Peptide Sequence Number=SeqID_62190
atgttttattttgaaaaacagaggcaaatacgcaaagtccagaaaacaagggctactgcaaggctactgcttcgaccttttatcgagtacaagcattctcgtggagctacgtaccaggagatagagttattggtcaccaaatggaatgaggccaagcaacctcgtgagatcaaagccatcttcaccactgttacagtgagtgctgaaaggaacaagtacgtctaa

SEQ ID NO: 18816 - DNA, 2208 bp, Zea mays
  Peptide Sequence Number=SeqID_62191
atggcgttcctgtgtttccacagaacccaagcactgagaatgatcaaggtgttgaaacctttactggttgacttggagagggacgaaacagctcgcttccaccattcaataaagttattttcagactgctccggcaccctagaggccatccgaaggcgtgataacactctgaaccaggaatccctcgagaagacgcaggggttctgcctaaaggttctaaaaaagtggcagatccagtgccgtaggctcccacatgagtatggtcgaggcaagccttgcaccgcaaatgccaaggcgctaatatccagatcttcacgtgagcaagcctcgggtcatcgcattaatttggatgttcctgcgctgaacactcaaaatgaaaagatagtgcgggttccatctaagcagcttgctcagagtcatcgtgtaacaaatgttacatgtcctgtttccaatccaaaacagttatctcatatagtaccctctcctactcatttggatccaaatggagcttctaaaaagagaaaaaaggcaaaagcttggtctaaagaggaggatgcagacctagcagctggtgtgcagaagtatggtgaaggaaattgggaggtcattttgcataaatgtaactttgataatacaagaacgcctgatcagttatctcagagatgggcactaaaacgcccaggaggatcaaccaagcctgctagcactaaacacgcctctgttggctcagaagaaagatcagcaactatcaaggcacttcatttggctgtcggtcctatgcctgtatcatctgcactaagatcaggacgtgaacaaagcattcagcataagtctacagcgtttgctcctaagatgccacaagtaagatctgcagtaaccccttcactggcaccggcactggcgctgccagtccaacctctgcgtgtggcagctgaagttcagtctccgcttcgtcatgggcaacaagctcctggccaaggtgcgccaccaaaattgtcaaatgcttcaaataatacacggaagaagcaagcagctctgccaaattctactttcagtccttcctcaatacaagcagcagcaattgctgctggtgggcgacttgccacagcctcaactgccgcaaatcttttaaaagctgcacaatctaagaatgctgtgcacataagatctctaggagcaacatctttgaaatcttctgcaagctttgatcatgggacacaatctgggggctcccagcacctagaatctctaaatgctagcgcagttaatggtgtttcaggagtttctgcagttaatcaatcagggccacctgctggagcggaaactaagaaggcattgggtaccacactagcacctgtcccatgcgacagcgaggaaaatgaggatggctctgaattttgtgcgattacgttagatgacttattccctgaagatgcaaagcagccggaaactgtggataccaaggcaaagcaaccagaaaccacgggtcccaaggcaaagcagccagaaaatgcagatcccaaggcaatgcatcaagaaaccatggatcccaaatcaaagcagccagatacactaaaggttgggatattagatcccaaagataaagacatgctagagttcgatcaatatgttgcttctcaaggagcacacttaaacacggatgatctgaataaaagcaagtgtaccaacagtgcttcccaagcccaaggtcttgttggcagccagaagaacccactgaaactgactcctgtggacgggaaagctaaccctgtaactgcggctgggagaggtaagcctgtagctgctggagtggcatcaaccggaaagaaggctacaatccctatctcacatttggcagcagggaccccacgcggcatagttgacacagtcaatgccaacgccccaattagaagaacactaacaaggagggcagccgcccttgtccccgctggttgccaagctcctcccccgaagcatgccatagacgcgaaaggctgccaaatgacgaatagcattgccacgtttgtcagttctggagtaccagccagcagccaggctagcacgcccgcgaaagatgctaacaaagcaagcccaccgtccagcagctgccagcccaagccggatagtgtggcggtgaacggtgctatcagggccgtgaagagtgttgctaagaaggggaatctgccagcagcagcagccaggcaatag

SEQ ID NO: 18817 - DNA, 456 bp, Zea mays
  Peptide Sequence Number=SeqID_62192
atgaccgttggtgagggcctctgtcgtatggcgcaccggatagtccggtgcgccagccacgtcaccaggttgttgggttctaaccgtttggagcttctgacaatggggccaccggacaatccggtggtgcaccggacaggtcatgttcactgtccggtgcgccttttggcacctgctctgacttctgcgtgcgcaggtgcactgttcactgttccctgtagcgttgcagacaaccattggcgcggacgaccgttgctccgcttggcacaccggacagtccggtgctacaccggacagtccggtgaattagagcggagcggcctccccgaattaccgaaggtggaaagtttggagtggaactccctggtgcaccggacactgtccggtggcacaccggacagtccggtgcgccagaccagggctgtttttgggttgtcttttgctctttttatttga

SEQ ID NO: 18818 - DNA, 216 bp, Zea mays
  Peptide Sequence Number=SeqID_62193
atggagataatttctggggaagaccttcgagcagattattttctaaaatctactcgaagctcgggggctacacccattgggtcgccgacgagctcgcccgcctgcgcacgtggaccgacctactccgaccatcacccgagacgacccgcacatcggcgtgaccgtcaagacctcccctacaccctcgaccacttcaccggagcaatctcaccgccg

SEQ ID NO: 18819 - DNA, 1044 bp, Zea mays
  Peptide Sequence Number=SeqID_62194
atggtcatccacggtcacgacaccacgctcgacatcatgctcaagctcgtgagtgcgccatatttgtggctgtcgttgggctcgcctactttctcaacaattctttcgccattgaggttgctctgctccccttccttcattttccactcctggttggcaacgaactcctcttccatgagaagatctgttagaaatgggataaagactggcatgctattatactcatttccactggagtcccatatccgagcgctcgaccactactgccctcacgaacagcagctcctgccggtggaagatcatgtcctcggagcacgtcagtcaattattaacctttttcaaatatcattggacctggagtatggatcatttcctgatgtcgacatatatggtgatctggggtttacatttccgtggtgggataagagagatattgtttttgcacttcaaaccaagaaggaaatcagtttttctctcggtgtacagaagcagtacctccggaaaataaagctatttgggtacaaagtgtttcttatttatgcgtggggaactccagttttttcctggaaaatgggccttgtgatgtgtgttgtatcagttattgcttctgttgattctgtcggttcctaccatgcatcgtctttgtttgtggctacccggccaccaacctctggagttgttagcagaggcattggtgttgagggtgtatctacagtcttggctggcctttgggggacaggagttggttctgcaacaataacagagaatgtacacacaattgttgtgactaaaatgggtagtcgacgagcagttggattcagtgctattttacttgtactgctttctattgttggaaaagtcgatgcattcattgcttctattcatgatgttatggttgctgctctcctttgcttcatgtgggctatgctctgtgctctcggcttgtccaatcttcgttaccgtgctactggaagctccagaaacagcattatagttgggctggctttattcttatccctatcagttccttcttacttccagtag

SEQ ID NO: 18820 - DNA, 198 bp, Zea mays
  Peptide Sequence Number=SeqID_62195
atggaggccgcgggttacccctttgctgtttctcccccctttgtgttccgtctcgcgccgacccatctgggctgggacacgcagcgacaattcactcgtcgggccagggaccccccggggtcgaaacgccgacaaaaccatccagctactggacttcccgtccaccatagctcacggctcaaccgccggaccttttaa

SEQ ID NO: 18821 - DNA, 1994 bp, Zea mays
  Peptide Sequence Number=SeqID_62196
ggatccccaaggggccggcgaaaacccccaggcggctgtcaggtttcataaagttaggccgaaaacgcagtgggggattcgaagggtggggccttcgcgggagccaggccccccctggcggggagttcgggcgcctttccatctgcaaaggcgccggagccacgggcaggcgcggaagcctccaattggaggaaggtggtccccccgttcagccggagtgccggaggtcgcgaaaggcggccccgagtgtttcccgttgtcggggcaaacgtgttgccgacttcggcaccgatattaatgtggacgactatcttggtgggtcggacgaaggccaacttgctatagttgcgcctgccgcggcgatcgcgacggctgccatagtgccgaagacgaggggcgaggctcttggcgccagaggtgaggtgtcggccctcgcggttgtcagggacgaggcgggcgcagcaacccgccgggctgaaggaggtgacggaggcgctgagtcaggtccgctgagctatactctctccctttttttgggcatcggccttacgtgtgctctgcaggtggctgacttcgccagccgtactgcgtcgggggccctcacggcagctgtgtctgccgaagtcgagagacttcggacgcaacatgctgatgctgtccgtgaaaaatcggcctccgacagcaagtgccgtaaactgacggacaaggtggccgcactggagagggagaaggctgacctccggcgccaactggcgggggagaggagggaggccaacgaggccatcgccaaggagcaggctgcgcaggcagaggccaaactggcgcgggcggaaggcaatcttgccaaggagctcgccgaacatctgcaggagcggctcaccgccctggagagccgcgtgaagggggccgaggccacgatgcgtgcggaggccgaacggacgcgcacacagcttatggatacatatcgtgagctgggtgcgcggaccggtgacttcgaggtgccggaccgagagcctgggcttcgctgtctggaatgggtgcaggaggagctgcaggaactccccactgtcatgggggggtttatgtcgtacgcctccctggcggatgaagattttgagcgagatgtctataaggtcgaataccccgtagtgaaggaatccgccggggccctctatgaccggatgtggggtccgcacggtcgtgaggtggtcagggagcgggccgagattgtttgggctcaggtaacgttgtccgcgctgcctgacccggagccgacccctgcggaggccgtgtctggggtcgccctggagccaaccccggagaccacggaagacgcaccggatgcccccacatctgctgcggccggcgaagacctgcccccaaaggtggccgaaggcgcacctgatgcccccgcagctgttgtgccgagtgctgaagatcccgcggcggtggcggcggaaacaacggcggaagcagcggcggagccaacggcggaggctcccgcagcgtcagggccttcgcaggttcaagattttgggcctgcgcacgcaaccgctactactgaatttttggcggcttcgaccgcggaaggtggtaatgaatatggtggatctgcatctgagttttttgattttactgactctgggagctcggttgagtggactgaggagtcgtcggaggaggacttggactattttgcggccttggacatggctgcggcggaggcttcgccacacgccgcggacgcgcgagatgtgccaggtcctagcaccgggcgccgacgacgaagggcggttgcaaagcgtagggttagtacggaggaaggggctcggcttcgtgtgagtagggctggtcggcaggaactgttgtctttgccggccgccgcgagtacaggggaaggggaactgcgaagtctttttgcgggtgaggagcttaggataatgttatttaattatagggagatgggaattattcctaaggttgagccgatgtag

SEQ ID NO: 18822 - DNA, 471 bp, Zea mays
  Peptide Sequence Number=SeqID_62197
atgtacgacaagctccggcatagccgccgcttggacgcggtgcagagcggctgctccacgttgtccatcgtcaagcagggggacctcatggtcgtcgccaacgtcggcgactctcggcccagccaagagtcatcaatactcaatatgtcgcgcgcgttcgacgactactatatcgaggactgtggcgtcatcttggcgccagaggtgatgcaggggaggaccgacaacaatgaccagttcgtcatcctcgccaccgttgggaaacagtcctacgtggccgcatgtgccgctatgtacgacaagctccggcgcagccgccgcttggacgcggtgcagagcgactgctccgtgctgtccatcgtcaagcagggggacctcatggtcgttgccaacgtcggcgactctcgggttgttctgggcaccgcattcgacgacgacgtcatcacgtcgtccagctcatcatctacctaa

SEQ ID NO: 18823 - DNA, 279 bp, Zea mays
  Peptide Sequence Number=SeqID_62198
atgggtgacgaagaaggatcgagaggcgttgttgtcgaactcatggccattatcacactggagggcatggaccggacaatggaactaggtggagacccaggcaaagaattgggtgagggcgaggctgaggacaggagaagtccagagatcacagtggacaagatcaaaggcctaaacagccctggacgtggaagtggaaaaaggaagacgagggtgctggccgagctgacaagcatgacagaggcgctcagaggagcctcgggtataggagatgtctaa

SEQ ID NO: 18824 - DNA, 267 bp, Zea mays
  Peptide Sequence Number=SeqID_62199
atggctaggcgtctcccctgcccccgttgccgccatggaggggctcgagcactcgatgacggacaaagagctgctctggcgcacgtcgttcgcctcgggggtgcggcggtacccgttccggcgcatgcccaaggtggccttcatgttcctcacgcacggcctactacctttggtgccgctctaggagcacttctttcatggaaagaggggcgctactccatctacgtccacgcgctgccgtcgtaccggtccaactttacctcttaa

SEQ ID NO: 18825 - DNA, 543 bp, Zea mays
  Peptide Sequence Number=SeqID_62200
atggccccaaacgagattattaaaccagggaatcccaccgctaatctgcgatggtctaaccaagtgattgatcagcttccagctgcagcccagggcatggaacaacatgcttggtggcccgtcagttggtatcccatgtgggcatcggggcggctgaacagatggcagggcatggatccctgcgtcagcgggtatttgggggagcgaggcagcagtcgcggatccaaggacaggcacgagttaaggtgggcaaccagacctgcggcggcggagtctggtgaggaggaggggagcacactggccccagaggacaggcatggagagcggggcgcgcacgacgcgtgggtagtccgccatggtcgtcgatggaagggcacggtgggggaggatttcggcgtggcgcaggggcgacgaagatgcaaggaggatgtgcggcgcttcggtagcgacctcatcgttggaagggcgcgggttagggcgacgaagaccggtgaagatgcggggaggatgcgcggcacttcggtagcgcccccgtcgttgtaa

SEQ ID NO: 18826 - DNA, 771 bp, Zea mays
  Peptide Sequence Number=SeqID_62201
atgacggcgctggggaagggaggggtggcgcggtttgcggccgcgctctttgtcctactgaatctctccgcggcgatcgccgggaagagctactacgacgtgctgcaagtgcccaagggcgcgtccgaggatcagattaagaggtcgtaccgcaagctcgcgctgaagtaccaccccgacaagaaccccgacaacgaggaggccaacaagcgcttcgccgagatcaataacgcttatgaggtgctgacggaccaggagaagaggaagatctatgaccagtatggcgaggagggcttgaagcagttccaaggcgggggaggcggtggcggtggaatgaacattcaggacatctttaggaacttttttggtggtggtggtggtgggatggaagaggaggaagaacaaattttgaaaggtgatgaggtgattgttgaactcgatgcttcattagaggacttgtacatgggcggttcagtaaaggaggttttgtttttcgaggaaggagagcctaagattgatggtgaacctggcgatttgaagctgcaagctctggttggtttcgagaagaccattaaccatcttgataaccatctggtagaaattggcaccaagggcattaccaaacccaaggagatcaggaagttcaaaggtgaaggcatgccactataccaaagcaacaagaaaggtgacctgtatgtgacattcgaggtgttattcccaaaaaccctaaccgatgagcagaagggcaagcttaaggatgttctcgtgtag

SEQ ID NO: 18827 - DNA, 501 bp, Zea mays
  Peptide Sequence Number=SeqID_62202
atgggcgggggcctcctggcagcagcatccgccctgaggtcagtgctgccgctgttcggccccccggagcagaagtcgtcgtcgtcgctgctgctggagcaggtgacggcgcgtcactcgcctgttgattatctgaaccgcttcaccaagcatgagtcgcctcgtgtcaaggtgacgagtgagccgggttgtccgttagcgggaccgacgccggagttgaccagccaaggcctcgggtcaggctggcgcccttggaagatggtcggccgaggccccagaggtgaccggccgagccgcctgctcgggccagattcccggagaagaccctggcggcgatggcccgggcgtggtgatgacgtcgtccttcggagtggaggtcttcggaccgcgtcgccgtccgaggctaggtcgaacctcgccgaagttgtcgtcgatgccgagggtgctgctgcccccttccagcgtcaagacccgagcctgcaggatcgaattgtcttgtag

SEQ ID NO: 18828 - DNA, 1143 bp, Zea mays
  Peptide Sequence Number=SeqID_62203
atgcaggcggcatgcaaccgcgccaagtggacgcgcttctccgactcccaacgcgcccagcctggaggcccaggctcacgcgtcatgcaatcggcgcgccggatgcttcatgcaagcaactgcaccgtcacttgcgccaccaccgcgcctcttcggttgcggaaccaataccgtgactcgaggcgaccaggcacacgacccagcagcgccagcctggacaggcggcgcttctggcaggaggagcgggcgacgcttcgccttcgccgtaataaccgcgccaaaaaaggggttcgaaggctggcccccgaagggttcacagccgcctcagacgccgagcgagggatgaccaggggggaccgagtccggcagatcacccgcaggtacttttgggcgtgcctctgggcccctagccgacccctaacgaacggggcacggacgtccactcagattacccgcttgcagctcaccggagacaccatgttcggcgcccatcgaggaggctcgagggctgctctcgcaaacccggctccggccgaaccgttgacagcgtcaacataccagcccgagaacttgggccctgaccggctcggactcgggctaagtcccggaagacggcgaactccgctccgcccgacccagggctcggactcgggctcagccccggaagacggtgaactccgctccgcccgacccagggctcggactcgggctaagtcccggaagacggcgaactccgctccgcccgacccagggctcggactcgggctaagtcccggaagacggcgaactccgctccgcccgaccccagggctcagactcggctcagccccagaagacgacgaactccgcttcgcccgaccccagggctcggactccgccctggcctctgccgaacgacctccgcctcgcccgacccaggggctcggactcggcctcggccacggaagacagactcgacctcggcttcggaggagcctccacgtcgcccaacctagggcgcaagccaaccacgaggacgtcagcaaggactcaaccgctccgacagctgtccctccgccaggctccgtcgctcctccgacggccacgacatcacaccagctgggtgccaagatctctccggctgccacatcggcatgtacttag

SEQ ID NO: 18829 - DNA, 1431 bp, Zea mays
  Peptide Sequence Number=SeqID_62204
atggggacttaccaatggtcggccgaggtcagacgacgcccgtccacggagcttgggcggaacccgcctgcagtgaattctgagtattacataaaaggaaggaccagggccctcttagagagggttggccacgcggggacgaggacggggcaggcgctctcttggggccgctcgcttccctcacccgcgtggacgcttcgacattcactcgtcggcttagggaccccccggtctcgaaacgccgacagttctgcctgttcccgcctcagccgcggatcccccaccctcttacccaccgccgccgctcgaccgcggtttcgtcgcactccttccttcgatggcgctccttccttcgacgaccactcccatgcccccgccccctcccactcccacgcccgcgcatccaagcagcccccgcatggagcgctccccccgcatcgcacgcgcgccaccatcgctcgctctgcgccctcgccccgcatggagcgctacctccgcatcgtgcgctccgcggagcccttcccacatggattctcaaacagcatgctgcactcccttctatcctcatccccgcatgatgcgctcccaagtcccaaaactgccgccctccatgatgaaaggcccgaggattcgaaggagggacgtgtaggtcaagatgcagatcttcatgaagaccccaatcggagcgtaggcatggccgccgtcgcggagcaggagaaggagctcctctcgtcggtggtggacgacaccagctcctactccggctccgatcccctccacccatggttgtggtacggcaccaccgcctatcgctccatcccggagacgttgacaaaccgtcgggtggtctccttccgctccgggaccgtggcgttggggcgcgtgagccgcaagctctcggtgccgccatcgccgtccatgcggcagaggaaccccgccagggcggtcgaacatctcgatgagcgcgacgtcggggatgtaggggtcgggcgccgccgccgccacatgcagtttggggcctggacccccgctaccgcccccatcccctctggtcatcccgcctcccccatgtcacacacaccccaccatccgctctcctgcccccacccccacaacaacggaggcgtccacaccgagccccacccctcgcctgcgcgtgcacgctcgcccgcgcgccaccacctgcgcccacaggtacgccataccccagccacgtcccctagttcgtgttcgtgttgctcgcccttagtcccctcccccgaccgcgtggcaccactcccctggtcgcattcgcccaacgcccctgcgccggagacgccgcctggtcggtgcctgcttcggtctagcccgtgctccgcgtctctctgggcgccctcgcccttccactcccgccgccatcgtgctcgaccgttcgtgctgaaagtcgcctag

SEQ ID NO: 18830 - DNA, 549 bp, Zea mays
  Peptide Sequence Number=SeqID_62205
atggcgcttcctgttgacgtggctggcttgcgccctaggttgggcgacgtggaggctcctccgaagccgaggtcgagtctctcttccgtggccgaggccgagtccgagcccctgggtcggctttatgctgatgggggttaccagctgagaattaggagtcttaaggatcacaatgctaggtgcaagtgtgcaactaacgtcaaactgggtgcagtggtattccacgagaccgcacgtcaaactgttgacttgccttccacagtccacgtcaacgcacttctccgtccattgctgaagtgtaaccacgtggacccaccccattggtcagagagccgatcatcccgcaccctattggtccacgtctccgctccacgtcccccgcgcgcttcgctcgcgaataggcagacacccgattccttccaggcagctttaaacgcaggaaccaaaaggccacggcgggagacggagaacggcgacgccggcggcgaggaggaggagggatacaacggcgagggagaagctgtctctctccacgcgtgggagcgctaa

SEQ ID NO: 18831 - DNA, 297 bp, Zea mays
  Peptide Sequence Number=SeqID_62206
atgatagttcaaaaatacttaataagaagcaataggaagaaaaaggggaatttgggagaactagataatgtacaactaaaaccttctaagaatctcatgaaacctaaagatgtaattaaagattgtaagttcattcaaaacctcaagaatgaagactgtaatctcgctgacggggagtacatccttgttctggagcaaggagttgctcaggaggtagtccaggagccagcaccagagcctgccatcgaggatctgcctgccccagctttggaaggcaagcctcggttttatgcataa

SEQ ID NO: 18832 - DNA, 357 bp, Zea mays
  Peptide Sequence Number=SeqID_62207
atggctagggtggccggtctacggtggttgggactcgggcggctactggcacaccgccatgagtgcttgtatttagcaagggccttgggtaacacctggggtgttacagccctcccccttaaaggaatctcgtcccgagatttgggtagggatcctttagaggggtaccaagaaggtgtgatgattcaaagggcaggtgggggtggtgttttgggttacgtaccgactccttttggcagaaagtcggggaagcgagaacgtagaaaatcctcagtctccgacgtagcctcttcttctgtgtggttgctccttatcttatacattcgaattgaccttgctcgtggtgatcttcctatg

SEQ ID NO: 18833 - DNA, 162 bp, Zea mays
  Peptide Sequence Number=SeqID_62208
atggtgggtacaagtgcggtcactgcacggcggcagccggggtcagtggagcattgtaccatgcaggaattggttgatggtgtgacttggcctaccaccctgccaccgggttggacggtcgagtgggacgtggctctagcaggagaggagcatgaggagtag

SEQ ID NO: 18834 - DNA, 543 bp, Zea mays
  Peptide Sequence Number=SeqID_62209
atgacgaatacggccggatacagggtcatcccatatcctaccctaatgggcaagaggggcaagggatggcctcaccacgctgacggcaagcacaagcgtcctccaagtccacccttggaggactttggtgactcggagtattcggaggaagtttcctccgagtatgaccggtcgcccactccagcgtcccccgtggcgtcgtccgaggactcggacgactccatggggctgtccaccgcggcctggacgtactggcgatccatcgagcgcgccgggatcggtgggtcggatgactcggaggagacctccttggaggaggtggaagactcctccaactccgaggagtggagcaacgacgagggcaacgacagcagcggcgacgacgatggcaagggcggcggcgacgacgactacgaagatggcaacaacgagggtgatcgcggcggcgacagcaagggcgacggcaagggtgacggcagcggcagcggcaaaggcgacggcaagggcgacggcaaggccggcgacataatgctcctggcgtaa

SEQ ID NO: 18835 - DNA, 117 bp, Zea mays
  Peptide Sequence Number=SeqID_62210
atggtcatcggcggggtcgcgttccttgccggtgctgcggtcagcggcggcgccgtcaacgtgtacatggccatcttaggtagggcactccttggggtgggcctcggatgtacatag

SEQ ID NO: 18836 - DNA, 180 bp, Zea mays
  Peptide Sequence Number=SeqID_62211
atggtgctgtcctgcgtcaccgcgactttgggtggcgccatcttcggctatgacctcggaacctccggtggcgtgtcatccatggggtcgtactcgttcctggaggagttcttctcggacgtgtaccaccggatgaagggcgacgtgcgcatcagcaactactgcaagttcgacagctag

SEQ ID NO: 18837 - DNA, 621 bp, Zea mays
  Peptide Sequence Number=SeqID_62212
atggatcccaacctcaaatccatgttcgaggagatgatgagattgatggggacgaaagttttcaaggaaatcgccaagggtttcgctgatcatgatgcaattctgaatcagagatttgccgatttatctgtggctgaggagaaccgcaacgttctcatccaagccctagaggaagctgccaccgaatttgatcgatccttcactgcatggaagccggagatcggatcttcgaggtctaacatccgcctagagatctccaagctcaacaagttctttgagcgcgatgcgtgcgtcgactccgcatcccagcctggcgttctcggcaccgaatcggctccttcgcgacagcctgctggatcgcgcgctgatgggccaatcgaccaccgcactgacaatcatacccgggatgatgagtctggcatccgttcttctattttgatgcaacagcctctagacctggatactgcttgtgtgctcgcctctttgcaggaagaagagtttatttcaacaaagaagcctgagtacaagagacaagttgatcctatttattcagctaaatcagagtactggccaacggctaaacctgcaaatccattgccttccccaaccatctctagatga

SEQ ID NO: 18838 - DNA, 348 bp, Zea mays
  Peptide Sequence Number=SeqID_62213
atggccggaatggctcatcggagtttctctgtcccgctcgaggctttctcaccaccgttctcccctctttgcccgtggattcatggcctcttccccgccattgagtttgccgtggcaccctcttcccctctgcccaactctggtgaccctggagccaccctagctcgcgccagcctcaaatccggtgacctcaccgccgcggagaggagcagcgccgcccgcagccatctgttaccccatgacaaagagcagtccgaggttcctgagtgtgttgttgcagatctccttgaccaaaaacctggtgaaggcaagtgtcctctgacctattacgtcctacatactttatga

SEQ ID NO: 18839 - DNA, 774 bp, Zea mays
  Peptide Sequence Number=SeqID_62214
atgccccctgcaccacctcagggcatcccaggtgctggaggagaccctaacggagacaacgacgacgccggtggtagttcgagccacggcacggagctctcggaggagccggagccggagggatggatcgctagacccatcactcgtgatgcctctcgtgggtgtcacttccacgacactctcgacaccctactgcgtcgggccttcgaccgacacacttggtctatcgagtaccgttgtgtagtctaccagcatcgtcgcgggttatacctggaccagtgggaggctacttgtttggtgcgtcgtccagacgatgatctccagggtgtagaagccttctcagagcactattctattactgagaaggatactgcagaggcagccatgcaagatgcagcacgacggacactttctcagtattgcttgttgttcagcggggtagctgatggcctcgacctgaagtactaccctcgtcgttcgaccggtagtgctagaggtgtgattgcctcaccagttggtgagggcaatcccaagctaaatagcatggtcaacttggctgccgtgctcaacacagagttggaccacgcccttgacgagttgggcaaggttcgggcgaaggttgtggaattgcgtgctgagtgcgcagcacgccactatctggatggtggttctcccgcccctgttaggattcagcacccttaccgatcactgccccatggtcgcttcgactatggtgccctagactacaggacccacatagatttagatccatag

SEQ ID NO: 18840 - DNA, 219 bp, Zea mays
  Peptide Sequence Number=SeqID_62215
atgaccatcgagcagatgttcttgatgcagactcaagcggtccaggcatatgagacaaccgatcaagccaaggatggaggcaagaagagcttcgaggtaccgagtgcacgggagaaggtcaaggagaccaggaacccaaagccaggagtgaagaagaagacttgcaaagtcaaggttgatcgagttaagagttatggtgcatcaaggatcactacataa

SEQ ID NO: 18841 - DNA, 252 bp, Zea mays
  Peptide Sequence Number=SeqID_62216
atgggtgttactggtatattatctgattctacccatgatgcagtcacaaaagaatgcgttgctctagtatcaaataagacatttgcagaatggtactcgactgaaaacgaagacgggatgcctggttgctctgacgctggtattgatttcatccttgctggttgttctgacggtactactgctgaggaaactgcctctggtactgctgctgctggttctgatgctgatgctggtgctggtgaccttgcttga

SEQ ID NO: 18842 - DNA, 237 bp, Zea mays
  Peptide Sequence Number=SeqID_62217
atggcggaagaatcggttggttcggccatgaccagctggggcaacgatgataggtggggccacgagtgcagcgacagagcgaacgcgcggcgcggagtcacagcggctggcatgcgggtcccgcagagcagcgagggaaggaaatcacggtcgacgcgcgtgaggctgccctgtgggcccaacgtgtcggcgcgcgccagcggacgcaagatgggctgcgcgggtgtgaatggatag

SEQ ID NO: 18843 - DNA, 588 bp, Zea mays
  Peptide Sequence Number=SeqID_62218
atgggcgtgtctgacttctgcgcgcgctggcgcgcatttaatgcgctgcaggaggggctcaagttctcctcctcgaggttcaactaccgtgccgagctgcgccacatctccctcctgttctgtttggacattccgacgctggagacgtgctgcgccgcggacttctctcgcgatgcctggttgggacggtggacgcggctcgccaagaacgacaactgcgaggacattgatgcagtggcgcggtacatccgcgagatccacctccgccggatccccaacccccatccgcacaacagactcaaggcaccacccagggcctctcctgcgccagcaccaccacccccgttgcacgatgccacccctagcccccgcccggagagacgccgcgccacagctctctgggcaccccgctcacgatccacccgtgcctgcctcacctatgctcccctgcatcgctcgcctctcccaagtgctcagatccacgaccgctgcttgcctgcttcacgcccccaatcgccacagcatcgagatcctgtggctccacctccactcatggcggtgtggacgcctcgaggactttgcctctga

SEQ ID NO: 18844 - DNA, 207 bp, Zea mays
  Peptide Sequence Number=SeqID_62219
atgcggcttcatatccttagaggtatgaaggcagaagtcatccttgcatttgcagacatttgcactcatgaggaatatatgaagtgtgacattactatgttactattgtggtttctacctgcgaggtacttgatacatgttgggaatgaggggagtagcagcacgtccactttcactctcacaaacgctgcccaggcgcagccatga

SEQ ID NO: 18845 - DNA, 660 bp, Zea mays
  Peptide Sequence Number=SeqID_62220
atgggggtcttgggtgactcgcctcgacacgctgatggtgtctgccgcctcgccacatgggagtttggggaactgtggtgcaggaccgtcagcggcggcaatggctttgtcgtaggggcacagcgctgccgccgcatctcggcttgtgttgggggaaaccacatggaccgtccgacctggtgtaagttacaagaaatagtcgacgttgcggtgaggagatgggtaaatattttatgcgttcaagagaccaagtggaaaggacagaaggcaaaggaagtggaaggtataggcttcaagttgtggtacacggggaatgctgcaaacaagaatggagtaggcgtcttgatcgacaagagccttaaagatggagtagtagatgttaagaggctaggagatagaatcatcctagttaaactagtcattggggacttggttctcaatgttatcagtgtgtatgctcctcaagtgggccttaatgagaactcaaagagggagttctgggaaggcctggaggacatggttagtagtgtgccagttggcgagaagctcttcataggaggagatctcaatggccatgtgggtacatctagcactagtttcaagggtgtgcatggaggcttcgactttggactaggattcaagaaggagaggaaatcctga

SEQ ID NO: 18846 - DNA, 141 bp, Zea mays
  Peptide Sequence Number=SeqID_62221
atggccgtgatgggttcaacatcggaaaagatgtacctctgccaggtgaggaagcaacaaactttggttgtttctgttccatggtggttccaaaagatgaaaagcaagaatgatgctgcgggaggaagagttcctccataa

SEQ ID NO: 18847 - DNA, 402 bp, Zea mays
  Peptide Sequence Number=SeqID_62222
atgaagctcatcgtgccatttgattgcactacatcgccgtggtttaggcggaacacccgccgccgacgagatcacccgcctatgcatgtggaccggacgatttcggccacctccaccgtcgagccgtacaccgctgtgaccgctagggcctcccgccggacctctcttgccgccggtagagtttgccatttatttcaccttgtgcttaaagttaaagaaaatagaaaagactgcaacctcgctgacggagagtacgtccttgtgccggagcaaggtgttgctcaggaggtagccccggatccagcaccagagcctgcaccagaggatctgcctgccccagctttggaaggcaagccctggtttatgcataacctgttatcaatactattttactatgcttaa

SEQ ID NO: 18848 - DNA, 747 bp, Zea mays
  Peptide Sequence Number=SeqID_62223
atgacttctcacggatccacggacgaagggaatgcacagtcccacactgacggacttgcacgagagggtttcccccgtattttgtgggaggtacttcagggagctggttacatgacgcctcctcagtatgcggtgcagttgttcgagaagaaccgagtgccccgctgtagggtaaggatgaccctggagcctcatcccctgcagccaggctggcgttcgctgaactctgagtcttttggatatcgggctgaagatactattgaggcgattgctcttcacgggctgaccaccttttgcggattccaccccttggagctgtccactcacgccattggtttgttccccgcggaaaaggaggacgacccaatgtggaaggatcgagtggagcatgccaaggatatttgggctatctacccaggccagactgctcacttgacggtgcggtgcatgaatgccctgtatcgtctgcaagtgatgcgaggagaggccatgtctcatctgatggcactattggaggctactaagatcactctggataacagagaggagcatgtggttgacttgtccactgagatggtagaaaaggatctacaagtggagcagttgttagatgagattcacgaacttgaggagctagtgggaaccagggagaacaccattgaggttctcgaagatcagcttatcaatactcagcagcagcttgcagaggctaaccaacatctggatatgcaccaccaggagatctag

SEQ ID NO: 18849 - DNA, 348 bp, Zea mays
  Peptide Sequence Number=SeqID_62224
atggggaagcctatcccatcactcatcatgctcctcctcagccgaggcagggtcccactcgactgtccaacctggtggcaaggtggacggccaagtcactccagcaaccatgtcctccagagaacctgtaaaattatgccacaagcaaggctgagtatactaatactcagcttgacttacccgcagcatggatcaagcagtctcattagctgcgagaagcagacgattcgaatcgagtttttaaaccttgcaagtgaccgcacttgtacccaccataaccggaatgggagaacacgtctcaagtcgcgtgaggagggcaatctgcgggcaagttcactcaggtactag

SEQ ID NO: 18850 - DNA, 612 bp, Zea mays
  Peptide Sequence Number=SeqID_62225
atgcagcccggctgcacccctccgccggcggtcacccaagacggtgacctccagttcgatggagggggaaagcgagccgggctgcggcctctgcccctccctcagcctcaaggattttcatcactagtgctggggaggggagtgtgccgagttggggtcggcccctgcgtgggcggtggtccgctccttccctcagtgatcggggggaagggcgtccgccgttcatggcatgggcagctgcagcgtgcccggctctctgagccgagcggcttcggagccgctcccggtgccgccttccaccacggcagctggaagaggttccgccaccgacgaggttgccggcaccacccgcggaccgacctccaactctacggccttctgcccgtccttgcctctcgagttgggggcatgggcgagggcctcctggcagcagcatccgcactgaggtcatcgctgccgctgttcggccctctggagcagaagtcgtcgtcgtcgccactgctggggcgggcgacgacaagccgttcgtcggtcttctgttgctccgcaggcctccctagtcgcgtggggttgttcgtacctgcggaggtggaaccggagttccgtttgtaa

SEQ ID NO: 18851 - DNA, 285 bp, Zea mays
  Peptide Sequence Number=SeqID_62226
atgagcaagaacacaagagacacaagatttatcccgaggtttggtcacaccaccaaggtgccctacttgctcgttgaggcgcccacaaagagccgggtctctttcaaccctaatcctccctttgccgaccacaaaggtcaagcccacacaataatctttgctcaaacgagcgggagagaaaaccccagctcaactgcccggaggcaagttcagctggtgtatggtcaaagaggttcacagctgaagttgagaaatctcaactcagctgaagttcagctcagctga

SEQ ID NO: 18852 - DNA, 2784 bp, Zea mays
  Peptide Sequence Number=SeqID_62227
atgctgtctttttctcgttcggccatcctctcctacctactgtggtgtcttctatttctcacattggcaagcagcaatggcgcggtcgccacagcaaagccgaaggctgggtgcgggtacaagctggtctcccttgttcagctgcccaacgggggaggccttgtgggttacctgcaggtgaagcagcgcacctccacttatggtcctgacatccctcgcctcaggctctttgtcaagcacgagaccagggagagggtgcgcgtgcagattacagatgcagataagcagaggtgggaggtcccctacaacctgctcccaagggagccagccccacccgtgaccggcggcaaggtcacgggcgcccccttcacgggcgccgagtaccccggcgaggagctggtgttcacctatgggcgcgacccgttctggttcgcggtgcaccgccggtccactcggcagccgctgttcaacaccagcgccggcgcgctggtgttcaaggaccagtacctggaggtgtccacggcgctgcccaagaacgccgccctgtacgggctcggcgagaacacgcagccggggggcatccggctgcggcccaacgacccctacaccatctacaccacggacatttccgccatcaacctcaacaccgacctctacggctcgcacccggtgtacatggacctccgcagcctgggcggccgcggcgtcgcgcacgccgtgctgctgctcaacagcaatggcatggatgtgttctacaggggcacgtcgctgacctacaaggtcatcggaggtcttctcgacttctacttcttctcgggcccgacgccgttggccatagtggatcagtacacgtcgatgatcggccgtcccgcgcccatgccttactgggcattcgggttccaccaatgtaggtgggggtacaagaacctttcagtggtagagggcgttgtggaaggttaccgtaatgcccagataccgctggacgtgatctggaacgatgacgaccacatggatgccgctaaggacttcacactcgatccggtcaactacccacgccccaaactgctggcgttccttgacaagatccatgcgcaaggcatgaagtacatcgtcctcatcgaccctggcattgccgtgaacagctcctatggcgtctaccagcgtggcatggaacgtgacatctttatcaagctggacgggcagccatacctcgcccaggtgtggcctggccccgtctacttcccggacttcctcaacccgaacggtgtgtcgtggtggatcgatgaggtgcggaggtttcatgatctggtcccggtggatggcctctggattgacatgaacgaggcctccaacttctgcacgggcaagtgcacgattccgaagacgcaccagtgccctattcctgacaccaagacaccatggctctgttgcttggattgcaagaaccttacaaacacgaggtgggatgagccgccgtacaagatcaacgcctccgggcagactgcccgtctcggcttcaacaccatcgcaaccagcgctacacactacaacggcatcctggagtacaatgcgcacagtctgtatggcttctcgcaggccattgccacgcatacggcgctgcaagggctgcaggggaagaggccgttcatcctgacccgctccacgttcgtcgggtcgggggcgtatgccgcgcactggaccggagacaacaagggcacgtgggaaaatctccgttactcgatctcaaccatgctcaactttggcatcttcggcatgcccatggttggctctgacatctgcggtttctacccgtcgccgactgaggagctctgcaacaggtggattgagctcggggccttctaccccttctccagggaccatgccaacttcgcgtcaccgaggcaggagctgtatgtctgggactccgtggcgaagtctgctcggaacgcgctcggcatgcggtacaagctgctcccctacctgtacacgctcaactaccaggcgcacctgaccggggcccccgtggcgcggccggtgttcttctccttccccgacttcacgccgtgctacgggctgagcacgcagttcctgctcggtcccggcgtcatggtgtccccggtcctcgagcagggcgccacttcggtgagcgccatgttcccgccgggcacctggtacaacctgttcgacatgagtaaggtggtggtgtccaggagcggggccccagtgaagctggacgcgccgctgaacgagatcaacgtgcacgtgtaccagaacacgatcctgccgatgcagcgcggcgggttcgtctccaaggacgcccgggcgacgccgttcacgctcgtggtcgcgttcccgttcggggcgacgcaggccgacgcggagggcgcggtgtacgtggacgacgacgagcgcccggagatggtgctcgcggaaggccaggcgtcgtacgtgcgtttccacgcgagcgtgcgcggaaaggccgtgacggtgcggtcggaggtgctgatgggaagctacagcctgcacaaggggctggtcgtcgagaagctctcggtgctgggtctggagggtaccggcaaggaccttgccatccaggtggacggcacggacgccactgccgtcgcgacgtcgagcccttactttgcagcaggtggcaacgcgaagctgcagggggaagaaggcgtcgaggatagtaagaacggcgtcatggtggagatcggcgggctggcattgccgctcgggaagagcttcaccatgacatggaacatgcggatcgaagcatag

SEQ ID NO: 18853 - DNA, 2010 bp, Zea mays
  Peptide Sequence Number=SeqID_62228
atgggggggcctgcggagcagcagaagaccgacggacggctcgccgtcgcctgttccagcagcagcgacaacgaccccctctacgggtggccaaactgcagcgacgatggcctcagggcggacgctgctacaaccttgccctcgcccacgccgacgctcgaggggcgaggacaagggccgtcggcccgccgtcagatccccactcggatcctcccggacgagcagggcaccaacctccccgcggaggcaccgtaccgccgccttccagcaggaaggggcactgggggccaagccgacgagcccgacgcgctggggcagacgacgcctgccgtcgaccggccccgcgttgtcgaagtccgacccgcccacagggccggcgagcgccctctccctcgaacgtcgcgggagagggtgacccacgagcccgcgcgggaggtagagctccggctcatcccggcctccaccccagcgaggatgatgaacatccttgaagctgagggtgggaccaagatcgcagcccggcttgcttccccccacccaggggctggtggtcaccgtcttggaaagacgcgatgcataagggagcgtgaagacatggtcgccttccaagggggtcaccctccttttaaaggcggctctccctacttgcgtccccagccgtcacgggctgagtcttctccaacacactccaaggtcctcccctgcggcgcgggggctgggtcccacacgtcatgcaagccgactcagagcagaagaagccaaaccgccgcgcgcggtgcgtacaaccgcccagcggttacaagcgaccctccactttggcccagaccagcgggcgaaagggtgggtagccgtgcaggcggcatgcaaccgcgccaagtgggcgcgcttctccaactcccaacacgcccggcggaggcccaggcccacgcgtcatgcaaccggcgcaccgaatgcttcgtgcatgcagctgcaccgccacttgcgccaccaccgcgcctcctcgactgcggaaccaatgccgcgactcgaggcgacccagcgcgcgacccagcagcaccagcctggcgcgacggtcaatgcggccaaaagtgggccggcagtaatggcggtggcaggcgggcaggagcagcggccacgtcgagaagcgagcgacgcttcgccttcgccataatgaccgtgtcaaaagagggaccgagaaaaggggataccccgaaaaggatccttccccgagaaggaaccaggctccgagcccccctactgatcagaggttcgaaggctggccccccggaagggttcgacagccgcctcagatcgcgtgggccctacacccactactggtcagaggttcgaaggccggcccctcaaaagggttccacggccgccttaggctactcgggctccgcgcccattactgatcaggggttcgaagggttcacagccgcctcagacaccgagcgagggatgaccatggaatcccatcagagggaggcatcgagccctcggaccccgtcaccaggggaccgggtctggcagatcacccgcagctcatcggagacaccatgttcggcgcccatcgagggtaacatggcgcttttccccccctcctccttgcggaaaggcgacgcaggggccgtcaacataccagcccgagaacttgggacccgaccgtacacccgggctatggccagctcgcatgagggaacgaccagaccagccaaagcgttacgcgagacattaagacctcgaaggagtgaaaccactcctccgaggcctcgggggctacacccggcgggtgcgctcgcgcgcaccccccggaacaaaacgcaaccgagaaaggctggtccccttgcaaaaaagtgcgacgaaagcctccaagcgagtgctaacactcccttcaaggctcgggggctactgtcggggaccataattaggggtaccctcaaggctcctaattctcagctggtaacccccatcagcacaaagctgcaaaggcctgatgggtgcgattaa

SEQ ID NO: 18854 - DNA, 144 bp, Zea mays
  Peptide Sequence Number=SeqID_62229
atgagcaagaacacaagagacacaaaatttatcccgaggttcggtcacaccaccaaggagagaaaaccccagctcaactgcccggaggcaagttcagctggtgtatggtcaaagaggttcacagctgaagttgagttcagctga

SEQ ID NO: 18855 - DNA, 402 bp, Zea mays
  Peptide Sequence Number=SeqID_62230
atggtggacaaagtacaaatcaaggataaaggaaaaatccaattggaaatgccttggctcgagcagccaagagtctgctcagtctggagcaccggactgtccggtggtgcaccggacagtgtccggtgcgccaggctggctcgagcaaagtggctgctctcgggacttcgacggcggtgtacggctataattcaccggactgtccggtggtgcatcggactgtccggtgggccgttcacaggcgaactcgtcgctctcgggaattcatcgtcgacgtacggctataattcaccggactgtccgtgcgttgctaatccctcccttgctctgtgcttctttgtgaacttcaagtgtaagggcgagaggctccaatttgtggagattcctcgcaaacgggattga

SEQ ID NO: 18856 - DNA, 801 bp, Zea mays
  Peptide Sequence Number=SeqID_62231
atgcacatgaaacccgagaagagaaagagaggtcggcgcgcggcggctgcggctgcggcggcctctgcagcccactcgctcggccactggggcaggtcatcacatcagcagtcaccactaaccatgcagagacacagcccacttgcctcgccgcgccgcgcttctgccgaacccaagccaggcgcggaccggagaccccacccgcattctactactacaaaaggccgcacgcccaaacgcctcggagctccaccactcccagtcccagtctcccaccgtcccacgaaacacactcaactctgccccgaagcggagaaccgccagccagacatgaagagaaccagagcgcagcagcccaaggtcgaggagccgcaggacctcgccgccaacctaaagccgcagcgccgggacaaacagccgaggcagcccaagtcaggcgccaaagcgaagcccgcggcgggcccgcgcgtcgcggcggccacgaccctcgccgccgccgccgccgcagcagcagcagcagcaaatgccgcctcggccgcgtcgtcgcccgggccggaaacggctccgaccgtgccggacgtgtgcgtcggcggggacaaggacggggacgcggacgcggacgcgagcgccgtggactgggacctcgacgccgggctgagcgcggcggcgtggtggacgtggggcgtggacgaggagaagctgctcggctggttccccttcgtggaggaggacttccggtgcgccggcggcggcgccgccgaggtggccgccttcgaccacgacatttggagcatctggtga

SEQ ID NO: 18857 - DNA, 336 bp, Zea mays
  Peptide Sequence Number=SeqID_62232
atggagcgaaatccaggtgctgttagcgaactccgtcgcctctgcgtacgcgcggaccatacggctactagacgcggaccgtctggctcgtcgagtagaaaccctatcctctgcgccaggtcgcggatcgtccacgcctctacagctgccgcagctagtgtccgcattgcttgctgcatattgcatctccggccgttgcattgccatgtgaggcaccattggccaggtagtagctacacagatcttactgcagacattgatggccgtagcatttgtcttgctgtcgtcgactgtgctgtgcttatggacaaattggatgacagtagtgttatatag

SEQ ID NO: 18858 - DNA, 543 bp, Zea mays
  Peptide Sequence Number=SeqID_62233
atggcgctaagcctggcgccgccggagggacaccgccgccacgaggacgagccagaaccaggcaacgggcgcgcgtcggcgggaagggggggcgcttgttcccgttgccttcttcttgccacaagaaagttcctcagaaggagcgcgccgccgggccccttgaactggaacccctacctctactgtgacccctacgctgcagcggcggtcccgggcagcaggctcggtgctgctgcagcgtccgtgccgctcgcctcgcatggcggcggcactgctgccgcagaggcagagcctcctggcagcgtgagcgtcgtcaagctcaagctcgagaggcctgacggcggcgcggcgctcttcacggacgacgacgccttgctcctggcggaaccagcagcagccgaccggccctttaccaggctgcccgacggcaccgtggacatgctcaactggaggaggacctcccgcgtctctgccccaccggacaccaacgcagcaccctccggcgccggcgaggagctgcttgacctcgagttgcggctctag

SEQ ID NO: 18859 - DNA, 372 bp, Zea mays
  Peptide Sequence Number=SeqID_62234
atggctccatccctcatgcccccaactctttggggtgggaagcgagccgtgttgtggctccacctctttggctttgatggttttggtgccgcctccaacgccgcctcccgccgtcgagcagagcgtggctacccgtccaccgcatgggcgacggtcacgccgtgtgcaggccaacaggccgggtttatgagggtggacctcaccgggctggcgtacacaacttacagagatgctccaggggttaggaagaggtactccttcagttgtagcgaggtggtcaccctcgggtcagcatatttccgtcgccttgaagggtccttcccagctgggggagagtttgcgaagcccttcttggttcagtactcgccttag

SEQ ID NO: 18860 - DNA, 213 bp, Zea mays
  Peptide Sequence Number=SeqID_62235
atggagactcggctgcgtggcgagaagtccagtgagcacgaaccaagagaaaaagagagactgggggcaaaacagagggtgcctcatgctgctggcgaggaggtggagctcattggggcaatggacgccaggccagagccacattttaggccagacacactcgagcttgacgctgctccggcgtgctccctcgaccaaggaacacctaattag

SEQ ID NO: 18861 - DNA, 96 bp, Zea mays
  Peptide Sequence Number=SeqID_62236
atgtcttccaagcatggcttatggacagcacttgagaacaagtccccaacaccggactccttggatgaggtccggacccctctgagtgaggtctag

SEQ ID NO: 18862 - DNA, 513 bp, Zea mays
  Peptide Sequence Number=SeqID_62237
atggcgtcctttggaacggcccacgtgttggggtcgagtgttgttcaccgcgcggttagagatagccgcacgggcactgtgtcttcatactgtagtaagggaggcaaagaggcgcactaccgcaggcggtggcgtactcctcacgcggcagactggttcgctgctttcggcaaaggtgaagagacacaccaccacaggcgttggcgtgcacctcacgcggcagttcaccttctccgcacacggaggccaacgcccaaggagcatgactcgtgggcccgggcccccgtgccagaggctggttcgctgctttcggcggaggtgaagagacgcactaccgcaagcggtggcatgctcctcacgtggcggtttgccttctccgcacaaggaggccgacgcccaaggagtatgactcgtgggcccgggcccccgtgccagagactgggtcaccttggcacgcgtcgggcgaggtcttctgcggcgcttcagggcgttagtgggggaatccttctttaa

SEQ ID NO: 18863 - DNA, 306 bp, Zea mays
  Peptide Sequence Number=SeqID_62238
atggccacaactagcggctgcagctggccggctgccgtgtgcagaggcccggccctgccttgccgcgtccacgggagcggttgttggccgcgcaaggaggccacatactgtggtgatccttcggtcgaggtcttcgccaagaaatactgccttcattggcagaaaaaggttattggtagcaagattgcacaatttggtacatgcacgttcacaccgaggactgggaagacttcgggtgaagttgtggagctcgtgtcgtgcaccaagaacaagtggggaactggagagatttttggttttatgtga

SEQ ID NO: 18864 - DNA, 228 bp, Zea mays
  Peptide Sequence Number=SeqID_62239
atggcgagagtggcacgtaccctcctggcaaaggaccgcctaaaaagggtggtgtgctctcgggtggcgcagacctgttcatgcagtggaggatccgtgggaatggtagacatgcaaggttctaaccttgtgctgctgttgatggtgttaagtgccggtgggctcggccttcttataagtctaagtacctcttctatacttcttattgaggatggtcacttgagctag

SEQ ID NO: 18865 - DNA, 309 bp, Zea mays
  Peptide Sequence Number=SeqID_62240
atgccctggaaatgggacagggtaagcctgaacccggctattccatacatgaaaagacaatcacgcactgggagtggagagatggcgagagtggcacgtaccctcctggcaaaggaccgcctaaaaagggtggtgtgctctcgggtggcgcggacctgttcatgcagtggaggatccgtgggaatggtagacatgcaaggttctaaccttgtgctgctgttgatggtgttaagtgccggtgggctcggcgttcttataagtctaagtacctcttctatacttcttattgaggatggtcacttgagctag

SEQ ID NO: 18866 - DNA, 537 bp, Zea mays
  Peptide Sequence Number=SeqID_62241
atgccctttttgaataatcagatggtactgagttccgccttcaccatcgagttgcatgggcaagatgctgccgccttcatcagggaagtggaggcggaggcagtgaagattgttggaaaatgtttgacaatgatagagctaacgaggagctgggacattcgaggtttgaatgtcaggttgaaccatgtgtttaagctgaacagccttcgctatggtccatatcctgagcagggctctgcagacgttggggatgctgaggagtgtaaaaagggtggggtgaagcatggtagggttgatgctctggacaagtttgttgaggagctggctgaaacgtgtgtcaagctaggagaggttatggctttgcctgtcctgcgggaagtgtctgacagaatgctgaaaggatgtcttcttgacgatgaagggtccttcccactttggttcgagtttgcctttggattctattcttgttgtcctaatgaggacgagtgcgtcgagggcctcgacccggtctccatcaaggaagtcttttgctgttag

SEQ ID NO: 18867 - DNA, 495 bp, Zea mays
  Peptide Sequence Number=SeqID_62242
atgtccggtgcaccagaggactccagcgcaaactcgtcgccttcgggaaaatccagaggcaactccactataattcaccggactatccggtgtacaccggacagtgtccggtgctccaaggaagagcggcctcaggaactcgccagcttcgggaaactgcaacggctgcttcgctataattcaccggacatgtccggtgtacaccggactgtccggtgtaactgcggggcaacggctacttcgcgccaacggtcacctgcaacagcaattaatgcgcgccagagcgctcagaagtcaggcacgcgcgtagtggcgcaccggacactctacagtacatgtccggtgcgccaccggacatccaggcgggcccagaagtcagagctccaacggtcagaacccaacggctttggtgacgtggctggcgcaccggacatgtccggtgtgcaccggactgtccggtgcaccatgcgacagacaaccccaccaaacggctag

SEQ ID NO: 18868 - DNA, 840 bp, Zea mays
  Peptide Sequence Number=SeqID_62243
atgaacacgctctctcgcgaagggtgccgacactatgaggtcttcgaccaagctgatgaggatttggagcgtgatatctacaaggttgaggaccctatagtgaaggaatccgccggagccctctacgaccggatgtggggcccccacggtcgagaggtggtcagggagcgggctgagacggcgaggagtcaggcggcgcgtggcgagagggtggatgacttcggggctttgaacagcgcgctgcctgacccggagccgaacccggcggcggctgagtccgaggccgctccggagccgcccccggaaatcgccgaaggcgttcccgatgcccctgcagccactgcggctggcggagacccgtcgtcaactgctgcgccgagggctgaggatcatgtggcggtggctgcggaggcgacagcggaggctcccgcgacggctgggtcttcgcaggttcaagattttgggcctgtgcacgcaaccgctactgctaattttttggcagcttcgatcgtggatggtgggaataaatcggatgagtatgcgtctaaattttccgagttcggtgactctgggagctctgttgaatggaccgaagagtcgtcggatgaggacttggactactttgcggccttggatgtggcagtggcggaggcttcgtcgcaagctacggatgctgatgtgtctggtccgagtaccaggcgtaggcggcgaagggcggttgcgaagcgtagaacttgttgcgctgtccctgctgcaccctggggcgacttctgcagggatagtgttcgcggcaaactagaatttttcgcacttattgtgctagtccggctgcacccttag

SEQ ID NO: 18869 - DNA, 345 bp, Zea mays
  Peptide Sequence Number=SeqID_62244
atgaacccatcaggagtgatgcagagttgtgaaggtggaggcgtccgtccagggacgccctatgaccgcgactgcgaaccaggggcgggtgaacggacggcgaggatcgagccaccgaggaggaatggaggagggcgcaccgttcggcgatgcagaggcggtagtcggcaaattcacggtggattggaggttggagctgtcagcagaaaattaggctatgacctgagccacgacccaggtggcctaggcccaatatttgcccctgagttcaagcttcaacggtcaactactgacgtggcgctaacatggagggtccagggtgccaccatacccattacagtttga

SEQ ID NO: 18870 - DNA, 279 bp, Zea mays
  Peptide Sequence Number=SeqID_62245
atgggatcatttacaggtgcagagagcagatttacatttatggctaggctcgttggctcgacgagccgttttccgagcttgccagatgggcgagtcgagccgagctcggctcgttactgtataatgagccaatgtttcagagaaggttgtgtccaacaacatgtactttatgcggaggacaatgcagctgacgtgtcgggattcaacattgtccaaaaggtaacagttgcactctgcatgctagcatacggtggagctgtcgataggttggacgagtag

SEQ ID NO: 18871 - DNA, 1359 bp, Zea mays
  Peptide Sequence Number=SeqID_62246
atgaacctcgagtcctacacttgtgagaactgcatctggcaaaaggaagaaactctttaccatcttttcctcaagtgtaactttgcaaaggcttgctggacttctattggtttgacgtctcccagaattgctaatcctgaggccgctgcactcggctcggggttcctcgcgttccccacttcccttcccttccttcctcaccacttcttccgacccaagcaagagaaaactaaaaacaacccggacccaccaatcacgtgggcccacccaccgcctcaccaccagcgtccagggaggaggaaagggaaggaggaaccgaggaacccgccgcaccgcaggcacaggcaggcagggcagcagatcgcgagttccgacttccgacgcgtctccgaccaggccgccgccatttctctgtctccacacagcgggatccctccgccgctcgccgcttctcccttggtccaccgtccacccaacgccagagatcggccggtctcggttcaccccaggggctcctggaacatcaatctatgggaggtgaaaactggcggagccatgtataacaattaccggaatcctccggggacgcatatgcccccgcagaattctcaacctgtccagtttgacaatccattgtacggtgcaagctcgggtctaatccgatctgggataggagtgtatggggagaagttcttgggctctagttcagagttcatgcaaagcaacatcaatagatacttctccaacccacagtattacttccacgtgaacgatcaatatgtccggaacaagttgaaagtcatattgttcccgttctttcacagggggcactggactcgaataagcgagccggtcggtggacggttgtcctacaagcctccaatatatgacataaatgcgccggatctgtacatccctttcatggcatttggaagcttcatcattctttcagggtttacattgggtttcatgggaaagtttactccagaagctataaacctgcagtttacaagggcgctcatcggatggggcttccagctcacggtcctgaaaggcctgctctactcaatgggtggcggcgaggtgccactgctcgacctggtagcgtatggtggctatttattcgccgggctctcgctcgccgtcgtcgcgaggctcatgtgggcgtactcgtattacgtgatgatgccgtggatgagcctgtgcatgggggtgttcctggtgaggacgatgaagagggtgctcttcacggagatgaggagcagcgagaggcactcgtcgcggcagcattacttcctcctcttcatggcgatagtgcagttccccctgttcttctggctcggcagcataggcgtgtga

SEQ ID NO: 18872 - DNA, 1191 bp, Zea mays
  Peptide Sequence Number=SeqID_62247
atgtcgcctcgacggcccagctctgatgttacctttcttatatctggcttgccctgtgtggcagcagggattgagagaggaaggaaggaaaggaggtgcttcaatatgaaggcgctcattcttgtcgggggtttcggaacccgccttcggcctttgactcttagcttcccgaagccccttgtggattttgcaaacaagcccatgattctgcatcagatcgaagctttgaaagaagttggggtcacagaggtggttttggccatcaactaccgcccagaggtaatgattaatttcttgaaggactttgaggataaacttggcatcacaattacatgctcccaagagactgagcccttaggaactgctggccctcttgctctagcaagggacaagcttgcggatggatctggcgagccattctttgtcctcaacagcgatgtcataagcgaatacccatttgctgaactcatcaaatttcacaagtctcatggtggtgaggcaacaattatggtcactaaggtggatgaaccatctaaatatggtgttgtggttatggaggaggcaactggcagggtggaaaggtttgttgagaagccaaaaatatttgtgggcaacaagatcaatgctgggatttacttgctgaacccatctgtccttgaccgcattgaactgaggccaacatcaattgagaaagaggtcttccctcaaattgcagctgatcaacagctctatgcaatggtccttcctggtttttggatggatgttggtcagccaagggactacattactggattgcgtctttatctagactcgcttaggaagaaatcggctgccaggctagctgctggagcgcatgttgttggcaacgtgctggtgcatgagagcgccaagatcggagaaggttgcctgatcggtcctgatgtcgcaattggacctggatgtgtcgtggaggatggcgtgaggctttcccgctgcactgtcatgcgtggtgtgcgtatcaagaagcatgcctgcatctcgaacagcattatcgggtggcactcaactgttggacaatgggcacggatagagaatatgaccatcctgggcgaggatgttcatgtgtgtgacgaggtatacagtaatggcggtgttgttctcccacacaaagagatcaagtcaagcattctgaagcctgagatcgtcatgtaa

SEQ ID NO: 18873 - DNA, 1140 bp, Zea mays
  Peptide Sequence Number=SeqID_62248
atggctgcgggctcgtccgcggtgtgggccgcgcaacaccccgcctgcagcggcggcaagttccaccacctgtcgccgtcccactcccactgccgcccgcgccgcgccctccagacgccgcccgcgctccccgcgagacggagcggcgcctccccgccgcgcgccagcctcgccgccgccgcgcctgcggtggcggtgaggacggcttcggaggaggccgtgtacgaggtggtgctgcggcaggcggcactcgtggaggccgcgacgccacagaggcgccggacgcggcagccgaggtgggcggaggaagaggaggaggagagggtcctcggctggggcctcctcggcgacgcctacgaccgctgcggcgaggtctgcgccgagtacgccaagaccttttacctcggcacgcagctcatgactcctgagcggcgcaaagccgtctgggcgatctacgtgtggtgcagaagaactgacgagctagtggacggtcccaacgcgtcctacatcacgccgaccgctctcgaccgctgggagaagcggctggaggatctctttgagggccgcccgtacgacatgtacgacgccgcgctctcggacactgtgtccaagttccccgtcgatatccagccgttcaaagacatggtccaaggaatgaggctggacctgtggaagtcgaggtacatgaccttcgacgagctctacctctactgctactacgtcgccggcaccgtcggcctcatgacggtgcctgtcatgggcatcgctcccgactccaaggcctcgaccgagagcgttgcgaggagggggagaatataccttccgttggacgagcttgcgcaggcaggtctcacggaagaggacatattcagagggaaagtgaccggcaagtggaggaggttcatgaagggccagatccagcgtgccaggctcttctttgatgaggcggagaagggcgtcacccatctcgactctgctagcagatggccggtgctcgcgtctctgtggctgtacaggcagatccttgatgccattgaggcaaacgactacaacaacttcaccaagcgtgcgtacgtcggcaaggccaagaagctgctgtcgttaccgcttgcatatgcaagggctgcggttgcaccatga

SEQ ID NO: 18874 - DNA, 141 bp, Zea mays
  Peptide Sequence Number=SeqID_62249
atgggaaaccaagagaaggaggtcgagcgagatggagaccgggagaccatgtgccgcgtgccggacgagcatggctccattcgagacttcgagctcgaccgacccgtgcgcgtgcgggcatgtcccccagggcaaccatga

SEQ ID NO: 18875 - DNA, 2031 bp, Zea mays
  Peptide Sequence Number=SeqID_62250
atggcgcctcccaagctccatgacggcggcagctctcagctctcttacggaagcagccacgacatcacgccagcagggtgccaagatctctccggctgccacattggcatggccttcttagagaaggttggccgtgcgggaccgaggacgggacaggcgctctcttggggccgctcgcttccctcacccgcgtggacgcttgtaacccccctactgcaagcgcacccgacctgggcgcgggacgaacacgaaggccgcgggacttccacctctctcacgcccgtctccggccacctcgccactccccccttcgcgctcgcccacgcgctcgacccatctgggctggggcacgcagcacactcactcgtcggcttagggaccccccgatctcgaaacgccgacagcgctggaggttgtactagctccgttccagcttttgcggagattttcgaggaaggcttcttctccggtggatccgctatacgatgcagaatcccttcttcgtctgccacggacgagatggttccgaagcaaaacacggatccagagcggagagcaatcttatgctggaaaatgatggccattgagctagcttggatcagtgacacaccccctacctggcgcgccagctgtcggtgtttgggacccgaccgcgcacccagggttacccctcaaggcgaaccccccggcctcggaggctcggacttccagaaccttcctgccgcttcctggccacgaatggccgtcccgatccagcgtcccagcgcgcgccacgtgtcagagatcggccacgtcggcgtccgatgtggcgctcccgcccccgaagaaactgatacggccccaaccctcgcgtctcagcctcacgctcggaagagtaagtggccgccgcaagcccgcaaccaacaccaacgctttgctcgcttgctccgctgtccgctcccgtcggccagcgatcgaaatcagcggtggattcggaggcccaggctcccggaggagatgaacggccgcggcaccggcggaggagggggaggggaggatgagatggaggaggacagcggccccagctgcgcgcagggggagggcgcggggaataaggagcgggtggtgctgatgtgggggtacttgcccggcgtgtccccgcagcgctcgccgctgctcgggccggtccccgtaaggttgcccccgacggcggcgactgccgccggtgatgggtggagagacgtgtgcggcggcggttgcggcttcgcgatggccatctctgagtctggaaaactcctcacttggggttcagctgatgacatgggccaaagttatgtgactgctgggaagcacgaggagactccagaagcttttccacttcctagcagtgtcgtgatagtgcgcgctgatgctggatgggctcactgtgttgcaataactgatgaatatgatgtttatacatggggttggaaagaatgtgttccaactggaagggttattggagaccagtcttcagttggaaccatggaaaaggatgaaaggcaaatggcaatggccactgaccaaggtggagtgaaaatagtggctgtagccgctggtggtcgtcatacattagcactatcaggtcaggtgtggggttggggatatggaggagaagggcaactaggtttgggttctagaatccgaactgtttcttctccccatcctgtaccgtgcattgaatcagcactatacaccaaggataggccatcagctatgaaagattcaggagcacttcttacatttggatgggggctgtatggacaggagggaccttcagatgatgtgctcatctcgccactggtttgcagccacagtcggttggagactgcagtagtgcagcaggctgcaggactccaggagaaggggcagggacgcagggtgctgtaccgccgcccgccggtgtccaggactgcaagggcggtgcaagagaggagaggcaggggcggtgcaagagaggagaggagaggacagaggagacgtgcaaagagccagtgttggcggctagggtag

SEQ ID NO: 18876 - DNA, 273 bp, Zea mays
  Peptide Sequence Number=SeqID_62251
atggagactgtcagtgtttgggacccgaccgcgcacccggggttacccctcgaggctgtcgagcgctccgggctcgagggcttggatgagtcggaggtctcctcggacgaggagaactcctccgactcgtccgaggaggagagcggcggtgatggcaacgacgagggcgacggcggcgatggaggtgacgacggcgatgacggcaagggcgacggcgacggcaagggcaccggtggcagtagcaaggccagtggcaaagcgccactggtttaa

SEQ ID NO: 18877 - DNA, 222 bp, Zea mays
  Peptide Sequence Number=SeqID_62252
atggctgaaggtaccaactcccacggagttgtgttcctccaacgaggaggcggaaagacgaccggctccgagcagaagccgaaccgccgcgcgtggtgcgcacaaccgcccagcggttacaagcgaccccccacttttgcccagaccaacgggcgggaggggcgggtagccatgcaggcggcatgcaaccgcgccaggtggacgcacttctccgacttctga

SEQ ID NO: 18878 - DNA, 408 bp, Zea mays
  Peptide Sequence Number=SeqID_62253
atggaggcccaggcccacgcgtcatgcaaaccggcgcgccggtcgctacgtgcaaagaaaccgcaccgccactcgcgtcactactgcggctcctcgactgcggaaccagtaccgcgactcgaggcaaccctgcgcatgacccaacagtgccaaccaggcacatcggtcacgggccagtcagcgggaccgggaaaggggacaccccgaaagggatccttccccgcgaaggaaacgggccccgagccccctactgatcagaggttcgaaggctggccccttagaggggttcaacagccgcctcagagcgctcgggctccgcgcccactactggtcagaggttcaaaggccggcccctcggaagggttcaacgaccgcctcaggccactcgggctccgcgcccactactga

SEQ ID NO: 18879 - DNA, 2574 bp, Zea mays
  Peptide Sequence Number=SeqID_62254
atgccgtcttcctcttcttccgctgctactacgccgccggccgccgcctcgtctgaggagacgttgagtagcttgatggtggaggagttgcgcgccggcgactctgttgattttggtgtgtcatggatgacgtcagcccgcgttgaagatatgcagcgattgggctactttggcggcggagttgctcgtgctccggggacggaggaagtccccgagccggagggtgaattggtcgttttcgaggcgttcttcgccgctgtggcggaggaagatgcagacgaaggggcccttcggtgcgccgccggtcagagcagtgggcgtgatttagttgaagagttcgtggcgtacggggtgtggcccttggcgtacggctgggcgctgggcgaagtgtgccctcgccagatgccgtttcacggaggaagggtgatgcgaagccctgccttcgcactgaatctgcgaaaccacgacccggccgcgtttgtgcgcgatgcggaggacggggcggtgcggctcgtggggcattacgtgccgaggacggaaggccagcgcagctttgatatccgcgggtcaaatgaccgtttgaacagggtcttcgaattaaatcaattgccgtacgacggctatcctggtcaagacgaagcggaccgccgtggaaagaaaccggcggtggagactggaggcgaccctgcgctggcggccgccccttcctcaaaaaagagaaaattaggtactgcgatgggaggacttggggtgtctgatagttttgctagagagttaatgaggacgtgcgccgccccgggggaaaggatgtcttcgcccgagctccgggagtcttcggctcggatgctgagggttaccgggggttgctggcctaggaatgttcctatcccctgcgcggctggcgaggactgttttacatctcgtatggttcgtcggttgagagtttttccttacgggcggaatatcggtgctgttgtgtgggcagtgatggacaaggatcgccaaggtgcggcgcaaaaacgccaggcgattgtcaggctgcatgaagcgaggccgaagaggcagcggggggctgcgaaggctgcggcctccggcggaggcaagccgccgctggcggcgaaggcgggcgcctctgcacctagcaaggcgccggaggcaacggcgggcgctggaggctccaagtcaacgaaggtggtgccgccgtccagcggagtggcggaggcctcgaaggcggcccgagcgttgccgttgtcgggcaagcgcgttgccgacttcggcaccgatatcactgtagacgactatcttggtgggtcggacgaggggcagcttgctatggttgcgcctggcgcggagaccgcgacggcggccatagcgccgagggcgaggggcgaggcccttggcgccggaggcgaggtgtcggccctcgcggtggttagggacgaggcgagcgcagcgacccgccggctgaagggagtgacggaggcgctgagtcaggcgacggaggcgctgagtcaggtggctgacttcgccagccgtactgcgtcgggggccctcacggcagctgtgtctgccgaagtcgagaggcttcggacacaacatgctgacgctgtccgtgagaagtcggcctccgacagcaagtgccgtaagctgacggatagggtggccgccctggagagggagaaggctgacctccggcgccagctggcagcggagaggagggaagccaacgaggccgtcgccaaggggcaggctgcgcaggcggaggccaagctggcgcgggcggagggcaatcttgccaaggagctcgccgaacatctgcaagagcggctcaccgccctggagagccgcgcgaaggaggccgaggccgcgatgcatgcggaggccgaacggacgcgcacacagcttatggatacatatcgtgagctgggtgcgcggaccggtgacttcgaggtgccggaccgagagcccgggcttcgctgtctgcagtgggtgcaggaggagctgctggaacttccagccgtcgcgggggggttgatgtcgtacgcctccctggtcacctgcgagggggcgatgaacgcgctctcccgcgaagggtgccggcacttcgaggccttcgaccagacggatgaagaatttgagcgagatatctataaggtcgaagaccccgtagtgaaggaatccgccggggccctttatgaccggatgtggggtctgtacggtcgtgaggtggtcagggagcgggccgagactgcgagggctcaggcggagcgcggcgagcgggtggacgacttcggggctctgaacagcgcgctgccagacccggagccgatccccgcggaggctgtgattggggtcgccctggagccaaccccggagaccgcagagatcgcgacggctgcccccacatccgctgtggccggcgaagacctgcccccgaaggtggccgaaggcgcccctgatgcccccgcagctgctgtgccgagtgctgaagatcccgcggcggtggcggcggaaacaacggcggagccaacggcggaggctcccgcagcgtcagggccttcgcaggtggcgtag

SEQ ID NO: 18880 - DNA, 663 bp, Zea mays
  Peptide Sequence Number=SeqID_62255
atgggcaagagtaacaaacgcaagcgtgagccgactcctccgtcggaggacttcggcgactcggaatactcggaggaggagttctcctccgagtctgaggggtctccggctctcgtctctcccccggcgtcgtctgatgattcagacgactcccaggggattgccgcggaagtctggacgtacatccgggccgtcgagcgctccgggctcgagggctcgaatgagtcagagttctcctcggatgaggaggactcggacggcggcgagggcgaggatgacgacgacgacgacggcgacgacgacgacggtggcgacggcgacggtgacggcagcggcaacggcgaggcagcggcggcggcgacgggagcaagggcagcaccagaggcggcagcagcacgggcagcaccagaggcggcagcagcaagggcagcaccaggggcggcggcggtggcagcagcagcaaggccagtggctaaacgccactgggcccgttacaatgggccagatcacacgtgggcctcggagctgaacgaggccgcgctgcgggatgacttcgtcgccgcgaaggcctcgagcgaagggtggcgtctttgccttcgccccaacattttccctccgagggaccagttcgacaaagtcacctggtgccgaagacgtcgctag

SEQ ID NO: 18881 - DNA, 231 bp, Zea mays
  Peptide Sequence Number=SeqID_62256
atggaattactcagcaagtcttacccgactaaagaaaagactctcaagggtatgctggttatatgggagtcaagggtttcaaggagggaaatcaagatcaaggaaggtaatgcaggaatggttttatcaagcaactcctatcacctaatgcagcaatcaagtgagaaagattttaaaaacatcaaggaaggtggcaaatgcaccgaggcttgccttcgttcacaggtataa

SEQ ID NO: 18882 - DNA, 465 bp, Zea mays
  Peptide Sequence Number=SeqID_62257
atgaatttgagtggtcaaaaagggccatccatgtggtatgccaaacaatctctacatcctgacattgttgcccgctacgactacatatttatctgggatgaagatcttggtgtcgaacattttaatgcagaggcgtacattaagcttgttaggaagcatgggcttgagatctctcagcctggtttggagcccgataaaggtttgacatggcaaatgactaaacgaagaggtgatcaggaagtccacaagtttgttgaaataatggcaactgtattctcaagggatgcatggcgctgtgtatggcatatgattcagaacgacttggtccatggatggggccttgattttgctcttaggaaatgtgtggagatagcaaatgtccgagagtggttgctcgacttcttcatgaatgaggtgatagacgttggtggatcatgcagggttgaggttgcttcacataactaa

SEQ ID NO: 18883 - DNA, 530 bp, Zea mays
  Peptide Sequence Number=SeqID_62258
ccttggattttgacgtggcagcgtgccagtcggtgacgctgcacacgaacctgggcgacatcaagtgcgaggtgttctgcgaccaggtgccgcgcacggcggagaacttcctggcgctctgcggcagcggctactacgacggcaccgtgttccaccgcaacatcaagggcttcatggtccagggcggcgaccccaccggcaccggcaagggcgggtcgtccatctggggcgccaagttcgcggacgagttgagggagtcgctcaaggttgctttgcttgcctgcctgcacaacgcgcgcgggatcatgtcgatggccaacagcgggcccaacaccaacggcagccagttcttcatcacctacgccaagcagccgcacctcaacggtcactacaccgtgttcgccaaggtcatccacggcttcgaggtgctggacctcatggagaaggcgcagacgggacccggggacaggccgctcgccgagatcaggctcaaccgcgtcaccatccacgccaacccgctcgccgtctga

SEQ ID NO: 18884 - DNA, 852 bp, Zea mays
  Peptide Sequence Number=SeqID_62259
gtggatgaggattttgggcgtgatatctttgaggtcgaagaccccgtggtgaaggaatccgccggggccctctatgaccggatgtggggttcatacggtcgtgaggtggtccgggcgcgggccgaggctgcgagggctcaggcggagcgcggcgagcgggtggacgacttcggggcgctgaacagcgagctgcctgagccggagacgacccctgcggaggcctcgactggagtcgccccgggacctaccccggagactgcggaagatgcaccgggcgctcctgcatttgccgcggccggcgaagaccttcccccaaaggtggccgaaggcgcgccagatgcccccgcagctgctgtgccgagcgctgaggatccagcagaggttcaagattttgggcctgcgcacgcaaccgctaccactgggtttttggcggcttcgaccgcggaagatggaaatgaatgtggtgggtctgtttctgagttttttgatgttactgactctgggagctcggttgagtggactgaggagtcgtcggaggaggacttggattattttgcggccttggacgtggctgcggcggaggctgcaccacatgctgcggacgcgccaggcgtgcccggtcctagcaccgggcaccgacgacgaagggcggttgcaaagcgtaggattagtgcggaggaaggggctcggcttcgcgttagtagggctggccggcaggagctgctgtctttgccggccgcctcgggtgtaggggaaggggagctgcgaagcctttttgcgggtgaggagcttaggataatgttatttaattatagagagatggggattattcctaaggttgagccgatgtag

SEQ ID NO: 18885 - DNA, 165 bp, Zea mays
  Peptide Sequence Number=SeqID_62260
atggcgggtttattccaagaaaaggcagggtctcttttagaaagtggccacggcgaaggggtatcaagggtttctggccgcacgatccgatttggacgatgcagattagatggcatcaacaccgaaccgattaatagtaaaatttggacatacttaaaagtgtga

SEQ ID NO: 18886 - DNA, 204 bp, Zea mays
  Peptide Sequence Number=SeqID_62261
atgtggaaggatcgggtggagcatgccaaggatatctgggccatctacccaggacagactgcgcacttgaccgagatccaagacatggaggccaacgaggacgtcgacatcgagggaggagaggagcctgcctctagtgtggacactgctggctcagggagaccaccttcccccgagtcgagtgttgcctcgttcgctcactag

SEQ ID NO: 18887 - DNA, 639 bp, Zea mays
  Peptide Sequence Number=SeqID_62262
atggcccgcgcccgcgcctataaagcctactcaggcgtcgactatattcttccgcgcacgctcaaacctcaccggagctcagtttcaccgttatttgcccgtgcgcgacgtgtccgcggccacccgagccactgccgccgtagaccggccagcccagcccttcccaaccctgtccaaccctctgaggcgagtgtgcacgccccagtgaagctccccgagcaaggaatcgaagcttgcttcgccggagaggccagtccacggtcgctggagttcacaaccccgccggagtgcgtggaccggaacctccccgagccaaccccgtccctcgtcggacctctctcgtcgccggtaagtcgcgccgcccttttctttcccgcggactgtaaccttactggtggagagtacgtcctcgtgccggagcaaggagctgctcaggaggtagccccagatccagcaccagagcctgcactagaggacctgtctgccactgctttggaaggcaagccccggaatcctgttgagatgaatactagttctctggaggacatggttgctggagtgacttggtcgtccatcttgccaccgggttggactatcgagtgggaccctacctcggctgaggaggagcatgaggagtga

SEQ ID NO: 18888 - DNA, 291 bp, Zea mays
  Peptide Sequence Number=SeqID_62263
atgtcgggtgttgtcctggtcggcttgccccaactagccagtcttgggtttttctcgggccggtggctaaaaatcaccagcagtctggtgtgcaccggagatgtccggtacgtgcccttttggcgactacttggtgtgccttcggtgcgccgcacgtttacccggttgtggcctaaggatggttttgaagggggacctggtgcagcgatagagcctaccgtctgtaaccggaaggttccaggttcgagctctggcctctgcatatttgcatattatacgggtaaggcttga

SEQ ID NO: 18889 - DNA, 735 bp, Zea mays
  Peptide Sequence Number=SeqID_62264
atgaacagtactcccgtactgttcacgctgacttgtcattttgcttttggcgtcacgctgacttgtcattttgcttttggcgtcacgctcgtactttccaccttctctcaggatcgaaggagtgataggatagcggtcccatccacttttaccgactacgatgacgcatgcccggaaataacggctactgctcccccacgccgtctgctgagttcaaacaactccggatgggacgcgcgtatgatagagtacggtctgaccctcgggaggacactccgcctcgccccaaagtcggccttagcctcaaagcaagccccgcctcacccgagctcggcctcgaacaacagccccccgcgaatcccgcagaaggccactccttcaattgttccctgcacgactgcaagccccagagcaggcttggccatggcctcaggaagacttccgcctcgcccgagcatggcttcggccttgatagtatcgacaaaaggatgtctgacgtcaccagaagttgcagagctgacgtcgcacactctacgtatcgccaagagcttttgtcatacttaccactgctccaaccactacgactcggacaactcctccatcggacaggctcgggtacgtgtccaagccccatatcttggcctcgactctctgctcgatcaaagatgcgaatacaggaaccggacatccccttctcagctcaagtcaacagcaagtacggggacatactgttga

SEQ ID NO: 18890 - DNA, 714 bp, Zea mays
  Peptide Sequence Number=SeqID_62265
atgccgaggaaggcgaactgttgctgcccagctaggatgcaacattccgtcctctgtcctcgttttcgtggcgaggacgggagtgaggacctgccggtgcgctttggggcggccggcgctcgctggtgcggtgttgatgggcaggtggacgccgccgtcggtgctgaggtggtggcagctggagaaagcttctccgcggtcgagaccgtcagcgccacctatggaccgacctccggctctttggctttaatatctggttcttgtcccttgagtggggacgcgaacgagagccttccggtggcagcatccgtcctgggaccatcgctgctgctgcagaggtcgctggcgggtcgcctggagttcatcgtcccgcaggctctccgatgtggaggttgttcatacccgcgggagtggaaccggagttccgtttgtaatggcaccttgagtgtcgagccggaggcagcagtgtcagcatggacaaaggcagagttggctcgaaaagaagacttcgtcggccggatcctggccgggccgtccactggtgggaccagcgccggagtcgggcgtggtgccgacaggttccttcgaggcggaggtcttccgaccgtgtcgtcatccgaggccgggtcggattccgatgaaggtggagtcgacgccgagggtgttgctgctcccctgctgatgtctgatcctgcaggaacagtttatctgtag

SEQ ID NO: 18891 - DNA, 753 bp, Zea mays
  Peptide Sequence Number=SeqID_62266
atgacttcccacggatcctcagacgacgggaatgcactgtctcacactgacgggcttgcacgagagggctttccccgcattttgtgggaggtacttcagggggccggatacacaacaccccctcagtacgcggtgcagcagttcgagaagcaccgagtgcctcgctgtagggtgaggatgactttggagcctcatcccctgcagccaggctggcgctctttggactccgagtcttttggataccgagctgaggacacgatcgaggcgatcgctctgcatggattgaccaccttctgcggattccatcctttggagctggctacccaccccattggcttgttccccgccgaaagggaggacgacccaatgtggaaggatcgggtggagcatgccaaggatatctgggccatctacccaggacagactgcgcacttgaccgtacggtgcatgaatgccctgtaccgtctgcgagtgatgcgcggtgaggcgatgtcccatctgatggcactactggaggcaacaaagattacgttggacaacagagaggagcttgtggttgatttgtccactgagatggtggagaaggacttgcaggtggagcagctatccactgatatccaagagttggaggaattggtggaatccattgaagccagcataaaccaagtcagtgtgggtcccaagggacttaaaggtgaagacaacagcggtcaggggattgagatcaagtatccaatagatttactctactaa

SEQ ID NO: 18892 - DNA, 477 bp, Zea mays
  Peptide Sequence Number=SeqID_62267
atggaaacagaggaggaggtgaaagatcgggatgtggcaggtggtgagcaagccgggattctgagcgccatggccaccaagatcggcatggccatgcctggtgcaaacggtgacgacagccatggcggcagcggggacgacgctaagtcgagcaatggcgaagcgacccgtggtggcagtaatggtggagagaagcagggggatgaatccaacggtggcgggatacttagcgctgtggcttccaggatcggcgtggccatgtccggcgccaacggggaccgcagcggcagcgctgaggatggtgccaagacgagcgctggcgacgctggtcacggtagcaagggcgaggagaaggggcgtggtgtgaatggtggtagaatagtcgagcagatcatttctaatctgccctcagatggtcagtcgcctgatgccgatgaagcttcctcaacgccaggatcattttgtatcgaagattag

SEQ ID NO: 18893 - DNA, 1772 bp, Zea mays
  Peptide Sequence Number=SeqID_62268
atgagggaacgatcagaccggccgaggcgccacgaaaagcattcagacctcagaggagtcaaaccactcctccgaggcctcaggggctacacccggcgggaaaatagcgccgctcgccctgctccgactgccgtgtcaaccacccaagcaaagactgacaacaagtcacgatcaaccaccgagttcggcctcgggcgcaataggaagctccgcctcgcccgacctcaggctccggcttcgggaggaggtctccgcctcgcccgaccctcggactcggcctcgacctcggtctcaggaggaatcgcgtcctcgcccgaccccggcctcggccttaagagaagtctccgcctcgcccgaccttgggctcggaccgaccgcgccaacaggggatacatcattaccctatctctagcctgctcaggctacaaggaacaagaccggcgttccatctggcttaccccggcgacgggactcaggcgctcctccgacggccacgctatcacgtgtacagggctcaagctctcccccgacggccacgttggcatggacccccccgggtccgaacccccaacgctcctaatcatggctgcgggcgccccctcggctctcccgaagcccggctcgggcaggcttcgttgtgaagcaaccttggccagaccgcctcaccaaccgaccgcttcgcaggcgcattcaatgcaggggacgcctgacgtcgaaaatagcgccgctcgccctgctccgactaccgtgccaactacccaggcaaagactaacaacaagtcacgatcaaccaccgagttcggcctcgggcgcaacaggaagctccgcctcgcccgacctcaggctccagcctcgggaggaggtctctgcctcgcccgacctcaggctccggcctcgggaggaggtctccgcctcgcccgacccccagactcggcctcaacctcggtctcgggaggaatcacgtcctcgcccgaccccggcctcggcctcaagagaagtctccgcctcgcccaaccttgggctcggaccgaccacgccaacaggggatacatcattaccctattcctagcctgctcaggctacaaggaacaagaccggcgttccatctggcttaccccggtgacgggactcaggcgctcctccgacggccacgctatcacgtgtacagggcccaagctctcccccgacagccacgttggcatgtacgcagggcttaggcactcctctgccggacacacgggcacgtacgaggcctccgaccgtcctcctcctcccaactccgccggctaccggaccgacaaagtccggcgaaagcggctgacggcgcagaagaggaaagagatcaaggaggcgttcgacctcttcgacatcgacggctccggcaccatcgatgcaagggagctgaacgtcgcgatgagagcccttggattcgagatgacaccggagcaaatcgggcagatgatcgcggaggtggacaaggacggcagcggcaccatcgacttcgacgagttcgtgcacatgatgacggacaagatgggcgagcgggacgcccgggacgagctccacaaggcgttccgcatcatcgaccaggacgccaacggaaagatctcggacatggacatccagcggctggccatcgagaccggcgagcacttcacgctggacgaggtccgggagatgatagaggccgccgacgaggacggcgacggcgagatcgacctggaggagttcatgaagatgatgaagcggacagactttggctctgggttcta

SEQ ID NO: 18894 - DNA, 1389 bp, Zea mays
  Peptide Sequence Number=SeqID_62269
atggaatctctatctgtaggcttgtgtcataacaagccaaaaaaatcggcggcaaccgcaatagttccgaaagactatatttgcacgcagggtgatcttgccctcatcaattttattaaggaaatcccttgtgaaccaagggtagaagtcatgcttattgatgatgcctttgttgaaagaaagtcgatggaatgtttatttcaaccgaatgcatatataggtgacgaggttatagactgttatataaatttgataaaagctcaaaagcatctaaagtgccgatctggaggtcgcgttcacatagaaaatgctttccagtttaatttcttgaagcgagatggcgatgttgaaattaaaacagaggagctatatccaattgaagacatgacacaaatatgtagcgttgaacgaagggtgttactttacctagaccatgacatggtgtttattccgataaacatccgagagacgcactggtatcttgccgtgatccatgcaataaatatggagatacaagtgctcgattcacttggtacttcacaagaccgtaaagacctcactgactctattaaaggtctccaaagacaaattgatatgatatctcaacgtaaggagttaaaagaccacaggtggccagacctccaagttgcttcttggccgctcagagaaatagacataggatatgcaaagcagacagatagctcttcatgtggtctctttcttttgaactatatcgaatactggacaggggatgaactgtctgacagttttacccaggatgacatgtcacactttaggaaaaaaatggctgctatattactatttttagacctgaataagagaagggggtgtctgttatacaaaaatgataaagaagttgactctggaagcccatcagatgttgagatattagaaaacccaacagattctaagaagaggaaactactccacgtgcttcatgatagcgaagtagtgtatgaagatgaggaaggccctattactcaagcagacttgcaaaagtggtttgttgatgattcggataaaagagctcctgtaaaagtctctaacgatgggtgcaccaatgactttttaatggttggtctttccacaaaggacatgccagtgaccaaagccgattcaatagatgttttatatgattatatcatggcaatagaagacgatacggcactagagtttaataccagctacctcgttctacaagctatggccatgtgggggaatgacagacgaatgaaatttgttggggatgcaaagattgttcgaaggaactttgtgattgatctgttaagttatgaggataattcatgccgatatgtcatccctgcaaacatacaacagagacttatcgatatcgctaaaaaggattag

SEQ ID NO: 18895 - DNA, 378 bp, Zea mays
  Peptide Sequence Number=SeqID_62270
atgcatgccgcagtggaaacagctccatctgtcaatggggagaacgaatctccaaggagcttgggcgatgctacagagcgagatgaaggtagcgtggcagccgatgttttgctaactttagtgaactcagagggccagacggctgggagccagaataatgttgagcaggccagttccaaaataaccgatgatcgccgtgttcttagtgccatgattgggattgttgatcctgaattcaggaagcaaatgtccaggagtggagctggaaacgaggagccaatgtctgacgctgagaaggatgaaggcgtcgaggaagttgattccgattcaggttcagatggcagcgacagcgaggaggcccatgcgttgtgtccatga

SEQ ID NO: 18896 - DNA, 51 bp, Zea mays
  Peptide Sequence Number=SeqID_62271
atgtctctcagcttgtggagcggcaaaggacaaaccctgggtcttgattga

SEQ ID NO: 18897 - DNA, 1212 bp, Zea mays
  Peptide Sequence Number=SeqID_62272
atggcaggcacaggcacggtaaagatccacaacgtctcacttaaagcatcagagcaagatattagtgagttcttctcattttctggtgagattgtgcatgtagaattgaaaagttgtgatgagcggtcgcaatctgcctacatcacgtttagagataatcaaggagcagagagggctatgcttcttacgggagcgactatagaagatatggctgtcatcatcacaccagccactgattacaagctaccagcgtttgttttagctgatctagagtcaaaaaacactggtggcatggaatctgctcttcagaaggctgaggatattgcagtttctatgttagccaaagggtttgttctcggcatggacacagttgaaaaagcaaaggctttcgatgaaaagcatcagctcacatcaactgcaactgccaaagtcgcttcccttgacaggacaatgggcttaagccagaagttcagcaccgggaccttagtggtgaatgagaaaatgaaggagatggatgaaaagtaccaggttgcagagaagaccaagtcagcattagctgcagccgaacagactatctctactgctagttctgtcatcatgagtaacaggtatgtccttacaggtgcagcatgggtaactgatgcctacaacaaggttgcaaccactacaactgatgctagcaagtcgataaaggaaaggatgatggctgagcaggagggagccaatcagagcggtgaaaccacaaaagttgatttgcttgaaatctctgaagcggatgagaaagagtggaagcgccataaagatgactctacaaagaacgtcgttcaagaaagtcctgaaatgacttgtcaggagagtgagcatcaggcgggtgaacgtcaaatgactaatgtagcaggtaactcgaaaacgggtatagaggagcagaaaaatcacgagggtgaaatagcagtagtatcccacatgcaagaaaacatagatacagctgagaaggatcctagctgccacgagagtgaagtatccaaggccaatgtccatgatagcgttctaatgacaaagcaaagtgagcgagagcataatcaacccgaaggtgaatttgcaaacactcatgtcccaggaagccctgtcactattctggtcaccgtgtccactattgacaggaactctagcaacggtcccaagaagcctgattctgctgagggttttctatga

SEQ ID NO: 18898 - DNA, 417 bp, Zea mays
  Peptide Sequence Number=SeqID_62273
atggccctcggcggccggacgtggaggcgcgggccccaggcgctggcgcggctcggcgctcggcacgacatagcgctcggtgccggcgcggctggcacaaggagcagcggcggctgggcaggccccgacgtgagcactgctcgccctgggcggcgcggccggacctgccccgacgcgagtgcgcttggcaggcaagccccggctcgacgtgcgggccagcgggcccctcccttggggcgcggccgcacgtcccggcctcgggcgcggctccggtcaggcgcgctcggcgcggcctccatggcagagctcgacgactccctggaggagccctggcttacggctcctggcgcggtccggtctcggacacaggagcaagggagctcgacggctccctggaggagcaatggcggcggatag

SEQ ID NO: 18899 - DNA, 1179 bp, Zea mays
  Peptide Sequence Number=SeqID_62274
atggcaggcacaggcacggtaaagatccacaacgtctcacttaaagcatcagagcaagatattagtgagttcttctcattttctggtgagattgtgcatgtagaattgaaaagttgtgatgagcggtcgcaatctgcctacatcacgttcagagataatcaaggagcagagagagctatgcttcttacgggagcgactatagaagatatggctgtcatcatcacaccagccactgattacaagctaccagcgtttgttttagctgatctagagccaaagggtttgttctcggcatggacagttgaaaaagcaaaggctttcgatgaaaagcatcagctcacatcaactgcaactgccaaagtcgcttcccttgacaggacaatgggcttaagccagaagttcagcaccgggaccttagtggtgaatgagaaaatgaaggagatggatgaaaagtaccaggttgcagagaagaccaagtcagcattagctgcagccgaacagactgtctctactgctagttctgtcatcatgagtaacaggtatgtccttacaggtgcagcatgggtaactgatgcctacaacaaggttgcaaccactacaactgatgctagcaagtcgataaaggaaaggatgatggctgagcaggagggagccaatcagagcggtgaaaccacaaaagttgatttgcttgaaatctctgaagcggatgagaaagagtggaagcgccataaagatgactctacaaagaacgtcgttcaagaaagtcctgaaatgacttgtcaggagagtgagcatcaggcgggtgaacgtcaaatgactaatgtagcaggtaactcgaaaacgggtatagaggagcagaaaaatcacgagggtgaaatagcagtagtatcccacatgcaagaaaacatagatacagctgagaaggatcctagctgccacgagagtgaagtatccaaggccaatgtccatgatagcgttctaatgacaaagcaaagtgagcgagagcataatcaacccgaaggtgaatttgcaaacactcatgtcccaggaagccctgtcactattctggtcaccgtgtccactattgacaggaactctagcaacggtcccaagaagcctgattctgctgaggctcttcagctaaatttttcaccctttagtgttgctttcgggcagtag

SEQ ID NO: 18900 - DNA, 741 bp, Zea mays
  Peptide Sequence Number=SeqID_62275
atggaggtgctccgcaagcagatctccatctatgccaccatctgcgagcagcttgttgagatgcatcgcatcctcaccgagcaccaggacaccattgcagccctgcgcccccgcccgtggcttgctcgcctccacccgcggccgcggcctccagtgccctgcgccaccgccgtttgtcaggctccaccgccccatcttctctcccgctggacagcctgcaacgccccaaagcatctcccgccgatggcgtctccgccccactcagtcgaggtacggacccccggcgactcgccgcggcccaccgccgctctcctctccccctccgtggccgcaccccagccctccaccgcctcccgcctcctgctcctcctcaccgcggtcgtcgccgccgctacggccttcgtcctgctctgcccgcccatcaccgttgtgaccgcggcgtccgccaccgcgcgtccgctctccaagctctccaagcccgtggtgctgctcaccccctgtcatcctcggcgattcaagggatttacactgctctccaaggaaggacagggacttgctctaccccgtgattcactcccccaccgagctgctttcctatcgaggtcgcgaactcctgtgcgagatccacgctgctctccatggaaggccggggacctgctgtaccccgatgtggaaatctcatcctcggcgattcaaggtgttctgctcacccccctgtccttctcgctctttactctttga

SEQ ID NO: 18901 - DNA, 1125 bp, Zea mays
  Peptide Sequence Number=SeqID_62276
atggctgaacagtacaaaatgcatgtcatgaatgaaatacaatgggattatttttcagttgaattgttagacattcaacatgtgcatattaaattggtttctatagacacatgctttattgatctcaaccttgccaaacgcctctcacggaagctcagaggatacgtcaaggtcatgatcgacgaacagatggaggtgctccgcaagcagatctccatctatgccaccatctgcgagcagcttgttgagatgcatcgcatcctcaccgagcaccaggacaccattgcagttgtttatcacttcatgagcagtttatcacttcatgtaaaactagaggaagtcgaatctttttttgctcagtgtggcaaggtaaatagtgtgaggctacctcggcatgtttctgacaaaaggcatttctgtggcactgctttagttgaattttcagaagaagatgaagcaaaaggcgtttttgagaaaaatctcatttttgctggggaattatcaaagacaatagctaaattagctgaagatggcaagaaagtcatagacgactacatgaaaaagatcgaatccatccagaagcagaaggaacagtgtttgctggttatacgctataacctgaggcgaggaactgatgaaaatttaaacctcaagctgactgtatggctggttcttgaggaaggcgtcctcaacccagaatcaactgttgttgcgatttttccctctccaatgcattatgctgggccaactgaggtgcagtggcatgctaaggctcgtattaatgctggtgcaaatttctatattgttggaagggatcctgctggtatgagccatcccacggagaaaagggacctctatgatgctgaccatgggaagaaggttttgagcatggctcctggcctcgagaggctcaacatccttcctttcaaggtgactgcatatgacacaaagcaaaagaaaatggatttcttcgatccatcaaggaattcctcttcatctctggcacaaagcgttgcacatcaaatgtttggtgttaataaggacaggctatgtatcctctgccagattgttgtacatatacattctggtgatataaacatgaagctgtcttctgctgttttataa

SEQ ID NO: 18902 - DNA, 410 bp, Zea mays
  Peptide Sequence Number=SeqID_62277
atggcgtctccgccccactcagtcgaggtccggacccccggcgactcgccgtggcccaccgccgctctcctctccccctccgtggccgcaccccagccctccaccgcctcccgcctcctgatcctcctcaccgcggtcgtcgccgctacggccttcgtcctactctgcccgcccatcaccgtcgtgaccgcggcggggttctgggattttccccctgtttccccaaagaaagggaaaggggactttgccccaccccccgggttttccctccccccatccaagcgggttttccctatcgggggccgcaaacccccgggggaaaaaccccccgcggctccccagggaaaggccggggaaacctggcggtcccccgaatggggaaaatccccccccccccgggaatttaaggg

SEQ ID NO: 18903 - DNA, 834 bp, Zea mays
  Peptide Sequence Number=SeqID_62278
atggatgccttgctgtttgacatggtggggttggggctggtgacggggctgataagtggcgctggggtggtggcagggctgcaagagatttatagtagtggtaaccctacaaatattgccaatcccattgttgatgtaagtgttaagattgatataaaggcacttggtgggagattaaacttgtttaagactactgcttgtgaaaaaataccttggaagtacttgaaggcctatgatgatgttgatcctctagattaccttggggcatacaatgtggatgacattcagctgatttgctgccagcctgatgcatcaacaatgtggttgatacctcctccagtccaaaacagattcatccagtcccttgaggagagagagatgctttttggaaagatggaacttattttaaattgggattttctcagagctagaccaaaagggaaggaattagtgcgatatgaatcccctattgaacactgcccgagtgtagatgatgttaaacgagtgcttaatggaactgcaaacagcttcagtataattgatgcttacccaaggtactttcgagttactggatcaggtgaagtccggcgattagaagcagcgatagattcagtaagtggcgaattgctattaaataatggcactccttggtggtcattctatgatacaaacccatcagatttggcaggctgtcaagggctgaatggtcccatggctatagttgtttctgaggagacacctcgtatatcagatatatgtgagaatgggcaaaaactggagttcagtcaagcttcttgtgcaatcaccatacgatcaaactaccaaaagtcataa

SEQ ID NO: 18904 - DNA, 2124 bp, Zea mays
  Peptide Sequence Number=SeqID_62279
atggcctaccttggggcacttttcttatatgctctttgcgtgaactatggcccaagttacttgttttgggtcatcattctgatctacaccgagagctcgatcactgccaaagatggtgaatgggttccggtaacagaattcagctttcttagtgcaaggaacaacattgaagagaaacactgtgtagcttacagttggagagagaagctaaaaagtttgcccttgcctgtttttgatctcataaggatgattgttagaggcttatctagatactggatgtcattaacacatggagctgaatctcctccatattttgtgcaagttacaatggaggtaagccattggccagaagatggaatccagccagagaggatagagtctgccataaatagggtgcttgctattgctcatgaagaaagatgtcaggcaaacttgccttcctcttgccactgttgtagtaaagtccggattcaaagtattgaaaaaagcaaagaaaattgtaatatggctcttgctgtactagaagttgtttatgctgctcctgtagagtgccaatctaagggatggcacaaatctctcactccagcagctgatgtagaaagagagattcatgaatcacagaaagcaggattttttgaagaaataaattttccttacccgatcgtctcggtgattggtgggggtaaaagagagatcgatctttatgcatattattttggcgccgacttggcagttttcttccttgttgcaatgttctatcaatctatcctaaaaaataagagtgaattcttggaagtttaccagctggaggatcagttcccaaaagaatttgttttcatccttatggttctctttttcttgatagtggttgaccgcattatatatctttggtcctttgctaccggcaaagttgttttctatctttttaaccttgtgcttttcacgtattctgtcactgaatatgcttggggaacggagctagctcacagggatattggaggacttgtactacgtgcaatctaccttacaaaatcaatttccctagcactgcaagctttacagatcagatatggtattcctaacaaaagcaacctatataggcagttcttgactagcaaagttactcaagtgaattacttgggcttccgtctgtatcgtgctttaccattcttgtatgaattgcggtgtgtacttgattggtcttgcacaaccacatctttaacaatgtatgattggctgaaggatgtcaatagagcaaaagggtgtttcttctttcaggctttctgggtcaagttggaaggttttcatgatactgtggctcaggcttggagtttggtggcgccaggcccctgtccttttgtcactctctccaggaagttgcaaggtactgctagagttttgcaaagttggagtgcgaaaacagtgggctgtttgaagatgcagcttgagatggctaggtgtagaagtgtgaattcctggtggaagaaggctgggaggaaggaggccgccccccggagggaaggatgggcctcccgggggcagcgatgggaggcggtggctgggtggtggagagccgctggcggctgcagtgggaagggcggccgcgccgccagggtgctggtgaggggcggtcgcgacgccggtgacgaggggagtggctgctgccagccagggaggtggagctccggcggatgcgagcctagcgtcgagcaccaggggctgcggaaggacgcatgggcacttaggtctctggccgacgtccagaccagagaagaggcatcaggctccaagggaggcgttggggaggagcagaggacggtaggggacgaggtgcaggagctcggcatgaccagctgcgcgcgtgctggtcgcagcagcggcgacggcgtcgctggatgcggaactggtggggctgaggcgacggatcccgcggctgcgcctgtggcggcagcgccggcgaagggagggccggtcgcacggccgtgcgccagcggggaggggaggggcggagccggggaagggggacccggccgcggctggagatgtggccgccccccgggagggaaggatgagcctcccgggggcggtggcggctgctgtgggagagaacaaaaactaacctag

SEQ ID NO: 18905 - DNA, 306 bp, Zea mays
  Peptide Sequence Number=SeqID_62280
atggagctgcgcatgacacaggtgaaggagaaggatccacgcatggcgtggaagaggtcgatgggccgagtgtgggagagggaaagtgtagggacacgagagttgcaactgaacactgtgggagagaaagaaagaaccggaggcgttgtcaaacttgcggccattgttgcactagagtgcacgaaccgggcgatggaactgggtggagacccaagtgaagaagtgcaagagggtgtgaaatgtatcggactccaatcgcagtggaaaagtccaaagaaaatgagagaaatcatcgaaaatcactag

SEQ ID NO: 18906 - DNA, 396 bp, Zea mays
  Peptide Sequence Number=SeqID_62281
atgaccggcacagacgcgtacgctgccgccgacctccttggcggggctcctcgacgtttggacgatcgaagaaccaagaaggtcggcctgctggtgctcttttgtcgtgtcgtcctactgaccgttgacgctcgaacgtcgacccctcccgaagaacaggctactgctgcgtgtctcccgaccatgaccacctcgactttggctaccttgacatctaggggctatcgtcttctcggagtccacaccggtctctactccagccgcaacattcgcaccctcatgacgctggaggcccttggtgaagatgtcggcgaactgagaagtagtcgagacatgaagaactcgcacatccccgacgatgacacgctcgcggacgaagcatgcttcatgcgttga

SEQ ID NO: 18907 - DNA, 1092 bp, Zea mays
  Peptide Sequence Number=SeqID_62282
atgacgagaggttgcacgggcaaagatgtcgcgcaggggagagacgggcagcacaaccaagaggtgggggaacgctgtcgcgcccgcgtcaagagaggggcgtcgtcagccgccatgaggtcggcgaagtcagagggcgagtcctggtggcgctggtccctgcaactagggcaccgagcgccatggaggagcaggagcagggggttgggcgctaggcgtccatcaccggcgagggagctcgctggcgtcggcctgccactgtcgggggggagcgaggacgcgctgaagagtgacggctcgatccgtgtcacttctaggggaggaaggggaggcttgccgatcaggcgcaggagagtgcgtgcgccggatctgggtcacggtcgcacagttgaagacggcggtcgcgtcatgggctacgtcgtagagcctcggaaaggagggggctcgcagggcatccctagacgggctagggcgagctcgctaccgcgcaggccggagcaggaaggggatgacggcgcggctccggaggacggcgcatcaggggcagcgtcccgaccaggcagaggagaggggcatgcgccagcgccgaggaggaccggggcaggccgcggcgggcagaggtgggggtggggttggccgcccattggcctggaggggagaggggaggccggcacgcgcagaggcgaggacggtgcggcgcctgcgagcacggcgtcggggcttgcgcacgcagagggtgaggaggtcggtgccgagctgaaaaatagcgtcggccatggctgtagcggcggcgctagccggaggagtggtcgccgcgccagctgcgccgggctagggaaggccaacgaaggggaggacgacggcatctgggccggactcgaggtcgacggcgtgttcgccgaagctaggcacggcggccacactgtcgaggaggggccgccgcgtcgacagggagccggagaggggcgtcgagtggaggagctctcgggggtagaaggcggcgctggtgatctgctggagaccctgtgcgcgtgcagcggcgtgaagcgggtggccgacggcctgggcagcaaaggttggcgacagatgtag

SEQ ID NO: 18908 - DNA, 345 bp, Zea mays
  Peptide Sequence Number=SeqID_62283
atgtatctctatgctgccctccttcacgacgcacgcggccacgtcgcctgcgccctatgtgatagcaccgcgtttgccagtgccacacgtggtcccgtcgccatcccctatgccacgtgcaaccccacggtctctacctttacccatgccatcgactgcgccacgcgcgaccctgttgaccccgcccgcaccacgcatggccccgtcgccctcgtctgccctgcactcgacacacgcgaccctgtcgaccccgcccgcaccactctgatagagaaggtgcactgcactcagtcggttggctttgtggaccctgcgcaccctaacatagtctacaagctcaactga

SEQ ID NO: 18909 - DNA, 534 bp, Zea mays
  Peptide Sequence Number=SeqID_62284
atgaccaggcggacgggtgggtgcgccggcggcttcctgctgccgttgctgctcctggcaggctgttgggccgccgccgccgagagaccctgtttgaaacaactccagctccaagaaatttggtggagttggtggagcaggtcattaggtgctctagaaaatcgtggagctggagttcaaagagaatatggagctttttttaggttacaggctctgaagaatgtgatgcctgatggtaagaaaagggaacatggtaggaagtggttagtatgtttaaaggttacaggctctgaggctctgaagaatgtgatgcctgatgcttctttacttgattggagcttggtttctcttattaatatggtcatcttctttgctattcgatttgctgttccaagaagagggtcaaaaagagagcgcaagttcttggctccagcagaaacccacaatctcatctcgtctttaaatccatcctctaaggaatcttggttgaagcctttctccaccattcagcaaaaactgaatctcttctcttag

SEQ ID NO: 18910 - DNA, 438 bp, Zea mays
  Peptide Sequence Number=SeqID_62285
atgggcaagaacaacaaacgcaagcgcgagccgactcctccgtcagaggactttggcgactcagaatactcagaggaggagttctcctctgagtccgaggggtctccgtctcccgtctctcccccagcgtcgtccgatgactcggacgactctcaggggattgccgcggaagtctggatgtacatccgggccgtcgagcgctccgggctcgagggctcggatgagtcagagtactcctcggatgaggaggactcggacggcggcggcgaggacgaggacgacgacgacgacgacaacgacggcggcgacgacggtgacggtgacagcgacggcggcagcaggggcggcaatggcggcagcaggagcggcaacggcggcagcagcaggggcagcggcggcggcggcagcagcaagggcagcaacaaggccagtggctaa

SEQ ID NO: 18911 - DNA, 444 bp, Zea mays
  Peptide Sequence Number=SeqID_62286
atggcgcctcctgttgacgtggctggtctgcgccctaggttgggtgatgtgaaagctcctccaaagccgaggtcgagtctgtctttcgtggccgaggtcgagtccgagcccctggttcgggcgaggcggagaccgtcggctgaggccagggcggagtccgagccctgggtcgggcggagcggagttcgccgtcttccggggcttagcccaagtccgagccctgggtcgggcggagcggagttcgccgtcttccggggcctagcccgagtccgagccctgggtcgggcggagcggaaccgatcagtggagtggcgaagtgacggcggtcacttcggcactgtcggctggggggcgcgcgtcaggataaagctttatgctgatgggggttaccagctgagaattaggagccttgagggtacccctaattatggtccccgacagtag

SEQ ID NO: 18912 - DNA, 147 bp, Zea mays
  Peptide Sequence Number=SeqID_62287
atggcgcagggacgcaacagacgacggtgccggagcttcgctgcgcgagaattactccgggttttcaattcaaattcaattcaagtttcaaattcaaaccaaatcaaatatgtgcagcaattcaaagaatatttaggcttaatatga

SEQ ID NO: 18913 - DNA, 537 bp, Zea mays
  Peptide Sequence Number=SeqID_62288
atggacgtcgaagaatcgcggcggcgacaaactccgacctgcgccaggaaaaggctgagcgcggaccagacggaccagaggtgctgggggcgaactgaggggtgtcctgagttgctgacagcgaggcagaactcaccgaggcaacgggcgcgacgggggctcaacggcgactgcagaacgggcggcggacgagcgagcagcggcgaagctccctgggcatgcgcagagcgagagaggcggcgaggttgtctgggtgagggcgcaaatgagcaggggagagtgggcaagcgaggtgcgggcacaaaaaggagtcggggcgtgcggaggtggccagaaaacgcgcgatgtgggtttgtccacgacgggagtgagtgtcacacccggttttgcaagaggttgcacactttacccacaagccgtgattcccattttgtctggggttctagcctccccattgatcactacaaggtccttacggagaggtactcaggaaacagcctgagccccctaaagaatcataagaaccccacgggataa

SEQ ID NO: 18914 - DNA, 264 bp, Zea mays
  Peptide Sequence Number=SeqID_62289
atggcgacgagcgacgacatcgtgctctacgacagcaagcagaagtggggaggggaaggagcaccgtcgcgcttggtggagaggagggccggttggtggctcaacaacggaagcgagtgggtgcggagaggtgaacaggcgctagcgacaggagctccaaacagcggtgtcatatacaagaagccggacgaatgggaaaagttggcgtggggaaagaagaaagggcagagagaaaaatgtcctggtggggcctacctgccatag

SEQ ID NO: 18915 - DNA, 318 bp, Zea mays
  Peptide Sequence Number=SeqID_62290
atggcgcctcctgttgacgtggctggtctgcgccctaggttgggcgatgtggaagctcttccgaagccgaggtcgagtctgtctttcatggccgaggtcgagtccgagcccctggttcgggcgaggcggagactgtcggctgaggccagggcggagtccgagccctgggtcgggcggagcggagttcgccgtcttccggggcctagcccgagttcgagccctgggtcgggcggagcggagttcgtcgtcttctggggcttagccctagtccgagccctgggtcgggcggagcggagttcgccgtcttccggggcttag

SEQ ID NO: 18916 - DNA, 369 bp, Zea mays
  Peptide Sequence Number=SeqID_62291
atgtgtgatgatgtccaactatgtaatcgctgtgtacgtgagtttctgatcctggcacatacatggtttgcattcaatttgccttccaaaaccagtagtaccagaggtgtgattgtctcacctgttggtgagggcaatcctagattgagcagcatggtcaacctggtcgccgtgctcaacactgagctagaccacgcccttgacgagttgggcaagactcgggcggagattgcgaaattgcgtgctaaacgcgtggagtgccgccatcacgaggatagttcccccgaccctatcaggactcaacacccttactgctcgccgccccgtggtcatcatgcttatgacacccctgctacaggaccaagatag

SEQ ID NO: 18917 - DNA, 141 bp, Zea mays
  Peptide Sequence Number=SeqID_62292
atggccatgatgggttcagcatcggaaaagatgtacctctgccaggtgaagaagcagcaaacatttgttgcttctgttccaaggtggtgcccaaagaagaaaatcaagactaaagctgcgggaggaagggtcctccattaa

SEQ ID NO: 18918 - DNA, 726 bp, Zea mays
  Peptide Sequence Number=SeqID_62293
atgaacgcgcttgttggaagtttggtcagccaagatttcgtgggagaggtaggagtaaatgagagagagagtgtgagggggtatataaaggatctcccaaaagctggcagccgtttggagaaaaggagtaaaaaccggttgaaccggttttcagaccggttgaaccggtttctaccagggggatcccggtccactgacctactcagccggagactcgaccggtttcaaaaccggttgagtaagggaaaattccggttgaaccggttttcaaaaaagatctgcagcgacttttctgacagctctgactgtcagacaggtggttcaacacaaaccaatagaaagattaaagttagggttcaaaaaaaaggagcaaaagaaaccgaagagagccctggtctggcgcaccggactgtccggtgcaccagggtggatcgacttcaaactcttcaccttcgggtttctctaggcgcactccgctataattcaccaaactgtccggtgtgccaccggactatccggtgcaccaagcggagcaacggatatcagcgcaacggtcgactgcacagtgccctgacagagctacagttcgcgatagaagtcagaacagcgccagaaggcgcaccggacagtgaacagtgcttgtccggtgcgacactggactgtccggtgcaccaagatgtcagagctccaacggtcgaaaccgtcagaaccctaacggttgggtga

SEQ ID NO: 18919 - DNA, 216 bp, Zea mays
  Peptide Sequence Number=SeqID_62294
atggcccagctcttcgagttctacaaggctgaagattctgagcatctttttggtgaaggcaaagatgttcggattacaggtggtgatgaggaggatggttatgattatgactatggtaatgcgccacctgcggcaacgagaacggagcgaaatgctgccagtgtttggttcagcgccaccagcgtcaacgggaacagagcgaaatgctgccagtag

SEQ ID NO: 18920 - DNA, 1509 bp, Zea mays
  Peptide Sequence Number=SeqID_62295
atggaggagcccacggagtccaggccagctggcgcggaggatctcgcgaacggcgcgaaagacccggaggggcctccgccggaggttgaggaggaggaagtggaggagccgccacgatcggcgacggcgaagcaggaggaggcgaaggaggtactagggtcggaggggtctcgcccgttcaccatgcgggagctgctcggcgaactcagggaggacggcgagacggcggtcggcggcagcaccgcgagatctgcgttcggcgacgggaacggggtcggatccgctgatgccgagggctcgtcctacagccaagatagcgcacagttttcatcacaccatgatgtagcgatggacttgataaatagtgtaactggagttgacgaggaaggacgttctcgccaaaggattctttcttttgctgctaaaagatacgtaaatgcaattgaaagtaatcctgacgaccctgatgcatattataattgggctctagtcctccaggagagcgcagacaatgtggatcccaattcgagttcctctaaagatgcattgctggaggaggcttgcaaaaagtatgctgaagctactcgacttagtccaactctttatgatgcatattataactgggctattgctattgctgatcgggctaaaatgcgaggtcggacaaaagaagccgaagaactctggaagcaggcaatactgaattatgagaaggctgtccagcttaattggaatagcccacaggctctcaataactggggtcttgggctacaggagctgagtgcaattgttcctgcccgggataaacagaccatcataaaaacagctatcagtaagttccgtgctgcaattcagctgcaatttgatttccatcgggcaatatacaacctcggaactgtcttgtttaagttccatgacaatgacactcgtgcattttcttttataatgcttcagtatggtttagctgaggataccatgagatctgggaagccagatgtctccccaaatgagctttacagtcagtctgctatctatgttgcagctgctcatgctctgaagccaaattactcggtctatcgtagtgccttgcgactagtccgctcaatgttgcctctgccatatctcaaagtggggtatttgactgctcctccagctaacaattccatcgcaccacacggggattgggaggtatcacagttcattttgaatcatgagggcctccagcaggctgatgcttctgaccagcctccatcgcaatcccctgggcatttggacaggggcagaaagcctgtcagaataaacgttgcagatattgtttcagtgtcagcatgtgccgatttaactttaccaagtggtgctggcctctgtatagaaactattcatggtcctacgttcttggttgcccatagttgggaggctcttgacggctggctagatgccatacgccttgtctacactatttttgcgagagggaagagcgatgtgcttgccggtattattactggttaa

SEQ ID NO: 18921 - DNA, 549 bp, Zea mays
  Peptide Sequence Number=SeqID_62296
atggccagcgagaataaggtatttaggttcgaggaagtcgccaagcacaacgtcaccaaggactgctggatcatcatcgccggcaaggtgctgtttttctgctcctctcccatcctcggctccccctcccctttgtggtggcacaggattttggatggctggcggcatgcctttggtggctttgtaggatatggttttgtgaaattgtttggtgttcttgttggtggaatggtgtatgatgtcactccttttatggatgagcatcctggtggagatgaggttttgctagctgtaactgggaaagatgctacagctgattttgaagatattggccacagtgattccgcaagggacatgatggagaagtaccacatcgggcagatagatgcttcaacaatcccagcaaagcgaacttatgtgcacccccagcaagcgcccagccactcagacaagaataatgatctcctcatcaagatcctgcagttccttgtgcccattatgatcctgggccttgcatttggtatacgtcagtacaccaaatcagagtag

SEQ ID NO: 18922 - DNA, 1575 bp, Zea mays
  Peptide Sequence Number=SeqID_62297
atgtgggcgtggggctgcgtcgagcgcgtggccgcgggcttcctcggcggccccctcgccgccggcggccgctggaacaccgccgtcgccgtcggggtcacggccgccgcgggcctcgtgctcgtcgccatcgtcgtctcttcccgcaggggattgaaccgagtatcagagcgcaagtctggccgttccttctgggagtttatagccttgacagttctgaagcacaaagagatgtggtcaaggcccagaacaggtgatgacacccagtggcgtatttcttgtaggaagggatatttgttattgaggaaacattgcctgcgtaaattagcatacatcatggaagagagcaagcagtcaactaaaacagttaaagtcaaccatgaagggagcaatagttctgaaaaaggtgatgaatctggttgtgttagtccttttgaatctgaagatgttcttgaaaattctggcatgggagaggctacaactgaggaaggaattccatgcctcagtacagagcaagaagtgcaggatgacacttctgaaacaaagccagagcagatgaatggaaaccagtcttcatctagctcctctgatgaggaagggagtgaaagaagtgttgtgactcaagtagaagcatctcataagaacttggcctcagtttgtgagtcctcatttgaggatggacaagaaagcatcccaagatattcgaacacaggaggaaatatggatgatgttgtgttatctaaggctgcccgccctgtgaagtctgcacgggcaactgaggattttgagacatggcaacggattatccgtttggacgcagtccgtgctaacgacgaatggatttcctactctccatcccaagctgcagtttccaaggagagggcaattgaatctgctaaagctgtttttctcaaagactatgaccacttagaaccatatcggatccatcatgcgtcacgccttgttgctattcttgaggcctacgcaatatatgaccaagaaattggatattgtcaaggaatgagtgacctgcttgcgcctctccttgctgttctagaggacgatgacgaggccttctggtgctttgctggttttatgaggaaagcccgccacaactttaggcttgatgaagtgggtatacgccggcaactcaatatggttgccaggataatcaaatacaaggacttccatctctacagacatttggagatgctccaagctgaagactgctttttcgtttacagaatggtggttgtgatgttccggagggaactcaccttcgagcagaccctatgtctctgggaggtgatgtgggctgatcaggcagcaaaccgcgccgagatcgcaaactcatcctggcgtaaattgcagttgggagcgcctccaacagatgatctgttactgtatgcgattgctgctagtgtgttgcagaagcggaaactgataatagaaagctacaacagcatggatgagatcataagggagtgtaacagcatggctgggcagctggacatttggaagctcctggacgatgcgcacgatcttgtggtgacccttcacgataggatcgagtag

SEQ ID NO: 18923 - DNA, 192 bp, Zea mays
  Peptide Sequence Number=SeqID_62298
atgaaggatgccaaacccatcaagacaccaatgggaattaatggccatttcgacctcgccacggaaggggaagatagtacttcgagggctctagtgatttcgtttttggcgattcatgccaaagggggagaaagtaagagcccaaagcaaaaggaccgcaccaccaccaatttcaaaaaccttaagtgttga

SEQ ID NO: 18924 - DNA, 483 bp, Zea mays
  Peptide Sequence Number=SeqID_62299
atgggcgtgcctgacttctgcgcgcgctggcgtgcattcaatgcgctgcaggtagccgttggcgccgaagtatccgttgcttcgatggcacaccggacatgtccggtgaattatagcggactagccgttgtgaattcccgaagctggcgagttcctgaggcgcagttccttggagcaccggacactgtccggtgtacaccggacagtccggtgaattatagcggagcgcctctggattttcccgaaggtgacgagtttgagtgggagtcctctggtgcactggacactgtccggtgccacaccggacagtccgagacaatcgatcaagccaaggatggaggcaagaagaggttcgaggtaccgagtgcacgggagaaggtcaaggagaccaggaacccaaagccaggggtgaagaagaagacttgcaaagtcaaggttgatcgagttaagaagagttatggtgcatcaaggatcactacataa

SEQ ID NO: 18925 - DNA, 882 bp, Zea mays
  Peptide Sequence Number=SeqID_62300
atgtcttctcgctcccttatgcgtcgcgtctttccaccttccaagcccccggatggggggtacccgccgtcttttcgcctcatcgttggaggaacgcaactccgtgggagttggtacctttcagccatcgttcggcttcaaggattttcatcacacagcccggttgctcccctccaccggtggtcacccaagacagtgacctccagctcctggatggggagaggcaaaccgggctgtgatcccgccctcagcatcgggggtgttcgtcatcctcgctggggcggggagcgaggcgagccggggctctacctcctgcgcgggtcggcggaccacctcttcttccagcttctggtggtggcaatcgtcctcccgcgctgcgacggagacgtcctccagccatgccggggaaggcgaactgttgctgcccagctaggatgcaacattccgtcctctccctcgcattcgcggcgaggacggcagcgaggatctgccggtgcgcttgggagcggcccgctctttggctttaatagctggttcgcatcccttgagcgggaccgcgaacgagagccctccggtggccgcgtccacccgggaccatggctgctgctgcataggtcgctggcgagcctcccgatgttcgtcgccccgcaggctcgaggtcgctcatacccgcggggacggaaccagagttccgtttgtaagggcactttgaatgccagtgtttttgttcattatggctgtcgaggcctgaacatggatgtttgtgcgagcgagagttgcttctcgcggaaggtgatgagtgaggtatccgtatcccggaggcgtgggagtccctcggctcggtcggccttgccgcttacgcatactttcacccgtccatga

SEQ ID NO: 18926 - DNA, 987 bp, Zea mays
  Peptide Sequence Number=SeqID_62301
atgaaccagcaccatctacaggccgttggatcaagatccgagggcccaaatccatttctacatgagctaatctcagccgcatacgagcagatcaacggccgaggccggatcagtggaaggcgcccggaccagctgccgaggactcatcgccggcgagggcggatcgccacggcgggtggcgacaagctttcctcccgcactgccaatggcgcgcgcggcagattttttgtacaagagcacgacgactgttcctattggacactgcgtggcagtagagaggtgaaaaagagcagctgctgcaagacacgtgtgggcatggaggcaagcgtcgtgcggcacggaagggaatccagggcagcggcgcaggtccttgcggcgattgctttgcgcagcgacggcggatcacggcacagaggtggccgaggagcgtttggccgtgggcatcacaatgcgggagagcgctgggtctgcggggaggagagaccgcggggcacgctaattattcctaggagcccaggggatcacggaatccgtggcgaggcggacgggagcgctgaccacgcgagaatggcggattccgttgctcgccaacggtccatgcgcggattccccggcggtggtaacgcacatccgaacaaagggaggattagggttgaaagagacccggctctttgtgggcgcctcaacgaggaagtagggcaccttggtgatgttgatcctagggcaatagatcttgccatgagaatcgccgaaaggatgttcctcaaaatgaaggaagatgaggcaaagaacaaaattgaagaagaaaataatcgatggagaccaaacgacgaatccacctcttcacaaggttcgtctttcaaatccacttctcatatgtgctttattgctaatgggagtgacagtgaaagtgaaagtgaggatgaggaggagcaagaaagtgatagtgaagatgaggaagatcttcaaaaattcttgctcaactaa

SEQ ID NO: 18927 - DNA, 159 bp, Zea mays
  Peptide Sequence Number=SeqID_62302
atgagcaagaacacaagagacacaagatttatcccgaggttcggtcacaccaccaaggtgccctacttcctcgttgaggcgcccacaaagagccgggtgcccccaaaagctggtggccgttggggaaatctgactgaaattcggttgaaccggttctaa

SEQ ID NO: 18928 - DNA, 2787 bp, Zea mays
  Peptide Sequence Number=SeqID_62303
atggcggcgtccctgctcctccgcgccgtgcgccgaagggagcttgcgtcccctctcggatccctgggtgccagcatacagtcaacatgtgttgccaacgtttgctcaaaatggggaagttttgcaagacctttcagtgcaaaagctgctggaaatgaggttattgggattgatttggggacaactaactcatgtgtttcggttatggagggaaagaacccaaaagttattgagaatgctgaaggtgcgagaacaacaccatctgttgtcgcatttactcagaagggtgaaagacttgttggaactccagccaagcgccaggcagtaaccaacccccagaatactttctttggaacaaagaggttaattgggcgacgcttcgatgatccacagacacagaaagagatgaagatggtgccatacacaatcgtgaaggctccaaatggtgatgcttgggttcaaacaacagatggcaagcagtactcaccaagtcaggtcggtgcatttgtgctgaccaagatgaaggagacagctgaatcttaccttggcaagtctatctcaaaggcagtgattactgttccagcttatttcaatgatgctcagcgtcaggccacaaaggatgcaggccgcattgctggccttgatgttgaaaggatcatcaatgaacctacagcagccgctctgtcttatggaatgaacaacaaggaaggcttgatagcggtatttgatcttggaggaggaacttttgatatctctattctggagatctcaaatggagtttttgaggtcaaagcaacaaatggtgatactttcttgggtggtgaagattttgataatacactattggagttcttggtgagtgatttcaagagaactgagggcatagatctgtcgaaagatagattggccctgcaaaggcttcgtgaagctgctgagaaggcaaaggttgaactttcgtcgacttctcagacagaaatcaatctgccattcataacagctgatgcttcaggggcaaaacatttgaacatcacactgacaaggtcaaaatttgaatctcttgtacacaatctgattgagagaactagagatccatgcaagaactgtttgaaggatgccggaatatctactaaagaggtggatgaagtacttcttgttggtggaatgactagggttccaaaggtgcaggaggtagtctctgaaatctttgggaagaacccaagcaaaggagtcaatccagatgaagctgtggccatgggtgctgcacttcagggtggcattctccgtggagatgttaaggagcttcttcttcttgatgttactcccctgtcactaggtattgagacgctcggtggtatcttcaccagattgatcaacagaaacactacaatccccacaaagaaaagtcaggtgttctcaactgctgctgacaaccagacccaggtaggtatccgggtgttgcaaggtgagcgtgaaatggctacagacaacaagctccttggtgaatttgacctcgtgggcattccacctgccccaagaggcttgcctcagattgaggttacattcgacatcgatgccaatggaatcgtgactgtctcagccaaagataaggctaccgggaaggagcagaacatcaccatacgatcctcgggtgggctgtcggaggctgacatccagaagatggtgcaagaagctgagctgcatgcccagaaggaccaggagcggaaagccctcattgacatcaggaacaatgccgacaccaccatctacagcatcgagaagagtcttggagagtacagggacaagatcccggcagaggttgcatctgagatcgaggctgccatcgctgacctccgccaggagatggcctcggatgacatcgagaagatcaaggccaagcttgaggctgccaacaaggctgtctcgaagattggacagcacatgtctggtggtggctctggcggctcgcagtcaggatctggacctcagggtggcggcgaccaggcgccggaggcagagtatgaggaggttaagaaggctcggactcgggctaagccccggaagacggcgaactccgctccgcccgaccccagggctcggactccgccctggcctctgccgaacgacctccgcctcgcccgacccaggggctcgggctcggccatggaagacagactcgacctcggcttcggaggaacctccacgtcgcccgacctagggcacaggcccgccacgtcaacaggaagcgccatcatcaccctaccccgagccgactcgagccgcagagaacaagaccgctcccttacggaagcagggggacgtcagcaaggactcaaccgctccgacagctgtccctccgccaggctccgttgctcctccgacagccacgacatcacaccagcagggtgccaagatctctccggctgccacattggcatggccttcttagagaaggttggccgcgcggggacgaggacgggacaggcgctctcttggggccgctcgcttccctcacccgcgtggacgcttgtaaccccctactgcaagcgcacccgacctgggcgcgggacgaactcgaaggccgcgggatttccacctctctcacgcccgtctccggccacctcgctttccccccttcgcgctcgcccacgcgctcgacccatctgggctggggcacgcgacacactcactcgtcggcttagggacccccccggtctcgagacgccgacagttggcgcgccaggtaggggcctgctgcgtgctgacgaacaacttcccgtcaagctctag

SEQ ID NO: 18929 - DNA, 777 bp, Zea mays
  Peptide Sequence Number=SeqID_62304
atgacggtggcaggcgggcgggagcagcggtcacgtcgtcggccagactcacgtcccatccgggggcagcaagagaaccccctctcacggcgtgaagacagggcgcccgtgatccgttcctcgaatggctcgcgcacgcgcaacagccgccctgccaacaactcaccccgtcgcattaactccgcggcgggacaggcggcgcttctggcaggagaagcggggaccgggaaagggggataccccgaaaaaggatccttccctgtgaaggaaccgggctccgagccccccctactgatcagaggttcgaaggctggccctccgaggggttcaacagtcgcctcagatcgcgtgggccctacacccactactggtccgaggggttcgaaggctggcccccgaagggttcacagtcgcctcagacgccgagcgagggatgaccaggggtacgttcgatacataaccaaggctcgggctgcgctcccgagctcaccggagacaccatgttcggtgcccatcgagggtaacatggcgctctcccccctcctccttgcggaaaggcgacgtaggggcgtatgtaaaaaagccgagtctgtccctgatcgccctctcgccctgtgcggaggctcgggggctgctctcgcaaacccggctccggccgaaccgttgacagcgtcaacataccagcccgagaacttgggccccgaccgtgcacccgggctacggccagttcgcatgagggaacaaccagaccagccgaagcattacgcaaggcattaa

SEQ ID NO: 18930 - DNA, 509 bp, Zea mays
  Peptide Sequence Number=SeqID_62305
cagactccatagccgacaaggcaattggaaggatgcaagagattgcagacaagatattttccgtagcgagggaaacaatccgtcctggacgtggattgacctcatttgacgctaccaaacttcgtgtagcattggaggacattgcttgcatgatggagcaagattctctagtgttccaagagtatttggacaaggtcaacaatgttacccaccagcctgacagcaactacgaaccctcagacttgtcctcaccaccccctgttgaagacaaccttagtccagactgggactttgccgagcacttcgaaaagttttggggtattgaatatcactccgatcagatgcctttgtttagtgacaatgagaaggccccccttgagaatgaggacgagcttaaggttatgtttggacccattgtctgcaccagtgaaacaacccttgttcctggagttgaggatgcaaattcttcatctgatgaccacgtgcaagccacttttaggtgggggtga

SEQ ID NO: 18931 - DNA, 818 bp, Zea mays
  Peptide Sequence Number=SeqID_62306
atgaccattggtgagggaatgcagctgggctgcatgatgaaaatccttgaagccaagcgatggctgaagggcgccaacccccgcgaggtcgcgctcctccagcagcagcaagacgaaggcaacgcgggtgcttcccatccggaggctcagaaggcggctctccccactcgcatccttaagcgtcacgggcaaagtcttcaccgacgtgctccagggtcctccccctacgacacgggggctgggtcccacacgtcatgcgggctgaccagaaacgaaagaagccaaaccactgcatgtgaagcaggtaaccaccccgcagttataagcattcccccattctcgccgaaaccagcgggcgaaagggcggaccgccatgcaggaggcgtgcaaccgcaccacgattgtgcaccctttcggcttcatcgcatccggtgggtcagcgtgaaggcctgggcccgcatgtcatgcaaccggcgcaacggttactgcatgcaagaaaccgcaccgccacttgcgccaatgacgcgccttctcgactgcggaaccggtgccgcgtctcgaggcagccctgctcatgacccaacagtgccaatcgagcacaacgatcacggggaccgggaaagggggtactttgaaagggatccttctccgcgaaggaagcgggccccgagccctcctactgatcaggggttcgaaggctggcccctcagaagggctggcccctcagaagggttcgacagccgccccagagcacgcagagtgagggatgactctgggtacgtccgttacatggccgaggctcgggctacgctccagag

SEQ ID NO: 18932 - DNA, 270 bp, Zea mays
  Peptide Sequence Number=SeqID_62307
atggagttgcgccggtgtggtcaaaaccctgacgaactgaatggtcacgaaccttatcgaaatgatgacgagcggattcgttacggcatggaggataggaacctcttacctgcaggcggcttctcagcgaagcgcggtgccgaaaagctgccccaaaatctaggcgtttgggagtcgcttcagcttctggcggccaaaagccgccaagaagctgaaccaaatagggacctagtgccgttttccccttctagctctcaaactcagccataa

SEQ ID NO: 18933 - DNA, 315 bp, Zea mays
  Peptide Sequence Number=SeqID_62308
atgagggtcggaggaggcaagagatatgggcggtactggattgccgacggggcaatcaactcgtcgtccactcaactctgtctcaggtgcgagcaagtagcacgagctcgagcccaaccatacgaccttgatccagctagaaaaagagaggatggaacatcaggagatggaggcgaggatgatatcagagcgggaggcggagcgggaggcccgcttggtagatcaatagatgatggcaaagatgttccagtacatggagagccttggcaccgcacatggtttcgctccaccaccttcgttgttccctgcagttga

SEQ ID NO: 18934 - DNA, 207 bp, Zea mays
  Peptide Sequence Number=SeqID_62309
atggccagcccacctcggtcccttccaagccgcgcctgcccctcggttaggccggactcctcgccgccgacgagctctcccgcctgcgcacgtggaccggccgactccgaccacccccgacggcgacccgcacatcgccgtgaccctcaggacctcccctacaccctcgaccacctcaccggagtagtctcgccgccgacaacttag

SEQ ID NO: 18935 - DNA, 526 bp, Zea mays
  Peptide Sequence Number=SeqID_62310
cttgattcgtggtcgggcgaggcggagtttcgtcgtcttccgggtcttagcccgagtccgagccctggggtcgggcggagcggagttcaccgtcttccgggtcttagcccgagtccgagccctggggtcgggcggagcggagttcgccgtcttccgggtcttagcccgagtccgagccctggggtcgggcggagcggagttcgccgtcttccgggtcttagcccgagtccgagccctggggtcgggtggagcggagttcgccgtcttccgggtcttagcccgagtccgagccctggggtcgggcggagcggagttcgccgtggcgcctttggcaaggcctgactgcctgcctttgcagctttatgctgatgggggttaccagctgagaattaggcgccttgagggggaccagcctttctcggttgcatttcgatccggtgggggaatcacctgcagtacttttggagagcgcctctgggccactaccgaccttatcgacggggcacgggcgtccactcggataccc

SEQ ID NO: 18936 - DNA, 957 bp, Zea mays
  Peptide Sequence Number=SeqID_62311
atgaagcgcgggcgcaaagctcgcacctcaacgctccacgtcactctcttttttatggctgttcgatcctattccgatgtcaagcgcagcgcaaagctcgctacccatgcgcccactgtagactgccccgcccgccgcgccttctctctgcaaacgcaccgcgcccgccccgcgaacccctcgcgcaagccccgggagcgcctgccctacctcgcctccgagtgccgcgacctcgccgacgccgagcgctggcgctctgagatcctccgcgagatcggcgccaaggtcgccgagatccaaaacgagggtctcggcgagtacgcgcgcgacgcgtcggagatggcgtgggtggacgtgtcggactgcttctgcgaagccggcaccggggagagcgtgctgacggagatcaggctcgacacgcgcacgagcgcgtcgatgcggcacgtcgtgctgccggcatcggcgcaggtgaacctggaggaggggatggtgaaccggaacatgctggggcggcggacgcggtacgtgtacctggtcatggcggagacgtggcccaaggtgtccgggttcgcgaaagtggacctggtcgccacgacgctggcgcggcaaagcgggcacgtggcgtggagccgcagccacgcgcccacgcagtcggcgtggaaccggtgcccgcagcacgggaggaggcgcgccgagtcgccgtcgcggagctccaggatgcacacaacgcactccggggccttcccgcattcgccgccggcgctactggagtacacgtacacgggcagcgccgacgccacgtcgtcgtccaccggctgcgggctgtggtccttgctactccgccgagctcccttctccccacgttgtagcgcggagctccgtcgggcgctggccctaacgtggctcttgtcgatcaatgcgtcgtcccttcaccggctcccatgcgcaccttgttga

SEQ ID NO: 18937 - DNA, 1029 bp, Zea mays
  Peptide Sequence Number=SeqID_62312
atggaggacaacatctgcgaaccttccgaaatgatgtcgaagcgaaactcggctcgtggtcgagcgcacggaccccacggtgtgaggccactcgtcaatgatgcacgtgaggtggaggccagtctcgggaaggagcctccgagggaccgcagtggagtggcggcacgtggtcgtgggggcggcgacggccttggtggaggcgacgtgcggtcaacaaggtgcgcatgggagccgccggtggacgacgacgtggcgtcggcgctgcccgtgtacgtgtactccagtagcgccggcggcgaatgcgggaaggccccggagtgcgttgtgtgcatcctggagctccgcgacggcgactcggcgcgcctcctcccgtgctgcgggcaccggttccacgccgactgcgtgggcgcgtggctgcggctccacgccacgtgcccgctttgccgcgccagcgtcgtggcgaccaggtccactttcgcgaacccggacaccttgggccacgtctccgccatgaccaggtacacgtaccgcgtccgccgccccagcatgttccggttcaccatcccctcctccaggttcacctgcgccgatgccggcagcacgacgtgccgcatcgacgcgctcgtgcgcgtgtcgagcctgatctccgtcagcacgctctgcagctggcgcccgtcgtcggcgtcgttgaagatggagtcggcggggggtcatgcaggacccgaccaccaccacctccccggtgccggcttcgcagaagcagtccgacacgtccacccacgccatctccgacgcgtcgcgcgcgtactcgccgagaccctcgttttggatctcggcgaccttggcgccgatctcgcggaggatctcagagcgccagcgctcggcgtcggcgaggtcgcggcactcggaggcgaggtagggcaggcgctcccggggcttgcgcgaggggcgtgcgggggtggccgttgcggcagcggaggtcgtgcggcgggaaacgcggggaacaggcgggacgcgggcgtgcggtag

SEQ ID NO: 18938 - DNA, 657 bp, Zea mays
  Peptide Sequence Number=SeqID_62313
atggtgatccctctcctcatcgtattgtttctgttggtcctgtgcgatgaacacacttggatgaggttacaatacgcgtggaacgccatacccttcattctgctattttgtgctatctccacaaataaaatcttctccaacaacaaacctttcagcttcaccatagcgtctgctaggtcgttgcttcagattgacccaaattcaggacttgttcaggagcttggtaattcatttttggacttcgtcgctaacctgaatgacagcaaggtaaaagttggacaaattttggaagaggacacccaaaacattgtcaatatgactatgaatgtgtcgtctggatggagcattgtgaaagaagaactcatacttcctgctagaggtgcccctttcaatagttgccatgcttctactattgtacaggatggtcactggcatcctccagtggtggctgatgaacaagatggggtgcccatgtggaatcctgttttgtttcagcttccctcccgtgagctgcttctcttctacaagattggtcaagaagttcagaagtggagcggtgccatgaaaagatcgttagatggcggtgtaacctggtcacctagagagcagttacctcctggcatccttggtcctattaaaaataaggcatgcaaatag

SEQ ID NO: 18939 - DNA, 228 bp, Zea mays
  Peptide Sequence Number=SeqID_62314
atggttgcggacgtgattggcaaggagtacacacgatccacggctaattctgtagtaagcatgccaaatgcttggaagggtcggcacggggagagcgatggcgatgggtctggtggccgcaaggacagtgttgaagaggcagagcagttcctgtgctccatgctcggggataattccgagcttggcatgggtgttgttagagacgtgccaagtgagcctggtagctaa

SEQ ID NO: 18940 - DNA, 702 bp, Zea mays
  Peptide Sequence Number=SeqID_62315
atggcgaattattctctgataaaaaatcttgggcagattgcttttacatgcatggtgtatcgagcattgatccttgcatacatgggacaagttgcttatctgtgtaagcatcatatcatggaaagtgactacaggatcggattctatgtgtctgtgccaggcaagttattctcgtcagttcttatcatcagagatgcgaaccatagcgcgatatcagaatcagtgctgattcttaatgcttacaatgcaccatttcagagaaaattaggtggcccattatggcaattgctattcttgcaacagttgtgggaagccaagccgtcatcactggaacacaaaacacttgagaaatgcatcagggccgtcgaggatcgatcaggcggtggcgccgtcgggcagaagcggtcgtcaccggacaagatgcacaggtccaccatggacgccgtctaccaccaccaccaccaagagtcgccgttgacgggcaacgtcgccgccaccgccaccgccggtaagaagctgggcgtggagcggttcaagttgccgccgatctacatctcgctgtcgcggaaggagaaggacgacaatttccttgcgatgaagggcaccaagctaccccagtggcccaagaaaagggccaagaacgtggagaccctccaagtattaaacacctggcttgagatcgatttgatcctctatttctaa

SEQ ID NO: 18941 - DNA, 663 bp, Zea mays
  Peptide Sequence Number=SeqID_62316
atgtacggtgaggacgcccgcaccatcgccgagctctccatcgacgactacctctacccggacgccgacctctacaacgtctctggcctgccgcccctcgcgctgcccccgctcacctgcgacctctcccgcagcaaatgggtcttcgacaacgtctccgttccggcgtaccgggagaaagactgcaccttcctcaccaagcaggtctcctgcctccccaacggccgcccgacgacatgcgacagtactggagatggcagcccaacgagtgctccctccccacggcattcagttggtgctatcaggagctatgcaagcagaggatataaaggagctatgcaagcttttagtggtgctatcaggagaagctgcaaaagcatatgctggaaacctggttttccattgacgattcagcagggcgggaggtgcttcaaccccgacaccgtccacgaccacgcgtcctatgccttcaataactacccgcctcaaccagctgcgacttccgtggtggtctgcacatttggaagcatggtgtttgcaagcatccttcttgttcgtggtatatggtctgaggtgacatacagcagaaaaaaccgttacagctatattcaccggatcgacaacgatgagaaccgatggagcagagtccagactgctggttaa

SEQ ID NO: 18942 - DNA, 1050 bp, Zea mays
  Peptide Sequence Number=SeqID_62317
atggcctctctgcagcaacgcaagtctcgtgttcttcgtgtccggctttcgccgagtgatccggccggtacgtctctgcagcaacgcaaggatgagagcggcggcgcccacgcggttgctgatgaggcggtgcgcgggacgggaaaaggcaagagcgaggcggcgccggggcgccggaaggtgacgtacgggttccacctggtggagggccggatgccgcacggcatggaggaccgccacgtggccgagttccggaagctggacgacggcaacgaggtcggcctcttcgcggtcttcgacggacactccggcgccgacgtcgccacctacctccgcgagcacctcttcgacaacatactcatggaccaaaattcagatactagcgttgcgttgggttgcgtcgattatgtcgggacgcgtgtcgcgtgctcggctcggcagtcgggctccgatttctggacggacccgacggaggcgatccggcgcgcgtaccaccgcacggaccggaagctgctgaagaaaacggcgggcgacgacagcggcgaggggatgaagaagggcaggcggcgcggcgggtcgacggcggtcacggcgatcctgatcaacggagaggatctcgtggtcgccaacgtgggcgactcccgcgccgtgctgtgcgacgcgggcggcagggccaggcagctgtccgtggaccacgagccgctccgggagcgccgcgccatcgaggcccgcggcggcttcgtcaccgagatccacggggacgtgcctcgcgtagacgcgcagctggccatggcgcgcgcgttcggggaccggtcgctcaaggagcacatcagctcggaccccgacgtggccatcgaggacgtcggagacggcgccgagctgctcgtgctggcgagcgacgggctgtggaaggtcatgtcgaaccaggaggcggtcgacgaggctcggggcatcgaggacgcccggaaggcggcggtcaggctcgtcgacgaggcggtgcggcggggcagcaaggacgacatctcttgcatcgtcgtgcgactgcactag

SEQ ID NO: 18943 - DNA, 354 bp, Zea mays
  Peptide Sequence Number=SeqID_62318
atggcgttccaggcgtggtgcctgggcaggaagggcctgctgttcgtcttcgtcttcgggcccgtccagaccgtctccaccgccatcctctccgcggctctcctccgccaagtcctcagcctgggaagaaacagaaagaagaagaaaagaaaagaggtgaaaaaggactggctgtgtacagccaagactcagctcagtctggcacaccggactgtccggtggtgcaccggacagtatccgtgtaagggcgagagactccaagttgtggagattcctcgcaaacgggaaaagatcaaagtaaagaaaaacactatggtattcaagttgatcattggatcacttgagaggagttga

SEQ ID NO: 18944 - DNA, 540 bp, Zea mays
  Peptide Sequence Number=SeqID_62319
atgaacaccagttcgatcaatgcagcttccagttggagcattatgaaggaggagttcacatttcaagcacatgatcgccctttcaataattgtcatgcttccaccattgtagaggatggctattggcatcctccagtagtagctgatgaagaaaatgcgacagcaatgtggaatcctgttttatttcagctcccctctcatgagttgcttctcttctacaagattggtgaacaccctcaaaactggagcggtgccatgaaaagatctctcaatggtggtatgtcctggttagagagggagcaattaccacctggtattcttggccctattaagaataagccaagcccaacgcattataagagcccaactcagctcagtaatgctgaaaatacccagcgcaccaagctcgcgagaggcacgctcaaagtggccgtctccacagacgacggcctctcatggcaagaggtggtgacgctggagaacgcggaaggctgggagttctcgtatcctgcagtgatccaaacccagggccggccctga

SEQ ID NO: 18945 - DNA, 251 bp, Zea mays
  Peptide Sequence Number=SeqID_62320
ccattcccgaccccgtccagccctcggagaagactgtgcacgtctccgtgaagctccccgagcgaggaatcgggctctgcttcaccggagaggccggcccaaggtcaccggacttcaaccgaccgccggcaaccgtggaccgaggttccctggaggagatggttgctgggataacttggccgaccaccctgccactgggttggactgtcgagtgggaccctgcctcggctgaggaggagcatgaggagtga

SEQ ID NO: 18946 - DNA, 186 bp, Zea mays
  Peptide Sequence Number=SeqID_62321
atgcagtacaatggatcaagcagtctcattagctgcgagaagcagacgattcgaatcgagtttttatccttgcaagtgaccgcacttgtacccaccataaccggaatgggagaccacgtctcaggtcgcgtgaggggtaaagtctgcgggcaggttcactcagaaaaagacccactggacatttag

SEQ ID NO: 18947 - DNA, 300 bp, Zea mays
  Peptide Sequence Number=SeqID_62322
atggcgtttccccagcagctcaatatgccgtcgatcctgtcagtctcagtcgcagcacgcgtccgtggtcgtgttcatcgagttcaccgacgctctgttgccggttcgactgtcgtccctactgcgtgcctcgctgcgtgctcgccgggtgtcgtctattgtaccccagcactcgtgcttgccttggctcgctttagcgctcgcacgcctgctcgttatcactgcggcgcactcgctcttcgtccatcgggcttcgcgcgtgctggagaaagtctaagatcaaatgatttggatgcctga

SEQ ID NO: 18948 - DNA, 390 bp, Zea mays
  Peptide Sequence Number=SeqID_62323
atgtggtcgaccggcgtgtgcaggggcgagggcgcaggcgtccacgccaaggtgaaggagcaggaaaccgtggttgccggtgaacccgacgacgttttgaactggggcaagtccagcgagctccatggtgagctaggaagggatggacacccgacgaggtggccatggccggtcaagcggaggatgggacggcgcgtagactgggcaagcacggataggcgagcgtgccagggagcttgggggaaggaaagccgcagcgcacaagagctctggccgggtgcgcgttggaggctgggcaccgagcgccatgggagggaccgaagcgcagtccgatggaggaacaagggctggcagccggccatggggagcaggcgcacgtggggaagatga

SEQ ID NO: 18949 - DNA, 552 bp, Zea mays
  Peptide Sequence Number=SeqID_62324
atggtgtcgaactgggccgtggaaatccgtcgccgaggatggaacctgcagtcctgggagactcgcctcggcacgatgatgggtccgcagcttctccgcgtggagtttaatgctggagaggggggaattcgtcgccggagcatgccttccacttccaagtcactgaaagcgtggacgggtcatctcgtcgtcccaaccctaggtaagtgggtcctagaactactcgccttaagctcagcatcgtgttgcttggctcgatttggggagagaagtcactgcgggcgctcctggtccgacaccggctatggcgccatcgtgcggactgcgcgccgccgcaattgggacgtggggggtggaagacgggtttgtggccgtcgatctcaagatgggtggctaggattagatcctggtttaccctttcgttccatcgaagctataccgttggatcgggaccgggtgtatgaaattccatcgcggcattttaaatcccgaacgtcgaattccgattcgagggtcgtgagcacgtaccggttcgtcgcagccggcttttaa

SEQ ID NO: 18950 - DNA, 810 bp, Zea mays
  Peptide Sequence Number=SeqID_62325
atggctcgtcttagacacactactccatcctctagccgcacagtgtccggtcagtcgagtcacctggagaggctgcaccaccggctacgtgaggagcaggagcgccagcgtcagcagagggagcagcagggctcttcctccccgcctgagcaggaggtggagtccgtgaggcgccgttcccctgttcctcagctggaggcgccccctgcaccaccgcaggacaccccggctattggaggagctactggaggaggtcctggaggagaccccaatggagacgacgacgacggctcagaccacagtactgagccctctgaggagcaggaggcagagggatgggtcgcccgacccatcacccgtgacgccgctcatggttgtcacttccacgacgcactcgacaccttgttgcgccgggctttcgaccggcacacctggtcgatcgagtatcgttgtgtagtctaccagcacagtcgcgggaggtacccggaccgctgggaggctacctgcctagtactaccccgccgtcctactggtatcacagggagtgtggttgtcttgcctattggtgaggataaccctaggttgagccacacagtcaacctagtcgttgtgcttaacaccgagctggaccactctctggacgagctgagcagggctcgagcagagattgctgagttggcagagcgccgccaccaggagggtggttcccccactcctgttgggactcagcacccttaccgctcgccgccacgtggtcaccacacctatggttcccctgcttgtaggaccaagatagatctggatccttag

SEQ ID NO: 18951 - DNA, 1101 bp, Zea mays
  Peptide Sequence Number=SeqID_62326
atgcatatatcttactcattgcattcattagattgggatctcgctgacggagagtacgtgctcatccctgagcaaggagctgtccacgaggaagaccaggagcaagctcccgagactgccatcgaggatctcctcgcagccccagcatttgaaggcaagccccggactagaccgctagacctaagacaaaaggccttaggaatagtgggagaaataggtggcaaaatgacctcacctacccctgccagtggaggagacactcgtttcagctctgatttcctttctcatgatggttttccttccatcttgtgggaagtgcttaactctgccggttaccctacaccccctttgtacacagtgcagctgtacaaagagcatcgggtaccacattgccgagcttggctgactctagaggctcatccccttcagccgggttggcgttctcttgactccgagatgattggattcaggacagacgacaccactgaagcggcagctataaagaccctgacgactttctgtggctaccatccactggagatggtgatgcaccccttgggactcttccctactgaggacaaggatgaccccatgtggtgcaaccgcgtgagtcacgtgaaggacgtatgggcgatgtatcctgacttggttgggagggtcactgttcagtgcatgagtgcgctgtaccaccttcaggccctgcagagcgacgctatggcacatcttgctaacctcgctcaaaccaccaagctcaccctcgatagccaagaggacttcgtggtcgacttgtccttcgagttggtggagaaggacctacaggtggaaaggctgagccagcgcatcaccaccttggagcagcaggtggagatccgagacaacaccattgatgtcttggagaaccagctccatgatgtgcagcaggaacttgaagaagctaatgaccacctagacatgcaccacctggagatggaggccaatgaggccggaagcgagggagaagaggctcctgaggagttaggaccagcccctggtgccaatgtgactgcctccgcgatgcccccttcacccatgtccagtgtcgcttccactactcagggttga

SEQ ID NO: 18952 - DNA, 372 bp, Zea mays
  Peptide Sequence Number=SeqID_62327
atggaggatgaggaagagtcggggttggaggatgaggaagaggcgactgtgacactatccatggagaaggacgcgttggagtgcgacatctgctgcctacccttccagtccgaagttttcatggcaagctttgagctcttttctactagtggaaatccatggccggaggagcgcgcagagaaggggcctcggctctgggcgtcgagcacaggggcgccagctatggaggggctcagcaggacgtggcccgagcagagggatgggcgcgccgccatgggagggagaggaggagctggagagcgagcagggatgcgtgcggctggggaaaaatggaggctaggcgggctccgcaagggcaaacacgcggaatag

SEQ ID NO: 18953 - DNA, 312 bp, Zea mays
  Peptide Sequence Number=SeqID_62328
atgcaccatgggagtctttgtaaaggctacgtagtgtatccctggccattcaccttggtagggaagatcgggtctgtacaacccaggctggaaagggatcacgactcgtggatggcccgtatcaggtgcactgcacgtaagtctgtgatcccctttttgccttctcgcctggcggagcgtccactgcgtcgcacggtgccaagtcagtccagtcacctgaagagactgcatcgtcgcctgcgcgaggagcaggagcaccgacgccaggagcaggagcaggagcagcaggactcttccccctcgcctcagtag

SEQ ID NO: 18954 - DNA, 414 bp, Zea mays
  Peptide Sequence Number=SeqID_62329
atgcacgacttcctccttgcgctggcgctgcttggttgttctggttggttgctggggcaggaagacgggctgcctggttgctttgatgctggtattgatttcctccttactggttgttctgacggtactgctgctactgctgaggaaactgcctctggtactactgctgctggttctgacactgatgctggtgctgctgatagtggagggatcaaccaatcctctcagaaagcagtattgcctcttagcatccgtgttgacgtcttctggggctccctcgggcacatggtagcgacggaagttgtccctgaattcttcacaagtgatggcttccggattggcatgggtggcaaggcatctgaacttgcacctgaggctgaggtggtggtggctactgctgcacctgctgcatag

SEQ ID NO: 18955 - DNA, 171 bp, Zea mays
  Peptide Sequence Number=SeqID_62330
atggcgttgacagcaccacaagcaccctcccttcagggtccgtggatggagtcctgtacttcttctcgtgaacgacttcgccgaacggagcacgtggaagctggggttgttacaaccacgaccgcgattttctctacgcctagctcggaagccctcagtttcgtgatttaa

SEQ ID NO: 18956 - DNA, 276 bp, Zea mays
  Peptide Sequence Number=SeqID_62331
atggagagtcatgatctccgggcagaaagggaatcacgacttgtgggtggcaatgagactgatggttttggttatgactatggtactgataagtggtattctttccgtctggaaaggccaaacaagacacttgctaagtatgttgatgtgtactcacccttgctctacacaccaaaccccccatccctaggttgtcaacattgcaaccactgctcaggagaagatgaagccgtggaaggagacttccaggagttccgagactatgacgagttctag

SEQ ID NO: 18957 - DNA, 315 bp, Zea mays
  Peptide Sequence Number=SeqID_62332
atggagacccgtgcactcttgttttgcttaggaaccagtgagaagaccgaaagggaaaacaatttgaacatgctggattcggactgcagaagaacaccaacttgtgacggtcaccacggtcacatgcgggctcgtattggaatgttcaagcataatatggaaagattatcaagtctactttcatatggatctagaattatagacgagtgccctagtggccagggtgtcacgctccataagatcgtgacaaccataggaggtggtgtatcggttgctaaggcgcagcgtctttggaaggctgtagtcgggccgtga

SEQ ID NO: 18958 - DNA, 564 bp, Zea mays
  Peptide Sequence Number=SeqID_62333
atggacggcgccgacaggcgggtccgcttcgtcagtcgtgcgcgcttgcctcctccttccctttacaccgacttgtgggacccagttgacagtgccacaatctcgtgcgtgttttcgctggtgccactgctccgtggggcccaccgagcagtccctcaatcccagcgcatctccgtcttccccgtgcaccaaccacctccgcgcatgctgcagcgctgtaagctccggtcttccgttgcaggtgccccgtgctccacctcgcctacaaatactggaccccacaacatcgcccactcgtgctcccctttttccgctaccgccactccacaccaacccttgcaccgccgcgatccgcacggagacaacttgccgccgccgttgactcattctttcgctaccgtttcagagtcggcaggtggtctaggtgattcgcttgggcacgtggaacgtgttcgtggtggattaaggccgagggaagccgtggaggttgggcaaattcctcaccggagttgggatcggaaccggatccgcagatcaccgtcgaccggcccgctaccaccataa

SEQ ID NO: 18959 - DNA, 639 bp, Zea mays
  Peptide Sequence Number=SeqID_62334
atgggctgcttggccggggttgctgggtttgctgcagggatggcgagcagcgttgctcgcgcacgcaggggctggaatgggcgctgtgccgctgctggccacgctgcgcgcagggtgccatggccgcggccgcgaccacaaggtggctggctaggctggggaacatggcgaggggcacagaccggccatggggttagggcggggctcgaccgcgcgagggagcagggcgccgggcgcctgggatctccggccacgacggacaggccactgacggggagcgggctggccggctgcgcgctgagcccgcagccgcgcaggactggtcgagggagcaggggttggggggcgagccgcggtgcagggcctcctggccgcgacgccgtgcggggctgccggacttggccgcgcaacggaggaaacgggagccacgcggggtctcaccgggaggaaacgaatcgctcggttgggggacagagagtactgctcaccggggaaggagaacggcacaacgcggggctgcagggagagtccgtcgagggcgagagaggatggggaaggggagagaggggagaggactcacctggaaccgccggattcgtggagacggcaggctctcgctgctacgacggttatggcgag

SEQ ID NO: 18960 - DNA, 345 bp, Zea mays
  Peptide Sequence Number=SeqID_62335
atggagcgcggttggcggtctgggggctgggctacgcgctggccagtggggaggccacggcagggggcgagccgccgtgcagggcctcctggccgcgacgctgtgcggggctgccggacttggccgcgcaacggaggaaacgggagccacgcagggtctcgccgggaggaaacgaatcactcggttgggggacagagagtactgctcaccggggaaggagaacggcacaacgcggggctgcagggagagtccgtcgagggcgagagaggatggggaaggggagagaggggagaggactcacctggaaccaccggattcgtggagacggcaggctctggctgctga

SEQ ID NO: 18961 - DNA, 642 bp, Zea mays
  Peptide Sequence Number=SeqID_62336
atggctactgcccgagggatgatctcctttttaaaggcagatttcctcgctcgtgccccaaagcatcacgagcaaggtctcccccgatgtgcgccagggttcccattctatgacatgggggccaggccgcacatgtcgtacaagctgggcccgaagcgcgaagaaggcgaatcgtcgcgcaggagagcgtgcaaaccgccctacggttacacgcccttccaccttcgccgcaaccagcggtcaagaaggcgaaccgccgcacaaggagcgtgcaaccgtactacggttattcgcccttccatcttcaccacaaccagcggaaagtcgcaccgccgcttgcgccaataccacaccttctcgaggccatcgcagaaggctaaggagataaattttcaaaaccgacgcagcgactcgaggcaccccgcgcatggcccaacaaagacattgagtacggaggtcatgggccagtcagccgtaggggcaggcgtggcagtcagcgtgaccataggcgggtcggcagtaactgcaccaacgggtgtgcaagagcagcgagccaatcaccagtcaaactctggccccacctgcaggctcgcatcctcccctgaggcgggcctaggggcaactgtcggtaccctggattag

SEQ ID NO: 18962 - DNA, 159 bp, Zea mays
  Peptide Sequence Number=SeqID_62337
atgcctactcccctactggccttgcccctttcgtgggtaaacaaggatgagtgccctagtggccagggtgtcacgctccacaagatcatgacagccataggaggtggtgtatcggttgctaaggcacagcgtctttggaaggctgtagtcgggccgtga

SEQ ID NO: 18963 - DNA, 804 bp, Zea mays
  Peptide Sequence Number=SeqID_62338
atgaagggctctgcaactctcccccagctggggaaggacccttcaagcctggttctgtacccgaaagcctgcacactctaccatttcatgacgggccgaggtcccagccgaggctacctcctgggggccatcgccaaactctttcttaggtatgctggtctgcagcctcgacaaatcgagcctacatcccagggggccagcggccacctctgcactgacgacttgccagcagtggcgaccacctcagcacgtgcgccattgcgaagaggtcctcgcccccgtcttcctacggggggcggcaacgaggccattaaagccaaagagttagaggctcggtggcaggtggtgctggtggtctcgccagcggaggcaaccacctctgcagcgggcagcctcaccagcagtggcaaccacctcagcaccgacgacagcagccacctccgcactggtggcttaccggcgacggcggccgcccccatcgtgcacgaagaggtcctcgctcccaccctcctacggagtgaggacaagaccatcaaagaacgtggccgccacctctgcggcgtacgacactttgtacgaccccctagggcggcgtcggagcagtgcgccatggatgcggcagactacaatggatcaagcagtctcattagctgcgagaagcagacgattcgaattgagtttttatccttgcaagcgagtacggcgaaggcctcgagcgaagggtggcgtcttcgccttcgccctaacatttgccctccgagggaccagttcgacaaagtcatctggtgccgaagacgtcgctag

SEQ ID NO: 18964 - DNA, 243 bp, Zea mays
  Peptide Sequence Number=SeqID_62339
atggcccccctcgaccccgtgaccctaaagcaaacggttctagtcagcgaagacctcctgcccgaagaagaagacatacttctctcttatctcaaccacaacaaggatgtctttgcatggtctgccctaaaactcgtcggcgtcaatcgcaccaacattgagcacaacttgggcattgactccaccgttgtcacacctacttttaagggcaaaaccgaatgcatagcatatgtgtgccaggat

SEQ ID NO: 18965 - DNA, 540 bp, Zea mays
  Peptide Sequence Number=SeqID_62340
atgtcgactatgtcgaaggttgtggccgatggccatgcgatcgaaggcatgcaagaaaatgatgtcggcctgactaccattgtcgacaaatacttggtgcagatcccatcctgctacccgacagttgatcaccatggcatcagcatggggtgcgctatgaaggttgatgtctcttgcgtcgaagggatggtaatgctcattgtggaattggtgctggttatattgttgggggtggtaggtgtgggtgacaactttttggttattgatccattggtttctagccattctgtcctttatgaccttggtttaagggcagtccgtgatgagatgtgccgagtcttcaccttggaaaaagacaatagaaccttcgctgttgtgggactcgacctctacctctgcctctggtgtttccgtcgtagccctgttgcgcgggttattcgtggcgacgagcagtgtctccaatctcttgctgattggcgatggtgtgcgcttgggactggatatggttttgccggcctgagtctgattgcgcaagcctaa

SEQ ID NO: 18966 - DNA, 350 bp, Zea mays
  Peptide Sequence Number=SeqID_62341
atggaccccacgcctaatcctggccgagcgctgcgagatcaacggtcgggaggccatccgaaggcgaaggcgagctcggaggaatgcttcttaccagctattgggccgcagaaacgccagtccacagcgttgggcgggattggggcacgaacaggactccaatccggccacgaggaagagagcgacctatcaagtgggtcccaggcgtcagtgaccaagtgcgtgcgacgtgtggacggtggctatgacaaggttggacccgcatgtcatccgcaggaacacgacagtgggctggtgctggaaaacgaaatggaggtgggtcgagagggtgaatacgacccatggcgcag

SEQ ID NO: 18967 - DNA, 891 bp, Zea mays
  Peptide Sequence Number=SeqID_62342
atggcgctccctgttgacgtggcgggcccgcgcccgaggccgggcgacgtgggggctcctccgaagctggggtcgagtctgtcttccgttgccgaggccgagcccgagcccctgggtcgggcgaggcggaggtcgttcggtagaggccagggcggagtccgagccctgggtcgggcgaagcggagttcgccgtcttctagggctgagcctgagtccgagccctgggtcggacggagcggagttcgccgtcttccgggtcttagcccgagtccgagccctgggtcgggcggagcggagttcgccgtcttccggcccgagtccgagccctgggtcgggcggagcggagttcgccgtcttctggggcttatcccgagtccgagccctgggtcgggcggagcggagttcgccgtcttccgggtcttagcccgagtccgagccctgggtcgggcggagcggagtttcctatggcgcctttggcagggcctgactgcctgtcagtctcactctgtcaagtggcactacagtcggagtggcgcaggcggcgttgtccttctgtcagaccggtcagtggagcagcgaagtgacggcggtcacttcggctctgccgggggcgaaggcaaggcctcgggcgagccggagatatgtccgctgttaaagctttatgctgatgggggttaccagctgagaattaggcgtcttgaggaaaacgaagaagaggctatagtcgaagaagttgtcccacaagctgagaatcccccggttgagaacaacttcttttttgacatctgtgggacagacccggaacctcctgcaacacaaggcaagccccgccccggtgcatttacccctttccttgttttaaactctttatcacttgagatgatgcattag

SEQ ID NO: 18968 - DNA, 315 bp, Zea mays
  Peptide Sequence Number=SeqID_62343
atggatcatgaccagagaccttggtaccggcaggtgccaagcagcaaaatcctgggtgaggaaagtcccgtccggccaatgttaagggcacctggtaccaccttggagcagaagcaacaaaagtttgtcgcttcctcacctaaaaacaacaaagggataaaccctaagtatggaatactcagcaagtcttacccgactaaggaaaagactctcaaggataaagccctcgatttctatctcttctccaaggagctccccgaccgtggcgcgctcaagaacgatgatcctgctgctcggtccggccaagatcagtag

SEQ ID NO: 18969 - DNA, 414 bp, Zea mays
  Peptide Sequence Number=SeqID_62344
atggcaggaaaacagcgccgcccgccccactccgactgctgtgccacccaccagggcgaggctgacaacagccaggctcagcctcgggcgcaacaaggagctccgcctcgcccgatcttaggcctcggcctcaagtctccgcctcgcccgaccccagggctcagcctcaacctcggcttcggaaggaggtctccgcctcgcccgacccctgggctcgacctcgacctcggcctcgggcggaatcgcatcctcgcccgaccccagcctcggcctaaggagaagtctccgcctcgcccgaccttgggctcggaccgaccgcgccacggagaatacatcattaccctacccctagctagctcaggttacgggggaaccagaccggcgtcccatctggctcgccccggtaacaagtaa

SEQ ID NO: 18970 - DNA, 333 bp, Zea mays
  Peptide Sequence Number=SeqID_62345
atggcgtcaaggccgtcagcgcagggcacggtcaatgcagggcagagatctggtgaggtgccgcgcgcaatggagggcagctgcagcgacaacacagagcggcggctagcacagacgtggtggcggtggtattggacaacagagaacagggaggagagtgaggtggcagctcgcgaaacgtcatctggcaggcgaggagacactgccggtggtgcgggtacagcaccacgacgagcagagatactgaagacatgtttttgcgagcaacaaagcaacaggtcatggcagaagtctagcgtgaagggaggagcgcgagtgggggcagggaagtga

SEQ ID NO: 18971 - DNA, 426 bp, Zea mays
  Peptide Sequence Number=SeqID_62346
atggctgacgtccctgtgatgacacgcggcgggtcccacggttcagccttgcggcttgatttatacaacgtggctttctcctatcgtcgtgggcccttcatcgtctttctatgcacacagattctcctactcagtatggcgccccatactatcgcttctgacatactggctactgtggataatccagtgctgaggtcacctctgacccgtgcttcttcgtcccatcagagtatgcggtatgcttatattataagaatggaacatatagtcgggccactatcgtgtgggttcctggtgatgtgtcctattgtggtcgacgtctactcatggcttcataacttgagctggcctcagcgggggcctggtcatccattctacctcgtagaattgctcgatagcgacttggtcatccattccgcctcgtag

SEQ ID NO: 18972 - DNA, 504 bp, Zea mays
  Peptide Sequence Number=SeqID_62347
atgccgccgtcgccgcggcgcttgcgacagcctcgtcgttccaggcggcgtacctccacctgcaggccgcccacgcgccgttcctgccagatgcggcggccgccgcggacgccgccgctgtgtcgcacctccggaggctgtcggagctcaagcggatcgcgcgtgccggacggtggttgggccctcgcggcacacctcgaggtccaagtgcgcgagaaccaggcactgctgcggtcgttcgacgccgtggtgaaccgcctacaggccgcgctcgacgtcaaggacgccgcggccgccgcgctgcggctggacctcgaggcgctcgacgacgccaacgcgcggctcgcgggccgcctcgaccgcacgctcgcgcctccgccgggcggctccgcaatccgaatcacgcacgcaacctcggcggctccgcgccgtgaatctgcgccgaatcagaggcctaaatggtgggtcccgctgaagaaggatccgttgtggtgcggcacctga

SEQ ID NO: 18973 - DNA, 390 bp, Zea mays
  Peptide Sequence Number=SeqID_62348
atggcgtggcttagggatgtcttcggtacagcttcgtctgtcgtcatcccattagcgtcacctttcatcatgcataggcgtatgcctggtatggcatattttcctgtcccctatggagtatgggtcactgtagagaccccaatgctgaggtcggctcttccattcagtagaggtgtccgaccgagagtcggttgtcgtcttgctgggttgctcgacgggcagcactttgaatcacagcatcatgctcaggaaaatttcaagtctccttcaacatcaaaattatgggagatgacagggaaggtacagcaatccatcgtgactggaaatggaatcaggaagcaaggttctgttgtgctcgcatcaccagttcttcggtcgtcgtaccaatga

SEQ ID NO: 18974 - DNA, 1320 bp, Zea mays
  Peptide Sequence Number=SeqID_62349
atgggaggaggctctcttgctgtcccaggatgggacgtgagcctggctgacgaccaactggcgcgctggttgcgcgacgcgtgggcctgggcctccaagccggcgtgtcagaagtcggagaagcgcgtccacctggcgcggttgcatgccgcctgcatggctgcccgccccttccgcccgttggtctgggcgaaagtggggaatcgcttgatggtgacctccggcttgatggtgggggaaagcgagccgggctgcggccccttcccttccctcagcctcaaggattttcatcaccaaggctggggaggggagagtgccgcgttgggctgcagcgtgcccggtcttcggacgcgagtggctttggagccgctcgcggcgccggcgtccgccacggcagctggaagaggttcttccgccggcgcgacagcccgggccggccacggactgacctccaactctacgaccttctgcccgtccttgcctcacgagttttggcgtgggcgggggcctcctggcagcagcacccgccctgaggttagtgctgccgctgttcgaccccccggaacagaagtcgtcgtcgtcgccgctgctggagcaggtgacggcgcaccgttcgtcggccttccgttgctccgcaggccttccccctcggagtggggttgctcctctagcttagttaaagggaccccttggccgctcttcgatgagccgaggccaggggtagcgatatcagtacgaacagaggcggagttggctcgaaaatgggaacctggttggccggagcctagccgggttgcccgtcagcgggggtcgacgtcggagtcgatcagccgaggcctcgggtcgggctggcgcccttggaagaggcttggccgaggccccaggggtaaccggccgagccgcctgctcgggccggattcccggagaagtccctggaccgcgtcgccgtccgaggctgggtcggacctcgctgaaggcgtcgtcgatgccgagggtgctacagcccccttcagcgtgaagacccgagcctgcaggatcagatcgtcttgtagcgtgtgccttttgcggccgccgaggccagaaaacacaccctcgctgcgttgcaaagccgcgtctcctttcctctcatgtcgagcatctagactttccgtcggtaacagggatgtttgtgtgggcgagagttgcttctcgcggaaggtgatgagtgagaaggtgatgagtgaggtatccgtatcccggaggcgtaggagtacctcggctcggtcagccttggctgcttacgtgtactccgtcgtttccaggatccgcttttcgaagtag

SEQ ID NO: 18975 - DNA, 837 bp, Zea mays
  Peptide Sequence Number=SeqID_62350
atggggatagaagcagagacaagtgcttggccttcccggtcctccaattcttctcttctgcctcgcctcattttgctgatttttttgtcatggcgacgggacacccagcatcctgtgcagctcatctctggcttcaacaacacggtcacggtcattgctatccataacaaagataagaccctgtgtgttctggaacctaagaaatcaaatagaaaatcaaaaagaatggtggctcttggattctggaagaacaggaaattaggtagtgttcggtgtgcacgcgaagctccccgccgcggccgccgcctgcacgagcgccgccggcgaggctccgggctccgccagcgccaccacaaccgacgacacggcgcccaggcggaggtagaggagcttcttggtgcggttcccgatgatctggttcttgatctcgcgcagcgcgcggacacgctcgtgctccacctcctctccgccagctgcggcgccgccgtcccaccgccccgaaccacccacacccaccactcacctccgtccccacctctgcactcctgcaattcgcgtcgccgacaccccgccccgctcggcggcggagacaaagtgtgcgccgagcacgcggcggcgggcgtagccatgctccacaagttcgcgctcacgttcaagaccaagaccatcgagttcttcgccgaggaggacgaagacgaggacgccgaccagttagcgcgctctcaggcgccgggggcggatggggtcattgcctggcagcgggttgtcgtgctgaagcccgacccgccgaacccttcgcctgcttatcagaggcgaactgacctatgtgtattttga

SEQ ID NO: 18976 - DNA, 1104 bp, Zea mays
  Peptide Sequence Number=SeqID_62351
atggcctcccagctccgcctccaccttgcggctacaccgcctctccttcctcaccgccgtccgcacctcgcgcggccgctctgccccaccctaaacccaatccgagcgccgctcccccctctctcacgcgttctctcccacgctcgtcccgcccgtgcggtcgggggaggcatcgagccgaaggagggcgttgttgcggagggagacgagtctggcggagggcccgtgctcgtgggtgaggattcggctgcgttcgagctcaaggaccagagcgtggcgtcgtgggcttacttcgccgggatactaggtgcggtgctcgttgcgctcaacgtgctgtggatcgaccccagtaccggggtcgggaccaaattcctcgacgctgtcgcctccgtctccgacagccacgaggttgttatgttgctccttaccataatttttgctgtagtccatagtggtatggcaagcctacgggaaagtggtgagaaaatagtgggggagcgtgtttaccgtgtgctgttcgcaggaatttcactgcctttagcagttactactattgtatacttcataaatcatcggtatgatggtactcaattatggcaagttcagggaatcactggcattcatgagcttctttggttctcgtcgttcatttcgttcttctttctgtatccatccactttcaatctcttggaagtggcagctgtggacaagcctaaattacacatgtgggaaacaggaataatgcgtattaccagacatccacagtttcatatgaccacttacacacttctgatccacaattatcatgtagatggttggtcagttgccgtagcggcctctgtcggacttatcagccaccatctctttggtgcttggaatggtgacaggaggctgttgtcacgctatggtgaagccttcgaagtactgaagaagagaacaagtgttatgcccttcgctgcgatcatcgatggacggcagaaactgcccaaagattatcacaaggagttctttcggttaccatatgtagcaatcacaatgttaaccttgggtgcatactttgctcatccattgatgcaagcatccagctaccaacttccctggtag

SEQ ID NO: 18977 - DNA, 585 bp, Zea mays
  Peptide Sequence Number=SeqID_62352
atggacccgcgtgtcggtgagaaggcgagagcgcgcgtgaggggggaaaaactgtccagtgggtccgcggcggcagtgaggaagggagaatgggccgcgcggtgggtttggaaatgggccgaaaaggagagccgttcatcaagatccaacggcgtctgcgccccccccaatctctccgccagcgacggcggcgccgcccgacttcacggcgaagctcgccggggaaaactcaatcaaacgttccagtggccccagagctcaattaaaagctgctacacggtgcttaggggatggcgaactcaccggagtagttcttaccacggattcggccgcgtaggtgcccagtccacggcgcggtgcggattctcagctccgatgagcaatccggcgttcgagggacgaagacaagcccgggaggttcttgcaacggcttcaagggatcacggggcgaacccgtacgctcaacggagggcgaatcggcggcggaaggcacttagctcgcggcgaactgagttccgtcaccgcggcggcaatgggagctcacggtcgacttggagtgagggcaacgcctcgaccggtgcttaa

SEQ ID NO: 18978 - DNA, 1101 bp, Zea mays
  Peptide Sequence Number=SeqID_62353
atgcctgccccgcctcctcctccgtcggcggggaaggtgacgggacaaacccggatgttgctcttccatcacgcggggaagacgtcgtcgattccgccgccggcgggtgggctgacggccgccattgtcgttgtcgcgcggcggaggaaggagtatcatgtcgtagctgccgtcgagggacatgaactcaagactcccgaaacggagcatcgtcccgggttggagaggttgatgaagactacccatctggagcttgacgggaagctgttcgtcaacacgcagcagacccctacctggcgcgccaactatcggcgtttcgacctcgggggggcggatgcgcttgcagtagggggttacaagcgttcacgagggagagagagagtgactgtccgccagcccgttctcctgcgcggccaccttctcgccgacgtggctgttggagaggtgttgctgccctgttcatgtggtgtcgtggccgtcggaggagcgcttgagccctgtggaagcacagctgtcggggctgtctgtcacacccggatttcaggggtccaaagcccgggcgcgaacataatcaccaggtaccaggatgatcttcaggtgactcgtgttctcactgctagtcgtagcaattcaaacaaacatgagccgttcatcaagatccaacggcgtctgcgccccccccccaatctctccgccagcgacggcggcaccgcccgacttcacggcgaagctcgccggggaaaactcaatcaaacgttccagtggccccagagctcaattaaaagctgctacacggtgcttaggggatggcgaactcaccggagtagttcttaccacggattcggccgcgtaggtgcccagtccacggcgcggtgcggattctcagctccgatgagcaatccggcgttcgagggacgaagacaagcccgggaggttcttgcaacggcttcaagggatcacggggcgaacccgtacgctcaacggagggcgaatcggcggcggaaggcacttagctcgcggcgaactgagttccgtcaccgcggcggcaatgggagctcacggtcgacttggagtgagggcaacgcctcgaccggtgcttaa

SEQ ID NO: 18979 - DNA, 855 bp, Zea mays
  Peptide Sequence Number=SeqID_62354
atgcatcgcgcccttccaccttccgagcccctggatggggagcgcccgcatcgctttcgtcttgtcgtcgttggaggaacgcaacttcacggaagttggtacctttcggccatcgctcggcttcaaggattttcatcaggcagcccagctgcatcccctcgccggtggtcacccaagacggtgaccaccagttcgatggtggggagaagcgagccgggctgcggcctctgccccgccctcagcttcaaggatcttcatcatccttgctggggcggagggcgggctgagccggagctctacctcccgcacgggtcggcgggccacctcttcttccagcttctgggggtggaaaccatcctccagctctgcggaggaggcgccctccagccatgccggggaaggcgtggtgccgacaggttccttcgaggtggagatcctccgtccgtgttaccgttcgaggccgggtcggattccgccaaaggtggagtcgacgctgagggtgctgctgctcccccactgatgtctgatcctgcaggaacagtttatcttgtagacttgtttgtcggtaacagaattgtttgtccgagcgagagttacttttcacggaaggtgatgagtgaggattctgttatcgatatagtcgagaaggcacgaaaaatcgtttcggcagaaaggttttcgagcattaagacttgttcggtcagcggaatcgcttatccaagcgtgagttacttatcgcagaaggtgatgagtgaggatcccactttcgaagtagtcgaaaagcacgaaagatgttctggcagaaagacttttttcgaggaagattttgacgcagagggggttcgccccttctag

SEQ ID NO: 18980 - DNA, 306 bp, Zea mays
  Peptide Sequence Number=SeqID_62355
atggactcatgtagtcttttccaaaagcacgaggttgtcttcacaggtataaagcatttcaaagtctttgatcaggtaaccgaggactttgatcgtggaatctttcagatgctggacgatgaagaagtcgaggacttcggcagccttgaaagctcgctgactcggacagaaggcacggggacgggggctgaagagcattcagtgcctcaagccagccctagcgaagaccctgcggcggcggctgtctcggctggtgaagaccctgcagcggcggctgctccttcgcaggtggcagggtcacgttag

SEQ ID NO: 18981 - DNA, 1026 bp, Zea mays
  Peptide Sequence Number=SeqID_62356
atgaaggcccgggcccacatgtcatgtaaccagcgcgacggttactacgtgcaaggaaactgcaccgccacttgcgccaatgctgcgtcttctcgactgcggaaccggcgcagcgactcaaggcagccctgcgcgacaagcgacacctccggcaggcgggcgccgtttcgtctccatcacgatgaccgcgtcataaaagggactgggaaaggggataatgcgaaaaggatccttctcggcgaaggaaacgggccccgagccctcttactgatcaggggttcgaaggttgcgccctccggggttcgggaaccgccccagagcactccggctccgagcccattactgatcaggggttcgaaggctggcacctcggaagggttcgacagccgccctagagcacgcagagtcaaggatgaccctgggtacgtccgttacatggcagaggctcgggctacgctcccgaggtaccctaggacatttccgagaccagtgggaacgatttgtaacggaatcccaccagagggaggcatcgagccctcggaccctatcgaatgggtccgggtccggcaaatcacctgcagcagcgagctccgcctcgcccggcctcagcctcggcctcgggagaaggacttcgcctcacccgaccgcaggcctcggcctcagcctcggcctcaggagaaggactctgcctcgcccggcctcagcctcggccttggaggagtcgtcgcctcgcccgacctcagcctcggccttggaggagtcgccgcctcgcccgacctcggccacggctcaaggcgtttcttcgatggccacgttggtacacctacagggctcaaggcacccctccgacggccacatcggcgcatctatagggctcaaggcacttccccgacggccacattatttgtacagggctcagggcacttccctgccaatcacggccccagggaggagggggagacgggagaaaacgcacgtacgaacacacggacgcgcgacacagacaagcggaggcaggcagagtag

SEQ ID NO: 18982 - DNA, 1170 bp, Zea mays
  Peptide Sequence Number=SeqID_62357
atggtggcgccgctcgcgcccacgacagagatccgctggagacaagggtgcgggcgcactggggccctcggggcgccgggaatggctcaggaagattcgaggaactgtggcgaatatgaccatgggcatagcaccggcacaagggcgctagagggtggaggtccacggcgaggtggcttggcggcggcgcaactctactctggcgagcaatcacgcacaaacaagggcaggcaaggggaaaataggggcagggttaggttggttacctcaagagaaggctcagggaccctcgaacgacgaccgaggcatgagagggtcttaggtcaacgacggcggagctgctacagtgcggagaaagggccgttaaaccctcacctaattgacataattcaaataaaaagagagaaaagaaatctagagggagagaaacaagagatgaacctccaaggacatgtagccactgatcctcattacgctcatcacgcaagtgccttatggcaagagctatcaactaaaattgagcaattagaatctaatgctccatcctcagctaccgatgatggccttattaaaaagaatgaaaaacttaaggctaagttagctagctctcaagaagcaattgaatatttgctagagaaaatggaaattcttagcatacacaataatgagctaactactaagctagaaaacattggtagcaccccagaagtatctttagctgaaacgctagaaattattaataaagatgcttctacttcttgctttgttttaattaatgattctaacccctgcaaccaagctcttgttgagaatattgttatagaaacatgttcgaatgaggtcgcaaaagggaatgaacaattaaggcaagaagtggctcgccttggcaaagacttatatgacaagaaaggcaaagccaaacaaatccaacctcctcaggataacatcactacgggagtgaacaagcctgtggaggaagaaaccgtgatttgtaggttatgccacaagaaaggccacaagtcttaccaatgcaaggcaaagaccagggataagcaaaaacaaaagctcaagcaaaagccatcaaacaaaatctccaacacctacatcaacaaggtggataaaaaggttgctataccatatttgatcaagaagaaaagaatggaaaagtga

SEQ ID NO: 18983 - DNA, 180 bp, Zea mays
  Peptide Sequence Number=SeqID_62358
atgaagctagtttcaaagctcaagcctaagccccaaaaattgaaaatggagaccatcggaggcaactgccgaaagctaaaggaaaaatgcgcactcgcagaagctaaccaagaaatcagcgaatattggaaaaatcatttagagaaaaatgttgaagaacttcacacatccaaggaaaag

SEQ ID NO: 18984 - DNA, 447 bp, Zea mays
  Peptide Sequence Number=SeqID_62359
atgctcagtaccactgctacattccccaaaatcagctacccttggcctataacttttaagcgcaacagtgttcttgtacaagcaatatcagctgagtatggctcgcaggggctttgtgttgatctcagaggttgtgcatactttccagactttgtaaaaccaggaaactgcaattttaggccataccaatatgtcattgagttgcttggcacactgctactgaggaaaagaccagcagtagtagcaggtttagggcttagggtgctcgaccgactcgagagtttgccgacacttgaagaaggaccaaatgtgagcttttacacacttgatgaacatcttgagctcttgagaaaggtgggggcatttctgtacccactggtcgtagttttgttggctattactaatcgtgagcagatggccccattcacctctaccaacaggtgctga

SEQ ID NO: 18985 - DNA, 297 bp, Zea mays
  Peptide Sequence Number=SeqID_62360
atgaccggccgtgggatggatttcaacacagtcacggaggacagggctcatggcgtgatcgaaggccacgaaggtgccctggacaaactgaccatcgtggaggaggacacgcacgcaagcgtgtatggtggtgcgtacctgatgactgacaatgtacgagggaacttctaccggcagtcaatctggatcgtccgtatctgctgcccacgccagcgtgcatccggatcgtccaactattgcgagcaactagctgtcgctactccgcaagtccacatcaaccacctcccactcccttga

SEQ ID NO: 18986 - DNA, 3384 bp, Zea mays
  Peptide Sequence Number=SeqID_62361
atggaaggctccacttggcagtgtccaaatcatgtctacgcgtttggtccagccagagtcaggaagctcactggacatggtgccgtcagagccagagatcgttcacctgactccatggctcctgaggttagcgagctcgcagatgtcatcttcactgccatgctgttgctgctaaactatggcctcgcatatggagccgcattctggctcttcttaaacacctggtcagatataaaccatcgcagcagcagcgatggaggtggagggtacacgctctccacaccgccgccgcctgccagtgctggacagatggttcctcgacacctgccctgtggcaatccatctaccctttggcaagctgaaggacatcgtcgtccagtgacccgaacacgcgcggtccagaaatgtttcttccatttctctgcggagagcacaaagaggctcaagacgaaggcaaacaccgggaactgcaacggtcatcatctcctcattgaaggcacgggcctcaggatgcagtccttggtccggaatgtctgccgagccggaagccgtggagcggcggcgaggctcctggaggccgccgcggttcatccgggggcggcgcagccgtcctcggccgtcagacacctcaggcatccttgcgggttcgctcgtccgatcggggtagatcaacccaagcctgtgcagcgccggaccattttgcgtgatggcggccgcgttccggctgccgcctccggattcggtctctgcgcgaaagttctcgttgcgacgaggggtctgtcgacggcgggaaatgctgctgaggttgcctctgattcggacgattccacctctcctgcggttgagcaccccccgcgcatcaagttcaagaggcctgacaagaccgctagacacattatgaatatcctgaacaaagaggcggtcgaaaaggtccgctcggagagggcgattcctgatgtgcagcctggatgtatcattcagatgagattgatgactacaaaacttgagcaatcttctgcggagcatcgcccagcaaaattcgcagcaccatcgtctttgacccccaagatctcaatgtttggggcaaaagctggattcatcatacctaagaacaagctggccggctcactcgtaatccggagcaccagtgacaagaatgaaacaccaactgcatccaacgaagatagcagcaggcatgttcacagaaagacaaagtgggggcctgaccttgctttggaccctgtcgtgtgcaaaggaagggctttggcctaccagactcgagtggagcaaatttccaagcagctgaagtctggagctttggacacgtccgaaattgatggttcagtgtctgctggaaatgaattgaattctattggtcctgacatcttgaaagagaacgagctgggaaatgttgaactattggaacttgaaagacgagagcttatcggtgaaatactccgtttgaatccgggatataagacacctgagaactacaaaccagtacttagggagacaaaaatccctgttccgggtgaacggatgccaaaccgagcactttggattgggcacgctggggacagcggtcaatctcaaggcccaggggctgaggcagaagcacacccaggaaataatattattggagttcttctaggatctgagagcaatacccagaagagactacatgaagaaactggtgctgtcattcgagtgtatgggactaagaaaatcaatggagagaagagtgagattcgtcatcaagacataaatgaaacacaagatgcttatgaagacctatacatcaatgtatcggctgactcttatgataaagtagatgctgcagttgtgttgattgagctgcttcttgctcctgtttccgtaaagtcgacagctacttcaacagctgctactgtttcttcagcagatacatccaaggatgcagtttcagctaatgtgcaactggagcagaataccacgtcacagccagatctacttcattaccaatcacacaacgcaccttggctgcccacaccccagaccaatgctccatcaattccttccacggggcctgttttgagtacattacctaacaatccatcgcagccacaaccgcctgctggttctttcagtatgcctccatatactggtcaacctcctcacatgaatagcatgccagcaaatccatttcctgttcctgggcctcagcaaccagtaccaagcaatcaacaacatccacctcaatttcgagctaactcctcgattgggccttttttcggtcaaccacctggtattgtaagccaacaaatgccaccatcttcctcaatgccaccgccagttagaccccttcaaataccccatgcctctggtggctggccccctttctctcctgttacatcacaatctcataggcctctgcaagctccaccgacttttatggcagtgagacctcctatttccgtctctcctcttggtgcaactccaccgcaaggtcccattgcattgacaccaccaaatatgcccaccatgtaccgcggccagcatccaccagtaccaaatttcactggttcagcgccattggtttccaggcctcctggtggtggggctcagtcttttcctacagctgcgcctcaaggcccttcctcagtagcatttcccggtggaccatcgctgcggccaccttaccctccggcgcctgatcaagcgagggggccacctccagctttctctccagttggatcaactcctggcatggtgcctccacctattgcatcttccggcctgcctgccccgcgtcctgcgaacacgagctgcatccagacacaagtagtagcccctttgagacctccgctcccagccgcgggcgattttactttccggcctgccataccaccggcgcatgctccagagttcgcagcaccaggcagtcaaatgggagcaatacatggcagaactcaccaccctggaccattctcctcccatcctggtgaccagaagaaccccagccaaggtttccaagggccgtttgatggcagcaggcccatgtacacgacgaatcaggctcggatgcacgctccacctcctccacacttccacggagccttccccaggaacgcatctcctcttgagttcccagcggggttccggggagcctggccgtccgtgcaggcacctccgatgccggcaccgtcacatccatcgtctttcccgccgtttcagttgaggccaccgccaccgccgcagcaggatatgtctggcgcaggcggcaccaggtggcccggtggcaatcaaatctacaacccttttgcaccaacggctgcggcggcggctcagagagcggaggctgaccctgagtacgaggatctcatggcatcagttggcatgaagtag

SEQ ID NO: 18987 - DNA, 3750 bp, Zea mays
  Peptide Sequence Number=SeqID_62362
atggggagtcaagagtcggagcaggccaaggtgctcccgggaaccgactgcccgcagcagccaccggcgagcaggacctggcagaggaggttcgacgatgaaggcaagaacgtcgccatgttcagcatgaccatgagcgacctggtggaacttatgcccttgatggtcaaaatactcaagctgcaggtggaagaaaacgccgaaggccgagtgggaagcatagggaggagctacagagggtacttccagcagttccagatattccccgtgaccaacgaagagaaacctgtcctagcaaaccagttctcggcatttgtttcgcgcccgaacgggaacaagtactccacggtgctgtcggcgccaaccgctgaccttctcaagggagtcggcaaagccggcattggatcttgggactggaggttgaaggaggacaggtgcacttaccacgccctgttcccaaggtcatggacggtatatgatggtgaacctgaccctgagatcaagatcacctgccgtcagatatcgcccttcataccgcacaactacagagagagcagcttcccggctgcagttttcacattcacggtgaacaactctgggagctcacctgcagatgtgacgctgctcttcacctgggcaaattcagttggcgggaagtcggaactgacaggaaaccacgtgaattccaaaatgacggagcacgacggcgtccgtggcgttctcctccatcacaggacggcgggagggcagcctccggtgacgttcgcgatcgcgtcccgagagaccgacggtgtccgcgtcagcgtctgcccgtccttcacgatcgcgtcgggcggcccgtccagctccggcgagcccacggcggcggccatgtgggacgagatcaagaagcacggcgcgttcgggcacgccggcgccggcaacggcaacgcggcgagggcggcggcttccaaggccgggtcgtccgtgggcgcggcagtggcggcgtcgacggccgtgccggcgggggcgacgcgggtggtgtccttctcgctggcctgggcgtgccccgaagttaagttccccgccgggagcacgtactacaggaggtacaccaggttctacggcactgatgccgacgcagctgcagagcacctagctcatgatgcccttcttgagcatatgaactgggagtcccagatcgaggagtggcagaagccaatcttgcatgaccaaaggctgcctgaatggtatccagttgctctgttcaacgagctctactacctcaacgctggaggcaccatctggacagacgggcaggctccgaagagggccggcttcgcttcgtcgttgacggccaccgagccgttctccatcgacacgctcctcccagtcgcagcgggcggcagcgcggtggacggcgtcgtgcgcgcggtggcgtcggcgacggagcggtcccactccgcggcggcgttcggcgcggcgctactgcgcggcggcgaggacaacgtggggcagttcctgtacctggaaggcatggagtacaacatgtacaacacctacgacgtgcacttctacgcctccttcgcgctgctgtccctcttcccccggctggagctgagcctgcagcgggacttcgcgcgcgccgtgctcctccacgaccctcgcccccggcgcaccctggacggcaggaccgtggcgcgcaaggtgctgggcgccgtgccgcacgacgtcgggctcaacgacccatgggtggagctgaacgcgtacatgctgcacgacgcggcgcggtggaaggacctcaaccccaagttcgtcctgcaggtgtaccgcgacgccgtggccacgggcgacgccgcgttcgcggaggcggtgtggcccgccgtgtacgtggccatggcgtacatggaccagttcgaccgcgacggcgacgggatggtggagaacgagggggtgcccgaccagacgtacgacatgtggtcggtctccggtgtcagcgcctacacgggcggggtctgggtggcggcgctgcaggcggcggcgggcatggcgcgcgtcgtcggggaccgccccgccgaggcctacttccgcgcgaggcgggacagggcggcgcgcgtgtacgatgccgagctctggaccggcgcctacttccgctacgacaacagcggcggcggcggcgccagcgagtccatcatggcggaccaactggcggggcagtggtacgcgcgggcgtgcgggctggagccggtggtggaggacgccaaggcacggagcgcgctggcgaccgtgctggactacaacgtcatgcgggtcaagggcggcgccatcggggccgtgaacgggatgcgccccgacggcgccgtcgacgcatcgtccacgcagtccaaggaggtgtggcccggggtcacgtacgccgttgcggcggccatggtccacgagggcatgacggaggccgcgttccggacggccaagggcgcccacgacgccgcctggggcaacgacggcttcgggtacgcgttccagacgcccgaggcttggacggaggacggcggctatcggtcgctgcactacatgcggccgctcggcatctgggcgatgcagtgggcgctgtcgccacccgagctccacagggatctcaggacacccgaggcgcgatcctcggaggagccgtcgccggcggacgctgccctcgggcaggcgcagttcgacaaggtggcgagcatgttgaggctgccggaggagcagcagcccaagggatacctttgggccatctacaacctcaatgagacgaacgcaagaacacacgaggatttagagtggttcgggccgccggagcgggaagcttctcgcataagggatgatgagcacagtgcgccgtacggcacaggtgcactgtttgatattggactggacagagaccgcgcggctttacaggccttacgtctggctccgcccgctcgctcatgtcacgggccatacgccacgtggcagcagcgggtctccgcctgggcgaggagcgcaagacctcgttatggttcggaccttactcggaggatctgtaccccatccaagggacccagtcatgcttttttgggagtctcgggccgtaaccagggggtccgggttgtgcgtacaggggtccggtgctccttcgtggaggtccggtccaaatggtacatcatgggatgtatcatcttttcttaccacgtggtgccccttgagccacccacgtggtggggcgtggtgatgtttatcgtgcggctaggggacgtcgtacgggcaccgcgtcttcatactgtagtagggggtacccctgattcagggtaccgacaggcgacagtggccctcgggcccacctcaggggaggatacgagcctgcaggtggggccaaagtctgattggcgattggctcgttgcctctgcgcgcccgttgattcaattgctgccgtcctctgcgacggccccgaggagacgcggtattggcgcgagcggcggtacgacttttctgcacccagaaaccagcgcaccggtatttgccaggaggacttgtgctggtgtctctcctcttggcgacctctctgccgaagggtttgtgttctcaaactccccagcgggttggctctgccgatcccatcttcgccgctggtgaggctgcccgttgcagaggtggttgcctccgatggcgagccgctcagtgcggaggtggtcgctgccgtcggtgctgaggtggtcgcctccgctggcgagccgcttgcggccctactggtgtag

SEQ ID NO: 18988 - DNA, 117 bp, Zea mays
  Peptide Sequence Number=SeqID_62363
atggatcttggacgaaggcacagtacacagcctgtgagaaattacaattatgccccttatgaaggattacaacagcgacctaagcacttatgggctagagggtcattctacttttaa

SEQ ID NO: 18989 - DNA, 450 bp, Zea mays
  Peptide Sequence Number=SeqID_62364
atgggcaagaacaacaagcgcaagcgtgagccaactcctccatcggaggagtttggtgactcggagtactcagaggaggagttctcctctgaatctgaggggtctccggctcccatcctcctgcgtgagtcgtctgatgactcggacgactcccaggggcttgcggcggaggtctggacgtacatccgggccgtcgagcgctccgggctcgagggctcggatgagtcggagtactcctcggatgaggaggactcggacggcggcggcgaggacgacgacgacgacgacggtgacgaaagcggcaggggcggcaggggcggtagcaaggacggtgacggcagcggcagggacggcgacggcggcggcagcaggggcagcaaccggggcggcagcagcaggggcagcaccaggggcggcagcggcggcggcagcaacagggccagtggctag

SEQ ID NO: 18990 - DNA, 498 bp, Zea mays
  Peptide Sequence Number=SeqID_62365
atggactcgatcaccgcatcactgcttggatgtcacgccgtcagctacctgttacctttgctgcttcctgtggtagacggcgagcagcttgtagtacgtccagcgtcgcttcccaccggttgcctccagcaacaccacagagttggcgtggaagccgccattgccgaacgcctcgaacacgatgggatccgtagccacggtgggctcagcgtcgccgtcgagccgatcaaacgcgaacgtgaggttccgcacgaggcggcgctcgaggtcagcgccgtcccgaggctgcagatcaggaggtgcggtgcgtggatcagcgtcgaccccatccccggagcgctggtggccaacgtcggcgacgtcgtcaaggtgctcaccaacggcaggtacgcgctgatgtacatgaccattggcgtcgaggactacgtccgcctggcgctgtctattaagctccaagaaaagaacgccatgggagtgtggacatcttcttattcataa

SEQ ID NO: 18991 - DNA, 909 bp, Zea mays
  Peptide Sequence Number=SeqID_62366
atgctcggcaacgccgctgcggcggcgcaggaccagacgttctcgaactggttcattggggccgccggcgacttggatcagtcaggaccgccgcttcccccttcgccgccactgccccacggggcgatgaagaggacggctgcggaggcggcgcagcagcagttgctggacgagctggcggcggcggcaaaggccgctgaagctggcaattccattggcgtgcgagcgatattggcgcggctcaatcaccagcttcccccgctcgggaagccgttcctccgctccgcctcctacctcaaggaggccctcctcgcgctcgccgaaggccatcacggcggctgccatcatcgcggcgaacttgcgcgggtcccgctgccgcacgttctcgccggggtggatgaaggggcactccgtccagtcgtgggagtaggcgcgcgagcacgcgcgcaccttgaaggagtacatacggaagtcgttggaggcgtaggcaccgttcttgatgtcggggagggagggatccggcggccactccttgcgccctccgaggagctaggagacgggataccgcagccggcgcagcggaggcgccgccggcggctgcgaggtggagcgcggtggagagggacgacggtgaggctccgcggaggcgaccatgagcggggtcataggctccgcgccgcgaggaggtccccgagcgccgtggagtcgttgtcggccgcgagctccagtagccgcgcagttatggccgcagccgcgtcggagttctctcgcaagaacaatcgaagtccggctagggcaccgtcagtccttgtgccgccgttgcccgtcgtcttgctccgtcccccgcttgccaggtctaaacgcgtgcgcagactccgcttaggcgtcccgctgtcgtgccccgtctaa

SEQ ID NO: 18992 - DNA, 951 bp, Zea mays
  Peptide Sequence Number=SeqID_62367
atggcaggccgggacgagaggtggggggcgcggggcggcccgggggacacgcacgcgtcgacgagccgcgcacccgcgggcaccgccggggagtcggagggcgcgtcgccggactcgctgcggaacacgccctccaacatcgcgcggctggaggacgcgatcgggcactgcgcggcgcggcgcaaataccttgcgcacaccaagagcccctccgacggcaaggacgtccgctggtacttctgcaatctccccctcgccgacaaagtgctctcttcgtccgtaccgcggacagagatagtggggaaaggagactatttccggttcagcgagagggactctctggcactggaggcgtctttcttggagagggaggaagtgctgcttgcatactggtggcgtgagtatgctgaatgcagtgcaggaccgagaggatccttggttgaaagtgatgattctgcatatctttataaggtggaggaagaacgggttggggttcctgtgaaaggtggactatatgaggttgatttgatgaggcggcattgcttccctgtgtactggaacggtgaaaacaggcgtgtcttgagaggccactggttcgctcgcaaaggtggtgttgattggattcccttgcgagaggatgtttctgaacaacttgagttagcatataattgtcaggtctggcatcgtcgaaaatttcaaccttcaggcctatttgcagcaagggttgacctccaaggaagtacactggatttgcatgctctttttactggagaggatgatacttgggaagcttggcttgtctttgatacgggtcctaagcttggtagtaacacaatcaaattaaggcgcggattttctccttctgaatctgcaagtacaaagccttcacaggatgagttgcgtcagacaaaagaagaggaaatggatgattactgctctcagcttttctga

SEQ ID NO: 18993 - DNA, 1975 bp, Zea mays
  Peptide Sequence Number=SeqID_62368
atggacagcagctgtcaccctgctgcagataatcaaggccacctcaactctgcccgcaatggcagccacctgcgcagagacagcaacggcgcagatctgcagccctgcccgcaagacgaggtgactgcgatggtgacgagggacagcgggacggcagacacagcaggatctgacagcaggcggatctgcgcactccctggacgtcggatctgcgcagagcaggccgtgcgcagggacggcgggcggatctgcgcaaatctgcgattggcgcagggacaacaggtggaccgggcgcggcagacagacggcggatccggcggacggtcagctgacagtaggtcgacggggcgcggcagagggcggatccggcggacggcgggatgcgcaggtcgacggcgcggagagagcggatccggcgggatgcgcaggtcgacggcgcggacggcgcggatgtgcgcgaatcaggacggcggatgcgcagggacggttccagttggtcatctggtattcatggttcatggcattggacagaggctggagaaagctaatcttgttgatgatgttgttgatttccgccgagtaactgctaacctagctgaaagatacttaacttcttatcaaagaagtacccagagggttctatttattccctgtcagtggaggaagggcttgaaactcagtggtgaaagtacggttgagaaactcactttggatggagttaaaggtcttcgagtcgcattaggtgccacagttcatgatgtcctatattatatgagtcctatctactgtcagcatattattgactcggtctctaaccagttgaacaagctgtacatgaaatttctgaagagaaatcctggttacagtggaaaggtttcattgtatggccactcattaggaagtgttctgtcgtatgatatactttgtcatcaagaatcccttttggccccatttccaacagagtatctgaacatggaaacatctgatcgaagtcaaggagcaaagtcagccaatgaagttgctctgcatgattcaggtgcaaaggatcatgatacttatactctagggcattcttgtactggtaatgaaaacagtgccgttgatgaaggtagcaccagaactgacatgtcacatatggacagcattgtcccatcatgtgtgctcgaggattcattaaataacccagaaactggtgtgccacgtggggcagttgttgctgagcaaaatgaaaaagaaaataggattgagaatcatcagacggtgtatactgaggaaggaacaacttcaggtgtaagcacaaaagatgctgaagcatcacacatttcaagatctgctgaggatgtccatgaagaggtccttgacaaagaaaaaatgatcatttcactagaagaagaggtgaaacgtcttaaagctaaactagatcagcttgaacagcataagcatctagtgactgagagcaccagtggtgttgagtatcatggaggcaaaaatggcaatcatgccttgaactttggcgaacttttcactgcacaaggaagtataaaccagccctactcaccacaaatcaaatacacaaaactaaactttaaggtggttgacacattctttgctgttggatctcccctgggtgtcttcctttccctgcgtaatgtccgtattggtattggcaaagggcgagattattggaaagataagaacataattgaagagatgccatgctgccggcagatgttcaatatttttcatccttttgatcctgtagcatacagagttgaaccacttgtatgtgaagattatcaaaagaagcgtcctgtaattgttccctaccatagaggcggaaagaggatacatgttggagtgcaggagttcacagaagatatttctgcacgttctcaagccattgcctgtcaattgaagtcactgaaggtcaaagcagtagctgctttgctagcattgagcagaaatgacacagaag

SEQ ID NO: 18994 - DNA, 603 bp, Zea mays
  Peptide Sequence Number=SeqID_62369
atggccgaagctctggcggcaatggcgggcggaattgagctcgccggagctaagggaaagtggctggccggtgagggtgagtgcggggcgaagtcgaggttgagtccgagcccttgggtcgggcgagacggagaccgtcggctgaggccaaggtcgagtccgagccctgggtcgggcgaggcggagttcgtcgtcttctggggccgaggccgagtccgagccctgggtcgggcaaggcggagttcgtcgtcttccagggccgagcccgagtccgagccctgggtcgggcgaggcggagttcgtcgtcttccggggccgagcccgagtccgagccctgggtcgggcgaggcggagcttcctatggcgcctgaggccggaattggccgctgtcagcctcactctgtcgagtggcacagcagtcggagcgacgccacatttgcattaaatgctcctgcgatacggtcggttggcgtggcgatttggccaaggttgcttcttggtgaagactgggcctcgggcgagccgaagctttgtgctgttgggggttaccagctgagatttaggagtcttgggggtacccctaattatggtccccgacagtag

SEQ ID NO: 18995 - DNA, 132 bp, Zea mays
  Peptide Sequence Number=SeqID_62370
atgacgaccgacaggccgcttgaccacttccacatggatctatttggcccgattgcttacataagcatcggcgggagaaaaatcacaaacccaagaaactttaaaaggattcttgagacgggctcaaaatga

SEQ ID NO: 18996 - DNA, 546 bp, Zea mays
  Peptide Sequence Number=SeqID_62371
atggcggttcaaggcttgatatttcctggagcagagcaagggtgctgggagttcgcagcggtgctccacgacggccatcactggcgtcgagcaatgagcgatttagcaagaggggtaggaggccgagcagagaaacgcgaccatggacagagaagcaggcgcgcgcgcacggacaacagcgaagagctcggcgcgttggccacggcgaacgccagggcgcgcggcgagcagcagcctgagcaagcaacccagggcgcgagcagggagcttggccgggcgttggggctgggcgcgatgaacttcagtccgagcaccgacaagccgaggccggatccgaggaagacgagaggggctgcggccgggcgagacctcggcagggcgcgagcgagcaggggtctggcagggagtgacgactgggaagcagggaagctcgccagagggagagggcaagggcgccggcgaggagaaccaaggagccgggggcgagcagggaaggagaggagggagcggctgagctgggcgggaagaacctcagggcgcggctga

SEQ ID NO: 18997 - DNA, 546 bp, Zea mays
  Peptide Sequence Number=SeqID_62372
atggcggttcaaggcttgatatttcctggagcagagcaagggtgctgggagttcgcagcggtgctccacgacagccatcactggcgtcgagcaatgagcgatttagcaagaggggtaggaggccgagcagagaaacgcggccatggacagagaagcaggcgcgcgcgcacggacaacagcgaagagctcggcgcgttggccacggcgaacgccagggcgcgcggcgagcagcagcctgagcaagcaacccagggcgcgagcagggagcttggccgggcgttggggctgggcgcgatgaacttcagtccgagcaccgacaagccgaggccggatccgaggaagacgagaggggctgcggccgggcgagacctcggcagggcgcgagcgagcaggggtctggcagggagtgacgactgggaagcagggaagctcgccagagggagagggcaagggcgccggcgaggagaaccaaggagccgggggcgagcagggaaggagaggagggagcggctgagctgggcgggaagaacctcagggcgcggctga

SEQ ID NO: 18998 - DNA, 711 bp, Zea mays
  Peptide Sequence Number=SeqID_62373
atgggacagaggacacttgccttcaccaaactgctgatcagggacttcctctgcaacttcctcgggaaacacagactgctcgttgtctacgtaaactggggcggcggcgctcgtccccgcggcggagggctcgccggagacgaggggcgcgggcgtttggcgggcctctggggtgacctgagtggccgaaaaggttggggagggcacggggagtcctctggtggggtctgggtcggggcaggggcaccggaggggggcggttcacggcggagcggctcggcggcgggattactctactccggcgaggaattacacgcggcagagagcaaaacaaaggtcgataggggcgggagaggtcccttacctcaaggcgggctccggggactcctcggcggcggcaatggcgcgacggtggtccgggtgcgacggtgggggacctccgcggctgcacggggaacggcgggtgagcgcgggcagagagaaatagtgagggggagagggaattggggcgcgtcccgggttgcggacgtcggggcggagctcaccggggcaaagggcgcggcggagctccaacggcgacggggaatcgatctcgggacggcgggggttatggcggcggcgctctgcgtgcgcgcagcgaggggggaagagggtctactacagcgcacatggggagggggagagggcgagtggggctcggggctcatgtga

SEQ ID NO: 18999 - DNA, 300 bp, Zea mays
  Peptide Sequence Number=SeqID_62374
atgggagtcgttgtccagaatgagcaggtagtatttgtagccagagaggctgaggacaggagaagtccagagatcgcagtggacaagatcaaaggcctgaacagccctggacgtggaagtggaaaaaggaagacgagagtgacggtcgagctgacaagcatgacagaggcgctcaggagagcctcgagtataggatatgtcggagtggctggaaagctgggacattacgtcaagtccagggtgcccgaggcgacggtgccaaatggcggaggaggtggtggcagtagcaagagcatgtga

SEQ ID NO: 19000 - DNA, 1179 bp, Zea mays
  Peptide Sequence Number=SeqID_62375
atgaagggtttggcaaatgatctctgttacctcgacgagccagtctccaaccgtaccctcgtcctcaacctacttcacagcctcggcggtgctacgaccacctacggacttggatcgtgcgcgcaccttatgggctgcctcagcgcaccttactggcttaccctccactcttatcctccagggccccgtcgcctcgtcctcctgccccttctggccctcctaccagctatggttttgggttctgctggcgttataggaaatcctatgggttttgctaggaatgttgggtttggtttaaaggacttcatatctgcttcaagaaaagggaaattgcagagcccagttgaactattaaacggtatagcacaaggttcaaagactcttattggaagtacggtttatgcagtcagcagtgccacttctcacttcagtaaaactgcttataagggtctgactgggctccttcaatcaccgattaggggagctgagaaacatggtcttcccggggtcatctcaggtttagcaatgggaacagctgggcttgtggcacggcctatggctagcattcttgaagccacaggcagaactgcccagagcattagaaaccgaagcaaccctcacgaatccaactacttgcgagtacgtttccccaggcctgttgccagagatcgccctttgtttccctactcctgggaagaagccatcggtgaatcgttgcttgcccaagctgacagtggcagactaaaggaggagacatttgtcatgtgcaagacactcaagggggctgggaagttccttgtgctaactgagaagctgcttctgctagtctcaagcccatacttggtggatctaggatcgcctcggttcatcggtgttcctcctgacccgcagtggtcgatcgacacggagatgcacctcaagagcgttgttcatctggacaggtctcaggaggtagtgaacattgttgggagcaacggacagacctcacctagggacaaaagaggtggcacgagaaacagggtcatgagctcggccttcgtccccctgtttcacctcagcatagagctgccaaatgaggaggatgcagaagggacggtgcaggtcctacaggcactcatcgagaagggcaaggcacggaggtgggacaagaacatcctacaccggagcaacatcagttga

SEQ ID NO: 19001 - DNA, 249 bp, Zea mays
  Peptide Sequence Number=SeqID_62376
atggggtccagacacgtgacggccgacctgggggtggatttcgatacagtcacgaaggacagagctcatgacgcgatcgaaggccacgagggtgccctggataagctggccatcgtggaggaggacacgcacggcgcggtcgatggcaggggcgttggccgcggtctccggcgtgaggatgcggcacgtggacaacacccgagcagtgacgatgatcgccgctgggcaatgatgccgacggaggcctag

SEQ ID NO: 19002 - DNA, 576 bp, Zea mays
  Peptide Sequence Number=SeqID_62377
atgcgcggggtgcctcgatgccgctgcattggttttgaaaattcaccttctctgtcttctacggcggccccaaggaggcacggtgaaaaggtgcactaccgcgggcggtggcatgctccacacgcggcggttcaccttctccgcacacagaggtcgacgtccgaagagtatgactcgtgggcccgggcccccgtgtcagagactggtccgccgctttcggcggaggtgaagaggcgcactaccgcaggcggtggcgtgctcctcacgcgacggctgacacccaaggagtatgactcgtgggcccgagcccccatgtcagagactgggtcaccttggcgcgcgtcgggcgaggtcttctgtggcgcttcggggcgtcagttgggggaatctctctttaaaaaggggactcccccgagtgcggtagccattctcatcactcgcagcgccctttcgctcttgagttctccgcgctcttgtgccgctgtagccaccatggccttgctagatcctcccgagcttctccagcctgaggtggcactcaacttggtgcgcaacctgctcggatggggtgcgtga

SEQ ID NO: 19003 - DNA, 2271 bp, Zea mays
  Peptide Sequence Number=SeqID_62378
atgaagaacaagtccccaacaatactgctcatcactgtagctctgcacagtcgaccgttggcgcgcagggagccgttgcttcgctggctcaccggacagtccggactgtcggcggcggcggtgatgggtcagatcgggatcgattggcaggagatgtttcgcaactcaccctcccccgaccgtggggccaacgtctgcttcgcctccccctcttcggcgtcggtagcaacacgggcacggacattgggcgccgcaaaggcgatatcggacgacgaacggcggtggggttctctctcctccctgatcttaggactatcggcagcggtgatgggtcagatcgagatcaattggcaggagatgtttcgcaactcaccctcccccgaccgcggggccgatgtctgcttcgcctcctcttcggcgtcggtagtggcgcgggcgtgggcgttgagcaccatgaaggcgttatcggagaacaagcggcgatggggttctctctcctccctgatctcaagaatgtcggtggtggcggcgatggggcagatcgggatcgattggaaggagatgtttcaaaactcaccctcccccaaccgcagggctgatgtttgctttgcctccccctctttggcatcggtagcgatgcgggcgcaggcgttgggcgccactaaggcgttatcggacaacgatcggcggtggggttctctctcctccctgatctcaggactgtcagccatggcggcgatggggcagatcgggatcgattggaaggagatgtttcgcaactcaccctcccccgattgcggggccgacgtctgctttgcctccccctctttggcgtcggtagcgacaccggcgcgggcgttgggcgccgcgaaggcgttatcggacgacgagcgacgacggggttctctctccctgatcttaggactatcggcgatggcaacgatggggcagatcgagattgattggaaggagatgtttcgtagctcaccctcccccgaccatgaggctgacctctgctttgcctcgccctcgtcggtgtcagcagcgacgagggcgcggacgttgggcgtcgcgatgacgttatcgggcgacgagcggcgatggtgtcctctcttctccccgatccgaggactatcgaaggtggcggcaatggggaggatcgaaatcgattgggtggagatgtttcacagctcaccttctcccgatcacgaggccggcgttggctttgcctccccctcgtcggcatcagcagcgatgcatgcgcgagtgttgggtgtcgcgaaggtgttatcgggcgacaagcggcggctgagtcctctctcctccccgatctcatggctatcaggcattggcggcgatggggcgcagctccgctataattcaccagactgtccggtatgccaccagactgtccggtgcaccagcggagcaacgactatctgcgcgcaacggtcgactctgacggatgaacaatgcagcacagtgtcgcggcagaagtcagagcagcagaacggatcggcgctggagctagagctggcgacgctcttctttgccggcgcgcgctggagctcgtcttgtccgacggcgctcctctccctagtgctcggccctgtctccttccctgccaaggtcagcgctgtagccgtcaatcttgagcagctcgtcgtaggttgcttccccgcggccatggagaaatctccaagatccattcctatcggatcaggacctgttagggctgacacacgcaaagatgtcgcagaagctgcaaatgggactaggctgattgatgggagtaggcgcacaggcatcgtcgacatgagcaacattgattatggcactagtagattacgtccgcgccatcgattatgtaggacacatgatccggcgcaaagatataatcgagtttgggatggtcttttagacgccattagacagatgcaattatctgccgatgagttgaggaagttgagccaccgcaatcatgtgcctgagtatttggatatggtgcacaagaattgcttggttaatgccatgagtgatgttactgaaattgcaaaaggtctagacactatgagcagggatttggaggaagttcttattggtccgcaacctctacttgaggattacgaagcccttggaatgtacgatgatttcaaatctgatgttcattgtgattgtactgagcagtgtggttcggatgaagacaactcttcttttgactcggatgagatcaatgatcgtcatttatcacatatgaatgagcctatctga

SEQ ID NO: 19004 - DNA, 933 bp, Zea mays
  Peptide Sequence Number=SeqID_62379
atggagtttccgcaccaccaccaccaccacggccatcgccgcgacgacgacgaagacgaccgcagaggcccgcctcccccggtctacggcggctacggccagccaccgccacccgacccgtacggccgcgcgcccgtcgaccccgatccgtacggtcgacctccgccccagtccgcgtacggtggggccggggacgcctacggccacagcggccaaggctacgcgcccccgccggcctacggcgccgggggcgggtacggcaacgtcgtccacgtcgcgcacgaggtcggcgacgagaggccttactacggcggcggcggcggcggtcttggtggcgcctacggaggcggtggctccgagtacggccacgagggccgaccgcaccacggcggcggcggatcccagtacggccacgagacacgcccgcaccacggcggcgggggcggcgccccgcctgtgaggcagcagacgtacaggatctactgcaaggctggggaggaccagtacagcctcgcctcccgcgacggcaaggtctgcctcgtgcgcacggaccgtgatgacgacgcgcagcactggatcaaggacatgaagtacagcaccagggtgaaggatgaggaaggctaccctgccatcgtcctcgtcaacaaagccactggagaggctctcaagcattcccttggccagtcacaccctgttcttctgacccgccataatccagactccctggacgagtctgtcctgtggacagagagcagggacgttggggatgggttccgctgcattaggatggtcaacaacatctacctgaactttgatgctttacatggagacaaggaccatggtggtgtgcgcgacgggacggcccttgtgctgtgggagtggaacaaggaaatgtgtgaccgagcccgcaccaaggaggagctcctgccgtaa

SEQ ID NO: 19005 - DNA, 204 bp, Zea mays
  Peptide Sequence Number=SeqID_62380
atggtgatcctgaggctagcggcagcagtgccccaaggcggggcgactggcggccgcgctccccatggatcgagcgacggcgctcccgaagcggacgagcgacgacagtgcaccctaggccagatggcgatgatggttgcggggtctccttctctgtcgaaggtcctcagaatggagaaattgcctataagcaatgagaactaa

SEQ ID NO: 19006 - DNA, 164 bp, Zea mays
  Peptide Sequence Number=SeqID_62381
gtggttatgagatcgatgattctggttatgactatgatgctgctagtccactacagccaaacaggatacttgctgagtatgttgatcattgcaaccactgctcaatcgaagatgaagctgtggaaggagacttccaggagttccaagattacgacgagttctag

SEQ ID NO: 19007 - DNA, 324 bp, Zea mays
  Peptide Sequence Number=SeqID_62382
atggcgacgctgcccacgacacgaggcggattggttgccgatggcgaacttcacggagacccgagaggcgcaggcggcggagttgcgagcacagagagcgacgcggaggagggcaccactggagacgcgctcgagaggatcgagcccgatctggaggctctgggtcgagggaaggtcacgacaagcagtatttatggccggggcggaggggtaacaggagaatcggaggatcccaacaacccaccaaagtcgcggtctccgttagcttcgatcttcgttccgatggggaagaagactagtccgacagaaggggcccacatgtag

SEQ ID NO: 19008 - DNA, 216 bp, Zea mays
  Peptide Sequence Number=SeqID_62383
atgaacttaccaattagcttaatcaagcttgaccctaattttgctaagtgtaccacaaaaaccttcagtaattgcaatctcgctgatggagagtacgtgctcatccccaagcaaggagctgtccacgaggaagaccaggagcaagctctcgagcctgccatcgaggatctacccgcagccccagcatttgaaggcaatccccggttttatgcataa

SEQ ID NO: 19009 - DNA, 1026 bp, Zea mays
  Peptide Sequence Number=SeqID_62384
atggggatgatccgcaagattaatctaatgggtgtgcccctacaggtagaggatcttctctttaacattgacaggaaaaagcaaagaaagagaggatgcttcgcatgcggggagaagggccacttaagggacaactatccaactatggccgaactcaaaaaggagaggagcaaagacaaggtgctaacaagtgtcaaaacttgggatgactcttcaagcgaagataaacctccaaggacgcgcagccaccggtcctcatcacgttcatcacacaaatgccttatggcaagaggtaaaatgagcattccattctctagtgatgaaagtagtagttatgatgaaggtgagggaaagccctccgtagatgagcttgcggaagccgttaaattttttcaggatgtttgcactaagcaaaaggctcaacttaaaaccttgaaaaaaaaatttgaaacatttgcaaatttgaattgtgagctatcaactaaaattgagcaattagaaactagtgctccatccactgctaccgatgatggccttgttaaaagaaatgaaaaacttaaggctaagttagctaactcccaagaagctattgaaaatttgctagggaaaatggaaattcttagcatacacaataatgagctaactactaagctagaaaacattggtagcacccaaggggcatctttagttgaaattcctgaaattattaagaaagatgcttctacttcttactttgatttaattgatgattctaacccctgcaatgaagttcttgttgagaatattgttgtagaaacatgttcagatgatgttgcaaaggaaaatgaacaattaaggcaagaagtggctctccttggtaaggctttgtatgacaagaaagacaaagccaaacaaatccaatctccacaagataacaccactgcgggagtgaaaaagcctgtggaaggcgaaaccgtgatttgtacgttatgccacaaggaaggacataagtctttccaatgcaaggcgatgaccggggataagtaa

SEQ ID NO: 19010 - DNA, 1089 bp, Zea mays
  Peptide Sequence Number=SeqID_62385
atgactctgggtatgtccgttacatggccgaggctcgggctacgctcccgaggtaccgtaggacatttccgagaccagcaggagcgattttgtaacggaatcccatcagagggaggcatcgagccctcggaccctatcgaacgggtccgggtccggcaaatcacctacagggtgaggctgacaacagccaagttcagcctcaggcgcaataggaagctccaccttgcccgaccttgggcctcggcctcaggaggaggtctccgcctcgcccgaccccagggctcggcccccacctcggcctcggaaggtggcctccgcctcgcccgaccccagggctcagcctcaacctcgacctcgggaggaatcgcgtcctcgcctgaccccggcctcggcctcggaaggaggactctgcctcgcccgaccccagggctcggcctcaacctcgacctcggaaggtggtctccgcctcgcccgaccccagggctcggcctcaacctcggcctcgagaggaatcgcgtcctcgcccgaccccggcctcggcctcaggagaaatctctgcctcgcccgaccttgggctcggaccgaccgcgccacgggggatacatcattaccctacccctagctagctcaggctacgggagaacaagaccggcgtcccatctaggctcgccccggaggtccagggccttcatgcgagaaggtcgcgcgggagaacgagctcactctctctccctcgcgaacgcttgtaacccctactacgagcgcatccccctggcgcaggataacacgagccgcgttttcccccttgtgttccatctcgcgccaacccatctgggctgggacacgcagcgacaattttactcgtcgttccagggaccccccgcggtcgaaacgccgacatccgctataattcaccggactgtctggtgcaccagcggcgcaatggctactcgctccaatggtcgactgcaaaagtgtgctgacagcgcaacagtgcgcggcagagtcagagctcagagtcagtggcgcaccggacagtgtccgatgtggcacaggactgtccggtaccacaagagacaagctctctaa

SEQ ID NO: 19011 - DNA, 783 bp, Zea mays
  Peptide Sequence Number=SeqID_62386
atggctaccgcccgggggatcgacccctttttaaaggcggctctccccactcgcatcctcaggcatcacggacaaagtcttcaccgacgtgctccagggtcctccccctacgacacgggggctgggtcccacgcgtcatgcaagctgacccaaaacggaagaagccaaaccgccgcacgcggagcgtgtaaccgccccgcggttacaagcactcctccatcctcgccgaaaccagcggtcgaaagggcggaccgccatgcaggtggcgtacaaccgcaccgcggggggcgcaccccttcgactttgtcgcatccagcatggaggcccaggcccacacgtcatgtaaccgacgcgccggttactacgtgcaagcaaccgcaccgccacttgtgccaatgccgcgcttcctcgactgtggaaccggtgctgcgacccgaggcaaccccgcgcatggcccaacagtgccaatcgagcaccacgatcacgggtcagtcagccgcgggaggaggcgtgacggttgatatagccaaaagtggaccggcaataatggcgacagcagacgagcggaagcggcggtcaaatcgtctgcaggctcacgtcccctcctggagcagcaggggagccctctcccacgggaccgggaaaggggatatttcgaaagggatccttctccgcgaaggaagcgggccccgagccctcctactgatcaggggttcgaaggctggcccctcgggagggttcgacagccgccctagagcactcgggcttcaggctcattactga

SEQ ID NO: 19012 - DNA, 450 bp, Zea mays
  Peptide Sequence Number=SeqID_62387
atgtcccccgctggggtgccagcgtcgtcgactcgctcgacagccgacgaggtgccgcctcctgcctggccacggttgccccgtctccaccacggggggaagacgtcgtcgagttcgctgccaccgggagagcagtcggccgtcgctgtcgcgctgcgggggaaggagtaccatgtcgttgctgccatcgagggacatgaactcgaggctcccaaagaggagcagcgtcctgggctgaagaggttgctggaggctacccatctggaactcaacaggaagttgttcgtcaacacgcagcaggcccctacctggcgcgccaactgtcggcgtttcgaccccagggggtccctggaccgacgagtaaaattgtcgctgcgtgtcccagcccagatgggttggcgcgagatggaacacaagggggaaaatgcggctcgtgttatcctgcgctag

SEQ ID NO: 19013 - DNA, 1995 bp, Zea mays
  Peptide Sequence Number=SeqID_62388
atggcgagtcgtgccccacacgatcgtatcgaggattcaagagagaagcacattggccatccgacatcaagacaagtcattgtgctcctgttgatgttctcccctttgcggagtggtggaggaaagcctataatcaagtaccgaaggatagaaagaaagggcttaatagcgggcttggtgtatttgggtaatcgccaggagctcaagccaatcatgcagccacatagttcccatgttatcacactttcacaagcatgtccgaacaacatttctgggtgcactttgacgccccttgatctctgtgatgtaacaaacgagataacactgccgaaccatcagggttctgttggtccttctactccttcaaatctgaattccaggttaccagggtctcctgctatggttttgggcaacaattcaccgttcccttcaacattgagtagtcctagggatgctcagaaatatggtgttcccagacctatctctttacagggtgatgagcaaccaaagattcagtataatcagatggtcaatgacagaaatcttcatgaacctggagtttctgctcctggaactactccttccggggttgattgtggtccaggtgccctcatgatgccatctgcccctgctatgggaacagtggcaggactaaatcgaggtatgcctggtgccaagccaggctttccaaggattagttcaccagtaatgttaaatgctgttccatctggaaatctgtttcccaacagtgggcaaggtgtgctcaacacagtaaatgtccatcctggagccatatctggtcctggcaattcaatcttgaggccacatgatcctatgcaaacatttcgtcctggtcagggtatggaagagcataggcagatgtcggagtttgacatgccggtttcacagggaagcggccaagccactatccagtttagcagcatgaattcatctttctcgagtccacctgttcagcaaccccaacggccacatcagatgtcacaatcgttacacatgtttgggaatccacaccattctcagatccagggaactagttcaagctcacaacagcaggcatatgctgtgcacttggctaaagaaagacaaatgcaacagcatatggcacctcaacagcatagtgatctttctggagcaagtgcagtacccaatgtgcagagtaatactcaaacattgcagcagggccaaacctcatctgccaattcagccccttgttcaaaatcacagcatcagcgacagcaagcggcacaaaatctgccggatagctcttcatctcccaaccaacctgccacttttacacaacagaagcagaagaaacaacaggaacaacagcagtctagacaaaatgagccacaaaggaaccgtggcagtcaacaagctaagcttatgaagagtttaggacgaggaaacatgatggcccagactcctccaattgactgcacaccaaccaatgctgcttctactccatcaaaaaaccatgtgtctgaaaaactggtgcaacatggccaaggacatttccctgccaatacaacaccagtaccgtcaatgcctcaacctaggctagtcacttcgttgcctcagtcaccaacgaaggtggcagacattggtaaccaaggtttaaaaaagggtggttctttgagtcaggccatgttagctttgcaacaacctccacatggttctaaatcgacattgaccactcagctgcagcagcggcaggtcaatccgccacagaacaacaatgggagagcagtggtgcaacagaaccgccaaatgaactctgactgtaggacagacttgcacgtcggtcaggtccgtcacaatcagatggttccaacatccatgccacagagtgcagattcgtgtagccctgtactgtcatctgtaaaccagcagaagcgtgagccatcgctcaatcagacttcagttacctcgccgtctaacctgcttaggtctcctaaagatacttcttttgggtag

SEQ ID NO: 19014 - DNA, 792 bp, Zea mays
  Peptide Sequence Number=SeqID_62389
atgatgacttctggtggatggtcaaacttcgaggatcaggcacttgttgtccttgtccatgatatgggtcaaaactgggaactagttagtgacgcaatcaacaacatcgtgcagttcaagtgtgtacataggcagcctaaagagtgcaaggagcgccacaaggttcttttggatagaagctctggtgatggtgctgacagtgcagaagactctggttcatctcagcattaccataatacattgccgggcattccaaaggcatgttcttccgccatcttgttttgtgggtactctttactgcctgccatgtatgtgggatgcaactcaaacagatataacattgaacctttgatttttagctcctgccatgcttttcttaaaattgagtctgcttttatcaacaccattataatgtctgagatttatttggagggtagcgcaaggcaattatttgagcgacttcaaggaccatttgacgaagagaatctcaaggcacattttgaaaaaattatactactcatgcaacaagtgcatgccagacgtagacagcaacgacagatgttgatacttgatcgaaactccaagaacaccaagtacagaaggcccttggtgaagattttagcaaattacaaggggccaggatatcacatcgatctcgacatgcttcatgcgttggtgttggaaagagttgacggagagatggatgtcgctgatgttatagcagtagacaagcgtgctcctggtgaggagggctatggagttcctggagaagctcgccttcgccatgcatga

SEQ ID NO: 19015 - DNA, 87 bp, Zea mays
  Peptide Sequence Number=SeqID_62390
atggcgggcgaaaaatggctggtgacgaagctcggagccaccttaagccagatgatgaagctaaagaatgataagctgaagccctaa

SEQ ID NO: 19016 - DNA, 3636 bp, Zea mays
  Peptide Sequence Number=SeqID_62391
atggggcgcaagaagaacgtcgccatcgacgacgacgagtacttctttccgcaggacgacgcggccgacccagccccgcccccgcccgcccccgccgccgccgacaaagagaagtccaagaagggcggcaagaagggaaagaaggggggcaaggctgccgcgcccgacgacgacgactacgagccccctcccccgccgccgccggccgccgacgaggacgatgacggcgagcccatcaacctcgtcttcaccggcaagaaaaagaagaagaagggcgccactcccgccgctcccttcagcgccttcagcgccctcggcgaggagggcgaggaccaggatgaggaggaccccgccccgtctgccgcagccgagccggaggccatcaacgatccggcggaggacgacgatgacgtcgtcgatttcgatttcagcaaggccaagaagaaaaagaagaaggacaagggacctcgctcggcacctgccaaagacgaggatgtcgagcctgctccgccacccccacctgtggctgaggaggaggatgaggagcccccagtgattgccgcagcagctgcgaagaagccgcagaagaagaagaaaaagaagggtgcgtttatgatggatggtgagaatgtcgaccagatccttgcggggatggaggatcctcagctcatggatgagcctgaaccagaggaggtgaaagctcaggattctgtggctgcccctgatgcggatgatgccacgggaaagaaatcaaagaagaagaaaaagaagggagggtttacgatggatgtggatggtgaggagtttgaccagatccttgcagttatagatgaccttccgcctcctgaggaggagcctgagcccaaggaccccaaggatgagggtactgcagctactgctgcccttgtggatgatgctgaagggaagaaatcgaagaagaaaaagaagaaaagtggaaggacagcgaaggaagaagaggagttggacaagattcttgctgagcttgatggagtccctccagtggaggaggacaaacccactcaggcaccacaatctgctgctttggccaaggaggacgttggtgctgcagaggatggtaatgtggaggacaaagctgaggaaggaggagaggtggaatctgctgctgccaagaagaagaagaagaagaaggaaaaggagaaggagaaaaaggctgcagcaaagggagcggagtctaagaaaggggaggagcaagaggcacctaaaggcaaggttgacatgaagaagctccctaaacatgttcgtgagatgcaggaagcacttgccagaaggaaggaagctgaggagcgacaaaagagagaggaggaagagcgattgcggaaggaggaggaagagcgtctgcgacgtgaggaggaggagaggaaagcagaggaagcaaagaggaggaggaaggagagggaaaaggagaagctgctcaagaagaaacaggagggtaaactcttgactgggaagcagaaggaggaagcaaagaggttagaagccatgaggagacagtttcttgagcagagtgaactccaaaaggctgaggatgctgcccctgagaccaagaagaggccaatatatgattctaagaaaaagaaagctcaatcaaaggccacagagactgcaaaagtagtcgaagaacaacaggaagaactcaatgaagttaacaatgacgaggaagaatatgtgctcgtggatcaggaatctcaatctcaggttgaggaatctgatgagaaaactgaacctgaccaggagactgaagagccaaaaccagaagaggacgaggaagatgaggatgagtgggatgcaaagagctgggatgatattgatgtcaacttgcctaagataagcgcttttgatgaggaagaggcaaagcctattgtcaagaaggctgagcctgtccagaagcaggagaataataaagctcaacctgcaattcctgctgccaaaaagcttgttccttctgttgcagactctaaaaagagtgaaactgatgatgtgggtgccagtaatggaaatgttaagaggcacaaaaagaaaggacctgtgaaagaggataactctaagagtggtagtgacctcagatcaccaatctgctgcatccttgggcacgtcgatactggaaagacaaagctactagattgtattaggcgcactaatgtccaagaaggcgaagctgggggtattacccaacagatcggagcaacatacttccctactgaaaacattagagagagaactagggagttgaaagctgatgctacactcaaggttccaggcctgcttgttattgatacccctgggcatgagtcgttcagtaatctgcgttcgagaggttcaagtttgtgtgatattgccattttagttgttgacatcatgcatgggcttgaacctcagacaattgaatccctgaatcttttgaagagtcgagatgcagtgttcattgttgctttgaataaggttgatcgtctctatggttggaagaaatgtccaaatgctcctattgtgaaggctttaaaacaacaaaatgaagatgttaagagggagttcaatatgagactcacagatattgttacacaattcaagatgcaaggagtgaatactgctttgtactacaagaacaaggagatggaagatacctttaacatagtgcctacgagtgctgtaagtggtgaaggtattcctgatttgcttctgttactggttcaatggactcagaagacaatggaagaaaaactcacttttgttgatgaagtccagtgtactgtactggaagtcaaggttgttgaaggccatggtactacaattgatgttgttttggtcaatggtatactccatgaaggagatcaaatagttgtttgtggcatgcagggacccattgtgacaactgtcagggctttgttaacaccacacccaatgagagagcttcgagttaagggcacctacatacatcataaggagatcagagctgcacaaggagtcaaaatatctgctcagggtctcgaacatgcaattgcagggacagccctttacgtgttaggacctgatgatgatttagacaaactgaatgaagctgttatggaagagatgacacgggttaggagccggattgacaggagtggtgaaggtgtctatgtacaggcatctacccttgggtctttggaagctctcactgagttcttgaagagccctgctgtgaatattcccttctgtgatttcagtatagggccagtgcataagaaggatgttatgaaggctagtgtcatgcttgagagaaagaaagaatatgcaactatcttggcctttgatgtcaaagtgatgcctgatgcccgcgatctcgcagaagagtccggtgtgaggatctttgtggcagatataatataccatctgtttgatcaatttacagcatacattaagaacctcaaggaagagaagaagaaagaaagcgctgaagaagctgtgttcccttgtgttcttaagattatgccaaactgtgtcttcaacaagaaggacccaatcgttttgggtgttgatgtccttgaaggaatagccaaggacctgtcagggcccaagggggcagcggcaaggagcagcagcaaggataggattagttga

SEQ ID NO: 19017 - DNA, 90 bp, Zea mays
  Peptide Sequence Number=SeqID_62392
atgaaatggcaccccgacaagaaccccaacatcaaggaggttgagaacaagttcaagcagatctcggaggcgtacgagttgtattattag

SEQ ID NO: 19018 - DNA, 408 bp, Zea mays
  Peptide Sequence Number=SeqID_62393
atgactgctgcgacgaggacagagaaggcgaggccgcagagctccgtgcgagtgaaccccgtggacagagacgaggtggatgaccacccggcggcacgcgaacgacaaccatggggcgaggtctggcgagcgaccaccatggatcggcaagcagcacgacggctggtgatgctctgcgcgcatgcacagagggaagccgagcagggtcgcgcatctggtgaggacgaccggcacggagggcaggtcgcatgttgctactgctgcaggcagagggaacgacatggcacagactggcgacgtccaaactcaagcgcgacggtgatgccatggccgagcacagggagcttggccggcagctggaaccagagttgcgaatgctcacgcgatttcgtcgccaaaacagcgtga

SEQ ID NO: 19019 - DNA, 174 bp, Zea mays
  Peptide Sequence Number=SeqID_62394
atggctgccccattgactgccattaacgccagcgcttttcctctccccgcatatgcccacctgcaaatggaacgccacgagcccgacgcctccctctgccctgcactaccagcggtcgcgcagcagcctcctcaccttctccctccactcgcgcttctcaaattaagaaaataa

SEQ ID NO: 19020 - DNA, 465 bp, Zea mays
  Peptide Sequence Number=SeqID_62395
atggctctcagctcccttacggaagcagggggacgtcagcaaagactcgaccgctccaacagctgtccctccgccaagctccgttgctcctccgacagccacgacatcacaccaacagggtgccaagatctctccggctgccacattggcataggctatgtgcacaaggaatcgaagaatggggcagagatttacccggtctacgtttaccgacggtcgggcgaagtccggcgaccgtggactggcttctccggcgaagcaaagtccgattccttgctcagggagcttcaccgaggcgtgcacagtctattccgagggttgggcgcggctgggaagggctctgttggccggtctacggtggcaggggcacgggtggccgcgggcatgccgtgcacggggcaaacgccggtggtttcgggctccggtgaggtcgagcgtgcacggaggagtacggtctacgcctga

SEQ ID NO: 19021 - DNA, 534 bp, Zea mays
  Peptide Sequence Number=SeqID_62396
atggctcggcatttcgtcgaacgggcaaagcgggaagcgcgacgtcgaccactagctgcgataacacaaaaatttgttgttggcagttcatcgaacatcacaaacgtcggaaaaacagcgaggacagcggggttctcaccgaggatttacggcgtcgcgaatggggcagtgcacacccggttggagcccgacgatgagtgcgacgaggcaaacctcgcagcagtgctacttcatccacgaaagaggcaggggcagccaaaatggtgcctcgaccttagacatgaatgggacctgatgggggcgcacccatggggaaggggctcacctacaccttactgtcgcagaggagaggaggctgtagggaacccgggcaccatgggattccacccatgctgctggaggtgccgagctccctgggagaaggctccctgcttgcttcgtggagaaggaaaaaagtggttggcggcggtgggaagtgtaggggtgggaatgaaaaatgctccaaatgcaagagagaggcacttatatttatag

SEQ ID NO: 19022 - DNA, 270 bp, Zea mays
  Peptide Sequence Number=SeqID_62397
atgctggtagactacacaacgatactcaatagaccatgtgtgtcggtcgaaggcccgacgcagcagggtgtcgagagcgtcgtggaagtgacagccacgagcggcgtcacgagtgatgggtctagtgatccatccctccggctctggctcctccgagagctccgtgccatggctcgaaatgccaccggcgtcgtcgtcgtctccgtctccgtcaaggtctcctccagcagccaagatgccctgagatggtgcaggggcatctctggctaa

SEQ ID NO: 19023 - DNA, 1245 bp, Zea mays
  Peptide Sequence Number=SeqID_62398
atggaaggtggcaggtgccactctgccggaagtgccaaaagtgtggtggtactgtatgagccaatgactcccggcccgggcccgggcccgggccctccttcattcggctggtctggttcgtctgcttcctcgcagtctcgcgagtcgcgactgccggtgccagacactccgtcgtcctgcaagctcgccgccgcctgctgcttcgtcctgatcgtccccatcctcctcacggatgagcatgtggccgtcgccgagtccctgtcgatcggcgtcaactacgggcagatcgccaacaacctgccatcgccggcgcaggtatcgtggctgctccggtcgatgcgggtcagcaaggtgaagctgtacgacgccgaccccaacgtcctgcgcgcgttcctcggcacgggcgtcgagttcgtagtcggcatcggcaacgagtacgtgccggcgatggtgagccccgcggcggcgcaggcgtggctgcagcagcacgtggtgccgtacctccgctcgggcgcgcgcatcacctgcgtcaccgtgggcaacgaggtgttcaagggcaacgacaccgccctccaggcggcggtgcttcccgccatgcagtccgtgcacagggccctgggcgcgctcggcctccagggccgcatcaacgtcaccacggcgcactcgctggacgtcatgggcgtctccttcccgccctccgccggcgccttcgcccccgcggcgctggcgcacctgcagccgttcctgagctttctgtcggcgacgcggtcgccgttcctcatcaactgctacccctacttcgcgtacaaggacgacccggcgcgggtgccgctggactacgtgctcttccgtcccaacgccggtgtcgccgacgcccgcacggggctccgctacgacaacatgctgtacgcgcaggggctcgggtacacggacgtggaggtcaaggtgtcggagaccgggtggccgtcgcgaggcgacgccgacgaacccggcgccacgcccgagtacgcggggacctacatccggaacctgctgcagcggatcgagatgaagcagggcacgccgctgcgcccggcgacgcccgtcgacgtctacgtgttcgcgctcttcaacgagaacctcaagccagggccggcgtcggagaggaactacggcctcttctaccccgacggcacaccggtgtacaacgtcggcctgcacggatacctcccgccgatgctggtgtcgtcgactgcagcacgacag

SEQ ID NO: 19024 - DNA, 546 bp, Zea mays
  Peptide Sequence Number=SeqID_62399
atggttaaaaattttggcagcaaaacagtgcaaatagcaatgaatgctgtggtaatttcacaactacttgtcagtttatatagtgctgcaggaccgaaggaacgtcttttgaacttcttcgccttctatttcagcggtattcgcgttgacttttcgcgcttcgccttatatttcagcggaatcagcgtttatttttcgcttctcgctgctggtgagtatgctggctcccttttggctgttggcctcgggagtatgcgggttttattggtggtggaggtggaggctgttgccaagatgcctatggttggtttgccgaagcaacagaagctgcaggatggttacccacatactctgcaatttctccagggtctgagggggtttcctggcgaagtatcaggccgtaggtcctggctgaagccccttgatcatggcctcaatgacaatttcattgggcactattggtgcttgtgccctcagacgcaagaaccttcggacatacgcctgaaggtattcttcgtgatcttgcgttgtcacacccggctttaa

SEQ ID NO: 19025 - DNA, 240 bp, Zea mays
  Peptide Sequence Number=SeqID_62400
atggctggttccaaggatcacaccaagatctccaccaccaacatcatcaagccggccatggaggtactcctcgctaatgaccagcaaccctttgaggacctcataatgcgcaaagagaaggaggtgatgcggcaatggaacgaacaacacgacaaggaggagagtctcaagccaactgctctcaaaagtcaacttgagcctcaggggcttgtggggattgatatccccgggtcctcatga

SEQ ID NO: 19026 - DNA, 204 bp, Zea mays
  Peptide Sequence Number=SeqID_62401
atgaaagagaagcaacgaaggcagccgaaaaagctgcggaactcgaaagctgagctatctcctcccccaaagcccttcgagtcaatggccgacccagaagcagagaaagaagatgaaattactaaagtggccgaagctattatggacaaagctgtttctcgactgctaaacgaagctgcggaaacagttttaaaagaagaatag

SEQ ID NO: 19027 - DNA, 369 bp, Zea mays
  Peptide Sequence Number=SeqID_62402
atggttcacttggtagctaggtctacgtgcggtggcgggcggccgaagtctggcgacggtgatcttgctgttccggtgaggcagggcctcgatccttgcttcgagaagcttcatggctccacggggatactgtccagaggctcaggtgaggctaggggtctctggaaatggctggccgtgatggccggcgctcaggtggctcgggcatgtggcgctgagcttgctggagtgttgcacgctcgggggtggtctttaagggcgcgggtgagctcggctgagggtggctctaacacgcgctcggggtgtgcgcggggaacgccagtgcacgctctggcgcctagacacggcgtcgagcacgaggcagcgtag

SEQ ID NO: 19028 - DNA, 471 bp, Zea mays
  Peptide Sequence Number=SeqID_62403
atgaagaggaaccttcggtcatcacatgcggacagcttcagccgaagctatttcttcctaccagaccttcggcgacgaagcatagtcccaacaccacccgtctccgtggcgaggtctcgctggaggcgagggcacgaccaaggccatgacgaagttgtagagtacttgggaaaggctcgggcgcactcaaggcgacaccatggactcaaccataggcacgacaccggcgcgggggcactagagggcgcagaccacagcggagcggcccaacagcggtgcgaacttgctctaacgagcaatcgcgcgaaggacagggcagtaaatggagaaataagggcatgggggttgctcacctcgagtggatactccggagcacttgagcaacagtggggacgctgggagagctcaggtcgacagcggagcttcggctgcaaggtgaggaagccggtgagcgtggaccaggcgagctag

SEQ ID NO: 19029 - DNA, 423 bp, Zea mays
  Peptide Sequence Number=SeqID_62404
atgggaatagtctccgaaccttcagcttcgcctccctcacgctcaaccctagcggcttcaagctggagcttcgttcgattccaagagtcaagcttcggctatggtaagaaggcgaagcgccaggatttttacaccaggcggacaaccgcttgcactcgctgcgcggtggaccgcagagaccaaacagtaactctgcaaggtgggaccgctatgcgctgggaaactgaatcgtttctcgacaacgagctcagggaaggtgttttttggaccttcggcttcctgaagcttaggagacttttttcacggatcaagctcgttacgaaaaacgatctagcgccgcgaaaggggctactgttggggctatgcttcgtcgccgaaggtcttgtaggaagaagcagttttcggctgaagctgttcgtatga

SEQ ID NO: 19030 - DNA, 327 bp, Zea mays
  Peptide Sequence Number=SeqID_62405
atggcacaccttgctaacctcgctcagaccactaagctcacccttgacagccgggaggacttcgtggtcgacttgtcttcaaagttgatggcagctaggcagcgtcgcgggcagaacgagcaagttcccccgccacctcctccagctcccatggtgcaggagctgatcgctcagcggaatgaaattctgcgacagctttttgcagcgcgagccccaccctcagcagcacggtggaggccagccgcagtgaccccctatcgcgacaacctatcaggagttcctgagcatgtagccgcccttgttcaccaaggaagaggatccgcttga

SEQ ID NO: 19031 - DNA, 267 bp, Zea mays
  Peptide Sequence Number=SeqID_62406
atggggtcatccctcttctcagtggggaagagtcctagtgggtgcatcccaactccaggggatgctgcaccgtatacaaaggggtgtagggtaaccggcggagttgagcacctcccacaagatggaagggaaaccctcgtgagaaaggaaatcggaactgaaatgagcgtctcctccattggtggggtgggtgaggtcatctgcgaaagcggatcagatgtaaaggttacgatgaaggagtggttagtcgataacgtcgaatgttga

SEQ ID NO: 19032 - DNA, 378 bp, Zea mays
  Peptide Sequence Number=SeqID_62407
atggggtcgaggtcaccgaacgaggcggagaccgtgcctgaagatttggtgggtttggatgttgaaatgactaagtttgccgaggatctagcgaagactatgggtgaagccacaacgctcatgttccttgtggcaggaaacgcaagggtggccatagtcaccagggaagtcatctgcattgaggacctaagaggatctgtgaagacccgggccatgaaggcgacgggggcgaagggcggcacgacggagaccactaaagcagaggcggctggagttgaggtgcaacaaccttcgcccgagacggcgcctactaaagggatggtgactgagcaggcgctactggaggacgaaagggcgcggtgtctaccacaggggtag

SEQ ID NO: 19033 - DNA, 435 bp, Zea mays
  Peptide Sequence Number=SeqID_62408
atgtcttcaccgcctttgataaccaccgtctccttcatagtagtacttgagtcttcctcctccccttcttcaatgtcttcaggacatggcccgcatgtcctagtgtatttctcaattctcttcataagatttcgcgctggaattgtcactagagaaatattagcgctttcgaagccacagttcatgctaattggtttactggaagtgctaggtgctgctggcattatgggtaaatcaagcaagaagtccagtgttaaggctgcacctgctgctgtctcagttccagaggggaaatctgcaaagaaggggaagagaaatgcagaagatgagattgagaaggcagtgagtgcaaagaagcaaaagactgtacctgaaaaagttgtgccagttaagaagcagccccctccaaagaaagttgagtgcagcagctcttag

SEQ ID NO: 19034 - DNA, 1351 bp, Zea mays
  Peptide Sequence Number=SeqID_62409
atggacgtggggtggaagcgggcaggctggtctgatcgggtggtgcagaggatggatggagctggtctggtcgagtggtacagggacgactgggcttccactccgcttcgctaccgtgcacaggaaaacccaaacaaaccacagaacccgagcaccgccgccatgtccgccgccgcagccgactggctcccgtcagcgtccgtgacggcgtccggccgcccggtgctttccgcaggcgaggtggagcggaatctcgtcccgcttgtcgatctcgagcccgaggagaacccacacctcgcgcccctccgcgcctgcctcctcgcgctcacttcccaccgcctcatcttcctccacgagccgtcccgctccgcacgcggcctcccgctcgccaccgttgtccatgcctaccctccccaccgcaggcacaaccataacccccttcgctccctcttctcctcgtcctcatcttcctcgtcgcagcatcaccgcatccgcctccagatctccatgccatccgtgcgatcggaggtcattgccatcgtcgtgacctgtaaggctgacgttgatgtgttcttcgggaggctgctcgaggcgatccgtgcaagggcttgggaggtggcccccgcagctgctccgtcgagcagcacgcccgtcgcagatgtgcctgcggagaacgtcgggatccggatgcccgttgttggggtctctgggatactgcggatggagcaggagtcatgggagagcgccggccagaacttacaagatgcgttccaggatctcaatgccctcatgggcaaagctaaggaaatgatgcagttagcagagaaaatgaggctcaagctattaatgaactcatctactgaatcaaattccaatgatgaagagatgggctctaagcaagacatgcaggatttgctacttagtgttggcattgtgtctcctgtgacgaaagaaactgctggtgcgttgtatcatcagcagttgtcactacagctcgcggactttgtaagaataccgcttgagaaagcaggtggtatgatggcactggtcgatgtttactgtctcttcaaccgtgctaggggaacagagttaatctcaccagaggaccttttgcaagcttgttcgctatgggagaaagttgatgtccaagtcatgctcaggaaatttgatagtggagtgaaggtgatccagacaaagacacatagtgatgaagaggtatttgcgagaatctcatcacttgcacagaagcaggatgctcttcagaaagggattagcccaagtgatgctgcattcacactgggaattgctccagctttagcaaaggagcatcttctaaatgcagaaaacaaag

SEQ ID NO: 19035 - DNA, 486 bp, Zea mays
  Peptide Sequence Number=SeqID_62410
atggatgcgcccgtagcggaggagctggtgtggtggggcctgcctatcatacacgggagcgattgtgtttgcgtgcgggttaggctgatgagaggggcccacatggaaggcaacgcgcgcggaggtctaaacgccgacaacagggacccacatgccagtgcccacttcaggctggacggcgcggacgcggggcaaggtgggccacgcgaggtacctttacccggagtaacttctgatggggcattaggcttcactccgcttaacttccaaagtacctttgagctatcttttacaaataagtcgaagctttgttcatatttccttctaaagaccctcgttcttaagctaacacttcaaggaagtgataacctaaggatgaaggcttgggacaggatatcaccatccaatgagggtaggatatcgcagtcacagaagaagattgatgacacaatcgaagaaatgctcaacattgagccagaacattag

SEQ ID NO: 19036 - DNA, 303 bp, Zea mays
  Peptide Sequence Number=SeqID_62411
atgggtggctaccaggagactctttgtaaaggctacgtagtgaaaccttgccgactcaccttggtagtgtttgagggttgtctttgctgcaacctatgctcaggtaaagaagaagaaggcatcaaggcggatctccaggagttccaggacttcgacgagttcgaggattatgctagcgacctcccccagccaactgcatgtgtgtgtgatagtacgtcacacactatactgttggggttagctagaagaggtggatatgtcatgcctgaaggaacctgccctggtcaaacctcgcggtactga

SEQ ID NO: 19037 - DNA, 255 bp, Zea mays
  Peptide Sequence Number=SeqID_62412
atggctgacatgcgagcgcacgagtcttgcgagatctggcgtggacggggcacggctgtggccgacgcgcggccaggcgagctgctccctccggcctccggtggtctggcacgcctcctcctcgcccagatccgtccatggtccgcccctctggcctcgcctagctccaaagctccctcatgctcgcgggcacgcggcctcgccctgggggccaggccctgggccgccgtctccggcatccgacctgaggggtga

SEQ ID NO: 19038 - DNA, 615 bp, Zea mays
  Peptide Sequence Number=SeqID_62413
atggcttccgtcgtcggcgctgaggtggtggcggctgaagaagtcctcgtcgccgacgggatcaccgccaccatccgcgctctgggcctccggctctttggctttgataacttgtcctcgcccctcgagtggagaagtgggcgagggcattgttgcagcggcatccgccttgaggccatcgccgctgcagtttggccacctggagcagaggttgttgtcattgctgccggagtgggcggcggtgagccacctggagccttgtcgccccgcgggccctccaatgtggggggttgttcgtacccgcggaggcggaaccggagttccgtttgtaatggcactttgagtgccggtgtctgttcattgtggctgttggggcctgaacatgattctgctatcgatatagtcgagaaggcacgaaaaatcgtttcagcggaagagttttcgagcgttaagacttgttcggtccgcagaatcgcttatccgagcatgagttacttatcgcagaaggtgatgagtgaggtatccgtatcccggaggcgtaggagtccctcggctcggtcagccttggctgcttacgtgtactccgtcgttttcaggatcccactttcgaagtag

SEQ ID NO: 19039 - DNA, 873 bp, Zea mays
  Peptide Sequence Number=SeqID_62414
atggttgcctttcaagggggtcaccctccttttaaaggcaactctccccacttgcgtcctcagccgttgcgggctgagtcttctccaacacgctccaaggtcctccccctacaacacgggggccgggtcccacgcatcgtgcaagctggcccaggacagaaggagccaaaactgccgcgcgcggtgcgcgcgactgcccagcggttacgagcacttctccactttcgcccagaccagcgggtgaaagggtggaccgccatacaggcggcatgcaaccgcaccaagggggcgcgccctttcgacttcgacgcgtccagaatggaggcccagaccaccacgtcatgtaatcggcgcgccggttactacgtgcgagaaactgcaccgccacttgcgccagtaccgcgccttctcgactgcggaaccggtaccacgactcgaggcgaccctgcacgtgacacaacagtgccaactgagcacatcggtcacgggtcagtcagccgcgggagaaggcgcgacggtcgatatgaccagaaatgggccggcagtaatggcggtggcaggcaggcggaagcagcggacaggcggcacctttggcaggcgaagcaggcgacgcttcgcttccaccataatgaccgcgtcaaaaaagggaccgggaaaggggataccctgaaagggatccttctctgcgaaggaaacgggccccgagcccccctactgatcagaggttcgaaggctggcccctcggaagggttcaacagccgccttagagcacttgggctccgcacccattactggtcagaggttcgaaggctggcccctcagaagggttcaaacggccgcctcaggccactcgggctccgcgcccactactga

SEQ ID NO: 19040 - DNA, 2355 bp, Zea mays
  Peptide Sequence Number=SeqID_62415
atgcagaagttgtctgagatgaaatcagataatgaaaacaaggacaaagatgcccaactgcgacgtcaggttgtcgaactgaaggaagtcatagcaaagcaacaagagctgggttttgacccacctgagctaccgcctggctatctatcagaaattggggatcaatgcattgaaaataaaaataataggaaaactcaattcagggattctcattttggaaatcgtttcaataataacaaaagatcaaggtatgagcgtggaggttttcagtctaaaagatctaaggtatggaactgtactcctcacgctgatcacgggatggtcaagagcagagaaccaaccctcctgcagaagcttcttagctctgatatcaagagggatagacatagacttcttcacgtgttcagattcatgaccttgaacaatttctttaaggactggcctgacaggcctttacagtttcctagtgttaagatgaatcagattgaaataggaagcaatattagcacagatgacttggagaatgctgggatgtccaaagacagcatccttggtgtaaacgaaaatggtgattggaaagagttgagctcgattgatgaagaggataccgatagcgccaaccacaatgatgaagacgtcgatgatgacagtgttgacagcagcattgaggatggggccgaggaggacggccatgcctggagtatggactctggacttctggagttggaatgcttcaacgcggtgctcaacatgtcggactgcctgaggctgcagtccctgcacacgaacaggaaccacgccgctgctacgtcccgagcggccgagccccgcagagaaagaacgcctcgcatgcaactgctcaaaccgaaggaagccgccacactcccgcgcgaggccctcgaggcccacatcgtctcgctggtccgccgatgcccgggcctcctcgcgctccgcagcgcgcacgcgcacctcacgcggctccgcctcccgcgcctcaccgccgccttcgcgctctcgaagctcctcgcctcctgcgtctcggcgcccgcaccagccgcagcccaagccgcggcgtcctcctacgcccgcaacctgttcgaccaaatccccgacccgaccgccttctgctacaactccctcatccgcgcgctccccgccgcgggctccgctcccgccctggccgtctaccgccgcatgctgcgggcggggtccccgcgtcccaacagcttcacgctcgcgttcgcgctcaaggcctgcgcggccgtgccagctcctggcgagggacggcagctgcacgcgcaggcgctccgccaggggctagcgactagcgcctacgtgcagaccgggctgctcaacctctacgccaagtgcgagcaggttgcgcttgcgaggactgtgtttgatggcatggccggggacaagaatcttgtcgcttggagcgcgatggtcagtgggtactcgagggtggggatggtgaatgaagcgctggggctgttccgggagatgcaggcggtgggtgtggagccggatgaggtcaccatggtcagtgtgatatccgcgtgcgccaaggcaggggcacttgatctggggaagtgggtgcatgcttatatcgataggaaaggtatcaccgtcgatctagagctgagcaccgctttgattgatatgtatgctaagtgtgggttgatagagcgggcgagaggagtgtttgatgcgatggtggagaaggataccaaggcatggagcgcaatgatagttggatttgcaattcatgggcttgtagaggatgcattgggacttttctcaagaatgctagagctcaaggtgaggcctaacaatgtcacctttatcggtgtgctgtccgcctgtgctcatagtgggttagtggaagatggacggcggtattggtccattatgcaaaatttgggaattaaaccttcaatggagaattatggctgcatggttgatctcctgtgtcgatctggccttctggatgatgcttactcctttgttattggcatgcctgtctcaccgaattcagtaatctggaggacacttctcgtggcttgtaaaagctcgaacaggattgacatagcagaatcagcaacaaagaggctccttgagttagaacctcacaatccagagaactacgttctgctctccaacttgtacgcatccaactcccagtgggacagagtgagctatctgaggagaaagatgaaaggcaagaatgttactgctattgctggacgtagttcgattgaaataaacggccacctgcatgagtttgtgccgttctgcatgacgtcggtgaagaggaaaaggaagctgcgctttgtcaacacagtgaaaggctag

SEQ ID NO: 19041 - DNA, 486 bp, Zea mays
  Peptide Sequence Number=SeqID_62416
atgaccctgggtacgtctgttacatggccgaggctcgggctacgctctcgaggtaccctaggacatttccgagaccagcgagaacgatttgtaatggaatcccaccggagagaggcaccgagccctcagaccctatcgaatgggtccgggtctagcaaatcacccgcaggaaaacagcgctattcaccccgttccgactactgtgccaaccaccagggtaaaactggcaacattaagtcacaacctcccctgagttcagcctcgagcgcaacaaggagctccgcttcgcccgaccccaggcctcggcctcaggagaaggtctccgcctcgcccgaccctaggcctcagcctcagcctcggcctcgggaggagtcacatcctcgcccgacctcggccttggcctcaggagaagtctccgcctcggccgacctcggcctcggaccgactacgctacaggggatacatcattaccctaccgctagctag

SEQ ID NO: 19042 - DNA, 270 bp, Zea mays
  Peptide Sequence Number=SeqID_62417
atgacgtcaatggctctcagctccttacggaagcaaggaaacgtcagcaggatccatgctgcactaccaactatgcttctacagggctcaaggcacttctccgatggccaccttctccttgcctgttttgaagaaaaatctaaatcagtagctgccgcagttaagcggcgcaagcaaaggcagtcaacgaaagacaccggatctggcgaaagcaaagatcttgggaaaaaaggaaagcaccggaacctaacgacgaaccctaaaccctaa

SEQ ID NO: 19043 - DNA, 681 bp, Zea mays
  Peptide Sequence Number=SeqID_62418
atggtgatgtcggagtcggacgacgacgacgacgagccccagctcaacgcggtggagagctactacttcgttgactccacgaacgacaacgagcctgtctgcttctccactctgcctttcctgttcggggacactgatgatcttcctgactgcaagaaaaggctggtgctgcgcgggactggtggtgacccgggcgtcaaggtgtacagtgaggtggtggcctggagtctggggctcgaggggaagcaaccccagtttgcggtgctcacagcagaaggcagacgttgggttcgtctcgttaggcccttgaacagctacgaggagatgatcaggactgtgctgatcacagcgcatatgctgcattttctcatgaggaagcctcatgagccagagagaacgctgtggaaccacctttgcaaagttttcaacaagtttgacgttagaccctcagaggacgatttcaggaaccacatctcactgatgaagcagtttgtggcaaaagatcctatcttagcaaaatcagaggggagtctcccccatgagtggggtctgacgaagggaaaaactaaagctcagttcttgcttagctacgttatgcctagagctgtgttatgtaaagttgtaaacattgtccttaagacgctgcaattgagtcacaatttctgttgcctcaaaagataa

SEQ ID NO: 19044 - DNA, 1599 bp, Zea mays
  Peptide Sequence Number=SeqID_62419
atgctgagaggcgcactgggttgttatgtcgccgacccttgtccattgcaccgtgcaaccctggtaccaaaatatgccatagatgatctccttgaagttctagaggattggcccgagggagcacaaccacaagaggctggactcctagaacaatatcgaagctatagtgtttttttagagtccttgatgaagggcaagcctagcgaactggtgagagtttttttatgtaacaatgctacatgtggacacttctaccacccgaaatgtgttgcccagcaacttcatcctaataacattgatgaagcctcagaattggagaagaagataacagatgggttttcatttacatgcccaattcactggtgctttcattgcaaaggtttggaggatagaacacaagggcctttgcaatttgctgtttgcagacgctgtccgaagtcatatcacagaaagtgtttaccaagagaaatttcctttgatgaaattgaagagaagggtgtcatcatacgggcttgggaattatcaaaaatgattttgatatactgcctgaaccatgagatcgatagtgaacttgagacacctgtcagagatcatataaagtttccaaggattgaaaaaccacttcaatttgtaaagaagggagctaacttgttgcctaagaagaaaaagaggacttacagtgagtcaattcttgagcaacctcccaaagatactgtgaaaatgaaaagcaaggttcgcatgcaagaaagcgagcaaaacaaacacgacaccagagaagtttctgtgaagagtttcactcaaaacgttgttgacacacctgtaaagaaaaaaggcaagttgaaagagaataaacagttgccttatgtggccaaggatcattttgtaagcagtccaaaatctgtgaaagagcaagaacaagagttggtacctttgcccttatctggaatcaggaagagttcatttcctaaagtggacagtgaaattgaaaagagggtgattagcatactgggaaatgaaatctcttcgttgacaataaaagatgtaacaaggaactgcagtttgccatcaactcatgtatactctggcagaccaactgacaagatgccactaggaaaaattgagcgttctgttcaggctgtagaagctgctttaaaaaagctgaaaaatggaggtagtgtcaatgatgctaaagcagtatgtgaacctgatgttttaagacagcttgcaaggtggcatctcttccagctcggttgccttattgatggaagatcccttcttgtgcctgcgcccataggtgttccgattgttgatagacttcactggtatgtggaatctggtgacatgaaacaacctctttgtcaaattaatggaagggctcactccatcaaaaacagccctattacgagagagccacaagcaccaagctccaaggataatgacactattgaaacccctcctcttgcacctatggactcttttagagaccctctcccaccatgcaacaaaggactgttcagcagcaataggagtgaagttaccaaacccgatggacgacaaaatgagatgccaaaaatccctagaaaaactgcagttgcatag

SEQ ID NO: 19045 - DNA, 309 bp, Zea mays
  Peptide Sequence Number=SeqID_62420
atggagtccctcatgccaggtgtaaggtgggtgtcctgggttctgttccaaagggagacaaactcatgtatctgggctgcagtgattgtagatttctgctgtgggtcaaatgattttagccggcttatgaaagaaaaactcgacaaagttcagaaaaagtgccatttcaagaattatgatcttatccaaccacaggcaagcttgcctagcgcgtgcacacatttgtcgggggttgtcattcatgcctggcaaccactgaagcaaacaaccccttattgcttcatggctagagagttccttcacttttag

SEQ ID NO: 19046 - DNA, 255 bp, Zea mays
  Peptide Sequence Number=SeqID_62421
atggcagagctgcagattctgctcgagatgtggcaattgctacttgtaaggttggtatttcagctaatctcagagcctccgttgggaaccggggtgccagacgcggtggtggctgcggggggagcggtcgacggggccatcggcgccgacttcgccgagccggcagcccggcacatcatctccctcggtgacctacgggtatccctagacaataacaaggtggaaattaatttacttcaaccagggaaggtttaa

SEQ ID NO: 19047 - DNA, 513 bp, Zea mays
  Peptide Sequence Number=SeqID_62422
atgctctcgatgtttcagacaatacaggacaggcaggattctcttcagcagcagcttcttcaggatcgggctgagagcagggccttcatgactcttatgctacaacattctggtgtatcgattcccccggttcggtctgcacctcctccacctattcaggctcatgttgtgcccgtgattcagccaggaccccctcttcctactgttggtccgtcttcctctctgctccggccggtcaccctggctttcacgtcaccggttctcagcttcgtctgccctcagccgccagtgccaccagcttctgctgttaccactactattgtggcggtgtctgtgaccacttcagatccggcagtttctgcagcgcagcctcagtccgagtcagtaccagctccagcttctacagtagatcctggatccgagactgactctgacccccagctggcgttcgctctactgcctcgaccacgaccggatgcgcccccgccgcctcctcccacttcagatgtgtag

SEQ ID NO: 19048 - DNA, 612 bp, Zea mays
  Peptide Sequence Number=SeqID_62423
atgaagggtcaagtggctctttgtcctttcgcctttcgagtgatcgtggtgttcattctcccttgggactcaggccgctttcaaggcgacctgccactcctcgaggtggagtcgggtgcttcggcctcctttataagctctaggcgatcatcccattatcggtcacccttagccccctttctttggtctcttcctcgaatggacctcacaactgggtcggttgatggatcttgggtcgccgggatgtcgcactacgtgggtctcgagccgagggtgaccgccgtcgatcaagaggtcatgtcaccttttgttgggttgctatggtcaggctccttgtctgctctccctctccctcaggtgtctcaaccttggggcgagctagagaaattgagctaccgcctgtgcaagcttttggactacgtttgggcccacatcgcttccctgatggagcgtctagacattgcctcatgttgcatctgggatattgtcgactttggcgttcaccggggagctgcggttgcgctgcttatgggggagatttgctccggtgcagtctccgggacattgatggccctccctcatccctttcagacgaagggctggaagacctga

SEQ ID NO: 19049 - DNA, 837 bp, Zea mays
  Peptide Sequence Number=SeqID_62424
atgtcatgcatgtggatctctccattccctcgccgtgcccccatcaagaccaccagcaaacttgatggaagggagagatccgtggccaacgcccgatttgccgctcccaatctctgcatcgcgtggatgccttccgtggagtctctatacgtatgcacaatttactccccctccctccgatctgccactcccaatatctccctggaagaccgatctacatcgtgtggacgctccatggagtccccaccccctcaaccccgctccgtgttgtgcggcgacgcaatcattgccgaccatcgtgagccagcaccgcgccggctcatggagcggatatctggcagccgaagaagaagttcaagaggggcgacggcggtagacgctcgttcgctgcgtaagacgatgaggacttcaaatctgactccggtgatatggatttggagctcacagaaggggctgatgatgacgtcatcgagattaagtccttctccgccaagagggctttctctagagacgattagaatctacgagttggttggggctgccgccgtcgccgcatggaacccctcgctggcggggctggtcgagtccggtgtgcttgagggagcaggggaagacgatggcaacgatttgcttgagatgcaggcatctaaccctgaggcgtacagtgacaatgtcatcagagcgctatgcgtggttcttaatcgtggtgagaagattgagctacatgttgacaaaactgaaaatttgtgttgtcaggatgacatgtcaggttgggatatcctggcgtactttattcaaacagccctcttgcttcaagcaagagaccaagtatcttaa

SEQ ID NO: 19050 - DNA, 72 bp, Zea mays
  Peptide Sequence Number=SeqID_62425
atggcgtcgtcacactgtccagctcatcatccacctgaagctcaacctcccacgattacaaatggattataa

SEQ ID NO: 19051 - DNA, 771 bp, Zea mays
  Peptide Sequence Number=SeqID_62426
atggatggtacaggtgacctcttcaaggacgcggccttcagatctaagtgtagttgtaggttgtctaagaagagggggctttcgttggaggagaaacgggagcaaatgcttcaaatattttatgagagccaggaattctttctgcttaaggagctagagaaaatgggtcctaaaaagggagtgattagtcagtctgtgaaagatgtggtgcaaagcctggtggatgatgatcttgtcttgaaggataaaattgggacttctgtgtacttttggagtcttccaagttgtgctgggaaccagctgaggaatacttacaacaagctggaatctgacctttcaaactctagaaagcgttacatggaccttgttgaacacagagataacttgaaaagaggccgggaagactctgaagagagggaagctgctttggaggagctgaagactgtagaactacaccataagaaactcaagaggatgctactgatattgctcattcagcagctaacaggtggacagacaacattttcactttgcaacaatggtgttcaaccacattcccagaagcaaaagaacaactggaacatatgtacagggagtatgctgcctgacttccagttgattaagttgggatcacagaagattttgagtatttgcagtgatgtccaacagcctattacagcgtcgaaaatgtgccacggaatgttggatcgatcacagatgcaagtttatcatgttggtgctgaacattctttgttcacagtgaatcactga

SEQ ID NO: 19052 - DNA, 288 bp, Zea mays
  Peptide Sequence Number=SeqID_62427
atggggatcacctccgcccgcgagtaccagatgctctggcgccacttcgcctaccaaccctacctctcgctcttccctccacaaccatcgtcgccccgcctcccgcctccccacccactgctcctccgtccccctgcatccacacgggtctgcacgtcgccgccgtcagtggcttcaagctgtaatcagctctcaaggatccaagatgtgaggcaccacatcggcggagaggtttgccaaatcaagattgcaaaggctgctgcttacatatatggtctggagcggtag

SEQ ID NO: 19053 - DNA, 669 bp, Zea mays
  Peptide Sequence Number=SeqID_62428
atgaagactcagaagatctccaaacttcttagtaagcgatttacaacaccggtttggattaaggctatcttcgcggcgtgcgtgggagcggcaagtccgaccgcgagggcttctacgcctccgcactctggctccacgcgcggcacccacgcacgctggccctcaacgctgcaccctcgccgactttggctacctcaaggacctccccgagctgctccaccgaatcgtgcatggcggtgtgtccaccaggaccccaggcaagaaggcacgcctaaccaccagtgcagctggggccggggccgcgtctgctttggcaaccgtacgcgtcgcagccgcgcggaacgggccacgcgcgtcggctcaacggaggagcgtgccgcggctagcctggagcgcgactggggactcgcggccgcggccgtggtggcgcgccggactaggagagcagaggccgctgcgagggcggtcgagatgtacagcctccttgagaaagcgaaagaagaattcggaagtcacttcgacgactgcttccattcttcaaaggaactagaagccccttccagaaatgcgaatcagatggtctacgttgagcttgtgataatgtatgttgttgcaagtatttcctccgcaacatggtttgccataaaccctcctcattcaggagtttaa

SEQ ID NO: 19054 - DNA, 198 bp, Zea mays
  Peptide Sequence Number=SeqID_62429
atggcgcaccggacagtccggtgcgccaccggtgcgccaacggtcattccggtgcgccaccggtgtgccaacggcgctctcgggtttctgcgaggagaagtatcttcctcgggccagcctggccccacctggcagagggtgcaccggacagtccggtgcacaccggacagtctggtgccccagggccagaaaccctaa

SEQ ID NO: 19055 - DNA, 933 bp, Zea mays
  Peptide Sequence Number=SeqID_62430
atgacgacggcggctctcagcccccttacggaagcaagaggacgtcagcaaggacccaaccgctccgacagctgtccctccgccaggctccgtcgcttctccgacggccacgacatcacaccagctgggtgccaaaatctctccgactgccacatcggcatggccctcttagagagggttggccgcgcggggacgaggacgagacaggcgctctcttggggccactcgcttccctctcccgcgtggacgcttgtaaccccctactgcaagcgcacccgacctgggcgcgggacgaacacgaaggccgcgggattcccacctctctcacgccggactccggccgcctcgctccttccccccttcgcgctcgccctcgcgcttgacccatctgggctggggcacgcggcgacactcactcgtcagcccgagggaccccccggtgctaaaggttcatacttagccaataaaaagaccaagaattgggttcaacaaaagagcaaagggataaccaaaggcagccctggtctggcgcaccggactgtccgccaaagccagcgctgtctgggtgcaccggactgttcggtgtgccaggcgggctcaggcgaacttggcgctctcgggaataaattaacggcgtacggctataattcaccagactgtccggtgagccaacggtcggccgggccaacggtcggctgcgcaatctgcgcgagacacgtggccgagccaacggtcgggaaggggcaccggactgtccggtgtgcaccggacagtgtccggtgcgccaacggctccaaggcgccaacggtcggcttcgccgcagaaggaaagaaatccgcaccggacagtgtccggtggtgcaccggactgtccggggcgccaagcgacagaaggcaagaattgccttcccggattgctctcaacggctcctag

SEQ ID NO: 19056 - DNA, 234 bp, Zea mays
  Peptide Sequence Number=SeqID_62431
atggagttcagcatcaaaatcttcatctacaaacttctgatcaaaattaagcaagggtattttcggatccagaattatgaatatggagcacggccaggacgaagcctgaaccagacgaaggtcgagtgtagccgaagctgtgcgcagggaagcttcggcgcgatggcagaagggggaaccgacttaaagatgaaaagacttcgggggcctcgacagattttcataagccgttaa

SEQ ID NO: 19057 - DNA, 264 bp, Zea mays
  Peptide Sequence Number=SeqID_62432
atgggggacgacgacggcaacccccaaggcataggaggtggcagcggcgaccctaaaggctcgggtggaggcggtggctacgaccctcaaggcatgggctgcagcggcgcgactcccgaggcgtgtgcggcggcggcgtcctcaagacgcatgtggtggccacgcgaggcacgggtggctccagcggtgacggtggtcgcgcaaggcgcggcgcggtctacgagggtcggcggtctgcacggaggtttgggcggccttcgatga

SEQ ID NO: 19058 - DNA, 423 bp, Zea mays
  Peptide Sequence Number=SeqID_62433
atgtccggtggtgcaccggacactgtccggtggcacaccggacagtccgggactaggtgtaagcctaattccctttcagtccttcatcgcgaactcgcgctgcagggcagcgattgtgcgctggaggagggcagcactggacaccgtgagcacgatatcgtcgaagtagaggaggtacacggtgccgtcgccacgctgaaggatgaacatggacgtgtcctacttggcctcgatgaagccgaggtagaccaagtaggaggcgaagcgactgtaccaagcccacgacgcctgtttgaggccatacaaaaaacggctaagcttacacaccatacccagacgagtggagtcaacgaagccggtgggctggctgtagttaggggtggtaatggattgcgatccaaatgcttcttcacaaaatggtag

SEQ ID NO: 19059 - DNA, 849 bp, Zea mays
  Peptide Sequence Number=SeqID_62434
atgcggagcagccgatgcccgtcgcgccacgtccacaggaccacagccgacccgtcatccattccctcctccatgtcaccatccgcttcgttattctctgctactacgctgtctgctcctaaacacgcgcggtgtatcgccgacatacgcgcggacgccggctcgaccaccttcctcgccggcaccctcagcctcaaggaggagaacgaggtgcacctgatccggttttcgccggcggagagcgagctggtgtgcgatggcctcttctaccaccccaacgagatttgggacctcaaatcatgccccttcgatcacagggttttctccacagtctacacgtctggtgagggctatggtgcatcagtttggaagatcccggagctcaatgggcaatcaaactcaccacaacttgagcagctctttgagcttagtgggcatacgggcaagattagacgaaaatcaactgcaattgaacatgcacatatacgggatgtggattataaccccaagaagcaaaacattgttgcaacagcagaagaggaatttggaattcgcttgtgggatctcagaatgcttaagtatcctctaaaagatctccctgggcactcacattggacatgggctgttcggcacaatcctgcgtatgatgagctccttctgagtgctggaacagattcaactgtaaatttatggttggctaaagttagcagtgacgatcctgaatctgatagcccttctgctttatccaataggcaagaagtaccattactcaactcatatactgactatgaagacagcatctatggtatcctccaaccttcatacttcgcttatcaattagaactttga

SEQ ID NO: 19060 - DNA, 375 bp, Zea mays
  Peptide Sequence Number=SeqID_62435
atggagcagccgtccaaaaaaaaaatccagtcttacagccgcttggtgaagaaggctaagcagtctttcaagaagtcaagcaagaaggccgtttctgacaagacagactgtgcaatggtcaggctactgaccaaggccagggatatcgccatctctctacttgagtccacggtgcagctcttgtcgaagcaaattgaagtgccgaagcagtcacttgtctcaaaggcgttctccaagagaaaagcggttgtctgcgaggaggaccagttacaggcgttagagtgcagcattggagatcttgagagcggagcgggacacctgttcaggatattagtccagagcagggtctctctcctaaacattcttagctcatag

SEQ ID NO: 19061 - DNA, 714 bp, Zea mays
  Peptide Sequence Number=SeqID_62436
atggcttgccaccttagatccgcgagcgtgccttccagccctcgctctaacaaagccagcatcgatgaacagctgcagagcctgaaggcaaccatctcctcaccttcagtggccattcaaaccatggttgatggtctcaacaagattgtgagcatctacagctgcattgaccagctcacatccttgctcggcaaccaacgtcagcagaggaaggcagtggaggaggagctcgagcgctcccttgtcctgcttgacatctgcaacgccatgcaagagaactttgcagagctcaaggtcagcgtccaggagatgcagctggttctcaagagaggagacaacgcggctcttcaggccaaggttcaatcttacgtacgcttggccaagaagacacagaagcagttcaagaagatcaacagcaaggctgcctctgacatcgaaggttgcaaggtagtcatgttgttggctgaagcaagggagattgctgtgtcgatgctcgaatcggcatcacatctcctctcgaagaagatcgcgttgcccagcgctagcaagtggtctcttgtgtccaaggcatttgagaagaagaaatttgtgtgcaaggaggagcaattgcaggcgttggagttggacattgttgatcttgagagtggagttgccactttgttcaggacactgatccagagcagagtttctcttctgaacactctcactctgtag

SEQ ID NO: 19062 - DNA, 1038 bp, Zea mays
  Peptide Sequence Number=SeqID_62437
atggcctgccacctgagatccgcaagtgtgccctcaagcccttgctccaacaaaaccagcgtcgaggagcagctccagagcctgaaggcgaccatctcttcaccctctgcgacagtccaaactatcaccaatggcctgtccaggctcgggagcatctacagctgcatcgatgagctcgcgtgcctgcccagcaccagcagccagcgtcagcagaggaaagcagtggaggaggagctggagcgctctctcgttctgctcgacctctgcagcgccatgcaagaaaggctggcagatctcagggtgatcgcccaggagatgctgctgggtctgaagagaggaaacaacgtgtctgtccaggccaaggctcaggcttatgcccgcctggccaagaaggcgcaaaagcagttcaagaagaccagcagcaacattgctcttgacgacactgaaagctgcagggtggtcaagctgttgtctgaagcgagagaggtcgctctctcgatgctagagtcgacattgtacctactgtcaagggagatcgtgatgccgagcgcctccaagtggtctcttgtctccaagacattccagaagaaaagagtcgagtacagggaggagcaactgcaagcgttggagttggagattgctgaccttgagagccaggttcaggttgtcttcaggagactgatccaatgcaggatattgagactggaccgaaactccgagaacaccgtagagcggagctcccttggtgaagatgtcagcgaactgcgaaatggtcggtacgaggacgcatacattgccgacggcgacacgctcgcggacgaagtggaagtctatatccacatgatttgtgcgttggtgctacacagggttgatggagaggtagaccatgttgacattgtcgcagtagacgagtgtgacggcatgcgtgagggggcttgtggagatcctggagaagctgacgaaaccaagacgcctcaaccatgtcgttggccacagtgcatactcagcctcagcgcaggagatgagcgcaagagatga

SEQ ID NO: 19063 - DNA, 714 bp, Zea mays
  Peptide Sequence Number=SeqID_62438
atggcttgccaccttagatccgcgagcgtgccatccagccctcgctctaacaaagccagcatcgatgaacagctgcagagcctgaaggcaaccatctcctcaccttcagtggccattcaaaccatggttgatggtctcaacaagatcgtgagcatctacagctgcattgacgagctcacatccttgcccggcaaccaacgtcagcagaggaaggcagtggaggaggagctcgagcgctcccttgtcctgcttgacctctgcaacgccgtgcaagagaactttgcagagctcaaggtcagcgtccaggagatgcagctggttctcaagagaggagacaacgcggctcttcaggccaaggttcaatcttacgtacgcttggccaagaagacacagaagcagttcaagaagatcaacagcaaggctgcctctgacatcgaaggattcaaggtagtcatgttgttggctgaagcaagggagattgctgtgtcgatgcttgaatcggcctcacatctcctctcgaagaagatcgcgctgcccagcgctagcaagtggtctcttgtgtccaaggcatttgagaagaagaaatttgtgtgcaaggaggagcaattgcaggcgttggagttggacattgttgatcttgagagtggagttgccactttgttcaggacactgatccagagcagagtttctcttctgaacactctcactctgtag

SEQ ID NO: 19064 - DNA, 157 bp, Zea mays
  Peptide Sequence Number=SeqID_62439
atgacgaggggttgtgcggttgaagatgccgacgcaggggagagacgtgcagggcagccaagaggggggaggcggcttgaaaggctgaagacctccgcaaactggccgctctcaggttttctcacagccattccactaaaattcatcggactgtccg

SEQ ID NO: 19065 - DNA, 327 bp, Zea mays
  Peptide Sequence Number=SeqID_62440
atgaggcacgactatggactgacgatctacataagaaccatgagcaacgctgtaggaaccatgagcaacgctgttgttcagggagaccgaggaatggaggctcgctaccctggagaccctcgaggaagaccatcgcgtgccttctgcatagtctcggcgaccggctccttccgtcgccatagagacgagctgattgacaaggctgtggtttgctccttcgacggcaatagccatgaggttgacacattagctgcaggagacatgctaagggagaagttcaaccttcaccacgatcagtatcagctagtcaagcactttcctgagtag

SEQ ID NO: 19066 - DNA, 441 bp, Zea mays
  Peptide Sequence Number=SeqID_62441
atggcgaatggcgccgccgcttcccttggccctcctttccagacgccgggggatcctccgtccgccgcgggctgggctcgcgcctcccttctcggcgggcgcggatcggccccgcgcgcgacggattccccactcggtgacccggtaagtacgatgaaggaactccctcattctcaggctcagatcagagatgatttctgcaagcaaactcaagattcccaaggcaagggcgacccaatttctcaatcgaagcttcaatggtccgtcgcggctggcgatggctctgtttcaacgacccgggtggatccaagatcaaaatccaaagcagattcgcgtccagtgcaggcagtacttggtgatcctcttcagcagacttcaatgtcgcgtatcctggcgactggaaaggccaaagaggttgcagatcgctcgccggatttctag

SEQ ID NO: 19067 - DNA, 1974 bp, Zea mays
  Peptide Sequence Number=SeqID_62442
atgaacaaacaccggcactcaaggtgccattacaaacggaactccggttctgcctccgcaggttcgaacaaccccccacgttggagggcctgcggagcaacagaagaccgacggatggctcgccgccgcccgaagagcagcagcgacaacgacttctgctccgagcggccgaacagcagcagtgatgacctcagggcggatgctgctgcagcaaggccctcgcccacgtccccactcgaggggcgaggacaagcagaaagccgtagagttggaggtcagtccgcgggcggcaccgactatctcgtcggcggagaaacctcttccggctacctcggcgggaggtggcaccggaagcggcaccgaagccgctcgggccggagagccggacacgcggcagctgccagggccacgaacggcgaacgcccttccccccgatcactgagggaaggagcgagccgctgcccgcgcagagacaggccccaactcggcgcactcccctccccagcactgatgatgaacatccttgaagctgagggaggggcgaaggccgcagcccagcttgcttctccccaccctggaactggtggtcaccgttttggggcagaagaagccaaaccgccgcgcacggtgcgcgcaactgcccagcggttacgagcattcctccactttcgcccaggccagcgggtgaaagggcggaccaccatgcaggcggcatgcaaccgcacccagggggcgcaccctttcgacttcgacgcgtccagcatggaggcccaggcccacacgtcatgtaaccgacgcgccggttactacatgcaagaaactgcaccgccactcgcgccagtaccgcgccttctcgattgcggaaccagtgccgcgactcgaggcgaccctgcgcatgacccgacagtgccaaccgagcacatcggtcacaggacaggcgatacctttggcaggcgaagcaggcgacgcttcacctccgccataatgaccgcgtcaaaaaaggtgtgccacgtcgttcgatttcgtatccttttcctcttcctctttctctctcttacaaaagggaccgggaaaggggacaccccgaaagggatccttctccgcgaaggaagcgggccccaagcccccctactgatcagaggttcgaaggcctggcccctcggaagggttcaacagccgcctcaaagcactcggggctccgcgcccactactggtcagaggttcgaaggccggccccctcggaagggttcaacggctgcctcaggccactcgggctccgcgcccactactgatcaggggttcgtaggctggcccccgaaagggttcgacaaccgcctcagacgtagagcaagggatgaccctgggtacgttcgatacataaccgaggctcgggctacgctccggaggctcgggggctgctctcgcaaacccggctccggccaaaccgttgacagcgtcaacataccagcccgagaacttgggactcgactgtgcacccaggctacgggctcggactcggcctcggctccagaagacgacgaactccgcctcgcccgaccccagggctcggactcgagctcggccccagaagacgacgaactccgcctcgcccgaccccagggctcagactcgggctcggccccggaagacgacgaactctgcctcgcccgacctcagggctcggactcgggctcggccccggaagacgacgaactctgcctcgcccgaccccagggctcggacccagccttggcctcggacgacagtctccgcctcgcccgacccggggctcggactcgacctcgacctcggaagactgactcgacctcgaccttggaggagctccacctcgcccgacctagggctcggaccgaccacgtcacaagaggggccatcattaccctacccctagctagctcaggctacggggaacaagaccagcgtcccatctggctcgccccgataaacaaataa

SEQ ID NO: 19068 - DNA, 570 bp, Zea mays
  Peptide Sequence Number=SeqID_62443
atggtgttcgaggttgccgctgtcggccaccggagctccgtcctcgacccacatggagacaacacgggctggggcccaacattcgacatcgctcggatagataggtcagccacgtacattctacccgtaagtggcaaagtatcaccaggtgaaccactttgcatggaggacgcaagcacggagccgttgcacgccacttgtgatcaacatgcttggagcaaagcacaattatgcccgacctgcgggtttgccacctcacccgaggtgagcctggcggcctctgtcggtaccccaaaactagggtacccattcctgctgggtcaaggcgggacccttgtggttatccatagccacatagtgacgggtagtctacctcgactcaaagtccggcctcgtcctacggggccaccagacaccaagtcgatgtcactgcagcctagggctggatcctcgtggggcagtcctggacccctacgtatgtcatctggacctctactcaggggaggtctggtgctgctatgtgtccgggatattacagatgggaagcggacctccacaagtgccctctag

SEQ ID NO: 19069 - DNA, 507 bp, Zea mays
  Peptide Sequence Number=SeqID_62444
atggtgacaaagaagaaggatggtctactccccccgccggtgcctctcagaaggagaaataaacagttaccgcctgattttatccctcgccgaagtagcagattggcaaagcggaggaccccaaatgatgcaaccaggcagatccaaattgacttactaagaacaatggatattgttgatgcggatgaggcattcagcgatgaagctcttgaaaaatatggcaggctgttcaactcccccctgtctgaatcccatattaaagccttggctgctttgttcggatggtcagtgcctgtcgatatccatcttcaggatgtccaggtgttgcctgctgacctaggtccagaggatataataggtttgaatagaaaagtcagaagggatgtagttcgtgctatggtcaatagtacttgtcctgacgtgggggatttcaaccttatttataaagctgaagataaaaacaatggcaacctaaacagagctatgatgggaagatttagacgtctg

SEQ ID NO: 19070 - DNA, 516 bp, Zea mays
  Peptide Sequence Number=SeqID_62445
atggaggactttgaggagttccaggactacgacgagttcaagtttactttagtggcaaacccccaatggcccgtatcaggtgcattgcacgtcagtccagtcacctggagagactgcatcgagcgccgacgccaggagcaggagcaggagcaggagcagcaagactcttccccctcgcctcagcgggaggtggagtctgagaggccgccttcccctgcacctctgctagagatgccccctgcaccacctcagggcatcccggcttctggaggagaccctaacggagacggagacgacgacgacgtcggtggcagttcaagccacgacacggagcgctcagaggagccggagccggaggggtggatcgctagacccatcactcatgacgctgctcgcgggtgtcacttccacgacactctcgataccctgttgcgtcgggccttcgaccgactcacttggtctatcgagtaccgttgtgtagtctaccagcatcatcgcgggttatacccagactag

SEQ ID NO: 19071 - DNA, 126 bp, Zea mays
  Peptide Sequence Number=SeqID_62446
atggtgggtataagtgcggtcactgcacggcggaaaccggggtcagtggagcattgtatgccaaggcggtacctccttgatttggttgatggtgtgacttggcctccatccctgccatcgggatag

SEQ ID NO: 19072 - DNA, 336 bp, Zea mays
  Peptide Sequence Number=SeqID_62447
atggaggaggtccggatcttgaagcgcggcgaggaaccgcccactccagctccctcgccagccccgatgctggtgatagcagcgccccccgtggcgcaaaccgcagcggttgaccagcgcgccatctgctccactggtcggatcgggccacagacgcccgccgtggtgccgacgaagaagatggtgtcgccccccgctgcatctccagcagaggtggaggcgggtggggggatctgcggcatccgcgtgcgcgttgatggcggaggcgggcgtctcacggggtggagagagcgcctgtcatggcggcgattctggcgggtattgaaagggaattag

SEQ ID NO: 19073 - DNA, 144 bp, Zea mays
  Peptide Sequence Number=SeqID_62448
atggatgacgagctcgatgtggggaagaaggctggttctacaacttttattaaaggtcaaacctcatatcttgaatataaattaaagtttcactttggtcaaggtagcatcattataaagcttcaaatgatatttttaaggtaa

SEQ ID NO: 19074 - DNA, 81 bp, Zea mays
  Peptide Sequence Number=SeqID_62449
atgggtgacgagctcgacgtggggaagaaggctgatttttatcctatcgtgatggcactgtttgagatacttagagattga

SEQ ID NO: 19075 - DNA, 210 bp, Zea mays
  Peptide Sequence Number=SeqID_62450
atgggtcagagctgtcagcgaccaggggcacaggtggccgacgagtgggacctaggggcagggggtgcgctcgaaccagtatccagggatccaggccattggatcgagagcggacggttgagatcgggcgccacagggactcctcacacagggtgcctccttgatttggttgatggtgtgacttggcctccatccctgtcaccgggatag

SEQ ID NO: 19076 - DNA, 1326 bp, Zea mays
  Peptide Sequence Number=SeqID_62451
atgggtagcttcgttaagctggcgaggagggcggtggagacggacgcgcccggggccatggatgtcatgtcgcttgcgcagggagttgtttactggcaacctcctgcgtcagcaatggctaaggtcgaaaaaataattaaggaaccaacgcttagtaaatatggctctgatgatggtcttcccgagcttcgagaagcacttcttgaaaagctaaggctgcaagagagggatacaaaaataatttcctgtattatccagcatcttgctcttgttatgattactctggctaataattacagttacttgtttgtctataattccaaccagagagggatacaaaaatatgcattcaatcattctttgcagccaagtgataggaagcacatggagtccgtgggcgaggagatggagcagcgccgccgcgagctgcgcctcttcgccaacaccgccgcgagctgtccctcctccacctgcgtcgcgtcgtgctgcggcgaggagcgcatcatgttcatgctctgcgacttcgaggccttcaaggcgctgaccagcaactacctggggctcaaggaccacaagttgtactcgcaggtggaggaggggttccacgccgccggcgcccgcctcagcccggccgagcttggcgagatcatgctggccaaccgcgcgtccccgagccgcgcgtccccgcagcttgatcaccaagctccagcacatttggagttgatgcctgctatcatcaatgcttcagaagttcagatgagtaactctgacgggctgacccttgttcggcaatttaatacctatcgccagatcagaacacttcgcaagaagctgcaacaaattgagattcttgaggctaaacaacttgcaagtcatcatcttgacaatcaacagaagaggcaccatggcgcctccgtcagaccgaacactcggacatcaagcttctctataccgccccatggcggagctctagaggtcaatggcgacgcgaaggacaacgtgcccaaccggtggttcaggccagagatcgatgctccgtgcccccatagtccacccactctatctaggattccagatcttggagcaggctacgaaagacttcatgcgcttctacagcagcgtgagcagcttgttagcattccatcttcctcacttgaaattgtaccagtgcctcctgtgaatgaacttgtgccatcggtggaatgtgcagcagagcttgtttcaacactgtccccacctaggaaattaaggagagctgtgaaaaagataactccaaaggagaagatccaagccatgtacaactgcaatttggttcctgaaatctga

SEQ ID NO: 19077 - DNA, 159 bp, Zea mays
  Peptide Sequence Number=SeqID_62452
atgggcgctgacaagcgggccaaggcgttagggcgcgcgggcacgaagcgagtgaacggagcggagcgtgactgtgagagcgggatgagaacagagcggctccgtccggttgattttttggagcggaatggttccagatttgaggagaatattacctaa

SEQ ID NO: 19078 - DNA, 384 bp, Zea mays
  Peptide Sequence Number=SeqID_62453
atggcactagatggacaatgttctcctctcatggattactggcaccctcaccactcgccaggcttgggttgccctcgaggacgagttcctcgacaaccgggaggctcgggagctccacctcgacgcgttgttccacctgttctcctagaggggcctctccgtcagcgagtactgccgtcggatgaagggcatggtgccatggagaactctctccatgatctcagtgagcccatcgtcaaccgcaccctagtgctgaaccttctgtgtggccttagcccccgctatagcagcttgaaggcactcatcgagcgaactgtgccattccccaccttccacaacgtccgcaatgagcttgtcctcgaggagctcaccttggagacttag

SEQ ID NO: 19079 - DNA, 192 bp, Zea mays
  Peptide Sequence Number=SeqID_62454
atggctcaccggagttacttcggcccgatcgaggctttctcacagccgttctcccctctctgcccgtggattcatggcatcttccccgccattgagttcaccgtggcgccctctccctctctgcctgtcacacccagttttggaagcggaaaggtacttagttacatcaagatgtctgagacatccacatag

SEQ ID NO: 19080 - DNA, 225 bp, Zea mays
  Peptide Sequence Number=SeqID_62455
atgtcaacacgccaatgggaggacgaggaacttgttgatcagaagaaatatcttgaggaacgatgcaagccgcaatgtgtaaaatcactttacgaatatgagaaatgcgtcaagagagttgagaatgatgatactggtcacaaacactgcactgggcaatactttgattactggtcatgcatcgacaaatgtgtagcatcaaagctctttaagaagctcaaatga

SEQ ID NO: 19081 - DNA, 255 bp, Zea mays
  Peptide Sequence Number=SeqID_62456
atggcggcatctagtcggaataggcccgtcggagatcgaccgggagctgtccaccgtcaggaatgtgtgaacagtaaaggaatactgttcactatttataggcacaggacacagcctgtgaggaattacaatcatgcccctcataaaagttacaacattgactcagacctttatggactaaaaggtcattctatcattaagtcggttcgtcccttcaccttcggatatgttgtattatcaaagcttaatgaatga

SEQ ID NO: 19082 - DNA, 594 bp, Zea mays
  Peptide Sequence Number=SeqID_62457
atggtggagacgctcacttcagctttgattacctttcccacgagggctttccctctatcttgtgggagggtttggctaaccctggagtctcaccctctccagcctgggtggcgttcccttgattccgagactgtcaggttcagagcggacgacaccactaaggccgcagcgctaaaggccttgacgaccttctgtggatattatctcctggagatgatggtgcacccactaggactcttccccgtggagaagagggaagacccaatgtggtgcaacagagtggaacagatgaaccagcgcatcctgactctagagcagcaagtggagattcgggataataccatcgatatcctggagatccagctccacgatgtgcaggaagagcttgcggaggccaaccaccacctggagatgcaccaccaagacatggaagcaaatgagatggcaactagacatcgtcgcttgcagaacgagcaggttcccccgccacctcctctagctcccatgatgcaggagctaatggctcagcagaacgagatcctgcgacagctggtgcagcgccagccccaccctcagcagtatggtggaggctag

SEQ ID NO: 19083 - DNA, 396 bp, Zea mays
  Peptide Sequence Number=SeqID_62458
atgccgggtctctgtcgttgcctcggccatggtgagcttcgccggagccctatgcactgggaacccgcagtggttttccctcccaccgatccccctacctgttccatgcttaaccccttccttgtgctggtgggagttcgccgccgccacgatttctcgtcgtccggccagccggagccccctcgcgctgtgccaagcagccctgagcgccgtctctattattatctttcactgtctgtgtcggtgtttggtacccgaccgcacacccaggggtaccctcctggtgcttttgggttctcggtatttgcttatgagctctccttctggcttgaggtatttacaattctgttgggtgcaccgaaggtgcactcaatgggtgtagcccctgagctttga

SEQ ID NO: 19084 - DNA, 168 bp, Zea mays
  Peptide Sequence Number=SeqID_62459
atggacggcggaatggcggagcaacagtgggggcggcgctgcgggctgagtgagcgcgagggtagggagaaagtgaatgagaggcaaaggcaaaatgagggggtgcagggaggtgatgctggcaacatggaagacttcgaggagtttcaggactacgacgagttctag

SEQ ID NO: 19085 - DNA, 120 bp, Zea mays
  Peptide Sequence Number=SeqID_62460
atgagacgacctcgtcacaggtcttcgtccggcgacgtgtgggacgaaggcgaggtcggcaaagggtggcgtcttcgccttcgccccaacatttgccctccgagggaccagttcgactaa

SEQ ID NO: 19086 - DNA, 3058 bp, Zea mays
  Peptide Sequence Number=SeqID_62461
atgccgtcctcttcctcttctgctgccgatacgccgccgccggccggcgcgtcgttcgaggagacgctgagcaatgtggcggcggaggagttgcgcgccggcgacaccgtggagttcggcgtgtcgcggatgtcctcggttcgcgtgcaggacatgcagcagcttggttatttcggcggcggagtggcacgtgtcccggggacagaggagatccccgagctggaaggcgagttggtcgtctttgaggcttttttcgccgctggtcttcgtctgcccgcgcatcgatttgtgggggaagttctgcgtagattcaatgtccagaaaaggaaaatcggagataagattgctcaatttgggtcttgtacatttacaccgaagaccggcaagacttcgatggaagtcgttgagttggttccctgtgcccgcaataaatggggcaattggtgggagttttggttttatgttgccgaagacacagtcgaagaccatccggggctgccagtggccgagatgtgttcgcattattactcagcgtacccgcagtttgaggtggcggaggaggatgcaaacgaaggggccctgctgtgcgcggccggcatgagtagcgggcgcgatctggtcgaggagtttgtcgcgtatggggtgtggcccttggcgcgtggctgggcgctgggcgaagtatgccctcgccagatgccttcccgtggcgggatgcaggtgcggagtcccgccttcgcactggatttgcatggccgagatcccgccgcattcgtgcgtgaggtggaggatggggcggtgcggattgttggtcgctatgtgccaaagacggaggcccagcgtagttgggatatacgcggatccaacgatcgcttgaatagggtcttcgagttgaaccgtctgccatatggcggttatcccgggcaagacattgtcgaccgccgcaggaaaaaaccggcggcggagactgaagacgactccgcggcggcggccgccccatccactaagaagaggaagctaggtactgcgaagggaggacttggggtctccgatagttttgctatggagttgatggggacatgcgcggcccccgggggaaggatgtcttcgcccgagctccgggagtcttcggcgcggatgctgaaggttaccgggggttggtggcctaagaacgttcctatcccccgcgcgaccggcgaagacttttttacatctcgcatggttcgtgacttgagagtgtttccttatgaacagaatattgctgctattgtgtcggcagtgatggacaaggatcgtcaggaagctgcgcagaagcgccgagcggtcatcaggctgcccgaggctaggccgaatagggcgcgggggactgcgaaggctgccgcccccggcgatagccagccgacgctggcggcaaagttggccgcccctgggtccagcaaggtgccggaggtcgtgaaggcagccggagccggcggaaccaagtctgcctcggccggagccgcgaagggccgaggatcgggcgaggggcaacttgttgttgtttcgcccgcggtggcaaccgcggtgtctgccgcgatgcctggggcgaagggtagcgctctcagcgctggtggtgagattccggcgctagctgccgtcaaggacgaagcatgcactatgtcccgccggctgagggaggcatcgcagcggctaagtcagcatgctgacgccgtccgggaaaagtcggccgtcgatagcaagtgccgcaagctggcggagaaggtggccgccctggagggcgagaggactgacctccggcgccagctggtggaggagaggagggagactaatcaggccctcgccaaggcacagtcggcgcaggcggaggccaacttggcgcgggtggagggtagcctcgccagccagcgcgccgaggaatgggaggaggggttcaacgctatgcaagcccgcatggagagggtcgaggcttctacgcgctcggaagttgagcggacgcgcaaacagcttatggactcataccacgaactgggcgcgcggaccgctgacttcgaagtgcccgaccgagagtcaggccttcgctgcctcgagtggctgcaagaggaattgttggcactcccgaccattgtggagggatttatgtcctttgcctccctggtcacctgcgaaggggcgatgaacgcgctgtcccacgaagggtgcagtcactatgaggtcttcgaccgatctaatgaagatttcgagcgcgagatttacaaggtcgaggaccctgtggtgaaggagtccgcgggggccctctttgaccggatgtggggccctcacggtcgggaggtggttagggagcggtccgacctagcgagggatcaggcggcgcgtgccgagaccgtggaggacttcggatctttgaatagcgcgcggcccgaagcggaggcgaacccggtggcggccgaggctgaggtcgtcccggcgccgcccccgaaaaccggcgaaggctccctcgctgcccctacggctactgcgtccggcggtggctcgtcgccaaccgctgtgctaagagtggaggaaaccccgaaggcgtcgacggggctagcagcggaggatctcccgaaggcggcgacggagccggcagcggaggatcccaaggcggcggctgggtcttcgcaggttcaggattttgggcctgcgcaagcaaccgctactgctaattttgtggcggcttcgaccgtggatgctggaaatgaatcagatgagtctgcttctaagttttctgattttagtgactctgggagttcggttgagtggacggaagagtcttcgaacgaagacttggattactttgcggccttggatgtggcagcggtggagacttcgccgcgtgccgtggatgctgaagttgtgccaggtccgagtgctgggcgtagacggcgaagggtggttgcgaagcgtagagtgagtgaggtggatggcggtcgtcttcgtgtgggcagggctggcagacatgaattgttgtcttcgccggccggggcgagtgtaggtgagggggagttgcgaagtctttttgagg

SEQ ID NO: 19087 - DNA, 909 bp, Zea mays
  Peptide Sequence Number=SeqID_62462
atgcctctcatcctcgctcctccactccctccactgctactgctaccactccaccacccacttcgcctgcccccatcactcctgcgccatccaccacctcagccatacccacctcctccactactccagcttccactgctccttccactcccctttccgctccacctatcccacctgctcgcttccgggagcgtgatgagactgaggtgcgaccacttgctgcggatcccaggtcgtttgaccttcagcgtgctacagcggcacgggtacgtcggttcagatacgtacccgtggagtctttggttaccggctcagagggaccctgctgcagttgacctcttcagcacctgtattcaggagtcctttttcagagctcagatgtctgcacagattgcctctacgagtgcaccggcttctggacctcgtgcatttttgcttgctgctggtgctgactctgagctgattcggcccccacagttccagggtactcttgaggcctctcgcctcatctttgggtcgtaccatccagctccagaggatcctgtgccagcatctgctccagtgattgatactcagcctgaggtctccgccttccatcagtttgagactcagggcggagcagcccatgatgatgatgatgatgatgatgtctttggggttcctcctccgcctccgcctcctatgcctccacgctcacatgatcatgaggatgggagttctagtgctacccctgctgcccctctagccattgaccctgctcttgctgcgattctccagactcttactcagcagcagactcacttggcagccgagcaggcccgtcagacagcggtccagcagcagttgtctgagagaatgctctcgatgttccaaacgattcaggacagacaggattctctacagcagtag

SEQ ID NO: 19088 - DNA, 820 bp, Zea mays
  Peptide Sequence Number=SeqID_62463
caggcaatttgagcccctcgaccagaggatagaagattttggccgaatattctttgaggcggagcgtggcgagcgggtggacgattttggggcgctgaacagcgcgccgcctgagccggagaccacccctgcggaggccgccactggagtcgccccgggactgaccatggtgaccgcggaagatgcaccaggcgcccttgtacctgctgcggccggcgaaggccttctcccaagggtagccgaaggcgtgtctgatgcccccgcagctgctgtgccgggcgctgaagatccagcggaggcaacggcggaggcggcggcggaggctcccgcagcggcagggccttcgcaggttcaagattttgggcctgcgcacgcaaccgctactactgggtttttggcggcttcgaccgcggaaggtggaaatgaatgtgatgggtctgtttctgagttttttgattttactgactctgggagctcggttgaatggaccgaggagtcgtcggaggaggacctggactattttgcggccctggacgtggctgcggcggaggctgcgctacatgctgcggacgcgccaagcgtgcccggtcctagcaccgggcaccgacgacgaagggcggttgcgaagcgtaggattagtgcggaggaaggggctcggcttcgcgttagtagggttggtcggcaggagctgctgtctttgccggccgtctcgggtgtgggggaaggggagctgcgaagcctttttgctggtgaggagcttaggataatgttatttaattatagagagatggggattattcctaaggttgagccgatgtag

SEQ ID NO: 19089 - DNA, 1887 bp, Zea mays
  Peptide Sequence Number=SeqID_62464
atgccagtagtggagttggtccccgtgcgccccgcaacaagtggggcagttggaatgagttttggttttatgttgctgaggctactgtcgaaggccatcaagggctccccgtgtccgaaatgtgctctcactatttactctgcgtatccgcctttcgaagtggcagaagaggatacagacgaaggggcccttcggtgcgccgccggccagagcagcgggcgtgatttggttgaggagtttgcggcgtacggggtctggcccttggcgcacggctgggcgctgggcgaagtatgccctcgccagatgccctttcacggaggaagggaggtgcgaagtcctgccttcgcactgagtttgcggaaccgtgacccggccgcctttgtgcgtgatgcagaagacttggcggtgcgactcgtggggcgctacgtgccgaagacggaaggccagcgcagttttgatatccgtgggtcaaacgatcgcttgaacagggtctttaaattaaatcaactgccgtacgacggctaccctggtcaggacgaagcagaccgccgcgggaagaaaccggcggtggaggccggaggcgaccccgcgctggcggccgccacctcttcgaaaaagagaaaattaggtactgcgatgggagggcttggggtgtctgatagtttcgctagagagttgatgaggacgtgtgcggccccgggggagaggatgtcttcgcccgagctccgggagtcttcggctcggatgctgagggttaccgggggttgttggcctaaaagcattcctatcccctgggatgcagaggactgttttacatctcgtatggctcgtcggtggaaagtttttccttatgggcgaaatatcggtcatgttgtgtgggcagtgatggacaaggatcgccaagtggcggcgcggaaacgccaggcgaccgtgagggtttcacgaagcccggccgaagaggcagcggggagcattggagggcggaggcctccggcgggaagcaagccgcccattccgggagaaggcgggcgcctccgcgacctggcaaggcgccggaggagacgatggggcgccgggaggccccaagctgtcgaagggttggacgagggcccgcttgctctagttgtgcctggcgcggcggtcgcgacggctgcgccagcgccgaaggcgggggtagagacccttggcgctggaggcgaggtgactgccctcgcgctggtcagagacgaggcggacgcggcgacccgccggctgaaaggggcgatggaggcgctgagtcaggtggctgacttcaccagccgtactgcgtcgggggcccttacggcggcgttgtctgccgaggtcgagagacttcggacgcaacacgcggacgctgtccgtgagaagtcggcctccgacagcaagtgccgcaagctggcggagaaggtggccgcccttgagaaggagaaggcagacctccggcgccagctgatggaggagagaagggaggccaacgaagccatcgtcaaggagcagtctgcgcaggcggaggccaggctggcgcgggcggagggcaatatcgccaaggagctcgccggggagctgcagcggcggcttgctgccttcgagagccgcgcagagggggccgaggccgcggcgcgagcggaggccgaacggacgcgcacgcagctcatgacttcatatcgcgagctgggtgtgcggacgggcgacttcgaggtgccggagcaagaggccggacttcgctgtctggagtgggtgcaagaggaactgcaggagctccccactgtcttggcggggttgatgtcgttcacctccctggtcacctgcgaggcagcgatgaacgcgctctgtcgcgaaggctgccgccactttgaggccctcgaccag

SEQ ID NO: 19090 - DNA, 213 bp, Zea mays
  Peptide Sequence Number=SeqID_62465
atggagggtttgctacctggaatcctagagcttgggtgtggacttcttctcaacgttgaggacaatggtgtccgtgccccgaacgccaacagcggtgttgcccttgcggacggcctcgagagcgtgctccacctggaagaggtgtccgtcgggggagaagacagttatggcgcggtcatagcgggccatcgtgctggcatcgccggcggttag

SEQ ID NO: 19091 - DNA, 405 bp, Zea mays
  Peptide Sequence Number=SeqID_62466
atggccgaaaacgaagaagagagtaaagtgactgaagagaagacaccaccacctttggaatctcaggcaaggacttggctctacttcgacatctgcgggtccgagcctgactcacctatcgacgaagccatccgctacttgcaagaccaactcgtgaaacgagatctagcgctcgattgggcaattaactctcgtccattcgcccgggctaaggaagccaaagctcgagcccgtgtagaggagcttagctcagccatggataacttgcagcgggagaagcacttgatggtgaactggaccttttcaaagccccctccctctatgaagttggtcgatgaatggtcttctacgcccgacagtaaagctaccaaacgtgaaaagaagtggcttaccaagtgcccgtaa

SEQ ID NO: 19092 - DNA, 327 bp, Zea mays
  Peptide Sequence Number=SeqID_62467
atgaccctcggacagaaccaatgcaaaaatccaagtctacactatggaccgtccggaggaaaagcatggaccgtccgagacctcgcgcggaccgtccggcctcaggcgcggaccgtccggggcggactgtctggaccaggcgggcggaccgtccgcagtcggcagaatggagcaacggctagaaagtggttggtggctataaatacaaccccaaccacctccattcacttcaaccaagtattccaaccttcaacattcaatacaagagctagcaatccattccaagacacattcaaagcctccaatctttccaagttccaaagttga

SEQ ID NO: 19093 - DNA, 354 bp, Zea mays
  Peptide Sequence Number=SeqID_62468
atggcccgcgcccgcgcctataaagcccactcaggcgtcgaccacacccctccgcacgcgctcaacctcactggagctcaaactcaccgtcgtttgcccgtgcacggcatgtccgcggccacccgagcccctgccgccgtagaccggccaacccagcctttcctagccccgtccgaccctcggagaagactgagcacaccctgtctctacgtcaccccgtggagctcaccgcgccattggattgaactaggtcgccgtgatttggccggcacacccgccgccgacgaggacacccgcctgcacatgtggaccgagcgattctatggcggaactgcccgaattattccaacttaa

SEQ ID NO: 19094 - DNA, 933 bp, Zea mays
  Peptide Sequence Number=SeqID_62469
atggctaggttttgtcgggcccttcgccatgtcttcgcacaacgctccgccggagacgagcacccaaaaggtttgggaggaattaacttggttttgtttctgcattggtacctggacttgcgaatccagcagaagcagttggagagtttggtaaatcaactggcaggggcaagcagatacagtggtgtgccaaactgctatggttgtcaaatgtttgctgctgatgtgctacagaacagtagaggtcgtagctatcataggcagattagagcaatcctgcataaatgcgaggacaatataaggggaggagctgaacaactgttttctatgataaccgagtataatctgaaggttgccatccccaaaaggggtgatggtgccaaaccttatttctttggatataccccaaaggtagaagcagaaatgttccagctaaaggcgaacaaggcaggaggtggagcggctacaccgttcgatctacttaaacaacgaagcactctgttttcatcctttttatttcatttattatgtagctcagtagctgcatgttactttactatttcccatccattgctggaaactaaatgtttcaaggagttttctgagcaactaaaggttgaggccaagagtaatcctgagttccagaaatccatggaacagttcagcgagaaactttgtgtgttgaaggaagatctcaaggtccagcatcttcaggttgagcttgagaatgagaagcaagaaaaagtagaacttcgacaagtgttggataacttaaagatggaatcagaaacttcaagggtaaaacattatgaggaaacagatggtttaaaaaagatatcacaaaaaaatgcatgccttccttcgctagctgctgagcttcaaccagggttagcatattccagggcaataaagtttctaagcccccaacaatga

SEQ ID NO: 19095 - DNA, 201 bp, Zea mays
  Peptide Sequence Number=SeqID_62470
atggagcctggcggagggacagctgtcggagctgttgagtccttgctgacgtcctcttgcttccgtaagggggctgagagccgccgtcatcacagagttgggcgacgtggaagctcctccgaagccaaggtcgagtctgtcttccgtggccgaggtcgagtccgagcccccgggtcgggcgaggcggagaccgtcggctga

SEQ ID NO: 19096 - DNA, 1188 bp, Zea mays
  Peptide Sequence Number=SeqID_62471
atgcaggcggcatgcaaccgcgccaagtgggcacacttctccgactcccaacacgcccggcatggaggcctaggcccacgcgtcatgcaaccggcgcgccgaatgcttcgtgcatgcaacagcaccgccacttgcgccactaccgtgcctcctcgactgcggaaccaatactgcgactcgaggcgacccagcgcacgacccagcagcgccaacctggcgcggcggtcaatgcggccaaaaatgggccggagaagcgggcgacgcttcgccttcgccataatgaccgcgtcagaaaagggaccgggaaagggggataccccgaaaaggatccttccccgtgaaggaaccaggctccgagcctccctactgatcagaggttcgaaggctggcccctcggaaggattcgacagccgcctcagatcgcgtgggctctacacccactactggtcagaggttcgaaggccggcccctcggaagggttccacggccgcctcaggctactcgggctccgcgcccattactgatcaggggttcaaaggctggcccccgaaggggatcggtccatacgagggactcgatcacgcctcgcccgagcctagcctcggacaagggcagccgaccccggaggatctccgtctcgcccgaggctcccctccagcggcgaacgtgttcccggctcgcccgagaccctgtcttcgccaagaagcaaccctgaccaaatcgccgcaccgaccgaacaagtcgcaggagcgtttaatgcaaaggtggccagacacctttatcctgacgcgcgccccccagccgacagagccgaaggctcggacttgggctaagccccggaagacggcgaactccgctccgcccgacccagggctcggacttgggctcagccccagaagacgacgaactccgctccgctcgacccagggctcggacttgggctcagccccagaagacgacgaactccgctccgcccgaccccagggctcggactacgccctgacctcagccgacggtctccgcctcgcccgacccgggggctcggactcgacctcggccacggaagacagactcgacctcggcttcggaggagcttccacgtcgcccaacctagggcgcagaccaaccacgtcaacaggaggcaccatcatcaccctaccccgagctgactcgggccacgggggataa

SEQ ID NO: 19097 - DNA, 747 bp, Zea mays
  Peptide Sequence Number=SeqID_62472
atgggggttatccgccgtctttccgcctcgtcgttggaggaacgcaactccgtgggagttgccagcccggctgctccccctcgctgggggtcacccaagacggtgaccaccagcccctgggtggggagaagcaagccgggctacgatcttggtcccaccctcaacttcaaggatgttcatcatcctcgctggggtggaggccgggctgagccggagctctacctcccgcgcgggttcgtgggtcaccctctcctgcggtgttcgagggagagggcgctcgctggccctgcgggcgggtcggacttcgacaacgcggggctggccgacggagggcgtcgtcagccccagcgcgtcgggctcgtcggcttggctcccggtgccccctcctgccggaaggcggctaccgcgccgtgtgcatgggaggaccgcccaagatgtcgcgcgctgctagggcggcgttcgtgttctggggcggtcctgcctttgtaccggtatggtgccttcgcgcgggggtcggtgccctgctcgtccgagaggatccgagtggggatctgccggcgggccgacggcccctgtcgtcggtgccgaggcggaggcggctcgagaagtccccgtcgccgacgggatcaccgccaccatccgcgcttcgggcctccggccctttgtacttgtccttgcccctcgagtgtcggcgtgggcgagggcagagttgcagcgacgctcgccctgaggccatcgccgctgtag

SEQ ID NO: 19098 - DNA, 651 bp, Zea mays
  Peptide Sequence Number=SeqID_62473
atggactgcaccgttatctcaggcgcgaggtcaacgcctgacatgtcccccactgggggtgtcggcgtcgtcgactcgctcgacagccgacaaggtgccgcctcccacctggccacggttgccttgcctcctcctgcggtgaggaaggcggcgggacaagcccggatgctgctcttccgccacgtggggaagacgtcgtcgagttcggcgccaccgggcgagctgacggtggtcgttgtcgctgtcgcgctgcgggggaaggagtaccatgtcgtagctaccgtcgagggacatgaactcgagactcccgaaatggagcagcgtctcgggctgaagaggttgctggagactacccatctggaactcaatgggaagttgctcgtcaacacgcagcaggcccctacctggcgcgccaactgtcggcgtttcgacctcggggggtccctggaccgacgagtaaaactgtcgctgcgtgccccagcccagatgtgttggcgcgagatggaacacaaaggggggaaaagtcgtggctcgtgttatcctgcgccaaaaaaggggggtgtgcttgcagtaggggttacaagctttcgcgagggagagagagagtcggtttgttggcccgtcctcccatgcgaccaccctctcgcatga

SEQ ID NO: 19099 - DNA, 456 bp, Zea mays
  Peptide Sequence Number=SeqID_62474
atgatgaccgcgtcaaaaaaggctggcccctcggaagggttcgatagccgcctcagaacacgcagagcgagggatgactctgggtacgtctgttacatggccgaggctcgggctacgctcccgagcctcaggcgcaacaggaagctccgcctcgcccgaccttgggcctcggcctcaggaggaagtctctgcctcgcccgaccccagggctcggcccccgcctcggcctcaaaaggtggtctccgcctcgcccggccccagggctcggcctcaacctcgacctcgaaaggtggtctctgcctcgcccgaccccagggctcggcctcaacctcgacctcgggaggaatcgcgtcctcgcccgaccccggcctcggcctcaggaggagtctccgcctcacccgaccttgggctcggaccgaccacgccgcagggggtacatcattacccaacccctag

SEQ ID NO: 19100 - DNA, 540 bp, Zea mays
  Peptide Sequence Number=SeqID_62475
atgggcaatggccatgaaccggtacagggccggtctgccaatgatggcgttgaaggggaggttaacctccgcgatgtcgaacacgatgttctccgtgcggaagttctcctcggtcttgaatgtaaccgagagtgcgatgctcccaaggggatacatcggttgtgggcccactccgaagaatgggcgagagggtcccagccgggaccctgggatctacagctgcttgaatgcagcatgactgatgacattgaggctgacccctccgtcaatcagaacatggtgcagccgcatgttggcgatgacaggagcgtcgaatgccctgaaggagacagtggtgctcctccaccgctgatgtggagcagccttcgggacccctgggactgccgagaggacctctcgacgcaggaattgacgttcctgcgggaggtgagctcccagcttccgccgtacatcacatatagcttcttggggcggtcattgtcgtcaccggagtcggagtctctagtgaagacgtccttgaggtccccctcgggtgactaa

SEQ ID NO: 19101 - DNA, 240 bp, Zea mays
  Peptide Sequence Number=SeqID_62476
atgcggaaggtgctgcacaatcttgcgaacatggtgaagacatctgggtacttaccaagaatagaggagaggcctggagagccgccgacggcgcagcaacaatcggcggtgccactaagcttcgtcgagaaattcgagtgtcccgaggtcccgcgtgcccccaacacggctgtatacgacccagaaactcctgcgaacccccctgatcatcgcccaaacctagagcagccgcacaagtga

SEQ ID NO: 19102 - DNA, 288 bp, Zea mays
  Peptide Sequence Number=SeqID_62477
atgtgcattgactttgctttgaataaaatacaagctgtccttaagtcattgaatgatactgaactagaagagtcttgcacccaacttccagacaccttttctcaggatggttcatctgatgttgaggaacacatcttatcaaaccaagaaaaatcagattggaaaagttgggctgaggcaagtcagacttgcaccaaccctgcggtgcaccggacagtgtccggtgcccaggctggcgccccagcaaacaagacgctctcagaaaaactcagcgtgtcgtggctataa

SEQ ID NO: 19103 - DNA, 522 bp, Zea mays
  Peptide Sequence Number=SeqID_62478
atgtcggctccggacccccgcctgaccttgatcaaggcctgggtattctttgtcccggaatcccgggaccttgctgtgagtggcccggaccctgcacagggaggtctaggacccgttccaggggtctgggcacgtccgtggaggtgcataaggttcaacataaaccaagaaagaaattcagttggggacacaattaaatttggagcaaaggactttgggtgtgctggaaaatggtgcaccagacactatccggtgcaccaggaccgtatagactcaaaccatccactctcgagaattcagcaggcgtgctccgctataattcaccgaactgttcagcgtggcaccagactgttcggtgagccagcggagcaacgactccctgcacgccaacggttgactgcaaaagtgcacagtagcaaacagtgccacgcaggagtcagagcgcagaagtcagaggtcaccggactgtctggtgcagcaaaaagacaaagggctccaacggccaatagctccaaaccctaa

SEQ ID NO: 19104 - DNA, 315 bp, Zea mays
  Peptide Sequence Number=SeqID_62479
atggaggttctcactggggaagaagaccctcgccggagccgagaagaaatccgtcgattgccggagattcagggatccaatcgacgaaccgaacgcgctgcgacaaagccctcgacgagacgaacacagcggtaccctcggattcggcagacgatgcacggattgggagtaattgctcgccggagttggaaccgctccgaacttcggcgagcaataccgggagctagggattggatttgggggaaacgttttgtgctctggaacgggctcgacgagatgaagccggacatgtatatatatctagggtttggatga

SEQ ID NO: 19105 - DNA, 195 bp, Zea mays
  Peptide Sequence Number=SeqID_62480
atggcgacacccctccccctccgtttcccctccccggcggcgcccctttccccctccctggcggcggcggcggtggccggcggtggtgatgaggatgatggttttgattatgcttatggtaatggtaaagaaagagaagaaggcatcgaggtggatctccaggagttccaggacgtcgatgagttcgaggattag

SEQ ID NO: 19106 - DNA, 672 bp, Zea mays
  Peptide Sequence Number=SeqID_62481
atgcaggcggcatgcaaccgcaccaagggggcgcaccctctcaacttcgacgcgtccagcatggaggcccaggcccacacgtcatccgcgggagagggcgcgaaggtcgatatggccagaaatgggccggcagtaatggcggtggcaggcgggcggaagcagtgggaccgggaaaggggataccctgaaagggatccttctccgcgaaggaaacgggccccgagcccccgactgatcagaggttcgaaggctagcccctcggaggggttcgacagccgcctcagagcgctcgggctccgcgcccactactggtcagaggttcgaaggccggcccctcggaagggttcaacggccgcctcaggccactcgggctccgcgcccactactgatcagggcggaatcccaccagagggaggcatcgagccctcggaccccatcaaaaggggaccggccaagtccgacctcgggcgccataggaagctccgcctcgcccgaccccagggctcggactcgggctcggccctagaagacgacgaactccgcctcgcccgacctgagggctcggactcgggctcggccccggaagacgacgaactccgcctcgcccgaccccagggctcggactcgggctcggccccgaaagacgatgaactccgcctcacccgaccctag

SEQ ID NO: 19107 - DNA, 714 bp, Zea mays
  Peptide Sequence Number=SeqID_62482
atggatcaagcagtctcattagctgcgagaagcagacgattcgaatcgagtttttatccttgcaagatcagggctcaccgccttggcgtacaatgcctcactgaccccgactggccgtcgtgcagtgaccgcacttgtacccaccataaccggaatgggagacctcatctcaggtcgcgtgaggggctcgggtgctggatctggggctacctcctgagcagctccttgctccggcacgaggatgtactctccgtcagcgagattacagtctatcgaaatgcaatgaacattccttccccttatgcaaacagtaaccgtgggaaagaaaagggcggcgcggcttaccggcggcgagggaggtccggcgaagggtggggttggctcggggagactctagtggtcacgtcgaggtacggctcgacgtcggagatggccggaatcgcccggtccacacgtacaggcgggtgtgctcgtcggcggcgagtgtaccggccaaaccacggcgaactggttcaatccgagggcatggtgagcttcacggggtcacgcagcgactatatgcacaaggaatcgaaggatggtggagtggtttacccggtccactcttctccgagggctggacggggttgggaatggctctattggccggtctacggtggcagtgggtcgggtggccgtgaacacgtcgcgcacgggcaaacggcggcgagctaa

SEQ ID NO: 19108 - DNA, 564 bp, Zea mays
  Peptide Sequence Number=SeqID_62483
atggcggcccaggaggcggttccgatcgtcgccatcggcagccaggtggagataagtctcgtcgggctggaggcctggagcacgcggtccttctcaccaacaacctcgacctcgccggacggaccttcgtcgtcgaaaaagtccaggatttccaatgagatcgaggtggtcgttgccgtcgtcatccctcaactgctccgcgacaacgttgaccccaccggcgcgcgactcctacgccgctacgcttggtccatctgtcatgcggcgagaaaggtggatggcgcccccaggattcctggggtatctgtcagcgtccgcgggccgttctggtccctggctgctgatgccgccaagccgctcctgcgatactccacctatgttttcagcgcgaacaggagcaaggcgtggtatgaggccaacgtcaccaagctcgcccccgccatcaccgtccttctggactacgtcgtcaacatcccgtacagctttacagtcgacggggctgacgacgatgacgatagcgacgacgatgacggcggtgacgacgacgacgaacacctggagtag

SEQ ID NO: 19109 - DNA, 1329 bp, Zea mays
  Peptide Sequence Number=SeqID_62484
atgtcaactacaccttcggcaaagtccgaccgagcctcgaacgacaacgcggtcggaggatctccactccgaaggacgacgtcggcaccgcgcccgggccatcgccgccagggtcttctccaggaatccggcccgagcagacagctcaaccggcaaccccgaagcctcagccagctgtcccccgaggacatcagcccggctcgtggcctcggcaactcgactccggcgtcggtcccgccagcggatggcccggccaggctctggccgacgaagtcttcttttcgagccaactccgcctctgtccacactgacaccgctgccttcggcttcagctcatcaaagagcggccgagggtttcctttaactgagcaagagaagcctcgggcggcaaggccaaccgagtcgaggaactcctacgcctccgggatacggacacctcactcatcgccttcgcacgaggcaactcacacttggttaagcggccccgacagccacaatgaacagacaccggcactcaaggtgccattacaaacggaactccggttctgcctccgcaggtacgaacaaccccccacaattggggggcctgcggagcaacagaaggccgacggatggctcgccgccgcccgctccagcagcggcgacgatgacttctgctccgagcggccgaacagcagcagcgatgacctcagggcggatgctgctgccataaagccctcgcccacatccccactcgaggggcgaggacgagcagaaggccgtagagttggaggtcagtccgcgggcggcaccgactatctcgtcggcgaagaaacctcttccggctgccgcggcggaaggtggcaccgggagcagcgccgaagctgctcggaccggagagccggacacgcggcagctgccagcaccacgaacggcgaacgcccttccccccgatcactgagggaaggagcgggccgctgcccgcgcggagaccgaccccaactcggcgcactcccctccccagcactgatgatgaacatccttgaagctgagggaggggcagaggccgcagcctggcttgcttctccccacccaggagctggtggtcaccgtcttggggcggaagaactgcgagtgtcccccatccgggggctcacaaggtggaaagacgggatgcatgaagggagcgcgaagacatggttgcctttcaagggggtcaccctccttttaaaggcaactctccccacttgcgtcctcagccatcgcgggctgagtcttctccaacacgctccaaggtcctccccctacgacacgggggctgggtcccacgcgtcatgcaagctggcctag

SEQ ID NO: 19110 - DNA, 966 bp, Zea mays
  Peptide Sequence Number=SeqID_62485
atgcaggcggcatgcaaccgtgccaagtgggcgcgccccttcgactccaacacgcccagcacggaggtccaggcccacgcgtcatgcaaccggcatgccagttgctacgtgcgagcaactgcaccaccactcgcgccactaccgcgcctcctcgactgcggagtcaataccgcgggcaggagcagcggtcacgtcgtcagccaagcttatgtcccatccaggggcagcgagggagccctctctcacggcgtgaagatggacaggcggcgcctcaagcgggagaagcaagcgacgcttcgccttcgccataataaccatgtcaaaaagctccgagcgtccctactgatcagaggttcgaaggctggcccctcggaggggttcaacggccgcctcagatcgattgggttctgcgcccactactggtcagaggctggccctcgaagggttcgcagtcgcctcagacacagagcgagggatgaccctgggtacgttcgatacataaccaaggctcgggctgtgctcccgagcgccgcctgcgtcgctccgactgctgagccacccgacagagtgaggctgacagcagccaaggccggcctcgggcgtcataggaaactccgcctcgcccgacccagggctcggactcaggctcagccccggaagacggcgaactccgctccgcctgacccagggctcggacttgggctcagccccggaagacggcgaactccgctccgcccgacccagggctcggactcgggctcagccctggaagacggcgaactccgcctcgcccgaccccagggctcggacatgggctcaaccccggaagacggcgaactctgcctcgcccgaccccagggctcggacatgggctcaaccccggaagacgacgaactccgcctcgcccgacccgggggctcgacctcgacctcgacctcggaggagcctccccctcgcccagcctag

SEQ ID NO: 19111 - DNA, 90 bp, Zea mays
  Peptide Sequence Number=SeqID_62486
atgggcgaagctgctctaggagtgctcacagatatacgggatagaagttggcctaataatgctactctctcatgcttgaggaaaaagtaa

SEQ ID NO: 19112 - DNA, 564 bp, Zea mays
  Peptide Sequence Number=SeqID_62487
atggcggcggcgctccagcgcgctagggcacgagcagtgccgcgcgagcggggcagggacgggcgaagtcggccgcgacgcaggggcatgcgcgtgctgggccgcctgggagcacgggtgggctggggggagggcggcgcgctggtccgtcgagaggggggaacaattgggccagccgggaaggggacagaagggatgggccttcacggctgggagctgggccgcgggaggctggggcgcgcggcgtgggttgccggttgcacagatgggccacgcgaggggggtgttacagatctaaccccctcaacaggaatctcgcccccgagattcaagaagaagttagcaagaagacaagagaggttggcggttgccaaccggacaggtgcaagagggaagggtatatacagaaaaggggccacaatcacttcaacactcatcacaaagaagcaaatcactcataacacaaaggcaaacagcacaagcatacaacaacaaacatctcgttgctatacgctaatgttaactagatggtggtctttcctttcaatggggaaattactctaa

SEQ ID NO: 19113 - DNA, 177 bp, Zea mays
  Peptide Sequence Number=SeqID_62488
atgaggacaaagcctccaacggttgaccagctccaagccctaacaacagggtcacgtggcggcacactggactgtccggttgcctttggtgcaatctatgctcaggtaaagaagaaggagaaagacgtcgaggcggatctccaggagttccaggacttcgacgagcttaaggattag

SEQ ID NO: 19114 - DNA, 159 bp, Zea mays
  Peptide Sequence Number=SeqID_62489
atgggtaaagtgtgcgacctctgcagagggaatgaaactgatatatcagccgtgctcatggttggctttggtgcaatctatgctcaggtaaagaagaaggagaaagacgtcaaggcggatctccaggagttccaggactccgacgagttcgaggattag

SEQ ID NO: 19115 - DNA, 666 bp, Zea mays
  Peptide Sequence Number=SeqID_62490
atggcggcccaggaggcggttccgatcgacgccatcggcagccagctggagataagtctcgtcgggctggagcacgcggtccttctcactaacaatctcgacctcgccggacagaccttcgtcgtcgaaaaagtccaggtgcgccaggcgccggccttgcttgaggtcatccagagggccgtctgccatcccaagaggaagtgggtggtccgcatacccaacaccttgaagttgcgccacatcgccaggatttcgaatgagatcgaggtggtcgttgccgtcgtgatccctcaactgctccgcgacaatgttgaccccaccggcgcgcgactcctacgccgctacgcttggtccatctgtcatgcggcgaggaaggtggatggcgcccccaggattcctggggtatctgtcagcgtccgcgggcctttgtggtccctggctgctgatgccgccaagccgctcctgcgatactccgcctatgttttcagcgcgaacaggagcaaggcgtggtatgaggccaacgtcaccaagctcgcccccgccatcaccgtccttctggactacgtcgtcaacattccgtacagcttcacagtcgacgcggctgacgacgatgacgacagcgacaacgatgacggcggtgacgacgacgacgagcacatggagtag

SEQ ID NO: 19116 - DNA, 474 bp, Zea mays
  Peptide Sequence Number=SeqID_62491
atggccgagggcccggagtttgtcgatggcggatgtcgctgggtccatggcggtgcactcagggttggatgcctcaacaccgatcacggggcgccgatgggatgggcaagagggtcgcggggcttccgttttatagagggtcgggtggacgccgagacggattggggtcccgtgattcccggtggtggttcacaacaaccctcgagctatcctgatcgcgtggagcagacatgcacttgttacggcgaagttgaagaagatcctgacagacatgccccacatgtctgtgagacccaggtgcaccagatgctagccaagcggctgcccagcagggccaatgcgccagtgatagaggctagagatggtggggagaagtgggttgcgcgggagataaaagtggatatgggccaacgcggaaatgggccggcgggaggtttcaggctaagtgctttcaaacatcaaaacaaattctaa

SEQ ID NO: 19117 - DNA, 381 bp, Zea mays
  Peptide Sequence Number=SeqID_62492
atgaacgataagaacgatagtaactgccaccttccaccaccaccagctccgccaagggataagcaccgggagtttatgagtcacaagccacctacattctccaactcctccgacccactacaggctgacgactggtcatgcttcaagtgtggacaacccagacattatgccaactattgtcccaacagggctgcatataccactccagctccgatgaagcaaggtcaggcctcaagaggcaagagtcagcccttatccgtcaatcaggggcaggtcaaccatgtggaagtagaagttgaacctggtgaacccgaaaacccgaaagaggtgccggttgaaggtgaagaagccagcgaagaaggcaaagagcaacgagattag

SEQ ID NO: 19118 - DNA, 225 bp, Zea mays
  Peptide Sequence Number=SeqID_62493
atggcaagattgaccaagatggttgaaggacctgacagcgattcgggcggcctatatagggagcaggggagtccgacccaggatggccacagtgggtcccaacaggtctcggccaagtcggctatgtcggtggttcagttgaggtcgttgcgcgacgaggggaagacggtactggagccatgggtccacaaatcagtgtctcaagtaaacgggaagcgcccctga

SEQ ID NO: 19119 - DNA, 777 bp, Zea mays
  Peptide Sequence Number=SeqID_62494
atgccccctgcaccaccacagggcatcccgactgctggaggagaccctgacggagatggagacgacgacgacgccggtggtagttcgagccatcacacggagctttcggaggagccggagctggagggatggatcgctagacccatcactcgtgacgccgctcgcgggtgtcacttccacgatactctcgataccctgctgcgtcgggccttcgaccgacacacatggtctatcgagtaccgttgtgtagtctaccagcatcgtcgcgggctatacccggaccagtgggaggctacttgcttggtgcgccgtccggacgatgatctccggggcacagaagccttcttagagcactattctattactgagagggatactgccgaggtagccatgcaagatgcagcacgacgggcactttctcagtattgttcgttgttcagcggggtagctgatggccttgacctgaagtactaccctcgccgttcgactggtagtgctggaggtgtgattgcctcgccagtaggtgagggcaatcccaggctgaacagcatggtcaacttggtcgtcgtgctcaacacagagttggaccatgcccttgatgagttgggtaaggattgggcagaggttgcggaattgcgtgctgagtgtgcagcatgccactatctggatggtggttctcccgcccctgtcgggattcagcacccttactgttcaccgccccgtggtcgcttcgactatggtacagactgcaggacccagatagatttggatccctag

SEQ ID NO: 19120 - DNA, 384 bp, Zea mays
  Peptide Sequence Number=SeqID_62495
atggctcaccggagtttctccggcccgcccgaggccttctcaccgctgtcctcccctctctgcccatggattcatggtcctttccccgccatcgagttcgccgtagcaccctcttcctctctacccaactacggcgaccccggaacccacctagctcgcgccagcctcaactccgacgacttcaccaccgcagagaggagcggcgccgcccgcagccatctgtttccccggtttgatcccctccgtccgattcagattgaacgactcggacctcgggataccgcttcgcgcacgcgcgccctgacgccgtggcccgcctgtcagcgcccaaaccctctggcgctgggcccgctcggtcagcgcactctccccctctgtcgctga

SEQ ID NO: 19121 - DNA, 195 bp, Zea mays
  Peptide Sequence Number=SeqID_62496
atggcgagagtggcacgtaccctcctggcaacggatcgcctaaaaggggtgcatacccttgagagtcttttccttagtcgggtgaggaagcgacaaatttttgttgcttttgctccaaggtggtatcaaatgcaggaaaacaggagtgaagatgcgggaggacttggtcctccatataggatctttttgttttaa

SEQ ID NO: 19122 - DNA, 627 bp, Zea mays
  Peptide Sequence Number=SeqID_62497
atggcccctagaggcctaaaccttatccttaccaagggacaggtttctgaaatcatgttcggcaaggacaaagcaaagaacaagaggatgcttcgcatgtggggagaaaggcactttcgggacaattgcccaaatatggctaaacccaagaagaggaggagcaaagaaacttgttcagatgatattgcattagaaaatgaattattaaagcacgaagtggctcgccttggcaaagattggggagataaaaagaaattgccaacaaacaaagtctccaacacctacatctacaaggtcaataggaaggcggctacaccatacttaatcaaaaagaagaagcatagagaggtcatagccatcaaggccaataatcaagccaacaaggtaaagaggggccaaatgcatctgggtgccaaaggagattatctcaaccatgaaaagcaccaagaaagtttaggccccgagagggaagtgataagtccgaaggactttgaggaatttttagacttggcaaattcggatgtatgtcatgggatgcatcacatcggatcaagaatattgccaaatgggttagtgaacactttagacccaaattccccacccatgactaagcttggaaagagataa

SEQ ID NO: 19123 - DNA, 504 bp, Zea mays
  Peptide Sequence Number=SeqID_62498
atgctcgtcgttgatcttaggtggtgcctcaaaactcgtgccaacactatcaggcagaagacggtggaaagctcaagcatgatgcttgaggataccattgttggccctgctccaggccctgtcatgcccgaggtcataggcatcgatccccggtggagcgtggtggtattcgaggtcagaactatcatccggtccccacgggctaggagcaaggctagcggagtccactgcagtggcctatgtcctggtcccacggtgaacatggtgaccattgtcgcaatttgggatggaagaccgaccaggatgttttctcgggtgcacatgagtgaggacaaggtgcgcacaaaagactcgtgttggtctgtggggacattatatgatcctagagatattccaggaaccaggaagttttctcgggtgcgcatgagtgaggacaaaatgcgcaaaaagactcgtgttggtttgtggggacaatatatgatcctagagagctaccaggagtaa

SEQ ID NO: 19124 - DNA, 195 bp, Zea mays
  Peptide Sequence Number=SeqID_62499
atggcgagagtggcacgtaccctcctggcaacggatcgcctaaaaggggtgcatacccttgagagtcttttccttagtcgggtgaggaagcgacgaatttttgttgcttttgctccaaggtggtatcaaatgcaggaaaacaggagtgaagatgtgggaggacttggtcctccatataggatctttttgttttaa

SEQ ID NO: 19125 - DNA, 762 bp, Zea mays
  Peptide Sequence Number=SeqID_62500
atggggaaatggagctgcgaagggactgctgctgggaggaagatgaacagggcactgggaaaaatctgggcgtcacggctgggagcagggggctcggcctccatggggaagaaggcccctgcgctggctgtctggggaggctcgcgccatggagaggagggtcgagctgctgcaatccatggaagaagaaggggtgctggggaggaagagctactgctcctctgcggcaagggacacaggaagaaagccgacgtcgagctcctggacatggggtcgctggagcgtcggcttcattccttgagcagggcgtcggccattggggctgctgggaatgggagccgctggctgctggaggttgaagacgacggagaaaactgctcgcacggggaagcaccggctggaaaaatggaggctagggcgagctcgggatggctgctccctgcgccacgctccattggaggagacagcaagggcgccgatccacaccatggagagctcctgcgcatagaggaggaaaggatccctgcactgaacgccatggagaagaggggcgctggcagaggagatgggagcagaaagcttgggcgccatggctgggagcgcgatggagagggcagctcgctggtggctgttgctgccgtgatgcagggaggaagaagctggcggctggaaatttttgaggggtgggaatggaaaattgccaagggcaaggggagaggggttcatatttatagaggagctctagggttatggtttccttag

SEQ ID NO: 19126 - DNA, 282 bp, Zea mays
  Peptide Sequence Number=SeqID_62501
atggttaaaaattttggcaggaaaacagtgcaaatagcaatgaatgctgtggtaacttcacacctactcgtctgtttatatagtgctgcaggtgaacagtactcccgtactgttcacgttgacttggcattttgcttttgcgtcacacttgtattttcatctccttccaagccgaaggtactccttgaattggttgatggtgtgacttggcctccatccctgccactgggacagacggtcgagtgggttactgcttccgcaggagaggaccaggaggagtag

SEQ ID NO: 19127 - DNA, 783 bp, Zea mays
  Peptide Sequence Number=SeqID_62502
atggggggggggctcatggccatggggaaatggagctgcgcatggactgctgctgggaggaagatgaacagggcactgggaaaaatctgggcgtcacggctgggagcagggggctcggcctccatggggaagaaggcccctgcgctggctgtctggggaggcttgcgccatggagaggagggtcgagctgctgcaatccatggaagaagaaggggcgctggggaggaggagctactgcttctctgcggcaagggacacaggaagaaagccggcatcgagctcctggacatggggtcgctggagcgtcggcttcattccttgagcagggcgtcggccattggggctgctgggaatgggagccgctggctgctggaggttgaagacgacggagaaaactgctcgcagggggaagcaccggctagaaaaatggaggctagggcgagctcgggatggctgctccctgcgccacgctccattggaggagacagcaagggcgccgatccacaccatggagagctcctgcgcacagaggaggaaaggatccctgcactgaacgccatggagaagaggggcactggcagaggagatgggagcagaaagcttgggcgccatggctgggagcgcgatggagagggcagctcgctggtggctgttgctgccgtgaagcagggaggaagaagctggcggctggaaatttttgaggggtgggaattgaaaattgccaagggcaaggggagagggcttcatatttatagaggagctctagggttatggtttccttag

SEQ ID NO: 19128 - DNA, 171 bp, Zea mays
  Peptide Sequence Number=SeqID_62503
atggcgtcgccgcggctgggcctgtgcgccaccgctctggtgatcgtcgtgtgggggagaatgttgttatttactgttcatgataagatcattatgttaattggaacatggagcgaccacccgggaaaacagtgctaccacaagggtttatggatgcccttggctgattaa

SEQ ID NO: 19129 - DNA, 215 bp, Zea mays
  Peptide Sequence Number=SeqID_62504
agaacgatccggttgaagaacccgaggaactagcaggagaagtccctgagcagcagtcggttggtggagagacattttggtttacaggtggcaatgagactgatggttttggttatgactatggtgctggttgtcagcattgcaaccactgctcaagagaagatgaagctgtggaaggagacttccaggagttccaagactacgacgagttctag

SEQ ID NO: 19130 - DNA, 249 bp, Zea mays
  Peptide Sequence Number=SeqID_62505
atggcgcatgcacaggcgaagccccgcacggcggccccgggcacccaacccacagtggatcgacattacgcactgaagaacgagaacctaaagggaaggaaagatgcaattgtggatattactccacaacccatcatactcaatcaaagatccaaatcagacaagtatcataagaacaaacattcaagcatacaattattttcaaacatagttttgattttgttcctaagagtaggtctcctattttaa

SEQ ID NO: 19131 - DNA, 381 bp, Zea mays
  Peptide Sequence Number=SeqID_62506
atggcgcatgcacaggcgaagccccgcacggcggccccgggcacccaacccacagtggatcgacattacgcactgaagaacgagaacctaaagggaaggaaagagaacgatccggttgaagaacccgaggaactagcaggagaagtccctgagcagcagtcggttggtggaggtggcaatgagactgatggttttggttatgactatggtgctgagctcgagactcaattaaaggaacaatctgaagcgcatagagccaaaatgcctctgctaaggaagaaacttgaggagatgaaagagaactttgaattgcagaattataagcatgagattgctgagagcgagcgtgataggctacaaaaaaatgttgatgagctttga

SEQ ID NO: 19132 - DNA, 396 bp, Zea mays
  Peptide Sequence Number=SeqID_62507
atgacatcaaattacaaatgtaccttcggcttgaaagaagctcccttgcgcatagctttggctctgcgtcaaccttcgtattctttctgcttctcacattatggttctgattcgagtctgaagctaaggaagcgccgcagacgcggggagcctcagttggccgccaatccgacccggttgcgtaatccggaggagggcgcgggtaatcgtggaggtgtggttgagaatctaggggtgcgcggtgacctgagccttggcgattactcgtcgggatccacaagaaccaccgtccaaccatccttcgtggtcagctacttccgtggaccttcgtcgccgtgccactgttttgacatgaaagttgtattaaaattaatctcttggttaatcttgtattga

SEQ ID NO: 19133 - DNA, 1239 bp, Zea mays
  Peptide Sequence Number=SeqID_62508
atgccgtcctcttcttcttccgccgacaccacgccgccggcggccgcctcgtctgaggagacgttgagtagcttggtggtggaggagttgcgcgccggcgactctgttgattttggtgtgtcacggatgacatcagcccgcgttgaagatatgcagcggttgggctactttggcggcggagttgctcgcgctccagggacggaggaagtccccgagccggagggtgagttggttgttttcgaggcgttcttcgccgccggtctccgcttgcctgcgcaccggatcgccaaggggcggcgcaaaaacgccaggcggcggtcaggctacatgaaagctaggccgaagcggcagcggggggctgcgaaggctgcggctcccggcggaggcaagccgccgctggcggcgaaggcgggcgccgctgcacctagcaaggcgtcggaggcgacggccggcgctggaggctccaagtcaacgaaggtggtgccgccggccagcggagtggcggaggcttcgaaggcggctcgagcgttgccgttgtcgggcaagcgcgttgccgacttcggcaccgatattactgtagacgactatcttggtgggtcggacgagggccagcttgctatggttgcgcctggcgcggagatcgcgacggcggccatagtgccgaaggcgaggggcgaggcccttgacgccggaggtgaggtgtcggccctcgccgtggtcagggacgaggcgggcgcagcgacccgccgactgaagggagtgacggaggcgctgagtcaggcgacggaggcgctgagtcaggtggctgacttcgccagccgtactgcgtcgggggccctcacggcagctgtgtctgccgaagtcgagagacttcggacacaacatgctgacgctgtccgtgagaagtcggcctccgacagcaagtgccgtaagctgacggacagggtggccgccctggagagggagaaggctgacctccggcgccaactggcggcggagaggagggaagctaacgaggccgtcgccaaggggcaggctgcgcaggcggaggccaagctggcgcgggcggagggcaatcttgccaaggagctcgccgaacatctgcaagagcggctcaccgccctggagagccgcgcaaaggaggccgaggccgcaatgcatgcggaggccggatggacgcgcacgcagcttatggatacatatcgtgagctgtgctgttgtgattatagtcgttcttag

SEQ ID NO: 19134 - DNA, 375 bp, Zea mays
  Peptide Sequence Number=SeqID_62509
atggagtctaccaagatcacccttgataacatggaggatcttgtagtagatttgtccactgagctggtggagaaggatctccaggtggaacagatggccaaccacatacaagagctcgaggatcaggtggaagccagggagaacactattgaggttctggaagaccagctccagaacacccagcagcagctcgaggaagccaaccagcacttagacctacaccatcaagagatcgaggacatggaggcagaaggggtcgatgaggacgtagatatcgaaggaggggaggagccggagcccgcatctagcttggacattgctggctcaggaggaccaccttcccccgagtctagtgttgcctcgtttgctcgttag

SEQ ID NO: 19135 - DNA, 603 bp, Zea mays
  Peptide Sequence Number=SeqID_62510
atggcatcacccacacccactggtggaggagacacacctttctgcattgacagccttgcacgggagggttttcccctcattctatgggagccagggtggcattcgttggacattgagacccttggtttttgggccgacgacaccacagaggtcgcagccatgcatgcgctgacgatcttctatgggtttcacccactggagatgacgacccatcccatcggtctattctccactgagagggagaacgaccctgtgtggaaggattgggttgaccacgccaaggacgtgtgggcaatctaccctagacccacaactcggttgacggttcagtgcatgagtatgttgtaccatttgcaggccttacaacacgaggttatgtcacatctgactgaccttgcacaaattgcaaaggtcaccctcaacgatagagagggctttgtggtatacttctcttctaagcttgtggagaaggatctccaagctgagaagatgggcacccaaatccgtgagattgaggagcaagtggaggattgggaccacaccattgaggttcttgagaaccagctccagactacccaacaacaactattaagccactattaa

SEQ ID NO: 19136 - DNA, 312 bp, Zea mays
  Peptide Sequence Number=SeqID_62511
atggaccacatgggtcttagtcacaagagtatcaagggaaggtgggatcagttagacggaaataggatcgcggcctcgcggggcatggctggccgcctccagctgctgggctcgctagtggccgctggccgggcaggcgaggcggacgcgcggctcggcaaggccgggcggcagcaccagagcgacgtgcatggctggggtggctgcggcaacgcagcagccatgggcatggttgggccgcaggggctgcgagcggggctcgctggtggctcgccagagaaggagcgagcaggcaggacagatgctctttag

SEQ ID NO: 19137 - DNA, 192 bp, Zea mays
  Peptide Sequence Number=SeqID_62512
atggcttcgtcttctcctgagcagtggttgcaatgtggacaacctggtgttttgtggctcaagcagttgcttttagttggtcagctaagggcgtcccatttcaccctcatggttgcactgttatcccgggtggtctctcaacgaataggtccttacggagaggtactcgagaaacagcccgagtccccttaa

SEQ ID NO: 19138 - DNA, 370 bp, Zea mays
  Peptide Sequence Number=SeqID_62513
cagcttcatcagtatccgtcaagcttcggatcattgaccttcggcttcgtcatcctttacataacaaagcgatataaggtaaatagaaatctcaagagaagctataacttcgtcaagcgcctctacttcgccctcaatatgttcgaaggcactgtggccatgacttcttctgcagaagcagcagtctcctccacagccaaatccaatagcactttatcgatagcagataatgtactctctaggttggtagcttcggcagaagcagcaacttcggcagctggtgttatttttgatgctgaggtcggtggctcgtccttcttctgtaaaagcttcgtcagttgcggccccaatggacttagcagcttgatag

SEQ ID NO: 19139 - DNA, 975 bp, Zea mays
  Peptide Sequence Number=SeqID_62514
atgagattgatggttctggttatgattatggtattgatggctcgacttagacacactgcacgaaagtcagtcatccccttcttaccctcccgccttgctgagcgtccgcttcgccgtcctgtggccggacagtccagccacttggagagactacaccaccgcctgcgtgaggagcaggaacgtcgacgacaggagcagcagagctcttccttctcgctccaccaggagatagagtctctgctggaggagacccagacgacgaagggtggcgacgacagctcgagccacgacaccgacttctctgctaaccctgagccggaaggatgggttgctcgacccatcactcacgacgctgctcgcgggtgtcacttccacgatgcgctcgacaccctgctacgtcgggcatttgaccgacatacttggtccgtcgagtatcgctgtgtggtctaccagcacagtcgcggggtctacccggaccgctgggaggcaacttgcttggtgcgctgcccggagaacagtctccagggagcggaggcttgctcagagcactattctatctctgagcgggactcagctgaggcagccatgcaagatgctgcacggcgtgcgctttcgcactactgctcggttttcggtggggcagctgacggtcttgacctgaagtattacccccgccgttcatctggcagcacaggaggcgtgattgtctcacctgtcggtgagggcaatcctaggttgagcagcacagtcaacctagccgccgtgctaaacacggagctggaccatgcattatacgagctgagtagggctcgtgctgagatcgccctgctgcgggctgagcgcgcggagcgtcgtcacctggatggtggttcccccgctcccgttgggactcagcacccgtaccgctcacctcagcgtggacaccagtcttatggcaatcccgactgcaagaccaagatcaacctagaaccatag

SEQ ID NO: 19140 - DNA, 216 bp, Zea mays
  Peptide Sequence Number=SeqID_62515
atgaacttaccaattagcttaatcaagcttgaccctaaatttgctaagtgtaccaccaaaatcttcagtaattgcaatctcgctgacggagagtacatgctcatccctgagcaaggagctgtccacgaggaagaccaggagcaagctcccgagactgccatcgaggatctccccgcagccccagcatttgaaggcaagccccgattttatgtataa

SEQ ID NO: 19141 - DNA, 225 bp, Zea mays
  Peptide Sequence Number=SeqID_62516
atggcccttggtgacgatgcagtgggcagtgacaggaaggacatcagtgatgattttgcttctaaggtatcacattccgttgatgactttaccgctgagataggagagctaaacgttgctttggctagtcatgataagttgcttaggtttgatgctcgagagaggaaagagtttgaatccaaacatgacaagacttggatcgaggaagagaacacatacctttga

SEQ ID NO: 19142 - DNA, 312 bp, Zea mays
  Peptide Sequence Number=SeqID_62517
atggaccacatgggtcttagccacaagagtatcaagggaaggtgggatcagttagacggaaataggatcgcggcctcgcggggcatggctggccgtctccagctgctgggctcgctagtggccgctggccgggcaggcgaggcggacgcgcggctcggcaaggccgggcggcagcaccagagtgacgtgcatggctggggtggctgcggcaatgcagcagccatgggcatggttgggccgcaggggctgcgagcggggctcgctggtggctcgccagagaaggagcgagcaggcagcacagatgctctttag

SEQ ID NO: 19143 - DNA, 474 bp, Zea mays
  Peptide Sequence Number=SeqID_62518
atgtcgcgcatgttcgatgactactatagcaaggactgtggcgtcgtctcggcgttggaggtgacgcagaggaggatcgacaacaatgaccagttcctcatcctcgccaccgtcggggtagcttttgtgccgcccccaccgccgtcgccgaccatctctaccaccaaccccaccgcccaggccaatcccacctcggccaacgccgccaccccgaccacccccgccgccccggctagtcccgcctcggccaccgcctccctggccatctccgccctccacgcctcggccaccaccgtcgggtcgtccccaccgcgcgccgcccgactgtctccaccgctgcccaaccgtctccggccatcctccccggccaaccccacactactccggccaccgctaagaggtcttcctagacgttgcgggtctgcctgcaccgcgatacgtcgccactgcaccgacccgccacagcctcgctag

SEQ ID NO: 19144 - DNA, 453 bp, Zea mays
  Peptide Sequence Number=SeqID_62519
atgttgagtgagcatggtgctcgaagtttccgatgtcaacaaactgagaagtggttgggacatgaagaatctgcacatatctccgacgccaacccattcacgaatgaagtggagattgagctcaacttgcttcgtgcattgacgttggacggggttggtagagaggtatatgacactgacgttgtcacaatagacaagggtgcttcgtgtcagcagactgtgcagctcctggagtatttgacgaagccatgccacctcggcgactacgttggccacaatgcggtacttggcctcggcgctagagcgggagacgatgggctaccgtttcgaagactagaagacaaggttgtcgccaaggaagacggcgaaaccggaagtggaccgacgggtgtcgggacaaccaccccaatattctatgcgctgctacgagatcgtaggttcgagaaccgctaa

SEQ ID NO: 19145 - DNA, 1296 bp, Zea mays
  Peptide Sequence Number=SeqID_62520
atgaccgcgtcaaaaaaggtgcgccacgtcgttcaatttcgtatcctttttctcttcccctttctctctcttgctacaaggaccgggaaaggggatactccgaaagggatccttccctgcgaaggaagcgagccccgagccctcctactgatcagaggttcgaaggctggcccctcggaagggttcgacagccgtcttagagcactcgggctccgcgcccactactggtcaggggttcgaaggctggcccctcgaaagggttcgacagccgcctcaggccactcgggctccgcgcccactactgatcaggggttcgtaggctggcccccgaagggttcgacagccgcctcagaacacggagagcgagggacgactctgggtacgtccgatacatggccgaggctcgggctacgctcccgaggctcgggggctgttctcgcaaacccggctccggccaaactgttgacagcgtcaacataccagcccgagaactcggaacctgactatgcacccaggcaacaaccactggtaacccccatcagcacaaagctgcaaaggcctgatgggcgcaattcaggtcaaggctacgtccactcaatggacacgatctcgcctcgcccgagcccagcctcgggcaaagacagccgacccaggaggattcacgtctcgcccgagggtcccctcaagcgacaggcacactttcgactcgcccgaggcccagctatggcaggcttcacggagaagcaaccttggccagatcgcctcgccagccgaccggatcgcaggagcattcaatgcaaggatcgcctgacaccttatcttgacgcacgctcctcagtcgacaaggccgaagaaaacagcgctgcttgccctgctccgactgctgtgccacctgacagggtgagactgacagcagccaagtccagcctcgggcgccataggaagctccgcctcgcccgaccccagggctcggactcaacctcgacaccggaagacggtctccgcctcgcccgacccagggctcggactcaacctcgacctcggacgacggactccgcctcgccctacctaggtctcggactcagcctcgacctcggacgatggtctccgcctcgcccgaccccagggctcggactcagcctcgacctcggacgacgatctccgtctcgcccgaccctaggactcggactcagcctcgacctcggaggagtcaccgcctcgcccgacctcgggctcggactgaccacgccgcaggaggggctcaagcgctcctccgacggccacgacatcacatga

SEQ ID NO: 19146 - DNA, 147 bp, Zea mays
  Peptide Sequence Number=SeqID_62521
atgagatgcatccacatcatgcaagcggccggtcaccaggtgtgtgtcgtcagtgtcaaatctgatttctcatttcttggaggttcaaattcacgtgctaaggttgatgaagttattagaggcgcggaagaaccaaatcgtctctaa

SEQ ID NO: 19147 - DNA, 144 bp, Zea mays
  Peptide Sequence Number=SeqID_62522
atgctcagctttaaccattatttgttgatcagccttacactatacatgagcccccaccatatgggaacgacaaaaggggacacagttgcgaactgtgagaaacttgccaagtactatgctcatattgtctgggacaatgggtga

SEQ ID NO: 19148 - DNA, 462 bp, Zea mays
  Peptide Sequence Number=SeqID_62523
atgggcaagaaacgcaagcgcgagccaactcctccgtctgaggattttggtgactcggagtattcagaggaggagttctcctctgaatccgaggggtctccggctcccatccctctgcgtgagtcgtctgatgattcggacgactcccaggggctcgcggcggaggtctggacttacatccgggccatcgagcgttccgggctcgcgggctcggatgagtcggaggactcctcggacgaggaggactcgtccgaggaggatggcggcgacggtggcgagggcgacaacgacgacgacgacggaggcggtggcggcgacgacgacggtgactgcggcggcgggggcgacagcagcggcaggggcagcaacagcggcggaggcggcagcagcggcggcaggggcagcggtggcagcggcaggggcggcaacaaggcccagtggctagatgccactagtttttaa

SEQ ID NO: 19149 - DNA, 1239 bp, Zea mays
  Peptide Sequence Number=SeqID_62524
atggatgaaggagctcccctcggtggtctggagtctgaggacaacgccgagccgagccacgggcttcacaccgttttttctagtctatggggccgaggccatcttgcccacagacttagaatacggttccccgaggacgagggcgtacgacgaccaaagcaatcgaaccaaccgagaagactcactggaccagctggaagaggctcgggacatggccttactacacttggcgcggtattagcagcccctacgacgctaccacgcccgaggggttcggtcccgagacctccaagtgggcgacttggtgctttggctgcgacaagacgcccgagggcggcacaagctcacgcctccctgggaagggtcgttcgtcatcgccaaggttctgaagcccgggacatacaagctggccaacaggcaaggcgaggtctacagcaacgcttggaatatccgacagctacgtcgcttctacccttaagatgctttcaagtcgttcgtacaactcgttcacatacaaagtctaaccatcaaggaagggtcagccttgcctcggcaaagctcgaccctccctcgggggctagaaggggtgaaccccctctgcgtcaaaattttcctcggaaaaggtctttctgccagaacgtctttcgtgcttttcgactacttcaaaagtgggatcctgaaaacgacgaagtacacgtacgaacaaccccccacgttggagggcctgcggagcaacagaacgccgatggatggctcgctgacgcccgctctggcagcagcgacaacgacttccgctccgggcggccaaacagcagcagcgatgacctcagggcagacgctgctgcgataaggccctcgcccgcgtccccgcccaaggggcgaggacatgcagaaggccgtagagttggaggtcagtccgcgggtggcgccgactatctcgtcggcggagaaacctcttccggctgcctcggtgggaggtggcaccggaagcagcgccgaagccgctcaggccagagagccagacacgcggcagctgccagcgccacgaacggcgaacgcccttccccccgatcactgagggaaggagcgggccgctgcccgcgcggagaccggccccaactcggcgcactcccctccccagcactaatgatgaacatccttgaagctgagggagaggcagaggccgcagcccggcttgcttctccccaccctggagctggtggtcaccgtcttgggtga

SEQ ID NO: 19150 - DNA, 291 bp, Zea mays
  Peptide Sequence Number=SeqID_62525
atgggggcgaagaactggggaagaagaaaaggaaggagacggggcgagacgaaccgaggaggagctagaggcactagagcggggctctgcgtcaccaaaccgccacaatgcgagcggcggcgtgtgggggaggtggacggcggtgtgggaaggtcggagccgttgccggcgcgaatgaagcctgctgtcgacgaagaggggacgaagaggggagcggagagaggagcagttgcgatcgagggatggaggaggcttgaaggggaggcgacgagacggacggtgatgatttga

SEQ ID NO: 19151 - DNA, 630 bp, Zea mays
  Peptide Sequence Number=SeqID_62526
atgaagatcctgatgtaccagctttgcaacagcgtggccttcgtccacgaccccaaggtgctacaccgggagctcaagttgcacatccttctcaaggaccacaagaccatggtgctcaagatcgttgaatatgttgaggacatttacagattctacaagagcactgagggcacctgccttcctctcagcagctacatgagctcacaggctgaaatcagtgagagaatgagagctatccttatcgactggattatcaaggaagagggaaggcgcctgcgggtgtatgccggacctgacagttctggacaaattagatgttctttgtggacaatgtctgctaagttcttgaaagttctgaggtgtttgcataaacaactcataacaatggacctgccctttgatgttcttgatgaacctagcccattgggtctgcgactaagaaaaggtccatctctgctggaccttattcagatgaagctttctcaggaaaaatctgtcagggaacagtttgatgtgcataacgatgtttctgatacacccatggagaaaaaggttagatctagggctccaacagctggtgaacggctgaaagcttcaaatgttcttgcaaatgttttgagaattggataa

SEQ ID NO: 19152 - DNA, 279 bp, Zea mays
  Peptide Sequence Number=SeqID_62527
atgggcgtcgaacgcgaagctgtacaacaacctgcacgaactcggttcagcatagaccatggcaagcgtctagccatcgtcaagcacatcttgtgctacatcgtcagcacaattgactatgaccttgtataccccaagcgttgcagcaccgacagcatgttgacgtgctacatgttgactgggtacacgaacaacggcttgaggggagacatcgatgagagaagcatcagcggtattttcttcttcctgggagacatgcttgtgtcttggcagtcttag

SEQ ID NO: 19153 - DNA, 528 bp, Zea mays
  Peptide Sequence Number=SeqID_62528
atgaagtcaaggtttggcgacatcgtacaaccaccacaatggacggcaacatctagggctgtccagggagttcgagggtgcatagggaggctcatagtcgggttctctgaggtagagatggacacagactcgcttcatgggccgcgtgaaaggcccctaatgggacatccatgggatgcatcgtgggccttgacaggaggtgggcgcgagttttgtgaggagaaccaatgtgacaccgaaggttccagtgggattgtagcagggagtgagaaatactcgcatgaacgctccgatctatacaaggaagataacctcaattggctatataaggctgagggagagcccctacgaaaaagagaggttttccattttagatacctctcctgcatcatcgaccaaaggggcgccctgcatcttgtgttggacacagggaagagcgccctaggatctcgcaccaccgacctcatgaagaaaggaccctcgccgagacctgagacatcctcggtgacggtcgtggtcaaaccctag

SEQ ID NO: 19154 - DNA, 132 bp, Zea mays
  Peptide Sequence Number=SeqID_62529
atggccgtatgtgccgggcctggccgaggccggtgtcttgcactcaccgggcctggctcaaatctccgtccagcagtagatgcgcaaagcgaggccacaaggcgtgaggccaatgaggagcttaatcattga

SEQ ID NO: 19155 - DNA, 363 bp, Zea mays
  Peptide Sequence Number=SeqID_62530
atggagtcatggaagaaattaccatgggggacacctggaagctgctgggggaaggggggaatgttgcccaggccggtgggaactgtacgcgagacgactgctgccaatgtcagcggaaccggaacggacgggctcgctcggtattttgcggtcgacagccgccacggactaggactagcccacaagttaaaggctattgggccggttttgttctcggatcagcgagagagaggcatgctgtcagctcaaggccggcccggaaagctcaagtggccgcggtccctactctacaaccgaaagagcccaagtgcgttcgacgccagtataaagcataaaactacgtgcgttctgttggctaggtag

SEQ ID NO: 19156 - DNA, 2379 bp, Zea mays
  Peptide Sequence Number=SeqID_62531
atggagaatttatgtaaccatattaaaagtattgaacatataagtaataagcaagtgcttgctccgcttatcaaaggcttaccatcggacagacacactagcaacaagcgagaaccaggaagtggccgtcagtcaggcaccgactacgaggcagtcagagaggagaggaagagctcgatcactgccacctgggaatcccgtccgcacaacacaacgtccggcgcgggtagctccgccgatcatcgatcaccggagaagagaccactcagtttcgtgcctcgcgtcccccgccacgggccccgccgtccgtcggttactgctgccgatgccaagtgtgaaccaagggagcactggaactggaacatcgatatgctctcctctggtcctctcacacagtggaaagcagtagcctatgtggatacccaagcaattaaggggggcaaaagccaaaagccaaaccaaacggaggcgctcgcgttggtgtcgctcatcgacgacgaaaagaagcttggcgactgccagttcgacctctggaagcagtactacgtgtactacctcgctgatgagtccggggtgcacttcgtttggcagcccagccaagagtcatcggtactcgccatatcgtgcgcgttcgacgactactatatcaaggactatgacgtcatcttggcactagaggtgacgcagaggaggaccgacaacaatgaccactcgtcatcgtcgggtagcttttgtgccgcaaacgtgtatgatggtgcatacctaatgattgacaatgtacgagggaacttctaccggcagccagcaacggacacggaggtggtagggggagctgtgaagaaagagccagaagagatcgtggtcgaagtagacggcgacggggacgaggaagccgagaaggtggtcaagaggaggcggaggaggaggaagaagacgacggcctgggatccgcacaagaagcgcgcatgcgtggattgcacgaagaggtgcgcccggatccatggccagcctgcttcgccgtccgcattggcgtcgtcttccagcaacgcgcggccggtcccggcagtgccgtccttcttcaaggtcatgttgggctacttctccgaggacatggatataccacccccttttgccaagacaatctgggacctggcaggctccaacgtctttctcgaagacgcgttcgggctccgctggcgcgtgcggctctgcctgcgcgacggcgtgctgtcattcgggcacggatggaagaacttcgtgctggaccatgccgtcagctgcggcgagttcctggtgttcaggcagatcgccaggtcggtcttcaccgtgcagatgttcgccccatcagccgtcgagaggctgcacctctgtgagaggaacaagaggcagagccggaagaggaagcccaggccgcagagacagagaacaagctctcccagtatccagactgtcaaggcgaccaagaacagagtgaagaacagtaataagaagagacagcgtactgatgatcaccaaaacggtgtacgcccgagaggccataagagcaagacggcagctcaggtctgcgtcgacgactctgacgtccccgatcctgcgtctgaaccgaagtgtccagacacgtcggaaagattgccggaggctgaagtcacagaaccgcaagaaatttctgagccccctgcgggacgacatgagcgtgaagctcagaaggtgttagacggagaggcagaggtagcagacgacagcgcaatgcttgaagagactgaaaccatctacaacgctagacttacggagcaccaggttcctgctgccaatgaaacagagcatggcgagtgcttggcaaatttcgatgctagcatacctcttgctatgatggatctgaatgaagtgagcatagacgatatatttctgtcggctgatacgtacgaatttggaagtgacatgtgtaacccagaaccgttttctgttggtctgaacatggaaggcaccactactggccaaaactcgggattcagttgccttgaggagctggataccccacagaaccacctttcttccatgggagatggccattgttctctggttccagaagcaggaccatgtaccgaaaacaacaaagagaaggctgatgcactagaaacgggagcatcgtatttctgtgactcctcgtttcatgatatagacatcaacgcgttgcccgctaaggagccgccgtcgtttggagaggatagcccttctcctcgagctggcgctgaaatgcatcctaatgaatgtggattaagcagctgtagtcaggatagaggcaatagttccctccttatcatcaacaagcaagctgcacataaagaatgtcagtactattttccaaacctttgtttctga

SEQ ID NO: 19157 - DNA, 540 bp, Zea mays
  Peptide Sequence Number=SeqID_62532
atggaggttcgctgccaaaccagcttttgccagaaggaagatggtttccccaagttgctgagagcatgcacagttttcctcggaatcaggagtcagccagagtatgatggtcgtgaattcgtcgagcatggcgcagagaaattcaaagacacctgccaagtcatcgctcgcaaggcattgagggccctgtgtcagatctatgaagaagaagtggccgacacaccgctcagattctttccgccctttcagagagaccgtcccgcttggatggctaggatgcgtgcattggaggagcagctgctgcttgaggacgaccccacagtcgtgtacctcactgcatacctgctcacccttgatacacagtatgatttcttggctcggcaccaccgtcagatgattgcccgagcagaagatgcagagaagctcaaccgtaagctccatgtggatctcaccacagctcaagcccgtgcaactgccttggagagtcgtgaagtaattgctgttgaagccttgaagcaagccaaggatgagcacgtctag

SEQ ID NO: 19158 - DNA, 405 bp, Zea mays
  Peptide Sequence Number=SeqID_62533
atgggccgaatcacacgtgggcctccatgctggacgaggccgcacggtgggatgacctcgtcacaggtcttcgtccgatgtcgtatggagcgaagggtgttcctgcccgttgtcttgtctccgttggaccaacgaccgcggcaaaggcctcgagcgaagggtggcgtcttcgccttcgccccaacaatctctgttggatcaaaggggcataccactttcatatgtggtctcttttcttttgatcttggtagtgactacttatacaagttccctttacgtcctttgtgtaaaggtgaagctttgaagctttttagtgttgagaaacaactgattagctctcaaaatggagattggttttccctgctgctgaaatgcaagagtttgttcattcgctttcttatttaa

SEQ ID NO: 19159 - DNA, 354 bp, Zea mays
  Peptide Sequence Number=SeqID_62534
atggccgccctccctggtgctcgccccagccgagctcgccatgggcctggtcaacgtccctgctttgccttccccaagcagccgcgtggatggccttgctctcgttgtcgttcttacaaatatcgagtcgacttaactctaatcctcaccaaccatgtgatgtatcgtcagacttctatgcgcaatcttgtcggctgtcgcgcccctgctcaccgtcaacccgctcgaacctcgcctcgacgcgcaacaaccatcatagcatggggattcagctgcgtcgtttctttttcggagcgcaaatcgcttgatggtgaagacagtggagttctaggtcggtgctcaccaaatgtttga

SEQ ID NO: 19160 - DNA, 1170 bp, Zea mays
  Peptide Sequence Number=SeqID_62535
atggaggtagttgagttggttccttgcgcccgcaacaagtggggcaattggcatgagttttggttttatgtcacggagggtacagtcgaagaccatcaggggctccccgtgtccgagatgtgctcacatctttactcagcatacccgccttttgaagtggcggaggatgatgcggacgaaggggcccttcggtgtgccaccggcctgagcagcgggcgcgatttggttgaggaatttgtggcgtacggggtatggcctttggcgcatggctgggcgttgggcgaagtttgccctcgccagatgccttcccatggtgggaagctggtgcgaagtcctgccttcgcgcttgatctacatagccgcgatccggccgcctttgtgcgtgaggcggaggatggggcggtgcggatcgttggtcggtacgtgccgaggacagagggccagcgtagctgggatattcgcgggtcgaatgaccgcttgaacagggtttttgagttgaatcgtctgccatatggcggttatcccggccaagacgatgtggatcgtcgcgggaagaaaccggtggtagagtctggagacgaccccgcgccggcggccgccccgtcctctaagaagaggaaactaggtactgctatgggaggacttggggattccgatggttttgctagagaattgatgaggacatgcgcggccctggggggaaggatgtcttcgcccgagctccgggagtcttcagcgcggatgctgagggttaccgggggttggtggcctaagaatgttcctatcccccgcgcggccggcgaagacttttttacatctcgcatggttcgtgaatggaaagtgtttccttacgggcggaatattgctgctgttgtgtcggcagtgatggacaaggatcgccagggagctgcacagaagcgccagcacgggtcggacgaaggccaacttgttgttgttccgcctgccgcggcgaccacgacggctgccgtggtgccaagggcgaagggcggtgcccttagtgccggcggcgagatgccggcactcattgccatcagggacgaggcgggcgctgtgtcccgccggctgaaggagatgaaggaggcactgagtcaggtggctgacttcgcagaccgcgcggcgtcgggggccctgacggcagttgtacgttga

SEQ ID NO: 19161 - DNA, 417 bp, Zea mays
  Peptide Sequence Number=SeqID_62536
atgggggacgtgtctccgaaaagtccaaatatgaagtttcgcagggtccttgcggatacgctcgcccgccttgctattgcatttgttgtcccgccatttcccatagaaagcggcttcactgtcgagcgtaggagaccattcatcggcgaggttcatagaaggagggggcctgaaaaggtccagttccccaccaagggcttcacccgctactccagaaggtccggctcccattccgacgggatccgcagcaagttggtcttgcaggtggtggatgttagttctcaactcgtttattcgctgaccatcctcgacccatatattgttcctgtgacggagctccgttcgaagctgttctacttgaacttccagatctccgataggatcattgctaccactactactgtcctcatgccttga

SEQ ID NO: 19162 - DNA, 111 bp, Zea mays
  Peptide Sequence Number=SeqID_62537
atggccatgatgggttcaacatcggaaaagatgtacctctgccaggaccttgtcgatgtaggcttgctgatcgaggaccctttaactggtcacatgcctcgtcatcggtaa

SEQ ID NO: 19163 - DNA, 189 bp, Zea mays
  Peptide Sequence Number=SeqID_62538
atggcggcttcggtttcaagacgtgcttgctccatgtctgaggagaagaagatgaccaaggaaaaactgactgagaagcagaagcttactgaggagaagaagctatatgaagagaagaaagttgcggatccttttatcgctgggttttatgagtccatggcaaagatgaatatagagaaaattacttag

SEQ ID NO: 19164 - DNA, 2487 bp, Zea mays
  Peptide Sequence Number=SeqID_62539
atggaggtagttgagttggttccttgcgcccgcaacaagtggggcaattggcatgagttttggttttacgtcacggagggtacagtcgaagaccatcaggggctccccgtgtccgagatgtgctcacatctttactcagcatacccgccttttgaagtggcggaggatgatgcagacgaaggggcccttcgatgtgccgccgacctgagcagcgggcgcgatttggttgaggaatttgtggcgtacggggtatggcctttggcgcatggctgggcgttgggcgaagtgtgccctcgccagatgccttcccatggtgggaagctggtgcgaagtcctgccttcgcgcttgatctacatagccgcgatccggccgcctttgtgcgtgaggcggaggatggggcgatgcggatcgttggtcggtacgtgccgaggacagagggccagcgtagctgggatattcgcgggtcgaatgaccgcttgaacagggtttttgagttgaatcgtctgccatatggcggttatcccggccaagacgatgtggatcgtcgcgggaagaaaccggtggtagagtctggagacgaccccgcgccggcggccgccccgtcctctaagaagaggaaactaggtactgctatgggaggacttggggtttccgatggttttgctagagaattgatgaggacatgtgcggccccggggggaaggatgccgaagaggcagcggggggctgcgaaggctgctgcccccggcgggggcaagccgccgctggcggcgaagtcggccgtccctgcatccgacaaggcgccgaaggctgcggctgccgccggtggttccaagtctgcgaaggctgcaccggcgtccagcggggtgccggaggccgcgaaggcggcccgagagttgccgccgtcgggcaagcgcgtcgccgacttcgccaccgacattagcgtggacgattatcttgttgggtcggacgaaggccaacttgttgttgttccgcctgccgcggcgaccacgacggctgccgtggtgccaagggcgaagggtggtgcccttagtgccggcggcgagatgccggcactcattgccgtcagggacgaggcgggtgctgcggctgacttcgcagaccgcgcggtgtcgggggccctgacggcagttgtgtctgccgaagtcgagagacttcggacgcaacatgctgacgccgtccgggagaagtcggccgccgatagtaagtgccgcaagctggcggacaaggtggccgcgctggagggggagaagactgacctccggcgccaactggcggaggagaggaaggaggccaatgaggccctcgtcaaggcgcaggctgcgcaggcggaggccaatttggcacgggtggagggcagtcttgccagggagcgcgccgagcagttggaggagcggctccgcgctctgcagagccgtgtggagagggccgaggccgcgacgagcacggaggctgagcggactcgcaaacagcttatggattcataccatgaactgggcgcgcggaccgctgacttcgaagtgccggaccgagagcccggacttcgctacctggagtgggtgcaggaggagttgcaggcgctccccactatcgtggaggggtttatgtcttatgcttccctggtcacctgcgagggggcgatgaacaagctctctcgcgaagggtgccggcactatgaggtcttcgaccaagctgatgaggatttcgagcgtgatatctacaaggttgaggaccctatagtgaaggaatccgccggagccctctacgaccagatgtggggcccctacggtcgagaggtggtcagggagcgggccgagacagcgaggggtcaggcagcgcgtggcgagagggtggatgacttcggggctttgaacagagtgctgtctgacccggagccgaacccgacggaggctgtgcccgaggccgccctgcagccgcctccggaaaccgccgaaggcgctcctgatgcccccgcagccaccgcagccggcggaggcccgtcgccaactgccgcgcggagggctgaggatcctgtgaaggtggcggcggagtcgacagcggaggagcctgcgacggctgggtcttcgcaggttcaagattttgggcctgcgcacgcaactgctactactaattttttggcggcttcgaccgtggatgatggtaataaatcggatgggtctccatctaagttgtctgattttggtgactctgggagctcggttgagtggactgaggagtcgtcggatgaggacttggactactttgcggccttggatgtggcagcggcggaggcttcgccgcacgctgcggatgctgaagttgtgcctggtccgagtactgggcgtaggcggcgaagggcggttgcgaagcgtagagtgagtggggcggacagtggtgaggagcttaggataatgttatttaactatatggagatgggaattattccgaaggttgagccgatgtag

SEQ ID NO: 19165 - DNA, 363 bp, Zea mays
  Peptide Sequence Number=SeqID_62540
atggacaacggctggatcgatgatgatctcatgttcgagctttttgctgagcaccagacgtgcaacacaagccgacttcacagtcttctttcccaaatccacacagacattgaccaaggcttaggctgcagatttaactccgttgctccatgcatgatgcgtggacggacggcgagcagggcaggcaggacgccgagcgtcgcaggcgagcaggaaaaggactcggcgcgggagctcgacgcgttgtggcgagcagaggggcacggccgcacgcgcagcagggagaagcttgaaggcggcgaccatggcgagcacagggagggagcaggcacggctgggctaggcgacttcatgggcggatag

SEQ ID NO: 19166 - DNA, 303 bp, Zea mays
  Peptide Sequence Number=SeqID_62541
atggagagacctcgactagggcgagcaccagggagggcggccatggcaggatttctgcagaagggaagatggaggggagatggctggcgtggagagcttgggcaccagcaagataaggagcccaacgcgatacagttcagcttctatcgcctagcccttgaggacccaggtccagtgctagatccagtgtcatatatcagggctgaggacgaagctatcagacagttcaagactcagggtgccattgcagattcttcttctgatgatcccgccaccgcttcctatgccacctcgctcacatga

SEQ ID NO: 19167 - DNA, 141 bp, Zea mays
  Peptide Sequence Number=SeqID_62542
atggccatgatgggttcaacatcggaaaagatgtacctctgccaggtgaggaagcggcaaatttttgcttcttttgttcaaaggtggtgcccaaagaagagaatcaagactgaagactcgggaggaagtgtcctccactaa

SEQ ID NO: 19168 - DNA, 282 bp, Zea mays
  Peptide Sequence Number=SeqID_62543
atggccggtgaatttgagagagacgcgcggcggccggagaaagaagaaggttactggcgctcgaggttagtggctttcaccgtggcagccctccagcgatcaccgggcatgcacgatgtgattcacagcgacatggtcaagtgctttagtacgtggcgcacgacgggcagacagacaagacttggcgctaccatatctcctcaaccagaccacatctactcttggaactcacatgaactaggtagctctaggtgcagggaagagatctcccacaggcggtag

SEQ ID NO: 19169 - DNA, 210 bp, Zea mays
  Peptide Sequence Number=SeqID_62544
atggagcaagcacgtcttgaaaccgaagctcgaaaatcaagcaagagctgtcacagggaccttcggcctcagaatgaagttgtacacgatatgaaaagcatggtatggaagaaggttgaaccagttccgaagctacgcatagagaagcttcggcttagcggtggaaaatggaaccgacttaaagaggaaaaactatctagtcctcgatag

SEQ ID NO: 19170 - DNA, 141 bp, Zea mays
  Peptide Sequence Number=SeqID_62545
atggccatgatgggttcaacatctgaaaagatgtacctctgccaggtgaggaagcggcaaatttttgctgattttgttcaaaggtggtgcccaaagaagagaatcaagactgaagactcgggaggaagtgtcctccactaa

SEQ ID NO: 19171 - DNA, 771 bp, Zea mays
  Peptide Sequence Number=SeqID_62546
atggggcgcaccggaggtgcacccaatgggtgtagcccccgaccttcaaatggattttttaaggataatccattcgaaggtcttccttttgaaagaatttgcatgaagttattcgcattatgctttggaggtcagcattgtgtcatcaaaattttgctgcagaggtcagcatatattttgtctttagcagccgagtttgcaatccgtccatatcttgctaggtatttactgcatgccctgcacggatgtgaccgttttgaaaaatatactgataattcctgggcgtcccccccaatgggtgtgggcaagggacggcttgctgcttctgccatgggcaagagcaacaagcgcaagcgcgaaccgactcctccatcagaggatttcggtgactcggaatactcggaggaggagttctcctccgagtccgaggggtctccggctcccgtctctcccccggcgtcgtctgatgattcagacgactcccaggggattgccgcggaggtctggacgtacatccgggctgtcgagcgatccgggctcgagggctcggatgagtctgagttctcctcggacgaggaggactcggacggcggcgaggacgaagatgacgatgacgacgacggcgacgacgacgatggtggcgacgacgacggtgacggaagcaacggcggcgggggcagcggcggcaagggcggcaccagaggcggcagcagcacgggcagcaccagaggcggcggcggcaagggcagcagcagcaaggccagtggctaa

SEQ ID NO: 19172 - DNA, 432 bp, Zea mays
  Peptide Sequence Number=SeqID_62547
atggtcggactcctccccgagaccaatgccgcggcggagacggacgtcctcctcgacgcctgggacttcaagggccggccggccccgcgcgccaccaccggccgctggggcgccgccgccatgatcctagtggcggagctgaacgagcggctgacgacgctgggcatcgccgtgaacctggtgacgtacctgacgggcaccatgcacctgggcaacgccgagtccgccaacgtcgtcaccaacttcatgggcacctccttcatgctctgcctcctcggcggcttcgtcgccgactccttcctcggccgctacctcaccatcgccatcttcaccgccgtccaggcctcgaagatgctcaaccctgaaaagaaccgcgcacgcgcacccaatgaaagcaaacagtttccaatccagtccatcatcgcccaatga

SEQ ID NO: 19173 - DNA, 756 bp, Zea mays
  Peptide Sequence Number=SeqID_62548
atggaggaaggggctggggtggcgctcggcaggggaggcgggctgcgcatcgcgccagacgacgatttggagaggacctcgtcgggacgagttcggccatggctgcagcacggccgcgcgctgcgagcagggtccgaggtcggccacacgcgcagtggagaagacaaggaggcgaggggaccgaggccaggggaggtagagggagatgggcacagtcgaggccggcctggcggttttctgggtcctgcgagcgtcgcaggggcagttgcgagcgagcggcggcgctgggcaaacgcgcacgcgcgcgctgggctggggcagcggctggggaacgcgcgcgtggcttggggcacgcaggggcgcggctgcctgggcgcgcccgcagcgtgggccggccaggggaggagcaggctgcggcaggaggagagcgagggggaggagctgggccgcggaaagggaagggggaaaggagccggttgggcctacgcgcgggagtggtccgggggtgtctgctcgggccgggaccctgggggagaccctggctgcgatggcccaagcgcggtgctgacgtcttccttcgacgtggagatctttccgcccgtgtcgccgtccgaggccgggccagattccgccgaaggtggaaacaacgccgagggatcccgctatcgaagcagtcgaaaaagcgcgaaagacattctggcagaaagactttttcccgaggaaaattttgacgcagagggggttccccccttctag

SEQ ID NO: 19174 - DNA, 1374 bp, Zea mays
  Peptide Sequence Number=SeqID_62549
atggatcctttgttggggatcttcctcgagattcgggctctccccagaagcgtcagaaaacagctggtggggctaaggagcccgaacctcgagtctaggacgaacagaggggcgcgagccctccaccgccaccatcttcagatcagataccaccaccgccgcctatgtcaggccgaccgccgtcaccgccgaggcagcggcaacaacagcagcaggggcggcagcagcagcaacaacagcaacgtgtgcctcgcttccaaggccactggaaggttcacggtcccaagatttgcctgtcaccatcgaggcaacactttcgggttcccaagttccagctctgtcccccagccaactcgagaagcggcggtgccgccatcagctgttgcagaccctctaacggcgataccgccggatgcaccaccggaggtaggcacggggggcgcgtccagctctgtcccccagccaactctagagggtctggaggttattcttgggcgtccactccggtctggtgccgagcctggagcgatacagactcctctacctcaggtgctgattcgcgctcaccaggccctccaggaaaccgaggcggctatccgacaagagtggaaggggctcgagaccgagcaccagcgccttggcgactggtgctcccaactggagaggcacactaaggcagcatcctgccaattcacctcggagcgagccgagcttgagcaggagcgtgaggacttcaaggaggacattcggaaggtgtctgaccgagaggaggaggtgacccggaaggaaagaagcttggccaggaataaaaaacacctggaccaaaaggaggaggccgtcacagcactccatgataggctgaaagcttataatgcagtgctggagaaacagcgggacaagcaagctacggctgaggcgaagctgcagcaggagctctccgacaaggccagtgacattgctcgtgttgagggaaacctcaaggcgagggaagcctccctggcgaaacgaacaactgacctcgcttggcaggaggaagacctcgccttcagggaggagatgtgggcaaggcggaacaagctgctggatgagcttgagctcgaggccgaggagaaagtgaagcgtctggaagggaagttgcgggcgctggaggggcaggttcttggcacccgcttggaggctgaaggcggcagactctgccggtcggccatcgagtacgtcttaacgtgcttccggagccacgatccgactgtctccttggggccggttattgcaggttcggtggccgacactgaagatgctgcctgggagggcgtatatgatgctgtggacgtggtggttgggcgcttccagcgggatcctgttgacgatgagtag

SEQ ID NO: 19175 - DNA, 243 bp, Zea mays
  Peptide Sequence Number=SeqID_62550
atgctgttcttctcctacttcaaggagctcgtggggaaggaggtgacggtggaactcaagaatgacctggcgatccgcgggacgctccactcggtagaccagtacctcaacatcaagctggaaaacacccgcgttgtcgaccaggacaagtatccccacatggtatgcctactgctgtgtctaattgtcatgccagcacagaatgacagaatccatgcccttcagcttaatcctatcggttag

SEQ ID NO: 19176 - DNA, 441 bp, Zea mays
  Peptide Sequence Number=SeqID_62551
atggcgtacccggccgaggcggcgccaaaccctagcacgcgggatccagctcgagggagagagggagggcgagtggagatggcgtacccggccgagacgacggcaaaccctagcacgcgggatccagctcgagggagagctcgggaaaccctagcacgcggcgctgcgcgagcgaatgcgcctgcgagcgagctgccgcgcgtggggagcctggctacggagcgacgcccaaaatggccgtatgagccgggcctggttgagaggtgggttttgcagcaagcgagacaggctccgacccccacacaggtaaccaaacaggtgctgtcagtgcggaactgcttcatccggggctcggtggtgcggtacgtgctgctcccgcaggacggcgtggacgtggacatcctgcacgacgccaccaggagggaggcgcgcggaggctga

SEQ ID NO: 19177 - DNA, 1239 bp, Zea mays
  Peptide Sequence Number=SeqID_62552
atggcgacccccgatgacggcccggccccggccgggcccggggtccgcaagttctggcgttccgcgtcgtggtccgagccgcgggagccgctgccggacgccgcggcggggcccggggcagcgggcgggcggtcccggcgcgtgccgccgccgccgccgctcaccccgcggtcgatgagctccaaggcgcggtcctgcctcccgccgctgcagccgctcgccatcacgcgccgaagcttggacgagtggcccagggccggctccgacgacgtcggcgagtggcccaaccccaccacgcccggcgcgtccaaggcgggcggcgggccctcctccgccaggccaggggaggggctccggctcgacctctcctcgctccgctcgcagggacgcaaggaccagatcgccttctttgacaaggagtgctccaaggtcgccgaccatgtatacctcggcggcgacgccgtcgctaagaaccgcgacatcctcaggaagaacggcatcacccacgttctcaactgcgtgggcttcgtctgcccggagtacttcaagtctgaccttgtctaccgcaccctctggctgcaggacagccccaccgaggacatcaccagcatcctgtacgacgtgtttgattactttgaggatgtcagggagcagggtggccgcgtgtttgtgcattgctgccagggggtgtcgcgctccacgtcgctggtcatcgcctacttgatgtggagggaaggccagagcttcgatgacgccttccagtttgtcaaggctgcccgggggattgcgaacccaaacatgggctttgcttgccagcttctccagtgccagaaacgggtgcatgcgattccgttgtctccaaattcagtgctcaggatgtaccgcatggcgccgcactcccagtatgcccctctgcatttggtgcccaaaatgctcaatgacccatcccctgccgcactggactctagaggcgccttcattgtacacgttctgttgtccatctatgtctgggttgggatgaagtgtgatccggtaatggagaaggatgcaaaagctgctgcgtttcaggtagtgaggtacgagaaggtgcaggggcacatcaaggttgtgagagaaggaggcgaaattgaaagcagcaagagtgttaatgctgttgattggcaacaggtcactggtgattttcttcatcgaaaaggcctcagcgatgctcttcctataaaggataatggatcctattag

SEQ ID NO: 19178 - DNA, 849 bp, Zea mays
  Peptide Sequence Number=SeqID_62553
atggccatggagctccctctcttcctcggggacggcccggacgccgcgctcttctcctccctctggccctccttcctcgacgacctgcagcagcccccgcaagagcagagcgtggcggagctgaagcaggcgctgctggcgacgacgctggagctggaggcggcgagggaggagctgaggcgcaaggagcagagcatcgccaagctggccggcctggtccgcgaggtggccagggagcgcgacgacgcgcgggaccagctgcagagcctccgcctcctggccgcgcaggcggcggcggcggcgccgccgctcgtcacgtccagcgtcaccgactccgacggcagcctcgcctcgtcccccgccgaccccttcttcgaccccgtcacctccgccgaccggcgctgcaagctcagccccgccacgcccccccgcgccgccgcccaagccggtgcagcagcgccactgccagcccggagcctgcggccgcgggtcggcgccggcggcagacgccgtgctcgagacgctcgccagcaagcggccccttccgcagaggggccgcctgctggccgccgtcatggaggcggggcccctgctgcagaatctgctcgtcgccgggcagctaccgcggtggcgcaacccgcccacggttcgcgccccggacacgacgctgccgctaggcgccgccacgctggcctccaccgcctgcatgaagcggccggtggcggcggcggccatgtccgtgctgcccgccgccagctgcccgccggctttcatagccaagcggcagaggctgctgcactgacagcccctggcccactcggcagtgacggcgggatcgaccgccgttga

SEQ ID NO: 19179 - DNA, 462 bp, Zea mays
  Peptide Sequence Number=SeqID_62554
atggaagcagcccacttcgaagtgcagcagcgggcaaaaccaggcacccgcccgatccgattaggcttctgtctcacccatctcgccccgcctccgcggagagatctagcggtggaggcgatgccactggacgacggcgcggaggcggcggacttcgtgctgctggacgagctcctggcggcgctgccgcgggacccctacgagcagctggcctcgacgaagaggagctccccactgacgatgagacggtttatgctgatggagatagctcagtgtcgacatatgaaaggcgggcaagccttagggaattctatgcagcttgagagtagtttgatcgagagcgacctgaaagggaagggccgatgcaaggatatagtgagtaggaggaggatggaggattggaaaaagaactccacgcatgccacacgcaacacctcctacgacagtgtaggaaacgggtga

SEQ ID NO: 19180 - DNA, 162 bp, Zea mays
  Peptide Sequence Number=SeqID_62555
atgaggatcctcctgtggccagcaagaggtggcgctctggcttcctgcgtcggcgctcctcctacaggttgcaaaggtccttggttgggcggtggtgcttctgcctccccgaggttgaagatcaacatcgatagagacttgatcaatatggaacatatttaa

SEQ ID NO: 19181 - DNA, 900 bp, Zea mays
  Peptide Sequence Number=SeqID_62556
atggtcagggccccgaaagaccgaccccttccgcccggcgaccttgacaccatcacggaggccctaggcggcctctgcctcgcggcctcgccccgcagaggctttatttgtgcctccacccatttatttccacggttgtgcctttctctctggcggtgtttatgtctttctctttggctgcacgtgagtgggggtgctgaagtgtataagtggattgactaccttctctcatcagctcaagcttttgggttgaactggagcaccctatcaagaggattcctgaagacctttagggaagtgcttcaattgcccttcgccatcccacagtgcggttgtttgccagtgtcagcgtcctgtgtgtctagtgcatttcctccaacgctccaccgcgatcaaccacatggaagacggcgcgctctgcttatcacggtcatcggagataatcaaatggtcgacatcccagagatttctaatgtgctcgccgcaaggttcaacctagaggttggtgcactcaatctccgtcgagcttcgtcggacgcctacattctcatcctccccaacgagagtatggcgctgcgagtctacaacgggggaaggtcgttcatcacttcaactttgcgcttacaccttcggcggtggacgcgccaatcctgtgtggctcgtggagcttcgcttccaatcctggtcgacattgagcaactgggagtcccagagcacgtctggagcaaagaattagtggagctactccttcatgactcctgcatgatccagaggctgcattcagacacaaaatcctctcctgatttctcttccttcaagcttagtgtctgtctttctaatgtctggatcagctccgctgatggttcctccttcctcaccaccggattccccttctcctag

SEQ ID NO: 19182 - DNA, 2298 bp, Zea mays
  Peptide Sequence Number=SeqID_62557
atgagctccaaggcgcggtcctgcctccagtcgttgcagctgctcgccatcacccgccgcagcctagacgagtggcccaaggctggctctgacaacgtcggcgagtggcccaaccccaccacgctcgacgcatccaaggcgggcggcggaccatcctccgccaggcccggggaggggctccggctcgacctctcctcgctccgctcgcagggacgcaaggaccagatcgccttcttcgacaaggagtgctccaaggtcctctgtggcgacgcggtcgtcaagaaccgcgacatcctgaggaagaacgacatcacccacggagcagggtggccgcgtgtttgtgcattgctgccaggggaggggctccggctcgacctctcctcgctccgctctcagggacgcaaggaccagatcgccttctttgacaaggagtgctccaaggtcgccgaccatgtatacctcggcggcgacgccgtcgccaagaaccgcgacatcctcaggaagaacggcatcacccacgttctcaactgtgtgggcttcgtctgcccggagtacttcaagtctgaccttgtctaccgcaccctctggctgcaggacagccccaccgaggacatcaccagcatcctgtacgacgtgtttgattactttgaggatgtcagggagcagcgtggccgcgtgtttgtgcattgctgccagggggtgtcgcgctccacgtcgctggtcatcgcctacttgatgtggagggaaggccagagcttcgatgacgccttccagtttgtcaaggctgcccgggggattgcgaacccaaacatgggctttgcttgccagcttctccagtgccagaaacgggtgcatgtgattccgttgtctccaaattcagtgctcaggatgtaccgcatggcgccgcactcccagtatgcccctctgcatttggtgcccaaaatgctcaatgacccatcccctgccgcactggactctagaggcgccttcattgtacacgttctgttgtccatctatgtctgggttgggatgaagtgtgatccggtaatggagaaggatgcaaaagctgctgcgtttcaggtagtgaggtacgagaaggtgcaggggcacatcaaggttgtgagagaaggtttggagccacaagagttttgggatgcattttcaagtacgctgcctaattcagatactaatacaaagattagcaaggaccagatcgattcagcatccaagagtaacccaggaagccggataattgagtcttatgacgctgattttgagcttgtctataaggcaatcaccgggggagtggttccagcgttctcaacttctggggctggggacgagacccaccttccagccagagagagtagctggagtttactgaggcacaagttcatctccaggtcgctagctcgtgtttattcatattctgctctaatcagggattttgatccacgggtagaccgtgtacagcacctggctgctgaggcatcgacctcacctcctttcctttctccaagctccttctcatcggattcaagcgccagctcgaagtataattcagattcaccctccttatcacctacaactagctccccgccatcatttggcctctcgcctgcttcatctaatctgcctcaagctcttgtgccatcgtccaggtctcctctttctcaatcatctaatgcaggggcttcaaagccttctggcctggaatcaatacgccatccttccaagacctcttctatagcagaaagaagaggaggcttcacacttctaaagctaccatctctccaaaaggaccttgtattgccaccaagggtaccgtctagtattcgcagaactgacgaggccttggataagagttgtacaaatggtgtcaaaaggccgactggtgattttcgctcagaaaaatgcactgataatagttcaagcttgcattccgaaaccagattaactgagcgtactgacagtaactcagaagcttgcagtaatgtgcaactgttggtttaccagtggcccagcatggaaaagctaactacgtttgcacgcaaggatcttgactcaaactcggttttgatttttgttacatcgaatgccatcagaagagaagcagttaaaatggtgtatgtgtgggtaggaggcgaaattgaaagcagcaagagtgttaatgctgttgattggcaacaggtcactggtgattttcttcatcgaaaaggcctcagcgatgctcttcctataaaggttttcaaggagcatgaaacagagaatcttttggaactactgaattttagttaa

SEQ ID NO: 19183 - DNA, 1032 bp, Zea mays
  Peptide Sequence Number=SeqID_62558
atggccgcggtggatctgaccccaaggacgcccaagaaggcctacggcggcgacggcggcgcctactacgagtggagccccgccgacctgcccatgctcgccgtcgcctccatcggcgccgccaagctctcgctcgccgccggcggcctctccctccccagctactccgactccgccaaggtcgcctacgtcctacaaggcgtcggtacctgcggcctcgtcctccccgaggcgacgaaggagaaggtggtggcggtgaaggagggcgacgcgctggcgctgcccttcggcgcggtgacgtggtggcacaacggccccgccgcgcaggccgacctcacggtgctcttcctcggcgacacctccaagggccacaagcgggggcagttcaccaacttccagctcacggggtccgcgggcatcttcacgggcctgtccaccgagttcgtgtcgcgcgcgtgggatctgccggagcccgacgccgcgaggctggtgtcgagccagccggcctcgggcatcgtcaagctgcccgcctccgccgccgcgctcccggcgccctcgccgcaggaccgcgccggggtggcgctcaactgcctggaggcgccgctggacgtggacatccccggcgggggccgcgtcgtggtgctcaacacggccaacctgccgctggtgcgcgaggtcgggctcggcgccgacctggtcacgtacatcgtgcgcggcagcggccgggtgcaggtggtcgggcccgacgggaggcgcgtgctggagacccgcatcgagggcgggtccctcttcatcgtgccccgcttccatgtcgtgtccaagatcgccgacgcgtccgggatggagtggttctccatcatcaccaccccgaacccggtgttcagccacctggcggggaagacgtcggtgtggaaggccatctcgccggaggtgctgcaggcgtccttcaacaccactccggagatggagaagctgttccgctccaagaggctcgactcggagatctttttcgcgcctcccagctccaactga

SEQ ID NO: 19184 - DNA, 558 bp, Zea mays
  Peptide Sequence Number=SeqID_62559
atggcggaggagcagatcgaagaggcgtccatggccgcggcggcggtcacgccgttccagctccagttcgacaagcccatcccgttccagaatgggaagatgctaagaactacgaaatcccacgatgttgccattgtatctttgaattgggcagaagactctccactgtcaaagtctgacaaggatgagtttttatcctatgaagaccgcaccacacgtttcttttctcctcctgtgatgcctaggataggtggactacgttctggagatactggtcttgcggatgagaacgaagaagctattccagaattttctaatgcttcctgtcagcgttttaacattgtgtgcagtggtggcaaagatggttgtgtttgcttcagcatttttggaatatttcctgttggaaagatagcaaggaagtgcatcacatcaatttgttggagccctgatggtaaaataatagcacttggcacagaagatggtttgattcttctgcatgatgtggagattctcaagacctcactcttccatgataaacttctcatattattttcttga

SEQ ID NO: 19185 - DNA, 87 bp, Zea mays
  Peptide Sequence Number=SeqID_62560
atggcacgaagacgtcgactacctctcagcatggcccagatcgccctggttctggcagaactgggccacgactataccggtgcataa

SEQ ID NO: 19186 - DNA, 549 bp, Zea mays
  Peptide Sequence Number=SeqID_62561
atgcacgtggtcggagacttcttgaagcgccggatcgcgccgctgcagcagaggcgcaggccagggaccgacctgtcctgggaggagctggaggttctggtgaaggggattactggtgagtccatcgtccctgagtctctaatcctccccgagggcatccctgcgctctgcgacgacgtagggttgaggacggtgattttggccatgctgccgaccctcgacgagcgtggcctcgcggcggtgccgggatgtcggaggaggagaggagacgtcggctgcgccgcgccgacggatcgtttgtttcggatcccccctgttgagaccgaggaggccggttcccagaagctccagaggactactggcggggccgaggagaccggctcccagacccagggcgcgcagaggcgcgtcagtcctccgccaccacaaccatcgggtccgccgccaccacaaccaccaccactgtcgggttcgccgccgccaccaccacccgggggcgatctcccccaggggcaccagcagcaacaacaacagcaacaacaacaatag

SEQ ID NO: 19187 - DNA, 741 bp, Zea mays
  Peptide Sequence Number=SeqID_62562
atgctggaggagcagcgggtccatcagaccgaggctgtggagagcctgcaaaggctgcagcgggggctggatgacagggccagcagccttgccctggccgaggagaacctcaaggcgaaggatgcttccctggataagcgggtggcggatctcgcctggcaggagaaagacctcgctttcagggaggaaatgtttgaaaggcgggagaagttgctggccgatcatgagctcgaggcgaaggagcgggcgttggaggagcaggtccgccagctcgaggcggcgcaggcggcacaggcagcatcgggtcctcaggcggtggaggcgatgaagaagacgcttgaagatctccaggcagagcagcgcgccggggttcaacgcatcgccgcatgggccggcgaggcaagcatgacactggtgccactaggggtgagtcccatccctgtgtcgcagccgccgacgtccatctccgacgcgctctcggtgctggactccgccgccgaccgcctccgacgcctggaccagatcctgggctcccgcttggaggccaagagcgacagactctgtcgggcggtagtcgagtacaacttgacgtgcttccggagccacgaccccgccatctccttggagccagtgatcgccggtccggtggccgacactgaagacgctgcccaggagggcattaaggatgctatggagctggtggccgagcacttccagcgggatcctgctgatgacgagtag

SEQ ID NO: 19188 - DNA, 282 bp, Zea mays
  Peptide Sequence Number=SeqID_62563
atgcagagcttacagcgaaaagtaaacgctgattccgccaaaagtaaaggcgaagaagctccaaagtcgttcctaagggaatgcagagcttacagcgaaaagtcaacgctgattccgccaaaagtaaaaggcgaagaagctccaaagtcgttcctaagggaatgcagagctaagccagcttttaggaaggctgcagcagtgccccgagaagctacccaggcacagaagtcaccatgcccagctataacttcgtcgagctcgtcaatttcaccctcaatatga

SEQ ID NO: 19189 - DNA, 366 bp, Zea mays
  Peptide Sequence Number=SeqID_62564
atgacttgcgacgtttttgaaaagcgaacgttcttttcgttaggctttcttttagctttacgtatggtgaatgtgtcactcctgtttatgatattaatgttccaaatgggaagtcttatgttgggtgctggtcgtggtcgaccggaacgggggcatctggcaagcgcttatagtaccggctcaggcagattggatacgggcatagttcctaaagctttaccctgtggtccggactataagttggttacgaagtttgcagatgaagatatgatgctaagctccatggatgctagtctagtgatacccccggtcatcttcctgtggatggatgtccatgttcgctgtactttgatgaataaaggttaa

SEQ ID NO: 19190 - DNA, 330 bp, Zea mays
  Peptide Sequence Number=SeqID_62565
atggctagcgtgctagacgttgtcaaggaaacgataagggctttaactcctacccctgtgatgaaggttgccgaaactgctacggctcaaggtgaaactgaagctgggccctcagcgcccgcagaggcaaagcctgccgcaactgagcagagagctaagcaagaatttccagatactagcgtggctctggagaaggatgtggccgaaaaagctaaatctcctgctcccgaagcaccatccgaagatcttgactttattattcgacatgctttggaaaaaaactatctgaagaagaaattgcagaagccaaacactatgcctgggaactga

SEQ ID NO: 19191 - DNA, 402 bp, Zea mays
  Peptide Sequence Number=SeqID_62566
atgagcaggctggccacggcggggcaccaggggcttgggggttggttcaggcgtgttcagggtgatctggcggactcagccgagggcaccacgccggcgcgggagcaccagagggcgctgcacatgggcgaagaggaggttgttggaaacaatgaaggggaacatgtgtcacaatgtgataatgaggagcatgtgccagatggaagcagaaatattgatgcggaacatcaatctgagttgcaaatgacgcttgttggaaatgttgattctgaaggggtactagatggggatgttagaaagagactggaatttgttgtagatggcataagctctatggaggagaatagggttaaattggctagccttgctgatagaaaaagaggacggccgcctgggtcttga

SEQ ID NO: 19192 - DNA, 525 bp, Zea mays
  Peptide Sequence Number=SeqID_62567
atgcctagtgtggacgataatgatgactttgagcccccaaaaaagtgtaatatcaaaatggataccccaaacaagacgcggagactcaacatcagatgcaacccaggagatgttcttgcgtccattcagataatgaatgaaaggcaacatcaagctatagtcagaaaaggtttctccagcattcttgacatgacgattgatgcaattggatgtcggacacatctttgttggctcatgcagaagctagaccctagagacatgactcttcgtattggtccagataaagaactgaaaatcaccaaggagactatccatctgatattgggtcttccaaattcgggtggtggaaagccactaaatattgatgaagcaaatgtcgcggcaaaccttcggtcctccatgggcattagcaaggatgagtttgtgatttcaaagctacaggacagattgaggctaggcaacgatgatgagctgtcaattcgatatttttatcctcttcaatcggctgcttttcccaatggctag

SEQ ID NO: 19193 - DNA, 834 bp, Zea mays
  Peptide Sequence Number=SeqID_62568
atgggcgattctgacttctgcgcgcgcagaggacgcattaaatgcgcggcagagagccgttggcgcggagacgaccgttgcttcggagtcgcaccggacagtccggtgtacaccggacagtccgctggcgagttcctgagcccgacctcccttggcgcaccggacactgtccggtgtacaccggacagtccggtgaattatagccgagtcgccctggaaattcccgaaggtggcgagtttgagtctgagtcccctggtgcaccggacaggaagcagtacaagctagctgatacatttggagagttgattgacaaggttcttcgggctgagtcatatagttcagacattgaagataacgtgacacaaccttgcaatgctattgtaccagacgttcacaacccgtgcaccatggttctgccgcgcaatcctctccatccgttcctcatcgcacggccaccacaccacagccgctctcgattgcctcccccgcggtgccagagccgcaatccatgcctcccccaccgcgcccttccatccatagcggtcgccgcaatcagcaagtccgcaaggaggaaaatgggcgtttgggaaggctacctcgcgcggtgggggcaacgggacgagagcgagacgggcagcaacggtgagaggaggaagggcaggggcggaccggtggaggctggacaaggagagctcatcggcgacggcgtccgtggcatcctccacggcctcatgggccagtggctccacggtgatggactgggccagccccatggtggccgagatgcagcgcggcgatggcttctcgctgctgatctacgctggaagagctaa

SEQ ID NO: 19194 - DNA, 408 bp, Zea mays
  Peptide Sequence Number=SeqID_62569
atggaggcccgggttgaggttgaagctaccgagcctgcagccgaggagcctgacctcgcggtcgggcagcacggcgaccatgaagcgccctgcggggagcagggggatctgcgccaggatccccgagatggtgagcgactgggtgcggtacgtgaagaaggtttgaggaagatgaggtcgatgcaggagccgagccacagcgcccacgcccggaatgtcatcacgggcagcgacggatcgtccgtctccggcaccaccagcgccacctcctccaccgcgcaccgctcccccttcccctcccctgtccccgcccgctcctccgctgccaccagcgacttccgcgacgccatcgtcccggtcccctcgctcctcccgcccactgaatggaccatccctgctacccgctag

SEQ ID NO: 19195 - DNA, 330 bp, Zea mays
  Peptide Sequence Number=SeqID_62570
atgaaggcctactacaagcagacgctcagcttcgcaggcgccctcctcatcgtcctcaccacacagatgaggatgggaccaccgacgtcggcggtgcacccccagcacgccatggaagacgccactgtcgacatcggcggttcagccacaactgctgattatgaaattgaactgagctgcccgcacgctcaggcgagcggtatggcaaccggcgaggagcacgtggcggcgtcggcgatcgaggatacgtcggagaagaagcaggccagcacaaccgagctgcccgcaccctcaggcgtgacgaagaaggtccctgtttgttcagggtag

SEQ ID NO: 19196 - DNA, 315 bp, Zea mays
  Peptide Sequence Number=SeqID_62571
atggagcatttgagattcaatcacgatcactcatcaccagatcaacggccagggccgtttctcactcgcacgatcctgttcacgctagaacggggctgcggcatcctgcccgtgatggtaggcccaccggcgagtggtggctgctgcgaggctgatgaagctgaggtgcccgatctttcggcgagtagagataattccgatttggcggaagatgacccttgcgatccgactacgacgagcaagcccgaggcgccaatgcaatcgctgaaccaactccctgtggttaccgaccttgctgttgcgagattggcctga

SEQ ID NO: 19197 - DNA, 1086 bp, Zea mays
  Peptide Sequence Number=SeqID_62572
atgtcttcgcgctcccttatgcatcgtgcctttccaccttccaagcccccggatgggggatacccgccgtctttccgccttgtcgttggaggaacgcaactccgtgggagttggtacctttcagccatcgttcggcttcaaggattttcatcagtcagcccggctgcacccctccgccggtggtcacctgagacggtgaccaccagcccctgggtggggagaagcaagccgggctacgatcttggtcccaccctcagcttcaaggatgttcatcatcctcgctggggtggaggccgggctgagccggagctctacctcccgcgcgggttcgtgggtcggcctctccttcggcattcgagggagagggcgctcactggccctgcgggcgggtcggacttcgacaacgcggggctggtcgacggcgggcgtcgtcagcctcagcgcgtcgagctcgtcggcttggctcccggtgccccctcctgccggaaggcggttgccgcgccgtgtgcacgggaggaccgcccaagatatcgcgcgctgtcagggcggcgttcgtgttctggggcggtcctgcctttgcaccggtacggcgcctccacgcggaggtcggagtccctcggctcggtcagccttgttgttcgaggcttctcttgcttagttaaaggaacccctcggccgctcttcgatgagccgaagccaggggtagaggtgtcagcacgaacagaggcagagttggctcgaaaagaaaaccaggtcggccggagcctggccgggtcatccgttagcgggaccgacgccggagttgatctgccgaggccttgggccgggctgatgtcttcgggggacagctggccgaggcctcggggtgaccagccgagccgcctgctcgagccggatttttggagaaaaccccggcggcgatggcccgggcttggtgatgacgtcgtcctttggagtggagaccctcagaccgcgtcgccgttcgaggctaggtcggaccttgccgaaggtgtagccgacgccgagggtgctgctgctcccttcaaccgtcaagatccgagcctgcaggatcggattatcttgtag

SEQ ID NO: 19198 - DNA, 567 bp, Zea mays
  Peptide Sequence Number=SeqID_62573
atgaagggaaacgacgatgctgtcgcacacagcgcgaaggcgaacgacaatgacatggatagtgctggacgtggccgaatccgtgcagaacttcaaatcgacggccaccagatcgacattaggactcgacggcagcgcaacaccaccacgaaacagaggcgaactgacaacgacggtctaggacgggtgcggaggctgacagcagggaactccgtgatgggcagcgaggctcgacgactggggaagagactcagcaagctaaaccaccagggggcacgcgtgcacgggagctccatggcgagggaaagtggcaccgcggccatggcaacggcagtagggagcacggccagagctcctgcgcccgcagcttcccaaacgccaccagtgcgcggccggtccaagtcggccgccgactgcgccaccgcggccaggccgagtggccatggaggagcacgcggcatgggcgagcgcgccagggagcaggaggagcggccgagctgggctacggcgaccatggggatgagcttgaggaagagagggcgagctgctcggctgcttctttcctag

SEQ ID NO: 19199 - DNA, 426 bp, Zea mays
  Peptide Sequence Number=SeqID_62574
atgacttcccacggatcctccgatgacggaaatgcactgacccacactgacggacttgcacgagagggctttccccgcattttgtgggaggtacttcagggggccggatacgcgacaccccctcagtacgcggtgcagcagttcgagaagcaccgagtgcctcgctgtagactggccacccaccccattggcttgttccccgctgagagggaggacgacccaatgtggaaggatcgggtggagcatgccaaggataactgggccatctacccaggacagactgcgcacttgaccgtatggtgcatgaatgcgctgtaccgtctgcaggtgatgcgcggtgaggcgatgtcccatctgatggcactgctggaggcaacaaagattacgttggacaacagagaggagctcgtggttgatttgtcctaa

SEQ ID NO: 19200 - DNA, 234 bp, Zea mays
  Peptide Sequence Number=SeqID_62575
atgtgcgcgctagggttgaatgtgaagacacaagcaaccacaacaaagacgcgaaagcacacaaatcacaatgcagattatgaaagaaagtgcgaggctcaaaagggtgctgggataagatctaacctgaattttatgcggttttgtggactttcaattctcttgcacgggcccgagtcactggcccaggtggaaggggtggcgcctgggctggagaaggtgctgctggtgtag

SEQ ID NO: 19201 - DNA, 567 bp, Zea mays
  Peptide Sequence Number=SeqID_62576
atgacccgcgcccgcgcctataaaaccctcccagtcttcgactgcactcttccgcgcaccctcaaacctcaccggagtccagctcgccgccatttgcctgtgcgcagcgtgtccgcggccgcccaatccctctgtcaccgtagaccggccagtagggccattcccaactccgtccagccctcggagaagactgtgcacacctccgtgaagctccccgagcgaggaatcggagtttgcttcgctggagaggccagcccacgctcgctggagctctcaaccccgccggagtacgtggaccgggtaaaccactccaccatccttcgattccttgtgcacacggtcgctacgttaccccgtgaagctcaccgtgtcctcggattgaaccagttcgccgtggtttggccggataagaaaaatagaaaatactgtaaccttgctgacggagagtacatcctcgtgccggagcaaggagctgctcaggaggtagccccggatccagcacccgagcctgcaccagaggacctgcctgccactgctttggaaggcaagccccggttttatgcataa

SEQ ID NO: 19202 - DNA, 1731 bp, Zea mays
  Peptide Sequence Number=SeqID_62577
atggctgcggacgccgccgctgcggcgatgtccgcgacttccctctgcgacgatctcgagcccgccaccgtgcgcacccgcatccgcgatgtcctggccgcaggtgccgcgcgtgccggggaccgcgtcgtggtcggtgggtgggtccggacgggccgggagcaggggaagggctctttcgccttcctggagctcagcgacgggtcctgcgctgccacgcttcaggccatcgttgacgccgccgtgcacccgctagcgcgcctcaccgccaccggcacctccgtcctcgtcgagggcgtgatcaaggagccgcccgaggggaccaagcagaacgtcgagctgaaggtcagccgcgtgcttgaggtcggcgaggtcgatgccgccgtctacccgctgcccaagggcaaggtcaaactcacgctcgagaagctcagggacgtcgttcatctccgttcgcgcaccaacacgctaaatcataacgattttgaacttaaaattttgtatataattagaattggagcggttgctaggattaggcaccagttagcctatgcatcacacaggttctttgatgagaatggatttctctatgtacatacaccaataataactacgagtgactgtgaaggtgctggtgagatgtttcaagtgacaactttatttagccaggctgagaaaactgagaaggaattgagagagaacccaaaaccttctgattctgaaattgaggcagctaaagttcttgtcaaggaaaaaggtgatgtggtcgcacagcttaaagctgcaaaagccagcaaacaagagatatcaactgctgtcgatgagcttaatagggcaaaggaaattgtttcaaaactggaggagaggttcaagttaaagcctgggattccacgcaaggatgatggttcaatagcttttgaaaatgacttcttcaaacgtcaagcttttttgacagtgtctggacagcttcaggttgagacatatgcatgtgctcttagtagcgtttatacctttggaccaacattccgggcagagaactcacatacgtcacgacatttggcagagttttggatggttgaaccggaaatcgcatttgcaaacttgcaggatgacatgaactgtgcagaaaaatatgtacagtacctttgcaagtggctgcttgaccattgccaggaagatatggagtttatggtgaaaaattatgataagagtgcaattgaacgcctggagcttgtttcgtcaactccttttgtgcggatttcatacacaaaggctgtggagctcttgaaaaatgttaccgacaagaagtttgacaacaaagttgaatggggaattgatttagcctctgagcatgaaaggtatttaacagaggatatatttaagaagccagttattgtctataactatccgaaaggaataaaggcattttatatgagactcaatgatgatgacaagacggtggctgcaatggatgttcttgtgcctaaggttggtgaattgattggtggaagccaaagggaggaacggttagatgttctgaaacagaggatacttgatgctggcctgcctttggaaccctatgaatggtacttggacctccgtcgctttggatctgtaaagcacagtggttttgggttgggttttgaaaggatgattctatttgcaaccggaatggagaacatcagagatgttatacccttcccaaggtacccaggaagggctgatctgtga

SEQ ID NO: 19203 - DNA, 486 bp, Zea mays
  Peptide Sequence Number=SeqID_62578
atggagaggaccaacattgagaaaatcactgatgaaatgctagttaggagaaaaaaaacactcgataaactcaccgatcaacctggaaatctgataccacttgatatagctgaggtgcccgatctttcagcgagtagagataattctgatttggcagaagatgacccttgcgatctgactacgacgagcaagcccgaggcgccaatgcaatcgctgaaccaactcccagtggttaccttgctgatgcgagatcggcctgatcacgaagatcgtttcctgcctgagtcactggcccaggtggaaggggtggcgcctggactggaaaagatggtgcctaggctggagaaggactcccgagtaagcatgctaggtcccttggatggaatccagatccctccgagtaaggtccgggccgctatgaggtcctgggataggggaaaccctggcatgagcaagggtctggtactgacacgtgtccgggtctaa

SEQ ID NO: 19204 - DNA, 924 bp, Zea mays
  Peptide Sequence Number=SeqID_62579
atgggggtgaggacaagaccatccaagaacacgaccgccccctccacggcgtacgacgtcttgtacgaccccccgggcggcgtcggagcagtgcgaccggcggcgcaggggacgccatggatgcggcagacctacgcacggcgcgaccgtcgcccgtacggtggatggacagccgcgtcccacttggcggcgggaggcagcattggaggcgacaccaaaaccatcaaagccaaagagatggagccgcagcacggctcgcttcccaccctaaaaattggggggctcataggatggagccgtaccacagcccgctgtccaccttcacgaggctggttgaagcaggacacctcgggtagaggctgggggccaagcccctccaacagctgcgcgaagagagatgggatcggtagagccaacccgctggggagtttggaaacaagcaacacgaactcttcggcggaaagtttgggtgtgctcgacatgaagttacaaggtcatggtaaactatggcgacacaaagcggaaaccttgaaggcaaaggggcacagagagctcagaggcgaaaggacaccgcaagtgggaaagaagcaagacatggctgctactcgaagggtagacccctttttaaaggcagatttccctgctcgcgccccgaagcatcacgagcaaggtctcccccaatgcgcaccagggttcccatcctatgacatgggggccaggcctcacatgtcatacaagctggcccgaagcacgaagaaggcgaatcgtcgcacaaggagcgtgcaactgccctgcggttatacgcccttccatcttcgccgcaaccagcggtcaagaaggcaaactgccgcacaaggagtgtgcaaccgccccgcggtcgtgcgcccccttggtttctctgcaaaccagtggtccaacctctag

SEQ ID NO: 19205 - DNA, 573 bp, Zea mays
  Peptide Sequence Number=SeqID_62580
atggaccttaaaggaagtcataactgctacaatgataagaagaaagtagaggaaaaggaacagatctcagttgtaattctacagatgaagcataccaataaaaagctaggtcacaccgtgccaggtggcatagttcatcctcactctggcccagtctttgacaagactcctattggaaatgttagtgcctcaggcatcttcctatcaaaaatagaatatgctcacactcttcgaacctacttgtgttctaaggtcatggacatggacagacatatcattgactttggtgaacatcgtggcaattgtcgtgacatacaacaatcttttgctgatggcgcgtgtatcgacaatgtatttatgcaatgcttcattgagtgtctctacgatgatgcgtctaaccatattcctccaatgaatgctcaccagctcatcctagacgtcaatgttgggatcatgcactacgactacaaggatggagctatcaatgcagtcattgatccggataattcagaggacattcgctctcttgtactacattacatgatattccatcacctaaacaaaaatagctag

SEQ ID NO: 19206 - DNA, 219 bp, Zea mays
  Peptide Sequence Number=SeqID_62581
atgacgcaactgcttgaaagaggagttgcaggctgtttccatcttcaaataccagacgaacaccagctgtttgaagttgagatactgttggcagaccaaccatttgtgattccatatccagatccagtttctcatgcatatccagtttgtgacagaaacaaaattgcctcagaaatcatgagagtatgcagaccaacaaacataaacagaaactcatga

SEQ ID NO: 19207 - DNA, 216 bp, Zea mays
  Peptide Sequence Number=SeqID_62582
atgacaaatttacttggcaggatacttgatgctggcctgcctttggaaccctatgaatggtacttggacctccgtcgctttggatctgtaaagcacagtggttttgggttgggttttgaaaggatgattctatttgcaaccggaatggagaacatcagagatgttatacccttcccaagctctaagaaattctatgctcaaataatgggcaagtaa

SEQ ID NO: 19208 - DNA, 333 bp, Zea mays
  Peptide Sequence Number=SeqID_62583
atgacttgcgacgtttttgaaaagcgaacgttcttttcgttaggctttcttttagctttacgtatggtgaatgtgtcactcctgtttatgatattaatgttccaaatgggaagtcttatgttgggtgctggtcgtggtcgaccggaacgggggcatctggcaagcgcttatagtaccggctcaggcagattggatacgggcatagttcctaaagctttaccctgtggtccggactataagttggttacgcatttgcgtaatgaggactctagggagaagcctcgtagtgagaccctggccattcaccttggaagtgaatacgggtctagctaa

SEQ ID NO: 19209 - DNA, 198 bp, Zea mays
  Peptide Sequence Number=SeqID_62584
atgaggctgagcatggacatgaacgaacacgaacacgatgagcaaggaggggaatatggccgttacgggggagtgaagagccggaccgaagatttcgggtggaggaggaaggagcaggacatcccgggatgcgagggcggcgcacaggacggagagcggcgacgaccgacggctgctgagttgccaccaaagagctaa

SEQ ID NO: 19210 - DNA, 234 bp, Zea mays
  Peptide Sequence Number=SeqID_62585
atggggaagcctgtcccatcactcctcatgctcctcctcagccgaggcggggtcccactcgacagtccaacccggtggcaagatggatggccaagtcactccagcaaccatttcctccagagaacctgttctctggaggaaatggttgctggagtgacttggccatccatcttgccaccgggttggactgtcgagtgggaccccgcctcggctgaggaggagcatgaggagtga

SEQ ID NO: 19211 - DNA, 249 bp, Zea mays
  Peptide Sequence Number=SeqID_62586
accagggctcaccgccttggcatacaatgcctcactgaccccgactgccgtcgtgcagtgaccgcacttgtacccaccataaccggaatgggagaccacgtctcaggtcgcgtgagggagccaaacagctgcatgtctagaggttctctggaggaaatggttgctggagtgacttggccatccatcttgccaccgggttggactgtcgagtgggaccccgcctcggctgaggaggagcatgaggagtga

SEQ ID NO: 19212 - DNA, 753 bp, Zea mays
  Peptide Sequence Number=SeqID_62587
atggcccgcgcccgcgcctataaagccctcccaggcttcgactgcactcttccacgcaccctcaaacctcaccggagttcagttcgccgccgtttgcccgtgcgcagcgcgtccgcggccgcccaatccctctgccaccgtagaccggccaatagagccattcccaaccccatccagccctcggagaagactgtgcacacctcagtgaagcttcccaagcgaggaatcgaagcctgcttcgccggagaagccagtccacggtcgccggagctctcaaccccgccggagtacgtggaccgggtaatccactcgaccatttttcgattccttgtgcacacggtcactacgttaccccgtgaagctcaccgtgccattggattgaaccagatcgccgtggtttggccggtacactcgccgccgacgagaacacccgcatgcgcacgtggaccgagcgattccggccatccccgccgtcaagccgcacctcgctgtgaccgccagaacctccccgagccaaccctgcccttcgccggacctagctcgccgccggtaagccgcgccacccttttctttcccgcgggtactgtttacattgggggaaggactgcggactgtaaccttgctgacggagagtacatcctcgtgccggagcaaggagctgctcaggaggtagccccagatccagcacccgagcctgcaccagaggacctgcctgccactgctttggaaggcaagccccggttttatgcataa

SEQ ID NO: 19213 - DNA, 375 bp, Zea mays
  Peptide Sequence Number=SeqID_62588
atgcccacccactatcgccctcgtgcatgcccatggtcgagaagacagaccctcacacctgaccccacactaggcctcgcgcggcccatgtcaagactattggtacccgtccagaccccaatgggtgggtcccggacctccatgtattttgtcaggacccccgcacaagagtcccgtacctcttcgtttgacatccggaccccgacatgtgtaacccaagtctttaggccagcgtgcgcccttggttcccactcttcgctcgagcaggggtctgatgccaccacatggcacgtaggcgtgtggcgaaagccttcagccagaaggaagctcgctgcacgcgttcaatgcgagcgaccgaggcatactctgctatga

SEQ ID NO: 19214 - DNA, 915 bp, Zea mays
  Peptide Sequence Number=SeqID_62589
atggacacgtaccctgagcaaccgcaaatcggcagtaaatcagccgatctgcacatgcgtccacactctgttgtgttctgcctccgcagtccgcacccgcgacaccgccgccgtgattcgcgtgacccccacccccgcgcgtggaaatcctcctgcgccccgccagcccaaccagcccgtaactctgccccatccccgtccaaccccacgccgtcgccgccatccgcgccgccatcaaggggatctccttacaacaacggacaccatcaacggacgagaatctccgccccaccctcgtccccacgccgtcgatggaaggggactcgagtccgccgcggcctcggcctccgcgccgggccacgggtccacctccgccatccgctcgctcttctcccggccgttcgctcgctggagcccgacggatctggcgcgcccgccccggctaggaagccacccttgcacgcctccggaggcggcggcgggtgggacgactgggacgatgatttttggccggacatgaggcggaatcagtcggttggatcattcgccgccacgggggcgcagtcagggaggcagccgccgaggtccaaatcaacacaggacatctacactaggcagcaactggaggcgtcagtggctaataaggatgatttcttcgccaggaggatggcggagaacgagtccaatcctgagggtatcccgccatcccagggcggcaagtacgttgggttcggatccagcccagcgccatcggctaataggaacggcggtgctgctcagggcgatgtcttgcaggtcgtctctcagatcttcaaggtctgccttaggaagtcccctgtggcgaaggatgtggacttgaatgctcttgctaagtacacgcaagggttcaatggagcagatatcagtacatggtaa

SEQ ID NO: 19215 - DNA, 978 bp, Zea mays
  Peptide Sequence Number=SeqID_62590
atggcgttcacctccctggtcacctgcgaggcagcgatgaacgcgctctctcgcgaaggctgccggcactttgaggccctcgaccaggtggatgaagattttgggcgagatatctttgaggtcgaagaccccgtggtgaaggagtccggcggggccctctatgaccggatgtggggttcatacggtcgagaggtggtccgggcgcgggccgaggctgcaagggctcaggcggagcgcggcgagcgggtggacgattttggggcgctgaacagcgcgccgcctgagccggagaccacccgtgcggaggccgccactggagtcgcctcggtgaccgcggaagatgcaccaggcgcccttgtacctgctgcggccggcgaaggcttactcccaagggtggccgaaggcgcgtctgatgcccccgcagctgctgtgccgggcgctgaagatccagcggagacaacggcggaggcggcggcggaggctcccgcagcggcagggccttcgcaggttcaagattttgggcctgcgcacgcaaccgctactactggttttttggcggcttcgaccgcggaaggtggaaatgaatgtggtgggtctgtttctgagttttttgattttactgactctgggagctcggctgaatggaccgaggagtcgtcggaggaggacttggactattttgcggccctggacgaggctgcggcggaggctgcgctacatgctgcggacgcgccaggcgtgcccggtcctagcaccgggcaccgacgacgaagggcggttgcgaagcgtaggattagtgcggaggaaggggctcgtcttcgcgttagtagggttggtcggcaggagctgctgtctttgccggccgtctcgggtgtgggggaaggggagctgcgaagcctttttgctggtgaggagcttaggataatgttatttaattatagagagatggggattattcctaaggttgagccgatgtag

SEQ ID NO: 19216 - DNA, 381 bp, Zea mays
  Peptide Sequence Number=SeqID_62591
atggatcctggcccacatatgttatgcattcggttttgcccccagaacaggatggttcgtacaatccaaaccactcgaatcaacaccaactacatccctccgccacggcaagttcctgtctacccagtggtaatcgaggaaatttctgtggatctccctcgcattcgtgtggagaacggagtcattctggaggacatctcggaggagtttctgcctacgcacaccccgttggcagactcactagccttcgcagctggatcgtcaacttcagcaccgcctgcaccagcagtcccagcccttgctcccggaggcaacgacccagacgactctggtgacgatgatgaagacgaagaagaagaagaagaagaagaagaagaataa

SEQ ID NO: 19217 - DNA, 705 bp, Zea mays
  Peptide Sequence Number=SeqID_62592
atgttcatcatccgggctggggaggagggcacgccgagttgggtcccgcctccgcgtgggcagcggcccgctccttcccttagtgttcggggggagaagggcgttcgccgtccgtggcactgtcagctgccgtgtgtctggctccctagcctgagcggcgctggtgctgcttctggtgccgcctcctaccgctggggcagagcgtggctgcccgtccgccgcgcgggtgtcggttgcgacgtgcgcgggccggccaggtccaggtccttctcgtgccgttggctgcaccgggaggtcgcacaacacagcgtacgccacgagggtggtgttcgtgttctgggacagtcccgtccttgctcttgtggcgaggaagggagtgaggacctgccggtgcgcactggggcagccactgttcgccggtgcggtgttggtgggcaggtggtcgctgtcgtcggtgctgaggtggtggtcgccataggtgaggcttcccctgccgaagcggttgcctccgccgacgagaccgtcagtgccacctacgctccggacctccggctctttggctttaatggctggttctcatccctcccgcccgaggcggaggtcgttgtcactgctggtgcagtggtcgccggtgagccgcccggagtttgttatcccgcatgccttctggtgtggaggttgttctttgtggctgctgaggcctga

SEQ ID NO: 19218 - DNA, 501 bp, Zea mays
  Peptide Sequence Number=SeqID_62593
atggccttgttcagccaaagccagctctgtctgggtgcaccggactgtccggtgcgccatactggctcaggcgaacttgctgctctcgggaagaaattaacggcgtacggctataattcaccggactgtccgggtccctggtattttcttcttgcgttctttacaaacaggtccttgggttactatttcactgaatccctgagaatgcagaaaaccccctggggtaaccctaaatcaatctcgcggtccttcccctattggaacagtacccgcggtggaggaaagggcggaggggcttaccggcggtgggatagctccgatgaggcgtccagggaggtcggggaggttacggcggtcacgtcgaggtacgggtcggcgtcggaggtggtcgaagtcggccggtccacgtgcgtaggcgggggagttcgtcggcggcgagtgctccggcctgctcatggcaagataattcaattggttggctcgggaggcttgaccaagtga

SEQ ID NO: 19219 - DNA, 819 bp, Zea mays
  Peptide Sequence Number=SeqID_62594
atggcgcttccttttgacgtggctggcctgcgccctaggtcgggcgacgtggaggctcctccgaagccgaggtcgagtctgtcttccatggccgaggccgagcccgagcccctgggtcgggcgaggcggaggtcgttcggcagaggccagggcggagtccgagccctggggtcgggcgaagcggacctgagtccgagccctgggtcgggcggagcggagttcgccgtcttccggggcttagcccgagtccgagccctgggtcgggcggagcggagttcgccgtcttccggggcttatcccgagtccgagccctgggtcgggcggagtggagttcgccgtcttccggggcttagcccgagtccgagccctgggtcgggcggagcggagtttcatatggcgcctttggcagggcccgactgcctatcagtctcattctgtcaagtggcactgcagtcggagtggcgcaggcggcgctgtccttctgtcagaccggtcattggagcggcgaagcctctgcagctttatgctgatgggggttacgagctgagaattaggcgtcttgaggggagcagggcagtggcggtctcggcgtcggggtggacggcgacgagcgcggccgactcgacgaactctagcgagcagggcgtggacggcgaggctccggcggaaggcgaggttcctggttgctcagacaatgatactgatttcctccctactggttgttctgacggtactactgctgctactgctgagaaaactgtgtctggtattgctggtgctggttctggcgatgatgctggtgctggtgaccttggttga

SEQ ID NO: 19220 - DNA, 294 bp, Zea mays
  Peptide Sequence Number=SeqID_62595
atggcgggggcgcgactccggtgtggtccggttggcaaggctcggcggattcggctgggtacggcgcggcgaacagcgagcaagacgcacgacacagtcgcggcgagagataggggaagaggagaaaagatggccggggagaagaagagatggccggctattaatggctttaacgtcggcgacgatttccttcatgaacggagagaagaattggggagtgagaagaggaaacgggcgttcatttcggtgtttccatattgcagggaggcagagcagcacgggcgcggacgctga

SEQ ID NO: 19221 - DNA, 180 bp, Zea mays
  Peptide Sequence Number=SeqID_62596
atggagggtgagtcacggcctaagatcaggccgaaaggcgtagtcgatggacaacagcttaggtggaaggcgaagaaggcccccttccggggggtcatgccatcagtgatataccactctggaagagctcggattctaaccttgtgtcagaccctcgggccaagggacagtctcaggtag

SEQ ID NO: 19222 - DNA, 129 bp, Zea mays
  Peptide Sequence Number=SeqID_62597
atggccgaagctctagtggcaatggcgggcgagaaggagctcgccggagctaaggagcggtgtttggccggcggtggattcgagttagggatcaaggtgaacacgcttgatctttggctcaaggtctga

SEQ ID NO: 19223 - DNA, 99 bp, Zea mays
  Peptide Sequence Number=SeqID_62598
atgacgaagataagaacaatattgaattacaaaggtaccttcggcttagaagacaagaaggtacaagtgtggtgcaaaagcgagtatcaatcagcgtga

SEQ ID NO: 19224 - DNA, 771 bp, Zea mays
  Peptide Sequence Number=SeqID_62599
atggcgggtatatttctaaaaatcgcagggtctcttctgcaaaacggcccggccgaaggggtacggtttactctcggccgtccgatcaaatatcgaatgtcaggattagatcttggctttatcgaaccgatcaacggtcacagtccatcgtgcccactcgccatcccaagctccacggcggtggcagccgcgccgcccaacacggcatggcacgccgacgaggagaagcatcagccaccccagtgccccaatccatacgagagcggcagcaagtccgagtggaggaggagaacgatagacgaagcggacccacatatgggctgcgcggtggtgttggtgggccgagacaaaggggttttggcccaggcgcagagcacgctcgcgcgcgtccccgcatgccccacgccgcgcccgagccaaacccgcgccgtggcccgcgcccgagcttataaagccctcctaggcttcgactacacccttccgcgcaccctccacacctcaccggagttagctcgtcgccgtttgcccgtgcgcagcgagtccacggccgcccaacccctctgccaccatagaccggccagcagagccatccccaatcccgtcctgccctcggagaagcttgtgcacacctccgtgaggctccccgagcaaggaatcggagtttccttcgccggagaagccagtccacgctcgccggagctctcgaccccgccggagtacgtggaccggtcgcagcgtgaccccgtgatgctcactgtgcccttggattga

SEQ ID NO: 19225 - DNA, 711 bp, Zea mays
  Peptide Sequence Number=SeqID_62600
atggtaaagaatgtttctagggcagcttggaacactgtgtatgagaaaggtctggttgatgtgctccttgaatataaggacaacccaaagttcaaaagtcaaaatggttggactgttgagggatggaacaatatcacaaacaagttcaatgagagaaggtatttttactcatcttctctctttttaggtagtgtggctacaggagatttgaatttcacatccactcagcaaatgccaccaccttctttcattcctgttcgtcctcttgctgcccctcctagtggccctcttgctgcccctcctggtggccctcttgctacagcttccgcttctgctactactcattcgaacaggagtacctctaaacaaagccactctcccttgcacccccacacaaacccattctccatggaatggcaagaaatatcaattgaagctcaatcaaaacatgtagaaggtggaaatgggagaaaacgcaagcaaagccaaattggagcagccattgaaagttttgtggattttaagaggagcgccacatccaaaacgcttgaaggtattgaagaagtgtctatggaaaagtgtctagacaagttggatagaattgatgggttcactgatgaggatagatcatatgcaatggaggtctttgaatctgcgataaatagagaggtgtttatgaagtcaaaaaaccacaatgctagattactttag

SEQ ID NO: 19226 - DNA, 534 bp, Zea mays
  Peptide Sequence Number=SeqID_62601
atggcggagaaggaggcggcggctacgtggggcggcggcgacaagctcattctgcgcggccttcagttccatggcttccacggtgtcctgcaggaggagaagacgttgggacagaagttcgtggttgacatcgacgcctggatggacctcgccgctgccggcgagtctgactgcattgctgacaccgtcagctacatggctacaccgatatctacagacatcaaaaccttggaacgacagttgatgcaatccatggagacatgtactgctaagaagaagaaaattattttgtcccaaatggagatggagaggattcaaggatcagatgagttctatcttgaagatataaaaaacttagaagtaggagtccatgcactggaagagctttccaaacagctgtttcttgagatatatgaacttcgtcaaactaaggattccggctctcatcaagtgactcctccccctcacaatgactttgcggacaaatgtctcaattatagtggtggagctacgaacaacaatccgatgtcctga

SEQ ID NO: 19227 - DNA, 348 bp, Zea mays
  Peptide Sequence Number=SeqID_62602
atgtcgatggctggcatggatcccccaattgggacctcctctgttgctgcgacgccgcctgatgctggcgccgatgccgccggaccccggctggggcatgagaagccactggcgctgtctaggctgcagctggaggcagaccgccggtaccactcccagcagattcctactgctgagagccggacccatcgatcacccctagatggtggtggtggcggcgggaccgatggtggtggtggtggcggcgggcccgatggtggtggtggcggccgaaccacaggactgacacgcctctgcgcgccctgggcctgggagccggcctcctcagccccaccagcagtcctctga

SEQ ID NO: 19228 - DNA, 450 bp, Zea mays
  Peptide Sequence Number=SeqID_62603
atggaggtggtgttcgggcgacggctccggtcaggtgctgaggaagaagctgcgccaatccccctccccctcatgttgtcccgtgcccaccaggtccttagtgacaatggggtagcaattttgcgggagtgggaggcgcttgaggccgagcacccgcgcctcagcgactggcacacccagctggaggagcgtaccaggacggcgtcccgccaattcatctccgagcggtcccaacttgagtgggaccgtaaggagtacaataaggacctccataaggtgtatgccagggagctggaggcacaccggagggagaagaaggtggctaggagggaggaggccgtgtctcagctggaggccctcgcaacagagttccgggccaagctgagtgccctggaccaaaccctggaagagcagctggtcgagcaaaccaaggctgtggagaggctgtaa

SEQ ID NO: 19229 - DNA, 750 bp, Zea mays
  Peptide Sequence Number=SeqID_62604
atgacttctcacggatcctcggacgaagggaatgcacagtcccacacggacggacttgcacgagagggtttcccccgtatcttgtgggaggtacttcagggagctggttacacgacgcctccccaggctgaggatactatcgaggtgattgcccttcacggactgaccaccttctgtggattccaccccttggagctgtccactcaccccattggtttattccccgcggagaaggaggacgacccaatgtggaaggaccgagtggagcatgccaaggatatatgggctatctacccaggtcagactgctcacttaacggtgcggtgcatgaatgccatgtatcgtttgcaagtgatgcgaggagaggcaatgtcccatctgatggcattgttggaggctaccaagatcaccttggataacagaaaggaacttgtggtagacttgtccacggagatggtggaaaaggacctacaagtggaacaaatgtcaaatgagatccaagagcttgaggagttagtgggaaccagggagaacaccatcgaggttctcggggatcagctaatcaacactcagcagcagcttgtggaggctaaccagcatctggatatgcaccaccaggagatccaggacatggaggacaacgaggatgtcgacatcgagggaggagaggagcctgcctccagcttggacactgctggctcaggaagaccaccttcccccgagtcgagcattgcctcgtttgctcactag

SEQ ID NO: 19230 - DNA, 162 bp, Zea mays
  Peptide Sequence Number=SeqID_62605
atggggacagttgatatgtgtgaggatggagtgcctcgccacgtcgtatgtttaggttctctggaggacatggttgctggagtgacttggccgtccatcttgccaccgggctggacagtcgagtgggaccctacctcagctgaagaggagcatgaggagtga

SEQ ID NO: 19231 - DNA, 381 bp, Zea mays
  Peptide Sequence Number=SeqID_62606
atgttctggggggaggatcagggactcagggatgaaggtttccccggtaatccgtcccaccaggaccaccagctggtcccaggacaggaagtagtaggccccgatgtggtccttggtcttcccagacttgaccaacacaaagaagtggtgaaagagggaagtgcagggagccacccctacgaacatctcgcagaggtggatgaagatggccgcctggaggacggagtggggcgtgagatgctgaagctgaagcccaaactcctccagcaacaacaagaagaagggcgagattggcagcgccaacccgcaggagatgtaggaggtgaacaacacaaactccccaacgtggggagcggcaccagcgaggattcttccggctag

SEQ ID NO: 19232 - DNA, 516 bp, Zea mays
  Peptide Sequence Number=SeqID_62607
atggcttactggattgctcggtccaggcgcggcgacgggcgaccgaagtccggcgaggtcgatctcgggcctccggtgaagttctgctgggtttgtgagcttgggaagcttcacggtctattggcggagctaaccgagtggctggcgcagcctggaagtgaccgggggaggctggccacggtggccgaggctcggaaggcttggcgggcggtggtgctccgtactcggggcgaagttcggcgatctttggctcgggcaggacttgtgagcatgcggggaggtatgtccgaggctcgaggctgctttataggcacggcgcggtgcacgagcgatcgtggactggcgagcgcgcgcgggcgtgcactggggagcacgggtgcgcgaacgggcatgaaccgggggtgtcagccacggtcgaacacgtggaaccgttgcttctgcccgagtcctaacgccgattgggcacaaatcttcgtgaatttgggcaagatcgctgtgaaggatttgttcccctaa

SEQ ID NO: 19233 - DNA, 618 bp, Zea mays
  Peptide Sequence Number=SeqID_62608
atggtgggtacaagtgcggtcactgcacggcggcagccggggtcagtggagcattatacagctagtgcttttggcaaaccaaacccctcagctaaacagctgcatagtctagaggtacgcttcaggatatggttgatgatgaattcacccacccccgccagtggaggagacactcgtttcagctctgacttcctttctcatgatggttttccttccatcttgtgggaagtgcttaactccaccggttaccccacgccccctttgtacacggtgctgttgtatgaggagcatcaggtacctcattgccgagtctggctgaccttggaggctcatccccttcagccaggttggcgttctcttgactctgagacaattggattcaggacggacgacaccactgaagtggtagccatgaagactctgacgactttctgtggctaccatcccctggagatggtgatgcaccccttgggacttttccctgctgagaaaaaggatgacccaatgtggtgtaaccgtgtgagccacgtcaaagatgtgtgggcaatgtatcctgacttggttgggagggtcactgttcagtgcatgagtgcactgtaccgcctccaggccctgtag

SEQ ID NO: 19234 - DNA, 501 bp, Zea mays
  Peptide Sequence Number=SeqID_62609
atgaccttggagcctcatcccttgcagccgggctggcgttcattggactccgagtctttcggtttcagggccgaggatactattgagtccactgctctgcatgtgctgacgacctactgcggctttcaccccttggagctatcaacccatcccattggcttgctcctcgctgagaaggaggatgacccaatgtggaaggatcgggttgagcatgccacggatgtgtgggctctctaccctggatataccgctcaactgatggttcggtgcatgaatgcactgtatcgtatgcaggcattacgaggtgaggcaatgtcacagctgatgggtctagtggagtctaccaagatcaccctggataacatggaggaccttgtggtcgacttgtcgactgagctggtggaaaaggacctccaggtggaacagatggccactcaaattcaagagcttgaagatcaggtggacgccagggaaaacaccatcgaggttctggaagattag

SEQ ID NO: 19235 - DNA, 495 bp, Zea mays
  Peptide Sequence Number=SeqID_62610
atgaaggccaagtcacaccagcaaccaatcatcctaaggagtacctgcaaaaatggtgccacaagcaaggctgagtatactaatactcagctagacttactcggtcagcatggatcaagcagtctcattagctgtgagaagcagacgattcgaatcgagtttttaaaccttgcaaggtgccaaggttcacacttagccaataaaaagaccaagtatggggttcaacaaagagagcaagggacaaccgaaggcacctctagactagggcaccagactgtccggtgcaccagagggctccaactcaaactcgccaccttcaggaatttccaggggcactccgctataattcaccagactgtctggtgtacaccagacagtgtccggtgctccaaggaagagcggcctcagaaactcgccagcttcgggaaactgcaacggctgcttcgctataattcacaggacatgtccggtgtacaccggactgtccaggtgtaa

SEQ ID NO: 19236 - DNA, 258 bp, Zea mays
  Peptide Sequence Number=SeqID_62611
atggagagcagagacatggcgcagagcaccagggacagaggagcagggagaagcgacggccgatgggaggagcttcggcgcgccggggaagaaaggtgtcgtgctgcagccgtggggaggaagggctcgcagccatggagcagggaagggcgcaggcttcctgctggccgtggagtaggggacgctgggcagaggagggcggctgggagtgtggaggcgccatgggagaaggagctgagctccctgctgcaaccgtga

SEQ ID NO: 19237 - DNA, 1059 bp, Zea mays
  Peptide Sequence Number=SeqID_62612
atggggagggtatggcggagcttaccagccgagacggcagcggcggctccggcgaggacggcgggcgacgacggggcgaggcaagcaatgcacggccatggcgaaagtcgaatgcgcagaatcgggcacggcgaatggcacagtggcgagggcatagcgggcgcgactgtacggggaagcggggacacggctgggcacgcgctcgcgcaggtcgaccgggatgctgccggcaagccgcgctggctggccacgccggcgagccatgggccgccgcgtagggtgtcgcactgccgcgggcgcgccacacctcgcgagggagagggagaggaaatgggaatggagagaggaatgataggggatcaccatgggcatacggagacgaatggcatgggttccacgcggcctccggcggacgacggttttgggcgagaggaagacgatgtgggtgaggtggctgctacgcgcgtcgtggggaaaaaggggagacagaggtgggcgagtgggcagcaacgccgggcaacggctgggacgcgcactggatggcgcgggcgcgccggccaggcgggccacgagcggggctgtgggcgcggcatccgcgcctgcgtgcatgcgcacatgcagaggcgcggcggcggcgctaggtggctgggcgcgcgcagcgggctagggcagcgggggcgcgctgggctgccgcgcggctgggccgcgaaagtaggccggggcgggttggagaatgccaaccggacaggtgcaagagggaagggtagcgagaaaagatgtcatatgataagtataagatatgatatagaggctatgaacataagggtgataacaaaacaaagcaccactaaggatgcaattaggataatacaagacttgcgaagcggcaaggaacacgaaacaactaagggcgtgataggtaaaaccacacccctgaatttgaaatgggagagagaaggctctaaaatgcaggtgcaggataagcatcaaggtaaagatcggaggatgacaaggatgaaggtgataacagaaaaacacaccacaatggatgtattctag

SEQ ID NO: 19238 - DNA, 621 bp, Zea mays
  Peptide Sequence Number=SeqID_62613
atgaccctagagcctcatcccttacagccaggctggcgttcgttggactccaagtctttcggataccgggttgaggatactatcgaggcgattgctctccacgggctgaccaccttctgtggttttcaccccttggagctgtctactcatcccgttggcttgttccccacggagaaggaggacgacccaatgtggaaggaccgagtggagcatgccaaggatatatgggctctttacccatggcagactgctcacttgatggctaccaagatcaccttggataacagagatgaacttgtggtagacctgtccactgagatggtggaaaaggacctacaggtggaacatatgtccaatgagatccaggagcttgaggagctagtgggaaccagggagaacaccattgaggttctcgaggatcagctaatcaacactcagcagcaacttgcggaagctaaccaacatttggatatgcaccaccaggagatccaggacatgcaggccaatgaggatgtcgatatcgagggaggagaggagccggagcctgcatccagcttggacactgctggctcagggagaccaccttcccccgagtcgagcgttgcctcgtttgctcactag

SEQ ID NO: 19239 - DNA, 663 bp, Zea mays
  Peptide Sequence Number=SeqID_62614
atgatcaaggcggcgaggcttaccggcggcagtagagctccggtggggtggtcggtgacgtcggggaggtcacagcggtcacgacgggtcatgaactccggcgagcgtgatctcactgttccggtggggctggtcctcggctcaagcttgggaaagcttcacggcctcccgaggaagctatccgcgggcttggatcgagtggaggtgggcgggaatggtttggccacggcgggcgccctcgagcggctctggcggttgcggggagagcttacgcttggggccatggatgttttgatgattaggtaccttggagaggaccagcaaggacttgggaaaggccaaggtgttgagcaggagcagcaagggcgtccacaacaggaaggagatcaagtccgagtcggctggataagccttcgtggcgaggtcattcgtgtgtcactggtgataaccaacggagccgtgggaagatggtcgtgcatgagggcgggctttatagccactcgcgggcacgacacgggtgtgggcacgggggcggccgagggcgcgcgggggcgcgcttgcaagcgtgctctgggcgcgttcccaagtgcctacccacatcgaacacgtggtggtttgcttctgtcggtgttcacaggcctgtttggtcgccttagcgtgtag

SEQ ID NO: 19240 - DNA, 192 bp, Zea mays
  Peptide Sequence Number=SeqID_62615
atgggagacccagtctcaggacaagtgagggggaaagtccgcgcccggcttcactcagggcttgccttcaaatgctggggctacggggagatcctctgtggcaggctcgagagctggctcctggtcttcttcgtggacagctccttgctcgggaatgagcatgtactctccgtcagcgaggttgcaatctaa

SEQ ID NO: 19241 - DNA, 438 bp, Zea mays
  Peptide Sequence Number=SeqID_62616
atgggcaagagtaacaagcgcaagcgcgagccgactcctccgtcggaggacttcggcgactcggaatactcggaggaggagttctcctccgagtccgaggggtctccggctcccgggattgccgcggaagtctggacgtacatccgggccgtcgagcgctccgggctcgagggctcggatgagtcggagttctcctcggaggaggaggactcggacggcggcaagggcgaggatgacgacgatgacgacgacgacgatgacgacgacggtggcggcggcgatggtgatggcaacggcagcggcgggggcagcggcggcggcgacgggagcaagggcagcaccagaggcggcagcagcacgggcagcaccagaggcggcagcagcaaaggcagcaccaggggcggcggcggtggcagcagcagcaaggctagtggctaa

SEQ ID NO: 19242 - DNA, 84 bp, Zea mays
  Peptide Sequence Number=SeqID_62617
atgacgcaggacgctttaagtatagtagagataactgttggatatttcatatcgttgtcgaatatggatatgaaatcagattga

SEQ ID NO: 19243 - DNA, 1143 bp, Zea mays
  Peptide Sequence Number=SeqID_62618
atggaaattcttagcatacacaatgaagagctaagtacaaagctagaaaacattggtagcaccccagaagtatctttggttgaaatacctgaaattattaagaaagatgcttctacttcttgctttgatttaattgataattctaatccctgcaatcaagttcttgttaagaatgttgttatagaaacatgttcgaacgagattgcaatggagaatgagcaattaaagcaagaggtggctcaccttgggaaggccttgtatgacaagaaaggcaaagccaaacaaatccaacctcctcaggataacaccactgcaggattgaacaagcttgtggagggcgaaactgtgatttgtaggctatgtcacaaggaagaccacaagtctttccaatgcaaggcgaagactagggataagcaaaagccaacaagcaaaatctccaacacctacatcaacaaggtggacaaaaaggctgctacaccatacttaatcaagaagaaaaataatggaaaggtgatagcaatcaaggtcaacaaacaagccaacaaagggaaagggaccaaacacatctgggtgtcaaagaaaattatttcaaccatgaaaagcaccaagaaggcgctgcggggcaaggacctcaacgacatgttcccggtgacggacgcggaggcgccacccaccgccaacccccgcggcttcgccaacctcctctggaagcagctcgaccacctcgggaacgcggggttcgatctggcgctcttccgggtggacgcgtatgggggagggaagacggtgccgagcaatcagcggataatgcagtggcaggtgtgcaggaagaagcagaacaagctcgagttcctcatgccgtggtgggatctgcagctcggcgtctctgtcaaccagttcctgtccatcttcgcctcgaagaattccgacttcagaaacagagcattggcgttcttgtttacccatggcgccagcgaggaactgagctcgctgcaggtggtggaggcacacgcgttccctcagcacttctctgagatgaaaacgaaagtagggctcgcccctgctgcaattgtttcctctaggggttctgacaactcggtgctgacgatatatttccgttgcaacgcacgggcacccatctag

SEQ ID NO: 19244 - DNA, 469 bp, Zea mays
  Peptide Sequence Number=SeqID_62619
atgatggtccccgcctcagttgccaccacctcgttcgtcattctacttctctctctcccctcatgcctccaccttcgcgccaccccattcttggtagagggcgtaggagcagacacctcctccccgtattcgtctgacaccagccccgataccgactcgaacagtggctattgcacgtccacgaggacgtttcacgtcatgcgtgcatcatcgttttcgccattgtcggacgtcccgttcgtattcccggccttcgcgccgttctccctccccatcctgctgcccccatctgtcagtatgacagatagagccttccactatgttgagttgggttacaacaaagccgcggctgcttacaatcttcttgacagcactcaagcagagcgcctaggggtcccttttatagccccaaagggcctaggagccgttggagcttcatttggaagctcccagccttccctggttgcgg

SEQ ID NO: 19245 - DNA, 219 bp, Zea mays
  Peptide Sequence Number=SeqID_62620
atggcgcactggacagtccggtgcgccatcggtgcgccaacgatgcgccaccgagacaccgatcaagccaaggatggaggcaagaagagctacgaggtactgagtgcacgggagaaaggtcaaggagaccaggacccaaagccagggttgaagaagaagacttgcaagtcaaggttgatcgagttaagaagaagttatggtgcaataaggaacacctaa

SEQ ID NO: 19246 - DNA, 1520 bp, Zea mays
  Peptide Sequence Number=SeqID_62621
catgctactgcagccacgggtacgtcggtttcaggtacgtacccgtgaagtcttggctaccagctcagagagacccagcagcagccggtgctgagtctgaggcgcatctcacctatctgcctggcctcctgacccttctgactatcagcggcagatatgttgaggagtgggtccgcgtcttctacgcctctgtttggattgacccggatcatcactggatgaggttccgctttgagcgcgaggatgtcacgatcactgccagtcagatccgacagctatttggattccctgagtcgacgactcgccttcacagcctctgttacggctcttctgaccctcctcgtcgccctcacagcggtgtggctccagggacagctcacgtcgcggctctgttccgcccgcctttcacagatgggtcgcgacgttctccagcagactttactacagcagtgaagtacttatatgagctcatcagacggacactcctgccgaggatgggatacagggaggctaccactcatattcagctttggctccttggtgccctggtatcccactcacagtttgatgttgtggacttcctgatttgtgagattgaggacactgttctggatgggattcgtgctcgttggcagttaccttatgctcactacttgtgccacatctttgcgcagctgattcagccacctcgttttcagagcacccttgaggcctcacgccttgtatttggatcttaccgtcctgctcctgagattccagtgccagcttctgcttctgtgtttgactctcaggccgaggatgcagctcttcgtcagtttgacactcagggtacaacagctgatgatgatgatgatgatgattttggggttcctcctccgcctccgcctcctatgcctccacgctcacatgatcatgaggctgggagttctcgtgctacccctgctcctcctccggctatggaccctgctcttgcggtgattctggccaacctggcagccgagcaggcccggttatccgagacgatgctctcgatgtttcagagcatgcaggacaggcaggatgcacttcagcagcagctcattcaggatagggcagagaatagggcattcatggctctcatgcttcagcattctggtatctcagcacctcctgttcagtctgctccgcctcctccgcttcacgcttcagtggtgccttcgattttgtctggaccccctgttggtacctctccgctccggccggtcactttggcgttcacctctccggttctcagctctgtctgtccgcagccgccagtgccaccagcatctgctgttcccactaccgctgtggcagtatctgtgaccgcttctgttccggtagctcctgcagcgcggcctccgtccgagtcagtaccagctccagcttctaccgcagaccctggatccgagactgactctgaccctccgccggcgttcgctctactacctcgacctcgaccggatgcgcccccgtcgcctcctcctgcttcagatgtttag

SEQ ID NO: 19247 - DNA, 276 bp, Zea mays
  Peptide Sequence Number=SeqID_62622
atggtgaaaggagaaaccgacttaaaggggaaagactgcttagtcctcaacaacttgccttatgcttccgagaacaaggaccaacaaggaggatgcggtctgttgggggccttcttcgccgccgaaggtcctgtaagcaaaaacaccttcggcaagacgatgtgcaaacagatacgacatgaagatatatgccaaagttacaatcgaaagagcttcggcatgttggcatgcaaaaacgaaggatggcaccgacttaaagaggaaaagaccacatag

SEQ ID NO: 19248 - DNA, 306 bp, Zea mays
  Peptide Sequence Number=SeqID_62623
atggggtgcaccggaggtgcacccaatgggtgtagcccccgaccttcaaatggatttttcaaggataatccattcgaagaaattggcatgaagctatttgcattacgctttggaggtcagcattatgtcatcaatattttgctgcagaggtattcactgcgtgccctgcacagatgtgaccgttttgaaaaatatactgataattcctgggcgtcccccccaatgggtgtgggcaagggacggcttgacgggtggaagtgcttattgaatgctttgcgactgttcagtgaccacggttggaggtga

SEQ ID NO: 19249 - DNA, 576 bp, Zea mays
  Peptide Sequence Number=SeqID_62624
atgccaccgtgcataaggaaaacggcgcgcaagtcaactggaccaatcggtgtgccttggcatcaactggcccctcgacatgagaatagtagcagcgggagtaatgatccaataggagatcttgaagcacgagtaagtcgacttcaagcggagttgcaacacaggaccaacgcttgggttgcggatggagatagaataaatgaactaagaagagacatccgccacctgcgggatcagcttgctgatcgggacttggcgctcgactgggcagtccagtcccgttgtgctaaggaagcaagggctcaagcccgaatcaaggaacttagctcagctgtcgacgacctgcaggtctgttgcaatacgttacatgaggaagtccatgtactgtattcgcaattacaccctagtgcacctgcgcaccctgttgaggcggaagccgtaccctcccatgttgcgggacacgcgcttggtggggagttagacctttttgagccccctccttccatgaggctggtcgacgtatggactcccacacccgacgacgaggccgccaagagcaacgggaaacaggactag

SEQ ID NO: 19250 - DNA, 585 bp, Zea mays
  Peptide Sequence Number=SeqID_62625
atgggtgtaggcaagggacggcttgtgaccgtggtaggagataggtggttgccttcttcctctataaatagagtgcttgcttcactggcgtcttcacacatctctctgccgcttgttgtttactctcctcttttctcttctcttctacaccaccatgggcaagagcaagaaagacgaaagtcgtcgcaccattccggcgacaagcggaagcgcgagacaacccctccctcggaggacttcggcgattccgagtactcggagcaggagttttcctccgagtctgaggggtcgccagtctacacctctcccccggcgtcgttcgatgactcggacgattcccaggggatcgccgccgaggtgtggacatacatccgggccatcgagcgctccgggctcgagggctcggatgagtcggaggtctcctcggacgagaactcctctgactcgtccgaggaggggagcggcggtgatggcgatgacgagggtgacgacgacgacgatgatggtgacggcgacggcggcaagggcaacggcaagggcgacagcggcagcagcaaggctagtggcaaagcactactgtcttag

SEQ ID NO: 19251 - DNA, 768 bp, Zea mays
  Peptide Sequence Number=SeqID_62626
atggacgcggcggggtcggcgccgtcgccggcggcggtggtgagggagcgcgtggcggtgaagctccggggctacttcgacctcgccaaggaggagatggacaaggccgtgcgcgccgaggagtgggggctccccgacgacgccaccgcgcactaccgcaacgcgatgcgcgtcatgctcgaggcccaggccgcgcgcgtccctgatgccgtctcctccagtgggtggtgccctgcggagcttgagaggcttgcagcgagagggggcaggtcagggtgtaccaggagaagatcgccaagtggcaggcgcaggtcgaggagcggctcagagtgcttggtcagagaagtgctgaaaggtgccactgctgcagtagtgcctaagaagattgttttgagtgcaattaaaacaggagctactaataaacctcaagagttggatgatgctgttcttcgaagactggtgaaaagaatatatgtgccactacctgatccaaacgtacggaggctacttctgaaaaatcagctcaaaggacaagcattcaaattgtcgaggtattctggaagtgacctgagagccgtgtgcgaagaagctgcaatgatgccaataagagagctcgggccacagagtattcttgctattaaagcaaatcagttgcgacctttgaagtacgaggatttcaagaacgcgatggcggtgatcaggccaagcttgcagaagagcaaatgggacgagcttgagaaatggaacgaggaatttggttcgagctga

SEQ ID NO: 19252 - DNA, 735 bp, Zea mays
  Peptide Sequence Number=SeqID_62627
atgaggagatccatcgcgcccctgaggcagaggggcactgacgcggagtcgagaagggtcgtgcgtcgagtaccgatggaaagggcctgggcgacggcgaagatctcggcaaaccggtgcagtcggttgcgctcaacctgccgccaggagcgaaatcccgattgggatggggaagaaggacgggacccgacaagcgggggaccacccgccagcaaggagttttccccggcccaagcccgcgcacaagaaagtggagaccgactaatgggtcccagcggtcacagacagagtgaaaggagcgggcggtggctgacagtgggccccgcacgcttcctaaagcctaagagacttttttcacggatcaagctcgttacgaaaaacgatctagcaccgggaaggggctactgttgggaccatgcttcgtcgcgaacgtctgcaggaagaaacagcttcgctgaagctgcctctacagtggcccgaagcggcagtcttcctcttttttccttgccctcgcagcaggaagcgataatcggggtatatgaagccaatcgcatcaaagaccctgttcagtcttttcttccctcggcctctgaaggctgcggacaaagcattatcttcggccttggagtatacttcggtcggaccagaccaccatcactagagtcggtggtggtctcctttggcatttcccagctttccacaagtggccataccctgaaggatatatgctcttga

SEQ ID NO: 19253 - DNA, 147 bp, Zea mays
  Peptide Sequence Number=SeqID_62628
atgagggtgaaatgggacgcccttagctgccggagggccgtcaatgggggccgaggcatagtgctcactctgctaagggtgggtgccgaggttgtccccacagtattcagtgctcatgaggagatgcagatttattggaggttatga

SEQ ID NO: 19254 - DNA, 255 bp, Zea mays
  Peptide Sequence Number=SeqID_62629
atggtcggagtaggtcggtccacgtgcgcaggcgggcgagctcgtcggcgacgaggactctggcctatccagggcggtatagttcaattgaacgggtcagagagcttcaccagagatagcttggttcacgcgcggtggcgggtgaccgaagtccgacgagggcaattctgcttctccggtgaggcagtgcctcggctcaagcttggagaagcttcacagggtcttggggaagctatctgtcacacccggatttaa

SEQ ID NO: 19255 - DNA, 483 bp, Zea mays
  Peptide Sequence Number=SeqID_62630
atggcatccttcggcatcacgtacagacagcttcagccgaagttgtttcttcctgcaggaccttcggcgacgaagcatggtcccaacaggacctattcagctgccaaagcaaaagaaactgttctgattatgcagagcgctgaagagccgactatagtgccgaaagcagcggcagatttgccaaagatgcatagagctcctgttgcaactcccaagaggaggaggatggccagcgtgctagacgctattatagagactacgaaggccttgagccctgctccttcaaagaaaattcctgaaactgccaaagcgcaagccgaagccgaaactgggcaagcagaagccaaagctagaccttcagcgcccatcgcagcgaagcctgccgcgcctgaggaaaaatggcagggcagaatgcacctgaaactcctgctcccgaagctccaatcgagactgttgactacatcattccacatgcttcggtga

SEQ ID NO: 19256 - DNA, 927 bp, Zea mays
  Peptide Sequence Number=SeqID_62631
atgcatggtttacaggtggtgacgaggatgatggttatgattatgaccatggtaatggttgtccgtgttgcaaccactgctcaggtgaagatgaagtcatggaggaggacttccaggagttccaagagtatgatgagttctaggcgtgggttagcgatggctcgtcttagacacgctgcacggaagtctgtcatccccttcttaccctctcgtctcgcggagcgtccgcttcgccatcgagtgaccgtaggagataaagtctgtgaggagttgttcccatgtgctcccgctggaggcgcccctgcaccaccaccgagcgccccagccgctggagtagatgctggaggagacccagacgacggaggtggcgatagcagctcgagccacaacaccgaccttttagaggagcaggagttggaaggatgggttgcccgacccatcactcatgacgctgctcgcgggtgtcacttccacgacgcgctcgacaccctgctacgtcaggcactcgaccagcgtacttggtctatcgagtatcactgtgtggtcttccagcatagtcacggggtttacccgaaccgttgggaggcgacctgcttggtgcgctgtccggagaatagtctccggggtgcggaggtctgctcagagcactattccatctctgagcgggactcggctgaggcggccatgcaagatgccgcacggcgtgcacttttgcactattgctcagtgctcggtggggtagctgatggtctcaacctgaagtattacccccgccgtccatctggcagcacaggaggcgtggttgtctcacttgtcggtgaggacaatcctaggttgagcagcacagtcaacctagccgccgtgctaaacgcgaagctggaccatgcattagacgagctgagtagggctcatgctgagatcgcctag

SEQ ID NO: 19257 - DNA, 789 bp, Zea mays
  Peptide Sequence Number=SeqID_62632
atggactggcttctccggcgaggcaaagttcgattccttgctcggggagcttcaccgaggcatgcacggtctactccgagggttggacggggttgggagaggctctgctggccggtctacggtggcgggtgttcgggtggccgcgggcacgccgtgcacggggcaatgccgggctacctagttcatgtgagttccaagggaagatgtggtcaggttagggagatatgggggtgggaagtcggctctgtcagggctgtccacaccgagacaaaacttgtgccaagtcgtgtcaaacgacttagggttgggttcaaacttttccagggtattctagagccttatgtgaaaaccctaagtaaaacctggggtgttacatatttccacacttacattcaagcaaatgctgttagctcgaattctaccgccgactcccatagtcaatttggatgggggttgacatgggtggctgagagaggttgcctgctccaggctgagacacattctgctttgctggggcaatggggcctgactgctgctgggctgccttcttcggacattgcatcacccaatggccatgctctccacaatggaaacatgctctgcttccgccttgaactagggcggcttgactgttctattgggtcgctggggcgggaacacgaggtgcctgctgattctgcctctggaactgacctcctcctgactgattgttctagcgattttgctactggtgttgagggtactacctttgaaactgctgctgctaaggtggacgctggttctgcctga

SEQ ID NO: 19258 - DNA, 645 bp, Zea mays
  Peptide Sequence Number=SeqID_62633
atggacggacttgcacgagagggtttcccccgtatcttgtgggaggtacttcagggagctggctggtgttcgctggactctaagtcttttgggtacagggctgaggatactatcgaggtgattgctcttcacgggctgaccaccttctgtggtttccaccccttagagctgtccactcaccccattggtttgttctccgcggagaaggaggacgacccaatgtggaaggaccgagtggagcacgccaaggatatatgggctatctacccaggtcagactgctcacttgacggctaccaagatcaccttggataatagggaggaacttgtggtagacttgtccactgagatggtggaaaaagacttacaattggaacagttgtcaaatgagatccaagagcttgatgagctagtgggaaccagggagaacagcatcgaggttctcgaggatcagctcatcaacactcagcagcaacttgcggaggctaaccagcatctggatatgcaccaccaagagatccaggacaaggaggccaacgagaatgtcaacatcgagggaggagaggagcctgcctccagcttggacactgctggctcaaggagaccaccttcccccatgtcgagtgttgcctcatttgctcactag

SEQ ID NO: 19259 - DNA, 459 bp, Zea mays
  Peptide Sequence Number=SeqID_62634
atgagcgtgccccacgaccgccaccaggatctcaagctcgccatcgatgaattcgacgaggagttgatcgaccctgagctacgcttctcgttccagcgcaacagcaaggtttgtggagtggacttgactgacaaagtagtggacataattttccatgtatttgatgctaactgtgatggtaacctgagctcagaggagttcttgaggaagtgcttgttcagcatgatgagtgatcttccttctgtcttagaagcattcgtggacaggaaacacgataaagataggtctggggttgatagcagcggcaagtccagacactcatcaaatagaggaaaagatggccatgccaagagttccagggcagcacctcctgccaccaaggagtatgacaaagacgaggaggagcacacggagaccttttgtggaagctgcggcgacctttacattggcagcaactaa

SEQ ID NO: 19260 - DNA, 849 bp, Zea mays
  Peptide Sequence Number=SeqID_62635
atgcatcgcgtccttccaccttccgagcccccggatagggaacactcgtgtcgctttcgtcttgctgtcgatggaggaatgcaacttcgcggaagttggtacctttcagccatcgttcggcttcaaggattttcatcaggcagcctggccgcatcccctcttcggtggtcacccaagacggtgaccaccagttcgatggtggggggaagcgagccgggctgcgatcttggtcccgccctcagcttcaaggatcttcatcatcctggctggggcggaggccgggctgagtcggagctctacctcccgcgcgggttcgtgggtcaccttctccctcagcattcaagggagagagcgctcacccgcctagcgggagggtcagacttcgacaatgcggggctggttggcggcgagcgtcgtcagcttcagcacgttgggctcgctggctcagctggctctggctcggctcccggtgccccctcccgccgcgagagcggttgtcgcgtcgcgcgcaccggaggaccacccaagacgtcgcgcgctgctagggcggcgtttgtgttctggggctgtcctgcctttgccccggtacggcgcctctgcgcggaggtcggtgcttcgctcgtccgagaggatccgagtggggatctgccggtgggcagatggcttccgtcgtcggcgctgaggtggtggcggctgaagaagtcctcgtcgccgacgggatcactgccaccatccgcgctccgggcctccggctctttggctttgatagcttgtcctcgcccctcgagtggggacgtgagcgagggcattgttgcagcggcgtccgccctgaggccatcgctgctgtag

SEQ ID NO: 19261 - DNA, 663 bp, Zea mays
  Peptide Sequence Number=SeqID_62636
atgagggcccaggcccacacgtcgtgtaaccgacgtgctggttactacgtacaagaaactgcaccgccactcgcgccactatcgcgcctcctcgactgcggaaccggtgccgcgactcgaggcaaccctgcgcatgacccaacagtgccaaccaagcacatcggtcacgggacaggcgacacctttgacaggcgaagcaggcgacgcttcacctccgccataatgaccgcatcaaaaaagggaccgggaaaggggatgctccgaaagggatccttctccgcgaaggaagcgggccccgagccccctactgatcagagggctcggactcagcctcggctccggaagacgacgaactccgcctcgctcgaccccagggctcggcctcggctccagaagacgacgaactccgcctcgcccgacccagggctcggactcggcctcggctccggaagacgacgaactctgcctcgcccgaccacagggctcggactcagccctggcctcagacgacggtctccgcctcgcccggctcggggctcggactcgacctcgacctcggaagacagactcgacctcgacctcggaggagcctctgcctcgctcgacccagggctcggaccgaccacgtcacaggggggccatcattaccctacccctagctag

SEQ ID NO: 19262 - DNA, 378 bp, Zea mays
  Peptide Sequence Number=SeqID_62637
atgcccctcataaaagtttacaacaatgactcagacccttatggactaaaaggtcattctatctttaagtcggttcgacccttcatcttcggatatgctgaccttcggcgacgaagcatggtccccaacaatggggaagtctgtcccatcactcctcatgctcctcctcagccgaggcagggtcccactcgactgtccaacccggtgtacaatggatcaagcagtctcattagctgcgagaagcagacgattcgaatcgagtttttaaaccttgcaaggctctggtgctggatccggggctacctgctgagcaactccttgctccggcacgaggacgtactctccgtcagcgaggttgcaatctatcgaatgcaatga

SEQ ID NO: 19263 - DNA, 750 bp, Zea mays
  Peptide Sequence Number=SeqID_62638
atgaaaggcacatacattattgaaagccttctagcatgcttcggtataattctcgagcgcaatagtcggccttcggaggccgaagcgagaccaaatggggcattgaataatgccctttatatcttccctttcaatcagattatttttgacataaaaccattcctccatccaggccccaggccaccttttttgaaatattggaacaggataacttacattggaacgaggaacaaagccatagcaaccgaagttgttgtgatattgctctttaccagtggccttcgtcccttggcttttcgcggcccaaacaaaaatacccattctgattatagcttcgggagtgatttgatgaaggaagatttcaaatgtcttcaaaacttcaacaaaaaatctgctcaatgggaatcaaagaccagccttcataaagcttctgtaaacaacaacttcatcttcttcgggtgtgggggcggcgctgtctctcccaaccctcacaatagacatgtcacaaaagtatctccccttcatggcatcaatctgactctatttaatggacgactttccaaagatggtatgacttggtcgccagggccggtcctcggcatcttcattcccactttccacatcaaagtcatcactattgtggcggaactgcccgaattattccaacttaagtgcctaagtcccgccttagaggctagaccacacttaaatgggaataacacgtcaatccctcggatcaagtctgactag

SEQ ID NO: 19264 - DNA, 870 bp, Zea mays
  Peptide Sequence Number=SeqID_62639
atgacttctcacagatcctcggatgaagggaatgcacagtcccacactgacgggcttgcacgagagggtttcccccgtatcttgtgggaggtccttcagggagctggttacatgacgcctccccaatatgcgatgcagctgttcgagaagcaccgagtgccccgctgtagggtgaggatgaccctagagcctcatcccctgcagccaggatggcgttcgttggattcagagtcttttggatacagggctgaggatactatggaggcaattgctcttcacggactgaccaccttctgcagattccaccccttggagctgtccactcaccccattggtttgttccccgcggagaaggaggacgacccaatgtggaaggaccgagtggagcatgccaaggatatctgggctatctacccaggtcagactgctcacttcacggtgtggtgcatgaatgccctgtatcgtctgcaagtgatgcgtggagaggcaatgtctcatctaatggcattattggaggcaaccaagaccaccttggataacagagaggaacttgtggttgacttgtccaatgagatggtggaaaaagacctacaagtggaacaattgtcgaatgagatccaagagcttgaggagctagtgggaaccagggagaacaccatcgaggttctcgaggatcaggtaatcaacactcagcagcaactcgtggaggctaaccagcatctggatatgcaccaccaggagatccaggacatggaggccaacgaggatgtcgacatcgagggaggagaggagcctgcctccagtttggacactgctggctcagggagaccaccttcccccgagtcgagcattgcctcgtttgctcactag

SEQ ID NO: 19265 - DNA, 303 bp, Zea mays
  Peptide Sequence Number=SeqID_62640
atggcgaagcagttcccgcggcatggtgacggaccccatggcggctgggttctttgtgcggtgaagccgcagggaaggtcgcggcataccacggccgcaagctacgcgcgaccccaatttatacccggtagtgaagtccgagcatgggctttacacatcatcactattcttcacaacattgaggacttgagtacaatgaccccgaccattgtaattgggaaaattgcggcatttgagatgtcgcgaaaaaatgtgtcgacaagaggagccaacttcctcgaggacatattcttttgcatgtga

SEQ ID NO: 19266 - DNA, 123 bp, Zea mays
  Peptide Sequence Number=SeqID_62641
atgcggtctgtgtacttaggtcgtagcgcccgccgctggagtgggcaggttgagaccgagtttccttggtggtccatgctatgtgtcgccagacatgcggcagcgccgggcttcgcctggtga

SEQ ID NO: 19267 - DNA, 69 bp, Zea mays
  Peptide Sequence Number=SeqID_62642
atggggatgtgtggtctacgagatgaaattggaataaggattaaggtattccttaggatgattggttga

SEQ ID NO: 19268 - DNA, 1749 bp, Zea mays
  Peptide Sequence Number=SeqID_62643
atgccccaagtgctcggcgaaaggacagaacaaggatcatcgtcgtttattcgtattgctagtcgatatgccgtcgcgcccaggcgtggagcttcctccctgctgcagttcggcctccaggttgcctccaccaccgcgctctgcttcttccacggtagctgcacctctctcctccccaagcttctttctcgcgacatgcctccaagccctggccagctcgcttgcccctggtttccccggcttcttcctgcgctcgccgagcggctctctacgtcgcgcaacttccccaagatccctggtgctttctcctctccagtgccgagctcctccctaaagctttccccccatggcgcgcccaagccctctccttcctccgcctctacacgccgtgattccgagctcggctcgcccatccgctgttccctctttccggatctcgcgcgcccctggtcgcctgcccctcagctgcttgctctgctcgccgcgcgcactcctccctgcacgccgctcatccttgtcgtcgccctatgcacgttcttctctgccatggccgcgccctgctccctgcgcaagcgccgccatcgaaccccctacgtcctcgccccttcttcttgctccgtctcggctgtctggcaaatccggattcgttgcgctactcgcaaagcacgtgggggcctcgccggccatcctgcttccttttatgcgctccgcttgccgtcatcctccatgcgccggatggctcgacttagacacactgcacgaaagtcagtcatccccttcttaccctcccgccttgctgagcgtccgcttcgccgtcccgtggccggacagtccagccacttggagagactacaccaccgcctgcgtgaggagcaggagcgtcgacgacaggagcagcagagctcttccttctcgctccaccaggagatagagtctgtgaggagctgctcccctgtgcttcctctggagccgccccctgcaccacccctgggcgccccagcttctggagtagctgctggaggagacccagacgacggagatggcgacgacagctcgagccacgacaccgacttctctgctaaccctgagccggaaggatgggttgctcgacccatcactcgcgacgctgctcgcgggtgtcacttccacgatgcgctcgacaccctgctacgtcgggcatttgaccggcatacttggtccgtcgagtatcgctgtgtggtctaccagcacagtcgcggggtctacccggaccgctgggaggcgacttgcttggtgcgctgcccggaggacagtctccagggtgcggaggcctgttcagagcactattctatctctgagcgggactcagctggggcagccatgcaagatgctgcacggcgtgcgctttcgcactactgctcggttttcggtggggcagctgacggtcttgacctgaagtattacccccgccgtccatctggcagcacaggaggcgtgattgtctcacctgtcggtgagggcaatcctaggttgagcagcacagtcaacctagccgccgtgctaaacacggagctggaccatgcattagacgagctgagtagggctcgtgctgagatcgccctgctgcgggctgagcgcgcggaacgtcgtcacctggatggtggttcccccgctcccgttgggactcagcacccgtaccgctcacctcagcgtggacaccagtcttatggcaatcccgactgcaagaccaagataactctagaaccatag

SEQ ID NO: 19269 - DNA, 345 bp, Zea mays
  Peptide Sequence Number=SeqID_62644
atggctcttctttgctttggcaaaaagagaaggagctcttcttgcccatatgggagtggaagcttcagtgaggcgctcgctgttctcgttgaagctgtttatacaggttttggtggcaatccgagtgagattgaacctgcttcttcgactcaagaacactttcttcttttcaatagaggaagagtgttcgttcgggctaacgaaagatctcagagggactcttacttctacaagagcttttacacaagttatcgacatataggaattcgactacctcatcactgtgtgaaggaaaaggttcaggaagcttgtgatgctcgggatggactgactccatatgcgtga

SEQ ID NO: 19270 - DNA, 423 bp, Zea mays
  Peptide Sequence Number=SeqID_62645
atgaaggtttttaaagagaaacatagtgaggatggcacgaaggttcttcgaaggctaagcaacacgaagttatggcccttaaaaaggagagctgcgtatcattatattaagaggaaaaaaggtgaggatatgaaacctcatacaagccaaacaaacccacacacccacacgcactcaaggatagctaggagtacaatgatattatgtgtagttcgtattacacggtgccttctttccaaggtatggcgtatcttcgctattagggattgcagtcttatcagaggggttctcggcgtgccatgcgtgttatcagtttctgactggggtgccgctggaagaaccattacccttactagtaccaaggctagagatccggatttgaaccaaggaatggaatcaaatgcaacaagaaaaaggttctag

SEQ ID NO: 19271 - DNA, 231 bp, Zea mays
  Peptide Sequence Number=SeqID_62646
atggttaacggcggttctgtggagtggttttgcaagacaagaatagttaataatgagatcatcattttaggaaatgatgcagaactgggtagtgacattgatccagaagaagctcaacaggcacttgaaatagccgaagctaacttgagtaaagctgaagtaaacggatcaaagggatatcctctggcattagagaatattcatcttgacaagaaattatctatatgttaa

SEQ ID NO: 19272 - DNA, 291 bp, Zea mays
  Peptide Sequence Number=SeqID_62647
atgagcgaagtgagggaattccttctgattgggtcccttaggggagagacagaagaactatgccaacgtgtgcctacattgtttgatttaccagttccggccgcacctgagcccgcaactgctgcctctactccgcctacttcttgtgccgacttcgccagcctcgcggggtaccaatttcctcctgctttgtcggtcaaccccgggaacgcgtaccgccttgccaatgaacatggggatgaacttcctgaaccttggaatgacatgtacttgaaaaagtactacgcctga

SEQ ID NO: 19273 - DNA, 576 bp, Zea mays
  Peptide Sequence Number=SeqID_62648
atggaggttcggtccgccccagatattatagatccgctactcagccctacggagggcgaacggttgagcccaaccactggcccttcgccagaagggggtgatcatccccatgacaacacgccaccggtggcggtggaaccggccccacttcctgagacaaatccgactcggggggagggttccttaaaaaggcatccacatccatatgtagaggatatggataaaaagttggaggattgccgaaaaaaacgaaaagcccaagagtggggggatcttatttcaggaatagaaaccaaggagaaaaagcgaggcattgagtctcaaattatagaggaaaaccaccgtttttatagtatgtgttgtgaacattttaggcaaagaatgcccttgatgattttacaaaatgaatctgatcgcgaggataacaagcgggaaaagcttttttccactattttgcgaagccaaggaaaggagcattatcttgaaaaccttttgcaactaagggaggatttgagggacccggcggcctatgaggcactccgccccatttttcgggagttgagtaataaactataa

SEQ ID NO: 19274 - DNA, 489 bp, Zea mays
  Peptide Sequence Number=SeqID_62649
atggcagggcggtacgctcatctctctcgcgacctctactctaatcaaaagactaaaggcccgcccctacggaagatgaaaaaggcgaggactgaaatgagaaaggaaggacaagacgacttcggttcacacgtgaaagtgcttcgaaaggtgtcagcaggcattgactggttgtcaagttttggtcaaatgatagttgactggagtaaaggaatgcggaaactcaagcataaaggcaagcaagtgatcttacaagtgcaagatgtcacagctgaactgaaggtgtgccagggaacagttgacttgcacaaggaaaagaagaaaagaagccaagtcatcatagctcatcttttcacttcacaaggcgctccgcgttgtttgaggggcgataggtttctggttgcaaggaggaggcaaagcaagagatgggtgcttagaaacaagggctgctggacaaagtattcacaggtgctgccggtcttcggctga

SEQ ID NO: 19275 - DNA, 228 bp, Zea mays
  Peptide Sequence Number=SeqID_62650
atgtcgactcatcacatcctggggttgaagaaggtcccaagggttcggttgttcgccgatgaaagtggtactctagcgaagatgtttcagttccgttctctaaagatagagtttccttggaaaaaccaaggccagttgagatcagtctctttcaacaaaagagcggagcggaaaggaaaaaactttttcgtcaatgatcacgactttcttaaaccttcctccctttga

SEQ ID NO: 19276 - DNA, 424 bp, Zea mays
  Peptide Sequence Number=SeqID_62651
tccaccaccggactgtccggtgagacaatggagcaacgatcaacttcaccaatggtcgactgcggaaaagtctgaccgtcagaagtcagaagagagtctgcgatgtcagatcgcaccagactgtctggtgccacaagaggacagaagacttcagcggtcaatagctccaacccccaatggtcggctgatgtggaactcaccggatagagaacagtgcagtgtccggtgcaccatcagactgtccggcgtgcccaacgacagcaacgtctggaatagtagttggggctataaatacccccaaccaccaccattcaagctatccaagcttctcactcttctaattcaatacaagagcaaaggatatacaccaaagacacaatcaaagcattcaatcctctccaagctccaaaatcaagtcaagtga

SEQ ID NO: 19277 - DNA, 207 bp, Zea mays
  Peptide Sequence Number=SeqID_62652
atgtgggtgcaccttcgtcccctgaccctcattttgttaacctttggctcaacagaacaagggatgtacaatggagaaaatctttggctggcaaacaacttcgtcggactgctttgtctcatcggtggagatttgaaagtggatatcacaaatggagttggcaagcgattctttgatgatgacttgaatgcggtagcaaaagaatga

SEQ ID NO: 19278 - DNA, 579 bp, Zea mays
  Peptide Sequence Number=SeqID_62653
atgccgtcgtgccatcaatggggctcggtgtatgcggctcgctctgccgagggtggattgccccttggggaggagtgcgatgatgatgaggataatgttggtttctactgtgattatgattattattattattatggtttcaggtattctttcagtttggaaagggagttggagcagcagggctcttcttcctcacctcagcaggaggtagagtctgtgaggcgctgctctcctatgcccccgctggaggcgccccctgcaccaccactgggcgactcggccgctggagtagctattggaggagagcccgacgatggaggtgacgacaacagctcaagccacatcatcgacctctcggaggagcaggagccggagggatgggtctctcgaaccttcgctcgtgacgccactcgcgggtgtcagttccatgatgcgctcgacaccttgctacgccaggcactcgaccggcgcgcttggtccatcgagtattgttgtgttgtcttccagcacagtcatggggcttacccggaccgctgggaggcgacatgtttggttcgccatccggaggatagtctctag

SEQ ID NO: 19279 - DNA, 1926 bp, Zea mays
  Peptide Sequence Number=SeqID_62654
atgccctccttgggcgggcagcgagtgcgaagtctagccttcgcattggatctgcatggccgggatccagccacatttgttcgtgaagtggaggacagtgcggcgaggattgtggggcgctatgtgccaaggacagcgggtctatggagctgggatatccgtgggtccaatgttagattgaatcgggtcttcgaattaaactgcttgccatacggtggctatcccagggatgacactgccgaccgctgcgggaagagaccggtgggcgtgaccgaggaagggccttcgcaggggactgccccggccactaagaagagaaaattaggtactgcagtggggagagtgggggtctctgatagttttgttgtggatttgatggggacgtgtgcagccctcaggggaaggatgttttcgcccgagctctgggagtcttcggcccgaatgctggaggttaccgagggtcgatggcccaagaatgttccgatcccccgcgcggctggcgaagtcttctttacgtctcgcatggctcgtgacttgaaggtttttccttatggatggaatattgttgctgttgtatcggcagtgatggagagggaccgtcaagacgctgcgcagaaacaccgggcgatcgtcaggatcgcggatcctatgcgcgaggcgaagaaggcgcgagggagcaggaaggctgctgcctctggcagtagcaaaccggtgccggatgcgaaaccggccgcccctgggcacagcaaggcgtcggcttgtgcgaaggttgccgcctctggcgggagcaagccacccccggacgggctcgtgaaaggacgaaggccgccttcgccggcgcgacgtattgccgacttcggcatggacatcagtgtcgatgattattttgttgggtcgggtgaggggcaactggttgttgtcccgcctccggtggcaaccacttcggcaacggtggtggtgggggcgaagggtgccacgcgggacccttgggccactttttgcacgagcggcgagattctgtcggccgctgccgctaaggacgtggcggtcgactttgccgacctcgtcgtgtcgggtgccttgactacggacgttgctgccgaagtcgagcgtctctgggcacagcatgcggatgctgtgcgggagaaatcggctacgaaaagcaaaaaccgcaggctgtcggagaaggtggccgccatggaggccgagaagacggatctctgccgccagctggcggaggagaggagggaggcgaacaaggccatcgctgatgcgcaggctgcgcaggccgaagccaaagtggcatgggcggagggcagtctcgcccgccaacgcgccgaggagctggaggcgaggttcaatgccctgcgcagccgcgtggacaaggccgaggcctcaacgcgcgcggaggtcgagcggacgcacgcacagttcgtggacgcgtaccgcgagctgggtgcgcggactgctgacttcgaagtgcccgtccaagaagcgggccttcacttccttgaatggttgcaggaggagctgctggtgctcccgaccattgtgacgggtttcatgtccttcgcctccctcgtcacatgcgagggggccatggcgcatgccaaagacgtcgaggaccttggtggtctagacggcgcgctgcccgaggccgcggaggtcgatctggtgccgccctcggatgccggtgaaggcccctcggcgacccccgcgcccactgcggtcggcgaagacccccgcatcagcccctgcgccgacgggcgaagacgccttgaagaggagtcttcagatgaggacttggattattttgcagcgttggatgtggctgcagcggagccttcgccgcgcacggagggttctgaggagcttccgggcgcgagtactgggtataggcagcgaatggcggtggcgaaatggaga

SEQ ID NO: 19280 - DNA, 477 bp, Zea mays
  Peptide Sequence Number=SeqID_62655
atgcggcggccgccctccggcaggaggggccgccggaagcccggccgacgactccgacacgctggaggtgacgacgctcgccgtcgttcagccccacgttatcgaagtccgcgccgtccgcagggccagcgaacgcctccacccccaaacgccgcgggaaaaggcgacccgcggacccgcgcggaagggaccgggaaagggggataccccgaaagggatccttctccgcgaaggaaccgggctccgagccccccattactgatcaggggttcgaaggctggccccccgagggttcaacagtcgcctcagatcgcgtgggcccgacacccactactggtcaggggttcgaaggccagccccccgaagggctccatggccgcctcaggctactcgggctccgcgcccattactgatcaggggttcgaaggctggcccccgaagggttcacagtcgcctcagacaccgagcgagggatga

SEQ ID NO: 19281 - DNA, 288 bp, Zea mays
  Peptide Sequence Number=SeqID_62656
atggcgatggtctttccacgtgcaccggggaagaggagctcccccgaagctggccctaggtttgattcggatggaggagcaggaagggaggaagaagccccccaacggattccacaaattgcgccaggatcgagcttcaccgagcggcgcgggtctaggggcattctgttctggcggtcagcgaagaggaaagagctgaccggttggtcccaccggtcagtggcgaagggctcccacgtgcacgcgtcgagtgagcccaaagcagcggctgaggcggagaggagatga

SEQ ID NO: 19282 - DNA, 855 bp, Zea mays
  Peptide Sequence Number=SeqID_62657
atgaccgtcgttgttgctgtcgcgctgcggggggaggagtaccatgtcgtagctgccatcgagggacatgaactcgagactgaagaggttgctggagactacccatctggagctcaacaggaaggtgttcgtcaacatgcagcaggcccctacctggcacaccaactgtcggcgtttcgtaccccgggggtccctggaccgacgagtaaatttgtcgctgcgtgcccctacccagatgggttggcgcaagatggaacacaaggggaaagcgcggctcgtgttatctcgcaccaggggggtaatgatgtatcccccggggcgctgttggtccgagcccgaggtcgggcgaggcggaggtttctcctgaggtcgaggccggggttgggcgaggacgcgattcctcccgaggccgaggttgaggccgagccctggggtcgggcgaggcggagacctcctttcgaggctgaggttgaggccgagccctggggtcgggcgaggcggatacctccttccgaggctgaggcgatccctgcattgaatgttcctgcgatacggtcggttggtgaggcgatttggccaaggttgcttctcgatgaagcctgcccgagctgggcttcgagcgagccgagggtctggacctacaaccgggtcgtcgagcgctccgggctcgagggctcggatgagtcggagtcctcctcggactcgtccgaggagagcagcggcggtgatgacggcgacgacggaggcgatagcggcaggggcggcgatggcggcaggggtggcgacggaggcaggggcagcgacggcggcagcaagggcagcaatggcagcggcagcaagaaggccagtggctag

SEQ ID NO: 19283 - DNA, 1266 bp, Zea mays
  Peptide Sequence Number=SeqID_62658
atggatggtggcaacaaccccgcagcggtgagtccatcatctcttaacttctgcaaggcatccagaagaggctggagcttctcctgtttctcgcgcgtggcccccctgcgccagttagttgtcggcggcggtcaccactcgttgaggaaacgacaggagcctcctgtcatcgttccagagataaaaccaccggcgctgccaccccttgttcgaagccacgagggcaaagagctccgcggaaaagagatgggtccacagatcccagtgagggtcaatccccaagaaaccctcgcaaaccgtcgtgaagatggccgcttgcgcgatggagttggggttgaagttatgcagctccacctcatagtagtgcaggagcgccctcatgaagcggctcgctggcactccaaacccccgctcatggaaggggataaagctgaccacgtacccccgcagtggagttggatcggcctcgctcgggaccatccacttcggctgtcgccaaccggagaggggacggagcaaaccatcggcgacaagggcctccagatcccccacgacgacggtggaggaaggccacgggtcgcacgacgggacaacggtcaccttgtcagccatcgccgaaaaaaggtggtggaggcgaaggggatgagggaccgggaaatgggatatatcgaaagggatccttctccgcgaaggaagcgggccctgagccctcatactgatcaggggggttcgaaggctggcccctcggaagggttcgacagccgccctagagcacgcagagcgagggatgactctgggtacgtccgttacatggccgaggctcaggctacgctcccaagtcgcttcgccctttcactgaccgaccagacagaaaaacagcgccgctcgccccgctccgactgctgtgccacccaccagggtgagactgacaatagccaagttcggcctcgggcgcaacaggaagctccgcctctcccgacgttaggcctcggcctcggaaggaggtctttgcctcagggctcggcctcaacctcgacctcggaaagaggtctccaccccgcccgaccccagggctcggcctcaacctcagcctcggaaggaggtatccgcctcgcccgaccccagggctcggcctcaacctcggcctcgggaggaatcgcgtcctcgcccaaccccggcctcggcctcaggagaaacctctgcctcgcccgactttgggctcggaccaaccgcgccacgggggatacatcattaccctacccctag

SEQ ID NO: 19284 - DNA, 243 bp, Zea mays
  Peptide Sequence Number=SeqID_62659
atgtacccaagcacctaccgcacccaccagcatcccaaatccctcactagcaagcatgaatttcggattctctccaatccggttctaaaacaccgtgaactcaaccccgccgtggtcagcccaactcagaacgcgaagaagaagtggaagtcaccgaagaaaggacaccaccaccctcggattctcaggcacgcaactgcttctactttgatatttgtggatccgagccagactcacctgtga

SEQ ID NO: 19285 - DNA, 198 bp, Zea mays
  Peptide Sequence Number=SeqID_62660
atggcgcccacctcgcgtagtggctggtcagggtttgtgcaggggctatccgagggtgtgatggggttactgctgtgcaggatgccgaccgcgagggccactggctactccgatcgtgggttagcgactaacccctttaacaggagcgttgatacacacttgatgaagatgctgccaactctgatcttgactaattaa

SEQ ID NO: 19286 - DNA, 945 bp, Zea mays
  Peptide Sequence Number=SeqID_62661
atggttcataattatacgcctagtgcgttgcaacttggagggccccgtctgtcattgactgttgctattctagcaaagagaaggaaccttcgaactcggagtgaagctgtacacaatatgaaaagcttggtcgggacaaagagatatgaatggtgttatatggttattcatgttatttctcatgttttatatgcttctacttccattaatatatactgtgatgatgaagcatttgacaacaagtccctaacaacgagtgaggacacgacgcccacctcgcgcagtggctggtcggggtttgtgcaagggctatctaagtgtgtgacggggttgctgctatgcgagatgccgaccgcgagggccactggctacgccgatcgtgggaggacgttcggtggcggtgactcggccacggtggccacggccgaccaggctacgggcgcacggggcggccgcgcgggcgtggctgggccacacccgcggccggggagaaaggggagaggggtggctgggctggctcgtccaagccccggccatggcaagtggtcgtcacaccaagcgcaaatgaggggggaggaagaggggatggagagaggaaggggaggggctcacatgggcgggtggagacgaacggcatgggcgacgtggcctccgacggatggcgggctaagcgcgacaaggcgccaatggcaagaggagggcgtggaggggaggcgcgaggtggtggctctgcgggtgcgcgacgtgggcgccgaagggggcggcctggcggttgttcccgtggggaagaggaacagtgggctgggcgccactgacaggagagcccggtggctagggggcggctgggcacagcggctatggtttgagggaggggtgtgcctacgtcgggtgggccaggttttggtttataaacttcgaaattcaaatgagcttcgagaattttga

SEQ ID NO: 19287 - DNA, 159 bp, Zea mays
  Peptide Sequence Number=SeqID_62662
atggcgagagtagcatgtaccctccgtggcaagaggctagacggtggtgtatctatgctctcggtgatgaagcagcaaacttttgttgcttctgttccaaggtggtacctaaagaagaaaatcaagactgaagctgtgggaggaagggtcctccattaa

SEQ ID NO: 19288 - DNA, 159 bp, Zea mays
  Peptide Sequence Number=SeqID_62663
atggcgagagtagcgtgtaccctccgtggcaagaggctagacggtggtatatctgtgctctcggtgatgaagcagcaaacttttgttgcttttgttccaaggtggtacctaaagaagaaaatcaagactgaagctacgggaggaagggtcctctgttaa

SEQ ID NO: 19289 - DNA, 180 bp, Zea mays
  Peptide Sequence Number=SeqID_62664
atggggaagcctgtcccatcactcctcatgctcctcctcagccgagatcaggctcaccgccttggcgtacaatgcctcactgaccccgactgccgtcgtgcagtgaccgcacttgtacccaccataaccggaatgggagaccacgtctcaggtcgcgtgaggggtaaagtctacgtgtag

SEQ ID NO: 19290 - DNA, 186 bp, Zea mays
  Peptide Sequence Number=SeqID_62665
atggagcggcagcgactgagcttgcgcactcgcgtgaccacgagtatgcactgccttggagtgggttgggctcacgcgttggcattttggcggtggtgccagcgcccgcacccgtgctgcggcggcagcgaggtggcagtaaaatcaatgagcgtattccaagttccaacagcttcgtgccggtga

SEQ ID NO: 19291 - DNA, 369 bp, Zea mays
  Peptide Sequence Number=SeqID_62666
atggacaagcaggatgagaggaagaagccccacgggaaaacagaccccaagaggggcgacatcatgaagcggatcataaaggacctcaccggcggcggcaacgacggcggcggcggtgccagtgacggtggtggtagattgcatgcaatacaggcccaaatatgttcccaccgctgtctgggaggctctagatgggcctccagcggatgtcctgtttctttactagcctgcaacgaatactggaaaaggcccaaagtcagcgggtcgtgtttcgatgccaagctcagcacgcacttgggccctgctcgtcatgcctgcccacctacgctggcaaggtggaaatggaaccggtccgatgcatatccatag

SEQ ID NO: 19292 - DNA, 609 bp, Zea mays
  Peptide Sequence Number=SeqID_62667
atggccgctttcgacgccgttccccgcctctccgctcaccagtacaaccaactccatctcgccgccgtcgaccgctcctccttccacagccccccccccccccccgccgcgcgccgtatcttcgcccacatgctccaggccgcagcgccgccctccgaggcccccatgatgcaaatctcccccgtccccatcttcgctgcatttcaggtcaaaacaacatcgccgaggaagtatttcgtccggccgaacgcgagcatcgtccagccatgggattcttgcacaataacgattaccctgcaggcacagaaagattacccaccagacatgcaatgcaaggataaattcttgattcagagcacgaaggtggccaccggtaccgagatggatgagatccccctgatacgccacacgctatacacggttacattacatgtgcgcagttcaacaaggaaggctgataaggtaatcgaggaaatgaagctcaaggttgtctacacattacctagctacggaggttcaaatgactctagcgtatcatttttaggaagccggagcttcaaagcagcgtctgacgatctgatgatgctgaagaatgcaagccttgaagag

SEQ ID NO: 19293 - DNA, 417 bp, Zea mays
  Peptide Sequence Number=SeqID_62668
atgggtcagaggacacttgcctgcaccaaactgctgatcagggacttcttctgcaacttcctcgggaaacacagactgcccgttgtctacgtaaacgggggcagtaaaaaaagaagggagagggcggaagaggttccttacctcaaggcaaactccggggactcctcggtggcggcgaagacgcggcggcagcccgagtcgacggtggcggacctcggcgactgcgcagagaacggcggcggggctccaacggcgacggagaaacgggctcgggcgatggcactttggcgtgtgagaagcgtgggggaggtggaagggaggtctgcagaagagattgccttgacctttgtggtcggcttgtggaggattagggttggaaaagacccggccctttgtgggttcctcaacgaggagtag

SEQ ID NO: 19294 - DNA, 840 bp, Zea mays
  Peptide Sequence Number=SeqID_62669
atggtgatgtcgtcgagtacaccgtcggcagcggcgaaggaggtcccaactgtgcccacgcccgccatcgagggtgatgcggggggtgcgtctagctccatcctgtcgcccactctggaggagacggaggtggttttttggcggcggctccggtccggcgccgagccagaagcagcgccagttcccctcccctgggtgttgtctcgtgtccatcaggctcttcatgatactgaagtggtgatccttcgggagtgggaggcgcttgaggccgagcaccagtgcctcggcgactggcgcactcagctggaggaacgcaccaaggcggcgtcccaccggttcgcctccgagtggtctgagctcaagcgggaccgcaaggattacaaaagggacctccagaaggtgtttgccaaggagctggaggcgtcacgttgggagaagaggctggccaagagggaggaggccctgagagagagggaggccctcacaacagagatccgggccaagctaaaggccctggaccagaccctggaggcccagcgggtccagcaagtggaggccatagagaagatcaaaaaatgggagtgggagctagaggacaaggccagcaacattgccctcgccgaggagaacctcaaggagaaggatgcgtccctagataggcgggagacggatctcgccaggtgggagaaggatctcgctttcagggaggaaatgcttgaaaggcaagagatgttgctagccgagcatgagctcgaggcggaggagaaggagcggaagctggaggagtgggtccgccagttcgaagcagcgcaagctacgctgggtccccaggcggcgtag

SEQ ID NO: 19295 - DNA, 582 bp, Zea mays
  Peptide Sequence Number=SeqID_62670
atggctcggcggcggcgcaaccttactctggtgagcaattgcgcacacctgagggcagtaaagggaaaattaggggcagtggaagaggcagaactcaccgaggcaacgggcacggcgagacctcaacggcggcggcagaacaggcacgcgaacacgacggacggcgacggtgcttctctagctcgtgcgcgatgtgagattggatgtcgtcgagttttagtgattaatgacaacgtaagattacatgtgaccaacatgtgttttccagagcaaatgttgtctgatggagcgctcacaatggtacagtgcccaaccggatcagatcagccgccgcagaagaatcccaccgccgacgaccttcgccgtgattcacgccaccgctgttggattcgtgctctgggcgagtggataacatcgtgcggtagaagcccctcgccgacgcatacccttgagagtcttttccttagtcgggtgaggaagcaacaaatttttgttgcttttgctccaaggtggtaccaaatgaagaaaaacaagactgaagtgcgggaggacttggtcctccacataggatcttttgcttaa

SEQ ID NO: 19296 - DNA, 318 bp, Zea mays
  Peptide Sequence Number=SeqID_62671
atggttttacagagtgttgacatgctccgccaaattttaccagacctccacagcttcccaccttcccatttggaaaacaacgaactgcagtttccctgcactggcgttacccaaggcgtgacggatggtttctctcgtacagcgagagccacacacacactgcgacctcctaggcagttctgggagattcttggcgcgacggactcccctcatgctcgtccctcgctgctctcgaggctcccgggacagaagcggcagcgacaaagtggattgcttgaccagtgccgatgtcaaccggggattgtgattgaagcgtga

SEQ ID NO: 19297 - DNA, 570 bp, Zea mays
  Peptide Sequence Number=SeqID_62672
atggcggtcataacagttcctgtgttcctgttcaagatccagccacagcaccccagcgcccaacccaacacatattccttccgagatcttcctgcacatcaggtcgtgtcgcttgcaccacacgaagtgccaccatccaccctcggcgacataacaaaggctctctccgaggtcatccagcagttgaccgacctcaaggtgcagcagcattcactcatcgggtcacccgtttcgcccctcgaggcactccttgcgccagcccacgacaccctggtccctagggtatttgttgaccccaaggcatctgttctggccctcgggtgttctagcccccatggcacttcatgcgccaactattggcgcactggtcctcatggcacttcttgcgctggccctggtgcctcggcacctggtgcatctgttctgttccctgaggcacttcttgcgcttgtcctcgggatatctgttccagcccttgagacaactcttctggcccctaaggcaccttggctttggggacttctcagtgtagcgtggaccaacaaccatccgacagggagaaggcatggg

SEQ ID NO: 19298 - DNA, 525 bp, Zea mays
  Peptide Sequence Number=SeqID_62673
atggacttggatgacacacgcccacctgatgacgcgattcccaacgtgccttcgccacccgaagcaccggctttctccgtcgcgccctcgccggctgacgcgattgccttgctgccccgtcgtccaggctccggccggccgtgctgcaggaagctttcccctgcccggatttccccagatatcgcgtcgtcggcctatggtggtccaaagggcaaaggtaggccacctctgccacttggtccttcgtccggcgcctcgtgtcatcactcgtcacagttcacagcgaaggaaaaggacctctcccgtcttgacgcgacggtccgacatggcaggcctggcctacagtttggtgtgcgcagatgcctgccggtcacggtccaggcgtccagccggcggtggaccgtggactggtggtggcggcggcgtctgtcaacgaagcacatgttcattgcacatgcctgcggcagcggaagtgcatatccgcccaagattcgggtggtgtggtgtgggactgtggccgtgtag

SEQ ID NO: 19299 - DNA, 165 bp, Zea mays
  Peptide Sequence Number=SeqID_62674
atggcggcagccaccgccgcgtctcccccggtggctgatgcggttcgaaggagtcaagttctcacccacgaggccacagtgcatgttgacggtgtactctgtttctttcacttgaacaaggattttactcttccagtgaaggtgaaggcaatgactagtgtgtaa

SEQ ID NO: 19300 - DNA, 195 bp, Zea mays
  Peptide Sequence Number=SeqID_62675
atgaaggatgccaagcccatcaagacacccatgggaacaaatgggcatctcgacctcgacacgggagtatatttcaaaccaagtcaaaggtatattgaaagggaattggagtcttcggtgaagacaaaggcttccactccactctactactcatccttcgccgtcgctccacatcactcttcgtctttggcataa

SEQ ID NO: 19301 - DNA, 723 bp, Zea mays
  Peptide Sequence Number=SeqID_62676
atggcgaaaagctgcggcgagtacactgtggaggttgcgtcctccagctcctctcctattcccgcttccgcgtcggctacgaggtcgaaggcgaaacaccatatagagatcaaggggtaccctgtggatggtgtctccatcggcggtcaagagacctgcgtcatcttcccgacgctgagcctcgccttcgacatcggtcgatgcccgcagctgcgtccgcccaccatcttcgtcccggcgtgcctccgggacctcgtggagcggctatttgaggtgcaccacgccatggaccagtccgatctcaaccataacctggtccccctggaggtcagggaggagtacgagctcaggagggacctcaaggggtatgtgatatactcggtgaagcagaagcttaagcaggagttcattggcctaccagggagcgagatcaagcggctcaagctatcaggtgtggaggaggtctctgacaataattgtgtctatccaaacgaggtgcaccacactgctagggagcgaacaaagtatcttagactcttggtaaatgaatgtgctgctaaaatggttgaacctacagggttgattgtctgtggtaatctcaggcaaatccaatggagtcgtgcccaagtcttcctgtctttgagatttgatgaagatattggaaaagatgagattgaggagaaaaaggttgatgcagatcttttttccattcattcactctga

SEQ ID NO: 19302 - DNA, 1316 bp, Zea mays
  Peptide Sequence Number=SeqID_62677
atgcaggcggcatgcaaccgcaccgaaggggcgcaccctttcgacttcgacgcgtccagcatggaggcccaggcccacacgtcatgcaaccggcgcgccggtcgctacgtgcaagaaaccgcaccgccactcgcgccactatcgcgcctcctcgactgcggaaccagtactgcgactcgaggcaaccctgcgcatgacccaacagagccaaccaggcacattggtcacgggccagtcagccgcgggagaaggcgcgacggtcgatgcggccagaaatgggccggcagtaatggcggtggcaggcgagcgaaagcagcggtcaagtcgtcagccaagctcacggactgggaaaggggataccccgaaagggatccttctccacgaaggaaacgggccccgagcccccctactgatcagaggttcgaaggctggcccctcggaggggttcaacagccgcctcagagcgctcgggctccgcgcccactactggtcagaggttcaaaggccggcccctcggaagggttcaacgaccgcctcgaccatgttcggcgccctccaagggcaacatggcgcttctcccccctcctccttgcagaaaggagacgcaggggcgtatgtaaaaaagtcgagtctgtccttgaccgtcctctcgctctgtgcggaggctcgggggctgctctcgcaaacccggctccggccaaaccgttgacagcgtcaacataccagcccgagaacttgggacccgaccccaaccccggaggatttacgtctcgcccgaggaccccctccagcaatggacacaccttcggctcacccgaggcccagtcttcgccaagaagcaaccttggccaagtcgccacgctgaccgaccgtatcgcaggagcattcaatgcaaagggctcggactcgggctcggccccggaagacgacgaactccgcttcgcccgaccccagggctcggactcgggctcagccccggaagacgacgaactccgcatcgcccgaccccagggctcggactcagccctggcctcagccgacggtctccgcctcgcccgacccaggggctcggactcgacctcggcctcggaagacagactagacctcgacctcggaggagcctccatctcacccaacccagggctcggaccgaccacgtcacaggaggcgccatcattaccctaccccaagctaactcaggctacggggaacaagaccggcgtcccatctggctcgccccggctccagcgctcctccgacggccacgacaccacacgaactgggtgccaaaacctctccggctgccacgatggcat

SEQ ID NO: 19303 - DNA, 315 bp, Zea mays
  Peptide Sequence Number=SeqID_62678
atgaggaacaggctcaagatgatgaggatgaaaatcaagaagatgagcaccctcaagaggaggagaataatcaagggggagatgaagagaataaagacaaggaagatggtcaagaaattcagggtcaaagaccgccacatccaagagtccaccaagcaattcaacgagatcaccccatcaactccatccttggtgacattcataaggggggtagaggatgcactaagagatcctgattgggtgctggcaatgcaagaggagctcaacaacttcatgaggaatgaggtaccaagtgggtatttgaaagggaattag

SEQ ID NO: 19304 - DNA, 119 bp, Zea mays
  Peptide Sequence Number=SeqID_62679
atggatctatcaaaggccttgatggattcaacatcggaaaagatgtacctctgccaggaccttgtcgatgtaggcttgatgatcgaggaccctttaactggtcacatgcctcgtcatgg

SEQ ID NO: 19305 - DNA, 2685 bp, Zea mays
  Peptide Sequence Number=SeqID_62680
atgccagccatccaagggaagaaggacgacaaaccctctgaagaacctagtagcatcgtcgcagatggcaagcaaagcgcggcagcggcagcggccgaggacggcggatcgttccccttcttcggcctgcttcgctacgcggacgcgctggactggctgctcatggtgtcggggaccgtgggctccttcgtgcatggcatggggccttccatgtcgtactacatactggggaagactctcgacgttgtcgggagcaacatgggcgacaacgaggccacggtccatgaactcactaagttgattccgtatatgtggatgttagcagttgttacccttcctggtgggatgattgtgctcagccaagatatcggagccttcgacaccgacttaaccactgcaagtatcatggctggggcaaccaaccacatgagtgtcatacaagacgcaattggtgaaaagatgggtcacttcatgtcaaacttctccacgttcttagttgctatcattgttgccttcgcgtgctgttgggaggtcggcctgctctccctgctagttgtgcctatgctcctcatggttggagcatcttactcgaaggcgatgatcagcatgtccctcgcaagaacatctttcgtgtctgaagcgaccgctatcgtagaacagatcgcaacattctgttcgtattcactggtaatctgggttggagcggttgctgtgactgaaggaaaagcaaaacctggtgaaacgattgcagccgtcattaatgtcctctccggtgcaatatatatatcaaatgcagcgccagatctgcaggccttcagccaagccaaagttgctgggaaagaagtgtttaaggtcatcaaaagaactccagcaataagctacgaatcgaagggaaaattcttggaaaaggtcactggagatatagaaatacgggaggtgcacttcacatatccatcgcgtgaggataagccagttctccaaggtttctcactggctatacaggcaggcaatattttagctcttgtggggagcagtggatgtggaaagagcacagtgatttctctggttcaaaggttctacgatcctatgtcaggtgtggttctcattgatggccaagacattaaaacactcgacctgaagttcctgcggacaaatataggttcagtctcccaagagccatcgctattttcagacaagatcgttctcgtggagaatggaacagtggctcaatctggaacacatgaagaattgctggagaaaagtgcattctactcaagcgtatgcagtatgcaaaatctggagaaggattctggcaagagcaagacaagccacagtgttgagcacagtagtgaactggaggatgggtcttgttgcatggactttgatgccattccatttctttgctggccttgtacaagtcaggaagacgaaatactaaagaaagcagacttatcactccaagaaccaatgcgtacaagcaaagtagaaagcatcaagtatggtttagtacaagggacttccctctgcttgtggcatatgacacatgccatcgcattgagtttcactatcatgctacttgataagaacctatcatcattcaaagactgtgtacgatcgtaccaagcgtttgcaatgacaatatcttccatcacagagctatggtccttgatccctctagtcttgtccgctatcacagtattagaccctgcacttgacatacttgacagagaaacacagattgtaccggatgttccagaagtgcattctgaagaaagattagcaggtgacattgtgtttcaagatgtcagtttcagctacccctcaaggccagaagtgatcatactagatggcttcaatctagatattgaaccagggcaacaggtggcattggtaggcccaagtggttcaggaaaaaccacagtgttggctcttctgctaagattctatgatccttgcgaaggacgggtgcttgtgaacgataaggatatccgggactacaatctgagatacctgagaaagcacataggactagtgcagcaagagccaatgttgttcaacttgtctattagagagaacattagctacggaaatgaaggtgcatcagaatcagaaatagttgcggctgcaatggaggcaaacatccatgagttcatcagtggcctgtcaaatggatatgacactgtggttggggacaaaggaagtcagctttccggaggtcagaagcagcggatcgccattgcaagagctatactaaagaggcccaccataatgctactggacgaggcgacgagcgctctagatggccaatctgagatggtggtgatgagctccctggtagcaaaagagtggagaaacaatggcgagctttcaagcaagatcacaagcatcacgattgcacatagattgtccacaatcacgagtgcagaggtgattgtcgtgatggataaaggtcaggtggttgaattgggaagccatgaagcattaatctcggcaaaagatggtgtttactcgagactgtacatcgagctccttcaattctatcgcgtcgacaacatcactatacggcgaaggcgcaagtgcgtgatcaatgacttaagggttgttgacgccaccatcaagctcgcaggcggcaacatcgtcaagatcactaatcctaataatcataaggggtccaagtacatgcgg

SEQ ID NO: 19306 - DNA, 195 bp, Zea mays
  Peptide Sequence Number=SeqID_62681
atggccttgatccacttgaacgagtttattgctttctatatgaggatattttggttcctcatctacagggttggtgatatgggacactatgattggagactcaaggacactaacatctatatctggacgaccaataacaggtgttgtgactacactaggtaccaagaagaacaattcaaaaatcataggagttga

SEQ ID NO: 19307 - DNA, 204 bp, Zea mays
  Peptide Sequence Number=SeqID_62682
atggctccattacatgggggcttcagcgcgggcccacgaaagaacgaccttacgatttattgggcccttgggcctttcgtgaggtcttttacttctttagtggacccgggggatatctatcccccacaagcccccgatctttgggttgatttagagaattctgaacgtcattgggtgcaccagaggtgcacccaatgggtgtag

SEQ ID NO: 19308 - DNA, 444 bp, Zea mays
  Peptide Sequence Number=SeqID_62683
atggcggcagcggcctccagtcgagcaagcaaggcggcgacggtaaccctcctccgccttcctctcgcccgactctcctaccacctccgctccgtagaggaggaatttgcggccgaggcggaggcacctaggtcgttcgtgctcccacagttgtcgcggccgaagctgagcgtgaaggaagatgtgtgcccgcatggaagcacaattgttggtattggttcaccggatcctcttgcattcgtgtatgacgatgaagactacaaggatgtttttgtgtcagaggcttgcttgctcagtcccgatgagaacgattggtacagggaaccaatcccggccaaatgcacgtctggaaaagaagatacagaatttgatcaacgcctcgacatggtaggaaagaacactacagtattggcggggattgttcacaagacaatctggttctga

SEQ ID NO: 19309 - DNA, 144 bp, Zea mays
  Peptide Sequence Number=SeqID_62684
atggctccccagaggcgctcgcatggttcgccgtcaacaccacgggcctgtgacatcctccgatccgacgcacttcgggcatcctccgacgagtggtggcaaatcccaaaggcgaggtggcagttccatgtcgtcggggactag

SEQ ID NO: 19310 - DNA, 1314 bp, Zea mays
  Peptide Sequence Number=SeqID_62685
atggctccggatttgggttcggttgtcagtcgcgtgaccgatggccgctgccacctcgtgctctcgtggaaccgcctccgccgcacgcgcctagagctctgggctctatttaactacaggaagccccgaccaggcgcccgtgagcaggagagccccggccgccgcggcgctctccagccggtggattggcggacatggagggggcgcgaggaggaggagcctcagcgtccacggcggtacagcttcaggaggcaccagtcgggcgcggcggagttggcggcggtggtgctggtcaaggtgctggcggtcgtggtgctactgggcgcagtgaccgtccttgtggtggtgctgctgctgcagccccgcgcgtcgtacatggcggtgcgggtggcgagcctgtacgcgctggtgtacgggcagacgggggcgctggacgatgtgcaggtcacggtccgggtggaggcccgcaacggcaacacgcgctcggcagcctacttctcgcgcctcgagtgccgcttcgcgttcgccggcgcgactctgtcggtgctccacgcctacccgttccgcgtgcccgccaggggcgtcctcccgctagcgtatgtggcgcgcgcgcagggcgccccgctgggcgacgccggcagcgccgccatggagactgcgctccgcgacggcgtggtgccgttccgggtggagggggaggcccgaacgcgatggaaggtcgcggggatcgtcggcgtcgaccagtggacgcgcctggcgtgccagctccacttcttctggcccaacgccaccgtgctccccttcagatgcagctccaagtccaatggtccgaccacgacctggttggcgtcctggctggggcttcccccactaacggaagcccagggcttccattacctcttcccctgggctctatttaactacaggaagccccgaccaggcgcccgtgagcaggagagccccggccgccgcggcgctctccagccggtggattggcggacgtggagggggcgcgaggaggaggagcctcagcgtccacggcggtacagcttcaggaggcaccagtcgggcgcggcggagttggcggcggtggtgctggtcaaggtgctggcggtcgtggtgctactgggcgcagtgaccgtccttgtggtggtgctgctgctgcagccccgcgcgtcgtacatggcggtgcgggtggcgagcctgtacgcgctggtgtacgggcagacgggggcgctggacgacgtgcaggtcacggtccgggtggaggcccgcaacggcaacacgcactcggcagcctactctcgcggatga

SEQ ID NO: 19311 - DNA, 420 bp, Zea mays
  Peptide Sequence Number=SeqID_62686
atggcggacaggcggctcctcgcctcctgtattccgggcatggaggcggcggcggagagggaggacgaggggctggagctcagcctctcgctgcacccgtcgtccccgtcgtcgccgcccaggttccaggcggtcttcgcctgctgctactgccccaggaagttccgcagctcgcaggcgctcggcggccaccagaacgcgcacaagctgcagcgcaacctggcaaggcgaggccgggaggccacctcggcgccacccgcgccgccgccgccgccgccggtagccgaccagggcattggcagggcgtccggcagcgacagcgcgccgccgccgcgctccagggtggagcccgcggccgccgaattattgctacgacctttggacttagctttctgcaggtttcagtatgatagtcactga

SEQ ID NO: 19312 - DNA, 774 bp, Zea mays
  Peptide Sequence Number=SeqID_62687
atgcagaggcatttacacaagctaacaaaaaatatgagcgctgtcatcatccaagaagaagcgctgctcagccttgatcctgtcgcagctgcatgctcaatgatgaatcaaactattaaggatgcaggcatccagaacgacgctctcctgagtgaagtgttgtacgagtgcaagaaggaactcatggaaaagtctgcaatcgaagagacaatttctgaacttatggatgttaagatccctatgctgcaagctgaacaactcccggccatggagaatgagaagcgttccattcctgaatgctcgctccagaaaagtgttagttctggatgcctcaactcggcagatcggatgaatggagctgtcaggccaaactttctagacttccaagggctggactttgaggcaacgtttgggctgaggagagcttacagtgaaggagacattcagaaccttggagccaacacgcctcgaccagcagcaaatgtttgtgtgaccatcagtgacctcaaggccgaagaaaggaagcaaaagctttctaggtatagaaaaaagaagatcaagcggaactttggcaggaagattaagtatgcttgtaggaaggctctggcagacagccagccaagggtgagagggagatttgccaagatcgaagaatgcgacttgctgctgctgaattcaggcacttatatggaggttcaatcgatcattcagctgttcaaaatccacctcctctacccagccgttttggtgcgagccgagggagtgaagagctga

SEQ ID NO: 19313 - DNA, 972 bp, Zea mays
  Peptide Sequence Number=SeqID_62688
atggaggaaatggagaagctggtgggagttcaccatcaccaccactcgctctcccatcgggctcctcgcaccccaacccgcccgcagccgcagccgcacccgctcctccaccatctcccgtccaacaggttccgggatctccactcccagattcacaatcacattcaccccacggtccccgcggccagcagggtgctccgcgccaccccgcccttcttcctcatcctcctctcctccgtctacctgctcgcctccgtcaccatcttctctgcccccacgccgctgctccgcctccgattggcctctcccaggccgctgatcctctcgaagctcgcgccgccgcggcctgcgccggagctctttgatctagacggcgggagtgtccgggtccacctcaccaatgtcggcgccgctgtcacctcgttcctcgtcccggacaagaacggtgcgggttctctttggtacctaccttctgtttgcttgtgctctacaatggctctgactcttccgtttcacgatgctcggctcgtcttcctcccaggggttctcgctgatgtggtgctcggattcaactcgctggatccgtacctgagaaaaggctacaagcttgttgccatcaagctgattgtcccatccaaaggattcgctgagaaacactaccatgatctcaaggaaaggcctttcttcaacaagttgtgtgacttcctcagctctggccctgtacttgcaatggtttgggaaggagagggtgtcatcaagtatgggagaaaactaattggtgccacagacccacagaaatatgaaccaggaaccatcaggggcgatcttggcgttgttgtgggaaggttagtaaggcacaaggaaaggaaggaatacaccgtgaaatttgttaatcttcatgagtctgtttttgctcttgttttcattaaggcacaaggagtgcagtgccaagcaagcagaggggagagctga

SEQ ID NO: 19314 - DNA, 237 bp, Zea mays
  Peptide Sequence Number=SeqID_62689
atgcaggcggcatgcaactacaccaaggggatgcaccctttcgacttcgacgcatccagagtggcggcccaggcccacacgtcatgtaactggcgcgccggttactatgtgcgaaaaactgcaccgccacttacgccaatgctgcgcctcctcaactacgaaaccgggaccgggaaaggggatactccgaaagggatccttctccgtgaaggaagcgggccccgagccccctactga

SEQ ID NO: 19315 - DNA, 1311 bp, Zea mays
  Peptide Sequence Number=SeqID_62690
atggcaaaagctcaccacgagtgctacactggcattcagaagcttatcgctgacgctatcgttgagaagcgagctgccaaagagcgcaggaggaaggtgaagaacgaccctagagcaggagcagagcactttgcaagcattgatggcgagtcccctcccaatagccagccgactcgtgcaccacgaattgctgttcgcaagaggaaggcttcctcaaacccccctggcaatgatcaaccgcctgtgggaccacctgagacagaagaggagcctctgagcagggacactgggatgcagcatcctactgcccaggatcatataacttactcaaggaggagcgataggtccattcaagttgccaacacacagaaggcagaggctgagaagaaaaaggctgagattgagatgaagaatgctaaagctgaggaggctgagaagagaaaggctgaagccgaacaagctgataagaagaaggcagaagaagctgagaataagagaaaggctgaggccgaagtagctgagatcaagagaaaggctgctgctgaagaagctgagaagaagaaggaagtagaagctgagaataagagaaaggctgaggccgaagtagctgagatgaagagaaaggctgcagctgaagaagctaagaagaagaaggaagaagaagctgaggataagagaaaggctgaggctgaaaaagctgagattaagagaaaggctgaggccgaagaagctgagattaagagaaaggctgaggctgaagaagctgagattaagagaatggctgcagctgaagaagttgtgaagaagaaggctgatgccgagaagaaggttgatgcggaggagaaaaggatacaggttgcaatccagaaacagctaaaggacaacatcaaagctttgaaaaagccggtgcccgctgccaagttaaagaagatgttccagttacaaatgtcaaaagaatatgctgagcagtgccaacagtacgaggacaggttgaacatgcttcgtcaggaggccaaagctgagattgatagtttggagaacagcattgatggccaggcaggacccagctcatcatttgatgatatacagttcccggcggagtctgatgatgatatcaacaatttgacccaaccaatccgactttctcaagacgaagtctcagtaggccaggctgatttcagtgagtttcaaaggatgatattcaagcgcctaggtgatagagtgctgaagaagcctagggagtacatatccccgttcaagatccctcgtaatcgacctgagatacccctggcccaaggctgttgcacttag

SEQ ID NO: 19316 - DNA, 369 bp, Zea mays
  Peptide Sequence Number=SeqID_62691
atggaaaaggcagcgcgaccaccggtctcatgcacgatagcggcatgctcactcacaggtgaacacacattggcaatgggccctacaggtggttccagtacactctgccacgatctctcagtctcactgaagatgatgaggaaggcagaggaagggacgaaggcgctgaggacgggagcgggagtggagaggatgacaaactttgctaataatcttaagtactttgatatggaattgaacaatgactttattgtctacttgatattagtgtctctacttaaagagtttgagacttttgttgtgagctacaacatgagtgttgagaagtggataatggagaggctaattgccatgtgtgtcttggaatag

SEQ ID NO: 19317 - DNA, 366 bp, Zea mays
  Peptide Sequence Number=SeqID_62692
atgaacaaaaaccctggcaatcgaaatgccattacaaatggaactccggttccccctccgcaggtacgaacaaccccactccatgggggaaggcctgcggagcaacagaagactgacgagcggctcgccgccgcccgttccaactacgacgacaacaacccccgctccggatcaccgagccgcagcagtgcaggcctcaggaccggctccgagcagaagaagccaaaccgccgcgcgtggtgcgcgcaaccgcccagcggttacaagcgaccccccacctttgcccagaccaacgggcgggaggggcgggcagccatgcaggcggcatgcaaccgcgccaggtggacgcacttctccgacttctga

SEQ ID NO: 19318 - DNA, 213 bp, Zea mays
  Peptide Sequence Number=SeqID_62693
atggggggatctttctccatgaatctcaatgactctgttgcacactatatagctgcggagaagaaaggtatcaaatatcaggtagctttacagcagcgaaggatcattcactatgagtggatattagattgttgcaaggaaaacatcttcatttgcatcgtaggttcttggcctaagattgactcagatgacccttcaaagaggatggaataa

SEQ ID NO: 19319 - DNA, 480 bp, Zea mays
  Peptide Sequence Number=SeqID_62694
atggctgctgccggtggcggtgctagagcggaggcagggctgcgtaagttcctcgtggagcatcagccgtgctgcaatgccacggtgcccaaggggagtgttgtcgacggtggcaagaggaaagtggcggcggcgggcgtgccgacggagccgaggtacagggacgcgcagaggagacggcctagggggcggtactcggcggagatccgcgatcaacataagggcgtgtggctgtggctaggcacgttcgacactgctgaggaggcggccaggaggtacgacagtgaggcgtgccgactccgcgggccgtcggagaacaccaacttccttgcgacgcttgattatcgtgtcccgcttccggcgctgtcgctgcacgccttgctgccatgtgtaagaacactagtatggatcggggttgagcgctactcccagcactcgaagggtatcgtggtgttacacgacgagtccaccgcaagctag

SEQ ID NO: 19320 - DNA, 552 bp, Zea mays
  Peptide Sequence Number=SeqID_62695
atggcgagagtagcgtgtacccttcgtggcaagaggctggacggtggtgtatctgtgctcttggttggcgtgaacctgatctggtgtactgcaatacattacatgaggaagttcatgaattgtattcgctactgcaccctgacgtacctaccgaccctatcggaatgggagctggaccttttggaacagcagatgccatctcgaactcatgcacatgacggcgcgcaaacatcccatggtcaagaagataaacccaatccgccgccggtaccgcccacgttggccgaggctatcgctgccttggtcaccgtgaccgctgacaacacccgcttcctgcgtgaaatggcgggacaccaacttcagcaacaaggtgggagagcttatctacagggaccccgcgaagcttcatacttggatttctcagaaactcatcccccactttacgtcaaagctgaggatcctctcaaagctgacgaatgggttcaggtcattgagcagaagtttggactcatccgatgcacggagacccagaagccattatttgcggtttag

SEQ ID NO: 19321 - DNA, 447 bp, Zea mays
  Peptide Sequence Number=SeqID_62696
atgggcaagagcaagaaaggcggaagttcatcgcaccactccgatgacaaatggaagcgcgagctgagtcccccctccgaggacttcggtgactccgagtactcggagaaggagttctcctctgagtccgaagggtcgccagcctacgcctctcccccggtgtcgtccgatgactcggacgattcccaggggatcgccgccgaggtgtggacgtacatccgggccgtcgagcgctccgggctcgagggttcggatgagtccgaggtcttttcggatgaggaggactcctccgactcgtccgaggaggggagcagtgacgacggtgaagacgagggcaacggcggcgacaagggcaacgacgacagcggcagcagcaagggcgacgacgttagtagtaaggacgacggcggcaatggcacgaccagtggcaaagcgccgctagtttaa

SEQ ID NO: 19322 - DNA, 681 bp, Zea mays
  Peptide Sequence Number=SeqID_62697
atgggaaaagaaaaacagatttgcgctgaagtccctgggttttcttcccccttttctctcacaaatcagccctcggtctactattcacatgagtcactgaccttacgcataacccctggacttatcctatatctaacccacgatccttgcctggctagaacagtaaccggggcaaagatcacggcggcgaggcttaccggcggcagtatagctccggtggggtggtcggtgacgtcggggaggtcacggcggtcacgtcggtgtgcgggtcggcgttggaggtggccggagctgctctggccacgagcgcaggcgacagaggtcgtcagcggcacctgctccggccaaaccacggcggtagggttcaatcaaagtgcacgagaagctccactgggtgatgtagaagctatgcgcgcaaggaatcgagaaatggttcagtggattacccggtccacgtgctccggcggggtcacgaactccggcgagcgtgatctcactgctctggtggggctggtcctcggttcaagcttgggaaagcttcacggcctcaagaggaagctattcgagggctcggatcgagcggaggtgggcgggattggtttggtcatggtggtcgccctcgggtggctctggcggtcgcggggaggtcgccggagctgtgggctggctcaggaaggctag

SEQ ID NO: 19323 - DNA, 498 bp, Zea mays
  Peptide Sequence Number=SeqID_62698
atggcgcagagactcacccggtccacgtgcgtcggcggggctccgaactccggcgagcacgattgcgctaatccggtggcgggggtccacggttcaagctctagcaagcttcacggcctcccagggaagctacctaggggcttggatcgagaggaggagggcggaaaatggttcgaccacggtggttgccctcgggcggctctagcgggtcgcggagaggtcgccggagctatgggtgagctccggggagtttggcgcgggacagaggatgcaacggggaagatagccgggcactggggcgggctttatagctgtggcgcaggcgtggtcatggggcggctgcgggcacgcagggattgcaacctcgctgacggagagtacgtcctcgtgccggagcaaggagttgctcaggaggtagcccaggatccagcaccagaacctgccatcaaggatctgcctgccccaactttggaaggcaagccccggttttatgcataa

SEQ ID NO: 19324 - DNA, 799 bp, Zea mays
  Peptide Sequence Number=SeqID_62699
atggcgcggcggtggtgcccggcgcagcgcgcggccctggaccccgccacggcgcaaccccgccccgtcgcgctcgctcggccccggtcctggcccctacctgcccagcgcagtcgccccctgcccgttcggcgcggcctcgacgtggccccttgccgactcggcgcggcggtccggcatgcccctgcccgcggcgcgcccctgcctgttcggcgcggtcagcccggcgcgcgtgccccgcccctcctcggcgtggtcgtagtgcccccggcacatgcggtcccggccccggtgtgccccgccctggcgcgctcgcccccaacccgaccacctcgacacggctgtccgcggtgcggcctcgcccggcgcgtggcccccttgcgctcggcccctccccacgcagtagccccgcggtgcggcgtggcgcgcccgctcctgcctgcggcatgcccgcctcggcacggctcccggcgcgctctcccggcacgctgctccctatccgagcgcagcgtggccccagcgcagcgcggccccagctcgcgcggccgtggtgcccctgcgtggcatggccccctgcacgcgacttcacccgacgtgacgaactggggtgtagttcgcttcgccgtcatgccgttaatggggctcggtctacatagtgataccccgctgggtcaccttggtagtgatcaatggagagtcatgatctccgagcagaaagagaatcacgacttgtgggtaaaagatgtttggattacaggtggtgatgagaatggtggttttggtattgactatggtaatg

SEQ ID NO: 19325 - DNA, 369 bp, Zea mays
  Peptide Sequence Number=SeqID_62700
atggccagcgagggggggggggttgggcacaccgcggggagggggtcgccgagccagggaagaaaggggcgaagaagggaggaagaagaggagtcggggctcaccgtgggaggagagaaggcgatgcaggcggacggtgtcgagggtggctccgatcgatgtgggagaggtggaggagggaagggaaaggaacgggcggcggcggctactgtaaacgcgtgcgcgtcgcgcgtggggaacgcagggaggtgcgggcgcgctggggcggctgggccgtgccacgaggccggcccaggacaggggtgggccgcgcgggggggggggggggactcggctgggccgcgccacgacaccgagctaggccgctag

SEQ ID NO: 19326 - DNA, 210 bp, Zea mays
  Peptide Sequence Number=SeqID_62701
atggcggggcctcgccgtagatttcggggccgttgcgccgctcggttccttaccgcgtctacaaattggcggtccctcgaccctgccgctcgtgccctatttccccaacacagcccaccacgcagccgcgcccgccattgccgccccgcggccgccgatggagaaacctcctctgtgcttgcgccccgcctccgatttgtggtcaagtag

SEQ ID NO: 19327 - DNA, 576 bp, Zea mays
  Peptide Sequence Number=SeqID_62702
atggcgcatgcgaggaaaaccgcaagcaagtccactatacctattggcgtgcctcgtcatcagttggcttccagacatgaagggagcagtagcggcagtaacgatccaatcggagacttggaggccaaagtggaagagcttaagacggagctacatcaccgaagtagggtgagggcacaggacggtcagcgtatagctgagttggcagctgacgtcagacgcttgcaagacgagctttctgaacgagatctggtgattgattgggccgtcaactcacgttcaattgcttgggaccacgaagcaaaggctcgagctcgggtgaatgatcttagtgcggccctcgacagcttgcaggtgtactacaatactttacatgaggaagtacatgtactgtatgcgcgactgcaccaggacgtgcctgctgaccctgttgcaatgggagctggaccatcagggacaacaggtgaaggacctgatggggatttggacctttttaggccccctccttccatgaacctggctgacgatctgtctcctgcagcagggaatgaagaaaccaaggacgacgaagactag

SEQ ID NO: 19328 - DNA, 357 bp, Zea mays
  Peptide Sequence Number=SeqID_62703
atgggggctcgccacgcgcgcaaggcacgccgggtgggctgcgcaccgtgggccacgagccgcaccagggctggccacgatggtcgcgcgctggccacaccacgctgcaggctcgccgggagcatgccaggccgcggctaccaggccgcgcagcgagcacgctgggccacgcaacgagcacgccaggccgtgctgcgagcacgccgggctgcgcgactaacgcagagaaagggaggggaagggagaaggagaaggagggctcaccatggcaatgaacctcagcatgacgacgacagcgacacctcggttttggtttataacttcgaaattcaaatgagcttcgagaatttcgaatga

SEQ ID NO: 19329 - DNA, 303 bp, Zea mays
  Peptide Sequence Number=SeqID_62704
atggcgaagcccggccacgctactcctcgtggtcctctcctgcggaagcagaaaccctctcgaccatatatcccggtggctgggatgaaggccaagtcacaccaacaaccagatcaaggagagcttacgcttggggccatggatgttttgatgattaggaaccttggagaggaccagcaaggacttgggaaaggcctaggtgttgaggaggagcagcaagggcgcccacgacaggaagggataagccttcgtggcgaggtcactcgtgtgtcacgggtgataaccaatggagccgtggtgtag

SEQ ID NO: 19330 - DNA, 690 bp, Zea mays
  Peptide Sequence Number=SeqID_62705
atgcatccggactccaattgcaacggacttgatatggttggaaagataaagagattatccaaccaacccaactgggataagccttcgtggcgaggtcaatcgtgtgtcacgggtgataaccaacagagccgtgctgtagtgattgcgaggaaccgttggctcgtagccttggatcatcaacgtcgagatctccactcaatcaaattatcgcatctcacggaagatcgggccgtgtcttctatcacctgtgagcacttaacccttgcatatgtcaactcgccatcggggttcttaagaccagatcaggttcatgccaaccgagagcacagatacaccaccatccagcctcttgccacgaagggtacacgctactctcgccatctctccactcccattgtgtgttatcttattatggtattagtctgctcaaggcaaagcttacccatgatgaggcatgtgaccagttataaggtcctcgatcatcaagcctacattgacatggtccttaatcgactcagacgaagacactacactgagactcccttctcatgcaagccaaccgctcagtctcagctttattattttcaacccaaagtttggtacctggcagagagcaaggctaagcataagaaaaaccttttttataaaacaggggatcaaggaaaggagtataggttttggctattttaa

SEQ ID NO: 19331 - DNA, 378 bp, Zea mays
  Peptide Sequence Number=SeqID_62706
atggcacatgggtatgtggcacaagccttcggctggaagtgccaaaagttcatctataactatgctaaatcgactgtccggaataccgtagattattccggacaggagaagccttttggaaaaacaggccaagcgcggaccgtccgggcccttgcggcggaccgtccgcgacacaaggatgaccctcggacagaaccaatgcaaaaacacaagtttccactacagactgtccggaggaaaagcaaagaccgtccgagccctcgcgcggaccgtccggcctcaggcgcggaccgtccggtcgccgttgatctacaggggcggaccgtccgcacccggagggcggaccgtccgcgctcagcagaaaggcccaacggctag

SEQ ID NO: 19332 - DNA, 930 bp, Zea mays
  Peptide Sequence Number=SeqID_62707
atggtggacggtccagaaaaaatcaagggaggggttagagttgacgctggaacggacgcttctcctccctcgctttccggtaccgagcgtgcatcggcagagctgactgtgactggtgaccggattagagaaggaagcctagcactagcagaaatagtaggcagtagcagggttgaccggaggggcagtggtgacccaacaacctccctcatcccctccccttctttcttattgccaccactccacgtctccaccaaacaaggcaacaagggagaagtagatctgcatctgcgagaggaggcagcgggggtggtgatgatggagagccagccgctgcaggccccgacggccacggctccgccccccggatctgcggagccagccggagctccgccggccgtcacccccggcaaggagttcacgcgcacctgcaagggcctcgtcgtcgtgctcatcggaggatacgtgctgctccagctcctcccttcgtcactcaactacctcgccatcatcccatccaagacaatcccctatgtatggaccgttttcactgctggttacatagagcaagtcctcccaggggccattggcagttctcttggtcttctcttttgtggaaaggacattgaaccagcatggggccgcaaggaattcttgaagttcattattttgatcaactccatctgtggcattcttgcattttgctttgctattggactctactacgtcactggaaaggagagcttccttatcatggccttcatcgtgcctgattccattaacttcctgccaactttggtgtccgggatgtacgttagctggctttacctgaggtacttccaaaggaacccactgactggacttaagggtgatcccagtgatgacttctccttccccagtttattcccagctgccatgagttacttttaa

SEQ ID NO: 19333 - DNA, 141 bp, Zea mays
  Peptide Sequence Number=SeqID_62708
atggcggagaggatcagggacgaggtagccgggatgttcagggacaaactcggtgttagtgtgtcaggggctgcacggcttcacgtcaggctcgacccgatagcttatgtcatgggccacaagcagcgggtctccacctga

SEQ ID NO: 19334 - DNA, 963 bp, Zea mays
  Peptide Sequence Number=SeqID_62709
atgacggatgcggagaaggaggtagcaacagaaagacggatggactcaccgcctcgatgcgattgtggagaccgtgctgtcatcgacgaagactatgacaggcagttctgttgtccgaacattgattatccatacgggtggcgtaagtgtcgtttcagagagtggttgtatggtcctttgtcccattggccagagccagaggtaaaggaaaagagatacatggggtgggcggcagaagaggtcaaatttgatccagtactctgcaaatgtggtattgaagctaagtatggattagttccttcggagcttggtgttggatatttttgtggacatatggtcgattacgacgaggagacgaggaaatgcagttgggagagttacgacgacaaaggagaggtgatgcgcacaatagagtccaagagaataatgggacagaagatgcgttgtggatctcggctcgtcgattcgtacattaacgatcgcatacgcgacatgcgtagggaagcaaaatctgccttttatgatagcccgaagcgtgcagagtataggaggttgaaggcggcagatgagaagagagcacaggatgtaagggaatgggaagcggctcaagccgagaaacagatgttggataatcttgctgatcgcctcaagggaaagattggaagcggcgtaaactatttggccgatgaggcgcatgcgagatatgttcaggataaaatggcaatgatggaggaggaggacgacgacacatctagattgagtgagcttatcgccctcgcagaggcaggattacatgaagaagaggaggacgacacgtcaaggttgagtgagctcatcgcactagctgaggcaggattacgtgctcatcgtacctctcatcgtacctcatctcctctagaaacaggtcatgggtccggacccgcagaacgggcaacacctagcaatcaaaagaattttcattag

SEQ ID NO: 19335 - DNA, 348 bp, Zea mays
  Peptide Sequence Number=SeqID_62710
atggacggcggcgagcacgaagcggaggagtcctcctacaagcgccgggagcgcctgctcgccctccgctccgccgcaaacgcgtctccggcaggggctcctccgccgacggccgcggggagcatcctcccggaccctgacctcccgggagacgaggccgcatccgtgtgcccgaccccgccccagcggttcgactactacaccaaccccgccgccgccttcacttcctcctcaggaggtgccacaaatcccacctggtcccacaagcgcaagagccctcccgcctgctacgccccgcctccgcctccgccggcttacggtccgtactaccctacaagcacctactag

SEQ ID NO: 19336 - DNA, 1329 bp, Zea mays
  Peptide Sequence Number=SeqID_62711
atggctgaaaggtaccaactcccacgaagttgcgttcctccaacgacaaggcgaaaggactgcgggcatcccccatccgggggctcggaaggtggaaagacacgatgcataagggagcgcgaagacatggtcgcctttcaagggggtcacccaccttttaaaggcgactctccctacttgcgtccccagccgtcatgggctgagtcttctccaacacgctccaaggtcctccccctacggcgcgggggctggatcccacacatcatgcaagccggcccagagcagaagaagccaaaccgccgcgcgcggtgcatgcaaccgcccagcggttacaagcagttctccactttttcccagaccagtgggcgaaagggcgggcagccatgcaggcggcatgcaaccgcgccaagtgggcgcacctctccgacggcgcacctctccgacttccaacgcgcccagcatggaagcccacgcccacgcgtcatgcaaccggcgcgccggtcgctacgtgcaagcaactgcaccgccactcgcaccactaccgcgcctcctcgactgcggaaccagtaccgtgactcgaggcgacccagcgcacgcccagcagcgccagcctggcgcgacggtcaatacgaccaaaaatgggctggcagcaatggcggtggcaggcgggcaggagcagcggtcacgtcgtcagccaagcttacgtcccatccgggggcagctggccccttggaggcgttcaacagccgcctcagagcacgtgggctccacacccactactggtcagaggttcgaaggccggcccctcggaagggttcaacggctgcctcaggccactcaggctccacgcccactactgatcagggcgggaacgatcttgtaacggaatcccatcagagggaggcatcgagccctcggaccccgtcgacaggggaccgggtccggcagatcacccgcaggtacttttgggcgtgcctctgggcctctagccgacccctagcaaatggggcacggacgtccgctcggattacccgccagcagctcaccggagacaccatgttcggcgcccaccgagggcaacatggcgcttcccccctccttgcggaaaggcgacgcaggggcgtatgtaaaaaagtcgagtctgtccctgatcgtcctctcgccctatgcagaggctcgggggctgctctcgcaaacccggctccggccaaaccgttgacagcgtcaacaaaccagcccgagaacttggaacccgaccgtgcacccgggctacggccagctcgcatgagggaacgaccagaccagccgaagcattacgcgaggcattaa

SEQ ID NO: 19337 - DNA, 504 bp, Zea mays
  Peptide Sequence Number=SeqID_62712
atgtctccctactcgacgacggacgacgctgcacgcggggcatgctggggcgaactcgccagcgcacgagagttgggcgaccgcgccctaggacctcgcccatggcaggcgggctgttcggcaaaccggtcggcgcccacgccacctcacctagctgcgccggggagggccgggctcgctggccatgccatggccacgccgccgggagccatggccgtgctaggagcacgatgccgaccgagccgcaccgagcgggcaggccgcgacggtcgcgcaccggctgcgggccgcgccgcaggccgccgcgacgccactggccacgccaaaggccgccgcgctctggacgagggccgtctgcccggcccgcgcctgggccgtggccgcacgcccgcgcagggccgctgccccgccgagcagactagccgccgagctgcgtgcctgaactgtgccatggccgcccgctggggagccgaggctgcgcgcccgcgccccgcgccgccatga

SEQ ID NO: 19338 - DNA, 84 bp, Zea mays
  Peptide Sequence Number=SeqID_62713
atgactaagatatgcgtatctattcttcttgcatctactttacattttacgcctagttgtaacaccctgaatttgggggtataa

SEQ ID NO: 19339 - DNA, 324 bp, Zea mays
  Peptide Sequence Number=SeqID_62714
atggcttgttacctagaggcagttgatctaggtgtttggagagtcactcgtgacgggatgaaaccccccaagaatcccgagaaacccaccacgaataatgagcttgttagagacatgtattctcgtttgaatctaatcatcaatgagctcaactctattggcataaataagctaggtgatgcagacattgttaggatgattatctccctgctaccacaacaaagatacgggagcatcatcactattcttcacaacatggaggacttgggtacaatgaccccgaccattgtgattgggaaaatcgcggcctttgagatgtcgtga

SEQ ID NO: 19340 - DNA, 750 bp, Zea mays
  Peptide Sequence Number=SeqID_62715
atgccgctgctggcgaggagcacgaccgcggggcctcggcggcgcgccttcgtcctcgctctcctcctgctgcccccgctgtttcttattctgctccaccgcacctcatcgccctcgcttcggcccctccccgcgccccgcaagccctcttcccggtcccagtcctgcgactactccgccggcgagtgggtgcgcgaccccctcgcgggctcctcgctccgctacgacaacacctgcaaggagatcttcaagggatggaactgcatcgccaatggcaagcccaacgcccgcgacctgctcagctggcggtggaggcccgtcgggcccgggtgcgagctcccccgcctcgacccgcgccggttcctggagcacctcagggacaccagtatcggatttgtgggtgattcgttgaaccgcaacatgtttgcctcattagtatgcatgcttaggggagtaagtggtgaggttcgcaaatggcgtcctgcagaggcagaccgtggcttcaccttcctgcgctataacctcactgtggcataccacaggacaaatctcttggtacattatggtaggtggtcagcaaatccaaatggaggtactctagaatctcttgggtataagcatggttacagagttgatgtggatattcctgaccaaacatgggtagaggcatgtagcttccatgatgttcttattttcaacactgggcattggtacgtgaacgccactattcatgtgcttccttgccattaa

SEQ ID NO: 19341 - DNA, 204 bp, Zea mays
  Peptide Sequence Number=SeqID_62716
atgtacgtggcgaagcaccagatctcctactgcaaatgctcagggacgtatcgccttgtcgtggtagcgtctctgggtctgctggataccttgggtgccccaaaagcaaggtttgctggcaacattgcttctgacccatacaccatgaagaaggggatgttgttgcttggccaagaactgacaggcttcacatctcttgactag

SEQ ID NO: 19342 - DNA, 690 bp, Zea mays
  Peptide Sequence Number=SeqID_62717
atgcagtacttgctagtctgctacctagaacattggtgcaatggtgctgagcagacagagcagaacactggtgctgtgatggtggccttccttgcaagtttgaaggcattttggagtccccagttgttaatggataccgtaacaagtgttcgtgagggaagatgtccagctgaagctgttgtttcacagaatgcagaatcacaaatatcagaagtcatgcttattgtgcaggtgtgttcgacaagtgttgatgaagctcttatgaaagaagagtttgacaagctgtctgctgccctggtacaaggagcagcaacatgctcacctcccttgccactgacaactattgtagtgcaagatcataaagggatatcaaatgctgcacctactgattgcccactgatcccgctattggtaccaaagggagataagttggatggcacatcagaagataaaacaagaatccatgatcacataagcaacttaaagttctctatatcaccaacagcttttttccaggttaatactcttgctgcggaaagattgtatgcccttgctggtgattgggctaatctcaattcagacacattactttttgatgtgtgttgtgggactggaactattggcctgaccttagcacagcgtgttggaatggtgatttcttttacgccccgtttggatcattgtaattga

SEQ ID NO: 19343 - DNA, 333 bp, Zea mays
  Peptide Sequence Number=SeqID_62718
atggcccctcggaagggttcgacaaccgcctcagagcactcaggctccgcgcccactactgatcaggggttcgaaggctggcccctcggaagggttcgacagccgccccagagcacgcagagtgaggactctgggtacgtccgttacatggccgaggctcgagctacgctcccgaggagcgattttgtaacggaatcccaccaaagggaggcatcgagccctcggaccctatcgaacgggtctgggtccggcaaatcacctgcagaggctcgagggctgctctcgcaacccggctacgaccaaaccgttgatagcgtcaacaaacctgcctaa

SEQ ID NO: 19344 - DNA, 258 bp, Zea mays
  Peptide Sequence Number=SeqID_62719
atgaagccgggggttgatttggagggctcgcggatgtcctcggcttccctctccgccgacgacctccgcaggcgggtagcaggtacgatagggaggctggatgccggggcccttacccagcccatgatgcgtctcgagcgtgggtacgtgtccctgaggtcggcatttcgtattgtaggaccctggacttcattgggtgcaccggaggtgcacccaatgggtgtagcccccgagcttcgagtagattttggaaaataa

SEQ ID NO: 19345 - DNA, 453 bp, Zea mays
  Peptide Sequence Number=SeqID_62720
atgggcaagaacaacaagcgcaagcgtgagccgactcctccatcagaggacttcggtgattcggagtactcagaggaggagttctcctctgagtccgaggggtctccggctcccatccctctgcgtgagtcgtctgacgattcagacgactcccaggggcttgcggtggaggtctggacttacatccgggccgtcaagcgctccgggctcgagggctcggatgagttggagtactcctcggatgaggaggactcgtccgagggcggtggcggcgatggcgacgacgacgacgacgacgacggtggcggtggcggcaatgacggtgacgacggcgatgacgatgacggcggcggcaggggcggcagcggcggcagcaaggatggcgacgtcggcagcggcaggggcaacagcaggggcggcagcagcagaggcagcaacagggccagtggctag

SEQ ID NO: 19346 - DNA, 493 bp, Zea mays
  Peptide Sequence Number=SeqID_62721
cttctgggcggcttctggccgacagaagcagaagctggagccaaacggggttgtagcccacgcgacgctcctccgccgccgcgaacccatcgcaccggcagctctccagctctccaccagcgccggcagctctccagctctccaccagcgccgctccgatttcgcccccttcacgcccctcgtctcctcctcccgctgtccagatgcgaacggcaccgcggccgccgccgccgtcgcttgccccagctgcggagacgcgttcccgtccgaggtcgccgtctccgagcacctcgacggctgcctcgcgtcggcagggggcgcccgcgcgtgcgcttccgcgtacctcgccgccgacctggccccgcccgcggcctccgtggaggtggtcaaacgcctgctgggcaacctgctgcgggagcccgagaacgacaagttcagatatttctttacttcttcagatgattgctggtcatacgtgaaacgaggaaagcag

SEQ ID NO: 19347 - DNA, 126 bp, Zea mays
  Peptide Sequence Number=SeqID_62722
atgacttctgaaacaatggaaatactgagcaacaaagaagtaattcaagtaaaccaagatcctcttggagttcaaggaagaaaaattttaggacaagagcttatgtgtttcatgatgtacctttag

SEQ ID NO: 19348 - DNA, 453 bp, Zea mays
  Peptide Sequence Number=SeqID_62723
atgatgctgcagatcattgagcaccgcaccgagacttcgatagactttgcgatggagggagaagctgcttcctccacaccacagcggccagggaattgttgcgacaccctctggtggtccaccgctctggtggtcgccgtcgcgaccggaggccagggcgaccgcaacaaacgcctgcgaccacagaagggtagcagcggttcatgccctatgcacccgaacggtcgccacagcgccgcggagtgtcgcgagatcattgacctcgcaaaacgcgtcagcgagcggcgcgggcagtcttccaaagacggctccccgcctcgtcgccggcccagcaaggaaaaggtggacgacggcgaggtggccacggctgagcgggacctcgggtatcagtcgcccgagggggacctgaaggatatcttcgccggaggttcctactccggtgaagacaactag

SEQ ID NO: 19349 - DNA, 477 bp, Zea mays
  Peptide Sequence Number=SeqID_62724
atggccgaaccgcgatttccggcctcggctgacccagcaagcaacgcccgcgtccttaaatgccagctcggcgccctgagtcaaccaaacgcgaactcaccggagcccaggccgtgcgtaggtggggaatcggtgacccgacaaccagataagccgcgccgccgcgaaccctcctccccgtcgacgcccaaagcctgtgatcgggtccagaacctgcaccaagttagagagaagccacccgtggagtcttcgggtggatttggcgaccgcataagcctcaatcgctcgccgatctgttacagcataccgctcggattggattggcgtaaccgtccgatcctctacggatggctaggattagaagctaagtaccggttcgaccagggcgattggcgaccgttgatccgaaatcccgtggtggagattagatgtagtgtactcgctcgccgcggctcgatctggtccactgtcgtctaa

SEQ ID NO: 19350 - DNA, 1686 bp, Zea mays
  Peptide Sequence Number=SeqID_62725
atggggatgctggcttctgctctgagttctttcaacaagaaaagcacgttgttgcagatgcttacctcactggcgaagacagtaggcaggattccagcttcgtgggggagacatgcgtggagcatcggaagcgaagatccaaggagagcggtccatgctctcaaggctgggacggctctcacgctggtgtccctcctgtacatactcgagcctttcttccaagggatcggaaagaacgcaatgtgggctgtcatgaccgtagtcgtcgtgctcgaattcactgcaggagcaaccatatgcaaagggctgaatagagggctgggaacagtgctggcaggctgtctagcacttctcatcgagctcgtagcagccggaaccgggaaggttctgcgcgctttcatcgtgggggcttcggtgttcatagtaggatttgccgccacatataccagattcttcccagcgatcaagaagagctacgactacggtgtgctgatcttcctcctgaccttcaacctgatcacggtgtcaagctaccggcagcaggacgtggtgtcgttgacgagagaccgcctgagtactatcgccattggctgcgcgatatgcctgttcatgagtctcttggtgttgcccaactggtccggagaagacctccacagtagcaccgttggcaaattccaaggattggcgacgtcaattgaagctcgtagagattgttatcaaaacttaccgcaaattaattcttaccgaagaaaggttgcagcttgtgtgaatgagtatttccgagaccaggatgaaggcgacgacgttcttggcaagcaggaagcaagagcttccattcagatcggctatagagcagtcttggactcaaagtccagtgatgagaccctagcacactatgcgagctgggagccaagacactcgatgcattgttacagctacccatggcagaagtacgtgaagctcgggtccgtgctcaggcacttcgcctacacggttgctgcacttcatgggtgtctggaatctgaggttcagactccgccgtccgtgagatcgctgttccgaggcccatgcacaagagttgcacgagaagtagccaaggtcctgcaggagcttgcagcgagcataaagcatcaccggcggtgcgcccccgacgtgctctccgaccatctccacgaagcgctgcaggatctgaactccgccatcaggtcacagccgcggctcttcctcggctccaagcacgcgtgcgccgccaacaagcgggtgctgctgatggaactgaactccgggtccgggaagctttccgcgtcgagagcagctcttcgctcgttcaagaccgacgcgacagcgctgtccgagacgaggaacgcccggtcagaccaaccgccgccgccgtcggatcgcagcgagaggagcggcggcttgctgcggccgacgctcagcaagatcgccatcacgagcctcgagttctccgaggcgctgccgttcgccgcgttcgcgtcgctgctggtggagatggtggtgcggctggagctggtgatagaggaagtgaagaacctggagcgggttgcgaacttcagagagctcgctactgggcataatcacctgatcgtcgatctcggtagcaaggagaagacgaggaacagtaatgctgcggcgttacaccctgtttctgctgcagctgaatga

SEQ ID NO: 19351 - DNA, 261 bp, Zea mays
  Peptide Sequence Number=SeqID_62726
atggggcgcggcgacgtgctcgagctggggcgtgacgaccggcgaggtggagcgggagcagagctggaggctgggcggtgcgccgggtggctggggacggcggtgggcggctctagtggcgcgccgggtggctgcgggtgggcagggtggcgctgttggcggcgcgggaggaaaaaacagaagaatggagtgggaggaaggagaaagaagaaacgcggctgcagtggaggtctaagtcaagtgtccagcggcagccgatag

SEQ ID NO: 19352 - DNA, 322 bp, Zea mays
  Peptide Sequence Number=SeqID_62727
atggctgcttaccgctgggaccaggtcgaggagccatttgcacgacaccagcgtgcgtacgtggagtactcaaacgagcttgacgcacttactccttcgatggtgacctggcaactgtatcttgatccatatttcgccagcatacagttgagcagcatgtgctcaatagacgaggacatctacctaatgaggttcgacagacagagacagaagaaggtcacgggcttcgagacccaccaccgtgattacattgatgaatgggaacaacagggggatcttaactatgtctcgaacaggcgcacacaaactaccacttctgaag

SEQ ID NO: 19353 - DNA, 610 bp, Zea mays
  Peptide Sequence Number=SeqID_62728
gccaggggatcgacgccaaccccagggactacctcacttcttctgcctcggcaaccgggaggcgaagaagccaggagagtacgtgcccacggaggaaggctgagctgacactggctacatcaaggcccagcaaaaacagaaggttcatgatctatgtccacaccaagatgatgatggtggatgacgagtacatcatcgtggggtcggcgaacatcaaccagcgttccatggacggggcgcgggactcggagatcgcgatgggcgcgtaccagccgcaccacctggcggcggcgagcaggccggcgagagggcaggtgcacgggttccggatgtcgctgtggtacgagcacctgggcgcggtggacgacgcgttcacccggccggacagcgtcgagtgcatccgcaaggtgaacgccatggcagacaggtactgggacctgtacgccggcgacgggcctgagcgtgacctgccggggcacctgctcacctatcccgtcgccgtcggcactgacggctcggtcaatcagctgccggggatggagttcttcccggacacgcaggcgcgggtgcttggcgccaagtccgactacctgccgcccattctcaccac

SEQ ID NO: 19354 - DNA, 1635 bp, Zea mays
  Peptide Sequence Number=SeqID_62729
atgtccggactccggacgctgggtgacctgatatcgacgggagggatggcaaggatactgctccatggttcgcttcatgtcaccatctttgaggcagaggagctgtcgaactccagcaggcccagcagccaggctcccgggttcctccgcaagctggttgaggggatcgaggacactgtgggcgtgggcaagggcaccagcaagatctacgccaccatcgggctcggcaagacccgcgtcggccgcacccgcaagctcaccgacgagacggccagcccgcgctggtacgagtccttccacgtctactgcgcccaccttgcctccgacgtcgtcttcaccatccgggccaagaaccccatcggcgcctccaccgtcggtgtcgcctacctccccgtccgcgatatcttcgagggccacgaggtggaccgctggctccacctctgcgacggcggcggcgacgacaaggaccgcacgccgctcgagagcggcgggaaggtccacgtcaggctccagtacttcgacatctccaaggaccacagctggggcaagggcgtgcgcagtggaaagtaccccggcgtgccctacaccttcttctcgcagcggcaggggtgcagggtgacgctgtaccaggacgcgcacgtccccgacggctttgtcccgaggatcccactcgacggcggccggtgctacgaggcgcaccggtgctgggaggacatcttcgacgccatcagcggcgctaagcacctcatctacatcacgggttggtcggtgtacacggagatcacgctactcagggacggcgcccgcccacccaggcccggcagcggcgtcacgctcggcgagctgctcaagaagaaagccggcgagggcgtccgtgtgctcatgctcgtctgggacgaccgcacctccgtcggggcgctcaagaaggacgggctcatggccacccacgacgaggagacgatgaactacttcgagggcaccgacgtacactgcgtgctatgcccgcgaaaccccgacgactccgggagcatcgtgcaggacctgcagatctccaccatgttcacgcaccaccagaagatcgtcgtcgtcgaccacgacatgccggtgcagcggtcgcagcggcagcggaggatcctcagcttcgtgggcgggctggacctctgcgacggccgctacgacacgccatgccactcgctgttccggacgctggacggcgcgcaccacgacgacttccaccagccaaacttcgccacggccgccatcgccaagggcggaccgagggagccgtggcacgacatccactgtcgcctcgaaggccccgtggcgtgggacgtgctctacaacttcgagcagcggtggcggaagcagggcggcaaggacttgctcatccagctccgggacctcgccgacgagatcatcgccccgtcacccgtcacgttcccgaacgaccccgagacgtggaacgtgcagctctttcgctctatcgacggcggcgccgcgttcgggttcccggacacccccgacgacgccaccagggccgggctcgtcagtggcaaggaccagatcatcgatcggagcatccaggacgcctacatccacgccatccgccgcgccaggagcttcatctacatttga

SEQ ID NO: 19355 - DNA, 432 bp, Zea mays
  Peptide Sequence Number=SeqID_62730
atgtaccgagaggcgttgtggcagaagagaggtcatcctcgggagttatatccagacgtatctagtaaggatgctcatgttcctcctgaactccccgtgcctaactgtgactgtggcagactggcttggggtcacctgaggtgtttctttttccagtggatcgacggtcctgataaatttgaccctcgatatcttcttttcgctaattggttgtgtggaaggactagtcatgagcattttaagcgttggttacctcctcccccgaatcctccaccaatgacggatgtggagaaggagccatacgggaggcgtaagtgtcgtttcagagagtggttgtatggtcctttgtcctattggccagagccagaggagacgaggaaatgcagttgggagagttacgacgacaaaggagagagattggatgtggcgtaa

SEQ ID NO: 19356 - DNA, 471 bp, Zea mays
  Peptide Sequence Number=SeqID_62731
atgccttccgtgctttctgactacttcgaaaagcggatcctgaaaacgacggagtacaccggccgcagaaggcacacgctacaagacaatctgatcctgcaggctcgggtcttcacgctggaagggggctgtagcaccctcggcatcgacgacaccttcagcgaggtccgacccagcctcggacggcgacgcggtcccgggacttctccgggaatccggcccgagcaggcggctcggccggttaccccaggggcctcggccaaccatcttccaagggcgccagcccggtccgaggcctcggctgccaactccgcctctgttcgtgctgatatcgctacccctggcctcggctcgtcgaagagcggccaaggggtctctttaactaagctagaggagcctcagacaataaggccgatcgagccgagggattcctacgcctccgggatacggatacctcactcgtcaccttga

SEQ ID NO: 19357 - DNA, 747 bp, Zea mays
  Peptide Sequence Number=SeqID_62732
atgtcccctggcgtgggtgcgggcccctggtatggtggcataggcgttgaccctcgatgcagcaatgcaggtgtgtcccttgacgcagacagcaagctaccgagacagcaggcaacatcaccgaagcaaggaagctttgagcttcggaaaaaacttcaggggtgtgaccgcggctccgcaacctcttcgacaaatcccacaggcatcttgaagtcgcgactcgtcccgccatctcatctttcgtcttcccagatttccccatcaactcgggttattcgtctgaggatccaagatcaacttcaggcaagcagccaaggcacaggacatgtgaccacgccaaatttttgtagatactccccatgtctgatggattcagcagactccatagccgacaaggcaattggaaggatgcaagagatttcggacaagatattttccgtagcgagggaaacaatccgtcctggacgcgggttgacctcatttgatgctaccaaacttcgtgtagctttggaggagatagcttgcatgctggagcaagactctctggtgttgcaagagcatttggacatcgtgaacaacgtaaacatcccggttgacagcagctatgaaccttctaccttgtcgtcaccacccccatctgacgacgaccttactccacattgggactttgcggagcatttccaaaacttttggggtgttgaatatgactccgatcagatgccttcgtttagtgacaatgatgtttaa

SEQ ID NO: 19358 - DNA, 1236 bp, Zea mays
  Peptide Sequence Number=SeqID_62733
atggacccccgcgtgtggagccggctgccgcagccgctggtggaccgcgtgctggcgtgcctaccgacgccatccttcctccgtctccgggccgcctgccgccgcttcggcaacctcatctactcgtcgccgttcctccactcccacctcctcctctcgccgcacctccccttcttcgccttcgccgtcccttccgcggggtacccgtacctcctcctgctcgaccccaccacgcaggcgcccgcgccctcctggtcccgcctcccgctgccgctgccggccgcgcccggcgccgtgcaggcggcgttctccccggcggccgcgtcggcgggcctgctcgcgttcctgtcggacgcgtccggccacaagacgctgctcctcgccaaccccatcacgcgcctcctcgcgccgctgccgctctgccccaccgcgcgcctctcccccaccgtcggcctcgccgcgggacccacctccttcatcgccgtcgttgccggcgacgacctcgtgtcccccttcgcggtcaagaacatctccgcggacacgttcgtcgccgacgccgcctccgtcccgccctccggtttctgggcctcgagttccatcctgccccgcctctcctccctcgacccccgcgccggcatggctttcgcctctggaaggttctactgcatgagctcgtcgccgttcgcggtgcttgtgttcgacgtggcaaccaacgtgtggagcaaggtgcagccgccgatgaggaggttcctgcggtcgccggcgctcgtggagctcggcggcgggagggagcgcgaggcggtggtggcgctggtctccgccgtcgaaaagagccgcctcagcgtgccgcggagcgtgcgcgtgtggacgctgcgaggcgagcacggagctgctgccggcggaagcaacggcggcggagcgtggactgaggtggcgcggatgccacccgacgtgcacgcgcagttcgcggcggccgagggcgggcgcgggttcgagtgcgcggcgcacggcgacttcgtggtgctggcgccacgcgggcccgcgagccccgtgctcgtgttcgactcgcgccacgacgagtggcggtgggcgccgccgtgcccgtacccgtacccgtacgccgcgggaggcgcggggttcagggtgttcgcctacgagccccgccttgcgacgccggccatcggtctcctggacgccacggcgccggcggcctttttgcatgggatgcagggctag

SEQ ID NO: 19359 - DNA, 822 bp, Zea mays
  Peptide Sequence Number=SeqID_62734
atggcgacggcggcgaaggcaagggctccgccggccgtgacggcttccaaagcggcggcggcagcggtggagctggaggagcacgtgcactacaagcacactgatgcgtgccaccaactccggtggacagccaaggaaagctatgagtacatgtacgcgcggccgtggagcagggtggtcgacttttatgccgagctcgtgcgcgccggcgccggcgcagcggggctcgccaaattatttgggaatgatgagaaagattacacactttatactgctggagaaaattatctaacaccatcagaaaaaccaacgacaactaccttctccaaaggtcgtggaggaagatgggaaagagtaacatttaaagttgttatttcataccatggggggtcgttcgatggctggcagaaacagcctggccttaatactgttcaagggttagtggagaaacatctcggacaatttgttgatgagcgaaaagctaaacagcttgaagcaagatctttgccgatagaaggctgtgcaattgttgctggacgcactgacaaaggggtgactgctcttcagcaagatcacaaaggaggcatggtggtcatgtgcgtcgagctagtcgcaaacaggttcctgcgcaagatggtcagggttcttgtggccactgccataagagaggctgctgccggtgctggcgccgatgctttgctgaacctaatggaagccacggacaggcgtgccacggcgcccccggcaccgccagaaggcctgtgcctcgtagacgttggttatgaagattttgataagcagaggtgcttcatagtcgattga

SEQ ID NO: 19360 - DNA, 594 bp, Zea mays
  Peptide Sequence Number=SeqID_62735
atggcggcgcaaggggcaggaagggcggtttcctcttctctggctaagtctctcgggttgcgaaaacctaagagggaggcaggaagcggagcaaagaaccgtcaccagaccctctcccagggaccgggaaagggggataccccgaaaaggatccttccccgtgaaggaaccaggctccgagcctccctactgatcagaggttcgaaggctggccccccggaagggttcgacagccgcctcagatcgcgtgggccctacacccactactggtcagaggttcgaaggccggcccctcggaagggtaccacggccgcctcaggctactcgggctccgcgcccattactgatcaggggttcgaaggctggcccccgaaggaagacgacgaactccgctccgcccgacccagggctcggactcgggctaagtcccagaagatgacgaactccgcttcgcccgaccccagggctcggactccgccctggcctcagccgacgacctccgcctcgcccgacccagaggctcggactcagcctcggtcacggaagacggactcgacctcggtttcggaggagcctccacatcgcccaacctag

SEQ ID NO: 19361 - DNA, 222 bp, Zea mays
  Peptide Sequence Number=SeqID_62736
atggcctttgttgcctcagtcaaatcatcaagccttgcctttggcacatcagatgaaggtgccaagagcacctctaggatagattgctctccggtcatctctaatgaaaaagtgtgtgcttcgaaactggctaacactagttcagaggcattgaaagcgttcgaagcaagcttgaaggtagaacaggctatacatcaaatgggtacaagcagcaaatgttga

SEQ ID NO: 19362 - DNA, 219 bp, Zea mays
  Peptide Sequence Number=SeqID_62737
atggataagcaggagccagtagccaatgttgaacaaaagataggtctctctaggaagccaaaggagctgcctattgccaataaggatgagaatgcaactgtgcccttgatttcagttggttcaaatgctatcgatctaccaagtgaaggccaaatccaagttggcacactcaacatggatgggggccataatagtgcacacaacttgtattcttcttag

SEQ ID NO: 19363 - DNA, 363 bp, Zea mays
  Peptide Sequence Number=SeqID_62738
atgcacgaggaacaatggacaatgtttacaggttcgggccgctttgagatgcgtaacaccctacgtcctggagagtatgttttgtgtaatgggttacaagggagctctcgtaaagagttgagggagttctacgttccttggctaatgaccaacattgtcaacattgtgcaactagacaagagtagttacaaggttgatatcgatgttaggatgatgcaaatcagggagcctaacagacatatgttggtgaaggttgccatcaaacacatccatgagcaggcaaaaggtgaattctggggaaagctcaaggtgttccacactaattgtgaaggggacttcacgtccattgagttggtagaataa

SEQ ID NO: 19364 - DNA, 273 bp, Zea mays
  Peptide Sequence Number=SeqID_62739
atgtcctccgaagatttctctgattgcctggcttacaagcatctgaagggtttatttctgagcaaagctctaaagaacaaaagaaatgttgagggcgaagctgctcgaaaagagatagttaagcccagatccgaaggaggtggtcctgggatgaaggaagcaaatggtgactatgcactcattactggattgcttgaggcgtttgaggccgaagactgcgacatggacgaaggcctcaagccgaaggtccgaaaaacaccttccctttgctag

SEQ ID NO: 19365 - DNA, 306 bp, Zea mays
  Peptide Sequence Number=SeqID_62740
atggcggctagattcctccatggtggcgctccgccggaacagtgcccatccgaggccccaggccctaaccctagctctagtgtgcataaaaagaaggcgaacgcaatagcgaacacgtcgaagggtgactcaccaagatgctcctcactagcttctaaggcttccagtcaaagccaatcactacacaagctttgtttcaatgtaccaaggacccagatgagtacctctaggcatttggccgaagatttcttcatcttcgagcccaggcaccagcagtctaggacaacattgtcatcgaggacatga

SEQ ID NO: 19366 - DNA, 327 bp, Zea mays
  Peptide Sequence Number=SeqID_62741
atgtctcaagacaaaaaagttgctgctgagacgaagcttagcgaagaggagaagcttcttgaggagaagactgctgatgaggacatcactatcattgatacaaccataccagtgaccacttcaccattcgtagctaatcaaggaccaatgacacgagcccgtgcacgtaaacttaattatcaggtgaactcgttccttgccattgaagctaattcttctttaaatgaggtactaaagccttacgatgactttattatgctcaattgtttgggaggttcaaggctgttcttggcacggcaagagcagcaacaacaggagtcggtgtaa

SEQ ID NO: 19367 - DNA, 242 bp, Zea mays
  Peptide Sequence Number=SeqID_62742
atggcaggagagcagcctggtgctgatgtgcccttggcaccttcatcaagcgttcaagaaacgacggttgagaagttagttacaataatagaggctaccgcctctcaggccaaagccggcgttgtgaatctgttcgaggatagtgacaacattgatattgaagaggatagcaccaccatttatcctacgaagccaagccatgtggacttcggtaaatcaaagatcaaaggaggacacttgag

SEQ ID NO: 19368 - DNA, 102 bp, Zea mays
  Peptide Sequence Number=SeqID_62743
atggcggcggccacaaccgtcgcgccgggaacctcggctccagtgggccccacctcccgtgctcatgactatatggtgcagagaaacttatttaattcctag

SEQ ID NO: 19369 - DNA, 2121 bp, Zea mays
  Peptide Sequence Number=SeqID_62744
atggcacgcgatctggctcctgaagtggagagactgttgcaaaatagggaccctaatacaaagaagaaggctgctttatgctctataaggattgtgcgaaaagttccagacttggcggaaaatttcatgagtgctgctgcatcattactgaaggaaaaacatcatggtgttctgatatctgccgttcagctttgcatggaactatgtaaagccagccatgaagcattggagtacttgaggaagaattgccttgaaggactggtccgaatactgagagatgtctccaacagttcatatgctcctgaatacgacatcggtggcatcacagatccattcttacatatccgagtgcttaaactcatgcgaatactgggtcaaggagatgcagattgcagcgagtatatcaatgatattcttgctcaggtggtttcaacaaaaactgagtcaaataagaatgctggaaatgctattttatatgaatgcgtggagacaataatgggcattgaagctacaagtggtttacgtgtgttggcaattaatattttgggtcgttttttgtccaaccgtgataacaacataagatatgttgccctaaacatgcttatgaaggccattgccgtggacacacaagcggtgcagaggcacagggcaacaattttagagtgcgtcaaggatgcagatgtctctattcgtaaaagagccctagaacttgtttatctacttgtcaatgatacaaatgtaaagccattgactaaggaacttgttgattaccttgaagtgagtgatcaagatttcaaggaagacctcactgctaaaatatgctcaatagttgaaaagttttccctggacaagctatggtacttagaccagatgttcagagttttgtctctggctggtaattatgtaaaggatgatgtatggcatgctcttatagttctaatgagtaatgcatctgaacttcaaggatattcaatcaggtcattatataaggcattgcaagcatctggtgaacaggaaagtttagttagggtggccatttggtgcattggtgaatatggagaaatgctggtcaacaatcttagtatgttagacatggaggaaccgatcacggtaactgaatctgatgctgtggatgccgtagagattgctcttcagcgttactcggcggatgttactaccagggctatgtgtcttgtctctcttttgaagctttcttcccggtttccaccaacatcagagagaataaaagaaatagttgcgcaaaataaagggaatactgtgcttgaattgcagcaaagatctattgaattcagttccattatacaaagacatcagtcgataaaatcatctttgcttgaacgtatgcctgcattggatgaagcaaattatttggtgaagagagctgcttctacacaggctgcagtttcatctgtaaattctgctcctgcagtcacttctggaggcccacttaagcttccaaatggcgtagcaaagccaccaccagctcctttagctgatttgcttgatttgggttctgatgatgctccagtgactacttcggcccctactacatcacctaatgattttctacaggatctgttgggcatcggtggagctccgtctacaagcactgacattctgatggatcttctatctattggttcatctcctgtacaaaatggcccaccaacgtcaaactttagccttcctggcatagagactaaacctccccctgttacacctcaagttgtggatcttcttgatggtttgtcctcaagcacatctcttcctgatgagaatgcagcttacccgacaatcacagcattccagagtgcaaccttgaggatcacattcagtttcaaaaagcaacctggaaaacctcaggagactacaattaatgcttctttcacaaatttagcaactactgcattaacagatttcgtcttccaggcagccgtgccaaagttcatccagttgcgtttggacccagctagcagcagcactcttcctgccagtggaaatgtgtcagtcacacaaagcctcagtgtcactaacaaccaacatgggcaggttcagacatatttggaataccagactcccccaattcttgccaaaaaatag

SEQ ID NO: 19370 - DNA, 531 bp, Zea mays
  Peptide Sequence Number=SeqID_62745
atgtggggggcgcatggtcgggacgctgtcagggagcgatccgaccgggcgagggagcaggtgaagatggagcgtgccgaggacatcgaggaccttagaggtctggtcggcgcgtcgcccgaggctgcagagggttttgggcctgcgcacgcaaccgctactgacaatgctaattttgtggcggctttgaccatggttgctgaaaatgattcggatgattccgtgtctatgttttttgagtctgatgattctgggagttcggttgtgtggacggaggagtcttcagatgaggacttggattattttgtggccttggatgtggcagcggcggaggcttctccgcgtgagatggatgctgaagttcttcctggttcgagtgctgggcgtaggcggcgaagggcggtggcgaagcgtagagtgagtgaggtggagagtggtcgtcttcgtgtggacggggctggcaagcgggaattgttgtcctcgccggttggggcgagtgtgggtgagggggagtttgcgaaatctttttga

SEQ ID NO: 19371 - DNA, 141 bp, Zea mays
  Peptide Sequence Number=SeqID_62746
atgtacctttcagcttgtgagaagaaagtggacaaagtttggagatttgagtatcaggccgcggactatctgggtaatgaccgcggaccgtccgacgtatcaggttctagaaagtccgagacagtagagcagactgtttga

SEQ ID NO: 19372 - DNA, 348 bp, Zea mays
  Peptide Sequence Number=SeqID_62747
atggcgcggaccatccggtccctgacagaaacttacacttcctttctctatgttgtgacatcatcaactattaaccagtggatattcctcatatatattgtagtggtctgggtggtcttaagaagaagcttgcagttttttcatactcagcttcagtttgatgtcttctggggaaccctaatggacacaaactttcacaagcatcaagttattgattggcaatttatgttgggtcagtcagtcatggagggattgattccaaagttcgaggcatgtggtctctatgactttatgggccagaagacagacttcagtgatggctgtgaaacagttcctggcaactgctga

SEQ ID NO: 19373 - DNA, 555 bp, Zea mays
  Peptide Sequence Number=SeqID_62748
atggacaagaaccagaacttgacatatgctccatacatcatggctctcatcatggctaagatcagatttgaggggcgctgtgagatagctcacactccatttaggcctttcaagaatgatattggatttctcaccaggcctcttactcctttcccaaatgatgaggaagaagctagagatgatgaagaagttgctcctgaggcttatgcagctgagcagatgcctcctcctccacctcctcctcagcctgagcagttctggcaacctggtccaggctattttgatccttacttccagcacatgcagcaagggctccagacacatatggatggccgatttcagggcatgttgacccatatgaaccagcgcatggatagggatgataatatgggagccttgtccagtcagtttgacagcctgtccacaaatgaaagcatccaggatatacgtcagaggcaacagcaactccagcatgactttgggcagttctcctctgtcttcgacactttcagcacccattactacaacatgtactctccacctagtgatcagtga

SEQ ID NO: 19374 - DNA, 1266 bp, Zea mays
  Peptide Sequence Number=SeqID_62749
atgtcgcaagctgatatgtatagtacaaaggatttggatttggttttggttttggttttggttttggttttgatcggtggtactcaaaagtcaaggctctgcccagctcaaaaggcgttcaggtttagtgcacgaaatgagcagcgcgctgcccgcggcagatcgggcgacagggagaaggaggagggagagatgttgctgctaggattagccacgggctgctgcgtcctcgccgtcgccggggaagccgagaagcaggacggcggcggggcgtcctccgggggcggtcatggtcttggttccaagattagccccgccgtgctgttcgccgtggtgatagcggccgtggtgctgttcgtctcctgcctgctgcatctcttggtcaggctcttgctcaggcgcggccgtgcccgtgcccgtgcgcgcgcgccggccgaggccggtgccggtgccggcggtggggcggacgcggcgggcggcggcggggaggagtccgcgttgcagaggcagctgcagcagctgttccacctgcacgacgccgggctggaccaggacgtcatcgacgcgctcccggtgttcctgtaccgggaggtggtcggcgccggcgccggcgccaaggagccgttcgactgcgcggtctgcctgtgcgagttcgccggcgaggaccggctgcggctgctgccgctgtgcgggcacgcgttccacatcggctgcatcgacacctggctgctctccaactccacgtgcccgctgtgccggtgcgcgctcggcgccgacgctgccgcgctgttcgacgaggaaggcatgtgggagcacgaggacgccgtgctccccgtgcgcctcggcaagttcaagaacctggccagggcggcgcctggccccgtgcgcgccggcgccggcattgtgaccagggaggccggcgagacgagcagcagcagcctggacgccaggcggtgctactccatgggctcctaccagtacgtcctcgccgaggcgagcctccaggtgtccgtccacaggaggcacggcgacggccatggcaggggcggggcggggctcagaggcgtcggcgtgggctccaaccgcgccggcgccacagaggggaagaggatcggcgcgggcagcaaaggcgacagcttctcggtgtccaagatttggcagtggccgcggaacggcaaggagaagcttcccgtgctcgcgtccgatgactcgccggccatgaacggcaggctgccgtggcagaggccaagtcccggggattcgtga

SEQ ID NO: 19375 - DNA, 768 bp, Zea mays
  Peptide Sequence Number=SeqID_62750
atgtcacttagctggcggatggcgaccagaccatcccgtaggcggcgtgcctgtccattcctgtggcaggcggcacggccatactaccgcatgcgccatgatcatcatcactcgtacgtcgccagggaggcttcctctgcacgccaatgctacgcagaccgcggatatcagggtacaaggagattgcactggcgactagcattactggctccaagtattacatctgttatgttcctgagcccgcatgtcggggatcagcacccttgtacattgttggggcgaaggcgaagacgccacccttcgctcgatgccttcgccgatctcaccgaaccaacggaggcaaagcggccggcagtttccacccttcgtccaacacgctgcaagacgaaggcctacgacgaggtcgctccgtctcgcatcctcgtccaacacgaaggcccacacgccaccgaggatggcaaagtcatcggcatttcaacagaggaacagctacagctgcgggccttgcgcatcaagaaccacaacctccagaagcaaaaagagatcctcgaggccaagcgccaacgtgtgtctgcgcaagccaaggtgcgccagatgatacgcaacgaagagcagaaggctcaggagcttgagcaagagatcgcgctcatgcagcgcgaaggccaacttggtctgcaacacagcccacccatccaacagcgcgcgcaaatcgaagacatgttcatccctcagcgcggacatgccatcccgcacgccgtagcattctaa

SEQ ID NO: 19376 - DNA, 1203 bp, Zea mays
  Peptide Sequence Number=SeqID_62751
atgcaggccaggctcgacgaggaagcaggacaacttgtgcagctctggcagaatgtcgggcaggagtgggcaggccgagctccggccggaacaagccaaggctccgctgaaaaaatcactaaacaaataccacatctagaagaacatttacttcgcaatttggacaaaaatggagttgtaaggttgggatcatgggtagaaactagcgatattttagtaggtaaattaacgcctcagatagcgagcgaatcgtcctatatcacggaagctggattattacgggctatttttggtcttgaggtatccacttcaaaagaaacttctctcaaactacctataggtggaagagggcgtgttatcgatgtgaaatggatccagagggacccctttgacataatggttcgtgtatatattttacagaaacgtgaaatcaaagttggggataaagtagctggaagacacgggaataaggggatcatttccaaaattttgcctaggcaagatatgccctatttgcaagatggaacacctgttgatatggtcttcaatcccttaggagtaccctcacgaatgaatgtgggacaaatatttgaaagctcgctcggattagcaggggatctgctaaagaaacattatagaatagcaccctttgatgagagatatgagcaagaggcttcaagaaaacttgtgttttcggaattatatgaagccagtaaacaaacaaaaaatccatgggtatttgaacccgaatacccgggaaaaagcagaatatttgatggaagaacaggagatcccttcgaacagcctattctaatagggaagtcctatatcttaaaattaattcatcaagttgatgagaaaattcatggacgttctactgggccctactcacttgttacccaacaacccgttagaggaagagccaagcaagggggacaacaaataggagaaatggaagtttgggctttagaaggatttggtgttgctcatattttacaagagatacttacttataaatcagatcatcttatagctcgccaagaaatacttaatgctacgatctggggaaaaagagtgtctaatcatgaggatccgccagaatcttttcgagtgctcgttcgagaactacgatctttggctctagaactgaaccatttccttgtatctgagaagaacttccaggttaatagggaggatgtttga

SEQ ID NO: 19377 - DNA, 1050 bp, Zea mays
  Peptide Sequence Number=SeqID_62752
atggctaatgatcaagtaagccatagactgttggatacttttggtaaaaaagatagagaaattcttgattatttaacgccagatcgaatcatgttcaacggtcattggaattgtttctatccttccattcttcaagataattcagatttgttggtgaaaaagcgaagaaataggctcgtcgttccattacaatatcatcaagaacaagaaaaagagcgaatatcctgtttgggtatttcaatggaaataccctttatgggcgttttacgtagaaatactatttttgcttattttgacgatccacgatacagaaaagataaaaggggttcaggaattgttaaatttagatataggaccctagaggaagaatatcggacccaagaggaagagtataggactcgagaggaagaatatcggactcgagaggaagactcagaagacgaatatgagagcccagagaacaaatataggacccgagagggagagggcgaatataaaatcctagaagacgaatataggactctagaggacgaatatgaaaccctagaagatgaatatgggatcctagaggacgaatataggactctagagaaagactcagaggaagaatatgggagcctagagaacaaatataggactcgagagggagagggcgaatatgaaatcctagaggaagaatcagaagaagaatatgggagctctgaagatggctcagagaaggaatatgggactttagaagaagactcagaagaagactcagaggaagactcagaagacgaatatgggagcccggaggaagattctatcttaaaaaaagagggttttattgagcatcgaggaataaaagaatttagtctaaaataccaaaaagaagtagatcggttttttttcattcttcaagaactgcatatcttgccgagatcctcatccctaaagaacaaatcttcgaagcgcgttcaattgattcactatcgccgaatctcgaaaggagaattgaggattggaatgaacgtataccaagaattcttggggttccctggggattcttga

SEQ ID NO: 19378 - DNA, 1239 bp, Zea mays
  Peptide Sequence Number=SeqID_62753
atggtcacccaagacggtgaccaccagtttgatggtggggagaagcaagccgggctgcgcctctgccctgccctcagcttcaaggatcttcatcatccttgctggggcggagggcgagctgagccgaagctctacctcccgtacgggccggtaggccacctcctccttcagcatttaggggagagggcgctcactggcctagcggaggggcggacttcgacaacgcgggaccgattggccgcaagcgtcgtcagctccagcatgcctggttcgctggctcagctggctctggcacagcttccggtgccacctcccaccgctgggcagagcgtggctatctgcccgccgtcggtgctcgcccgtccgggaggattcgagcggggatctgccggtgggcgggtggacaccaccgtcggagctgaggtggtggcagctggagaaggcctcgtcgccgatgagattgtcggcaccatctgcgctctgggcctctggctctttggctttgatagcttgtcctcgcccctcgagtggggacatgggcgagaaccttgtcgcagcagcgtctgccctgaggtcatcgctgctgctgtttggccgcccggagcggaggtcgttgtcgctattgctgctgctgtttggccgcccggagcggaggtcgttgtcgctgctgctggagtggtcggcggcgagccacctggaattttgtcgtcccgcaggccctccaatgtggggggttgttcgtacctgcgggagtggaactggagttccgtttgtaatggcaccttgagtgccggtgtctgttcattgtggctatcggggcctgaacatttaggtatttttggtgcaataccgtgtttcttccttatttcgagcaccagaatcgctcatccgagcgagaattacttttcacagaaggtgatgagtgaggtatccgtatcccggaggcgtaggagttcctcggctcggtcggccttgccgcttacgtgtactcttactcgtccgcaggattctgttatcgatatagtcgagaaggcacaaaaaatcgtttcggcagaaaagttttcgagcgttaagacttgttcggtcagcggaatcgcttatccgagcgtgagttacttatcgcagaaggtgatgagtgaggatcccactatcgaagtagtcgaaaagcgcgaaagacgttctgacaaaaagactttttccgaggaaaattttgatgcagagggggttccccccttctag

SEQ ID NO: 19379 - DNA, 843 bp, Zea mays
  Peptide Sequence Number=SeqID_62754
atggcggcagcaggcgagcggaagcggcggtcaaatcgtctgcaggctcacgtcccctcctgggacagcgagagagccctctcccgcgacggcaggcgacacctttggcaggcgaagcgggcgacgcttcacctccgccataatgaccacgtcaaaaaagggaccgggaaaggggatactccaaaagggatccttcaatgcgaaggaagcgggccccgagccctcctactgatcaggggttcgaaggctggcccctcggaagggttcgacagccgcctcagagcactcgggctccgcacccactactggtcagaggttcgaaggctggcccctcggaagggttcaacagccgcctcaggccactcgggctccgcgcccactactgatcaggggttcgaaggctggccccccgaagggttcgacggctgcctcagaacacgcagagcgagggatgactctgggtacgtccgatacatggccgaggctcgggctacgctcccgagaggctcgggggctgctctcgcaaacccggctccggccaaaccgttgacagcgtcaacataccagcacgagaactcagaacctgaccatgcacccgggtcaaagctccacccactcaagggacacgatctcgcctggcccaagcccagcctcgggcaagaacagcagacccagaaaaacagcgccgcctgccctgctccgactgttgtgccgcccgccagggtgaggctgacagcagccaagtctagcctcaggcgccataggaagctctgcctcgcccgaccccagggctcggactccacctcgacctcggaagacgggctccgcctcgcccgaccctag

SEQ ID NO: 19380 - DNA, 2010 bp, Zea mays
  Peptide Sequence Number=SeqID_62755
atggacaaggatcgccaaggggcggcgcaaaaacgccaggcgactgtcaggattcacgaagcccggccgaaaaggcagcggggaacggcgaaggctgcggcctctggcggaggcaagccgccgctgccggcgaaggcgggcgcctctgcacctagcaaggcgccggaggcaacggtgggcgccggaggctccaaactgacgaaggtggtgccgccggtcagcggagtggcggaggctgcgaaggcggctcgaacgttgccgccgccgggcaaacgcgttgccgacttcggcaccgagattaatgtggaggattatcttgtggggtcggacgagggccagcttgctctagttgcgcctggcgcggcgatcgcgacagctgcgctagcgccgaaggcaaggggcgagacccttggcgtcggaggcgaggtgtcggccctcgcgctggtcagggacgaggcgggcgtggcgacccgccgactgaagggagtgacggaggcgctgagtcaggcgacggaggcgctgagtcaggtggctgacttcactagccgcactgcgtcgggggcccttacggcagctttgtctgccgaagtcgagagacttcggacgcaacatgctgacgctgtccgtgagaagtcggcctccgacagcaagtgccgtaaactggcggacaaggtggccgccctggagaaggagaaggctgacctccggcgccagctggcgagggagaggagggaggccaacgaagccatcgccaaagagcaggctgcgcaggcggaggccaagctggcgcgggcggaaggcaatattgccaaggagctcgccggtcagctgcaggagcggcttactgccctggagagccgcgcgaagggggccgaggccgcgatgcgagcggaggccgaacggacgcgcacaaagctgatggctacatatcgcgagctgggtgcgcggactggtgacttcgaggtgccggagcgcgagcccgggctttgctgtctggaatgggtgcaggaggagctgcaggagctccccactgtcttgggggggttaatgttgttcacctccctggtcacctgcgagggggcgatgaatgcactctctcgcgaagggtgccggcactttgaggccttcgaccaggcagatgaagattttgggcgagatatctatgaggccgaagaccccgtggtgaaggaatccgccggggccctctatgaccggatgtggggtctgtgcggtcgtgaggtggtcagggagcgggccgaggctgcgagggctcaggcggagcgtggcgagcgggtggacgacttcggggcactgaacagcgcgctgcctgacccggagccgacccctacggaggctgcgactggagtcgccctagaaccaaccccggagcctgcggaagacctgccccagaaggtggccgaaggcacgcctgatgcccccgcagctgctgcgccgagcgctgaagatctcgcggtggtggtggcggaagcagcggcggaggctgcggcggaggctcccgcggcggcagggccttcgcaggttcaagattttgggcctgcgcacgcaaccgctactactgagtttttggcggcttcgaccgcggaaggtgggaatgaatatggtgggtctgaatctgagttttctgattttactgactctgggagctcggttgagtggactgaggagtcgtcggaggaggacttggattattttgcggccttggatgtggctgtggcggaggcttcgccacgcgccgcggacgctccagacgtgccaggtcctagcaccgggtgccgacgacgaagggcggttgcaaagcgtagggttagtgcggaggaaggggctcggcttcgcgtgagtagggctggtcggctggagctgttgtctttgtcggccgccgcgggtacaggggaaggggaactgcgaagtctttttgcgggtgaagagcttaggataatgttatttaattatagggagatgggaattattcctaaggttgagccgatgtag

SEQ ID NO: 19381 - DNA, 591 bp, Zea mays
  Peptide Sequence Number=SeqID_62756
atggtgggtacaagtgtggccgttgcacggtggcagccggggacaattggagcattgtccgccaaggtcggagaaagctcgattgtggtagccaaagctaccacaccgcaagctgaagatgttgctatggacccagctaaagggtcaggtgatgatactgaagacattgacattgaagaagatagtaacattatccgtcccatgaagccgagccgtgtggactttaggaaatccacaatcaagggaagacatattgaggaggcaaagaagaagaagaggaaacaaaagcatcctaaggtgactttgaagcgtcacaaaatttccgcttcgaagaagaaacctaaagcaaggattgctcaagcttcagaagagccaaagactaactctagggatgacgacgttgttgaattacccattcttgagaaaactcccctagaaagtattgcttctgagccgaaggaggctccaacttcagagttctttccaagcactatagaggaggatggacacatagctctagtgatgagcgcactctttttttatggggacgaagaggacggcgaagatgtaactaatatgaagggttcatag

SEQ ID NO: 19382 - DNA, 597 bp, Zea mays
  Peptide Sequence Number=SeqID_62757
atgtgttgtgtggctaatgaaaatgatagcggaagcacaaatggggatgaggaggaagaaagaagctttgtgcaactctacgctcgcctaagccaagaagataaagcggtcatgctcaaacttctagaaagagcgaaagagcaaagcgaagctcgtcaaaggttagaagatattctctccatgaaaatgctacactttgacgagttgactaaagaacatgaggagctaaagtgctctcatgttgatttggtccaaagcatatcttcttttgagctagaacttgcaggaacaaaagatgatacatatcaaaagctcaaagaagagattgagaggctaaagatgagcttgacacaactaaaagggaaatgcattgcccaaccttctcaagataaccgtgatcacatggtgaagaagcttgagacgggaacaaccgtggcatgcactacattccttaaagaaaatgtcaaggatttgaggattgccaagaggaagaaacaaaagatgaaattcaacacctcctccaaaagcctcaaccacgcctccacaaaaggtaacatccaaggcaacccaaaattgcaacttgtgctagaaaggtag

SEQ ID NO: 19383 - DNA, 1137 bp, Zea mays
  Peptide Sequence Number=SeqID_62758
atgcggggaggagaccggccatcggcgtcgctccagctcctctcgctgggcctcgtgctcctctacttcttcacctcaggcagcaccgttggtctcgtggagggacagaagacgtggtgcatcgcgaagccgtcggcgtcgaacgagatcctggcgcagaacctggactacgcgtgctcccaggtgagctgcgccgtgatccagaagggcgggccgtgctactacccggacagccccgtgtcccgcgccgccgtcgccatgaacctctactacgcctacagcggcaggcacccctggaactgctacttcaacaactccgcgctcgtcgtgcagtccgacccaaaaaaactaaaagcaacccccaacccacgcggcgcggcgccgcccgacaccaccgctccggtccccggcgacggcacgatgcggcggcagcctttctcgcggcacgccggcttcttctcctgcctccagcgggtggaagaccggctggcgtcggagtcggagcagcaacatcaggagcagaaggagagcccgccgccgccagctacagcaaaggcaacggcaacgacgcgccaaaccgaggcgtcgccattctcggacaccatgaccgcctccccactcctcttcctcgacccagcagcacccgcaccagcgcccggcagcagcagcggcccggcgctggacttcctcaccgccgccacccaggagggcaagcacatccaacaggaagacgacgacaacgatggcggcggcgacggcgatgaggaggacatcgcgcggctcatggagctgctcggcctgtcatccggcggcggtggcagcagccgccgcgacgacgacggaggcgggtgcgactgcagcggcgccgacgggttcctggccaaggtcgtgggcgtggtcggccccaagtgcgacagggagaaggggaggctggacgcctggatccgccattaccaccgtgggggaggcagggagcccgcgaggctggcgcacctgctgctcgccagggctgccgccgacacggcagccgttgcgttcccggccagcgtgaaggacttcttggaccacgatccgccacggcagttgacggacgagtcggagtggagtgatgcaaacggagacaataatagagattga

SEQ ID NO: 19384 - DNA, 567 bp, Zea mays
  Peptide Sequence Number=SeqID_62759
atgaaggcgctcgaggctgccctgcaggtggcctcggtcgccgtcgtcgggttccttgccgtcgccaagggaacggtcctcacgtcgactgttcagagggccgcggtcgtgttggcagccgtgttgtgcttcgctgcctcccgctggcttgccaacttcatccagaacttctacttccaagactacatccacgcctacaagtgccaaaggttcatctacaactatactaaatcgactgtccggaataccgtagattattccggacaggagaaactttttggaaaatcaggccaagagcggaccgtccgggcccttgcggcggaccgtccgcgacactactttgacttcgaccaggaactacaaatcagggatagtccgactaaaccgcggaccgtccagctacaatgcgcggaccgtccggctataattcacggacagtccgcaagtgaagacctggttcagcccgaaggtgacaagttgagcaaaaggaattatatagctggcgcggaccgtccgggaccaagggcagaccgtccgcgtggtgtcaccgaggcagatagccgttga

SEQ ID NO: 19385 - DNA, 537 bp, Zea mays
  Peptide Sequence Number=SeqID_62760
atgtctagtgagccaacggagcaacggtcaactgcgtcaacagtaaaaagcgcacaatgcagaagtcagaagtcagagctgcgaagtcagaacgcaccggacagtccggtggcacaccggacttgtccggtgcagcaagaggacaaaagacttcaacggtcaaccgctccaaaccacaacggtctgctgacgtggcaggcaccggacagtgaacagtaccctgtccggtacgccaccggactgtccgatgcgcccgtcgacagcagattcagccaaggactgaattggtgggtgggggctataaatacccctcaaccaccaccattcaagccatccaagcctcctacacttctcattcaatacaagagcaaaggcaaacactccaaagacacaatcaaagcattcaatccagtccgagctctaaaatcaactcaattgcttagagacttgagagaggatcatttgtgttcttttgttgctcttgttgcttggattgcatttccccttctcattcttattcttctaagtgctttgtaa

SEQ ID NO: 19386 - DNA, 549 bp, Zea mays
  Peptide Sequence Number=SeqID_62761
atggctcaagaagaagagaatcaagatcaagacgatgagccacctcaagaggaggacattgataagggggagatgaagatgatcaagataagaaagatgatcaagagattcaggaccaaagaccaccgcacccaagagtccaccaagcaattcaaagagatcaccccgttaactccgtacttgatgacatccacaatgggtgtccaacacaagtgcctaagtgtcaaatggtggacaaagtacaaatcaagtaaaaaggaaaagaacaattggaaatgccttggctcgagcagccaagactctgctcagtctgggagcaccggactgtccggtggtgcaccggacagtgtccgttgctcatccctcccttactccgtgcttctttgtgaacatctttgtaagggcgagagactccaagttgtggagattcctcgcaaacgggatattgaaaagcaaagcaaaacaccgtggtattcaagtgggtctttggaccgcttgagaggggttgattgcaaccctcgtctgtcgggacgccacaacgtggagtag

SEQ ID NO: 19387 - DNA, 2343 bp, Zea mays
  Peptide Sequence Number=SeqID_62762
atggccgcagctaaggaaaaggcgtcggtatgctgccgcgatgcgcccgcgcgtgtcgctggcgccccagtcgtccccatgcgcgcgatcgccgcgtccccggtcggcaaggtcgtcgccctcgccgcgggaggcggtgagcgcgtttctgcgtcggctgctggctcaagcggcgccgtgatcgaggagatcgccgcggtccagcccaccaccgcgaaggcatcctccaaagggataccaataatgacaagagcccagaggtgtcaccctttggacccattatctgctgctgaaattgcagttgctgtagcaactgtaagagttgctggaagatctcctgaggaaagagacagcatgcgctttgttgaagctgtgctgttggagccagaaaagaatgttgtggcactggccgacgcctacttctttccacctttccaaccatcactgctccctagaagcaaaggttctgctgttattccaagcaggctacctcctaggagggccagacttgttgtctataacaaacaatcaaatgagacaagtatttggatagtggaactatctgaagtgcatgccgctactaggggtggacatcacagagggaaggtgatatcatctgaagttattccggatgttcaacctgccatggatgctatggagtatgctgaatgtgaggctactgtcaaaagttatcctccatttattgaagctatgaagagaagaggtgtggatgacatggatcttgttatggtggatgcttggtgtgctggctactacagcgaagctgatgctcctagtcgcagacttggcaagcctttgatattttgcagaactgagagtgatagccccatggagaatggttatgctcgtcctgtagaaggaatccatgttgttgttgatatgcagaataatgctgtgatagagtttgaagataggaagttggttcctctaccccctccagatcatttgagaaactatactcctggggagacaagaggaggtgttgatcgaagtgatgtaaaaccacttatcatcaatcagcctgagggtccaagttttcgaattaatggctattttgtggaatggcagaagtggaacttccgtattggcttcacccccaaagagggtttggttatctattctgttgcttatgttgatggtagccgtggacgtagacctatagcacataggctgagctttgttgagatggttgttccttatggagatccaagtgaaccacattatcgcaagaatgcatttgatgctggagaagatggacttggaaaaaatgctcattctcttaagaagggatgcgattgcttgggctacataaaatattttgatgcacatttcacaaacttcactggtggtgtggagacaattgagaactgtgtttgtttgcatgaggaggatcatgggatcctttggaaacatcaagactggagaactggtttagcagaagtaaggcggtcaaggaggctcactgtttcatttatctgtacagttgcaaactatgagtatggtttttactggcacttctatcaggatgggaaaatagaggcagaagtaaagcttactggaattctcagtttaggggccttgatgcctggggaatcgaggaaatatggcacaactattgcccctggtctgtatgcaccagttcatcagcatttctttgttgcccgtatggacatggctgttgattgcaaacctaatgaagctcataaccaggtggttgaggttaatgttaaagtggaaagtgcaggcacacataatgtgcataataatgctttctatgctgaagagaagttgctcaaatctgagttgcaagcaatgcgtgattgcgacccttcatctgcccgccactggattgtacgcaacacacgaactgtgaatcggacggggcagccaactggctacaggctcgtacctggttcgaactgcctgcctttggctctgcctgaggcgaaatttctgaggagggctgggttcttgaagcacaacctctgggtcactcaatacaagcgtggcgagatgttccctggaggggagtttcccaaccagaatcctcgcatccatgagggtctgccaacatgggtcaagaatgataggcctctggaggaaaccgacattgttctctggtacgtgttcgggctcacccatatccccaggctagaagattggccagtcatgccggtggagcacataggcttcatgctcatgccacatggattcttcaactgctcgcctgcggtcgacgtgcctcccagctcgtccgatgcggatgtcaaggaagccgagtcgcccaaggccatccagaatagcctcatatcgaagctgtga

SEQ ID NO: 19388 - DNA, 1668 bp, Zea mays
  Peptide Sequence Number=SeqID_62763
atgacgccgtggcacgacagcttggcgccgccgcctcgcgtcctcatttcccaccgcccttctgatgccagcggtcaagggattgttctgtcacttcaacatccaagatcaggagatgaagtagggtatctatttattgatggccaactacaagagatcaactggtttaaggagcgttatggtgcttggttcttgggagattatgtttgtgaagatggtggcctttattattgcacccctgttgatcccatcttcattttcctaccaacttttgaagctgcacgtatgtcgaacgataaggatccaggaaaattcagacaattggatgaaatattgtatgttgagggatatcctggttatcagcagctaatgaatgtagctaaccaccatatggaattggtttgtgaagtaaaagtgaaggaggctgtccaaatgatccgtgaatatctgaaggacgaaccatggttagcattactatgcaagaagctgcagctggatatcaatgcgatcactgttgatgcgaccaccaaaactgctgaagcttcggtttatgcggacagttgtccggcacctgccctcccctctgagagtaagactgcgaatggtggtgccaagtcaagcaaagggaggccagcgaagaaagcaaagacagaggcagtgaactctgctagtgtacaaccctccctcccgtcccggatgcctagccgtccacattatatcgtggtgcacggttctgcttcgcctcggcgccttcggcctccacccgcgcgtccctgcgtcccaaaatctcgcatccgccccgatgccccctccgcgcacgcctcagcctccatgaccctcgcgccgccggcaatctcgctccgtgacccccacccccactcctctggcagtccccaggaaaatctcgctgcctcggcggggactacttcgagttcgacctctccggggacgcctagaagtcgcggcccccatcgtggaccacggcgacggctcctactccttccgcctccaggtcgcaccgcgcttcgccgcgagggagttccgcctcaccatcgtcatcctctaccgcagctgggaggggctcaagttctcctcctcgaggttcaagtaccgcgccgagctgcgccgcatcccctcctgtttcggccgaacaataacgcgcccctttcgacgctggagacgtgccgcgccgcggacttctctcgcgatgcctggtcgggatggtggacgcggctcgccaagaacgacaactgcgaggacgtcgacgcagcggggcggtacatccgcgagatccacctccgcgggatccccaaccccatccgcacaacagagtcaaggcaccacccggggcttctcccgcgccagcaccaccacccccgtcgcgcgatgccacccccagcgtatcttcccctcggacacgctggagcgacggagctgcggtatcaggacgtggaggtggacacgaggcggtgcgatgtgcggaactggagtggtcggcagtgcgaggcgctggtgccacatgatagtgctgatgaactccagcatccagatggagccggaggagtcgtcgccagccaggacacatggaggtatgattactctgattatgggcagtcatcaggcaaggtatttatcccagaagcaatgaacgccgaccggatcagctaa

SEQ ID NO: 19389 - DNA, 862 bp, Zea mays
  Peptide Sequence Number=SeqID_62764
cctcggaacaaactccacctcgaccaacctcggcctcaaccacctgccccccgcgaattccgcgaacggccactccttcaactgttccctacacgactgcgaaccccagagcaggctcgtccatggcatcgagaagacttctatctcgcccgagcatggcttcggccttgataataccgacgacagcacgcccgccgtcactagaagctgtagagctaatgtcggataccctacgtattgccaagagctttttgccatacttaccactgctccaaccactacgactcgtacaactcctccatcgaacaggcttgggtgcacgaccgagcccctggcactggcctcggctctctgcacagtcaaagatgcaaatacaggaaccggacacccccttcccagctcaagtcaacagcaagtgggagttcgggagcacaggacatgggtgtacacatgtacacctgatcgaagagctaccgtttcagccgccgccgctggcaccctcaggtgcttcccaatcctgccaaaagtcccagcaatcgccgagattcatcgagaccccagccccctagacgaccagatcctgcgctcgacagctgcggctccgcgaaggcgccaggcagcctgcggcttgtgtggcggcatggtggtgccccagctgctcagggagtatgcaacgccagcaacagcatccaaggggcggacgatctgcgcgcaggggccggacggtccgcggcctggtgcaaggctagggctcctgcctgacggccggacggtccgcgcgtgcgcagtggcggcggaagatcgtcggcggcgcctgtatctcgctcccgggagggaccccgtcggggaggagagatcctag

SEQ ID NO: 19390 - DNA, 756 bp, Zea mays
  Peptide Sequence Number=SeqID_62765
atggcgctcggcggtattgggactaacagttcgattaaagctaaaggggtcaagtccgttgagtcaaccatcaggactaaggccactgcgtgtcatcctactccaccaaaaggcagtgggcatatgtttggaaccaaattgagccttgcggacggtccgcggttcggacagtccgcgcctgggggccggacggggtgtccggttgggcttggactattgagcatgcacaatggggggtgggggcgcttagccaaaaaccgttttttctttaccataccattggcacctgatgcttggaaggtaagaggccagctagggctgcgggttgtagttggattccaagtccgggacttcgggactctagtagatcgagttgagagagccgaggccagtgccaggggctcggtcgtgcacccaagcctgttcgatggaggagttgtacgagtcgtagtggttggagcagtggtaagtatggcaaaaagctcttggcaatacgtagggtatccgacattagctctacagcttctagtgacggcgggcgtgctgtcgtcggtattatcaaggccgaagccatgctcgggcgagatagaagtcttctcgatgccatggacgagcctgctctggggttcgcagtcgtgtagggaacagttgaaggagtggccgttcgcggaattcgcggggggcaggtggttgaggccgaggttggtcgaggtggagtttgttccgaggctgaggccagcttcgggcgaggcgtag

SEQ ID NO: 19391 - DNA, 2487 bp, Zea mays
  Peptide Sequence Number=SeqID_62766
gaggcatatgggaaagaatcatctaattcaagtgatgacaaagagtggtctggaaaagaactattagaaggcagtgaaacagattcacttagtgagcgacctcatcctgtaaaacggtgctctagaagagcacaagcagagcagcagaataatgaacatacaccacagagggagcgccttcatggttctgaaagtgagcagaaaactggaattcttcgatccaatggcagcagtagcacaggacggaagtttggtcctgtagctacccagaaattgaaggtacattttgagaaagatccatatcctagccgtgaaacgaaagagaatatatcagaagaactaggcttgacatttaatcaggtctccagatggttctctagcactcgtcactattcaagggttgcttctgccagaaaagaaatgcatcctgacggccatactagcgagaataatgataccacgactgtagatagcatgcaagcaaggcaacccaacactgtggtgatggaaaagttgactgggaatagaaatgacattgtttctgagaaaccgatggtgcagaacaatcttaaccaaggggtggcagaaaagttgactagggatagaaatgacattgttcctgagaaacaggtggtgcagagcaatcttaaccaatgtaataatgaagatatcccgctttctggaacagaaattgagatggagtcttacgaacaagaatcatctgaaagcagtgatgaagagtggtccacacttagcacaccacgaaaaacaaaattacaaggcaacgaaaaagtatcacttactgaatcactacgttctgcaaaacggtgttctagaagagcaccagctagggagcagaataatgaacatactcagagtgagcagcttcatggttctgcaagtgagcagcaagctagagagcaacttcatggttctgtaagtaaacagcaaactgaagttcttcgctccaatgtcagcagtggcgatgcctcaaaatgtcattttggccctatagttactcagaagctgaaggaacattttgaaaaagatccatatccttgccgtgcaacaaaagagggtctggcacaagagctaggactgacatttaatcagatcagtaagtggttctctgccacccatcattattcaagagatgctgttgccaagaaccaaaaatacccaggagaaaatactactgagaataatagtagcacaatctttgatggtatacaagtaatagaacccaattttggtttgatagataaaccagatgcagatacaaatgacatgatttctgaaaagttgatggtacaaattaatcttaacgaaggcattgaagaggatatcccaccgagccaatatactaccaggtgtgaagagaaattaactatgactcaagctgccatctcaagggaagctggacctccaggttatggtcctggagaaaactttcttcaggtcagttcaaggattactagctgtgagcagagtgtgataatggctcctagcgctatcgcaagaggagttggtccaccaggatatacgcctggagaacaccagggcaatggggctccatggaatacaagctatgagcgaagaccgtttacgagtcctacgactagctcaagagaagtcggacctccaggatatgggcctgaagaaaaccaaggcagtggcatttcctgtaatacaagcagagagcaaatattgtttatgagccctacaaccatctcgagagaacttggtccaccaggatatttgcccagagaaaaccagcgcagtgacacttcatggaatacaagctgtgagtcgggactatttatgagtcctgcgaccacctcaatagaacatggtccaccaggatatgggcctggagaaaaccaggagaatgacagtacaagctgcgagttgagaatgtttacaagtcctacaatcgtctccagagaagttggcccaccaggataccagcagggagtgtttatgagtcctaaaaccatctcaagagaagtctgtcctccaggatttgggtctggagagaaccagggcaacgacactacatggtacaaacagagcgcgtttacaagtcctacaaccatctcgagagaagtcggtccgccagggtatggacaggaagatcagggcaatggtggttcttggaacacgagttgtgagcagggagtgtttacgagtcctactagaggcatctcaagagaagtcggtccgccaggatacgggcccggggaaagtcagggcaataccacttcgtggatttcgacctgccagcagagaatgcttgcaggaatccagagaactggtggctcaaggagtatggacttggaagcctttccaccgggatacggacctggtggtgcttcagggagtgtcataagcccccaagctcggtctgcagagaatgtagaattttcggacgaggctagaaaaaaggctatacagcgggagctgagacggcggcagaagttcaggtga

SEQ ID NO: 19392 - DNA, 1205 bp, Zea mays
  Peptide Sequence Number=SeqID_62767
cgggcctctaaatgacaggatccctgataagccagctgcaaataaaagaaaacgtgccagtccttcacaggtgggaagttccagcaacagtgtcagggtgcttcgctctgcaataaaaaataaagatgaggcatgcagtaaatctctaagtgacaggaccgctggtgagccagctgcaaataaaagaaaaaacgtcaatcgctcaaagacggggagtctgagctgtggtgtcagggtgcttctatctgcttcaaaagctaaggatgagacatctaccaagcctttaaatgatagtgctgctgttgaaccagcttcaggtaaaaggaaaggcaccagtccgtcaaaggtgggaagtgccagcaatagtgtcagggtgcttcgatctacttcaaaatataagaatgagacatgtactgagcctttaaatgatagtggtgctgttgaaccagctgcaaataaaaggaaaggtgtcagtcgttcaaagaagagaagtctcaatagcagtgtcagggtgcttcgctctgcctcaaataataagattgaggtatctattaagcctctaggtaatagtactgctggccaaccagctgcgaaaagaagaaaaagcggcagttccttcgaggcaggaagccctgtgagcagtgccagggtgcttcgctctacctcagaaaggaagaatgaggcatctaagcctttaaatgaaagtactgctgctcaaccagctgcgaggaaaaaaaaagctggggtaatttcaaagaccgacaatccaaagattggtctcagggttcttcgctctgcctcaggaaagaagaatgaagcatgtattgggcatgtaaatgatagtacttctgctgaaccaactgtgacaaaaagaaaccgcaagccttcaatgggatcgcagtcccaagaaggactacttaaaaatttgtcaaagatacctccgggggatcaaagatggctttgccctgcatgtgtctgcaaagcagactctatagatgcactaaatgaacttcaaggaagcaagctctccattcatgactcatgggagaaagttttccctgaggcagcttcaattgccaacggttctaaacaagttgatacttctgatctgctgccagatcatataaagcacagtgacaaccctgcattggttgaagggctgatggtgaatgaagtcaggctttctgcagaggatgacagcaaag

SEQ ID NO: 19393 - DNA, 252 bp, Zea mays
  Peptide Sequence Number=SeqID_62768
atgcattccgatgcagaacatgttgtaacctcctatggcttacgagatctagatgcactgaatcgtcaagatcatataaagcacagtgacaaccctgcattggttgaagggctgatggtgaatgaagtcaggctttctgcagaggatgacagcaaagaaattgcaaacccacccgacccgcagttgcaaattcccccgaccagcagttgcaatcattgtttgtttaacagatttttggacatagttatatag

SEQ ID NO: 19394 - DNA, 246 bp, Zea mays
  Peptide Sequence Number=SeqID_62769
atggcccaagggcacatttccctttcaatgagtccactgacctcttacttcatttcagaggaagcgcccttcgactgcaaaggtttcagctttattgtggcgagtttcttcttggcaatctcgttctgcctcgcttggatgcttaacccaggaatgaaggacaagggcacaaaagctgccgtttcagacaacgctgatgaggaagcagcgcaaggaccactactggcaaaatggaccagaccatga

SEQ ID NO: 19395 - DNA, 666 bp, Zea mays
  Peptide Sequence Number=SeqID_62770
atggcaagagtaactgtgggaaataaagaaggggagatcaccttgctgctggtgaagaggagctcctcgccgcgattgttcctccatgagccaacctggctgtcgtacaggctcacccacgaagcaaatcaggcagtccagccagacgacaaagccccgtcaaaaccacaaccaaacaagcaatgcggagccgatcgatcgcccaacaagatgaagagaggagagggtgacatagcagtccgtagggatgaaaatgatttcggaaattttcggtattccggaaaccgatttcgaaatttttcgatcggattcaccggtaacggcattttccgaaaacgaaatcggttttcagaattttctatcggaatcggcgtgtccgccagtctgtacccacgcggatgctcccttgggcgagcggagcacaatctggacgatgttgttctagtccctgaccacctacagccccaacgttggatccatggagttgacgaagcgccccatgctcatcgacgaccagccgagcagcaagcagcgtgtgctcgacctgtgcagcgcacgacgacaagggaagcagagtggcacctgacggatgaggctgagacagaggatgcgacgttgtcggcgtggatgtcgtggagccgccatagcaggtcgcggaggttgtga

SEQ ID NO: 19396 - DNA, 549 bp, Zea mays
  Peptide Sequence Number=SeqID_62771
atgacctgctcctctgcgagacctgctgctccggcgaccgtgacctgctcctttgcgaccgcgagcttcacatcttctgcctcctcccatcgccgccaaggtccccatccgcggatctacccggttctgccccgtctgcgcctcacccgccaaggcactcaagagtggtctatggcttctcctaaggtcggtaatcgtccaattgtctgggaaggagctacacgtggtgcagatttactccgtgctccccgctgcctcacgcgcaccaaggttgtcgcgctcatggtcatggccagctcggcgctcgtcaatgttgtcacggtcgcccaccatcctcgcccttccgtcgtcgctggcgttgttcgtgttcccggccccgaggaggtgtacgcggcaatagacttggtgttgcccgttgcggcgaagtctacggttggtggcgaatctgtaacagagagcggcgtacggaaaatggagcagttattgtgcagggatgatgggggcttcggtgcagaaagagactacaatccattgaaagagaagcagtaa

SEQ ID NO: 19397 - DNA, 1497 bp, Zea mays
  Peptide Sequence Number=SeqID_62772
atgttcgtcgggcacgccagcctgggcaccggacagtccgatgcaccgcaggctgatataaaatccctcagatctgacggcgaggcgacatctgctagaggtggaaatctcgaggaagtcagcccgctggcgaagtcaaggggagaacgggaagagcctgaggaggaggaggaggacgcggtggtctggagagggatggagggcgcgtcctcgctgccgcccttcctgagcaagacgtacgagatggtggacgacccggccacggacgccgtggtggcgtggacgccgctggggaccagcttcgtcgtcgccaaccaggccgagttctgcagggatctgctccccaagtacttcaagcacaacaacttctccagcttcgtgcggcaactgaacacctacggctttaagaaaattgatcctgaacaatgggagtttgcaaatgatgatttcattaggggacaacagcaccgactgaaaaatatacacaggcgtaagcctatattcagccattcatcgcatactcagggttctggaccattaccagataccgaaaggagggattatgaggaggaaatcgaaaggcttaagtgtgacaatgcagctctgacctcagagcttgaaaagaatgcacagaagaaacttgttacagagaaacgaatgcaggagctagaagataagttgatctttttggaggatcggcagaaaaatctgatggcgtatgtcagggatattgtacaggcaccaggatctttctctagctttgtgcagcaacctgatcatcacggaaagaaaaggagactaccagtacctatctctctctaccaagattctaatgctgaggggaaccaggttgtgcatgggggcttcatcaccaacccaccagcttgcagggaatcattcgacaagacggaatcttcgttgaactcattggagaatttccttcgggaagcgagtgaagcgttcaatatttcatatggtgatggcctccctggcccttcatctgctgtcgttatcacagagctccattcatccggagaaagtgatccccatgtgccatcacctgtctcaagaatgcatacatcttcggctggtgcgggagattcgctctcttcccgcgatttaacagagtcaactagctgcgctgagagccctcgcctcgctcagatccaaccctgtacagattcacggactaaggtgtctgagatcgatgtcaatcgggagcctgctgtcacagaaactggtccgacaagggaccaacctgccgaggagcctccccacgtagcagctggggtgaacgatggcttttggcagcagttcctcacagagcagcccggtcctgatgtacaccaggaggcccaatcagaaaggagagatggcgatgatgataagggcgatcagacgaggataggggaccgagaaaatttttggtgggggaagaagaatgttgagcagatgagagagaagctggggcgtctcacctcggtggagaaaacctga

SEQ ID NO: 19398 - DNA, 2772 bp, Zea mays
  Peptide Sequence Number=SeqID_62773
atgtcgcggtcgtacaccaacctgctcgacctcgcggagggcaacttcgcggcgctgggcccggccgccggcgccggcggcggcgggcggcagaggcaggggtcgttcgggctgaggcggatgtcgcgggtgatgacggtgccggggacgctctcggagctcgacggcgaggacgagtcggagccggcggccaccagcagcgtcgcctccgacgcgccctcgtccgtggcggcggaccgcctcatagtggtctccaaccagctgcccatcgtcgcgcgccggaggcccgacggccgaggatggtccttcgtgtgggacgacgactcgcttctgctccagctccgcgacggcattcccgaggatatggaggtgctcttcgtcggctccctccgcgccgacgtccccgtagccgagcaggacgaggtgtcgcaggcgttgctcgaccggttccgctgcgcgccggtcttcctccctgaccgcctcaacgaccgcttctaccacggcttctgcaagcgccaactctggcctctgttccactacatgctccccttctcctcatccgcgtccgccgccggcaccacctcttcctcctccgccgccacttgcaacggtcgcttcgaccgcagcgcttgggaggcgtacgtgctcgccaacaagttcttcttcgagaaggtcgtcgaggtaatcaacccggaggatgactacgtttgggttcacgactaccatctcatggcgctgcctaccttcctccgccgctgcttcaaccgcctccgcatcggattcttcctccacagccccttcccctcgtccgagatctaccgcaccctccctgttcgggaggagatactcaaggcgctgctcaactgtgacctaattggcttccacacttttgattacgccaggcacttcctctcgtgctgcagtaggatgctgggaattgaataccagtcaaagcgtgggtacattgaattggattactttggccgcactgtcgggatcaaaatcatgccagtgggagttcatatgggtcaattggagttgggtctgcgcttgcctgatagggaatggaggctttctgagcttcaacggcagtttcaggggaaaactgtcttgcttggtgtggatgatatggatatctttaaggggatcaatttgaagcttctcgcctttgagaacatgttgaggacacatcccaagtggcaggggagagcagtgttagtgcagattgctaacccagcccgtggaaggggtaaagatctggaagccatccaggctgagattgaggagagctgccagcggatcaatggagactttggccagtcagggtatagccctgttgttttcatcggccgtgatgtgtcaagtgttgagaagatcgcctattatacgatagcggaatgtgtggtggtcactgctgtgagggatgggatgaacttgacaccgtatgaatacgttgtctgtaggcagggtgcaccaggatctcagtcggtatcagaggtgagtgggccaaagaagagcatgctggttgtgtcagagtttattggctgctcaccgtcactgagcggtgctattagggttaacccatggaatatagaggcaaccgcagaggcgatgaatgaggccatttcaatgccagaacaggaaaaacagttgaggcatgagaaacattaccgttatgtcaggagccatgacgtcgcttattggtcaaagagcttcatcatagacttggaaagggtttgtaaggatcacttcaagaggacttgttggggcatagggttgggttttggtttcagggtggtggccttggaccctcatttcacaaagcttaacatggattcaatcattaatgcttatgagctttcagagagcagggctatattgctcgattatgatggaactctggttccccaaacttccctcaacaaggaacctagtccacaggttttgagcatcatcaataccctttgctcagatagtagaaacatcgtttttcttgtcagtggtcgagacaaagataccttgggaaagtggttctcctcatgtccaagattggggattgcagctgaacatggttacttcttgagcgtgtcaaattgcattgattacattctctgtgaaactgggaaaagagaagaagagtggcaaacatgcactcaggcattggacttcggatggatgcaaatggcgaagccagtgatgaatttatatacagaagcaactgatggatcctacattgaggccaaggaaagtgccttggtgtggcaccatcaggatgctgacctaggctttggatcctcacaggcaaaggagatgcttgatcacctggaaagtgtactagcaaatgaaccagtctctgtcaagagtggccagttcattgttgaagtcaaaccacagggaataagcaagggaatagttgccgagaggatacttgcatcagtgaaggagagaggaaagcaggctgatttcttattgtgcatcggcgatgataggtctgatgaggacatgtttgaaaatattgctgatatcattgggaggaatttggttgctccaagaacagcactgtttgcgtgcactgtgggacaaaaaccaagcaaagccaaattctacctggatgatacattcgaagtggtcactatgctgagcgcactggcagatgccacaggtcctgaactggagactgattcggctgatgaatctgtcgcatatatctcatcacttgatattggtgacgaacaatcagaatccagtgataaaccagttgaagggtcttag

SEQ ID NO: 19399 - DNA, 237 bp, Zea mays
  Peptide Sequence Number=SeqID_62774
atggcgcctttcccgctccgccttctgcggacggcgaccctgccgcgacgccgagaggccagcggccaggcgagcagactgcagtgcccccctgcctccccgctgggctgggaagaggatccagtggcaatggagggcgcgcaagatcttccccggcttgtcgcgtcccggatcctaccggcctaccactaccacttccagccgtccgcggcaactttcagtggtcagaagctgtag

SEQ ID NO: 19400 - DNA, 417 bp, Zea mays
  Peptide Sequence Number=SeqID_62775
atgtcgcgcgcggaggcggagcggacgcgccagctgcttgtggatacataccgcgggctgggcgcggggaccggtgatttcgaagtgccggaccgggagtccggacttcgctgcctggagtgggtgcaggaggagttgcaggctctccccactgtcgtggaggggttcatggcgtatgcctccctggtcacctgcgagggggcgatgaatgcgctctccagggaagggtgccggcacttcgaggcggcgcgtggcgagagggtcgacgacttcggggcgctgaacagcatgctatctgacccggagccagccccggcggaggccgtgcctgggcccgtcctggggccgaccccggagactgcgggagacgcgccgggttcaagattttgggcctgcgcacacaaccgctactactaa

SEQ ID NO: 19401 - DNA, 363 bp, Zea mays
  Peptide Sequence Number=SeqID_62776
atgaccctgggtacatccgttacatggccgaggctcgggctacgctcccgaggtaccctaggacatttccgagaccagcgggaacggtttgttatggaatcccaccgaagggaggcaccgagccctcggagcctatcaaatgggtccgggtccaacaaatcacccgtagggctcgggcgttcgctcggattacccaatagcaactcactggaaacaccatgttcagcgcccaccgagggtaacatggcgcgttccccctcttccttgctgaaaggcgatgaaggggcatacaataaaaagccgagacggtcctcaatcgtcctctcgctccgtgcagaggctcggaggctgctctcgcactag

SEQ ID NO: 19402 - DNA, 222 bp, Zea mays
  Peptide Sequence Number=SeqID_62777
atggccgtgactctcgctcgcccggcagtggcctggctggccgcatgggtcctccgccagtcggaacgttgtccgctgccctgcccggcgagcgggggtcacaccagggcccagggcccgccactgccagtgcgttactgtatatgccctgaagccgtggaccttgtggtcagtgtcaaagcacgtctttcgtcgtacacgcgcgaccatgttaaagcttag

SEQ ID NO: 19403 - DNA, 1260 bp, Zea mays
  Peptide Sequence Number=SeqID_62778
atggcgggcatcgacctcaacaccgtggaggaggaggacgaggaggaggcggaggcgctgcctttgcccggacccggtggccgtggcgccgtgtgcctggagctgtggcacgcgtgcgcgggccccgtcccgccgctgccgcggaagggcagcgccgtcgtgtacctgccgcagggccacctcgagcacatcggcggcgacgcggcgcgaggagcagcagcttcggcggtgccgccgcacgtgctctgccgcgtcgtcgacgtcaccctccacgcggacggcgcgacagacgaggtgtacgcgcgggtgtcgctgctgcccgaggacgaggacgcggagaagcgggcgcaggcgcaggcgcgggtccgggaggacgaggaccgccgcgacggcgaggacggcggcgccatgaggccgctcgcacggacgccgcacatgttctgcaagacgctcacggcatccgataccagcacgcacggcggtttctcagtgccgcgccgcgccgccgaggactgcttcccgccgctggactacagccagcagaggccgtctcaggagctcgtggccaaggatctacacggcacggagtggaagttccggcatatctatcgaggtcagccacgaaggcatctcttaaccactggatggagtgcatttgttaataggaagaagctcatttctggagatgcagttctcttccttcgaggcgaagatggagtgcttcgactgggagtgcgccgagcagcccagctaaaaattgtaactcctattcctgcacctcataaccagtgctcaagtaatagcaatcttggaaacgttgcacaagctgtggccacgaagactgttttccacatctactacaatcccaggttaactcaatctgaattcattgtaccctattggaagttcacaagaagcttcaatcaaccaatttctgttggaatgaggtgcagaatgcgatatgaaagtgacgatgcttctgaaagaaggtgcactggtataataattggaagcagagaagctgatcctatatggtatggttcgaaatggaaatgcttggtgaaaaatataccaacaaacgtcaaatcagttttgttaaatgtcaagggcgttcgtgcccaaggatgccggaccccgactacggagttcgtagtcgcgatccgtggtagacggcagggttatacccccacaccgccactcttcgtcaaccgggttatgcccccaggttgccggcttaggagaatagagagaggagattag

SEQ ID NO: 19404 - DNA, 699 bp, Zea mays
  Peptide Sequence Number=SeqID_62779
atgtccgggggcacaccggacatgtactgtagagtgtccggtgaccgttggcgcgaagtagccgttgctccactggctcaccggacagtccggtgcacaccggacatgtccggtgaggagttcaacgtgaagtcccctggtacaccggacactgtccggtggcacactggacagtccggtacccccaatactcctaagcatggctggaaaacatcttcaaaacagaccgtaaagactgacggattcacgcctcgcccgagggcctcctcagatagtgggcgcacccccggctcgcccgaggccaagctcgggcaaactttgtcatacaacaacctcggccaaatcgccttaccaccgaccggaaacaacactattcaccccgtttcgactactgtgccaaccaccagggtaaaactaatgacagtaagtcacgacctcccccgagttcagcctcgggcgcaacagggagctccgcctcgcccgaccccatgcctcgacctcagcctcagccttgggagaaggtctccgcctcgcccgaccccaggcctcgacatcaacctcggcctcgggagaaggtctccgcctcgcccgaccctaggcctcggcctcagcctcggcctcgggagaagtcaccgcctcgcccgacctcagcctcggaccgactacgccacaggggatacatcattaccctacccctag

SEQ ID NO: 19405 - DNA, 840 bp, Zea mays
  Peptide Sequence Number=SeqID_62780
atgctcttgaacaccgaagctcctgacttgtacataaggcagaatcctgttccaaatgcctacaccttagcaatcaacggcaaaaaaccattcattgtcgttcacacaagccttgtggagctgcttactccaagggaattgcaggctgttttggctcatgagatgggtcacctcaagtgcgatcatggtgtttggctcacttttgccaatatactcacaatgggagcatacactgtccctggttttggcatggttgctggctttctggaagagcagctatatagatggctacaagctgcagagctgacttgtgacagggcagctcttcttgtggtgcaagacccgaaggtagtcatctctgttccgatgaaattgtcaagaggttacagttttttcagattctcctacagccacgggatggtggcggccttcgcgcgggcagcgtggctcaaggagtaccacgagaaggttagcatgacgctgaacattttggccgacctttcacctcttttcacgtgggacacaaaacaggtgtttgtttttgtgacagcagagtgtgagactccacatgatgcttttattcaatatgtcatttgcacaattactgttgtttttaccttcaaagctgtttatgcttctattgttaatgttcattgtacattcactcttctggcacaattgtgtttgactacttttgtgttcaaatacggaagtggtttgattatcgtagccatatttgtattaaaactgacatctgtgaaggaaaagtcccttgggctcctcacccagaattttgtcaagctcttcttcaccatgaaggttgagacaatctcactttga

SEQ ID NO: 19406 - DNA, 174 bp, Zea mays
  Peptide Sequence Number=SeqID_62781
atggagcgatccctgcacggagacggggtgtcatcctcctcgtcttgcgaaggcacgaacggtgaccgtcgggccttggcttctctgactgtcacgctaggcggggaggatggcattactccaagtatgcctcctgatgagttgatcaagcagttggatgtagacatgccgaag

SEQ ID NO: 19407 - DNA, 429 bp, Zea mays
  Peptide Sequence Number=SeqID_62782
atgacccaaaagccttacgtcaggctcctcccgttggctcacgtcatgggcagtcggccacgcggcagcattgggtctccgcctgagcggggagcggaagcatacgcggtatggtccagacacatgtcagctccggacccccgcctggccttgatcaaggcctgggtattctttgtctcggaatcccgggaccttgccgtgagtggcccggaccctgcacaggggggtacgggcacgcccgtggaggttctggaccttacccggaggtccgatccgtacgtacaggggtccgacactttcccatgggggtctggacccactgttgatatcctggagtatatcgtcttctctagtcacgtggcgacccgggagccgcccatgtggtggggtcgggtgttgtttatcacgcgactagagatagtcgcatga

SEQ ID NO: 19408 - DNA, 804 bp, Zea mays
  Peptide Sequence Number=SeqID_62783
atggcaatgaaaaatcgtggatctggatcaaacaaccatactatgtggaatatacaggctgacccagttgacaacctgaattctaggagtataaaccagactaaatcctctaaatgctctgtcattattgaagaacttgataccaatgaaaaaggagttgataattctgaagaattgttttctggtactcaaggtagctcgattgtgaatgtttctcaagaggaaggcgaagatctttcggatcaaagaaagaaaactgatggcattattcatcatgaagataatcagaaatttatgccttcacccatcccgataagaagggtcagtgaacgtcttaaaaaagatatgggtattagaattgaagagaagaacagaagaatggctgtgaaaaggaatctggaagcttctaaggaaattattgatattagcaagaaaatgggagttaatataaatgagcaaaatatggaatctattgagttactcaaagaaatggaattagctagacaatgtttgggtcagaaaaaaattgagattttacagtttattggcctacaagaaactatgattggggactgtgatgacttcatcacaagaaaattggacccctctggtgattacctatggctttggtcccctgctaaagggaaatctggaggcattcttgtgggttctagaattgatgatcttgatgtgggatcttttaagaagggaaatcacattctccaggtgaattactgggataaagctctgttatgtaaatggaatcttatggtgatttatgggtcctgctctggagaaatataa

SEQ ID NO: 19409 - DNA, 342 bp, Zea mays
  Peptide Sequence Number=SeqID_62784
atgggagacccagtcttcaggttgcatggaggggtaaagttcgcgcccggcttcactcaggatttctcctacaggccaggggactggctagtcttcggttccgaaacaaaagggttgcctcagcaagccctcgaggattgctgcagagaaggcctaggcggcgggaccctccggattcccatggtggagacctacgtccggtgcctgaacctctccgtcagcgtcggagtcgcgctgtacgaagccgctagacagctgaactatgaacagcttcagtaccagcctgatgagctcccagaggaggcgcaggagcttttcccggcagaggacatttatgcgtga

SEQ ID NO: 19410 - DNA, 813 bp, Zea mays
  Peptide Sequence Number=SeqID_62785
atggcgcctccgcggccctcgtggccatttgcgagcgcaacgagccggctgtgggacgtggatttccgaagaaagaggaggcagcgcaatctatctctgggtatgcaggacaggacaggtgctcaatacaggggaggaccgcgatggctggactggacccggcacactcgcttcgagcgactttttgttttggtgcccctcttcctcattccgtggctgctcgacgtgaaccgtgtccagagcagtcagctggcccactccacattttcccgtagcgacgaacccgggagcccatcactgcagcacaaagcagttcggaccgaaggcccacggcccgtttcccttccgccttatccctccgatcgctgtcggattattcgagagcaacagatggaggccggcctgcgcgcgctaggccaccgctacttcggcggcggcggcggtggcctcggtgggttcgcggccgcgcgtgccacccggctccggcgccagcgccagcgccgcatggccgccttctgctcccgtgagtggcaagggattcccccacttcccccctccacttcctaccgctccggcgtgtctgtgtatctgacgtccctccccacgctcgcaaacgtctctgcagtcgctgttaatggagatgggaatggcgccgcgggtggccccgtggggagcggcgtcgaggtggcgcgcgccaggaggatgctccatgtcgtgctcgtctcgccgctgataccaggaaatacagggtccattgcaaggacatgtgcagcatctgcagttggcctgcatcttgtcggggtaagccattag

SEQ ID NO: 19411 - DNA, 318 bp, Zea mays
  Peptide Sequence Number=SeqID_62786
atggcaaccgcgatccaagtggctgttaaaatgctagctggaagagccgaagagctttgtgttcgttgcgatgcggtgcggtgcgacagcctctcatcgccaataatgcagctgtgtctctgcgaggttcttcggcgacagcgctgttcacggtttaataatagggttgtgccccagctcccagatggcacatgcaaggcaggggattctgaggcgtgtcgcgcagacccgcgaggcataagatacgatgatactgcccggacagtgggtcctgctggccgtcttaataacagccaaaagaaacaatttgggtcttaa

SEQ ID NO: 19412 - DNA, 888 bp, Zea mays
  Peptide Sequence Number=SeqID_62787
atgaggaggagagtcctaatagggcgtacccagtgccgtaggcttcccgcactgtgcggggtctggggaagggtatctttaagcgccaagccttacccgcataatatgcagaggctggggctcgaacccgggaccttccggttacagacggacgccactcttgaacaactgcttcccatttttctttctttgctgaaggatgagttccctgatgttcgactcaacattataagcaaacttgatcaagttaaccaggttattggaattgacttgttgtcgcaatcacttctgccagccattgtagagctctctgaagataggcactggagagttcggcttgccataattgagtacatacctttgttggccagccagttaggtgttggtttttttgatgacaagttaggggcactttgcatgcagtggttggaagataaggttttctcgatcagagatgctggtgccaataatttaaagcgtttgacagaggaatttggccctgagtgggcgatgcaacatataattcctcaggttatatgcgcaaaacccatgcacatcatctcttatgcgagggcgacaatggagtcttctgtgaaagggcctctagctgagatggttttggagaagataaacaacccacattatctgtatcggatgaccactttgcaagctatttctttgctagctcctgtcatgggtcctgatatcacatgccaacagttgctccctgtcgtcattgcttcttcaaaggacagggttccgaacatgaaattcaatgttgctaaagtcctgcaatcacttgtaccaatccttgaccaatctgttgtggagaagacagtgaaaccatgcctagttgagctcagtgaggacccagatgtagatgtttag

SEQ ID NO: 19413 - DNA, 480 bp, Zea mays
  Peptide Sequence Number=SeqID_62788
atggcctttgttcctatgtggttgctgcatatgccagtgtggatgtcttcaagtgctaaaggttcaacacaaaccaataaaaagatacaagttagggttcaaaagaaaggggcaaaagaaaccaaagagaaccctggtttggcgcaccggactgtccgttcgcacagagtcagagcagcgccagaaggcgcaccggatagtgaacagtgcctgtctggtgccccaagctgtcagagctccgacgatcgaaaccatcagaaccctaacagttgggtgacgtggctggcacaccggacagtgtccggtggcgcaccggacagtgtccggtggcgcaccggactgtccggtaccttcggacttatgtcaaagagggagaacctcaaaagatacgaaggttggcagtgccgaagctgtgaagcaggaaagcttcggcatgttcgcagaaaagggaaccgacttaaagatgaaaaggccatttag

SEQ ID NO: 19414 - DNA, 180 bp, Zea mays
  Peptide Sequence Number=SeqID_62789
atgaaggtgaacatgatcgagaagcaagaccaggccaaggctttaggcgggcccagaagacagaagctccaacagtcggaatccaacggtattggtgacgtggctggcgcaccggacatgtccggtgtgcaccggactgtccggtgcaccattcggcagacagtcccaccaaacggctag

SEQ ID NO: 19415 - DNA, 483 bp, Zea mays
  Peptide Sequence Number=SeqID_62790
atgggcaagaacaacaagcgcaagcgtgagccgactcctccatcggaggattttggtgactcggagtactcagaggaggagttctcctctgagtctgaggggtctccggctcccatccccctgcgtgagtcatctgacgactcagacgactcccaggggctcgcggcggaggtctggacttacatccgggtcgtcgagcgctccgggctcgagggctcggatgagtcggagtactcctcgggcgaggaggactcgtccgaggaggacggcggcggcgatggcgaggacgatgacgacgacgacggcggtggcgacggtggcggcaggggcggcagcggaaacagcaaggatggcggcggcggcagcagcaggagcggcggcggcagcagcaggagcggcgcgcggcagcagcaggggcagcaacaggggcggcagcggcagaggcagcaacagggccagtggctagacgccactggtccttag

SEQ ID NO: 19416 - DNA, 291 bp, Zea mays
  Peptide Sequence Number=SeqID_62791
atggtcatcatgatgagactgttctttgcttcggcttttgacaggtccccaagaacggggtaccccaaagtgaagcggctccgaactggccagcttcgggaaaatccggggccggcgcgctataattcaccggactgtccggtgtacaccggacagtgtccgcggagcaacggctacttcgcgccaacggtcgactctgacagtgaacagtacacgcggcagaagtcagagcagaggatcagagaggcaccggactgtccggtgtgcaccggactgtccggtgccacatga

SEQ ID NO: 19417 - DNA, 765 bp, Zea mays
  Peptide Sequence Number=SeqID_62792
atggctctctccactaggccacagaagttttggtacaacgtccttgcctccagctcaaggatggactgtagcatcatggccactacagccatgtcctgcctaaggttgaagaacctcaagacggtgccgctccacgttgttgtagactttgtcgagcctgcatatgagggcgttgatatcctcttgctattgttggagagtttcctcacgagcgaggatttgtgcctgacactggtgctggtactcctcttcttggttgggggcttcttcatcccctgcatcatccttgtctcatggtggcattgccatgaaacaagttcgtccgactgcattagtggcatcatagtcgagctccgatgtctaaccgtggctcaaattgtattcaaggagatcgaggatggaggttggttagtgaccaaccatggccacgggtgtcgagggtttgcctctctcacccttttgactgatggcggcatcatgcctcttgaggtgtcgtttgagggagacaacgcgcctcttgaggcaccacttgtcttctttgttttggtggccatgggtcatgtgggcattcccgtacttgccatgatggctgagaagcgtgttcgcgcagttggcaagcgcttcgacatcgagagtggtggtgcgcccctctccctctgtcgtgatgatgtgggtgatttctgccagtcgaagatcacccatgtcctaggtgagggcatcgatgggaccattgaagtggagatgcagttcgacaggggaggctag

SEQ ID NO: 19418 - DNA, 84 bp, Zea mays
  Peptide Sequence Number=SeqID_62793
atggactacatggtgtttgaggttgctgaattggatgaagcagcaatgatttgtcaaactaacaacaaaatgaaagaaacttga

SEQ ID NO: 19419 - DNA, 489 bp, Zea mays
  Peptide Sequence Number=SeqID_62794
atgccctcgacctcgccaatgcccgttttctgtaccctttccctagctcgtgcccttgcatgctgcacgttgcgtcgcgctgttgctgttccctgttcgcctctgctcctcaccggtgaagtcgccggtgaagtcgttgagcaccttcgttccttacagcctctagaaaatgctccccagaatctactctgcctcgttgccagctcccctacatcgagcccccgacgtcgttttctcactctacttgcttgtcgtgccgcctgcgcgcctgctcaattcagtaccaccgtcggcgccattcgccagcgcaccatgacttcgtcctgtgctgtgacggcattgtcctactgcaaccttgctggagccccatacgtcgtccaattgtcgcggcctcgtcgttgccttgttgctgttacactcaccggcgcctgcactgtaggattacggggaggctacgctagcgcaaaacaaaaattttcatccccataa

SEQ ID NO: 19420 - DNA, 333 bp, Zea mays
  Peptide Sequence Number=SeqID_62795
atggaattaccactagacgcgcagagcagcggaagacgtctcgatgtagacgaacgcgtcgagcagtgccgtgtagtcgccggcgttcttcacgtcctcgcacggttcgtccaagtgctccagatgcagcacctccgagggcatatttctaacatgcacatcgtcggagttcggcaccgcgacgtcaccagagcttctacgtccagcttgtcgcgtcgaacgccgttatcattctctgttcgcgtcgcgacaatctgttttctatccataatccgaagcgtttccaataatttccatgtttttgcaaataaatttgaattacgtttgatgtaa

SEQ ID NO: 19421 - DNA, 246 bp, Zea mays
  Peptide Sequence Number=SeqID_62796
atgacttcgtcctgtgctgtgacggcattgtcctactgcaaccttgctggagccccatacgtcgtccaattgtcgcggcctcgtcgttgccttgttgctgttacactcaccggcgcctgcacatcgtcggagttcggcaccgcgacgtcaccagagcttctacgtccagcttgtcgcgtcgaacgccgttatcattcgcgtcgcgacgatctgttttctatccataatccgaagttttctaaataa

SEQ ID NO: 19422 - DNA, 189 bp, Zea mays
  Peptide Sequence Number=SeqID_62797
atgcgaaaaaagcacatgctagaatattccgaaaaaaaattccgagacacaattccggaaaattccgagacacaaatccgagtgaacggaacggagcgtgactgtgagagcgggattggaacggagcggctccgtcccattgattttttggagcggaatggttccggatctgaggagaatattccctaa

SEQ ID NO: 19423 - DNA, 474 bp, Zea mays
  Peptide Sequence Number=SeqID_62798
atggtcaagtgggctggtcgccagtgggccagcactatttctgtgtcggcagaccaagattcagtgcgactattggcagttgagggttgtgctgctcttgggaagttgttggagccccaagattgtgcagcacatattctcccagttattgtaaatttctctcaggataaatcttggcgtgtgcgctatatggtggcaaatcaactgtatgaactatgtgaagctgttggtactgaacccacaaggggtgatctggtgtcagcgtatgttcgccttctctgtgacaatgaggctgaagtgcggattgcagctgctggaaaagttacaaaattctgcaaaatattaaacccacaaattgcaattgaacatattcttccgtgtatcaaggaattatcatcagattcatctcagcatgttcgttcagctttggcatcggttattatgggaatggctcctgtattgggaaaggcctaa

SEQ ID NO: 19424 - DNA, 786 bp, Zea mays
  Peptide Sequence Number=SeqID_62799
atggatgactggcggcctgtacgcagccggctgttcgagcttctgtcgctgtcggggatgctgaccgaccagagctggacggagatactcaagcgccgagacatgtacagggaggcgttcgcctgcttcgaccctagcgcggtggcgaggatggaggaggacgacgtcgcggagatcagcggcaacagggagctgaggctcgccgcgtgtgcagggtccggtgcatcgtggcaaacgccagctgcatccagaaggtggccagggagctcgggctccttcagcgggtacatgtggcgggggcctcacgtgaaccaccggtggccggtggtgggcaagcacaggtaccaccacaagtacgtcccgttccggacgcccaggtcggaggcggccgccggcatggacgtcgatcacctcgtcgactggttccgcgactgcgtccgcctcgccgaccgctccagtcccggggcatcgccaacgtcgccgcgtagcccgcccgggtcgaccggcatgtcatcggacatgcagcatacacaaacaacaatgcggcaccacgacagtgtgttgacaccttttcggaggcgccaattactcaagagaaccagcggcggtgctctctgcacaggggcggacggtccgcgcgctggggccggacggtccacggcctggtgcgaggcggcggtgctttctggtcaggcgcggacggtccgcggcacagggccggacggtccgcgacctggtgcaggagcccgagttccctgcctgacggccggacggtccgcgccctag

SEQ ID NO: 19425 - DNA, 207 bp, Zea mays
  Peptide Sequence Number=SeqID_62800
atggggaaaggtgggaggggatgggggagggaggagagggggagtgggaagctcaccggcgacggggacggggcgtccgagcggggcggccgaacggcgacggcgaggggcggcggcctagcgcaggggcggcggctagggcagggagcgggtaggacgtcggcgacttgtgtgcggagtgagataatgatgggtgataggtatagg

SEQ ID NO: 19426 - DNA, 480 bp, Zea mays
  Peptide Sequence Number=SeqID_62801
atggccagaggcaagaagggcaagagagagcctcgccgcactgacgggaagcgcaagcgccccccgagtcctccctcgaaggacttcggggactcagagtactcggaggaggtctcctccgagtatggtcgctcgcctactccggtgtcccttgtggcatcgtccgaggacttggatgactccatgggactgtccgtcgcagcgcgggcgtactggcgatccatcgagtgtgtggggctcggtgggtcagacgaatcagagaagacggcggcgagggcgacggcagcagtggcgatgacgatggcaagcagtggcgacgacggtgacgagggcagcggcgacggcggcgaaggcgacaacagtggcgacgacgacgacgacaaaggtgatgatggcaaaggtgacggcaaaggcggcgatgacgatgtcaaggacggcggcggtggtggcaaggccggtggcataatgctctcggcttaa

SEQ ID NO: 19427 - DNA, 384 bp, Zea mays
  Peptide Sequence Number=SeqID_62802
atgttgaagaaagcggtatctgacttaaggaggcttcatgtggccgatgaagtcctgggcccactcgtcagcgatgttgtagatgtctgcttctcgaaagagctgttccgagggttgcgctggtttgttagaaagggattggaaatttatgacacaccggtggcagaaatcggcccagtcgtcgatgcactggcggggaaggtgccggagccactgcagcacgtcctgcccgagaacgatgggcagcaagaggacaaaggacttcaacggtcgaccgctccaaactccaacagtctgctgatgtggcaggcaccggacagtgaacagtgcccctgtccggtgcaccaccagactatccggtgtgccatcgacaacaacagctag

SEQ ID NO: 19428 - DNA, 459 bp, Zea mays
  Peptide Sequence Number=SeqID_62803
atgcccccactcatagctcgggagggcgtggccctgcgcaagttagggctcaaaagcccccggaggatggaaggccagtcagccggggcctctccaactcggagaactccattgtccacctcgcccactaaggagtggacacggatcactcggagaagggaagtgaatgttccctccgaggaaggaaaacacagcgaacaatcctcccaacacctccgccctcaaaggaggatgagaagaggcgcaccaccgtacctgctcctttctaccccgacgttctcttcattcaagggagattggagtcatcgcccatcttcgacgatgaacccaccatgcagggggaggaacctccccaacgcggtgctcggcgatggagaaataggcaccggaacgtacgacgatatcacgaagccgaagaacgggacccagcgcaacccgtctcttgggacgaagccttag

SEQ ID NO: 19429 - DNA, 308 bp, Zea mays
  Peptide Sequence Number=SeqID_62804
ggaccgaagatgtccgcctccctgaacagctgttcggaggtggcaggaactttttgaagtatgggccggacaaaggccgggtcattggatccccgatagaagtcttcaatcacagccgcctcaacgactttaggaatatggttcctcatcgtttgaaaacttttgacgaacaatcagagagtttcatcactctgtcgcctaatggattggaggtcccatggctgcaccggtttatcggagagagactggaaattcacgataaactggcggctgaagtaaccccaatcgtcgatgcagtgttgaggtag

SEQ ID NO: 19430 - DNA, 621 bp, Zea mays
  Peptide Sequence Number=SeqID_62805
atggatgaattatcctatcgatctaatgtcgatgtggttgctatgggatggctaacgagtctcctttcttactgcccctcttccattctaaaaaccccagtggcaggaggcaagagcggcaagggcaagcatgacaagaagagccagagcgacaagaggaatcgtcttccgacccctctgtcagacaacttcgatgactctgagtaccagaggagaggttctcctccgagggtggggctctccacagctgagagagcctacatccgggccattgagcgagcatggctcaatggctcggatgacttagaggaggactccgaggaggatgactccacggaggaggaagacgagggaggggtggatgagggcggctatgatggtggcgacgagggcggcaatgacgacatggttggcagcggtggcgatgaaaacaatggaacctttgagagaaccagcaaggacttggaaaaggccaaggtgttgaggaggagcagcaagggcacccacaacagaaaggagatcaagtccgactcggctgcgactccatctcggggtccaggaccagtctgcactaaaatagacgcccaagatgcatccagattccgattgcgacgaacttga

SEQ ID NO: 19431 - DNA, 228 bp, Zea mays
  Peptide Sequence Number=SeqID_62806
atggggaagcctgtcccatcactcctcatgctcctcctcggccgaggcggggtcccactcgacagtccaacccagtggcaagatggacggccaagtcactccagcaaccatgtcctccaaagaacattgaccgcacttgtacccaccataaccggaatgggagaccacgtctcaggtcgcgtgaggggtatgtccactgccaggttcactcaggtatccgcacgttaa

SEQ ID NO: 19432 - DNA, 438 bp, Zea mays
  Peptide Sequence Number=SeqID_62807
atggccggttcaagggatagctctgatatttctccaagcaacatcatagaggcgacttgggaaaccttgccggctgacgagcagctccagtttgaggagcacaaggagcggatgatccaggaggcgaaagcaaagttcttggccaacttcaaagtggacaggaacaacaaggtcgtccgacatcgggcgacggatccggcttcgctccaacccacgccagatatccccaatgttgtcacgaccagtcacaacccctttatgggatgccgatggacacataccctaagcaaccgcaaatcggcagcaaaccagccgatctgcacatgcccggaccgtccgcacgtgagcgtggaccgtccgggccagcaacagtcgggcctatttttaatgagttacctagatatgcgcccgaaccaccacacacgacacagaatctaa

SEQ ID NO: 19433 - DNA, 171 bp, Zea mays
  Peptide Sequence Number=SeqID_62808
atggagcctgggagcctggccatacggacgttggaatccaacggttggatcaagcgcatgcatgcagtcgcgctgtatttggagatagaagtcgcctcgaggaaggtgcagtacattaggctacctgcactcacgaactggaagcgcggatgcagtcgccgtttgcagtaa

SEQ ID NO: 19434 - DNA, 330 bp, Zea mays
  Peptide Sequence Number=SeqID_62809
gaaaacagcgctattcaccccgttccgactactgtgccaaccaccaaggtaagactgacgacagcaggtctcgacctcccccgagttcagcctcgggcacaacagggagctccgcctcgcccgaccacaggcctcagcctcagcctcggcctcggaagaaggtctccgcctcgcccgaccccaggcctcggcctaagcctcggcctcgggaggagtcacgtcctcgcccgaccccaggcctcggcctcaggagaagtcttcgccttgcccgaccttgggctcggaccgaccacgccacaggggatacatcattaccctgcccctagctag

SEQ ID NO: 19435 - DNA, 198 bp, Zea mays
  Peptide Sequence Number=SeqID_62810
atggcgaagtgtatgggagtcgcgatcccttggcagatgggtaacatgacttgtgggtacaggttacaacctctgcagagtgtaaaactgatggtcaataccaggaagggtggtggaattgatctacctcccaatcgacacactcgaaggatatttagacaaccacaacaacaacaacctgagatggatcctccataa

SEQ ID NO: 19436 - DNA, 984 bp, Zea mays
  Peptide Sequence Number=SeqID_62811
atgtattgcgcctttccaccttccgagcccccggatggggagcgcccgcgttgctttcgtcttgctgctattggaggagcgcaacttcgtggagattggcacctttcagccattgctcggcttcaaggattttcatcaagcagcctggctgcatcccctcaccaatggtcacccaagacggtgaccaccagttcgatggtggggagaagcaagccgggctgcggcctctgccccgccctcagcttcaaggatcttcatcatccttgctggggaggagggcgaggcgagccggggcttgccttcgcgtgggctggcgtcccgcttcttcctccggcatctgggggtggaaaccatcctccagctctgcgaaggaggcatcctccagccaagtcggggaaggcgaactgctgctgcccagccagggtgcaccattccgtcctctgtccgggcgacggtggccagccgcaccggggggtctcacaacacgtcgtacgccgcgagggcggtgctcgtgttctgggacagtcccattctcgttttcgtggcgaggacgggagtgaggacctgccggtgcgctttggggcggccggcgctcgctggtgtggtgttggtgggcaggtggacgccgccgtcggtgctgaggtggtggcagccggagaaggtttctccgccgatgagatcgtcggcgccccccgcggactgacctctggctctttggctttgatagcttgtcctcgccccttgagtggggacgcgggcgagggccttgtcgcagcagcgtctgccctgaggtcatcgctgctgctgtttagccgcctggagcggaggtcgttgtcgctgctgacggagtgggcggcggcgagcctcctggaatttgtcgtcccgcaggccctccgatgtggaggttgttcatacccacgggagtggaaccggagttccgtttgtaatggcaccttgagtgccggaagagagctactcgtgtga

SEQ ID NO: 19437 - DNA, 1005 bp, Zea mays
  Peptide Sequence Number=SeqID_62812
atgcctgcaccgccggccgcaccgccggtgccaccggccgctccctggcgtcggcacgctcccacggcggcctcctctactcccagaaccgtcctgctcctcctaccgatcctcctgctgctcctcttcgtgctctccaaagcgacggatctaaccttctccaccaccaccacctcctcctcctcctcccgccatgttccagtcaacctccgctcctttgactgctacgcctcgccgcaggcttccccgatggtcgccaaccttgtggagggcgtgccctaccccttcttctactcgctcgccgacatgggtaccctccccgaccacccccacaagaacatcgctcgtctcctcaagggcaagcgcttccgcaagcccgacatctccgagaccatccaggagttgctcggcggggaggtggggaagggggaaccatccggtggtttggtggtggacgtgggtgccaatgttgggatggcatcattcgcggccgccgtgatggggttccgggtgcttgcattcgagcccgtgttggagaacctgcagcggatatgtgatggggtctacctcaaccgggtgcaggaccgcgttgtggtgtatcacgctgcagcttctgatcgagttgggactactacgatgcacaaggtgattggccgacttgacaacagtgctatatctgcaattggtgcaaagttagcattcaagtctaatgcagaagttgctgttgaagtttccacaattccattggatgaagttgttccagatactgagagagttcttctgatcaaagttgatgttcaaggctgggaataccatgtactgagaggtgcatcaaaattgctttcaaggaggaaaggtgaagctccctaccttatatatgaagaagatgaacacctgctgcaggctagcaacagcagtgcacaggagataagggcatttctcactagtgttggttacaatcactgtaccaggcatggaaatgatgctcactgtacaaaggaatag

SEQ ID NO: 19438 - DNA, 1152 bp, Zea mays
  Peptide Sequence Number=SeqID_62813
atgtggcaggacgccaagaaaagcctcgcacaaatgaacgtaaatggaaatttgcagaatagaattgggattcaggtgggtcaagttaaggcgataaaaatcaaggaggccgcggaaaaagggagaaatgggaagagcgagatcgcggagaagaaaaggaacgtaaatcacagattcatgggtatcctctgccgtgacagtgaccccatgacaaatccgccaagaacaaagctccctcgggggaaggaccccaatggacacgaggtggagaaggtcaggctcggagacaacagacatatggttacctgcgaaaggcaactggctgttggggtcgatgggaggaatcaccacagcggacgaactcgaggcctttctcttgggcgccatctcaactctactgaggatctagaggcaggaaagcaagaactagggcacggaaagcagaggcggctgaaagcgcagtatatgcgggatattcctgagtcagataccgtctccaaaagcgcccatggccttgttgctgcccttgctgctgccgccgccgctgcccctgctgccgccgttgccgcccctgctgccgtcgtcgccgccgtcaccgtcgtcatcgccgccatcgcctccgtcgtcgtcgtcgtcgtcgtcgtcgccttcgccaccgccgccaccgtcctcctcagacgagtcctcctcgcccgaggagtactccgactcatccgagcccgcgagcccggagcgctcgacggcccggatacccaaaacaccgacagagcccgagtccgagccctggggtcgggcggagcggagtttcccatggcgcctagggccggacttggctgctgtcagcctcactctatcgagtggctcagcagtcggagcggcgcaggcgacgctgtcctcttgtcagaccgttcagtgaagcggcgaagtgactgcggtcacttcggagctgtcgactggagggcgtgcgtcaggataaaggtgtcaggcacctttgcattaaatgcccctgcgatttggtcagttggcgtggcgatttggccaaggttgcttcttggtgaagactgggcctcgggcgggccgaagctttgtgctgatgggggttaccagctgagatttaggagccttgagggtacccctaattatggtccctga

SEQ ID NO: 19439 - DNA, 465 bp, Zea mays
  Peptide Sequence Number=SeqID_62814
atgacttggaacccgaccacgcacctgggctactgccaggccgcgagagggaacgaccagaccgaccgaagcactacgaaaagcattcaggcctcagaggagtcaaaccactcctccgaggcctcgggggctacacccggcgggtgcgctcgcgcgcacccaccagaacaaggcaaaaaaccgagaaaggaaaacagcgccgcccgctccgctccgactgccgtgtcagccaccccggcaacgactgacaacaggtcacggtcagccaccgagatcaagcctcgggcgccacaggaagctccgcctcgcccgacctcacgctccggcctcgggaggagatctccgcctcgcccgacccccggacttggcctcgaccccggtctcgggaggaatcacgtcctcgcccaaccccggcctcgaccacaagagaagtctccgccacgaccgaccttgggctcggactga

SEQ ID NO: 19440 - DNA, 3198 bp, Zea mays
  Peptide Sequence Number=SeqID_62815
atggcagccggcgagcatgctctggtcgaggagtccaccgtccctgtcgtctccgacgtcgctgacgccgccgccaaaccctacgtccggccggcccttttcctgcgcccccgcgcgggggacggcgcccctgcccctgctccgcccggcgacccgggccccgtcctcccccgcgggatcgaggcggagttcatgggctgggcgggcgtgccccggctgtggccggagtgggtggccaagctccgccggcgccacgagccgctgtggcgggaggtcgggatcctgggcggcatcctcgccagcacgtgccgggtgcgccaccaccaccacgagcgcgtgctgctgcagctcgccgccttctggtacggcgccaccagcaccttcgtcttcccctggggcgaggtcacgctcaccctcgaggacgtcgccacgctcgccggcctgccgctcctcggcgacccagtacgcgcgcccgtgtcggacagcctggagaaggacgtggccgcgatcgaggccgtccgggcggtgatgaaccggagcaagaagaagaaatcttcttacggcgcgtgggttaagcgcttcgtcgagcgcacgccggaggaggagatgccgccgcccgcgaccggtgacggtggcagagacggcgaggcgcaccagctggtcgagcatggcgctttcctctccatgtggctgtcccttttcgttctacccggcccaccgttcgacgtcgtccgccgggagatcattccgctcgcggcccgtctggcgcgcggcgagagcgtggcgctcgcccccgccgcgctcgccaccatctaccacgatctctccgcgctcaaacgccacataacctcgggcgacaaaaacggacccttcgtcatctcggcaccgatccacatcctccagctctgggtctgggagcatttcacccagctccgccctgaaacagtgggctcgtctactcctgatgatcatgacatgccaagggctgcccgatggcgtgaagctggaaaaaggctgagctccaaggacttgcacgcagtgctcatgtcaccgaaggggtttgagtggaggccctataaaaatagcaggttttttggtctgcacccaggtacaggtggttcttgggtccgcggtcaggatatagcaacaagtgaagcgctcttgtcttttgcacggtgtttgcacccttgtgagctcgtgggcatgaactgcattgagcagtataatcctcatcgtgttgcgaggcagctcggcttcgatcaggacatccctgggacggttccccgtgcaagctcaggttgggagaaagcatgggagacatacaacatagaggccaagagttctgcttttatctttccaaatcacaagcctggcgtgacggttcagtatgcaaagtggtggaagccttactcatcagcatgcggtagtgccgttgctaatgctgcaaagatcaaagaaggccacgatcttgttagtccagtgaaaaggaaaatggaaggggttcttgctggaaattctggcaaaaaggtgcgtctgcgtgtggccactgctaccctgggctgcccgcccaatataccagcaggaattaacgtctacccgtcccagtcctcaggcagccatgctgcaacaagacgagctgcggcagcaccagggcttgttctccgcgcgtgtccaccccacctaaggtttaaagctgtgtcccccacagggatgcctcagccactacgagatgcagcctacgatccgcttgatcacgtttctctttctgaaaggctcgatggcattactaagatgcctaagcagcacaacacagaatgtttggtgaaggatagtgagcaggagagaattgtcaaacgtgtgaagattgttacaccaaagcctccaagtgctggcccagagaaggcagttctacacaaagttgttgagcaagctttgcctgacgcagttgcaagctcagctataattcatgactcgtctagtgtatttggtactgaaaggccacatgcaaggtgtctccaacaaagtaaagatgaagatcttaatagtgccaatggggaaaatattagcagaagaacagagcattgtgatgtcgtgcttcttaatgttgtccagggtgcagtgagtactgtaaagagtgaagccattggagctgggactgaagttgatatgcttccaacacatgaagacttattggtggtcagtgacggtgacaggtgtgataaatcaagtagcatgggacatgaggtgcatctggaatctcatatgtcgggagcaaaaatgtcctttataagagagcgaaacgaaggtaccgagctggttgatgcaagaaacgacgaggaagacagccaagttctgaaggaagcgacaaaacaaggcaattttggtgataccgttaaattcaatgacgatgagcttgataaactaacaaggaaggaagccagggtgtttgttgaagcaatgagcaacaaagatgcgccgagtgccatgcatctgaaatgtcctgagatggaaccaacgcggaccatcttacaggagtgtaatgaagaaaagcagatggtcagggaaacaaatgatgagcacgacaacccagtgatgaaagaaggcacggtgcaaaacagttatgaccgtcagcttgcaagtgttctagatggcacgactccaagacaacagccagatgtattaactcatgctgctactgtccaaacctatgatggtctcttaaaagaaccagctaaagaaatggatacatgcattgtcacaggggatatcgacaataccgacaaggtgctcaatgaaaaatttggttctctgaatttcagtgagaagggaaatgaagataccttcgtgtcaaaccaagggttagaatatcctatggaacactcagcaggagccagtagaaagaaatcaggaaacagtgagagattctctagcagtctgttagatggaaatactaaactggttagccatgaagtttgtactaaaacactgtactatcttagtcggtttgaccggatgaaagacgcttgggacaaagatgcaaatagcctaccaaggagggctgttggtacgatggaaatgataggaaaagcatctgcaattcgacatgccgaaattgctgagttggacaaaaagattaatactctgaaggaagagattctggcgctagaggcagctgagaaagggaaatctcctgagtga

SEQ ID NO: 19441 - DNA, 369 bp, Zea mays
  Peptide Sequence Number=SeqID_62816
atgagcttgacacaactaaaagggaagtgcattgctcaaccttctcaagataaccgtgatcacatggtgaagaagcttgagacgggaacaatcgtggcatgcactaaatcccttgaagaaaatgtcaaggacttgaggattgccaagaggaggaaacaaaagaaaaaaaatcaatacctcttccaaaagcctcaaccatacctccataaaaggcaacccaaaattgcaacttgtgctagaaaggaaataaagaattatcctatgccgaaaagtcaagacctacaacatggaggaaagccaaaggatggtaacaagtatgcctttaagtgcaagtatcttaaattatcatttcttatgtgtcttgtgtag

SEQ ID NO: 19442 - DNA, 871 bp, Zea mays
  Peptide Sequence Number=SeqID_62817
atgacgctcttcgccaacggcaaggtacgagggcgaggaggagtctgggttatagcctcgggctcccactcccgatgcagtggatggcttctattctcggcgacagatgacaacggggggagggggtccatggaggcgggtggtcgctttccagcagagcgacagaagcagaatcgagggggcagcgccatctccgaatttgctgagtcgcggtgggggcacgaaggggctgagcaggggggcgaggaaggcaaggctgatgcggcggcagacacgagcggtggcagggcatcgcgacaacgaaggaaggggagatgcgagacggggcgaggatcacgagagcgggggcacggtgaagctgtggtggatgcccatgttagtactggaaagccagggcttccattagtaccgggaagccccaaccaggtatacctctgcgcagactgcccctgccgctaccccccccgcgtgaaacacccgcacgcccgccgcagcgcacgctccacgaatctagcacgcccgcacggtccgttggctgctactgctgcgcgcgcgcaacggcgggacccgggaggagcgccggtgctggtggccggcccgatggagtgggcgtcagtggagtacacagccgcagcgctggtgtgcgccgcggcggcgagcgtggtcgcgctcgcgcacatgtaccgccacctcctccactacgccgagcccatctaccagcgattcatcgtccgcatcatattcatggtcccggtaaagctctccgcccgccgctcacacccacaacaaatcctcgcggccaagggcgccctcgcgccagatttgtcgcccgccttcgctgtagcttttccgtattgggtgagctcgaggg

SEQ ID NO: 19443 - DNA, 636 bp, Zea mays
  Peptide Sequence Number=SeqID_62818
atggagttgcagtcgggccacacggtggagttcagcacctcgaggatttcctcggttcgcgtgcaggagatgcagcagctagggtactttggtgacggtgttgggcgcgtcccgggcgctgaggagattcctgagcctaagggcgaattagttgtgttcgaggcattcttcgtcgctggccttcgcctactagcgcatcgtttcgtggtggagtatgtctgggcggtgacttcgtacggcggtcagccgtccgtggaggtcttcgccaagaactattatctgcactggcaaaagaggaaaattggaaataagattgcacaatttggatcgtgcaccttcacgccgaggactggaaagacttcggcgaaagtcgtggaaatagtcccctgcgctcggaacaagtggggcaactggtgggactattggttttatgtctcgggaggggaagtcgattacctcccagggctccctgcggccgtcatgtgctcccactgttacatggcattcccaccatttgaggtggcgaaggatgatgaggacgaaggggccctccggtatgatgcccgcatgagtagcgggcgtgatttggttgaggagttcattggttatggagtatggcccttggtgcacggctag

SEQ ID NO: 19444 - DNA, 1831 bp, Zea mays
  Peptide Sequence Number=SeqID_62819
atggacaaggatcaccaagatgcgacgcggaagcgtcgggcgttcactagggtcagggaccctagtcgcgaggtcaagaaggcacgaggaatcgtgaagtctaccgcccctggtagcagcaagccaccgccggctgcaaagcctgccgcccccggccccagcaaaccttcatcgggtgcgagggccgtcgctcccggctcgagcaaaccgccttctgcggagcccacgcaggagcaagggccaccgtctccgctgcatactgccgaggcggcggcgggtggggccgacctctccatggacatctgcgtggatgactaccgcgtgggtagcgtcatgatgtttgatgcccgcacggggcggggacttgtcggtgagtttttttcacggagtctgggtcttggacaagattgtgatgcagggtcagatcctaggcaactggctgttgtcccggctccagtggcggccgcgccggccgcggtggcggccgaggcgaaggtagctgaagcatgtaagttgtcttggacttcatcagtttgttgtgtttatgtgattgcgaatttgatggacttttcatggcaggcggctgccttcgtcgaacatgttgcgtcgggcgctctgacctcggagttcactgccgagaagcaacgactcgagggcaggattgagcgcctccgaacgcagcatacggaagttgtgcgagacaagtcagctgcggaaaacaagagccgcaggctgatggagaagttggtggctatggaggtcgagaaggaggacctcagctgtcagctggcggcggagaggaaagacgcaaacagggcctacactgaggcgcaggctgcacatgccgaggccaaacttgcgtgtgcggaggccaatcttgctcgccaacgcgccgaggaggcggaaacgagccacagcagcttgcgtgaccgcctggacaaagcgaaggcctctacccgcgtagaggtcaaccggacgcaggcgcagctgacggacgcgtatcggcagcttggtgcggggaccgctccctttgacgcgtccagtaaggaggtgcgcctccgcttcctcggatggctgcaggacgagttggaggtgctcccaacgattgtgacaggcctcatgtcatttgcctcgctcatcacctgcgaattggccgtgaatgccttgtcccacgagggatgcgggcactttgaagtctttgaccgatcggacgaagacttcgaacgcggaatcttccaggttgaggacccgatggcgcgtgatgaggaggtcgaagacctcgaggacttggagagcacgctgcccgaggcgtcgggtgagaaggagggggttgagggggagctggcgccgccgtccgatgttagtgaaggccccatggtgacctccgcgctgacctgtgctggcgaggaccctgtgccggccgctgcgccgactggtgaggacacttcggtggtggcgggcgaaccagctgccaaagaccctgcagcgtcggccggcccttcgcaggtttcgacgtatgggcctgcgcaagcaaccgctgctgacgatactaattttgtggcggccgcaaccgtagtgcctgccaatgacaatttatctggttctggatctgggtctttttcgtctgatggtgagtttgggagtccgttttcctggaccgaagagtcttcagatgaagacttggattattttgctgtgttagatgtggctgcggtggagtcctcgccgcgggtggaggttggcaaggtggctgatcttcctagtgcgaggaccaagtgccggcgacgaagggtggtgtcgaagcatagcgtgggcgaggtttcgcaaagtg

SEQ ID NO: 19445 - DNA, 486 bp, Zea mays
  Peptide Sequence Number=SeqID_62820
atggtggccgtgagcagcgcggcaggaccgacgcgttcccggcgaccagaggctactccgtgcaaaataagggtttgggaggcatcacaacgatgtgagagtgctcaaacgagaaagcaggggacggggactgaccggaaaagggctggccacggtgaagccggtttcacggtgttcttcaaccggtttgggggaagtcccaaattcgcgttctctggtgggggtttcgggatgcaggggtgttacagtcaaggattgactgagcgcttccaacaacacccttaccaagaacaaggacaacaagcatttttggaccctttgctcggcgccatagcctatggcgccgaggtaacacagctctgcgccataggttatggcgccgagagctatactatgtcgctggccgaggagatcgtgcatagtatagtagttcatggtggccactcactatggatacatggtcctcaagatgctaggtcccaatga

SEQ ID NO: 19446 - DNA, 426 bp, Zea mays
  Peptide Sequence Number=SeqID_62821
atgagcgaaaggaatcgggcggagactcactggatagctcggtccacgcgcggcggcggaagaccgaagtccggtgaggttgatctcgggcctccggtgaagtctggccgagtccgagggcttggcgagcttcacgggctactggcggagctagccgaagcactggcttgcccggaggatggctggggtgggctggccacggtggccgaagctctggtggcaatggcgggcggaaataagctcgccggagctaaggggaagtggctggccggtgaggccgcggtcgaacacgtgttcccgttgcctctgcccctgttcaagcgccgattgggagcaaatcttcgcgaatttgggcaagatcactgcaagggatttgttcaccagaccaagctttgtcttttgtgtatggacgacgtgcggttttag

SEQ ID NO: 19447 - DNA, 384 bp, Zea mays
  Peptide Sequence Number=SeqID_62822
atgggcgccgaacatggtgtctccggtgagctgcaagcggaacctcggaccgcgtcgccgcccgaggctaggtcggacctcgccgaaggtgtcgtcgatgccgagggtgctgctgcccccttccagcgtcaagacccgagcctgcattgtcttgtagcggatgtttgtgcgagcgagagttgcttctcgcggaaggtgatgagtgagccgaagcaccaggtcgcccacctggaggtctcgggaccggacccctcgggcgtagtagcgtcgcagggactgctgacgaacgcgtcgagcagtgccgtgcagtcgccggcgtccttcacgtcctcgcacggttcgtccaagtgctccagatgcagcacctccgaggtggcgaattag

SEQ ID NO: 19448 - DNA, 735 bp, Zea mays
  Peptide Sequence Number=SeqID_62823
atggcgctttcccccctcatccttgcggaaaggcgacgcaggggcgaatgtaaaaaagccgagtctgtccctgatcgccctctcgccctgtgcagaggctcgggggctgctctcgcaaacccggctccgaccgaaccgttgacagcgtcaacataccagcccgagaacttgggacccgaccggctcggactcgggctaagtcccggaagacggcgaactccgctccgcccgacccagggctcggactcgggctcagccccagaagacgacgaactccgctccgcccgacccagggctcggactcgggctcagccccagaagacgacgaactccgctccgcccgacccagggctcggactcgggctcagccccagtagacgacgaactccgctccgcccgacccagggctcggactcgagctcagccccagaagacgacgaactccgcttcgcccgaccccagggctcggactccgccctggccttagccgacggcctccgcctcgcccgacccaggggctcggactcgacctcggccacggaagacagactcgacctcggcttcggaggagcttccacatcgcccaacctagggcgcagaccagccacgtcaacaggaggcgccatcatcgccctacctcgagctgactcgggccgcaggaaacaagaccgaatatctttcgtgctttttgactacttcgaaaagtggatcctgaaaacgacggagtacacgtaa

SEQ ID NO: 19449 - DNA, 372 bp, Zea mays
  Peptide Sequence Number=SeqID_62824
atgtccggtgcaccagaggactccaactcaaactcgtcaccttcgggaaattccagaggcaacttcgctataattcaccggactgtccggtgctccaaggaagagcggcctcaggaactcgccagcttcgggaattcatttcagctgctccgctataattcaccggactgtccggtgtatctgcggggcaacgactatttcggcgccaacggctacctgcagcgcatttattgcgcgccagcgcgcgcagaagtcaggcacgcccatgctggcgcaccggacactctacagtacatgtccggtgcgccaccggacatccaggcgggcccagaagtcagagctccaacggaactttgtgttccaagtgattga

SEQ ID NO: 19450 - DNA, 171 bp, Zea mays
  Peptide Sequence Number=SeqID_62825
atgtcgcgcgcgttcgacgactactatatcaaggattgtggcgtcatgtcggcgctggaggccggcacaaaagctaccctgacggtggcgaggatgacgaactggtcactattgtcgatcctcctctgtgtcacctccggtgccaagatgacgccacaatcctcgatatag

SEQ ID NO: 19451 - DNA, 117 bp, Zea mays
  Peptide Sequence Number=SeqID_62826
atggccacggctagcggctacagccgaccggctgccgtgcgcacaggcccagacctgccttgccgcgtccgcgggagcggttggtggccgtgcaaggatcatgtccaactagcataa

SEQ ID NO: 19452 - DNA, 264 bp, Zea mays
  Peptide Sequence Number=SeqID_62827
atgtatgtccaaaggaatccgaagagcctacataagcacaagatcaaccgtcatcttccaatcaagcatctccaccaactcaagatgagggtgaggctcaagacaatgaagatgaagatcaagaggatgagctacctcaagaggaggacaatgatcaaggtggagatgaccatgacaaagacaaggaagatgagcaagagattcagggtcaaagaccgccacacccaagagtccaccaagcgattcaaagagatcaccccgtga

SEQ ID NO: 19453 - DNA, 459 bp, Zea mays
  Peptide Sequence Number=SeqID_62828
atgggcaccaagctagacttcagcaccgcctaccacccccagtcagatggacagacagaaagagtcaacaaagtcctcgaagatttgttgagagcctacaaagtctgctcagtctgggagcaccggactgtccgatggtgcaccggacagtgtccggtgcgccacactggcttgagcgaactggccgctctcgggaattcaccggcgacgtacggctataattcaccggactgtccggtgtgcaccggactgtccggggactcaaactgccgcccgccaggacacacaaccatcagcagccagggactccacgcctgccttcagccttcagccagggactccacgccttcagccttcaggattgaacctggtgacctggtgacccagatagaggcgcagttcctttggtcgctgaacctggtgacctggacgaaggcgaagctgtcccctcaggattga

SEQ ID NO: 19454 - DNA, 737 bp, Zea mays
  Peptide Sequence Number=SeqID_62829
atgggttgtgttgtctcgtggagcggtgaagaactgctgaactggagatggcgatgccgcgtgatttcggacgaccagacgtgttacttgctgttttccgtgatgtcgtggtcgtcggcggaggcgcaggcgccgtcggagcagctgtgcgaaggggtggcggctgtcgtggcggcgcgccaggggatggagacgccgctgacggcggtggccgaggcgttcgaggagctggtgcgcgggatggacgccgacggcggcgagctccgcgtcgcgcccttcagcgacacctgtgccctcgtctccgtgctcttcagcagcctcgggatggccttcaggttcgccgagatggagtacgtcaccaaggtgaacgatctcatcggtgccggcaagtcgtaccgcacgctgagcgacatcctcgacaaggacatccagaacgactgcgtgaagaagcagggaagccactcccggaacctgcgcagggtccgtctcggactcggcctcatcaaggccctcttcgagcaattcctcgccaccgagggttcattgtatgatgctgctacgatagcttacgggcaggtctgcgcgccgtttcatagctgggcgatcaggaaggctgttggcgctggcatgtacacccttccaaccagggagcagttggtagtgcggctgaacgaaactgatctctcggtgcagaagcagatgaggagatacattgacgcttctagtcctatcataga

SEQ ID NO: 19455 - DNA, 1836 bp, Zea mays
  Peptide Sequence Number=SeqID_62830
atggagccctcgccggcgcaagcgggcgcgtcggaccgcgaccgctcgccgcctccgcccccgccaccgccgtcccagtcgtctaccgcagcgacgatctcatcgccgcttgccgtcgtctgcagtttctggaaagattttgatttggagaaggaaagaagtggattggatgagcaaggtttaaagattgcggagaatcaagaaactagtcaaaagaacaggcgtaagcttgctgagaacacacgggatttcaaaaaggcatcatcagatgagaaactcagtttactcaattctttgctgaagagttatcaagaggaagttgataacctcacaaagagagcaaagtttggagaaaatgcatttctcaacatctatcagaagctctatgaagctcctgatccatatccagctcttgcttcaatgactgatcaagaccagaaattgtctgaactggagactgagaaccgtaagatgaaactagagcttgaagaataccgtgctgaagctgcacacttgaagaaccagcaggcaacaattaggcgacttgaagagcgtaatcgccaactggaacagcagatggaggagaaagtaagggagatggttgaaatgaagcagcgaagcatggctgaggatagtcagaaaactctagaagccctgaaagatagggaacggtcattgcaggaccaactaaggcaagctacagaaagtgtaaagaatatgcaaaagctacatgaatcggcgcaaagccaattgtttgagcttcgcactcaatcagaggaggatcgagctgcaaaggaggttgaagtcagccttctgatggatgaagttgaaagggctcaagcacgattagtcagtcttgagagggaaaagggggatctgcgttcacaattgcagacaactaatgaggatgcaagcaaaagtagtgactatttggaatcaagtgatatacttgagagttccttgaacgccaaggagaagattatttcggagttgaatgcagaacttcgcaacattgaaagtactttatcaagtgagagagaaatgcatgtgaacgagcttaagaagttgactactttactcactgaacaggaaagtgctcttatggagttgaagaaagaactccaggaaagacctacacaaaaactggtagatgatctcaagaaaaaggttcagattttgcagtatttcttccgacaggctgttggttacaactccattgaagctgaagactgggagcttgctactaatggtgaagaaatgagcaagttggaagcattgcttctagacaagaaccgtaaaatggagcatgagctaacacaactgaaggttaaaatatcagagaaaacaagtgttcttgaggaagctgaaaaaaggattgttgaactaacttcaaaggttgaagagcagcaaaagctgattttgaaacttgaggatgacatactaaagggctacagttcaactgataggaggggctcactcttgaatgactgggatattcaagaaatcggctcaagtgaagcatctgagggctctgatccaaggcatgcatcggcagatcaagatcaaagttcgatgctcaaggtcatttgcaaccagagggatcgtttccgtgcacgtctgcgtgaaactgaggagtacgcagaagatattgaaagtggttcttctgatgttgaagcaaagtacaagaaaatgtatgaggatgacataaacccgtttgctgctttttcaaagaaggaaaaggatcagcgttataaggaacttggtttaagagacaaaatcacacttagtagtggccgttttgtccttggtaacaagtatgatactatctttgtgtaa

SEQ ID NO: 19456 - DNA, 321 bp, Zea mays
  Peptide Sequence Number=SeqID_62831
atggcgacgttcggcggcgtggccatgattatgtccgtcaggctgggcacaattctgtctggcggcgccaagattgcagcaaggatggttatacacgttagatatagatccagtggccggcgtcgtggtttgcacagcaacacggaggactgcacactggactggagtgcagtgcaacaaaaatgggacagtcaaacagattgtgcgatcgctgacaggcaaataagattggctttggctatggagacggaaaatgctaggagagagccaaagcctagcatgggcgtgctacgtaacgtactagtgctccaaagatgctag

SEQ ID NO: 19457 - DNA, 279 bp, Zea mays
  Peptide Sequence Number=SeqID_62832
atgggcttcaaacttggatcaacatcaggaataaatgaggaacactgtaagcactccaaactgcccgacgcgtgcatgacaacggaggctggcgtggtcgcaatcaggcaagtcgaagcatcaggtgctatgaaagtcggcgtcgtcgtgctcagggaggctggcgtcgttgcgggcaaggagcccgacgtctgctcgacgatggagggcgtcacactcgtgctcgacgaggaaggtgcactcgagatcaaagaaaacgggggcttcacgatcatgtag

SEQ ID NO: 19458 - DNA, 3462 bp, Zea mays
  Peptide Sequence Number=SeqID_62833
atggaggcgctcaacgagctctgcgacctggtggccgcgcacccggatctcctcctcgccgacaagcttgcatggctctcctcccgctgcgccgccgccccgggtgccgccgccccgcagcgtgcgtcgagggcgcaccttcattcgctcctcgcgttggcgcgcctcctcccggcgggtggcgccggtgccggtgccgaaggcgatgcggcgcccccggccccactcctattcttcctcgcgtcccacgccttcctctcgccggccttctggccccagtctttcgccccggcgccgtttctcgctaggctcctcccgctcctcgccgcggccccatcctcccccgccctttcttccgcgctctccgccgccctcctcgcggcgctcgacgtcgccgacccgacctccgcgccgctcgcccgcgcgtttctctccgccgccgctgccgcggcgcccctgccgctcctccccgcggatgccgcgcccatcgctgcccggctgctcctcgagtttcttggctccgaggaggagccgatcagggccaaggggaagggagaggacaccttgggcgaggaaaacggtggggcaaaggaggtagtgcggaggttcgaggaggaggaggtcgatgagctggagcggaaggaagtcgcattcagactgaccgtgcatatgcttgggggcgagggtgggctagagaccgagcagattgggaaggtcaggaatgctgctgcgcgacaggtccgatcactcacggattttctcaagattagaaagcgggactggagggagcagggtacacagctcagggcaaggataaacaccaaattgatgtgttgtcaagctgcagtgggggtgctggtgcgaagcgtttccaccatggatactgatatcaaatcttcgaaggatatgctccagcagactctagcttggttcatcgaggccaccaagtcgtgcatcctgtcatcctggcggaaactgaagatatgcgaggagctattttgcacactgctcaatgggatcagccagataactgtctcacgtgggggccaacttctgccggtgcttttgattcccttaaaaccgcttgttgctgacatggcaggcagtagtcctggggctctatttgaagcagttgtgaagttgagctgtgagatcatagagtttggctggacaaaggatagggcccttgttgacacatttgttatgcgtctagctgcttatgttcgtgagcggaatgattacgaggaggaggatggcaaaggaaaagaggcagttccagttattcgacttaatgtcatacgccttttggctgagttatgtgtttgcttgaaaaaatgggaagttgtggacatgattttaccccttttcattgaacatctagaagagggctttctgcttgttgcttccaaccttacaagcacaaaactcaggtctgattatcgtcataggttactgtctctgtgctcagatgtggggctagttgctgaatctaaaagtgggaggagtggtgctgatttgatgggtccgttacttcctgcagttgctgatatatgttctgattttgatccagtgtccactgttgagccatcattattgaaactattccgaaacctttggttctacgttgtattgtttgggctagctccacccatacagaataatgaggcacctacaaaaccggtttccacttcattaggtacagcagaaagcagcagtgctatagcccttcaagctgtagctggaccatacatgtggaacagccaatggtctgtagcagtgcaacgtattgcgcaaggaacacctcctctggttgttagttctgtaaaatggcttgaagatgagctagagttaaacactctacacaacccaggtagtcgtggtggtaatggtaatgaaaattctgctgttgggcagagagctgcactttctgctgctttgggaggtcgagttgaggtagcagcaatgaacactatttcaggggtaaaagctacgtacctacttgcagttgctttcctggagatactacgttttagttgcaatggtggcatactctcggctacatctacattgaatagatcaaacagtgctttcagttgtgtatttgaatacctgctcactccaaatttgacaccagcagtaactcagtgtttgacggcagttgcacatagagcttttgaaacagtgctgtcgtggctggggctgtttggatcacggcctctgaggctatgcctggccaggcaagatgatcgcatatctgacataggtgaaggagctgatgttagagaatcggttctttctgttcatgcttgctttctgataaaaagcatgtcccagagagacgagcatgttcgtgatgtgagtgttaagcttttaacgcagctgaaggaaaagttcccacaggtcctctggaactcttcatgcttggatttacttcttatttctgttcacaatgagttgacttctggtccagtcagtgatcctgcttgggttgcaactgaaaatttttgcaagccaagtggagtacaaagaacacaacatacagcagatgttgtttcacttttatctgagatacgtatttgtagtggaaagaatgattggaacggtattaggacggccaatgttcctgcagttatggactcagcagcagcagcatcgggagccaaaaaagaagcacctgacttcactttggaagtactctctactgcagtagtgagtgcaactgtgaagtgcaatcatgctggtgagattgctggtatgagaaggctgtttagtactatgggaggcataaacatgggcatgtctcctcctgggacacaatctttgcacccccatcagtcatttgatgaagtttttgtctccaagtttgtcagtcttcttcagaactttgttgttgcagctgagaaacaaccaatagataattcacaatttcgtgaaacatgttctcaagctacagcattacttcttgatcatatggtgtctgattctagagcaaacctggaagggttttctcagcttatacggcttctatgttggtgtcctgcttatatttctacccctgatgcaatggaaactggaatctacatctggacatggctagtatcggctgcgccttctttaggtcctcttgtgcttgcggaacttgttgatgcatggctgtggaccatagatacaaagcgtggattgtttgcatcagatatgaattactgtggcccagatgcaaaattgaggccgcatcttatcgctggtgagcctgaggcaccaccagaaaaggacccagtagaagcaataatagcccatagactctggcttggcttcttcattgatcggtttgaggggttcggaggttttctcgacctgtgtgagaagattttcttcttaatacaatactcgggggctgtcttacccccgcaggtcgagtttatgggattaaggagtgtcataagcgaaaaggaaagcaaataa

SEQ ID NO: 19459 - DNA, 453 bp, Zea mays
  Peptide Sequence Number=SeqID_62834
atggccctggccatggaggtttgccatgcaagggacacggggctagcaggggctgggcgagctaggagccgcggcagggggcaagccgtcgcgctggccaagaacagaggggaggggaagaacgcgtggggagggagggagcagccagagaggaagagggataaaaggagaagaagagggagcctcacccggccactaaccccggcgacgacgagagcagcgcagggcgatcggcacggcgaacgaccaagcgaccgggacatggagggcagctcgccggagggtcgaggtcggctgggggcagggctggccgccgccatggccacggctagcggctacagccggccggctgccgtgcgcacaggcccagacctgccttgccgcgtccgcgggagcggttggtggccgtgtgttgacgcctttttggaggcgccaattactcaagagaactag

SEQ ID NO: 19460 - DNA, 513 bp, Zea mays
  Peptide Sequence Number=SeqID_62835
atgggcgcgattcaggccaaggctccgctcaagggacacgatcccgcctcgcccgagcctgacctcgggcaaagacagccgaccccggaagattcacgcctcgcccgaggatcccctcaagcaacggacgcaccgacgactcgcccgaggcacagctcgggaagctccacctcgcccgaccccagggttcggcccccgtcttggcctcggaagatggacttcgcctcgcccgaccctagggctcggactcaaccacgacttagaagacgacgaactccgcctcgcccgaccccagggctcggactcaaccacgacttagaagacgacgaactccgcctcgcccgaccccagggctcggactcagcctcggctccggaagacgatgaactctgcctcgccccgaccccagggctcagactcaacctcgacctcggaggaatcgccaccttgcccaaactcgggtcccggaccggccacgtcgcccagggaggctatcattacccctgcccctaa

SEQ ID NO: 19461 - DNA, 939 bp, Zea mays
  Peptide Sequence Number=SeqID_62836
atgtcttcgcactccatgcagcccggctgcatcccctcgctggtggtcacccaagacggtgaccacgagttcgatggcggggagaagcgagccgggctgcggcctctgcccctccctcagcttcaaggatgttcatcatcagtgctggggaggggagtgtgccgagttggggcctgtctccacgcgggcagcaccccgctccttcccttagtgatcggggggaagggcgttcaccgttcgtggcgctggcaactgccgcgtgcccggctccccggcctgagcggcttcggcgctacttccgatgccacctcccaccgaggcagccggaagagcaccgtctgctctgaggttatcgttgctgctgttcggctgcccggagaggaggtcgttgtcgctgctgccggagcgggcgtcagcgtgccacctggggtcttgtcgccccacaggccctccaatgaggcgttggaatccctcggctcggtcggccttgccgcccgaggcttcacttgcttagtcaaagaaaccctcggccgctctgcggtgagccagggccgagggcagcggtgtctacgtggacagaggcggagttggctcgaaaaaggaagcttcgtcggccggggcctggccgggtcgtccactggcgggaccaacgccggagtcgatttgtcgaggccacgaaccgggctggtgtcctcgggggacagctggctgaggcttcggggcggccggccgagccgtctgctcgggccgggttcctggaggagaccctggcggcgatggcccgggcgtggtgctgatgtcgtccttcggagcggagatccttcgcccgtgttgccgtccgaggctcggtcggacttcgccgatggtggagttgatgttgagggtgctgctgctccccctccatcgacgtctgagcctgcaggatcggttcgcctgtag

SEQ ID NO: 19462 - DNA, 618 bp, Zea mays
  Peptide Sequence Number=SeqID_62837
atgcaggcggcatgcaactgcaccaaggtggcgcaccctttcgactttgacgcatccagcatggaggcccaggcccacacgtcatgtaaccggtgcgccggttactacgtgcgagaaactgcaccgccactcgcgccagtaccgcgccttctcgactgcgggaccggtgccgcgactcgaggcgaccctgcgcatgacccgacagtgccaaccgagaacatcgttcacggggcaggcggcacctttggcaggcgaagcaggcgacgcttcacctctgccataatgaccgcgtcaaaaaatggaccgggaaaggggatactccgaaagggatccttctccgcgaaggaagcggggccccgagccctcatactgatcagaggttcgaaggctggcccctcggaagggttcaacagccacctcagagcactcgggctccgcgcccactactggtcagaggttcgaaggctggcccctcggaagggttcaacggccgcctcaggccactcgggctccgcgcccactactgatcagaggttcgtaggctggcccccgaagggttcgacagccgcctcagagcacgcagagcgagggatgaccctgggtacgttcgatacataa

SEQ ID NO: 19463 - DNA, 633 bp, Zea mays
  Peptide Sequence Number=SeqID_62838
atggacttgggcctcagcgtcgcgggtaggaccggcagcggaggaggaagagggggctggagagggagcgggggcggcgcgtccgcggcggcgtggacccggctcgtcagctctggcgtggaggacgagctggtggccgcgtcgggaggaggaggaggaggaggtggtggacgcgctggggcgagagccggaggcctgccgctgggccactttttggaggcctgcttcctctgccggaagcccctccccagcaaccgcgacatatttatgtacagggatggttttgggaatttctgcggcgggtcccgtggtatggacgtttccgacgtctttggaaggttgcttttgcgcgtgaatcaattaaattcctgggaccctaaattggtgcgcttatttatggccatgccaggtgacatcccgttctgcaccgaggattgcaggagggagcagatcgaaatggacgaggagatggagcggaaggagagcaaacccaagaacgtggcgccgagaggagctccatcccccaaggacgtggactccccgccgaggcctcccaaggcccgggccgggcttatggtttcccgtaatgatgacgacggaaaatggaaaacatatgtctacagaaagaaatag

SEQ ID NO: 19464 - DNA, 174 bp, Zea mays
  Peptide Sequence Number=SeqID_62839
atgaccgcctgtggcgccgaggtaacacagctcggcgccataggctatggcgccgaggtacgtgttgcgttggcacaaacggacatcgtggcgccgacgtgcacgtacctcggcgccatagcctatggcgccgagctgtgttatctcggcgccacaggctacggcgccgagtaa

SEQ ID NO: 19465 - DNA, 216 bp, Zea mays
  Peptide Sequence Number=SeqID_62840
atggcgaaggtgtccagaattgatcggagttggagaatcctagttaatgaagcttttattacaattagtgtgtcatcagcacagggccggcacatgcagaagaaagggtatagatttgtgctcatgtcagatactcatcggaagggggtgaaggactgcaccatcaggcttgatgagaacctaaaggatgtacaagctataaggaggaagagatag

SEQ ID NO: 19466 - DNA, 2844 bp, Zea mays
  Peptide Sequence Number=SeqID_62841
atgaagtccatgctccaggtttggggcatcttctgctgtgtgtgttcctgtgcacttggacaaaatacttctgcgcggcccagtgtcgtgaacgttggagctctcttcacgttccactcgacgattgggagagccgccaaggtggccatcgctgctgcggtcaatgacatcaacagagatccaagcgttcttcaggggacgaagctggttgttcagatgcaagataccaactacagcggtttcatcagcattgttcaagccttgcaattcatggagaaagacacgatcgcgatcatcgggccacagtcttcagtcgttgcgcacgtcatatcccacgtcgcaaatgaactccaggtgcctctgatgtccttcgctgcaaccgatccgactctgacaccgcttcagtatcctttctttgtgcgcactgtccacagcgaccagttccagatggcttccgtggctgcgatagttgattactacgggtggaagatggtgacagccgtgtacatcgatgacgactacggaagaaacggcgtgtcctccttagacgacgagcttgccaagaggagactgaagatcctgtacaaagctgcgatcaggccaggggcaagaaagagcgagatggccgccgtgctggtcaaggctgcgatgatggagtcccgggttttcgtgctgcacgcgcgtgacgattctggaatcgacgtgttctcgctggcgtacaatctgagcatgacatccggtggatacgtgtggatcgcgacagattggctcaccgcgtgcctcgactcagctcctcgtcttggaactggattactgaacacgatgcagggtgttctcacgttgcgtcagcacacggagaacaccagtaggaagaaggcgttggtttcgcgatggagtgaagtggcgaaggaggaggaggaggaggacggcggcagcttgcccaatacctatggcctctatgcttatgacactgtctggatgcttgcccatgggttggatgcgtttttcaacagtggcggaaacatttccttctctccagaccccagactgcgtgcggttgtaggaggagctctgaatctggacgcactgagcgtcttcgacgaggggacgctgttgctagaaagaatccgcaacgtgagtttcatgggtgcgactggccctgtaaagttggactcagatggtaaccttatccagcctgcatatgacattgtaaacgtagtagggtctggtttgaggacgattggctattggtccaactactctgggctgtccgttgtgtcccctgagactctgtacaagaaaccattcaatgtcagtgcaaaccaggagctccacgctgccatctggccaggcgagactgtaacgaggccccggggatgggtgttccctaacaacgggaatgagctgaggattggagttcccgacagggtaagctaccgtcagtttatatcagtagacaatcaaactggaacggtgggaggtttctgcatcgatgtgtttgctgctgcgataaacctgctgcagtacccagtcacatataggtttgtgccttttggcaatggccgtgagaatccaagctacacggaacttatcggtcgaattctgacgaatgaatttgatgctgttgttggggatgtagctattgtcacgaatcggacaaaagttgttgatttcacccagccatacgttgcttctggcctcgtcatacttaccgccgtcaagacacagagctcggatgcatgggctttcctgcagccgtttaccatcagaatgtggtctgtgacaggggtgttctttctggtcgtaggagcagtgatttggttgctcgagcacagaatcaacgacgacttccgtggtcctccagcgaagcaggttattactgttttctggttcagtttctcaactctgttctttgcccacagacaaaacttggcaaacgtgctcaggagatcttggacgattttgacaggagaggacacgaggagcacgctgggccgcgtcgtggtcatcatctggctgttcgtagtcctgatcatccagtccagctacaccgcgagcctgacctccatcctcaccgtgcagcagctgacgtccccgatcaagggcatcgacagcctgatcgccagcgacgagcccatcgggttccaggttgggtccttcgcggagagctacctggtgcacgagctgggcgtctccccgtccaggctcaaggcgctcggcaccccggacgagtacaagaacgcgctagagctcgggcctcgcaagggaggcgtcgtggccatcgtcgacgagcgcccgtacgtcgaggtcttcctggtgcagcacgacaagttcgccatcgtgggcgcggagttcaccaagagcggctggggcttcgcgttcccgcgtgactcgcctctggccgtggacctgtcgacggcgatcctggcgctgtcggagaacggcgacctgcagaggatccacgacaagtggctgtcgaacgggccgtcgccccagtccacgaccgacctggagccggaacggctgcgggtgcagagcttctcggcgctgttcctcctctgcggcgcggcgtgcctcgcggcgctggccatccacggctgcatcctggcccggcagtactccctccacgtggcgtcccagccgccggacgcggtggccacgggggccgacggcgccatccgccgctccagccgcagcagcatccggtcgttcctgtccttcgcggaccgccgggaggcgcagtgcccgagggggagctgcaaggaccccgccgcggcgctgggagggtcctccagcagcggcgtcagcagcttcacgtcaagcaacgccagcgtatcgaggtag

SEQ ID NO: 19467 - DNA, 201 bp, Zea mays
  Peptide Sequence Number=SeqID_62842
atggggacagacacggcagttgacgtgaccgaagccggactgacgatgagtgcgtcagtaggcacactgaagcggcgcgccagtcaccaactaaagggtagacgttacaataagaactcatattctcctggggtggagtttgacctcctacttctggacctcgtatcccatatggtgtcgtctgctgggtcgtgcttctga

SEQ ID NO: 19468 - DNA, 138 bp, Zea mays
  Peptide Sequence Number=SeqID_62843
atgacgggggcgccgagagctggtctcctggatcccaaccggcccggggttcgcgctggggggacacaccggtggacggaccggacccatgctgggtccatcttccatggcaagatgaggagctccgtctctcattaa

SEQ ID NO: 19469 - DNA, 1023 bp, Zea mays
  Peptide Sequence Number=SeqID_62844
atggtgggtctcgtcggcggcagcacggcgcgggcggagcacgtcgtcgccaacgccggaggggaggcagagtacgtgcgccgcatgcaccgccacgcgccgaccgagcaccagtgcacctccaccctcgtcaagcacatcaaggcgcccgtccacctcgtgtgggagctggtgcggaggttcgaccagccgcagcggtacaagccattcgtcaggaactgcgtcgtgcgcggggaccagctcgaggtgggcagcctgcgcgacgtcaacgtcaatcccggcctgccggcgacgaccagcaccgagcgcctcgagcagctcgacgacgacctgcacatactcggcgtcaagttcgtcggcggggaccaccgcctccagcttgctggagtcgtggcagtcgaggtaactggcggacctgatgtccccttccaccccgggagggagttcaaacagattgtcatgaacatgcttgattgctttcgtttgactgtggagtacggagtacggagttcacaaaatctaggagatgaacaacctcaggcttgtgaaatcaaggcacagcttgtccgcacagccgaggcggctaggcagctcgcgctaatgctcgaagtcgagaggccaagctaccaaggccgcaactcagtctaccaatcttcctcaaagatgatgtcggctatctccgtggctcatttggggtgcaaagacatggacgccgtggacgtcggagtggtagggatggtggactcgcagagcctatcctcggcacttgagaaactctatttctgggagaggaagctgtatgctgaggtcaagattgtaggctgtggagtacggagttcacaaaatctaggatatgaacaacctcagggtaaccctctcactgtctcatgccagcagccgcacccacgtcctgttctgtctcgcacgctctcgccaacttgtggttgtccatccgccgccaagcacccggccccagcagtcgcaatgtcagtgtttttctttcacagcaagcttctgttctga

SEQ ID NO: 19470 - DNA, 207 bp, Zea mays
  Peptide Sequence Number=SeqID_62845
atggaggcaagaagagcttcgaggtaccgagtgcacgggagaagagaaagtaccattctgagctctgctggaggagaaacagaaaagctaggagaagaacaagaaagattctcaggaaaatcctcccaaaagttgaagtcaaacggagaaagaacggaggaaaaagcacttagtgtgctgttggctggtgcacaggacagtgaatag

SEQ ID NO: 19471 - DNA, 255 bp, Zea mays
  Peptide Sequence Number=SeqID_62846
atggggtgcgtgtcgtccaagatcctagcaaaatcagggagctttgatgagaaggaaaaacaatcttctgttggaggccatacgggtggcacagtaatccccgtatatacggtcgaggtgaaattatcgctgagaccgacctatgaagtatttcaaaaggaaaaagtgattaaagatagaagaccgtgtaaaataaaatatgtcgagcgctttcgaccgcaaggattacaagcttctaggacaggaatctactag

SEQ ID NO: 19472 - DNA, 2349 bp, Zea mays
  Peptide Sequence Number=SeqID_62847
atggtgtgcaactgcaagccaccccaagatggccgaatgggttgtagagatggatgtttgaacaggatgctcaacattgaatgtgtcaagcggacatgtccatgtggagaacaatgctctaatcagaagttccagcggcgtagctatgcaaaactgagatggttccattctggcaagaaaggctatggattgcagttgcaagaagacgttactgaaggaagatttcttattgaatatgttggagaggtccttgacataacatcctatgaatcccgccaaagatattatgcttgcaaaggccagaaacatttctatttcatggctctaaatggtggtgaggtaattgatgcttgcactaagggaaacttgggccgattcatcaatcatagctgcagccctaactgttgcacagagaagtggatggtcaatggggaagtctgcattggaatatttgctttgaggagcatcaagaagggtgaagaattgacatttgattacaattatgttcgtgtatctggtgctgctcctcaaaaatgcttctgtggtactgccaaatgtcggggttacctgggtggagacatatcaattgtcgataccatcatcacccaagatgatacagaagcagatcattttgaacaaatggttgttgacaaagactccaaggagttgctgggtccaaatgagtctgattctgatggtagccacccaaatatttcagaacctgaattttctatccaaggggaagatttacatgattgctcagctgcaaaagtagaattagatctgcttgaaggaactagaggaacctcattagaaactagtgagcctgaacatcccttggaagcatggagcccaccagaagatgaagatgtcattcgtacgcctgtgcatgtgtcacggacatttgaaagttctctgcagaagttctcagtacatgacactcagtcatcagatcttttgcgtaagactgcaaattcaatggaaggatcaaaggctccaaatataacaaacggatcgacacttggttctgatttcaggggcaatctggtgcctactttcagacctgctgagagaaaaaacttaaaacaacataaaaatcagaaacgacaaccgtcttctccaattgacaatgaacatattttgggagttgaagggacactgaacagcctactggatgtggacggtggtatcagcaagcgaaaggatgctacaaagggatacttgaagctgctcgttgtgactgcagcagaagatggtagtgctgggggcacatccaaaagtctgagggatctttcgttgattcttgaggcacttctaaaaacaaaatcacattcggttctgttggatatcatcaataagaacggactgcaaatgcttcataatatattgaagcagagtagaggcatcttccaccggagacctattatacggaagcttctgaaggtacttgaatttctagctcagaaaggaattttgacatctgaacatataaatggaggtcctcggtttgctggagtcgaaagcttcagagacttgatgctgagtttaacaagacattcagacattcaggttcaacagattgctcggagcttccgtgatagatggatcccccctaataatgcaaggagtgaaccaacagaatatccacatacatcaacatttgtgcatgatatccagggaaccaatacagtctggagttctgctaggaggaaacgcaagagccgctgggactatcaacctgacgagcattataagatgccgggactaaaaatccaaaaagtttgttctggacatggtgaatttgatgttcagtttggctttatgaaaaataagttaaagaggaatcagggcgcaaacaactatcataatgatgttcttggcatggggagttcaacagagggtgaagatgatgaagcccctcctcctgggtttgagtcccagctggaccgtcggcctgcacaactttcaataggcagcgaggttgctccaggactttgcatggagagcactttggaacccctgaatctgaaggaggccaatgccataaaaaatggaaagttgcacctggcgtgccttttagtccttttccaccattgcctccctatccgcgagggaatccttgcccctccacttcgtcttcccagatgtttcagcatgatggaataccccaagttaaacataacaattctggacaacggggaaggatcatgggccgagatgggagagtgcataggtcatggagaaatgagtcaagaacaaaatggcaataccatcatcaaggaaggagattttcgagcactcatcatagatttgaaagatccgaacctgcaagacctcaatagtgattaa

SEQ ID NO: 19473 - DNA, 1383 bp, Zea mays
  Peptide Sequence Number=SeqID_62848
atggctgaaaggtaccaactcccacagagttgcgttcctccaacgacaaggcgaaaggattgcgggtgtcccccatccgggggctcggaaggtggaaagatacgatgcataagggagcgtgaagacatggtcgcctttcaagggggtcaccctccttttaaagacgactctccctacttgcgtccccagccgtcgtgggctgagtcttctccaacacgctccaaggaaccgggaaagggggataccccaaaaaggatccttctccgtgaaggaaacaggctccgagcctccctactgatcagaggttcgaaggctggcccctcggaggggttcaacagccgcctaagagcgcttgggttctgcgcccactactggtcagaggttcgaaggccggcccctcgaaagggttcaacggccgcctcaggccactcgggctccgcgcccactactgatcagggcgggaacgatcttgtaacggaatcccatcagagggaggcatcgagccctcggaccccgtcgacaggggaccgggtccggcagatcacccgcaggtacttttgggtgcgcctccgggcctctagccgacccctaacaaatggggcacgagcgtccactcggattacccgccagcagctcaccggagacaccatgttcggcgccctccgagggcaacatggtgctttccccccctcctccttgcggaaaggcgacgtaggggcgcagccaggcccggcctcaggcaccatagggaactccgcttcgcccgacccagggctcggactcgggctcagccccggaagacggcgaactccgcttcgcccgacccagggctcggactcgggctcagctccggaagacggcgaactccgctccgcccgacccagggctcggactcgggctcagccccggaagacggcgaactccgctccgcccgacccagggctcggactcgggctcagccccggaagacggcgaactccgctccgcccgacccagggctcggactcgggcacagccccggaagacgacgaactccgtttcgcccgaccccagggctcggactcagccctggcctcagccggcggtctccgcctcgcccgacccaggggctcggactcgacctcggcctcggaagacagactcgacctcgacctcggaggagcctccacatcgcccaacctagggcacggaccgaccacgtcaacaggaggcgccatcattaccctaccccaagctgactcaggctacggggaacaagaccggcgtcccatctggctcgctccgctagacaagctccagcgctcctccgacggccacgacaccacacgaaccgggtgccaaaacctctccggctgccacgatggcatgtacttagggcgctag

SEQ ID NO: 19474 - DNA, 492 bp, Zea mays
  Peptide Sequence Number=SeqID_62849
atggcgtgtttgggcctcggcggccgcagaaaacacacgctacaagataatccgatcctgcaggctcggatctcgatagttgaagggagcagcagcaccctcggcgtcgactacaccttcggcgagggtcctctccaggaatccggcccgagcagacggttcggctggtcaccccgaggcctcggccagctgtcccccgaagacatcagcccggcccgaggcctcggcagatcaactccagcgtcggtcccgctaacgggcgacccggccaggctctggccgaccaagtcttcttttcgagccaactctgcctctgtccgtgctgacaccgctacccctggcttcggctcatcgaagagtggtcgaggggttcctttaactaagcaagagaagcctcggacagcaaggccgactgagccgagggactcctacgcctccgggatacggatacctcactcatcacctttgcatggggcgactcacgcttggtga

SEQ ID NO: 19475 - DNA, 228 bp, Zea mays
  Peptide Sequence Number=SeqID_62850
atgaagctgtggaaggagacttccaggagttccaagactacgacgagttctaggtgtgggttagcggcaacccccagtcggctgcctgtgaaggccgcggttatctacgtttcttttccgcactttgatttatttgccgttgtcggtgatgatggagttcgggaccccaaagcgatggatgatgttggtgaagaacgccaccgcctgttcggacctgatgctgtttag

SEQ ID NO: 19476 - DNA, 1904 bp, Zea mays
  Peptide Sequence Number=SeqID_62851
ttgaatccagtagcggtttgagcaagaaggactgcatcgggaggtactacgccaaggatgccaccaagtacaggccgttcagcgcgctgctgcccgaggggggctggagcggcaaggtgctgtacgtcaagctcgtgctcgtcctcctcatgtgcggctccttcatgggcctcctcaactcgccgtccatccacctcgccgacgaacgccaccaccacgcgcagactgcagaggcgtggaatgcgagctggacgtcgcaccccgacgcggcgaactccgggtacgcgtcgagcctgaggatcgactggtcgcaggtccagacagcggcgaagcaggtcgctccgccggcgggcggcggcgccacgcgtgtggcgctgctcaacttcgacgacggcgaggtccaggagtggaaggcgcggatgccgcacacggacgcctccacggtgcgcctggaccacgtcgggagcgacgtcacctgggaccacctgtacccggagtggatcgacgaggaggagcactacggcgcgccggcgtgcccggacctgccggagcctaaggtggccaaggaggaggaggcgtacgacgtcgtcgcggtcaagctgccttgcgggcgcgcggcgagctggtccaaggacgtggcgcgcctgcacctgcagctggccgcggcgcgtctcgcggccgcgcgcgcgccccgcggcggcggcgggcaggcggcgcacgtgctcgtggtcagccggtgcttcccgacgcccaacctgttcaggtgccgggacgaggtggcgcgccacggcgacgtgtggctgtacaggccggacgtgggcgacctcacccggaagctggagctccccgtggggtcctgcaagctggccatgccatccaaagcgctaggcgaacattacgcgtcggcggcgccgcagcgcgaggcgtacgccacgatcctccactcggagcagctgtacgcgtgcggcgccgtcacggcggcgcggagcatccggatggcggggtccgggcgggacatggtggccctggtggacgagacgatcagcgcgcggcaccgcgccgccctggaggcggccgggtggaaggtgcggacgatccggcgcatccgcaacccgcgggcgtcgcgggacgcgtacaacgagtggaactacagcaagttctggctctggacgctcacggagtacgaccgggtcatcttcctggacgccgacctgctggtgcagcgccccatggagcctctgttcgcgatgcccgaggtgagcgccacggggaaccacggcgcctacttcaactcgggcgtcatggtcgtggagccctgcaactgcacgttccgcctgctggcggaccacgtcggcgacatcgattcgtacaacggcggcgaccaggggtacctcaacgaggtgttctcgtggtggcaccgcctgccgtcgcacgccaactacatgaagcacttctgggagggggacacggaggagcgcgccgcggccaagcgccgcgtgctggcggccgacccgcccatcgcgctcgccgtgcacttcgtcggcctcaaaccctggttctgcttccgggactacgactgcaactggaacgtgccggcgctgcgccagttcgccagcgacgaggcgcacgcgcgctggtggaaggtgcacgacgccatgccgcggcgcctccaggggttctgcctgctggacgagcggcagaaggcgctgctgtggtgggacgtcgcgcgggcgagggaggccaacttctccgacgcccactggagcgtccggatcgccgacccacgccggagtatctgcgccggcggcgacgccgaggcctgccgcgagagggagatcgccggccgccgggtggaagggaaccggatcaccacgtcgtacgccaagctaattgacaatttctga

SEQ ID NO: 19477 - DNA, 147 bp, Zea mays
  Peptide Sequence Number=SeqID_62852
atggaggagcatgacggggaggtgaagcagggacgacgattgggtcaggccgcggcgaggtcggctggcacagggcgcacgacggcgcagcctaaagcaggtgttacactgagcacaaacatagagtatacagagtttcttttctaa

SEQ ID NO: 19478 - DNA, 51 bp, Zea mays
  Peptide Sequence Number=SeqID_62853
atggcgcgcgcggatatcgcttgtgggctgagcagaaaatttccaatttaa

SEQ ID NO: 19479 - DNA, 996 bp, Zea mays
  Peptide Sequence Number=SeqID_62854
atgcttgtgtgggtgcacgacgacgcatttgaagaagcgcgcgcggcagcgagggacgaggacgagcaggaccgcgcattcaaagaagcacgcgtcgctgtgcagcgcgtggccgtggcggcgcacgcggcggcccgcacggctacgctagcccaccccgccgtcgtcgccaaccccccgccgccgcccgccaccgcccccgcccccgccatcgcccaccaccgtgtctgcagtcgcctcccgcccctgcagccacccgtcccaccggcgcccgccccgccaccgcaggagcccgccgacagccttctcactcccgccggcgcccactctgcccccaccgcctcatcggctccaacgcccatccgcccctacatcacccaccgccagccatcccgatctcgccatcggctaaccaagtccggcctcaggcgccataggaaactccgcttcgcccgaccccagggctcggactcgggctcagccccggaagacgacgaactccgcttcgcccgaccccagggctcggactcgggctcagccccggaagacgacgaactccgcctcgcccgaccccagggctcggactcgggctcagccccggaagaggacgaactccgcctcgcccgaccccagggctcggactcgggctcagccccagaagacgacgaactccgcttcgcccgaccccagggctcggactcgggctcagccccagaagacgacgaactctgcttcgcccgaccccagggctcggactcgggctcagccccggaagacgacgaactccgcttcgcccgaccccagggctcggactcgggctcggactcgacctcggccttggaagacagactcgacctcgacctcggaggagcctccacctcgcccaacccagggctcggaccgaccacgtcacaggaggcgccatcattaccctaccccaagctgactcaggctacggggaacaagatcggcgtctcatctggctcgctccgctaa

SEQ ID NO: 19480 - DNA, 309 bp, Zea mays
  Peptide Sequence Number=SeqID_62855
atggctcaccggattgctcggtctacgcgcgactacgggcgaccgaagtctggcaaggatgatcttgggtctccagtgaagttctatcgggtccgaggacatggaaagcttcacgggccactagcgaagctaaccgagcaactggcatggcttggaagtggctggagggagctggccgcggtggccgaggctcgggtggcatggcgggcggtggcgcagcatgctcaaggcgaagtccggtggaactttggctcgggcaggactgagagcgcgcgggaggtacggccgaggccttgggatgctttatag

SEQ ID NO: 19481 - DNA, 216 bp, Zea mays
  Peptide Sequence Number=SeqID_62856
atggtgagtgggggtaaaaggaagagtggagaccctcgagagtctgctatatggccttcgggagatttttgggccttacaacttcaaatggtgacatctttagactggcttggtagctattattatatgagaactcagcatacgatagactcttgtcccaaatgcctccatgctgaagggcacaagctctcaacatatcttcaagtacttgattag

SEQ ID NO: 19482 - DNA, 270 bp, Zea mays
  Peptide Sequence Number=SeqID_62857
atggcgggcggaaatgagctcgccggagctaaggaacggtggctggccggtgaggaaaccctaggtgacactggggtgtcacagccttccccccttaaaggaatctcgtcccgagattcgggccagagtcctttcgaggtgaagcgaaggattcgaaaggcaggaggaggggttgggggtgattacataccagcttccttaggtaggcaatcggggaagttggatcttaagaattcctcggtttcccaagtagcttcctcctctgagtga

SEQ ID NO: 19483 - DNA, 588 bp, Zea mays
  Peptide Sequence Number=SeqID_62858
atgcaaccaagaaaggctggtccccttgcaaaaaagtgcgacaaaagcctccaagcgagtattaacactcccttcgaggctcgggggctactgtcggggaccataattaggggtaccctcaagactcctaaatctcagctggtaacccccatcagcacaaagctgcaaaggcctgatggagtgaggctgacagcagccaagtccggcctcaggcaccataggaaactcctcttcgcccgaccccagggctcggactcgggctcagccccggaagacgacgaactccgcttcgcccgaccccagggctcggactcgggctcagccccggaagacgacgaactccgcctcgcccgaccccagggctcggactcgggctcagccccggaagacgacgaactccgcttcgcccgacccgagggctcggactcgggctcagccccggaagacgacgaactccgcttcgcccgaccccagggctcggactcgggctcagccccggaagacgacgaactccgcttcgcccgaccccagggctcggacttgggcttagccccggaagacgacgaactccgcttcgcccgaccctag

SEQ ID NO: 19484 - DNA, 930 bp, Zea mays
  Peptide Sequence Number=SeqID_62859
atgacttcggcaccttctgcattcctgaagccaaaatgcgctctctgggactgcctcaggcctgctgttggatcagaaagatggcatgattattgcagcatgtatcatgctgatttggctgtgcaagaagagggccctccgggcacaatgcctgtgatccgtccaagaggtattgatctgaaagatggccccctgtttactgctcttagtgcaaaaaatataaggaaaaaaatgttgggatccctgtctgtgaaggagctgccactgcaaagtctccgtggaatgcacctgccattctgcaccattgcagaacttttcgatctttacatctttgaaggtgagtctatcagagaatggttgttttttgacaaaccaaggagggcatttgttagtggaaatcggaagcagcggtccttgctagattacggcggccgtggttggcatgaatctaggaagcaggcgatgaaggactttgggggtctgaagaggtcctattacatggatccacaaccatccaacagctacgaatggcacctctacgaatatgagatcaatgagtgtgatgcttttgccttatatcggcttgagttcaagtcttcagatgcaaagaagactgtgaaatccaaattagtctgtaatccaatgaatgaaattcagcagcaaatggttagactcagtgcaaacagtcctgtagacaacaaacggactgcccggggcaggccacatgctaacccgacagatgtcgatactaacatctattcagttccaaacaccacagctcaagccaatgttccaaatgcttttcagccagggtcagaagtggaccagatgacatatttgaatggtagtgttgtttatgggcctcatctgtcgtatggttactcgactgaaagaagttacttttattggaactcagctgatgggacatga

SEQ ID NO: 19485 - DNA, 537 bp, Zea mays
  Peptide Sequence Number=SeqID_62860
atggctgacctatttcaagaagtttttaatccaacaaacatggatggtgccatgaaatcaatgagatcaacaggagctggtaactatggaagaatgcaacagattatgcagatggagaaagattggcatgtggaattcttgagacagtatagcagagagcacaattattcaggaatagtttactactctaatgctcattctattaacattgacaaaaatatatatcacttgaagacagggcggcgacttcaccgggacaacgacactggcggcgagtccatctacggcgccaggttcgccgacgagaacttcaagctacgccacacggggcccagcgtgctctccatggccaacgcagggcccgacaccaatggctcccagttcttaatctgcaccgtgcagacgccctggcttgacggcaagcacgtcgtcttcggcaaggtcgtcgatggctatgccgtcgtggacaagatggaggctgtcggttctcagtcatgtgccacggtcgagaccatacgcatcgaggactgcggctag

SEQ ID NO: 19486 - DNA, 369 bp, Zea mays
  Peptide Sequence Number=SeqID_62861
atggcggagaccacctgcttctccgtgtcacgcccacagatctcggctgccacggtctcgcgcttgccgacccatgcgcccgtgcaagcacgtgttggccagcgcggccgcgtatcatttggtggcgccgctagagaagcgtgcaacccaccgcggcggcgttctcttccaagcgtcgtcctggccagaggaggagggggaggagcgcgcgaatgggccacggccataaaccccatcccttctccttctcaaacaccaacgccgtcaccgtgccgtcgcgggctggagtcctatctccatctcaaacgtcggcacgcggtggatctgcaacccatgccgggtggagttccttcccctgcttcaagctaa

SEQ ID NO: 19487 - DNA, 423 bp, Zea mays
  Peptide Sequence Number=SeqID_62862
atgttgccaaagagccaaagtccactagtagaggcagaactgccgaaggtgataaaggctcccgccacaactcccaagaggaggagaatggccagcgtgctagacgctgttatggaaaccacaaaggcattgactcctgcccctacgaagaaagttgtcgaagctgctacagcccaggctgaagtcaaagctgggccttcagtgcccattgagacaaagcctaccgcgactgaggataaggctgagcaagaatctccaaacgccggcatggcagcagggaaggacgtgatagaaaaagctaaatctccggccctcgaagctccgtccgaagatctttattatattatttcgacttgctttcggagaaaagattatccaaagaagaatatttttagaagccaaacactaggcctggggaactga

SEQ ID NO: 19488 - DNA, 132 bp, Zea mays
  Peptide Sequence Number=SeqID_62863
atgacgaccgacaggccacttgagctactcgacatggatttattcagcccgatcgcttacataagcatcggcaggagaaaaatctcaaacccaagagaccttaaagggattcttgagatgagctcaaaatga

SEQ ID NO: 19489 - DNA, 988 bp, Zea mays
  Peptide Sequence Number=SeqID_62864
atggggatccgcaagaagcccgaatatgtctggaaggaataccgcgaaaatggaatagaaaacaacaaaaacacccccacctggaggaaaagacttcaggccctgtcagggagagaccccaccgaggatgaccccaccattgtctacatggccggatacctccacactctcgatacccactacgatgatctctcctcccactgcacccacctaaactcccgggtggaaagcttagagcagcaggtcaaggagcttaagaaggagaaaacatccctccaagagtgcctcgacatagcggaaggcgaggaggccaacacccgtgaagcctatcgaaccctaaagatggactatgataagaagctaaagaagctcgcccccatgaagaaaatccaaaagaagaccaagaaccaaggaggccaagctgagcggaggaagaaggctcccccagcaccagctcccgccaggatagagaatttgtccgacatcgaggatatgtccctagctagccttgatgaccttctcaaggaatttggggacactttagagaaagagttcagtaggtttcccctgagagctaaaagggaagccggtagagaggaaagtgagacccacctccccgcattaccggccccaccggtcagccgcgtcgtcttcctcacgtacgacgctccgccgtcccctcaccgtcgtcccctccatctccgtcccctcgccgcacaggaagagttcggcaccgccccgtcctccccgcttgaccaacgtccttgcccggtaccgccccgccgtggagtctcatcggcggcgctgtgcggcatcaatgtcggtgctgtacacctcaccggcgcccgccgagctccatcgctcctctccccttcgggcgcctataaaaaggctgccccaggcacctccttccctgcaccggcctcggccactcctctccttccctcgtcgagcgcaattcgcagagcgccgccgtcttcccctctcg

SEQ ID NO: 19490 - DNA, 447 bp, Zea mays
  Peptide Sequence Number=SeqID_62865
atgggcaagagtaagaagggtagcagttcctccccttgctccgatgataagcgcaagcgtgagccgactcctccctcggaggacttcggcaactcggagtactcggaggaggagttctccttcgagtccgaggggtctccggctcctgcctctcccccggcgtcgtctgatgattcagacgactcccaggggattgccgcggaggtctggacctacatccgagccgtcgagcgcgctgggctcgagggctcggatgagtcggagtactcctcggacgaggaaggcagcggcggcgatggcagagacagcgacgacgacggaggcgacggcggcgacgacagcggcaatggcggcgacggcagcggcgagggcggcgacggcggcggcaagggcggcaacggcggcggcaagggcagtagtaggggcagcaaccaggccagtgcctaa

SEQ ID NO: 19491 - DNA, 1224 bp, Zea mays
  Peptide Sequence Number=SeqID_62866
atggctgctactcgagggatgaacccctttttaaaggcagactcccctgattgcgccccgaaacgccacgggaagtctcccccgatgcacaccggtgtacccaaccaatggcgagggggcccagccccacaagtcatacaactggtgcgctggtctccgagtacggagaaggcgaaccgccacgcgaggagcgaatcattgcgcctcttcgtctccatcgaaagcagcagaccagcctctggcatggagggcccgggcccacgagtcatactcttcgggcatcagcctccgtgtgcggagaaggcgaaccgccgcacgagggaggtcgaaccgccgctcgtgccagtaccatgcctcctcagggccaccgcagaagacagagaagggggtaccccttactacagcatgaagatgcggtgccccacgcgactatctctagtcacatgggtgaacaacacccgactccaccacgtggatggccccaaggacctccgcaagtgcaacccggacctccgggtcgggtcccggatgcctcagcatggggtctggactgcccacagccgggtcctgggactttggggcagagaaaacctaggtcttgctcaggctggggtccggcggagaccagatgctgccatgtggcctaccacgcgtgacataagccagtgggcggagcctgatctggcaggcggcgtccaggccatcctgcaggtggcgtgcctgtccgttgccaaatacacccttccatggtgtccgcgtgctcgcgctgccctgctgcgcgcgcgccgtctcctcctggccgagaacgccacttgcctgatagacctttcgcccgcaggcctgctgcttgtcgcctggaggctggagctcgcgcgccccatggtcccggcctctgaggagctagagcgccgcaaccactaccttagcgcgctcgtgcgccgcaccaagtattccgacccaccccagatcgagtcggagtcacgccgcgttggagtcgccccgcgccggaagcgcccgtgccgaggaggtgaagccgtgaaggagatgactcagagttgcgcccggggaactgcctggcgcggggcggcgcggatctggcgagtggcgacgctctttgggtcgtggaactgcctgatgcgaggcgtgggcgctccagcgctctcccacgagcgggtcatccgcatgcggctaggagacgtgcagttgaaaaaaatattaaaatag

SEQ ID NO: 19492 - DNA, 822 bp, Zea mays
  Peptide Sequence Number=SeqID_62867
atggaagactctctggccattaggacatcctactgctcggaggtggaagggttccccacatctttttgcgaagttgtgcgcttcgcatgggaatcccgcaagaagccggaatacgtctggaaggagtatttcgagggcggaatggagaaatgctctatggcagtctacctgggagaaagccgaaactatcccgaaccatctttccttccaagtcactttttaccggatacctctttccaaatacttgccagaatgttgcccgatcagccctccgacaactatgccagaactacaacaagcaacaagaatacccccacctggaggaaaagacttcaggccctgtcaggaggagatcctattgagaatgatcccaccatcgtctacatggctagataccttcacacccttgataaccaatatgatgacctcaccctccactgcacctacctaacctcccaggtggaaagtctggagcaaaaagtcagggaactttcaggggaaaaggcgtcccttcaagagagcctcgcaatagcagaaggtgaggaagccaatacccgagaggcctaccgcaccctaaagatggactatgacaagaaactaaagaagctcgcccctgcaagaaaaatccgcaagaagaccaaaagccaaggatgtcagactgagcagaaggaagaagcccctccaaccctaccccctgccgggttaaggaactcgtccgacactgaggagatgtccctagccagccttgatgaccttcccaaggaatttggggacactttagagaaggagttcgggagtaccctagatagcactcgcgtgtaa

SEQ ID NO: 19493 - DNA, 444 bp, Zea mays
  Peptide Sequence Number=SeqID_62868
atggcgggtatgctattccggcgagcaattcagtcgaatcacggagcccaatccacccatagacgccacagtaatctccgccaggataggatgggtcacccagacccccccacaggaccccgaacggtggtacataccgccgaccacgacagcggcatggatctcccctccgcggcactgctttctctggatggcgcccgatgcgctccacccatggatggctcagagggcggcgggtcttgcttatgtacccgagggataccagtaaaggtcggatcccgcggtgaagtcgttggaggcaaacgcgagcttcacggaggcgcccaacaacttcgcccgtccgcggagaacgcgtgtaggttagttgcttggctccacggaagagatgaaagcgcgggcccaccagtcggggaagtgcttaagtcccagcacgtgccgagctag

SEQ ID NO: 19494 - DNA, 618 bp, Zea mays
  Peptide Sequence Number=SeqID_62869
atggtcaaagtgaggttagctgatggtaagaagaacttggtaagggaagactccatccaaggtgatgcaattatggacattactccacaactcatcacactcaaacaaagatccaaatcagacaaaatgggtctcctatttctaaaagtcactttaagtacgggatttcaaagtgtgaaatccaagtttgtctttggaagcagaaaggaccgccatcacagcaaaatcctcccgagggcctccccaggaatcccttgcaggaccgccatcacagcaaaatcctcccgagggccttcccaggaatcccttgcaggaccgccatcacagcaaaatcctcccgagggcctccctacactgaccactcccctactgcccttgcccctttcggagaccgcaggatcaagggtgaacgccccggattttaaattgccaggcccgctcacaagcgtcagatcccgatcggacggccccgagttaaagaagcgaaaggatatgtctgatctaatctcgaccgcaaaacgggagatcaacggctctagagttgtcttctaccccagacggacgaacacgaccgcgccgccaggatcccacggcggagaccccgccggtgacacatga

SEQ ID NO: 19495 - DNA, 363 bp, Zea mays
  Peptide Sequence Number=SeqID_62870
atggttcaccaaagtttctccggcccgcccgaggccacctcaccaccgctctcctctctctacccgtggattcatggcctcttccccgccatcgagttcgtcatggcgccctcttcccctctgcccaactccggcgaccctgaagccaccctagcccgcgcctgcctcaactccggtgacctcaccgccacggagaggagcggcgccacccgcagccatatgttttccctcagtctgatttcccctccgtccgattcagatcaaacgatccggaccacgggatatcgcttcacgcacgcgcgcctgacacgccctggcccgcctgtcagcgccacccgcagccgctcatccttcccggtctga

SEQ ID NO: 19496 - DNA, 555 bp, Zea mays
  Peptide Sequence Number=SeqID_62871
atggccatgatggatccaccatcaagttttattttcaaaaacatcccttccactttgcacatcatcttttctaagaacaaaacattttgttttgctaaagcaagactaagcataagaaaaaccttttgtaaaacaggggttccaaggaaggtaatcaaattcaaggaagcgtgcttgagcggtggtgatcaatttgagcaagatgtgctggcggtcggagaagtgggagttcactggcgcaaagaattcgtggcattaaccgtggcagctctcacctgcgatgatcagacgattatagcgagtcacggcgacgcgatggatgtgtccagatacatggcgcaaggccatgagacagcggtcactagtgagctcatccgattccaccgtggcaagcttgatacgatggtcagaatagtttactggccggagcttatccacgacggtgatatttacttgaccttgaacgctatccaaacaatccgagcacgaatcaagacggcgacgacacgaatcgcatgtggctcgtcgacagcaagggctgagctgttgatctga

SEQ ID NO: 19497 - DNA, 363 bp, Zea mays
  Peptide Sequence Number=SeqID_62872
atggctcaccggagtttctccggcccgctcgaggccacctcactgccgctcttccctctctgcccatggattcatggcctcttccccaccatcgagttcgccgtggcgccctcttcccctctgcccaactccagcgaccccagagccaccctagcccgtgcctgcctcaactccggtgacctcaccaccgcggagaggagcggcgccgcccgcaaccatctgttttccctcggtctgatttcccctccatccgatttagatcgaacggcccagaccgcgggataccgcttcgcgcacgtgcgcctgacacgccctggcccgcctgtcagcgccactcgtagccactcatccttcccggtctga

SEQ ID NO: 19498 - DNA, 639 bp, Zea mays
  Peptide Sequence Number=SeqID_62873
atgccccctgcaccacctcatggcatcccggctgctggaggagaccctgacggagacggagacaatgacgacgctggtggcagttcgagccacgacacagagctttcggaggagctagagccggagggatggatcgcaagacccatcactcgtgacgctgctcgcgaatgtcacttccacgacgctctcgataccctgttgcatcgggcctttgaccaacacacatggtccatcgagtatcgttgtgtagtctaccagcaatacgaggtagctgatggccttgatctaaagtactaccctcgccgttcgactggcagtgctggaggtatgattgtctcgccagttggtgagggcaatgccaggctgaacaacatggttaatctagttgccgtgctcaacatagagttagaccacgcccttgacgagttgggcaaggttcgggcagaggttgcggaattgcgtgctgaatgcgcgacacgccactatctggatggtggtcctcccgcccctgtcaggattcaacacccttaccgttcatcgcccatggtcgcttcgactatggtatcttcggactcgaatcggtaccacagtgggagaagcccaaagaatacgaaggttgatacagcgtcgaagctgtga

SEQ ID NO: 19499 - DNA, 529 bp, Zea mays
  Peptide Sequence Number=SeqID_62874
ggagaagaacaagaacgatggcaaccaaacgatgaatccacctcatcaacaggtttgtcttccattagtaataaatgtcttattgctaacaatgatggtgaagacaaaagcgatgatgaggaagaatacgaggatgaggaatctacatcatcacaaggtacattttcctgttttgcttccactgataataatgacagggaaaatgagaccgacgatgtggaagaggagattcgtcgtttctacatccatctcaacaaagaagacaaagcgctcttgattaagctgttgagaaggaacaaggaacaaggcgagacgcttctcaggctagaggacactctcatcaaaaccaacgacagcctggagaagatgaccaaagaacatgaggagctaaagtactctcatgggaatttggtccaacgccacgggcacgtggtgaagaagcttgagaaaggaaaaactacagcaagtgttaagctccataagaagaatgttcctaaagatgaagaaatcaacatgagcttggaaaaag

SEQ ID NO: 19500 - DNA, 174 bp, Zea mays
  Peptide Sequence Number=SeqID_62875
atggaggcaagaagagcttcgaggtaccaagtgcacgggagaaggtcaaagaggctgaggaacccaaagccaagggtgaagaagaagacttgcaaagtcaaggatgttgggaacttaagacatatcaaatctagtcaagtcaagcctgacttgaggtttggagtttcacattaa

SEQ ID NO: 19501 - DNA, 375 bp, Zea mays
  Peptide Sequence Number=SeqID_62876
atgtgggcagtcactcaatctgaactcgtacggtccaactccagggttatgaaggctggggagcaccgggaggataaggagggggaatgttttgtccggtttggacatggcggtggcctaactccttccggtataaccgttaaggttaggacgtgcgaggaaagaaagagattcggcattcgggtctcacgacgaaaaaggagatcggctcaagcccgtgcaactgcattagaaagtcgtgaagtcattgcggttgaagccctgaagcaagccaaggatgagcatgtccagaagttgatggaggcccacttggtaacccataaccaacgtagagccctgcggatccaagaacctgcttcatccaaccctgtttaa

SEQ ID NO: 19502 - DNA, 2851 bp, Zea mays
  Peptide Sequence Number=SeqID_62877
cgtcatgtccggcaccaccccgacccctacacctacaccgacgccgctaccgccgccgccgccgccgccgccagccgctcgccccgcacggtacgacttcctcaactccaagccaccgcccaactacgtcgcggggctcggccgtggcgccaccggcttcaccacccgctcggatatcggaccggcccgcgccgcacccgacctacccgaccgctccgcctccgccgccgccgccggtcccgccgtcggccggggccgcgggaagcctcccggcgaggatgacggcgacgacgacggcggcgacgaggagaagggctacgacgaaaaccagaagttcgacgagttcgagggcaacgacgccggcctcttctccaacgccgactacgacgacgacgaccgcgaggcggatgcggtgtgggagagcatcgaccagaggatggactcgcgccgcaaggaccgccgcgaggcgcgcctcaagcaggagattgagaagtaccgcgcgtcaaaccctaagatcaccgagcagtttgctgatctcaagaggaagctggccgatctgtccgcgcaggaatgggagagcataccggagattggggactactcgctgcgcaacaagaagaagcggtttgagagcttcgtgcccgtgccggacaccctgcttgagaaggcccggcaggagcaggagcatgtcacagcacttgaccctaagagccgtgcggctggtggcacagagacgccatgggcgcagactcctgttaccgatttgacagctgtgggcgagggtcgtggcactgtgctctcgctcaagttagataggctgtcagattcagtttctgggctcactgtagtcgatcccaaggggtatttgacagacctgaaaagtatgaagattactagtgatgctgagatttctgacatcaagaaggcacggctattgctcaagtcggtgacacagacgaaccctaaacatccacctggttggattgccgctgctaggctcgaagagattgctggcaagcttcaggttgctcggcagctcatccagcgtggttgtgaggagtgccccaagaacgaagatgtttggcttgaggcatgccgtttggccagtccagatgaggcaaaggctgtaattgcccgtggcgtgatgtcaattccaaattctgtgaagctatggttgcaggcagcaaaactggagggtagtgatctgaataagagtagggttttgaggaaagggctggagcacattcctgattcagtccggctatggaaggctgtagttgagcttgcaaatgaagaggatgcaaggctgttgcttcacagggctgtggagtgttgcccgttgcatgttgagctttggcttgcccttgcaaggctggagacctatgaccaagcaaggaaagtacttaacaaggcgagggagaagctccccaaggagcctgccatttggattacagctgcgaagctagaggaggctaatgggaacacacaatctgttaacaaggtgattgagagaggtattaggtctcttcagagagaaggaatggatattgatagggaagcatggttaaaggaagcagaagccgcagaacgtgctgggtctgttttaacttgccaggctattgtgaagaacactgtaggcattggtgttgatgatgaggatcggaagcgtacatgggttgctgatgctgaggaatgcaagaagcgcggttcaattgagacagcgcgtgctatctatgcacatgcgcttactgtgttccttactaagaagagtatttggctgaaagcagctcagcttgagaagagccacgggactagggagtcacttgatgctctcctcaagaaggctgtgaattacaatccacgagctgaggtattgtggcttatggctgccaaggagaaatggttggctggggatgtgcctgcagctcgtgccattcttcaggaagcttatgctgctatccccaattcagaagagatctggctggccgcattcaagctcgagtttgagaacaatgagccagagagagcaagaatgctcttggccaaggccagggaaagaggagggacagagagggtctggatgaaatctgccattgttgagagggaattggggaatgttggtgaggaaaggagattgttggaggaaggtttgaagctattcccttcattcttcaaattgtggttaatgcttggacagatggaggaccggcttgataacggagcgaaggccaaggaggtttttgagaatggcctcaagcactgccccagttgcatccctctttggctctctctagctaacctagaggagaagattagtggattgagtaaatcacgtgctgtcctcacaatggctagaaagaagaaccctgctacacctgaactctggctagcggcaattcgagctgagttgaggaatgggaacaaaaaggaagctgatgctctactggccaaggcattacaagagtgtcccacaagtggtattttgtgggctgccgctattgagatggcgccacgcccacagcgcaaaggaaagagtacagatgctattaagcgaagtgatcatgatccacatgtcattgcaactgtggccaaacttttctggcttgacaggaaggtcgataaagctaggagttggttgaacagagctgttactcttgctcctgatgttggtgatttttgggcattgtactacaaatttgaacttcagcatggaaatgtggacacacagaaggatgttctgaaaagatgtgttgcagcagaaccaaagcatggtgaaaaatggcaagcaatatccaagtctgttgaaaactcacacctgcctgttgaggctcttctaaagaaagctgttgtg

SEQ ID NO: 19503 - DNA, 528 bp, Zea mays
  Peptide Sequence Number=SeqID_62878
atggctggtaatcaccatcagcacaagctgcagaggctgatgggcgcaattcaggaaaacagcgtctctcgccccgctccgactgctgtgccacccgccagagtgaggctggcaactgccaagttcagcctcaggcacaataggaagctccgcctcgcccgacccctggggctcggcctcaacctcagcctcggaaggaggagtccgcctcgcccgaccctagggctcgacctcaacctcggcctcggagggtggtctccgcctcgcccgaccccaaggctcagcctcagcctcggcctcggagggtggtctccgcctcgcctgaccccagggctcggcctcaacctcgacctcgggaggaatcgcgtcctcgcccgaccccggcctcggcctcaggaggagtctccgcctcgcccgaccttgggctcggaccgaccacgccacaggggatacatcattatcctacccctagctagctcaggctacaggggaacaagaccggcgtcccatccaggctcgccccgataa

SEQ ID NO: 19504 - DNA, 1043 bp, Zea mays
  Peptide Sequence Number=SeqID_62879
atgaccgcgtcaaaaaagaagggctcgacagccgccccagagcactcgggcttcaggctcattactgatcagaggttcgaaggctggcccctcggaagggttcgacaaccgcctcagaacactcgggctccgcgcccactactgatcaggggttcgaaggctggcccctcggaagggttcgacagccgccccagagcacgcagagcaagggatgactctgggtacgtccgttacatgtccgaggctcgggctacgctcccgaggcgaattcacgcctcgccagagggcctcctcaagcaacgggcgcaccctcgactcgcccgaagcccagctcgggcaggcttcgttgtgaagcaaccttggccaaatcgcctcaccaaccggccgtatcacaggcgcattcaatgcgaggatcgcctgacgccttatcctgacacacgtgcctcagttggcaaggtcgaagtgaccgcagtcactttgcccttttcactgaccgacctgacaggaaaacagcgccgctcgccccgctccgattgctgtgccacccgccagaggctcggcctcaacctcggcctcggaaggaggactccgcctcacccgaccccagggctcggcctcaacctcggcctcagaaggaggactccgcctcgcccgaccccaaggctcagcctcatcctcggcctcggagggtggtctccgcctcgcccgaccccagggctcggcctcaacctcgacctcgggaggaatcgcgtcctcgcccgactccggcctcggcctcaggaggagtctccgccttgcccgaccttgggctcggaccgaccatgccacgggggatacatcattaccctacccctgccccctatggaagcaaggagacgtcagcaagatcccagcagccccgacagctgtgcttctacagggctcaagcgctcctccgacggccacgataccgcatccgaagtagccgaactggaaaagaagcttgatgaagttactgagaacttcaacgtgaagcaatcgaagcacgagatatccgacgccga

SEQ ID NO: 19505 - DNA, 423 bp, Zea mays
  Peptide Sequence Number=SeqID_62880
atgcctctggtgggagacaacgagcgcacggacacggtgctgctcaagttcctctgcgcgcgcgagttcaaggtgaaggaggccatggcgatgctcaagtcggtggtgttgtggcgcaagcgcttcggcatcgacgagctcctgggcaccgaccctcgacctgcccagagctggagaagatatgtcacgccagagcaagtccccgtccagttcggtggcctgtacaaagaggacgacaccgagttctccgcctctaacgccgtcaccgagctcaccgtgaaaccgtcctccaaagaaaccgttgaggtccccgccaccgagggctccacggtggtgtgggagctccgtgtgctgggatgggaggtgagctacggcgcgcagttcgccccagacgcagaggacggatacaccgtcatcgtgtag

SEQ ID NO: 19506 - DNA, 303 bp, Zea mays
  Peptide Sequence Number=SeqID_62881
atgaccgttggtctgtcgtatggtgcaccagacagtccggtgtacaccggacatgtccggcgaccgttggcgcggagtagccgttgccccgtagttgcaccggacagtccggtgtacaccggacatgtccggcgaattatagcggagcaaccgctgcgaattcccgaggctgccaagttccgaagccgcgtcctcttggagcaccggacactgtccggtgtacaccggacagtccgccatgagagccacatcaaagatggagtgggcagcaacgatgtcatgggggagtaccggtcgaagtaa

SEQ ID NO: 19507 - DNA, 294 bp, Zea mays
  Peptide Sequence Number=SeqID_62882
atggaagtgtataacgggagtaattcgccctggcataagccccaaccaccaaacatgaccgttggtctgtcgtatggtgcaccggacagtccggtgtacaccggacatgtccggcgaccgttggcgtggagtagtcgttgccccgtagttgcaccggacagtccggtgtacaccggacatgtccggcgaattatagcggagcaaccgctgcgaatttccgaggctgccaagttccgaagccgcgtcctcttggagcaccggacactgtccggtgtacaccggacagtccggtga

SEQ ID NO: 19508 - DNA, 1422 bp, Zea mays
  Peptide Sequence Number=SeqID_62883
atggtgactacggcggcagaaagtagaggagcgcaaatgcagaggggcgcaaagagctcgaaggcgaaagggcgcagcagttgggagaaaatgcggaaacatacctgcaacacgcggggcccacaagccatacagctggtgtgcgggtctccgagtgctgagaaggcaaacagccgcgcgaggagcaaactgtcgcctacggcagtgcacctcttcaactccgctgaaaccaacggccaagtctcttacacggggacccgggcccacgggtcatactccttgggtgtcggttccggaaagagcgaatcgccgcttgcactagtactgcacctcctcgagaccgctgcaaaagatagagaaggagggtttttcaaaaccaatgcagtagtatcgaggtgcctcgcgtgtggcctggcgaaaccatcggacgtgggggccgcgggtcagtcagccgcggggacagatgtggaagttggcgtcaccaaaggcggtctggtagggattacgtcagcgagcgcacggaagcggcgcgccaatcgccaaccaagctttggccccacctgtaggcccgtatcctcccctgaggtgggcccgggggccactgtcgataccctgaaactggggtacccttactacagtgtgaaggcacgggccgccacgtggctagagaagacaatatcctccaaggacctccgtgggtacagactggacccccgggacgggtcctggacctctctgtgtggggtccgagccactctcagtagggtcccaggattctgggacaaagagtactcggaccttagtcaaggccaggcgggggtccggagccgacacgtgtccggaccataccgtgtacgcttctgctccccgctcaggcggagacccgatgctgccacgtggcccactgcccgtgacgcgatgtgccgcctcagcattaaatgtgccatgtccacttcgctgacgggcggcgaccgaaccatcctgcagacggcgtgcctgtccattccgttagcaggcagagttacaagcttcgcgagtgagggaacggatctcaggtctctcgagaggtctaatgctgtggagagagggttttgccttgaaccccaggtcctgctgatatttctttgccttcgtagagagctgaggacaatcgacgtcatggaccgtagtcagtccgaagccgtttcgggtgaggcggtgacttctcccgaggccgaggctgaggtcgggcgaggctgtgactcctctcgaggccgaggtcgggcgaggcggagaccatctcccgaggctgaggttgaggccgaggcctgggtcgggcgtagtgatgactcctcccgaggccgaggctggggtcgggcgaggcggagctccctgttgcgcccgaggctgaactcgggagaggccataacttactattgttag

SEQ ID NO: 19509 - DNA, 429 bp, Zea mays
  Peptide Sequence Number=SeqID_62884
atgcctcctgggcccccccgccggagggcgccttgcgcggaggccaaccaaccagcatggcgcgccgcaactccggctgaagaggccgaccccgtcttaagggccttcgtgggggccagaccggccgagccctgcctccgcttgctgaaaggaagaaaaggaaaaatcaagacacacagaaaaatgtctgaaacagggataccctcagatacttacccgctccggggcaaggccaatcatgcctacggggagacctctcaggccccggtctccacaggcgctgccgagggttgtcccgcagccggcttcgacgccgcttccgcctcggacacccgaggcgccgagggggcagcctgcccggccgagggaccaacttcccgtacggctggcacgggcacttgctcttggggggcatgcggttcgacctaa

SEQ ID NO: 19510 - DNA, 501 bp, Zea mays
  Peptide Sequence Number=SeqID_62885
atgttggcgcacgcatcgaggaggccgctgccgctggcaggctgtagcaccgggttgccgccagtgccgctgttcccagtggccgccaccgtgttcaggtatttgttcttgctatgtgtggctctaccaactcctctcctagagcttggccccctgggatgtaggctcgatgtgtcgaggctggataccagcatacctaagaaagagttggtgtcccggcccccaggagaccaacaggctgggcttacgagggcggacctcaccgggctggcatacacgtatgcacaacctggttacaaaaagaagaaaccccaaccccttagactggctcctatggatagaacttacggagatactctatgctccaggggttggaagaggcacccctttagttgtggcaaggcggacacacccgagtcggcgtacttccgtcaccttgaagggtccttcccggctgggggagagtttgtggagcccttcaaggctcagtactcaccgtag

SEQ ID NO: 19511 - DNA, 1392 bp, Zea mays
  Peptide Sequence Number=SeqID_62886
atgcaggccgcgcccgggagcgtctcttgggccgcctcgcagccgtccgtcctcggccggtgcggcggcggtgcaccgtccgcttcactcaagtggagagctggcggcgtcggaggaggggaatgcagggtccggggccgggacgtcgtcgtgccgcgctcctgcgcgcgcgcgcaggagaagcgcctgccgcgggtgcggaaatccaaggaggagaggagggagatggtggagtccttcatcaaaagctaccgagtttcaaatgaaggaaaattcccatcaattaatctgacacataaggaagttggaggatcatattatatagttcgtgaaatcatgagggatatcatccaagagaatagagtccttggtcctggtggattggatgctatgacacttagttttgaagattgcgctgattcttcaaagtcatccatgaagcttgaactgggtcaagacagtatagagatcttagatatgtctggtagtgaagtcagtaagagtcatgtacctgaaatatccagcactgatgaatcgtttccattgcaaggtaatgccatcagcaatcatagactgctgggttcatctaatatcttagaggttggtgttctgaatagtgtggtccaaaatggaagtgtggcagatgcaatattcatggaaacaaaccttgcgaaacaagatgaagttccatctagagggtccattgagtttgacttgaatacttctgaagagcaagctcgcttatttgctcaggtctctgattcagatgaagaagtaacactaaacaatcaggcggatgcacaggacgggacgaccaatagtggcactgatagagttattcttcccttagaatctttcgctgtttatgaaaacaatgcttcacttctaagagatcatgagacattgcctgatgataatcatgatggatcaactgatagggttgcggatgacgcaagtctccttgcggcgaccaatggtgttcaagcaaagcaagcttctttacatgagcatgatgcatcaactagaagtgtattgattgacaatgctcagagcttagatggtcagtttagtactactgtgtctactgatcctataaatggttttaaattggagactgaaattgcaaccaagacagttgaaacatctcaagtacacaggctgcaagatgagtttgagcaaccattagttgatgctagctatgatgggcaagaaaactctgatagcccagtttctcatccagcattagatacaaaggggctgttgcacacagaagatcagctcaatgtggtacaggtagatgaaactgaattcaagaactcaacatctgggatcacaaaggaagagcatcatagtgcagctgataggacctgggatcctaccgggactacgtag

SEQ ID NO: 19512 - DNA, 279 bp, Zea mays
  Peptide Sequence Number=SeqID_62887
atggccattcaccttggtagtgaagatcgggtctgtacaacccaggctggaaagggatcacgacctgtgggtaaagtgtacaacctctgtagagtgttaaaaactggtatatcagtcgagctcacggttaagagcatccttgggatcctcttcgatgatgctataaaatctgatctctgctgccgctctgcaatggccgcacttgtacccatcatatctagcatgggagactccatctcaggtctaatgaggagtaaattctgtgggcaggttcaataa

SEQ ID NO: 19513 - DNA, 708 bp, Zea mays
  Peptide Sequence Number=SeqID_62888
atgatgctacaaaatctgatctctggtatttcctcttttgaggagatggcacgtatcaggtgcactgcacgtaagtctgtgatcccctttttgccttctcgcctggcgaagcgtcccctgcgtcgcacggtgttaggtcagtccaatcatctggagagattgcatcgttgcctgcacgaggagcaggagtgccgacgccaggagcaggagcaggagcagcaggactcttccccctcgcctcagtggggagtggagtctgagaggcctccttcccctgcacctcagctagagatgccccctgcaccacctcagggcatcccggctgctggaggagaccctgacgaagacggagacagagatgatgatgacgctggtggcagttcgagccacgacacgttgctttcggaggagctggagccagagggatggatcgctagacccatcactcatgacgccgctcacgggtgtcacttccatgacgctctcgataccctgttgtgtcaggccttcgaccggcacacatggtctattgagtaccgttgtgtagtctaccagcatcgtcgtgggctatacccggaccagtgggaggctacttgcttggtgcgccgtctggacgatgatctccggggtgcagaagccttctcagagcactattctattaccgagagggatactgccgaggcagccatgcaagatgcagcacgatag

SEQ ID NO: 19514 - DNA, 396 bp, Zea mays
  Peptide Sequence Number=SeqID_62889
atggaggccaagtcacaccagcaaccaatcaccctaaggggtacctgcaaaaattatgccacaagcaaggctgagtatactaatactcagctagacttacccggttacaatggatcaagcagtctcattagttgcgagaagcagacgattcgaatcgagtttttatcattgcaagtgaccgcacttgtacccaccataaccggaatgggagaccacgtctcaggtcgcgtgaggggatatgtctgcgggcaggttcaatcaggtatccgcacgttaatccttattccaatttcatctcgtagaccacgcatccccatggatctgtgtccacagaccaatcatcaatatgatatgaaagtgggtacaaccaatttcctaacctcgcgcgagtgctag

SEQ ID NO: 19515 - DNA, 606 bp, Zea mays
  Peptide Sequence Number=SeqID_62890
atgagggaagtggagaacgaacgggagggctgctgcagcgcgtggcttgctgcgcattttgtcgaacacctacggcgcgtcgctgttgtggggctgcggggaaaactaggttgcgaggagctgcgctgccgagagatgggaacagggggcactgtcccagggagggagccgctgcaaggaatttctgggcgccgtggaggaatgaaactcggccgtgcatgcgaacagggcgccatggctgctggagaaatggagctgctgcgtcgcgccatggacatggacctcgccgaggtcggccagggagctcttgtgcgcaggggagaaaggctccctgctctgaatgccatggagaaggggcgctgggcagaggagggcgcagggacttggccaccgttgctgctggccgagcaggggttccttgctgctgcactagggggaaaggagggaggaggacgttgtcttgaggaagaagaagggggaggaggggtgcgcgcccatggaaggctggggagctactgccgtggggaggaagcgaggctggccatggaagaagctctgcgtacacacaggaaacagcgaggagaagaagttgctggtggcggctag

SEQ ID NO: 19516 - DNA, 594 bp, Zea mays
  Peptide Sequence Number=SeqID_62891
atggctaagggagaggaaccgagcgccaccgtgggggcatcgccgatcgtgggcatcggctcaccttcggttcgtggggccgtgtggcatcaccgggacgtggcgaaccaaggcgcggactccctggaccatctggtgtcgtcgccggcgtccctacctcggccgagtcgccggtcaactgtgggcaagccgcttctcccgtcgcaccagaacccgggccatgcattcctggacaacccgttggggcagggtagagcgcgtgcgtggggtctgggcctcaccggcgacgtgcggggtggaaggcactcgaagtggggagcattcgccgctcggtatcttcggactcaagtcggtatcacagcagaccagaataatacgaaggttgatacagcgccgaaggtgaacagtacccccgtactgttcacgctgatctggcatttgctcttgcgtcacacctgtactctcattctctttcaagctgaaggtatatccttcatgaccttcgtccgaaaatcattatatcctaagggaaataatgcttcgaagaacgaaggactttatcgattaatattttctgtgttgccttgttcttaa

SEQ ID NO: 19517 - DNA, 564 bp, Zea mays
  Peptide Sequence Number=SeqID_62892
atgccgccaccatcccctccgttcggtgtgcccctctccgctccctctcctcctcggtccacgctcagccaccgccataggatctggccgcgcctccgcagaacctctgtacgacgcgggtgggctgctgtcacccaaatcaccggtgagatcacttcccataagctttacttcgcctctgcttcgtgttgccgcatccgagggatgagccgtgaagcaccgtcaaatccggaggagagagataaacaaaaaacgcttggtgtggatcttcgttgggcgcgaggtgtagagatggatgggctcggttcgttgctcgccgggaggaactttgccgtggagcgcgaacgagtggggatcgccgggcggaccggtcccctggtcggcggacaccaccgcaggcaggagcgaccgcggctccgtctacctcgcgtgaagaagacaaaggagaaccgttggatccgcgatgttgggtcgagcctctcaaggccactgtgcgggggtatttataggtatctgagtgcccagcgtccagtgttaaggacgcatgtgcccccaggcgcctag

SEQ ID NO: 19518 - DNA, 951 bp, Zea mays
  Peptide Sequence Number=SeqID_62893
atggcgagttcaatatcccgttctggtggcattcctggcaattcattaggaaagacatctgcatactcacagaccactggaatcttcttcagagtggcccacattgccacaagtgaagcacttgttcccattgccctagcagaactgctgctgctgcggaggctgattgtttcttggagcgggagctggaaaaccagtgggtgcgggctgctgctgctgaggtggcctgatcacccatctgcctgcctgctgctgaaatcccctgctctggttgtgagaaacaatcctgaacctctgggcctgagagaatggtgctgccattggtgcctttctcttcttctctgcccggtgagctacaatacagtcctcctaggagatggccaggttgaccaactcattgaagctatcagcccgaacagtgttgagacgttcccacagcttggtgttgagacctctgcggaagcggtctctcttcttctcatcagaatcagcatggtaacctgcatactagcacaggtcgttgaaggcctgagcatactgcaataccgtgcgggttccttgattaagtgccagaaactcattcaacttgcgatcgagaattccagctgggatgtggtgccctctgaaagcagtcttgaattcctcccaagacacttcatgatcagcggggagcatagcacggaagtggtcccaccaagtccgagcagggccgcgaagctgctgcgtggcgaagcgagccttggtttcatcagggcagtcttccgtgaggaggggaaacttggactcaatgacgcggagccacacgtcggcatccaacggatcctctgccttggtgaacaagggtggctacgtactcaggaactcctggtaggttgccgctgccggaggtcgctgatgctggcctccaccatgctgctgagggtggggctggcgctgcaagagctgtcatag

SEQ ID NO: 19519 - DNA, 2007 bp, Zea mays
  Peptide Sequence Number=SeqID_62894
atggaggtcgttgagttggttccttgtgcctgcaataaatggggcaactggtgggatttttggttttatgttgccgagggcacagtcgaagaccatccggggcttcccgtggccgagatgtgttcacattattactctgcgtacccgcagtttgaagtagcggaggaggatgcagacgaaggggccctgcggtgcgcggctggcctaagtagcgggcgtgatctggttgaggagttcgtcgcatatggggtgtggcccttggcgcgtggctgggcgctgggcgaagtatgccctcgccagatgccttcccatggcaggatgctggtgcggagtccctccttcgcactggacttgcatggccgagatcccgacccattcgtgcgtgaggcggaggatggggcggcgcggattgttggtcgctacgtgccaaagacggagggccagcgtagctgggacatacgcggatccaatgatcgtttgaatagagtctttgagttgaaccatctgccgtatggcggttatcccgggcaggacgatgtcgaccgccgcgggaaaaaaccggcggccgagactgaagatgaccccgcactggcggccgccccgtccaccaagaagaggaagctaggtactgcgatgggaggactgggggtctccgatagttttgctatggagctgatggggacctgcgcggcccccgggggaaggatgtcttcgcccgagctccgagagtcttcgacacggatgctgaaggttaccgggggttggtggcctaagaacgttcctatcccccgcgcggccggcgaagacttttttacatctcgcatggttcgtgatatgagagtgtttccttatggacggaatattgctgctgttgtgtcggcagtgatggacaaggatcgtcaggaggctgcgcagaagcgtcgggcagtcgtcaggctgcccgaggctagaccgaagagggcgcgggggactgcaaagtctgccgccctcggcggcagccagttgacgctggcggcgaagactgccgcccctgggtccagcaaggtgccggaggtcgtgaaggctaccggagtcggtggaaccaagtccgcctcggccggagccgcgaagacccgagaattgccttcgccggcgaggagtgtcgccgacttcgccaccgatattagcgtggacgattatcttgttgggtcgggcgaagggcaacatgttgttgttccgcccgcagtggcggccgtggtgtctgccgcggtgtctggggcgaagggtatcgctctcagcgctggtggtgagattccagagctcgctgccgtcaaggacgaggcgggcgctgtgtcccgctggctgaaagaggcgtcgcagcggctaagtcaggcggctgacttcgctgatcgcgtggcgtcggggtccctgacggcagttgtgtctgccgaagtcgagagacttcgggcgcagcatgctgaggtcgtccgggagaagtcggccgccgatagcaagtgccgcaaactagcggagaaggtggccgcgctggagggcgagaggactgagctccggcaccagctggcggaggagaggagggaagctaatcaggccctcgccaaggcgcagtctgcgcaggcggaggccaatgtggcgtgggtggagggtagcctcgccaggcaacgcgccaaagaatgggaggagcggttcaacgctctacaggcccgcttggagagggccgaggcttctacgcgctcggaagttgagcggacgcgcaagcagcttatggactcataccacgagctgggcacgcggaccgctgacttcgaagtgcctgaccgagagtcaggccttcgctgtctcgagtggctgcaagaggagttgctggcgctcccgaccattgtgggagggattttatgtcctatgcctccctggtcaccctgcgaaggggcgatgaacacgctgtccagtgaaaggggtgccgtcactatgaggtcttcgaccgatctgatgagggattttcgagtgtga

SEQ ID NO: 19520 - DNA, 411 bp, Zea mays
  Peptide Sequence Number=SeqID_62895
atgtggtgtaaccatgtgagccatgtgaaagatgtgtgggcaatgtatcctgacttggttgtgagggtcactgttcagtgcatgggtgtgctctacggccttcaggccctgcagagcaacgctatggcacatcttgctaacatcgctcaaaccaccaagctcaccctcgacagccgagaagactttgtggtcgacttgtcctccgaattggtggaaaaggatttgcaccgagaactcgaagaagcaaatgaccacctagacatgcaccacttggaaatggaggccaatgaggccgaaagcgagggagaagaggctcccaaggagttaggaccagcccctggtgccaacgggactatctccacgatgcccccttcacccgcatccagtgttgcttccaccactcagggttga

SEQ ID NO: 19521 - DNA, 1565 bp, Zea mays
  Peptide Sequence Number=SeqID_62896
atgtctgccaaagtgcctagggcgaagggtggcgctctcagcgctggcggtgagattttggcgctcgctgccgttaaggacgaggcgggcgctgtatcccgccggttgaaggaggcgtcgcagcggctaagtcaggcggctgacttcgctgaccgcgtggcgtcgggggcccttacgacagttgtgtctgccgaagtcgagagacttcgggcgcagcatgctgaggccgtccgggaaaagtcggtcgccgatagcaagtgccgcaaactagcggagaaggtggccgcgctggagggcgagaggactgagctccggcgccagctgggggaggagaggagggaagctaatcaggccctcgccaaggcgcagtctgcgcaggcggaggccaatgtggcgcgggtggagggtagcctcgccaggcaacgcgccgaggaatgggaggagcggcccgcgtggagagggctgaggcttctacgcgctcgtatggactcgtaccacgagctgggcgcgcggaccgctgacttcgaagtgcctgaccgagagtcaggccttcgttgcctcgagtggctgcaagaggagttgttggcgctcccgaccatcgtggagggatttatgtcctacgcctccttggtcacctgcgaaggggcgatgaacgcgctgtcccgtgaagggtgccgtcactatgaggtcttcgaccgatctgatgaggatttcgagcgcgagatttacaaggttgaggaccctgtggtgaaggaatccgcgggagccctctttgaccagatgtggggcccccacggtcgggaggtggtcagggagcggtccgacacggcgaggggtcaggcggcgcgtgacgagaaggtggatgacttcggggctttgaacagtgcgtggcctgaggtggagtcgaacccggtggcggctgggctcgaggtcgccccggcgccaccctcagaaaccgtcgaaggctccctcgatgcccccgcagccactgcggccggtggtggctcgtcgccaaccgctgtgccgagggctgaggatcccccgaagacggcgacggagctggcagcgaaggatcccacggcggctgggtcttcacaggttcaagattttgggcctgcgcacgcaaccgctacagctaattttttggcggcttcgaccgtggatgctgggaatgaatcggatgagtctgcgtctaagttttctgattttggtgactctgggagttcggttgggtggacggaagagtcgttggatgaggacttggattactttgcggccttggatgtggcagcggcggaggcttcgccgcgtgctgcggatgctgaagttgtgcctggtccaagtgctgggcgtaggcggcgaagggtggttgcgaagcgtagagtgagtgaggcggacggcggtcggcttcgtgtgggcagggctggcaagaaggaactgctgtcctcgccggccgttgcgagtgtaggtgagggggagctgcgaagtctttttgagggtgaggagctgaagataatgctatttaactatagggagatgggaatcattctgaaggttgaaccgat

SEQ ID NO: 19522 - DNA, 654 bp, Zea mays
  Peptide Sequence Number=SeqID_62897
atgacggtgatgccattgaatacacagtcggcagcggcagaggaggctccatttgcgcctgaccccgccatcgaggtcgacgaggggggcacgtccagctccatcctgccgcccactccggaggagacggaggtgatttttgggtggcggctccggtccggcgccaagccagaagcggcaccggttccccttccccggcttgagcgggaccgcaaggactacaagaaagacctccataaggtgttcgcccgggagctagaggtggcccagaaggagaagaaggtggccaagaaggaggaacacttggaccagagggaggaggtcatcacggagctccaggcgaagctgaatgccttcaacaagatgctggaggagcagcgggtccagcaggccacagctgtggagagcctgaaaaggctgcagcaggggctggatgacagggccagcagccttgccctggccgaagagaacctcaaggagaaggatgcttccctggataagcgggcggcggatctcgcatggcaggagaaggacctcgccttcagggaggagatgtttgagaggcgggagaagctgctagccgatcatgaggtcgaggcggagaagaaggagcgggcgctggaggagcgggtctgccagttccatgcgacgtag

SEQ ID NO: 19523 - DNA, 339 bp, Zea mays
  Peptide Sequence Number=SeqID_62898
atggaccagtctatgacacgggggcctaggcccacgagtcatactccttgggcgccggttcctgggtgcaaagaagtcgaaccaccgctcacgccagctctgcgccgcctcggggccgccgcagaagacaaagaagacgtggcagttggcatgaccgaaggtggactggcagtgattacgtcagcaggtgcacggaagcagcgcgccaatcgccaattgttgggggccttcggcttccgaagagaggcccgaagccagaagaggaaggctgttattccaacacctccggaggatgacctggatcaggagatccaaaacctggagatccttcagcaatag

SEQ ID NO: 19524 - DNA, 1042 bp, Zea mays
  Peptide Sequence Number=SeqID_62899
atggccgattctaaagatctcaacagtgcttctccaaacagcaacacaaggctgactaatttatcggccgctgagcataaaaaattagaagatgacatgaagaaaatagacgaggaggcccaccgacaaaaggatcaggtgctcaaggtggcggacaagtggtacctctcgcacttcaaggtagactgccaccagaagaccgtccaagagagggagataaacgccgagtatatgttagccgtgctgcaacagctccccacaataggtgatgccaggtcagccgatgatattccatctattaaaatttcttttgataatcggattaaaagtatcacggaggatatagagaggatgacacatgcattaggaaaaactcacatgcctaattttttatcacataaattaggcgatgaaacaattgcgccaaacacatcggcggcaaatgggtttccccagccatattctgagggcaccgccacggttcttgttgagtgtttggcgctccaaaaaggcgtcaacatactttttggcgactccgctggggaagaagttgcagatctacaaaatcaggcttacatggccgattctaaagatctcaacagtgcttctccaaacagcaacacaaggctgactaatttatcggccgctgagcataaaaaattagaagatgacatgaagaaaatagacgaggaggcccaccgacaaaaggatcaggtgctcaaggtggcggacaagtggtacctctcgcacttcaaggtagactgccaccagaagaccgtccaagagagggagataaacgccgagtatatgttagccgtgctgcaacagctccccacaataggtgatgccaggtcagccgatgatattccatctattaaaatttcttttgataatcggattaaaagtatcacggaggatatagagaggatgacacatgcattaggaaaaactcacatgcctaattttttatcacataaattaggcgatgaaacaattgcgccaaacacatcggcggcaaatgggtttccccagccatattctg

SEQ ID NO: 19525 - DNA, 552 bp, Zea mays
  Peptide Sequence Number=SeqID_62900
atggagttgctgcttggcactatgtacaacagagagagggaggaatggctccatgggaagctcgagctcggccaggggaaggaagaaaggggttcggcatccaagctgttggagcccaaggagagggtgctggccgccgtgcgcaagggcagaggaggccggctggagcaccgggcagggtgctcggccatggagccgctgcatggatttgctgctgcgccctgggagaaaaacagtaggggagtgaaggatgccatggctgggggcgcggggagcagggagcctgctggtggccttgctgccgtgaagcggggaagaagaaaggcagaggacgctacgagaagagcttcgacgcgctggagggaaggaacgcccggccatggaagcccctgcgcgctggggaaggagctccagctctacgtgcttgaaggagcccatggctggaaaatggtagaggaggaagagaagggtgttggcggctggggtggaaatggaaaattttcagaatgcaaggtagggaagcccatatttatagaggagaaattagggtag

SEQ ID NO: 19526 - DNA, 150 bp, Zea mays
  Peptide Sequence Number=SeqID_62901
atgggagaccacgtctcaggtcgcgtgaggagggcaatctgcgggaaggttcactcagaccacgcgtccccatggacccgtgtccacagaccatcaccattatgttatcaaagtggatacaaccaattcctgacctcgcgcgagtgctag

SEQ ID NO: 19527 - DNA, 285 bp, Zea mays
  Peptide Sequence Number=SeqID_62902
atggcggccaggtgtttgtttcaggcgctgaaacaatggagggggagagggctacggctggggaagtggtggctcggccacagcaagaacagggaaggggaggctggtcgccgaccttgggcgcgggcagggaaaatggagttgctgcttggcgctatgtacaacagagagagggaggaatggcgccatgggaagctcgagctcggccaggggaaggaagaaaggggttcggcatccaagctgttggagcccaaggagagggtgctggccgccgtgcgcaagtga

SEQ ID NO: 19528 - DNA, 510 bp, Zea mays
  Peptide Sequence Number=SeqID_62903
agagattcacgggatgccagagaagatatgggtgcaaggaattggacggagactcaccggttagctctgtccacgcgcggcggtggaagaccgaagtccggtgaggtcgatctcgggcctccagtgaagtccggcctggtccgagggcttggaaagcttcacgggccactggcggagctagccgaagcactggctcgacttgggggtggctggagtgggctggccacggcggccgaagctctggtggcaatggcgggcggaattgagctcgccggagctaaggagaggtggctggccggtgaagggcgtgcgcggcgaacgccagtgcgcgctctggcgcctagcacagcgtcgagcatgaggcagcgcagagagaggtcaagttcaaacgcggattgggcccaaatctttgagattaaggccacgatcccgttgaaagatctcctcctctcagggatcaaggtgaacatccctgatctttggctcaaggtctcaatttcagaattctga

SEQ ID NO: 19529 - DNA, 183 bp, Zea mays
  Peptide Sequence Number=SeqID_62904
atgaacgcgttccagccaaacgacggcggggatgaccaaattgaggctggggaagggttcgcgggttcaccagggccttatcgggtcatcggcagcgtgaatcgcaacggcggtggcgcgaatcgcggtgaagatcgatcgtcggtggtgagagctctgcgctggcagcctgatccaattcag

SEQ ID NO: 19530 - DNA, 1191 bp, Zea mays
  Peptide Sequence Number=SeqID_62905
atgcacatggtcggcgacttcctgaagcggcagatcgcgccgctgcagaggagggtgtgcctgtgttgctggttcaccggccccaacgacatcaaccggatccagcatgggccaagtaccgacctgtcctgggaggagctagaactcctgggcattcctgcgctctgcgacgacccagggttcaggacggcgatcttggccacgctgccgaccctcgacgagagcggcgtggcggttcgtcagatcggtggccgggactccaccgcgggatccagatctctaatgcgccagctggaggcccccagcctgccagcgtggctcccagcgcccccgccgtggctcctagcgcccccgccgtggccccccgccccttggacaagggtaaaggtgctgcaagcagcgcctccgccggtacccccgccccaggggcagcagcagcaacaacaacagcagcagcagcaacaacaaccacagcagcagcaacaacaacagcagaggtctccccgcttccagggtcgctggaaggtccagggccccaaggcttcctcctccaccgctcctaaggccacaccccctccgtcaggaaccaggcccaccgatgggtccagctctcagcagcaggactctgttgggagtggtgtcggctgtccacctccagccgctgctaagacagtgccagtggcttctcatgccccagcctggggtccggtggcagtggcgccagcatcatgcggcgtcgcagcaacagaggaggtccctgctgggggatccacgcatgcctccaacatcgcgcccactcccgatgttgggggtgacaccggaggcgcgtccagctccaaccccccgcctgcactggaggagatggaggtggtgtttgggcgacgacttcggtcaggtgccgaggaagaagctgcgccaatccccctcccccgcatgctgtcccgcacccaccagcaagagctcgagggcaaggccagcgacgccgccctcgtcgaggagaagctcaaggcaaaggagcagtccctatacaggtgggagacggacctcgccaggcgggagacggatctctccaggtgggaggcagatctcaccttccgggaagagatgctcacccggcggggcgagatgctggccgagcacgagctcgaggcggaggagaaggagaaaaagctggaagagcggatccggtag

SEQ ID NO: 19531 - DNA, 192 bp, Zea mays
  Peptide Sequence Number=SeqID_62906
atggcctctgccaaagttggaggtaccagtggtgggattggagtctcccccaactaccccaagaagtccctatcccatcatgaccacgggtcagacccagccttccactcgggctcaggcagtcgcctcacaatcctaggctatggatcacgaactcaccacccaatctatagcctcatcaagctccactag

SEQ ID NO: 19532 - DNA, 3213 bp, Zea mays
  Peptide Sequence Number=SeqID_62907
atggatgtcaatcctgcccagctcctgcccatcgcccgctataccagcatcattgacgttatcatgcgacgaagggggatgctgctggccgagcgcgcgctggtcgtcgcgagcgtgcggtcgtcagcacgctatcgccagcagcagcgcgccatgggttgtttaccgaaccttgctggaggcagccttagaagccaggatgatcacggcaggggtgcttcatcaagaaaccgttcatcgggacgagatcgtgatcggagctcccaacagtcctcgtctcggaggggttcaagctctagtggttcaaggaggaatgatcgcgatggtacagggaaatcaagaggctatggtaattttggaaagcacagcaaggataggatacaagaaaaggacttggattttcgtgaacgggagagtaggttggttcaaccagatgatcctttacgtgatggctttgagtcctttagctcatgcagatctgaaaaggacaggcttaaccgtactcgttcaaaggtggccataccaaatcgggcaggagtaagtttagacaatggtaatgtatctaaaaaagataatggtgtcatctcctttgagcgggaatttccacaccttggttctgaggacaaaaatggaaagcaagacataggtcgagttccgtctcctggaattagcacgccaattcagaacataccattggtagtatctgatggctggaattcagtgcttgcagaagcatctatttccttggataagttattaaaatccaaaggtgcaagagctggagagtctaatggacctatcaaggttgctccacagctgtcaatacagccatctagcaactctgttcgcactccagtcaaaactgagctcgtaaagcaatctcaatcaggcagccttcaagtccttagccgtgagcagaatggtactgtaaatactgctgccaaagacatcaccagcaacaatcctgtgagccctgttttgggtcgatcttcttcaatggaacctatgagaaagtctattgtcaacccaaagcttaaggttggtactaatggccgttctttgcatcctctgcaaggttcatttgcagacagaaaagcaagtgcaaaagacaagtacaaattttttgagttgttgcgaagtaagtctgtaaatggttcaagcgctgctattgagtctccatctagcctgactgatgatcagcagaactctagtcctgaattgcctttcaagtttattgaaaatgggaacagttcctgtgaagaagcaaattcttgtgagggatcacagcgacacttgtcggacaatgaggaaattattccaccttcagaatctcatgacgttttagatgagggatctctggggattcaagttgacgacaagggttccagctcttcaccagtacttggcacacaagatatatcttccaagaagccccaggaagacaatgttgatattgttgtacctgtttatgtaaatgatggttctgtgatgcccaattctgttgacaatgaagcaagattgctgttggaggaagccaatcctgctcaagtgttacagcacattgatgcaagggaggagaatccctgtcctgctcaagagttcgagtccataggggcaggtggggaggaagagttgaacctcctgagatctatgggctgggatgagaatgaagaggttcagcctcttcagcaggaggagattgctgattgtaaggcagaacgtcaggctgcagcagaagcttcaggaatgcaggggctgatcgccgaatcaatggagcaacgtcactcattgtgggggaagaaggaatacaccaaatggaagtcttgtctggtgttggaggcacatagagataagcacttattaactgctctggcggttgctggacccagggacatggtcgctgcacgttctctacccaacagatgtggtcactgcccttccccacgcgcctcggccgccactgtgccatcaccgcccgcccccacgcgcctcggccgccatctgtgcaatcgtcgccatcaccttccttccccacgcgccgaggccgccatccgcgccatcaccttccttccccacgcgcgcgccgaggccgccacccgcgccataaccttcattccccacgcgcgcgccgaggccaccatcaccttccttccccacgcaccgaggccgccatccgtgccatcgccttccttccttacgtgcgccccccctccgtgtgtgccccgcccttgtccttcgctcaccctatgccctgccacctccgccgtgacagcctcactcacctcggatatccatgggacggcgcagtgcgaccccgacctcagcgttccatggaaggcgcgatccactctgctgagctcctcgtccttgcataggcgtacgcgcaggccgaggagctctccatcgagcgcgagcatctcatcgctgagctccagttctttgcagagcgccagccgcgagcgcgagatctcccaggcccacctccagcaggaaggagaagcggcggtccagggacaagctgtcgtcgtcgtcggcgggggcgggggctgtgaggacgagcaccagtccaggctgcggaggcagcagttgtcgcggtcgctgtggatgcggcacgtgaaggtcatcatcgccgtcgacaccgtcgtctaccactctgcctcgtgctattcgtggcctggccggcgctcttctgaatgtgagaacaaaaaagtgcagaaccttctcatcagcgatgggggaactagatggcttttcccgctggccacaactctgggaccatccacatctacatctgggacaagtggtataatccgcatcttagactgggctgatattattaatgctcacatagttcctagaactgggattgtagatggcttgaagttgaaggttttggacttcaaaactttgtcatggtcaaagctagaagctaaatcacaagcagaaccatccgaattagctggagcagtttcattttcagcaagtgctggtcattcactggttgcagtttttcatagcctacttgagacattacagtgtcctacagctgaacctgaaattatcttcaacttgctacttcaagctaaacttgaaaccgtgactaaagaattgcaagccacagaccagatgcaggtgctaccgaggaagaggaggcgctcccggtcctggcttctaaacgttgtgaaccagatcttggtgcggttgcccgagtag

SEQ ID NO: 19533 - DNA, 75 bp, Zea mays
  Peptide Sequence Number=SeqID_62908
atggtggccgccgtgcaggtgggcggcgctgttgcgcgcatggggatcagacgggtgttcgagcgcctcggttag

SEQ ID NO: 19534 - DNA, 456 bp, Zea mays
  Peptide Sequence Number=SeqID_62909
atgggcaagagcaagaaaggtggtggttcttcgcatcattccggtgataagcgcaagcgcgagccgactcccccctcggaggacttcggcgactcggagtactcggaggaggagttctcctccgagtccgagggctctccggctcctgcctctcccccggcgtcgtctgatgattcagacgacttcgaggggatcaccgcggaggtatggacttacatccgggccgtcgagcgcaccgggctcgagggctcggatgagttggagtactcctcggacgaggagaattcctccgacccgtccgaggagggcagcggcggcgacggcggtgacggcgacgacgacagaggcgacggtgacggcagcggcgacagcggcaagggcggcgacggcagcggcaagggtggcagtggcgacgacggcggtggcagcaagggcagcaacaaagccagtggctag

SEQ ID NO: 19535 - DNA, 396 bp, Zea mays
  Peptide Sequence Number=SeqID_62910
atggcggggtacctcccatttaaagattcaaacctgatgtcgctttacaagaagatcttcaaagcggatttcagttgcccatcctggttctccacaagtgcaaagaagctcatcaagaagatacttgatcctaatgctaacactatgagttctgttataatagctattgcggagcacattaacaatgagtggttcaagaagatcccactgactgtgccaaactctcacattggaagagatgttgttgttcacgctgctcctggtgatcttagaaaggagctattggtttttataagtgtgcaactaaagatcggtgactatatcttggttttaggccatcgaatctgtttcaagttccagcaatggagcagtgaagcacacattcatgaggattga

SEQ ID NO: 19536 - DNA, 294 bp, Zea mays
  Peptide Sequence Number=SeqID_62911
atgtgctggacaagttcagaaaactatacccctgtcttctcatctgatggctttagggcatggtccagtgaaggttcccccacccccaagctcgagtctgtgctcatcattttcttcgtcgaccagccaacatatgtcttcctcgagcagtttcatgcacccaccgaaaacttggactgtgagatggttcaagtaatcagtgttggtttgagttgggaagctgaagaagaatcttctctccctgtggttgcacttgtggataaagtaggaaatagggatgggatgaacaactaa

SEQ ID NO: 19537 - DNA, 225 bp, Zea mays
  Peptide Sequence Number=SeqID_62912
atggccttcaacgacacctcttcatcctccgacgacgagaagatcgccttagtcctcggcgacggggtgccacaacggctgcctactctgacccccggcgttggcccttcaggaacggcttcaccgtcgccactcttgagccagagcgacaaccgtgtggtccgccacctgatgtgggcgagtggacgtctctccaacatgatacttgtcggagaccataattag

SEQ ID NO: 19538 - DNA, 294 bp, Zea mays
  Peptide Sequence Number=SeqID_62913
atggcggccgacaacccgcccgccggcggcagaatcgacgacgtcttccccacgtggcgtaagaacaacattcgggtttgtcccgtcccctcccctgccgacggaggaggcggggcaaccaaggccaagcaggaggcggcacctcgtcggctgtcgagcgagtcgacggcgccgatcgcgcggctgaccgttggcccggccgaccgttggctcaccggacagtccggtgcacaccggacagtccggtgcacaccggacagtccggtgcacaccggacagtccggtgaattatag

SEQ ID NO: 19539 - DNA, 534 bp, Zea mays
  Peptide Sequence Number=SeqID_62914
atgtccggtgcaccagggggactcagactcatactcgccaccttcgggaatttccagaggcgactcggctataattcaccggactgtccggtgtacaccggacatgtccggtgctccaaggaaggtcggcctcaggaactcgccagcctcgggttttctccctcgccgctccgctataattcaccggactgtccggtgtgcaccggactgtccggtgcaacctcggagcaacggctacttcgcgccaacggctacctgcaacggcatttaatgcgcgcgcagcgcgcgcaggagtcagaatcgcccatgctggcacaccggacagcaaacagtacatgtccggtgtgcaccggacaccctggcgggcccacaagtcagaagttccaacggtcagaatccaacggtagtgatgacgtggcagggggcaccggactgtccggtgtgcaccggactgtccggtgtgcaccggactgtccggtgcgccatcgaacagacaagcctcccaacggccacttttggtggttggggctataa

SEQ ID NO: 19540 - DNA, 459 bp, Zea mays
  Peptide Sequence Number=SeqID_62915
atgatcaacagtgcctgtggggaggtctctcgaacctcgacccccgaagccgaggggtcaagtaccccctcgatcttcccccgctcttcggaccgtgaccccaacgtcccggccccggaaaccgacggcgccagcccgctcgggggctggcttgacgactcctggccaggcctcagatccgggctgaggccaaggcgagcagccatatcgtcgtcttcgtcgtcatcgtcgtcgtcaggcgtttccagcgacggctccctcgggagcccatccctctcctgccgacgacggagcctttccaaggcgtcccgagcccgcatccgctcgcgggaccgagccttcttcgcgtcctttttctccttcctcttctccacggcaaccctccgcgcagctcggtccaccgcgtcctccgggaccggtggccgggaaggcttgtgccaccctacctcctggggatag

SEQ ID NO: 19541 - DNA, 294 bp, Zea mays
  Peptide Sequence Number=SeqID_62916
atggaggtgtgtgacctgcgcaaggtgtgggagatccatgagctcaagaccaagctcgacgcggccggcgcccaggggactgtaggcgacctcatcacgagtggagcattcaggcaggtctacctcggcatggacctcgagtccagtgagatcctcgttgtcaaacagaggtatattgggatgacatgggaggaaaacatgctaaatattctactggaatttgttcctggaggctccatccaatcgctacttgggaggcttggatcattcccagaggctatatggtggggctag

SEQ ID NO: 19542 - DNA, 255 bp, Zea mays
  Peptide Sequence Number=SeqID_62917
atggataccactcagggagctaggttcaataaattttatcaatcatgggaggacaacccagacattggatttgtcatgatgaagggcagcggccgagcattctgtgctggtggggatgttgttagattacatgaacttatcagtgaagcaggaagctattacgatgagataattcagcaaaataactctacatttgcttgcttgttgaacccacttcatttttctctagaaaaggcttacacagacctgttttaa

SEQ ID NO: 19543 - DNA, 1797 bp, Zea mays
  Peptide Sequence Number=SeqID_62918
atggaaggagcggccgaccataagcggcaggtggacgacaagccgccgtacgccgccgtggacgacaccatgaccaccaccacgaagaagatggtggaggagcagctctcagacgacgccggcggcggcggcgagctgccagagcagaactaccgtggatggaaggccatgccctacgtcataggtgagtggaacgagacgtgcgagaagctgggcaccatcggcaccacggccaacctgctggtgtacctcaccaccgtgtacggcatgtcgggcgccagcgccgccaccctgctcagcctctggtcgggcaccgtcaacctggcgccgctcctgggcgccttcctcagcgacacctacatgggccgctacgccaccatcgccttcgcctccatggcctccttcctcggcatgatcgtcctcaccctcaccgccgccgtgccgtcgctccaccctgccgccaacagcagcaccaccggcggcccctcgtccctccagatggccgtgctcctcgcctccttcgcgctgctggccgtcggcgccggcggcatccggccctgcaacctggccttcggcgccgaccagttcgacccgcgcaccccagccggccgccggggcatcaacagcttcttcaactggtactacttcaccttcaccatcgccatgatggtctccgccaccgtcatcatctacctccagagcgacgtcagctgggcgctggggctggccgtgccggccacgctcatgggcctctcctgcgcgctcttcttcatgggcacgcgcctctacgtccgcgtcccgcccgagggcagccccttcaccagcttcgcgcaggtgctcgtcgccgccgcgcgcaagcgacgcctgcccgcgccccgcgccgacctctacgacccgccgcaccggagcagcctcatctccaagatcgcgtacaccgaccagttcctgtgcctcgacaaggcggccgtgcgcacccctgaggacggccccgcccccaacccctggcgcctctgcacgctgcagcaggtggaggaggtcaagtgcctggcgcgcctgctccccgtctggtcctccggcatcgtctactacatcgtgctcaccaacctcggcaactacaacgtgctccaggccatgcagaccgaccgccgcgtcggccgcgggggcttccacatccccgcgggctccttcgtcgtcttcaacatgctggcgctcaccctctggctccccttctacgacggcgtgctcgtgccggccatgcagcgcctcaccgggcgcgagggcggcatcacccagctgcagcggatcggcacggggatcgtcctctccatcgtcaccatgctcgtcgccgccgccgtcgagcgccaccgccgcaggctcggcgactccgcctcctgcttcctgctcgtgccgcagcagatgctggccggcctgtccgaggccttcggcatcatcggacaggtcgacttctactacaaacagttcccggagaacatgcgcagcgtcgcgggggccatgctcttcctggcattcgccatcgccagctacgccagcggcctcatggtcagcgtcgtgcaccggaccaccggaggccccgacggccgccccgactggctggcgcaggacctcaaccagggccacgtcgacctctactacctgctcatagccgccatggcggcggtcaacctagtctacttcgtcgcctgcgcgcgctggtacaggttcaagaacccggccgccgccgacgtcgagcagctggagctggagttagagggaaaggccgcagcgcctcctgtctga

SEQ ID NO: 19544 - DNA, 1200 bp, Zea mays
  Peptide Sequence Number=SeqID_62919
atggcatccaacggcatcgccccaagagatgtatgtgttgttggcgttgcacgcacccctttgggtggtttccttggtgccttgtcttccttgcccgcaacaaagcttggttctatagcaattgaagctgctctgaaaagagcaaatgtggatccggccctcgtgcaggaggtctttttcggaaacgtcttgagtgctaatttgggacaagctcctgcaaggcaagccgctctgggtgcagggataccaaacactgttgtttgcaccactgttaacaaagtctgcgcatctggcatgaaagctactatgttcgccgcacagtcaattcagctgggtatcaatgatattgttgtggcaggtggcatggaaagcatgtccaatgccccaaagtacattgctgaagctaggaaagggtctcgttttggacatgacacacttgttgatgccatgcttaaggatggactttgggatgtatacaatgactgtgccatgggaatgtgtgccgaactttgtgctgacaatcatgccctcacaagagaagaccaggatgcttttgctatccaaagcaaccagcgtggaattgctgctcgtgacagtggtgcttttgcatgggagattgttccgattgaagttcctgttgggagaggaaaaccacctgtacttattgagaaagatgaaagcctggataagtttgacccagcaaaactgaagaaacttcgcccaagtttcaaggagaatggtggtaccgttacagctggaaaatgcttctatgatggggcggctgcattagttttggtgagtgggcagaaggctcaagagcttggcctgcaagtccttgcaaggatcagaggatatgcagatgcggctcaagctccggaactttttacaaccaccccagcacttgcgataccaaaggctatatcaaatgctggattagagtcatcccatgttgatttttttgagattaatgaagcattttctgctgtcgcacttgcaaatcaaaagcttcttgggattccttcagaaaagattaatgtccatggaggagctgtgtctctagggcatcctcttgggtgcagcggtgctcgcattttggtcacccttcttggtgtccttagggaaaagggcggcaagatcggtgttgctggtgtctgcaacggcggaggtggagcatcagctcttgttctcgaactcgcataa

SEQ ID NO: 19545 - DNA, 222 bp, Zea mays
  Peptide Sequence Number=SeqID_62920
atggttaataacattttcgttctaacagcacatgtggagttgcaagaaaaggataatgtccatggaggagctgtgtctctagggcatcctcttgagtgcagcggtgctcgcattttggtcacccttcttggtgtccttagggaaaagggcggcaagatcggtgttgctggtgtctgcaacggcggaggtggagcatcagctcttgttttcgaactcgcataa

SEQ ID NO: 19546 - DNA, 761 bp, Zea mays
  Peptide Sequence Number=SeqID_62921
atgaagtctcgcatggcactaggggcacggagcccggagaaatcccaaccagagtcgggctcgtcatcttcctcggaacccggggggcacgctaacgcccagcaagtcctccacgagagtgctggcgtcatctgtccgcttggggttggcgtgttgcggggaaacgacgctcgtcgtcgtctcaagtgcgaggtcaacaccagacgtgtccccagcgggggcgccgacgtcgtcgactcgctcgacagccaacgaggtgccaccttctgcttggccatggttgccccgcctcctcctcctgcggcggggaaggtgatgggacagacccggatgctgctcttccgcaatggggggaagacgtcgccgagtccgccgtcgtcgggcaagctgacggccgtcgttgtcgttgtcgcgcggcggaggaaggagtaccatgtcgtagctgtcgtcgagggacatgaactcgagactcccgaaacggagcagcgtcccgggctagagaggttgctggagactacccatctggagcttgacgggaagctgttcgtcaacacgcagcaggcccctacctggcgcgccaactttcggcgtttcgaccccggggggtccctgtaccgacgaggcggatgtgcttgcagtagggggttacaagcgttcgcgagagagggagagagcctgctcgtcagcccgtcctcccgtgcggccacccctcgtacgagggccctggaccttccttttatagatgtaaggagagggtccag

SEQ ID NO: 19547 - DNA, 456 bp, Zea mays
  Peptide Sequence Number=SeqID_62922
atgcaggtggcatgcaactgcaccacggagacgcaccccttcggcctcgacgcatccagcatggagtcccaggcccacacgtcatgtaaccgacgcgccggttactacgtgcgaaagactgcaccgccacttacgccaatgtcgcgccttctcgactgcggaaccggtgccgcgactcgaggcaaccgcgcgcatggcccaacagggccaaccgagcacatcggtcacggggaccgggaaaggggatactccgaaagggatccttccccgcgaaggaagtgggccccgagccctcctactgatcaggggttcgaaggctggcccatcggaagggttcgacagccaccccagagcactcgggcttcaggctcattactgattagagcttcgaaggctgacccctcggaagggttcgacagccgcctcagaccactcgggctccgcgcccactactga

SEQ ID NO: 19548 - DNA, 1509 bp, Zea mays
  Peptide Sequence Number=SeqID_62923
atggacgaaggaactcccctcggtggtctagagtctaaggacgacgccaagtcgagccacgggcttcacgtcgttttttctagtctatggggccgaggctatcttgcccacagacttagaatacggttccccgagcacgagggcgtacggcgaccgaagcaaccagaccagccgagaagactcactggaccagctggaggaggctcgggacatggccttactacactcggcgcggtatcagcagtctctgcgacgctaccacgcccgaggggttcggtcctgagacctccaggtgggggacttggtacttcggctgcggcaagacgcccgagggcgtcacaagctcactcctccctgggaagggccattcatcatcgccaagattttgaagcctggaacatacaagctggccaacagtcaaggcgaaaacatcttttcgcgctcttcgactgctttgatagcgggatcctgaaaacgacggagtacacacatcaacagagggaacagcagcaccctcggcgttgtttccaccttcggcggaatctggcccggcctcggacggcgacacgggcggaggacctccacctcgaaggaagatgtcagcactgcgcctgggccatcgccgccagggtctcctccaggaacccgacccgagcagacggcttgtctggccgctccgtagcctcagccagctgtcccccgaggacatcagcccgcctcatggcctccgcagcccgactccggggttggtcctgccagtggacgacctggccaggttccagccgcggctgctacgcctcctcggtctgggaagccacccgctcctgggccgacgaggccccttttagagccaattccaccttcgtccatgctgacactgctgcctccggctttggctcatcgcagagcagccgaggatgttcaggcctcgacagccgcaatgaacatacaccgtcactcaaggtgccattacaaacggaactccggttccactcccgtgggtatgaacaacctccacatcggagggcctgcgggacgacaaactccgggtggctcgccagcgacctctgcagcagcagcgatggccccagggcgaacgctaccgctggaaggctctcgttcatgtcccctcacgggggacaagaaccagacattaaagccaaagagctggaggcctggagcgcaggtgacgccgacgatctcgtcgacggagaaaccttctccggctgccaccacctcagcaccgacggcggcgtccacctgcccaccaacaccgcaccagcgagcgccgaccgccccaaagcacaccggcagtcgcccggacagaagatggaatgttgcaccctggccgggcagcagcagttcgccttcctccgcatggctggaggacgcctcctccgcagagctggaggatggtttccacccccagatgccggaggaagaagcgggacgctagcccacgcgaaggcaggccccggctcgccccgccctcctccccagcaaggatga

SEQ ID NO: 19549 - DNA, 504 bp, Zea mays
  Peptide Sequence Number=SeqID_62924
tccgagcccaaggtcgggcgaggcggtggctcctccgaggtcgaggttgaggccgagccctggggtcgggcgaggcggagaccgtcttccgaggtcgaggttgaggccgagccttggggtcgggcgaggcggagaccaccttccgaggccgaggcggggggccgagccttggggtcgggcgaggcagagtcttctcccgaggccgaggcccaaggtcgggcgaggcggagcttcctgtggcgcctgaggcgggacttagctgttgtcagcctcaacctggcggggggcacagcagtcggagcagggcaggcgacgctgttttcctgtcagcccaaccaagagtcatcagtactcggtatgtcgcgcgcgttcgacgactactatatcgaggaccgtggcgtcatcttgatgacacaggaggtgacgcagagaaggactgacaataataaccagttcgtcatcctcgccaccgttggagtagcttttgtgccgacttgcatttaa

SEQ ID NO: 19550 - DNA, 846 bp, Zea mays
  Peptide Sequence Number=SeqID_62925
atggaattccttttgtacctgaacctgtcaggtgaatttctcccgtccagcatgttcaccagctcaagcatgcgccgtctccagaccctcatcctgcatggtaagttacaagggattaatgatctgccgagcgacgaccgctatgtcctaccaaaccttaccatgctctatttgcatggatctgaggtgtctcagcagtttgtgcacaagcttggtacgcttccgtgccttgttgagatggagctgtcagctgtttcgtacagtgagggtgagatgaaactgttcttggacggattcccaagcctagcaaggctgaagctcaagaacgtgtctatgttacaggaggtagagatacgtggaggggccatgccaatgctttccatcctagccatgtatgattgcgacagcttgaagaccttcaagaacctgaatagcttggaacaccttcaagaagtggcgatctacaatacgccgccggagattgttgataacataaagcttgaggacgagaagcttttcagcaagatcaaactcctgactaaccccatgatgacagcagaccgagactttccaggtcatgttgtcagaatgagaattaaaatgttggatgaaccggctcatgatctacgtgtcgcagtggcctctgaaccacattgcagtgacatggagggtgattatcatggtgaaaggaaagcaacagaccaagtacactacggccctgacatactggtagacgacgtgggtgggtggttcttcacactttctcctctcttccatgacttggtctcaatgccgttcactgtttcccagctcatctacagaatacggccgtccaaagaaaactga

SEQ ID NO: 19551 - DNA, 498 bp, Zea mays
  Peptide Sequence Number=SeqID_62926
atgtccggcagccacgcgctgtccccgtcgcttgctgatgagccgctgacccaccgtttcttgctcgcaggcgaggcgttgctggagctcaagctggccttcaacgcccaccgtgcatcatcggctcaccagctggcggcgcagcgaccccaacccctgtgtctgggagggcatctcctgctccgtccccgacctcagggtacaatccataaatctcccatacatgcagcttgggggcatcatttcgcccagcatcgggaggctggacaagctgcagagactagctctgcaccagaacagcttgcacggcccaatccccgcagagatcaagaactgcaccgagctcagggcaatttacctgagagccaactacctgcaaggaggtatcccttcggagattggcgagctcgtgcacctcaccatcttggacctgtcaagcaatctgttgaggggaacgataccggcctccatcggaagcctcactcaccttcgcttcct

SEQ ID NO: 19552 - DNA, 378 bp, Zea mays
  Peptide Sequence Number=SeqID_62927
atgcgggggaaggtgaactgctgctgcctggccagggtgcagctgtccgtcctccatccgatcgacggtcatgccgtgcgcaggtggctgctgtcgccggtgctgaagcggcggccgccgctggtgaggcttcccaccgcagcggtggttgcttccgccgacgagaccgtcagtgctacctgcgctctgggcctccggctctttggctttaatggctggttctcatcccccgtgaggggacgtgaacgagggcctttcagcgggttcgagatggctcttgacgaggccgtcaagaactgcaaggcgcttgccgaggcggctgagcagaaggaggccgagcgtgtggccatgtccgaggctatctcggctttctgctag

SEQ ID NO: 19553 - DNA, 498 bp, Zea mays
  Peptide Sequence Number=SeqID_62928
atggattccggcatggaatctgtcgctgagctgtgtgcccagaagttctccgtggccgttgaagcaggccgcgacaccgtcaatgcttctgttgccacctgtgtggtagctggtgatctctgcgccacagcatcagtaggcaaccatgtggtttcgacgcttgatgttcttgaatccgttgtggaggcggaaaaatgtgttatgtgttcttatcaacaggccagtgcagccgtcgtttgtgctcaggaacaatggccaaatactctcagtgatgcattgaactatgatgtgtctcaaatgcaagctacagctaagaaattacaagatactgcctctttctgctatacaaatgaggatgttgtagatggtttcacgatgacgcaagttgctcggtcaatggatgaattagctgaaattctagatgtcacttcaatggactaccagttttcgatgatgtgctgctatgaagcgtcccgatcctttgggactcaaatgtga

SEQ ID NO: 19554 - DNA, 717 bp, Zea mays
  Peptide Sequence Number=SeqID_62929
ggtcgggcgaggcggaagtcgttcggcagaggccagggcggagtccgagccctggggtcgggcgaggcggagttcgtcgtcttccggggccgagcccgagtccgagccctggggtcgggcggagcggagttcgtcgtcttccgggtcttagcccgagtccgagccctagggtcgggcggagcggagttcgccgtcttccgggtcttagcccgagtccgagccctggggtcgggcggagcggagttcgccgtcttccgggtcttagcccgagtccgagccctggggtcgggcggagcggagttcgccgtcttccgggtcttagcccgagtccgagccctggggtcgggcggagcggagtttgccgtcttccgggtcttagcccgagtccgagccctggggtcgggcggagcggagtttcctatggcgcctctggcaaggcctgactgcctgtcagactcactctgtcgagtggcactgcagtcggagtggcgcaggcggcactgtccttctgtcagaccgctttatgctgatgggggttaccagctgagaattaggcgtcttgagggtacctctaattatggtccccgacagctccgctataattcactggactgtccggtggagcactggacagtgtccggtggcacaccggactgtctggtgtgccagcggagcaacggctacttcgcgccaacggtcgtctgcagaaggcattaa

SEQ ID NO: 19555 - DNA, 381 bp, Zea mays
  Peptide Sequence Number=SeqID_62930
atggcgagggcatatctaggtgaagtgcctggacggggtgaagcagctgctcgtggccctgctcaacgtcgagctcaagcagccgcgggggctccaagaccccaggtcctcgcaagggagatcgtcttcagcgtgagcgaggacgtgttgctgtacgagctgtttaggaagatcagcagcgccgtcattgatgatgagctgattaacaaagaggaatttcagttggcgctatttaagactaacaaggagagcctattcgaggatcgcgtatttgatttattggacaggaagcatagtggaattttgggatttgaagaatttgctcgtgctctcagtatttcgcggatcttgtttgctggtatttatgccgcagcccagtaa

SEQ ID NO: 19556 - DNA, 465 bp, Zea mays
  Peptide Sequence Number=SeqID_62931
atgggcaagaacaacaagcgcaagcgtgagccaactcctccatcggaggagtttggtgactcggagtactcagaggaggagttctcctctgagtctgaggggtctccggctcccgtccccctgcgtgagtcgtctgacgactcagacgactcccaggggcttgcggcggaggtatggacgtatatccgggccgtcgagcgctccgggctcgagggctcggatgagtcggagtactcctcggatgaggaggactcggacggcggcggcgaggacgacgacgatgacgacggcgacgacgacgacgatggcgacggtgacggtgacggcagtggcagcggcaggggcagcggcggcggcagcaaggacggtgacggcggcggcagcaggggcagcaaccggggcggcagcagcaggggcagcaccaggggcggcggcggcggcgacagcaacagggccagtggctag

SEQ ID NO: 19557 - DNA, 495 bp, Zea mays
  Peptide Sequence Number=SeqID_62932
atgacgccgtcgaaaccccctggcaagcgccgccgttcggctccacctccgcgcttgccctcacccgctccacccgtggcgctctcgccgccgggcttcgtcgccgaccgcgccgaggccgcggcgcgcgtggagcgcctcctgcggtaccagttctgcgaccgcgcccttctagaggaggccctgacccaccaatccttctcggatggcgctctctcttaccagcggctcgagttcgtcggcgacgccgctctcggcctagccttctctaacttcctatacctcaccaaccccaccctcgggcccggcgcgctctccacgctccgcgccgccaacatctctaccgagaagctcgcgcgcgtcgccgtccggcacgacctctacccgctgctccggcgcaagtgcccccgcctcgacctactaggttcgtgcggttggcttgtctttggcgatgagtctttaagtttcgtaagctcggcaggggtatataggtga

SEQ ID NO: 19558 - DNA, 929 bp, Zea mays
  Peptide Sequence Number=SeqID_62933
atgactggccgcctgagtaagcagccgtcaataaccctccgcgggaggctgtcggctatctgcgccagtactcctccaacttcactcggcgtgttcaatgcttgggcaaagttgggggtaccgttatccagcttcgtgatgtcgtcgcatgttctggcgcctgtttctccgtcgccgagcatcgcgctggggaggtatggaggtgtgcttcttctcatcctctttgagggcggaggtgttgggaggatagctcgttgtgttttccttccccggtatggaacattcacttcccttctccgagtgatctgtgtccactccttagtgggtgaggtggacaacgaagttctttgggctggagaggccctggtcgactggacttccatcctccagggacttttgagctcagacttgtgtggggccgtgccctgccgagctgtgagcgggggcatggcttgcggtttcactctagcttcccgcggaatttctgaggaaggtttcctcttaggtggagctgttgtgcggtgcaaagttccctttatgtccgctacacatgagatggtcccgaagcaaaaaatagctcccgggctaaaggtgatcttgctcttgaagataatggccatgaagttagcgttgatcgacgacaccccctatctagcgcgccagctgtcggtgtttagtatccgaccgcacacccggggcaagtttgggctgcttgaggagcgtaataccctacttcctgggatgactttgtatgtgggagctgtttacaagtggtgtctaccaagtggtgagcaaacaaacttcgctaccccaaggaaaacccggcgcctccgcttcgagctttctgcggcgtttgagggcgactggcatgtggccccgagcggagttttcgcccccgagtggacctgggggatatctgtcccccacag

SEQ ID NO: 19559 - DNA, 1017 bp, Zea mays
  Peptide Sequence Number=SeqID_62934
atggggacgtattcttggctaaggtacctcacccagggggcctccaccatcgactttagaaacattagcgggttgcttagttttaagagtatttgtgaaagcctcataggggacccctacccattcacctcggcagtgtttaagggatggttcgtactctccaaactacccgggccaacaccagattacgcccctcagccccgacaaatccctgtctacccagtggtagttgaggaagttccggtggatctgcctcacattcgagtggagaatggagtcatcctagaggacagctcggaggaacagctgtcgacgcccaccccgttggcagagtcactggccttcgcagctgggtcatcgacatcggcaccgcctgcaccagccgtccaagctcatgcactcggaggtgacgaccccgatgaatctggggatgacgatgatgaggatgatgacgacgacgaaggagaagatgaacaagtcaacgaagaagccaattacgcccagcaggactacttcatggggtttggtcctatcaccgaacattacacatcaatgttcgagacggggcacttccccaacctgctgcaagaagtgatgcacgcgttgggaacctacgtccgccccctgtacgaaacaaggcgagtgagcgagcctccccgggcttgctactacatcactcgcatccacgtcaggctgcatgacacaaggttcaggcatcttactctacgtctgagtggaggaagccagaccagcatcgttctagatggagctggtgaggagcgcctcaacaccctagctggtgtggtggccggactcaacaccgacctggacagtgccaccctggatctctctagggtgcacttggagctggaggatgcccatgccaggattgcagccctggaagcccaacttcaaggatgggatccgcctgaagcccaggtccccgccatggcgttgtctcctccccgcaagaggcttcactatgaggagcccggatccgtcaccaggctgctttag

SEQ ID NO: 19560 - DNA, 402 bp, Zea mays
  Peptide Sequence Number=SeqID_62935
atgggtgtgaccaagggatgccttggacaagaagggtcgaggttcgccacgtcgctccggcgacaagcggaagcgcgagccaagtcctccctcggaggatttggtgactccgagtactcagaggaggaggtttcctccgagtccgagggatcgccggtctatgcttcccccccggcgtcgtccgacgactcggatgactcccaggggctagccgccaaggtgtggacgtacatccagtccatcgagcgcgccgggctcgagggctcggatgagtcggaggtctcctcggatgaggagaactcctccggctcttccgaggaagggagcgacggtgacggtgacggcgaaggcgacaacagcggtggaggtggtggcagcgacgatggcaatgacggcggctag

SEQ ID NO: 19561 - DNA, 1272 bp, Zea mays
  Peptide Sequence Number=SeqID_62936
atggtgtctccggtgagctgcaagcgggtaatccgagtggacgtccgtgccccgttcgttgggggtcggctaggggcccagaggcacgcccaaaagtacctgcggcaactggcgcgctggttgcgtgacgcgtgggcctgggcctccaagctggcatgtcagaagtcggagaagcgcgtccacctggcgcggttgcatgccgcatgcatggctgcccgccccttccgcccgttggtctgggcaaaagtggggggtcgcttgatcgcaactccgtgggagttggtacctttcagccatcgctcggcttcaaggattttcatcatgcagcccggccgcacccctccaccggcggtcacccaggatggtgacctccggcttgatggtgggggaaagcgagccgggctgcggcctctgcccctccctcagcctcaaggattttcatcaccagggctggggaggggagtgcgccgagttgaggtcggcccccgcgtgggcggcggcccgctccttcacccagtgatggggggaggagcggttgttgtccgtggcgctggcagctgcagcgtgcccggctttcggacgcgagtggcttcggagccgcttgcggcgccggcgtccgccatggcagctggaagaggttcttccgccggcgtgatagccagggccggccacgggctgacctccaactctacggccttctgcccgtccttgccttacgagtttcggcatgggcgggggcctcctagcagcagcacccgctctgaggtcagtgctaccgctgttcgaccccccggagcagaagtcgtcgtcgtcgctgctgctggagcaggtgacggcgcgccgttcgtcggccttccgttgctccgcaggccttccccctcggagtggggtttctcgcctgttgattatctgaaccgcttcaccaagcatgagtcgccccgtgtcaaggtgacgagtgagccgggttgcctgtcagcggggctgacgccggagtcgatcagccgaggcctcgggtcgggctggcgcccttggaagatggttggccgaggccccaggggtaaccggccgagccgcctgctcgggccagattcccggagaagtccctggaccgcgtcgccgtctgaggctgggtcggacctcgctgaaggcgtcgtcgatgccgagggtgctacagcccccttcagcgtgaagacccgagcctgcaggatcagactgtcttgtagcggatgtttgcgtgggcgtgagttgcttctcgcggaaggtgacgagtga

SEQ ID NO: 19562 - DNA, 384 bp, Zea mays
  Peptide Sequence Number=SeqID_62937
atggaattactcagcaagtcttacccgactaaagaaaagactctcaagggtatgctggttatatgggagtcaaggatttcaatgagggtaatcaagatcaaggaaggtaatgcaagaattgttttatcaagcaactcctatcacctaatgcagcaatcaagtgagaaagattttaaaaacatcaagggaggtggcaaatgcaccggggcttgccttcgtttacagataaacccctgcacttccatttattctcggttcgaagtccccgacggcgttcacgcccagccgagctccggcgagcacctacgccggccgattgggacaacggctagggttcccgagcggcggaaatcaaattggatcaagcccgagcattacccctaa

SEQ ID NO: 19563 - DNA, 981 bp, Zea mays
  Peptide Sequence Number=SeqID_62938
atgtcgtcggttccgccgccggcgggcgggatgtcagccgccattgtcgttgtcgcgcggcggtggaaggagtatcatgtcgtagctgccgtcgaaggacatgaactcaagactcccgaaacggagcaccgtcccgggccggagaggttgctggagactgcccatctggagcttgacgggaagctgttcgtcagcacgcagcaggctcttacctggcgcgccaactgtcggcgtttcgagaccggggggtcctcgagccgacgatcggctcggggtaggatgatgatggcgcttcctgttgacgtggcgggcctgtgccctaggtcgggcgacgtgggggctcctccgaagccgaggtcgagtctgtcttccgtggccgaggccgagcccgagcccccgggtcgggcgaggcggagatcgttcggcagaggccagggcggagtccgagccctggggtcgagcgaagcggagtttcgtcgtcttctggggctgagcccgagtccgagccctgaggtcgggcggagcggagttcgccgtcttccgggtcttagcccgagcccgagccctagggtcgtgcagagcagagttcgccgtcttccgggtcttagcccgagtccgagccctgggtcgggcggagcggagttcgccgtcttccgggtcttagcccgagtccgaaccctggggtcgggcggagcggagttcgccgtcttccgggtcttagcccgagtccgagccctggggtcgggcggagcggagttcgccgtcttccgggtcttagcccgagtccgagccctgggtcaggcggagcggagtttcctatggcgcctttggcaaggcctgactgcctgtcagactcactctgtcgagtggcactgcagtcggagtggcgcaggcggcgctgtccttctgtcagaccgatcagtggagcggcggagtgacgacggtcacttcggctctgccggggggcgcgcgtcaggataa

SEQ ID NO: 19564 - DNA, 696 bp, Zea mays
  Peptide Sequence Number=SeqID_62939
atggcgcttcctgttgacgtggcgggcctgtgccctaggtcgggcgacgtgggggctcctccgaagctgaggtcgagtctgtcttccgtggccgaggccgagcccgagcccccgggtcgggcgaggcggagatcgttcggcagaggccagggcggagtccgagccctggggtcgggcgaagcggagtttcgtcgtcttctggggctaagcccgagtccgagccctgaggtcgggcggagcggagttcgccgtcttccgggtcttagcccgagtccgagccctggggtcgggcagagcagagttcgccgtcttccgggtcttagcccgagtccgagccctgggtcgggcggagcggagttcgccgtcttccgggtcttagcccgagtccgaaccctggggtcgggcggagcggagttcgccgtcttccgggtcttagcccgagtccgagccctggggtcgggcggagtggagttcgccgtcttccgggtcttagcccgagtccgagccctgggtcgggcggagcggagtttcctatggcgcctttggcaaggcctgactgcctgtcagactcactctgtcgattggcactgcagtcggagtggcgcaggcggcgctgtccttctgtcagaccggtcagtggagcggcggagtgacgacggtcacttcggctctgccggggggcgcgcgtcaggataa

SEQ ID NO: 19565 - DNA, 381 bp, Zea mays
  Peptide Sequence Number=SeqID_62940
atgacgaagaagacagagaaaatattgaattacaaatgtaccttcggcttgatagaaggcaaaaagtacaagcgtgacgcaaaagcaagtacaagtcagcgtgaacagtacgggggtactgttcatctatttataggcacaggacgcagcatgatcttcggaggacgaaggcccctaacaatcctcgatcccagggcatcacgccagctggtggcagctatcccgccgccgagagaagcgggcaggcggttgcaatgctctgtcgaggaaaggggagaacctgacatatggtggccacctaacagcgtaacgaggcgtgcgagccagagagagctaggagagcgcgactgcaactgccccgatgggcctgcctattggtag

SEQ ID NO: 19566 - DNA, 324 bp, Zea mays
  Peptide Sequence Number=SeqID_62941
atgtttgactacatttatacctttgccttgacaaggagcaataattccagagtaatacgtcagcagttacaggattgcgtgaacagtaaaggaatattgttcactatttataggcacaggacacagcctgaccttcggcgacgaagcatggtcccaaaagtcggtgagagcagcggcgacggtgaaggtggtggcaacgacgacaaaggcgatggcaaaggcggcgacagcgacgacaaaggcgacgacgaaggtggcggtggcgacggcgacggcgatgacgacggcgacggcaagcccggtggcataatgctgccagcttaa

SEQ ID NO: 19567 - DNA, 660 bp, Zea mays
  Peptide Sequence Number=SeqID_62942
atgtcttcgcgctcccttatgcatcgtgtctttccaccttccgagcccccggatggggaacacccgcaatccttctgccttgtcattagaggaacgcaacttcgtggaagttggtacctttcagccatcgttcggcttcaaggattttcatcagccagcccggctgcatcccctcgccggtggtcacccaagacggtgaccgccagcccctgggtggggagaagcaagccgggctgcgatcttggtcccaccctcagcttcaaggatgttcatcatcctcgctggggtgggggctgggctgagccggagctctacctcccgcgcgggttcgtgggtcagcctctccctcagcgttcgagggagagggagctcactgaccctacgagaggggcggacttcaacaacgcggggctggtcgacggcgggcgtcgtcagcttcagcgcgtcgggctcgccggcttggctcccggcgccccctcctgccgcaagggcggttgtcgcgccgtgcgcacgggaggaccgcccaagacgtcgtgcgctgccagggcggcgttcgtgctctggggcggtcctgcctttgcaccggtacggcgccctcgcgcggaggtcggtgctccgctcgtccgggaggatccgagtggggatctgccggtgggctga

SEQ ID NO: 19568 - DNA, 366 bp, Zea mays
  Peptide Sequence Number=SeqID_62943
atggtgaagtgcctggacggggtgaagcagctgctcgtggccctgctcaacgtcgagctcaagcagccgcggggggctccaagaccccaggtcctcgcaagggagatcgtcttcagcgtgagcgaggacgtgttgctgtacgagctgtttaggaagatcagcagcgccgtcattgatgatgagctgattaacaaagaggaatttcagttggcgctatttaagactaacaaggagagcctattcgaggatcgcgtatttgatttattggacaggaagcacagtggaattttgggatttgaagaatttgctcgtgctctcagtatttcgcggatcttgtttgctggtatttatgccgcagcccagtaa

SEQ ID NO: 19569 - DNA, 300 bp, Zea mays
  Peptide Sequence Number=SeqID_62944
atggacaagcggcagcgcctttacaaaggccgtcagagtagttttgacgaagcgagaaaactgagggctgccgtgctggagccacgacgaggcactactgtactgagaggcttcaagacgggaaggtcagcgaaacagggatctcctcatcaggcaccgttggctcacccaactgagccaaccttgcccgagcgcggtaaagcagtttcaaacggacccttagacattcttcaaccattcccgctcacgcttcctgtccctttgaacgggtacaatgtaactgatcctcgaatccgttga

SEQ ID NO: 19570 - DNA, 696 bp, Zea mays
  Peptide Sequence Number=SeqID_62945
atgaaggttcgctgccaaaccagcttttgccagaatgaagatggtttccccaagttgctgagagcatgcacagttcgcctcggaatcaggagccagccagagtatgatggtcgtgaattcatcgagcatggcacagagaagtgtgtcatgattgtatacgttggatccagtccgcaccatgtggaatggaatgtcactgctgcggggcacagattcaaagacacctaccaagtcgtcgctcgcaaggcattaagggccctgtgtcagatctatgaagaagaagtggccgacacatcgatcagattctttccgccctttcagagagaccgtcaagtttggatggccaggatgcgtgcattggaaggacagcagctgcttgaggacgacccctcagtcgtgtacctcactgcctacctgctcaccctggatgcacaagctcaagcccgtgcaactgcattggaaagtcatgaagtcattgcggttgaagccctgaagcaagccaaggatgagcacgtccagaagctgatagaggcctacttggtaacccacaaccaacgtagagccctgcggatccaagagcccgcttcatccaacccagttcaacccaggagagctgaagatccaagattcttgaaggtcacccggtctctatcaaaggagataagaaggcttgggaactcctggaaggagccatag

SEQ ID NO: 19571 - DNA, 780 bp, Zea mays
  Peptide Sequence Number=SeqID_62946
atgagggatcgggaaaggggacatttcgaaggagcccttcgcagcaaaagaaacaggccccgagccctcctactgatcaggggttcgaaggttgcgccctgcggggttcggcaaccgccccagagcactcgggctccgagccctttactgatcagtggttcaaaggctggcccctcgaagggattcgacagccgccccagaacatgcagagtcaaggatgaccctgggtacgtctgttacatggccaaggcccgggctacgctcccgaggtaccttaagacattttcgagaccagcgggaatgggtaagactaacaacagtaagtcacggcctctcccgagttcagcctcgggcttaacagggagctccgcctcgcccgaccccagggctcggcctcagccccggcctcgggagaaggtctccgcctcgctcgaccccaggcctcggcctcagcctcagcctcgggagaaggtccccgcctcgcccgacgtcagcctcggcctcgggaggagtcacaacctcgcccgacctcagcctcggcctcaggagaggtcaccgcctcgcccgacctcggcctcggaccgactacgctacaggggatacatcattaccctacccctagctagccgcctcaggctacgaaggaacaagaccggtgtcacatctagattactccggcaacagctctctacgaaggcaaagaaacgtcaacaggacccagggccgcaccgccagctacgcttctacagggctcaagcacttctccgctggccacgttag

SEQ ID NO: 19572 - DNA, 414 bp, Zea mays
  Peptide Sequence Number=SeqID_62947
atggaacctaccgcggagctatgttcccagaagctgtccgcggccgttgatgccgcccgtgacacaatgaaagcttcatctaccgcctgtatggttgctgctaatggcaatggcgggtccccagaattagacccacgggcctcatcatgccgctcggaataccgccgtggcctcgtcgtgggcggagctcttggaattgcttgccatggatacgtcgtcgccgcggattcgcctgttgtcgtggcccagcctgctatgtcagtgaccaacgccggcctaggtcgattcggttgggggggacgcgccgggtcgccggacctctacgtgccggtgatctgcgccgccttggagctctttgctctgagccgcatgggtgtttggaggaaggagatgggtccagggccgctaatctag

SEQ ID NO: 19573 - DNA, 516 bp, Zea mays
  Peptide Sequence Number=SeqID_62948
atggcgcacagcgccgccgaggggacgctacggcggggcagtactggcgaggacgctggtcaaggggaggaggacggagcggtgccaaacttccctgtgcggcgaggagacggcgatgaagagacggcggtgaaggacggcggtgaagggacggcggggcgtccactcagatattctctgtctctaatgagtgatactcctaagaaactacaagatactgcctctttgtgctacacagatgaagatgttgtcgacggtttcaagctgactcaagtggctcgttcattggacgagttagctgaaacgctagaagttactgcaattgactgtcaggtctcgatgatggatccaacaactatattagaagctggctatggtagcgaagatagtgcggtgtgggaggacgtattccgtgaccgagaaataatgaatcagccattggaagcggagacactagctgagcactgtgctaagtgggggcttaattacaatgagatcagggatagatctgtgtaa

SEQ ID NO: 19574 - DNA, 282 bp, Zea mays
  Peptide Sequence Number=SeqID_62949
atggcggcggtgggtgcgctgcaaaggggggtgggtggcggtagtgcgctgcaaaggggggcgtggggcggtggtagtgcgctgcaaagggggcgtggggcggtggtagtgcgctgcaaaagggggcgtggggcggtggtagtgcgcatggaggcgggcacgcgtgcgaggggcacagctggacaggattcttctgtagcttgttccaggcttcaaggggctctagccaaagtgaagaaaaacttcactacccaatgcatgcagaggactgggtataactaa

SEQ ID NO: 19575 - DNA, 534 bp, Zea mays
  Peptide Sequence Number=SeqID_62950
atgcagacgtatggggtttgtatgcaagatggcataagaccaaggcgacagcatcctcccggtgatgggttcctacgcaggaccgtcgaggaaagagaggatgggcataagaattctcatgccctcatctccgatgatctgttggttcatgttactctggtcgtccgtcaaatttgtatgttgaaaacccatgtggatatattatcttattttaccccagttttcggttctaagcttcgctcggtagtagtagcagagacgagacgtcctttgaagccaccccctggttggaatcagactgcgaagatgatttctacagcgtcaacgaaggccgaacccctgaagccgccgccgccgcaaaggaggctgggcgacctcctgcgagaggcgcaagacgacgacaatgacaatgacaccgccgtcgacggcctctccagagacgactccttgcgcatgggcgcggaggccaaccggtgctgcgtgccgcggctcgcgtgggccattagctgcaacgggaggacacaacgcaagtga

SEQ ID NO: 19576 - DNA, 171 bp, Zea mays
  Peptide Sequence Number=SeqID_62951
atggggggccgagtcatggagaaggtcacgaaagagattaatgctttattgaatggattatgcttaaattacgaaggaaaggaacagtttgatgcatcttctattgctgaagctgacgatgcacgtattaattatttctgcaacgaagtcttttcttttgtggttgtataa

SEQ ID NO: 19577 - DNA, 252 bp, Zea mays
  Peptide Sequence Number=SeqID_62952
atgagggtagcggacatcgctggtgcagctgcacggcagctgcacggcgcggggacggcggtcgaagtaggggcaaggccgatgggaattattttagccaacggggttattcatgattcttgttatgtagggctgggcggtgcgacggctggaggaagaaggcaggcttggggtgaagggcggcgcgatggcaaacagggctgggcgaagagcggcacagtgataatagggcagggcagcgaggcgaggtag

SEQ ID NO: 19578 - DNA, 285 bp, Zea mays
  Peptide Sequence Number=SeqID_62953
atggcgacgtctcttcgctatatgtcaatcaaagaggaatggaaaatgtgcatatatgctgctgattgcagtgagattggcctcgtccaagttagccatgaactagacaagattagaagtttaaagaggccttacatcaagagagtacaagatcgacataaggaagtacaatcatatgatattttaagccatgaactagacaagatcagaagtttaaagaggttttacatcgagtacaagatcgccataaggaagtacaagtctttgaggaaagtggccttatga

SEQ ID NO: 19579 - DNA, 1236 bp, Zea mays
  Peptide Sequence Number=SeqID_62954
atggaggggaaggaggaggacgtccgcctgggcgccaacaagttctcggagcgccagcccatcggcacggcggcgcagggcacggacgacaaggactacaaggagcccccgccggcgccgctcttcgagcccggggagctcaagtcctggtccttctaccgcgccggcatcgccgagttcgtcgccaccttcctcttcctctacatctccatcctcaccgtcatgggcgtctccaagtccacctccaagtgcgccaccgtcggcatccagggcatcgcctggtccttcggcggcatgatcttcgccctcgtctactgcaccgccggcatctccggcgggcacatcaacccggcggtgaccttcgggctgttcctggcgaggaagttgtccctcaccagggcggtgttttacatcatcatgcagtgcctgggcgccatctgcggcgcgggcgtcgtcaaggggttccagcaggggctgtacatgggcaacggcggcggcgccaacgtcgtggcgcccggctacaccaagggcgacggcctaggcgccgagatcgtcggcaccttcatcctcgtctacaccgtcttctccgccaccgacgccaagaggaacgccagggactcccatgtgccgatcctcgcccctcttccaatcgggtttgccgtgttcctcgtccacctggccaccatccctatcaccggcaccggcatcaaccccgcgcggagccttggcgccgccgtaatttacaaccagcaccatgcgtgggctgaccactggatcttctgggtcggccccttcatcggcgctgcgctggctgccatctaccaccaggtgatcatcagggcgatcccgttcaagaccgctgctaccctcctcctgcaatgtggccaacccccctactgtgccacggccagcaagcagcggcgtctcggcacaagctacagcgccgtgacaacggctacgcagcgcaatagactctggccgctgaagcgatctgctctcaagttggggttggtgccggcgaaaaggacggcgatgagtcacccaccccacatccgcagcagcgtgcctgacagccagggtggaagactgccagaggcccctttcagttccagctaccaccaccaaggaccatatgagattggtctggtcccccagccccggagcatccaaggtaggagtgaggagcgcaactcggcgaggtgcatcctcgggagggcaaggccacaccagccatga

SEQ ID NO: 19580 - DNA, 417 bp, Zea mays
  Peptide Sequence Number=SeqID_62955
atgtcggagccccctgctaaaggcgaggtccccccaacacacaagtggcaaaatgtcaccctctcctatttcgagccccagaactacatcaggcacttccacacccctatctggtggtatgcaacttacagcagcgagggatttgggaccacatcaagaggcctagatgatcacttctccaactgtcataaagatctgaaccttgggcattttgctgaggcgcatcaagtctcacagggacctagggaaagggtagtatctgaagctgatattctgagccctcaatttagaaagaaacttggaaatgtatttgacttgcgggaaaggttgtccccttctgaacattttactcgtcgtgccttggtggatcatgtggagctaaatccttcaaaccctggactaaagcgtggtaaataa

SEQ ID NO: 19581 - DNA, 258 bp, Zea mays
  Peptide Sequence Number=SeqID_62956
atgaacaaattcctacatgctactccacctaggtacatgcaaattgtgatggcaatcgaaacccttcttgctctggatacaactgtggagttgattgggaggctcaaggcggtggaagaacggggttggagatggactcaacgttcagatcaagggcagaagcagcacctggggcttagggaactgctggagggtggcatggtgcacagactgccatcgatcgaccacatcgaccaggtccacgagttccttggctag

SEQ ID NO: 19582 - DNA, 218 bp, Zea mays
  Peptide Sequence Number=SeqID_62957
attatgcctcgttcctcgtcatcctcctcctccttcccgggttccacctccacggatctgctgctgcacgcccggaggcgacgcgctccgacggccgggcagacaggggagtgaacggagcggagcgtgactgtgagagcgggatgggaacggagcggctccgttccgttgattttttggagcggaatggttccggatctgaggagaatattctctaa

SEQ ID NO: 19583 - DNA, 975 bp, Zea mays
  Peptide Sequence Number=SeqID_62958
atggagagggtcgaggcctctacgcgctcggaagttgagcggacgcgcacacagctcatggactcataccgcgagttgggtgcgcggactgctgactttgaggtgcccgaccgagaggcgggccttcgcttccttgagtggctgcaagaggaattgctggcactcccgaccatcgtggagggcttcatgtcctttgcctccctcgtcaccttcgaaggggccatgaatgcgctgtcccgcgaggggtgcaagcactatgaggtcttcgaccggtccgatgaagactttgggcgtgaaatttttaaggtcgaagaccctgtggtgaaggattctgtgggggccctcttcgatcggatgtggggtgcgcatggccgggaggcggttagggagcggtctgatcgggcgagagagcatatggcacgtgccgaggatgtcgaagaccttggggatctgaacggcgcgcggcccgaggctgaggtcaactcggtgctgcccgaggctgaggtcaaccctgaagctgttgagggctcctccgccagacctatgcccactgtgtctggtgaaggctccttgccagcccctacgtcgacggcggagggccccccgaaggcggtggcggagctggcagcggaggatcccaaggcggcggcagggccttcgcaggttcaagattttgggcctgcgcacccaaccgctactgatactgctaattttgtggcggcttcgaccgtggttgcggaaaatgattcgggtgattctgtgtctaagttttttgagtctgatgattctgggagttcggtggtgtggacggaagagtcttcggatgatgatttggattattttgcagcattggatgtggctgcagcggaggcttctccgcgtgtggtgggtgcagaagttcccggtccgagtgttgggtgtaggcgtcgaagggcggtggcgaagcgtagagtgagtgaggtggagggtggttga

SEQ ID NO: 19584 - DNA, 1299 bp, Zea mays
  Peptide Sequence Number=SeqID_62959
atggaagttgtggagctggtcccctgtgcccgaaataagtggggcaactggtgggactactggttctatgtttcagaggctgaagtcgaagatcacccagggctccctactgccattatgtgctctcattattatgtggtgtacctgccatttgaagtggaggaggatgatgagaatgaaagggcccttcggatcgctgcccgtacgagtagtgggcgtgatctagttgaggaattcatagggtatggggtgtggcccttggcgcatggatgggcgctgggcgaagatcctgccgcggttgtgcgtgaggcggaggatggggcggtgcgaattgttgggcgctacgtgtcgaagacggaggcccagcggagctgggatatacgtggatccaacgaccgcctgaatagggtctttgagttgaattgtttgtcgtatggaggttatcccggggaagacgttgtcgaccgccgcgggaaaaaaccagcggctgtgactaaagacgaccccgcgccggaggccgccccagccactaagaagaggaagctaggtactacggtgggagaactggaggtctccgatagtcttgctatggagttgatggggacatgtgcggcccccgagggaaggatgtcttcgcccgagctccgggagtcttcggcgcggatgctggaggttaccgagggtcgatggcccaagaacgttcctatcccccacgcggctggcgaagtcttctttacgtctcgcatggctcgtgacttgagagtgtttccttacggacggaatattgctgctgttgtgtcggcagtgatgaacaaggatcgccaggatgctgcgcagaagcgccggacggtcatcaggctccccgatgctaggcgtgaagcgaagagagcgcgggggagtgcgaaggctgctgtccccggcggtagccagccgacgctggctgcgaagccggccgcacctggatccagcaaggtgctggagagcacgaaggcggtcggcgccggcggaaccaagtctgccccggacagagctgcgaaggtccgggagctgccttcgtcggggaaacgtgttgccgacttcggcatgaatattagcgtggacgactatctcgttgggtcgggcgaggggcaactagttgttgtcccgcctgcaatggcaaccacggtgtcaaccgtggtgcttggggtgaagggtggcgctttcagcgctggcagcgagatttcggtggccactgccgtcaaggacgaagcgggcaccatgtcccaccggctgagggaggcgtcgcagcagcttagtcaa

SEQ ID NO: 19585 - DNA, 87 bp, Zea mays
  Peptide Sequence Number=SeqID_62960
atgaaggatgccaagcccatcaagacacccatgggaaccaatgggcatctcgacctcgacacgggagttcacaggatgcaagattaa

SEQ ID NO: 19586 - DNA, 255 bp, Zea mays
  Peptide Sequence Number=SeqID_62961
atggccacgacatctcatgaacagggtgccaaaacctacatcaaaaaggtggacaaaaaggctgctacaccatatttgatgaagaagaaaaagaatggaaaggtgatagcaatcaaggccaacaagcaagccaacaaaggaaagggggccaaacgcatctgggtgccaaaggaaataattacgaccatgaaaagcaccaagaaggtttgtatcccgaaagggaaatatgcgtatctatttttttcttgtatctag

SEQ ID NO: 19587 - DNA, 1047 bp, Zea mays
  Peptide Sequence Number=SeqID_62962
atgaatggcggcaaccactcctgcagcggtgagccctcctttccgcaactcctccagggccttcagaaggggctggagattcttctatctgtcgcgcggggtcctgtagcactagttatcagcggcggcagtcaccactcgctgagaaaacgacgggagcctcccgtcgtcatttcggagatagaaccaccggcgctgccaccctttgttcgaggacgcaaggatggcggggatatactgcggcgcccgcgcctgcctcagctggaggatacagccaccagcccgcactgccgtgcggacccttctctctcccgtcggcgaggcaaaaagctccacggagaagagatgagtccacaggtcccagtgagggtcaatccccaagtatccttcgcaaaccgccgcgaagatggcggcttgcgagatggagttaggactgaggttgtgcagctccaccccgtagacatgcagaatcgcccgcataaaacgacttgccgtcgctctgaacccccgctcgtgaaaggagacgaagctcacgacataccccggcggtggggacggggcggctccgctcggaggggccatccactccggctgcaagtctccggagagagggcgaagcaaaccctcagcaaaaagggcctccaggtcatccgccgtgacggtggagaaaggccacgggtcgcgcgacggaacaatggtcacccggtcggccatcaccaagcagaagaggtggcggcggaaaggactgggacaggcggcacctttggcaagcgaagcaggcaacgcttcgcttccgccataatgaccgcgtcaaaaaaggctggcccctcggaagggttcaacagccgcctcagagcgctcgggctccgcgcccactactggtcagaggttcgaaggccggcccctcggaagggctcaacggccgcctcaggccactcgggctccgcgcccactactgatcaggggttcgtaggctggccctcgaagggttcgacagccgcctcagacgcagagcgagggatgaccctgggtacgttcgatacataa

SEQ ID NO: 19588 - DNA, 564 bp, Zea mays
  Peptide Sequence Number=SeqID_62963
atgcaagcggcatgcaaccgtaccaagggggcgcacccttttgactccgacgcgtccagcatgggggcccaggcccacacgtcatgtaaccggcgcgccggttactatgtgcgagaagctgcaccaccacttgcgccagtactgcgccttctcgactgcggaaccagtgccgcgacacgaggcaacccggcgcatgacccaacagtgccaaccgagcacatcgatcacgggtcagtcagccgcgggagaaggcgcgacagtcaatatggccaaaagtgggccgacagtaatggcggcgacaggcgggcggaagcagcggacaggcgacacctttggcaggcgaagcaggcgacacttcacctccgccataatgaccgcgtcaaaaaagggatcgggaaaggggatactccgaaagggatccttctccgcgaaggaagcgggccccgagcccccctactgatcagagattcgatggttggcccctcggaagggtacgacagccgcctcagagcactcgggcttcgagccctcctacttgaaagtcgcctagaggggggggggtga

SEQ ID NO: 19589 - DNA, 693 bp, Zea mays
  Peptide Sequence Number=SeqID_62964
atggcaagccccgaccttcgacgcctgcaaggaacgcgcgagaggcgtgccggagcctaccgcctggtcgacgaagcggcagccggcagcgagaccaaccaaccattgcgggcagcgaaccaagagcccccgctgcaaccagaaacgccttgctacggacaacgaaacaaaaccctacggcgaagggagaggggagaggatgcaggcaccggaacccagagcgtgcactggacggaaggagaagggacgctcacctgcggcggcgcggggtggtcgggcggatccgagtccgacgagatccggtcgaggcggagttgggatgagatggcgggggagctcgtcgacggcgaggagtccggcctatccagggcgaaattgaccaatcaaacgagcgggcggccgaagtccagtgaggtcgatcttcgccttccggtgaagttctgccaggtccgagggcttggaaagcttcacgggcctatggcggagctaaccgaagcgctggcgcgacttgggggtgactggagtgggctggccacggtggccgaagctctggcggcaatggcgggcggaaaggagctcgccgaagctaaggaggggtgtctggccggcggtggtgagcgcggggtgaacgtcgagcacgaggcagcgcagagagaggtcgagttcaagcgcggattggccccaaatctttga

SEQ ID NO: 19590 - DNA, 429 bp, Zea mays
  Peptide Sequence Number=SeqID_62965
atgacgtggcagggggcaccggactgtccgggcttgtgggagatagatatcccccgtgtccttctaagcatagaaacacggttccaactcgcccgaggccaaccttggatgggagacgcggttcaaactcgttcgaggcaaacctcggacgggagatgcaattccgacttgcccgaggccaacctcggatgggagatgcagtttcgactcgcccgtgaccaaccccagacgggagacgttgttccaactcgtctgaggccaacctcaaacgggatacgttgttccgactcgcccgagaccaacctcgggcgggagaggcaatcacgacttgccccaggccaaccttgggtgggagcacagaaacactctatgggccgcttgatgggcctcccgatggctttcctagcaaggcatgccctcgggccgtga

SEQ ID NO: 19591 - DNA, 528 bp, Zea mays
  Peptide Sequence Number=SeqID_62966
atgaccacgatcacacggtccatgtcggcccctggtgcatgcgcacacggggaacccacacaggcagacgtgcctgccactcacctgctgccccaccacaaccgtcgtggtcttgtggaggcggaggaaaacagcgccgcatgccccgcttcgactgctgtgccactcgacagagtgaggctgacagcagctaagtccaacctcgggtgccatgggaagctccgcctcgcccgacccagggctcggactcagcctcgacctcggaagacgaactccgcctcgcccgaccctagggctcgaactcagcctcggcctcggaagacgaactccgcctcgcccgacccagggcttggactcagcctcggcctcggaagacgaactccgcttcgcccgaccccagggctcggactcagcctcgaccccggaagacggactccgcctcgcccgaccccagggctcggactcagcctcgacatcggaggagcctccgcctcgcccgacctcaggctcggacccgccacgtcatag

SEQ ID NO: 19592 - DNA, 399 bp, Zea mays
  Peptide Sequence Number=SeqID_62967
atgcagtacaaggggtcaagcagtctcattagctgcgagaagcagacgattcgaatcgagttttatccttgcaaggcgggggagctcgtcggcggtgaggagtccggcctatccagggcaaaattgaccaatcaaacgggtcagagagcttcaccagggatcaaggaaggggtccgagggcttggaaagcttcacgggcctatggcagagctaaccgaagcgctggcgcgacttgggggtgactggagtgggctggccacggtggccgaagctctggcggcaatggcgggcgaaaaggagctcgccggagctaagcaggggtgtctggccggtggtggagaggaagaggaggaggaggaggaggaggaggacgacgacgacacagacacagagagctga

SEQ ID NO: 19593 - DNA, 132 bp, Zea mays
  Peptide Sequence Number=SeqID_62968
atgacgaccgacaggccgcttgagctactccacatggatttatttggcccgatcgcttacataagcatcgacgagagaaaaatcacaaacccaagagactttaaagggattcttgagacggactcaaaatga

SEQ ID NO: 19594 - DNA, 1344 bp, Zea mays
  Peptide Sequence Number=SeqID_62969
atggcggcggaggagctacatcctggtgatacagtggagtttggcgtgtcgtggatttcctcgtttgaggtggcggaggatgatgaagacgaaggagcccttcggtgcgctgcccgcatgagtagcgggcgtgatttagttgaggaatttatcgggtatggggtatggcccttggcacatggctgggcgctgggcaaagtatgccctctgatgaacaaggaccgtcaagacgctgcgcagaagcgccaggcggttgtcaggctcgcagatcctatgcgcgaggcgaagagggcgcgggggagcgcgaagactgctgctgcctccagcagtagcaagccggtgccagctgcgaaaccggttgtccccggacccagcaaggcgtcggcgagcgcgaagactgccgtctctggcggaaccaagcctcccccgggcggacccgcgaaaggacgggagctgccttcgccggggagacgtgttgccgacttcggcatgaacatcagtgtcgaggattattttgctgggtcgggtgaggggcaattggttgttgtcccgccttcggcggcaaccacgtcgccaacggcggtggttggggcgaagggtgccgcacaagacccgtgggccgctttctgcgcgagcggcgagattctgtcagccgctgctgccaaggacgtggcgggctccatgtcccagcggctgagggaggcatcgcagcagctgtcgcagcagctgaagcaagcggccgacttcgccgaccgcatggcgtcgggtgtcctgactgcgaacgtggctgccaaagtcgagagtcttcgggcgcagcatgcggatgctatccgggagaagtcggctgcggaaagcaaaaaccgcaggctggcggagaaagtggtcgccatggaggccgagaagccggacttccggtgccagctggcggaggagaggagggaggcaaaccaggccatcgctgaagcgcaggctgcacgagcggaggccaaagtggcacgggcagagagcagtctcgccagccaacgcgccgaggagctggaggcaaggttcaacaccttgcgcagccgcgtggacaaggccgaggcctcgacgcgcttggaagtcaagcggatgcacgcacagttcgtggacgcgtaccgcgagctgggtgcgcggactgctgacttcgaagtacccgaccgagaagcaggccttcgcttcctcgaatggttgcaggaggagctgctggtgctcccaaccattgtggagggtttcatgtccttcgcctccatcgtcacctgcgaagggaccatgaatgcattgtcccgcgaggggtgcaggcactacgaggtcttcgaccaatga

SEQ ID NO: 19595 - DNA, 1815 bp, Zea mays
  Peptide Sequence Number=SeqID_62970
atggtgattgctctattaatctggcctctcaagggcactgtacggggcgagattaacgaaggcctggagcgaagggtagcgtctttgacttcgccccaacatttgccctctgagggaccagttcgactaagtcatctggtgccgaagacatcgctagatggtggagacgctgccctcgctcgaagtggttccgcgggggtttttgatgtgaccattgacagacgtgtacttttggactgcgagcttcccgaagcgtcgcgtcctgtgtataaaaaggagggaggcggcgcggctcaggctttcttacctttctgcgtgtcgcgaaaccctaacattttgaaaccgttcgcccgctcgcctgccttcttgctctcattcatcagagatctggcccgcgtcaagcagaccgcgcgccaccgccgacggtacgtagccatgccatcttcttcttcatccgctgtgagtacgccgttggtcgaaccatcgtccgaagatactttcagcgatttggtggcggtggagctgcacccgagccacacgatggaatttggtgtttcaaggatctcctcggcccgcgtgcaagacatgcagcagttggggtactttgggagtggagttggacgagttccgggggcagaagagattccggagccggagggtgagatggttatgttcgaggcattttttactgccggcctctggttacctccgcatcgttttgtggcggagccctccatagaggtcttcgccaagaattattgtttacactggcagaagaggaaggttggaaacaagattgcacagtttgggtcatgcacctttacgccgaggaatgggaagacttcggcggaggttgtggagctagttccttgcactcacaataagtggggaaactggcatgactactggttctatgtggcgggaggcgaagtcaaagacctcccaggactcccagcggccgtgatgtgctcccattgctatgtggcgtttccgccgtttgaggtggcagagggtgatagtgacgaagaggcccttcgtggtgctgcccgcatgagtagcggacgcgatttagttgaggaattcattggttatggagtgtggcccttggcgcacggctgggcgttaggcgaagccctgcggagttgggatatccatggatccaacgttcgcctaaatagggtcttcgagctgaaccgcttgccatacggcggctatctcggggatgatgctgtcgaccgccgtgggaagaggccagtggccgtgactgaggaaggcccttcgcaggagttgatggggacgtgcgcaaccctcgcgggaaggatgtcttcacccgagctccgggagtcttcggcgcgaatgctggaggttaccgggggtcgatggcccaagaatgttccgatcccccgcgcggctggcgaagacttttttatgtctcgcatggctcgtgacttgaaggtttttccttacggacggaatattgctgctgttgtatcgacagtgatggaaaaggaccgtcaagacgctgcgcagaaacgccaggcggtcgttaggatcggggatcctttgcgcgaggcgaagaaggcacgggggagctcgaaggctgctgcccctggcagcagcaaaccagtgctggctgcaaaactgtctgcccccgggcacagcaaggcgtcggcgagtgcgcaggctgccacttctggcgcggccgacttcgccgaccacgtggcgtcgggtgccttgactgcggactttgctgccgaggtcgagagtctccgggcgcagcatgcagatgctgtgcgggagaagtcggctgcttaa

SEQ ID NO: 19596 - DNA, 228 bp, Zea mays
  Peptide Sequence Number=SeqID_62971
atgcgcatgcacgccggtgactgcgcactcaacgatgatgagaacagggagcggggtcatagtctgaagaactgtcctgacaaaagcgagagaaatttgaagaaattttgctataattgtggtgaatctggacactatctttccaagtgccccaagcccattgagaatggtaatcctcacgcactcattgtagacatttcgggtgctctatgcctgctagccgtgtaa

SEQ ID NO: 19597 - DNA, 1458 bp, Zea mays
  Peptide Sequence Number=SeqID_62972
atgggcgaggccaacgccacaggcacgccagccaccgcgacggtgcgcgtgctggccgtgtcgcgcgtcgcgccggcgccggcgccggcagcggcggaccccgtcgtcgtcaagctgtccttcttcgacacgccctgggtcgtgctgccgcccatccagcgggtgttcctgtacgagctgcctggtggcgacggtgagttcacggcggcagtgacgcgcctcaagagctccctcgccgccacgctggcggtgtacctgccgctggccgggaagctggcgtacgtcgccggcaccggggacgtggtcgtggactgcgtcgacgaccccggggtggccttcgtcgaggcggaggcggacgccggtatcgacaccatggacgtccgccggctggcgagcgacgaggcgcacgacatcccggcgttcctagcgctggtaccggagctccccaccaaggtgctcccggcgccggttctgtccgtgcaggccacgcggatccccggcggcggcctcgcgctcggcctctccgtgcaccacgccgtcgccgacggccaggccgtgtggaggttcatgggcgcctgggcctccgccgcccgcgacggatcccccgtcaccaagtccctccccgcgccgcactatagccgggaggccgtccacgtccccaacggcgacgagttcgcgcgccagatgctcaagatggtcgcgcccaacctgcccgcggcgggcaccgttgcggactacgacttcagccagcgcttccgcctggcgcgccggacgttctacctcggcggcgacgacatcagggcactgaagctccgcatctccgcgctcgccgaggccgaggccgaggccgaggacgacgtcgtcgccgacggcagaagcaagaagaagccggtgtcgacgttcgtggcgctgtcggcgctgggatggacgtcgttcgtgcggtgcaagggcctgggcgccggcgacgacacgtacctggtgttcctggcggacctgcgcgcgcgcatggacccgcccgtggcggacggctacctgggcaactgcatcaaggggtgcctggcgacggcggacgccggggacctgctgggcgagcgcggcctgctggtggcgtgccgcgcgatccaggcggcggtggcggagatggaggcggcgccgctggccggctcggagcggtggatccagaagatgatggggctgccgttcgcgcgcctcgccaacgtggcggccagcccgcggttccgcgtgtacgaggcgtccgacttcgggttcggccgccccgcgcgcgtggagctcgtgtccatgaacaacgacggcgagatggtgctcgtcggcggcaggggcgacggcgaggtgcagctgtccgtgtcgctggaccccgcgcgcatggaggacttcaaggcgcacgtcttcgccacctccgcggcgccgtcggactcagcggcggcggcggccaactga

SEQ ID NO: 19598 - DNA, 1770 bp, Zea mays
  Peptide Sequence Number=SeqID_62973
atggagagggccgagggaaggagagaggagggtaaaaggagtcaagaatctttcatgcaccatgcgggcttaggaagaatccgggagaagcagcgcaaggagtcctctcgtctacaaatcgtgaaccgaaagctgagtgcgatgaacaagttgttgatggaggagaatgaccggctacagaagcaggtttcccgtctcgtcttggacaacggtctactcgctattgttgaggagacattggcagagttcatgtccaaggcgactggaactgctgtcaactgggtgcaaatggttgggatggagcctggtccggattccgttggaatcgtcgctgtttcgcacaactgcagcggcgtagcagcacgagcttgcggccttgttgctgagatccataaggatcgtgcatcgtggtttcgcgattgtcggcatgttgatgtcctccatgttatccctacgggtaacggtggaacgattgagctgatctatatacaggggtttggttttgttaccatgccttgtgtcaaggaggcatatcgctacatcaaatatctaaatcgttttgtgatgcaagatcaggtcataactgctgagaaggtgcataattttgtattcatcatgagtgaagagatgaagagacttattgcttatgtgaaagatctctacgaggatacaaactcatgcaacatggtcaaggtacaatggttcgacaaagttgatgaggttggtgttcccttgcccatggatttcgatgacagggagatcttcttctctctggaccgtcaagatctcaatgtagaatgcattgatggattggctgcagtcctgagtgtccagcactacgagaagttcaagggtgataccagatacaacttgtggcaaccttatttttgctgtcggcagattgataatggtgacatcaaaccttttgatgtcacacagctgcaaggctactggagccaggaagtacttatgaccatgttcaatgcaacttcctctctgaaggtgcgtttcaaggtccctaaatctagacccaattcagatggagggctaaagaggaagcgtgatgcattcaacgatgatgctaatccacagaagttcattccttctagtgcttctacttctaggttttatggtgagaacatccaacaattgtgtcctggttgccatgtggaagtactctctcaagatagtggtataaggggatgttggtttagatgtttgattctgaagaggcataaagataaaatcaaggtgcgctacctagaacttcaggatgctgatgagactggaaacttggaggagtgggttatgctaacacgatttgccaaacctgatcaactgggtgtacgtttccttggaaggccaatggttcgtccacagcgcgtggaacaaagcaaggcctcatgctttgatgttggagccattgttgatgcgtggtggcatggtggctggtgggagggaatcgtgctgtgccaggtgggcagcgggcgtctacaagtttattttccaggagaaaaccgaacagctgaatttggtgaagatgagctgaggtgttcccttgagtgggttggtaacaaatggaatcctttgaagggaagaaaagatgtcacaagcaagttgacctccactgcagattgtggaagtgaatgtttgattgggaaacaagatccactgaatttttatgtgcctaaaaattcggaacctcaactagagagacatcaatatgacaaggggggtattgagaaatcttcagtcagcacaatttcatga

SEQ ID NO: 19599 - DNA, 741 bp, Zea mays
  Peptide Sequence Number=SeqID_62974
atggcgctgtccgcgtcggcaacgtcaaccggccgcgggtcacgggcggagaaggtgaggaggatcttcgagcgcttcgacaccaatggggacggcgggctggaccgcaacgagatggccgccatcgtcgtcgccgtcaatcctcggttcatcctcctcgacgacagcggcctctccctgtcggggctgctccgcacctacaacgacggcgctggggacgtcgaccgtgactttgtcgcgctctcccttcccaccgtccgttcagacgcctcatccccggatatcgccgcgggggacgccgccgcccactcctccccaccctccgcctccgccgctgcttggacgacagctgttgggggcgtggcggttgcagctttcgcggtcgtgcgggtgttggtggcgtttgcggcgtggggttcgcggcatggctggcgagtgtttcacgatggcgtttcgcggatggcggctggcaagcagggtgcgtggtggcgggcgtgcgggtggtggcggtcgtttcgcgagggcgattcgcgtgtggaggcgggttccgcgacgagggaggcgcgggcgggcgggattcgccgcgggggaggtggagcggcgggtggaggcgggagcagtctacactgtccccttaatagtcagtacatattagagatcgaagaaagagcctcctgccgtccctgcgtgacggggatgcaatcagagctgagtaaccatcgcctcgtgatgggcatgtga

SEQ ID NO: 19600 - DNA, 456 bp, Zea mays
  Peptide Sequence Number=SeqID_62975
atgtggttttctgtgagcttgaggtgggaggcctcgggatggttcctcttttatgatgggaatgtagtagcagcatttggctcagcttactatcacctcaagccagatgatgaccgcttaatatgggacagatacacaatgtttgctaacgtcatcgactcgagcctggtgagggttcaacgtggaggttcatcgaggtctgctgctcgtagctcctgtcgctctactcaagatccagcagaagtggagcaactgcgagaagaacttaggcgacatcaggattacttgaagcaacaagctgcgcaacatgaatattatgctacacagattcagcaacaacaaacactcatacaaccccctccagctaccttgccgacgcatgaacaagaggacgggttagactttgttgaaaccctcttcaatagtggaggtatcgaccatcactcttcactgtaa

SEQ ID NO: 19601 - DNA, 432 bp, Zea mays
  Peptide Sequence Number=SeqID_62976
atgcaggtggcatgcaactgcaccgcgggggcgcacccctttggcttcatcacatcccagcatggaggctcaggcccacacgtcatggaccgggaaaggggatattctgaaagggatccttctccacgaaggaagcgggccccgagccctccttctgatcaggggttcaaaggctggcccctcggaagggctggcccctcggaagggttcgacagccgccccagagcacgcagagcgagggatgactctgggtacgtccgatacatggccgaggctcgggctacgctctcgagccttcggcgcaacaggaagctccgcctcgcccggcccttgggcctcggcctcaggggagagatctccgccttgcccgaccccaagggctcggcccccgcttcagcctcggaaggtggtctccgcctcacccgaccctag

SEQ ID NO: 19602 - DNA, 525 bp, Zea mays
  Peptide Sequence Number=SeqID_62977
atggcgcctcctgtcgatgtggtcggtccgtgccctgggttgggcgaggtggaggctcctccgaggtcgaggtcgagtctgtcttccaaggccgaggtcgagtccgagcccctgggtcgggcgaggcagagaccgtcggctgatgccagggctgagtccgagccctggggttgggcgaagcggagttcgtcgtccttcggggctgagcccgagtccgagccctggggtcgggcaaagcggagttcgtcgtcttccggggctgagcccgagtccgagccctgggctggccgtagcctgggtgcacggtcgggtcccaagttctcgggctggtatgttgacgctgtcaacaatttggtcggagccgggtttgcgagagcagtccccgagcctccgcacagggcgagaggacggtcgaggacagactcgacttttttacatacgcccctgcgtcgccttttccgcaaggaggagggggaaaagcgccatgttgcccttggagggcgccgaacatggtgtctccggtga

SEQ ID NO: 19603 - DNA, 465 bp, Zea mays
  Peptide Sequence Number=SeqID_62978
atgggcaagagtaacaaacgcaagcgtgagccgactcctccgtcggaggacttcggcgactcggaatactcggaggaggagttctcctccgagtccgaggggtctccggctcccgtctctcccccggcgtcgtctgatgattcagacgactcccaggggattgccgcggaagtctggacgtacatccgggccgtcgagcgctccgggctcgagggctcggatgagtcggagttctcctcggacgaggaggactcggacggcggcgaggacgaggatgacgacgacgacggcgacgacgacgacggtggcgacggcgacggtgacggcagcggcagcggcggcggcggcgatgggagcaagggcagcaccagaggcggcagcagcacgggcagcaccagaggcggcagcagcaagggcagcaccaggggcggcggcggtggcagcagcagcaaggccagtggctaa

SEQ ID NO: 19604 - DNA, 1980 bp, Zea mays
  Peptide Sequence Number=SeqID_62979
atgcacggccggccgcggcgcccggccaagcctgaggacgacgaggcggcgtcagcgaaagccgccaagctccgggacctccaggcccaggtcctgcacaatcaccatgcccgcacgtacacaaaggagtcaattgggctgagcttcaagctgctcgagacaaatccagaggcctacacggcatggaactaccggaagcttgcgttgcagcacaatgtcaaggagctttctgacccacaggccatcaagtctgctattgatgatgagctgagagtggctgaggttgctttaaggcagaacccaaagtcctatggggcttggtatcaccggaagtggttgctaaaccaaaagctagcgcctgtggatttcaaatatgagcttggcctcttggataaactgttaaaggtggacgccaggaatttccatggatggaattaccgaagtatacttctgtccaacctactaatccagcagagcaaaggttttgagtcaaagcagaagattttttccgaggagtttgaacttgttactcaagctctttttacagatccaagtgaccaaagtggatggttctatcacctctggcttttagctcaaacatctagtccagataacccacagctgattgcttcatggccttctaatgctgcaaagctcagtttctcttttatcaaggaaaaggctgagcagcacacactgtcatccgtctggtcaaggactgtacccattgttctttattttaatgagcctgtcaaaggattaaatcattcaagtgtgaacttaaagtctgatttggagttcggtaaggatatccaatggaggcccctcacaatggcagactctgggtactctaaatgttgggccacatatcttcaaattacaaatgaatgtagcagtttgcaggaatattctgttgaaatgagcataccctgctcggatgacattgtgtctagaagtggctctaactacaactgtcctgtgcattttacattttacattgaactgatcagcaacaacgcagcccagggtttagatacgtttgataagccagttgcctggaattgctcagactcattccagtctcatggaaaccgtgatcctatccctttggatctgctaaacattactagtgccttggtcgaacatgactcagattggcattttgaaaggctgtctgaggagatagatcttttcagagagttagctgatgacaatagcaagtttgggaagttgacattagcccggctattgcttgcttgtgctgctataaaatcccgtggaagatctctaattgaaaggaagggatactgtgaagaggcactggggctcttcactgacttgattcacctggatccatctcataagcagtactatgaggatgaacggagcttagccctgatggataagttaacatgtgacatggagactttcacgaagcattgttctgttcaggttcaaccaaattcagctcccctgcatcatgtgcagtttcgcagattgtctgtaacacgcatcggatttgctgagcgcctgttgtgggttcaaatgctggacctaagccataatagtcttagatcagtcgaaggtttggaggctttgcagcgccttgtgttcttgaacatcagcaacaaccagatcagtagtttcacagcacttgaaccccttacgaagataatctcactgaaagttctggatttgtcgttcaacgagattggagctcactcaattgacacagcacggtatatctgcccgtctccgttctcacacaaaactgaagcaagtgaagcttttgaagagtaccaggaggtaaataatatcaacgtgacggaatactgggacgccatattgttcttcagatctttgaagctggcacagcttgatatcagaggaaatgcagttgccagcaaggacggcttcagaactcttgtcgtgacgctcattccttgtctaaaatggtttgatggtgaaggtgtcagttaa

SEQ ID NO: 19605 - DNA, 369 bp, Zea mays
  Peptide Sequence Number=SeqID_62980
atgggcaaaggcaaaaaaggtcgaggctcgccccgccataccggcgacaagcggaagcgggatccaagccctccctcggaggacttcggcgactctgagtactcggaggaggaggggatagttgcagaggtgtggacgtacatccgctctgtcgagcgcgctgggctcaaggggtcggatgagtcggaggtctcctcggatgaggaggactccttcggctcgtccaaggagcggagcggtggtggtgacagcgacgacggtgacggcagcggaggcgacgacgacggcggcaggggcggtgaaggcgacgacggcggcaacggcggcagtggcggcgacaaggccagtggcaaagcgccacttctttaa

SEQ ID NO: 19606 - DNA, 1716 bp, Zea mays
  Peptide Sequence Number=SeqID_62981
atggtgtgtttgggcctcggcggccgcagaaaacacacactacaagataatccgatcctgcaggctcggatcttgacaattgaagggagcagcaacaccctcggcgtcaactacaccttcggtgaggtccgacctagcctcggacggcgacgcagtcggaggatctccaccccgaaggacgacatcagcaccacgcccgggccatcgccgccagggtcttctccaggaatccggctcgagcagacggctcggtcggccaccccgaggcctcggccagctatcccccgaagacatcagcccggcccgtggcctcggcaactcaactccggcgtcggtcccgccagtggacgacccggccaggctctggctgaccaagtcttcttttcgagccaactcagcctctgtccgtgctcacaccgctaccttcggcttcggctcatcgaagagcagccgagggttcatttgactaagcaagagaagccttgggcagcaaggccgaccgagccgagggactcctacgcctccgggatacggatacctcactcgtcacctttgcacgaggtacgaacaaccccacacgattggggggggcctgcggagcggcagaaggccgacggatggctcaccgtcgcccgctccagcagcagcgacaacgacccccgctatgggtgtccgaactgcagcagcgatggcctcagggcggacgccgctgcaaccttgccctcgcccatgccgacgctcgaggggcgaggacaagagccgtcagcccaccggcagatccccactcggatcctcccggacgagtggagcaccgacctccgcgcggaggcgccgtaccggtgcaaaggcaggacagccccagaacacgaacgccgccgtagcagcgcgcgacgtcttgggtggtcctcccgtgcgcgcggcgcgacaactgcccttgcggcgggagggggcactgggagccaagccggcgagcccaacgcgctgaagctgacgacgcccgccgtcgaccagccccgtgttgtcaaacccggcctccgccccagcaaggatgatgaacatcctttgaagcggagggcgggaccaagatcgcagcccggcttgcttctccccaccgaggggctagcggtcaccgtcttggccatcgtgggtcgagtcttctccaacacgctccaaggtcctcctcctacgacgcgggggctgggtcccacgcgtcatgcaggctggcccagagcagaagaagccaaactgccgcgcacggtgcatgcaactgcccagcggttacaagcgttcctccactttcgcccggaccggcgggtgaaagggcggacagccatgctgtcggcatgcaaccgcgccaagtgggcgcacccctttgactccaacgcgcccagcatggaggcccaggcccacacgtcacgcaaccggcgtgccagttgctacgtgcgagcagccgcgccgccccttgcgccactaccgcgcctcctcgactgtggaaccagtaccgtgactcgaggcaaccctgcgtatgacccaacagtgccagccaggcgcatcggtcacgggccagtcagccgcgggagaaggcgcgacggtcgatgcagccaaaaatgggccggcagtaatggcagtggcaggcgggcagaagcagcggtcacgtcatcagccaagctcacgtcacctcgtgggatagcgagagaaccctctctcacggcgtga

SEQ ID NO: 19607 - DNA, 537 bp, Zea mays
  Peptide Sequence Number=SeqID_62982
atggtgctgcttctggcgcgggcgcgttgggcgctgggcgtcgcggtcgcggggcagtcctgcgcggctcgggctgctcggctggggtgcctggggcgggtcgcgcggcttctggcgagcagctgggcgctgaaagctggaccggcggcgtcggacgagcgaagaggcagtggcggctccgtttcgtgcgagcgatgttacaccccgccaaccactcgccccgtcgcattaactccgcggcaggacaggcggcgcttctggcaggagaagcgggcgacgcttcaccttcaccgtaataaccgcgccaaaaaagggaccgagaaaggggataccccgaaaaggatccttccccgtgaaggaaccaggctccgagcctccttactgatgagaggttcgaaggctggccccccgaagggttcaacagccgcctcagatcgcgtgggccctacacccactactagtcagaggttcgaaggccggccccccgaagggttccacggccgcctcaggctactcgggctccgcgcccattactga

SEQ ID NO: 19608 - DNA, 668 bp, Zea mays
  Peptide Sequence Number=SeqID_62983
atgggcaccgaacatggtgtctccggtgagctgcaagcggggcccacgcgatctgaggcggctgttgaacccttcggggggccagccttcgaacctctcatcagtaaggaggctcggagcctggttccttcacggggaaggatccttttcgggcgcccagctgctcgccagaagccgcgcgacccgccccaggcaccccagccgagcagcccgagccgcgcaggactgccccgcgaccgcgacgcccagcgcccaacgcgcccgcgccagaagcagcaccatgcagaccgacgccgcgcgccaggagcctgcgcggtgcgcgccgagcccaagacccgaagccgcgcccaatccaggaactttaccgcgtccgtttctcctctgtgtgttcaatacgtctgttccttttcctccccattaatccctccgatgatgaatgcctttgatgacagcttgaatggcaggccgccgtttcttctcctccctggcgtctctctctccctctccttcctctataaattggacgccgagctcctctattctcctcccctactcgagctctcttcctccccaagatccctctctctctcccactcgcccactccattgtcggagttcgtctacatcgtcgccgtccgccccgctgtccgtggtgcctcgccgaagac

SEQ ID NO: 19609 - DNA, 752 bp, Zea mays
  Peptide Sequence Number=SeqID_62984
atccgtctgcgtcctcgccccctctgaactcgcccagccgccgggcaccggtgatgcgtccgcgtccttgccccctccgggcttgcccagccgccgggcaccgacgacccgttcgcaccctcgccccctccggacttgcccagccgccgacaaccagcgatccatccacgccctcgcccgctccggaccacgcccgcgccgcctccgcgccctacgaacttcccgtcacgggcacgtacaccgtttctgtcttcctcgagaagggcttcctctccatccccgggttcatcctcgccggcgacaacctcatcgccaagtgcccctccttgttctgccgccgggcaccggtgatgcgtccgcgtccttgccccctccgggcttgcccagccgccgggcaccggcgacccgttcgcaccctcgccccctccggactcgcccagccgccgacaaccagctatccatccacgccctcgcccgctccggaccacgcccgcgccgcctgcgcgccctacgaacttcccgtcacgggcccgtacaccgtttctgacttcctcgagaagggcttcctctccatccccgggttcatcctcgccggcgacaacctcatcgccaagtgcccctcctggttctggtgcattctttactcatctcgccctgctcttgtgatttttattcctaaatacgtcttttatgctaatttgaatgtgttattatgctcaattactagatctcgtgtacgctccgcattataa

SEQ ID NO: 19610 - DNA, 654 bp, Zea mays
  Peptide Sequence Number=SeqID_62985
atgaagaacgtagaccgacctccttctaatccaaaacggattgtaatccagtctactcaggagtgcttcagcgttgacataccccgtgttccgacggagactgttagacccgaaacaaggcaggctgctgatgaggatgatgactttatgccattatccaagaagcgtaacttggacgacagtcctgggaaagttttgaagaaggtagtcacaaagcggaggaaagtagtgccccccgacagatgtaaatgtttacgatattcattgtatactttttttcagcagaggcttaacgtcagatgcaacccccaagatgtattagtaagcatccagatattaaatgacagacagcgccaagcaattgcacgtaggggattttctagtattcttgatatgagactggacgcactcggcagcagatcacatttagcttggctgatggaaaagctcgaccacaatgacatgacaattcgagccggcccagggaaggagctgaaaattacaaaggatacggtgcacctaattttggggttaccgaatgctgggggaagaactgcattgggcatcgatgaagctgttgctgccaacaatttaagagctgaacttggtctatcgaaagaagattttgggttacagctcttcaagatcgtctga

SEQ ID NO: 19611 - DNA, 476 bp, Zea mays
  Peptide Sequence Number=SeqID_62986
ggtgttacaggtagcagcgatcctatctgggatctggaagcacaagttgaactgcttcagtcagaactccgtcacaggaatgatctatgggtcgcggatgcagccatccgctacttgcaagaccaactcgcgaaacgagatttagcactcgattggatggttaactctcgtttactcgcctgggctagggaagccaaagctcgagcccatgtggaggagcttagcttagccatggataacttgcaggtctattataatacactacatgaagaagttcatgagttgtattcacaactgcacccgaacgtccctgcgaattctgtcaggatggaagccgaaccttctcatgtagcgggagaagcacttgatggagcactggaccttttcaggccccctccctctatgaagttggttgacaaatggtcttctacgcccgacaataaagctactaaaagtgaaaagaagtggcttatcag

SEQ ID NO: 19612 - DNA, 291 bp, Zea mays
  Peptide Sequence Number=SeqID_62987
atggtgtcaacaagctcctgtgaaaatttcagattttttggacacccgagcgaaaagttatgcccgttttacggaaggaaaaaaacgctcgataaactcaccgatcaacctggaaatctgataccaattgatgtagctgaggtgcccgatctttcggcgagtagagataattccgatttggcggaagatgacccttgcgatccgactacgacgagcaagcccgaggcgccaatgcaatcgctgaaccaactccctgtggttaccgaccttgctgatgcgagatcggcctga

SEQ ID NO: 19613 - DNA, 603 bp, Zea mays
  Peptide Sequence Number=SeqID_62988
atggcccctgccatcggtgccgaggcggaggcggctcgagaagtccccgtcgccgacgggatcaccgccaccatccgcgcttcgggcctccgagcgggcggcggcgagccgctcgtcagtcttctgttgctccgcaggcccacccctatcgagtggggttgttcgtacccgcggagggggaaccggagttccgtttgtgatggcactttgaatgccaactcgcctgttaattatcggaaccgcttcaccaagcatgagtcgccccgtgtcaaggtgacgagtgagcatgaacagaggcggagttggctcgaaaatgaaacctggttggccggagcctggccgggttgtccgtcagcgggaccgacgccggagttgatcagccgaggcctcgggtcgggctggcgcccttggaagatggttggccgaggccccaggggtaaccggccgagccgcctgctcgggccggattcccggagaagtccctggaccgcgtcgccgtccgaggctgggtcggacctcgctgaaggtgtcgtcgatgccgagggtgccactgcccccttccagcgtcaagacccgagcctgcaggatcagagtgtcttgtag

SEQ ID NO: 19614 - DNA, 1147 bp, Zea mays
  Peptide Sequence Number=SeqID_62989
atggcggtggcaggtgggcgggagcagcgatcacgtcgtcagccaagctcacgtcccatccgggggcagcaagagaaccccctctcatggcgtgaagacgacgcgcccgacaagcggcgctcctggcaggagaagcgggcgacgcttcgccttcgccgtaataaccgcgccaaaaaagggaccgggaaaggggataccccgaaaaggatccttccccgtgaaggaaccaggctccgagccttcttactgatcagaggttcgaaggctggccccccgaagggtttcaacagccgcctcagatcgcgtgggccctacacccactactggtcagaggttcgaaggccggccccccgaagggttccacggccgcctcaggctacccgggctccgcgcccattactgatcaggggttcgaaggctggcccccgaagggttcacagccgcctcagacgccgagcgagggatgaccaggggtacgttcgatacataaccaaggctcgggctgcgctcccgagggctcggactcgggctaagccccggaagacggcgaactccgctccgcccgacccagggctcggactcgggctaagtcccggaagacggcgaactccgctccgcccgacccagggctcggactcgggctcagccccagaagacgacgaactccgcttcgcccgaccccagggctcggactccgccctggcctctgtcgaacgacctccgcctcgcccgacccaggggctcggactcggcctcggccatggaagacagactcgacctcggcttcggaggagcctccacgtcgcccaacctagggcgcaggccagccacggccctcttagaggggattggccgcgcggggacgaggacgagacaggcgctctcttggggccgctcgctccctctcctgcgtggacgcttgtaaccccctactgcaagcgcacccgacctgggcgcgggacgaacacgaaggccgcgggatttccacctctctcacgcccgtctccggccacctcacttccccccttcgcgctcgcccacgcgctcgacccattgggctggggcacgcggcgacattcactcgtcggcttagggaccccccggtctcgaaacgccgacaagtgctgtccagatgggtcaggacgag

SEQ ID NO: 19615 - DNA, 993 bp, Zea mays
  Peptide Sequence Number=SeqID_62990
atggctctgataccacttctgtcacacctaggttttaggggtccaaacccagggcgcgaaattatcaccaagtgtgctgggaccaagtctcacacatatgatgactcatggccgagccaccgcctcgccaccgtcgggagcccgcgccggcaccgcgccgtcaccgcgaccgggccgtcaccgcgacctagacaaaaacagaagaggaggacagtgtgtgtgtttaagctgtcagaggtaaggctcggcaactgctaccggcacggccagtgccggcgcgacgtctacgatgccatatgccaggcccagaggctcatctacattatcgggtggtccgtgttccaaaccatccacctactgcgcgatgaccacgacgacatggcgctcggcgacctgctcaggaggaagtcgcaggagggcgtgcgggtgctgctgctcgtgtgggacgatcccacgtcccgaagactccgtggcatcaagatggaaacaggcactatctttactcatcaccagaagaaagtgatcttggatgctgatgctgggaatcatagaaggaagattgttgatttcatgggaggacttgatctatgtggaggccgatatgatacaccaaagcacactctatttcgaactcttcagacatttcacaaggaagactactacaacccaatttttgcggttgaagatgctcgcggcccaagagagccatggcatgacttgcattccaagatcgacggtccagaagcatacgatgtcctgaaaaactttgaggagcgctggttaaaggcatcaaagcgtagtgccgctaggaaactgtcaaaattgtcgaggtcgcataatgattcgctgctgtggatcaacaagatacctgatattattgctattgacgatgaaatctattcaaatgacgatgatccagagagatgggacgtgcagtccatcgccgccaagaggtcacaagagaagaactcgcagcccaagtcctcgtggtag

SEQ ID NO: 19616 - DNA, 675 bp, Zea mays
  Peptide Sequence Number=SeqID_62991
atggccacctcgtcagcagagttcccacaagagaatgtgaggtacgaccttggacatgggtatgagcaaatgacctatgggccggttgtcggtgttttgtgtcggaccgcacacccggggaaaacaaccttcactatcacgaggaaaactcagcgcctccactccgagctatctccggcgtttgaggacgtcggggaaaaaaaaggcaagaaagggcgccgctccaccgatgggaagcgcaagcgccccccaagtcctccctcggaggactttggggactcggagtactcggaggaagtctcctccgagtatgatctctctcccgctctggcatcccccatggtgtcgtttgatgattcggatgactccatggggctgtccaacgcggagtgggtgtacatccggtccgtcgagcgcgcggggctcggcgggtcggatgactcagaggaggtctcctcgaaggcagtggtggactcatcagactcagaggagggcggcgacagcgaggtcgatggcgacgagggcgacagcggcagcagcagcaggggcggcgatggcagcagcaggggtggtgatggcagcggcgacgttgacggtggcgaaggcagtagcaggggtggcgacagcaagggcggcgacgacggtgacgtcggtggcagagtgccaccggcttaa

SEQ ID NO: 19617 - DNA, 762 bp, Zea mays
  Peptide Sequence Number=SeqID_62992
atggagttagagctgggccacacggtggagttcggcacctcgagaatttcctcggttcgcgtgcaggagatgcagcagctcgggtactttggtgatggtgttgggcgcgtccccggtgctgaggagatcccggagcctgattgcgaattagttgtgttcgaggcgttcttcatcgccggccttcgccttccagcgcatcgtttcgtggcggtggtcttgcagaggttcgaggttcaggatctccaagatgcgacgcggaagcgccgggcgttcactagggtcctggaccctagtcgcgaggtcaagagggcgcggagaggcatgaagtccaccgcccccggcagcagcaaaccaccaccggctgcgaagccagccatccacgggcctagcaagtctttgtcgggtgcgagggctgtcgcttccggctcgggcaagccgccctcggctgagcccacgagggagcgaaggccaccatctccggtgcgcaccgacgaggcggcggcgggtggggccgacctcgacatggacatctgcgtggatgattaccgcgtaggtggggtcatgatgttcgatgcccacacgggccgaggactcattggggactgggtcttggacaagaatgtggtgcagggtcaaatgctgggcaactggctgttgtcccggctctggtggcggccacgccggctgtggcggcggccggggcgaagggtgcttcgcaggacacatgggctttttctcgccagcgtgtcacacccgatttga

SEQ ID NO: 19618 - DNA, 732 bp, Zea mays
  Peptide Sequence Number=SeqID_62993
atggaggctcgagcccacatgtcatgtaaccggcgcgccggctactacgtgcaaggaatccgcaccgccacttgcgccaatgccgcgtcttctcgactgtacaaccagtgccgcgactcgaggcagccctgcgcgccccgagccctcctactgatcaggggttcgaaggttgcgccctccggggttcggcaaccgccccagagcactcaggctccgagcccattactgatcaggggttcgaaggctgtccccttggaagggttcgacagcctccccagagcacgcagagtcagggatgaccctgggtacgtccgttacatggccaaggctcgggctacgctcccgagggagctctgcctcgcccgagcctcggcctcagcctcggcatcgggagaaggtctccgcctcgcccgacctcaggcctcggcctcgggaggagtctcatcctcgcccgacctcaacctcggcctcaggagaagtaatgatggttccccgcgtgcgcccaagacgtcggttgctctcaaaccccctacagaagcaagcaaacgtcaacaggatccatgccgcacctccagctatgcttctacagggctcaaggcacttctccgacagacacatgctgatgaggataatgttggtttctattgtgattatgattatgattatggtaaagacgaaggtgtcgaggcggatgtccaggagttccaggacttcgatgagttcgaggattag

SEQ ID NO: 19619 - DNA, 507 bp, Zea mays
  Peptide Sequence Number=SeqID_62994
atggaggccggtcttcttcctcgggtagttgtgcttggaccgattctctcgcctgggagctcgccaaggtcgttcccttgctccctaggggccataaatgtgcagacctggcccatcccttcgccgcgtgccgcatccctcccatgccgctccttcccgaagccatccaggaaatccaatgccttctctcgccttgtttcatctccgtcgcatacgcgcggacgcgaatgccgcgttggagaagatccacgccgcgggactgctcgtgccgcggaggggctcggggcaagccacgccatgactgggacctatggcgtcgatatggaagccaagcagaacagggagatcgagggcgctgtctgttcggagtactgtggaatgttcaccgggtggagcacttcgtcaccaacacggatcttccatctcgacgtcgtccggaatccaggatcgggcttggggatagcgcgctatcttgaggagcgttccacggcgagaaatttggagtag

SEQ ID NO: 19620 - DNA, 846 bp, Zea mays
  Peptide Sequence Number=SeqID_62995
atgagcaaccgcatccaagcattagagcagcagatggaaatccgggacaacaccattgaggtcctagaaaatcagctccgtgatgtgcaagatgaacttgaggaggccaacgctcacatagaaatgcatcaccaagacatgaacgccatggaggcagacaacgaagaggaggaggatcccgaggagatcgagccagcttccagcctggacacaacctactctggagtaccccctacacctggggccagtgttgcctctgccactcagggttatcatgcagactctgatgagaagaagagggaccgtttccagagagggctcaacaccaagctccgtgagcaccttaacactgttcgtgccgacagctacaatgaactggtcaacctagccatttcacaagaagactgcatcctagcccatagggcagagaagaagaagaaggcaccagtgatagggtccttggccccacctcaaagattctggattgtctccaataatcaaagcaggggatcccaacagcaagtagggagatgggtcattaggccgcctcagcagcagcaagcacccaactgtttccccgccctcgctccaaaaaataatcaggcccagcgacaacagcaacagcaatttagacaagggaacgggaacaaatgctttacgtgtggcaacacatgccactatgccaaggattgcccacggaatcaaccaagacagatgtcagcacctaacccaagaaaatgggaagaagcaaaaggtgcaagtcaagcaagggaggctcaatttcactactctggaggagctacccgaaggggcacccgtcatgactcgtacctttttagtttttaa

SEQ ID NO: 19621 - DNA, 444 bp, Zea mays
  Peptide Sequence Number=SeqID_62996
atggcgggaagcaccgtagggcaacgcacgacgcagcccgcggtgcagaggcccacgaccacggtgaagtatcgttttacggcggtggatcttcttctccagcgagccctgaggaatcctaggacccgaacggcggggcatgatctcggccacttatctcaggttgtttcactcagatccggattaaccggcattcagtacggtaccgtacaagctgatccaacgaaaggggatgaatctgctggttggggcccacgagatagtgtcagacgcgagtgtgcagatgcggggggtgaaaatgggccgatccagtttgttttggcccagtcgcagaaggaggatgggcagggacaagatgggctggactgcatttggctcaggaacagggctttacatttcgcccccgagcggacccgggggatatctgtccacgaatcaagctga

SEQ ID NO: 19622 - DNA, 894 bp, Zea mays
  Peptide Sequence Number=SeqID_62997
atggcccgtatcaggtgcactgcacgtaagtctgtgatccccttttttccttctcgcctggcggagcgtccactgcgtcgcatggtgccaggtcagtctagtcacctggagagactacatcgtcgcctgcacgaggagcaggagcaccgatgccaggagcaggagcaagagcagcaggactcttccccctcgcctcagcaggaggtggagtctgagaggctgctttcccctgcacctcagccagagatgccccctgcaccaccacagggcatcccggctgctggaggagaccctaacggagatggagacgacgacgacgccgatggcagttcgagccacgacacggagctctcagaggagccagagctggagggatggatcgctatacccatcactcgtgatgccgctcgcgggtgtcacttccacgacgctctcaacaccctgctgcgtcgggcctttgaccgacacacttggtccatcgagtaccgttgtgtagtctatcagcattgtcgcgggttatacccagaccagtgggatgctacttgcttgtattgctcgttgttcagcggggtagctgatggcctcgagctaaagtactactctcgccgttcgaccgacagtgctggaggtgtgattgcctcgctagttggtgagggcaatccccggctcaacagcatggtcaatctagctaacgtgctcaacatagagttggaccacacccttgacgagttgggcaaggttcgggcagaggttgcggaattgcgtgttgagtgcgcaacacgccactatctggatggtggttctcccgcccctgtcgggattcaacaccctcaccgttcaccgccccgtggtcgcttcgactatggtaccccagactgtaggaagaacccatga

SEQ ID NO: 19623 - DNA, 252 bp, Zea mays
  Peptide Sequence Number=SeqID_62998
atgcagtcacaaaagaatgtgttgctccagtatcaaataaggcattcgcagaatggtattgatttcctccttgctggttgttctaacggtattgctgctgctgaggaaactgcctctggtactggtgctgctggttctgacgctgatgctggtgctggtgctgtgtgcaactcacgctccacggcacttgaggcatctggacttgcacctgaggctgaggcggtggtggttgctgttgcacctgctgcatag

SEQ ID NO: 19624 - DNA, 642 bp, Zea mays
  Peptide Sequence Number=SeqID_62999
atggagcgacccgaggccggcgatgtagggggcccttccatgggcgagctcgctgctgatcgcagcaggggcgatggggagatgcgtgccaaggctggtggtggcagtggtggtgttgtccatggcggccagcatggccgtagtggtggtggtggatgcgtccatcggggcgacggttggagggagccacagcagagggcgtcgggtcagggtggggcgcagctctgctggcctccagggggtgtcgacgacctgagacgggtcggggtggggtgcggcatcgatgaccagagtcaggtcggggtggggcgcggtcgacgtgggcgctgggctcggtcctggcggcgacttctggcgcggcttggacgggcggcctgcagggcgccggggttgggcgctgggcgcgacgagcacgcaggggcgggtgcgggagctcctggcggcgcacctgggagggaagccggtggatggcggccggcggcgggagggagagggatgtctgaaaacaggcgcaaaggtgcgaggcgtgctcaacctgaacagcagacaccccaagaggaggcagccccgcagcagcatttgccactgccaccaccgatgaccattgagcaaatgttcttgatgcagacccaagcagtctaa

SEQ ID NO: 19625 - DNA, 345 bp, Zea mays
  Peptide Sequence Number=SeqID_63000
atggcggggcaaacccaggtgttcctcttctgccgcggggagatgtcgtcgtcgagttcgcctccgctgggcgagccgacaaccgtcgttgttgtcgtgctacggggagaggagtaccatgtcgtagccgccgtcgtgggacatgaactcgagtctcttgaagcggagcaccgtcccgggctgaagaggttgctgaagactacccatctagaactcaacgggaaagtatttgtcaacacgcagcaggcccctacctggcgcgccaactgtcggtgtttcggacccgcgaggaccctcaaccgaccagtgaagttgatgatgtgtgtccctgcccagatgggttga

SEQ ID NO: 19626 - DNA, 201 bp, Zea mays
  Peptide Sequence Number=SeqID_63001
atggagcggcgcggcgtcctcgacgtcgacgcgatggagcgggcggccctagtggcgtcactgctaggtgggcgtctcgcaggcgacagtggagactggagagtatggaggtggactctgtggaccaggcccaagcggcacgggcttggaagatggaggatgcaaagattcttcggagaaactttattatcgaactgttaa

SEQ ID NO: 19627 - DNA, 642 bp, Zea mays
  Peptide Sequence Number=SeqID_63002
atggtgggcgccctcgggcggctctggcgggtcgcggggaggtcgccggagctgcgggcgagctcgggagagttaggcgcgtgctcgagtgggtttgacttcgggttggcaagttacgaggaggtgacgttgggagggaggcaaacaaggccattgctgatgcgcaggctgcgcaagccgaggccaaggttgcgtggggcggagggcagtctcgcccgccaacttgccgaggagctgcatgcgaggctcgacgccctgcgcagccgcgtggacaaagcggagacctcgatgcgtgcggaggttgggctgacgcatgcgcagttcgtggatgcgtaccgagagctgggtgcgcggactgctgccttcgaggcgcccagccaagaggcgggcctccgcttccttgaatggatgcaggaagagttgggggtgctcccaacgaccgtgacaggtctcatgtcatttgcctccctcgtcacctgcgagggggccgtgaatgctttgtcccgcaaggggtgcaggcattacgaggtcttcgaccagtcgaacaaaaactttgaacgtgaaatcttcaaggtcgaggaccctgtgctgaagcagtcggtaggggcgctcttcgatcggatgtggggcccgcacggctga

SEQ ID NO: 19628 - DNA, 885 bp, Zea mays
  Peptide Sequence Number=SeqID_63003
atggggatgtgcgcagccctcgggggagggatgtcttcgcccgagctccgggagtctttggcgcaaatgctgaaggttaccgggggtcgatggccaaagaatgttccgatcccccgcgcggctggcgaagacttttttacgtctcgtatggctcgcgacttgaagatttttccttacaggcggaatattgctgctgttgtatcggcagtgatggagaaggatcgtcaagacgctgctcagaagcgtcgggcggtcgtcaggctcggggatcctttccgcgaggcaaagaaggcacggggagccgcgaagtctgccgccccgggcagtagtaagccattgccggctgcgaagccggctgccctcgggcccagcaaggcttcggctggtgcgaaggctgctgcttctggcgcgagcaagccaccctcaggcgggcccgtgaagggacgaaggcttccttcgccggcgcgaacggacggggcaacgacgcgtgttgccgactttgacatagacatctgtgtcggggattattttcttgggtgcgggtctcatgggtttatgtgtcaggcggccgacttcgccgaccacgtcgcgtcgggtggcttgacggtagagtttgttgccgaggttgagagtctccaggcgcagcatgcggaagctatgtgggagaagtcggctgcggaaagcaaaagtcgcaggctgtcggagaaggtagccgccatggaggccgagagggtggatctccggtgccagctggcggaggagaggaggcagatcctcgatgacaggttctggtgctggatcctgggctacctcctgagcaactccttgctccggcacgtggatgtactctccgtcagcgaggttgcaatctatcaaatgcaatga

SEQ ID NO: 19629 - DNA, 711 bp, Zea mays
  Peptide Sequence Number=SeqID_63004
atggacggacttgcacgagagggttttccccgtattttgtgggaggtacttcaaggagccggttacatgacgcctccccagtacgcggtgcggctgttcaagaagcaccgagtgccccgctgtagggtgaggatgaccctagagtctcatcccttacagccaggctggcgttcgttggactccgagtctttcggataccgggctgaggatactatagaggcgattgctctccacgggctgaccaccttctgtgggctgactgctcacttgacagtgcgatgcatggatgctctgtatcgtctgcaggtgaggcgaggagaggcaatgtctcatctgatggcattgttggaggctaccaagattaccttggataacagagaggaacttgtggtagacctgtccactaagatggtggaaaaggacctacaggtggaacagatgtccaacgagatccaggagcttgaggagctagtgggaaccagggagaacaccattgaggttctcgaggatcaactaatcaacactcagcagcaacttgcggaggctaaccaacatttggatatgcaccaccaggagatccatgacatggaggctaacgaggatgtcgacatcgagggaggagaggagccggagcctgcctccagcttggaaactgctggctcagggagaccaccttcccctgagtcgagtgttgcctcgtttgctcactag

SEQ ID NO: 19630 - DNA, 513 bp, Zea mays
  Peptide Sequence Number=SeqID_63005
atgatgaatcccaatggagataaagtggatgatgccaacaacaagtatccaacctcaatagtggtgaaaaggaaggatgagtcacatggatatctgctgaatggaatgaagaacaataagaggaccaggagaatgtttgggtacaatattaaaccacctcagccgcaagcaaaatcctcgaaattcacgaatacccaaatgggagaatcaaatcaagatcagttattcaacatgcagacaaccgaccaaccatcatctgctggcaatcaagtaaggccgactcgtagagaggctaaagaaagaggtgcttgtttctactacaaggaagaaggacatttcattcaccaatgccccaataagcttctagagtggctcgagaagaaggtctcaaagcagaactcaacagataataatcaagaagaaattgtcttcacccgctcaaagtacaaagtaattcaaacaagcaatgagggcgacaggttgctggacataagcgtcgagccgagagagtga

SEQ ID NO: 19631 - DNA, 594 bp, Zea mays
  Peptide Sequence Number=SeqID_63006
atggataggaactatgaacgaacgatgaacgatcgaatgatcgaacgaacaaacgatcagaatttcagcagcataacgacagtatttcttagaaagaaaatacttggagatatgttggtggaatatctgggcaatatttctggaaagaaattgaaggggattactcgagaaatatctggacaagatcgggaaaggagatatttcgaaagagtccttctcagcaaaggaaacgggccccgagccctcctactgatcaggggttcaaaggttgtgccctgcggggttcggcaaccgccccagagcactcgggcttcaagccctctactaatcaggggttcgaagactggcccctcggagggattcgacagccgccctagagcatgcagagtcagggatgaccctgggtacgtccgttacatggccaaggctcgggctacgctcccaaggtaccctaagccatttctgagaccaacgggaacgatttgtaatggaatcccaccgaagggaggcaccgagccctcggaccctatcaaatgggtccgggtccagcgaatcacctacaggtacttttggagcgcgcctctgggccactag

SEQ ID NO: 19632 - DNA, 768 bp, Zea mays
  Peptide Sequence Number=SeqID_63007
atggtgacctccggcttgatggtgggggaaagcaagccgggctgcggcctctgcccctccctcagcctcaaggattttcatcaccagggctggggagaggactgcagcgtgcccggctttcggacccgagtggcttcggaaccgctcgcggcgccggcgtctgccacggcagctggaagaggttcttccaccggcgtgatagccaaggctggccacggaccgacctccaactctatggccttctccccgtccttgcctcacgagttttggcatgggcgggggcctcctggcagcagcatccgccctgaggtcagtgctgccgctgttcggccccccggagcagaagtcgtcgtcgtcgccactgctggagcaggtgacggcgcgccgttcgtcggtcttccgttgctccgcaggccttcccccatggagtggggttactcgcctgttgattatctgaaccgcttcaccaagcatgagtcgccccgtgtccaggtgacgagtgagccgggttttccgtcagcgggaccgatgccggagttgatcagccgaggcctcggaccgggctggcgcccttggaagatggttggccgaggcccctggggtaaccggtcgagtcgcctgctcgggccggattcccggagaagtccctggaccgcgtcaccgtccgaggctgggtcggaccttgctaaaggtatcgtcgatgccgagggtgctacagctcccttccagcgtgaagacctgagcctgcaggatcagattgtcttgtag

SEQ ID NO: 19633 - DNA, 654 bp, Zea mays
  Peptide Sequence Number=SeqID_63008
atggcgcttcctgttgacgtggcgggcccgccgcccgaggtcgggcgacgtgggggctcctcagaagccggggttgagtctgtcttccgtggccgaggccgagcccgagccctgggtcgggcgaggcggagtcattcggcagaggccggggcggagtccgagcccgggggtcgggcgaagcggagtttgtcgtgttctggggttgatcctgagtccgagcactgggtcggacggagcggagatcgttgtcatctggggtttagcccgactccgagccctgggtcgcgcggagcggagttcgccgtctttctggggctgagcacgagtccgagccttgcctcccccgcgacacccccttcgttgtcttccggggccgagcccgagttcgagccctgggtcgggcggagtgagtcgtcgtctcccgggcttagcccgagtccgagccctgggtcgggcggagcggagttcgccgtcttccggggcttagcccgagtccgagccctgggtcgggcggagcggagttcgccgtcttctggggctgagcccgagtccgagccctgggtcgggcggagcggagttcgccgtcttccggggcttagcccgagtccgagccctgggtcgggcggagcggagttcgccgtcttctggggctga

SEQ ID NO: 19634 - DNA, 546 bp, Zea mays
  Peptide Sequence Number=SeqID_63009
atggaaaaagatccagccgccctctgctctgattttcttgccgccgttctgttgatcttttgggcgcgcggtgcttatctcccagcacgccgtgcccagcctcccttctccttccacgcaaccatccacgcgtggttgtcctcacgaacaccgtttcacactatcaccctatcttcaccgtccgtagtgtcatcgtcgggatgtcttagctgcaacacccgcgcccttgaccgtatccaaagctctatattggattcgtcagcgtgctactcgcccactggctccttgacgttctcgattccgtcgtcattccgtgcgtcgtcaaaaaatcccaagagtcgggtgaagacggagccaacagcatggtgttcaccaaatgcccgacaaaaagctcgaaccagtcgtcaattatctcgacaacaaccacatccaagactccagcgttccaataattttgtctcatcgcccttcaaatccgagtcctcgtccgtaggatcgtcgttgaccttgcaacttcagctcgagttaattatgagattaagttga

SEQ ID NO: 19635 - DNA, 546 bp, Zea mays
  Peptide Sequence Number=SeqID_63010
atggaaaaagatccagccgccctctgctctgattttcttgccgccgttctgttgatcttttgggcgcgcggtgcttatctcccagcacgccgtgcccagcctcccttctccttccacgcaaccatccacacgtggttgtcctcacgaacaccgtttcacactatcaccctatcttcatcgtccgtagtatcgtcgtcgggatgtcttagctgcaacacccgcgcccttgaccgtatccaaagctctatattggattcgtcagcgtgctactcgcccactggctccttgacgttctcgattccgtcgtcattccgtgcgtcgtcaagaaatcccaagagtcgtgtgaagacggagccaacagcatggtgttcaccaagtgcccgacaaaaagctcgaactggtcgtcaattatctcgacaacaaccacatccaagactccaccgttccaataattttgtctcatcgcccttcaaatccgagtcctcgtccgtaggatcgtcgttgaccttgcaacttcagctcgagttaattatgagattaagttga

SEQ ID NO: 19636 - DNA, 843 bp, Zea mays
  Peptide Sequence Number=SeqID_63011
atgacttctcacggatcctcggaaggagggaacgcacattcccacacggacggacttgcacacgagggttttccccgtatcttgtgggaggtacttcagggagcaggttacacgatgcctccccagtacacggtgcagctgttcgagaagcaccgggtgccctgctgtaggccaggctggcgttcgttggactccaagtctttcggataccgggctgaggatactatcgaggccattgctctccacgggttgaccaccttctgtggttttcaccccttggagttgtctactcatcccattggcttgttccccgctgaaaaggaggacaacccaatgtggaaagaccgagtggagcatgccaaggatatatgggttctttacccagggcagactgctcacttgacggtgcgatgcatggatgctctgtatcgtctgcaagtgatgcgaggagaggcaatgtctcatctaatggcattgttggaggctaccaagatcaccttggataacagagaggaacttgtggtagacatgtccactaagatggtggaaaagaacctacaggtggaacagatgtccaatgagatccaggagcttgaggagctagtggggaccagggagaacaccattgaggttctcgaggatcagctaatcaacactcagcagcaacttgcggaagccaaccaacatttggatatgcaccaccaggagatccaggacatggaggccaacgaggatgtcgacatcgagggaggagaggagccagagcctgcatccagcttggacactgctggctcagggagaccaccttcccccgagtcgagcgttgcctcgtttgctcactag

SEQ ID NO: 19637 - DNA, 387 bp, Zea mays
  Peptide Sequence Number=SeqID_63012
atgtcgaagaactgcttcctgttgtgtataaaccaacagtgggggaagcttgctagaagtatgggtcgatcttcatacgactacagggtttatacatccgcctcaaggagaacatttgagaacaagtccccaacaaaaagtattcatgttattgtggtcactaatggtgagcacattttaggcctgggatatctaggttgtcagattttactcatccaggataatatcctgattatgtgcttaaagagggtgaaggaggaacaattatttgccactcttggagcttctaggggttgtcgcgatgtctcctcccatgatgagcttgatgttgtctgtgttgacatcaccaacctctcttttgtgttagtgtcactgaaagtcgcctag

SEQ ID NO: 19638 - DNA, 606 bp, Zea mays
  Peptide Sequence Number=SeqID_63013
atggacgcgaccaggatctcgagctcgccgtcgatgacttcgatgaggaggagatcgacctcgagctacgctactcgttctagcgcaacagcaaggtacaatcctcccctccccgcccaaccgaccatttttaggtcgcaacggcaaaccttggtgctcctcacctatcgcagcctctttgacatcgccatgagacttcctgtcacgctgctccgagataggtgcacccgattttctaacaggaatgctatctatttatctatcagcattgcagaactaactctagattttaggaatgcttttgtttctcgtaaatctggttcctttgttcaagtcctgacaaagcaaagcactagcactggtctgtcatcatccaagcacgctatacaattactatttctggctctggttatctgtacacttatggttggaagctatcatcaaccttgtgcaactattcatgagtattttactctttgggaattgatacagagaactgttcctacaaacatggaatgtcagcaacagataattccaacagtgaaaatattccttctgggactggaaaggctatacttcgagtgcctgaggtttcagtgtgagtag

SEQ ID NO: 19639 - DNA, 519 bp, Zea mays
  Peptide Sequence Number=SeqID_63014
atggctttaaaggtgctaaaagaggacaagtatgattattgctctgaattttttgaacttgcagctgaattctcgagttcagataatggtgaagatggtgctactttactgatgtataaacattatgctgcaactgctattcccaaaggaatacattgcttgtctttgcgccttactgatgaatactcctcaaatgcccatgattgtgctaaagaaaaggatgtcatgcttctggttgatcttgaaaagaatatcattgcaggagcagacttgagtgatttagccgtggagcattccttctgtccatctaaagaaaatggtggtcaagacggtgctaaccttctcttgatttgcaactcatggctcatgagtgtcaatagtctgctcttggctaacgagaaggccactgctgttgatgatattggctacggtcatcttctcagattgggagacatagcttctaaaggtacccaaccaagttctcctgtaagccagcatcagtactgcccttcagattaa

SEQ ID NO: 19640 - DNA, 1203 bp, Zea mays
  Peptide Sequence Number=SeqID_63015
atgcccaccgccccttactttaaaagccgcccccttgtggcctcctttcccctccactcgcatcagagcggcgccggcctacaaccgttttcgtgctcacacacccaaaccttagtcgcgatcaggccccaaggactcgagatgaagtcgagggcacggtccaccgccggcgactccaggctctcggtgaggaagaccaaggcagagaaggacccaaacaagcccaagaggcctccgagcgcgttcttcgtcttcatggaggagttcaggaaggactacaaggagaagcaccccaatgtgaagcaagtctccgtgattggcaaggctggtggtgacaagtggaagtccctgtctgatgccgtgagtttgtttgttccccagtcccattttaaccgtttgagtccgcagttggttgcggagaaggctccctacgtgtctaaggcagagaagctcaaggctgagtacaccaagaagatcgacgcttacaacaacaagcagtctggagaccccacggcgtctggtgattccgacaagtccaagtccgaggtgaacgacgaggacgaggagatcgtacgctcaagtctcaacggctacacggctttacatgttgtgattcgtgagaaaggccgattgtcgctgaaaggaatgtcgccatctgcacgtttcgtgggcttcaccgcccttgcccgcgatgccaaaccgcctctgctcctcgttgcgcgttgccctcgtcgcgtgtttccacgtgatccccacccacaaactctcgtgcgatacccgcgcgcgtgctccgccggtagcaccgccccctgccttctcgcctacctccccaccctcatgctatcgctcctccccgctgtcgcctccgtctacaccaagcgcaacgctttcaccttcccacgcgtcctctccgtcgtgccccatgtttggcggaggctcgccgccaagttcctagccgccttcgcgctcgtcttcgcctaccacgccgctgccgtgctcgtcttcatcggcctcctcatcgctggattcaacgactccagcctctcgggcctgctccgccccaacgccccctccccggacgcctacctcccaaccctcgcccctgcccagtgcagcagccggcctgctccatgcgcctcatctgggggcctcccgagacgggcaagacgaagaccatcagcacgctcctatggtccatgctga

SEQ ID NO: 19641 - DNA, 171 bp, Zea mays
  Peptide Sequence Number=SeqID_63016
atggagaatgcagcacaccaaaggaggaaccaggggcggctagggtttagagggagggggctcggcctgttttctgagtacctctccataagaacctgttcgttgatagaccacctgggaaaacagtgcagccatgagggtggtatggaacgcccttggccaagtaattag

SEQ ID NO: 19642 - DNA, 579 bp, Zea mays
  Peptide Sequence Number=SeqID_63017
atggagcacgcggggcgtcatcattacttgtttaccggggcgagccagatgggacaccggtccgaacctgagtttgggcgaggtggcgatccctccgaggtcgaggttgagtccgagccctggggtcgggcgaggcggagtccgtcgtcttccggagccgaggccgagtccgatccctggagtcgggcgaggcggagttcgtcgtttcccggagccgaggccgagtccgagccctggggtcgggcgaggcggagttcgtcgtcttccggtgccgaggccgagtccgagccctggggtcgggcgaggcggagttcgtcgtttcccggagccaaggccgagttcgagccctggggtcaggcgaggcggagttcgtcgtcttccggtgctgaggccgagtccgagccctggggtcgggcgaggcggagttcgtcgtttcccggagccaaggtcgagtccgagccctggggtcgggcgaggcggagttcgtcgtcttccggtgccgaggccgagtccgagccctggggtcgggcgaggcagagttcgttgtcttccagagccgaggccgagtccgagccctag

SEQ ID NO: 19643 - DNA, 444 bp, Zea mays
  Peptide Sequence Number=SeqID_63018
atgggcaagagcaagaaaggcgtaagctcatcgcaccattccggtgacacgcggaagcgcgagccgactcctccctcggaggacttcaacgattctgagtactcggaggaggagttctcctccgagtctgaggggtcgccagtccacgcctctcccccggcgtcgtccgatgactcggacgattcccaggggatcgccgccgaggtgtggacatacatccgggccgtcgagcgctccgggctcaagggcttgaatgagtcggaggtctcctcagacgaggagaactcctctgactcgtccaaggaggggagcggtggtgacgacgacggcgagggcgacgacgatggtgacggcgacggcgacgacgacaagggcaacggcaagggcgacaacaagggcggcagcggcagcggtaaggccagtggcaaagcgccgctggcttag

SEQ ID NO: 19644 - DNA, 279 bp, Zea mays
  Peptide Sequence Number=SeqID_63019
atggagacagcagaaactgggatgtgccccggatctgcagagaacgtccatgtttcccagtttctccaacaaaggctggaacaagagacaagtcacctagagggagaatttgatgaatccactgtcggatcgatgcatcatcgggtggttcctgtaacaattgaggatcagctggcagaggacgtgccaaatggtactcaatttgacgaacttgttctcttgagttcccctgctttaaacaatggtaccattattgctttatttacagtaaattggtaa

SEQ ID NO: 19645 - DNA, 1224 bp, Zea mays
  Peptide Sequence Number=SeqID_63020
atggctatggctgttgccttacaagctgaaagaagtgtcattgaaaagaagaaacccgatatcaaacaaaggagggtggttgtcactggcatgggtgtagtgacaccattgggccatgatcccgacgtcttttacaacaatcttcttgatggtgttagcggaataagtgagatagagaggtttgactgttccaacttccccacgagaattgcaggagagataaaatccttttccactgatggttgggttgtacctaaacttgcaaagcggatggacaagtttatgctatatctgataactgctggaaagaaagcattagaaaatggtggactcactgaagaactgaggaacgagttggacaaaaccaggtgcggggtcctcattggttctgcaatgggcggcatgaagggatggatgggaccaaattattctatttccacagcctgtgctaccagtaacttctgtatccttaacgcagcaaaccacatcagaagaggcgaagctgacgttatgctctgcggtggttctgatgcacctcttatcccaatcggattgggaggttttgtggcctgcagagcactttcacagaggaacagtgacccaacgaaagcttctcgaccttgggacatgggccgtgatggttttgttatgggggaaggggctggtgtcctcgtattggaagaacttgagcacgccaaggaaagaggtgcaacaatatatgctgaatttcttggtggaagcttcacatgtgatgcttaccacatgactgagccacatcctgaaggaagagggattactctctgcatagaaaaggcactagctgatgcaggggtagcaagggaagaaatcaactacgtgaatgcccatgcaacttctacacaagcaggtgacctgaaggagtatgaggctattgtgcgctgttttcgccagaaccctcaactgagggtgaactcgaccaaatcaatgactgggcatcttataggagcagctggtggaatagaagcagttgcttctatacaagctataagaactggttgggtccatccaaatttgaatttagaaaatcctgaggacactgtggatgtgggcatcttggtaggatcacagaaggagagatgtgaggtgaaggtggcgttatccaactcattcggcttcggtgggcacaactcatcaattctctttgccccctttaaggaactgccatcttcctcatcgtccaaatag

SEQ ID NO: 19646 - DNA, 1296 bp, Zea mays
  Peptide Sequence Number=SeqID_63021
atgaccagcaataccataccacacgatcatcatcatcatcgtcaggagatggatcagctgcaagccctggctgtgaagccacaggtgaagaggcaggttaggaggaggaggacgcacacgagcaggccgtaccaagagaatctgctcaacatggcggaggcgcggcgggagatcgtcaccgccctcaagatccaccgggccagcagcaggaggcagcagcaacccaagtaccagcgtcatcaggagccgccgctgcgtcaaccaccgtttgcgcagctccagcaacagcaagaagagccgaagcacgtgcaagaggcgtttctggatccaagtcgaagccaaccggcggttgacgaagaagcatctctggcgcatacgacgatgagttacgcctccttcactaacaacccgttgcgcagctctccacctgcgcactggattgctgcccgtagctactgctcaccaccacccatccttcgtcttccttgtgatatcacgccacctgaactgccgcccactgccgccatggggggattggggttggacttggaccaataccaataccaataccaaggcggcttggagcgtttggttcgtagcctacctgcacagccgctaggactgaaccttagcttccaaggttttggtgtctctgtggacgatggtgccaaggaagatctccttgctcttccattgacccaaccgtcaccggctgcctcgtactcgtgctcacctccggcagtggagacggcgaccacccatgcctgtgccccgtcaccagcgctcagtgcaacggacgcagagaaccaggtgatcgatgcaccaccagcagcggcgttggtcccggccctggacggggagatggcgcagcaggcatcggtcggcggcgagatgcagggcgtggagtggagcgaggcggcggccgcggacgtggccgcgtgctggagcaagatcttcgagagcgtggagaacggccagggccagcacgcgccccgcccaaacgcggaggacgtggcggcggcggcggccggtttgccgatggagtggtggtggctgtgtggcgacgatgccggtgtcggcgagcaagcggggtcggtcacgggaggcaagccctcgccggatgttctggggaggagggtgcatgtcgacgacggcgacggcgactacagctgctgctacgactacgagggcggtcgcagaagcaacgacgacggcgacgaagtcaccttgccgtgcatggacgacatcggcgacgacactcaagggtgggatggggaatggttctcatgcccttga

SEQ ID NO: 19647 - DNA, 249 bp, Zea mays
  Peptide Sequence Number=SeqID_63022
atggggaagcctgtcccatcactcctcatgctcctcctctgccgagtgaccgcacttgtacccaccataaccggaatgggagaccacatctcaggtcgcgtgaggagggcaatctgcgggcaggttcactcaggtatccacacgttaatccttattccaatttcatctcgtagaccacgcatccccatggatccgtgtccacagaccaatcatcagtatgatatgaaagtgggtacaactaattcctaa

SEQ ID NO: 19648 - DNA, 666 bp, Zea mays
  Peptide Sequence Number=SeqID_63023
atgcctccacgctcacatgatcatgaggctaggagttctagtgctacccctgctgcccctccggctattgaccctgctattgcttcgattctccagtctctcactcagcagcaggctcacttggccgccgagcagtcccggttatccgagaggatgctctcgatgtttcagaccatgcaggacagacatgattctcttcagcagcagcttctccaggatcgggctgagagcagggcattcatggctcttatgctacaacattctggtgtctcggttcccccggttcagtctgcaccacctcctccgcttcaggctcctgttgtgccagcacttcagtcaggaccccctcttacttctgttggtccttcttcctctccgctccggccggtcaccctggttttcacgtcaccggttctcagctctgtctgccctcagccgccagtgccaccagcttctgctgttaccactactgctgtggcagtatctgtgaccacttcagttccggcagcttctgcagcgcggcctcagtccgagtcagtaccagctctagcttctacagcagatcctggatccgagactgactctgaccccctgccggcgttcgcactgctgcctcgaccgcgaccggatgcgcccccgccgcctcctcccgcctcagatgtgtag

SEQ ID NO: 19649 - DNA, 567 bp, Zea mays
  Peptide Sequence Number=SeqID_63024
atggcctcctcgccggcgctaccgctggtgctcctggccctgctgctggctcccaccggcctcgccgcgtccggctccggcggcggcggcggaggagagaagcgcacgcgcatccgggtgtacgtgcacgagcggttcaccggccgcaacgcgacggtggggtccgtggcgccgtccctgcgcggcggcaactcgacgttcggcgaggtgggcgtggtcgacgacgtgctgcgcgccgggccccgcgcgtcctcccaggaggtggggcggtaccagggcctgttcgccggcgcggacctcgcggacgacagcggcggcggcggcggctacttctcggccatcacgctcgtgttcgccgccggcgagcaccgcggcagcacgctgtccctgcagggccggtacagcttccccgccgacggcgccctcgagcgcgccgtcgtgggcggcaccggcggcttcaggatggcgcgcgggttctcgctgctccaggtcgccagcgccccgccggaggccgccgtcttccagcttgacctcgtcgtcttcacgccccgcggccaccgatactag

SEQ ID NO: 19650 - DNA, 420 bp, Zea mays
  Peptide Sequence Number=SeqID_63025
atggctagtgaggactcgaaagatatgctgaagaacgtggactggaagaccgtgggcggtgctgtgactactgaatctagccagccagttgtcaagaaacgccttccgaagaagatcagacaagtccctgagtgctattttctgcctcggcgatctttgccttctgcactggcaatctatggtgccgtgtgtgctgctggagttggtgcaggaatgctgatcgaggtgtggataaacaaaaagatcaaaggtgccttcgttggtgtttcactggaagggaatgtggtgacaactagaatggaaaccaatctccgcttctacggtgatgcataccagacggcaacccatatcctgtttgggagggtggagcggccccgagctgctcagcccttgtttgctagccgatttagggcttcttaa

SEQ ID NO: 19651 - DNA, 408 bp, Zea mays
  Peptide Sequence Number=SeqID_63026
atggctctggcgagccccgggcgacggcggtgggcaaagccgggcgcgggcggctcgaggcgcggcggcggcggcgcgctgtgcggggtcggggcaggtccgaattataatttaaatggggacgagggttcccgtcggggatttatccctgcagggaacgaggatgaggaagaaatttccaacgcaaacgttcgtggggattcctgcaaggaaatgttttcgacgcgggaacggaacgtggaatggctgcccatcctgctcaagggcatcctcatcggcaccgaggacggtggcgatatcacttcactgccactgccactgccagaagaatcagagtgcgcaaaaccgtctgccaggcgagacacttgccgaaacgaacagctattacaattcacaaaacaagcgtag

SEQ ID NO: 19652 - DNA, 1368 bp, Zea mays
  Peptide Sequence Number=SeqID_63027
atggaggataatctaccagttaatgtccgggaatatcaagaacttgctaagaaagcactaccaaagatgcactatgattatatcaacggaggagcagaagatgaatatacactgagggagaatattgcagcatatggaagaattctgtactgggaggtggccacagcaagagctgccgcagcatgtaacaccataatgatgctttccttctcatcaagctgcaggatcgaggaggttgcctccagttgcgacgctattcgcttttatcagttatatgtgtacaagagaagggatgtttcggcaacattggtacggcgggctgaaagtttaggattcagggcaattgttttgacagttgacacgcctgtgcttggcaggcgtgaagctgatatcagaaataagatgattgctccacctctgtcaaaccttgaaggtttaatgtcattagacgactttgacgatgctgaaggcggctccaagctggaacgattctcacgggagacgctggatccatcattgtcatggaagcatccacagtactgggcaagcatatgcaaggacgcatcaacatcgggcatcagggctgacgtggagtggctcaagtccatcaccagcctgccgattctgctcaagggcatcgtcaccgcggaagacgcgaggaaggccgtggaggcgggggcggccggcttgatcgtgtccaaccacggcgcccggcagctggactatgcgccggccaccatctcggcgctcgaagaggtggttaaggcggtggcgggggctgtgccggtgctggtggacggcggcgtccggcgcggcaccgacgtgttgaaggcgctggcgctcggcgccaaggcagtcatggtgggcaggccggtgttctttgggctggcggcgcgcggggaagccggcgcgaggcacgtgatcgagatgttgaacaaggagctggagttggccatggcgctctgcggctgccgtagcgtcgcggaggacgtggagtggctcaagccggccatcacctgcctgcgcgcggatcctgctcaaagggcatcgtcaccgccgatgccgataatgaactctaatgaccggcggccgcggcggtgggcagcgcggaaggtcgtggaggcgggggcgtccggcgtgatcgtgttcaaccacggcgtcctgcgcgcagtcagcggtggtggccaccgtaccagctcggccctcggcgaacaagtaactggctgccgcccggccgaccgcatttatcctcactacaggaaaacgcacagtttccgacggcctaaaccgtcggaagtaaatcctaaaccgtcagaagtaactacttccgacggcttaaggcgggtcccgtcggaagtaacgccgtag

SEQ ID NO: 19653 - DNA, 183 bp, Zea mays
  Peptide Sequence Number=SeqID_63028
atgaagaaggagatgatgatgaagatgatcagccctccacatcatcctccagagatgaagatacaacccaactgtggaccccaatgctcgggaacaggtgagaggcacaatgcacaacaaaatgttgggttgagtactttagcatctcgtcgagcatgtcttgtccacgcagtccagctatag

SEQ ID NO: 19654 - DNA, 93 bp, Zea mays
  Peptide Sequence Number=SeqID_63029
atggataacatggggtatccgaagcttgaacttggcatgtccgcgatgaccaaggatcaacttgcagatagcctagcctacaacagcttgaag

SEQ ID NO: 19655 - DNA, 798 bp, Zea mays
  Peptide Sequence Number=SeqID_63030
atggccaaacgggccggcccggcccggcccggcccgggcccggtgaagcccggccaaaaccgggccgggcctgctgagccagcgggcttaagtttctgtccaagcccggcccgcagcgggcctaaacgggccgggccggcccgtttagcacgaaaaaacgggccgaaaagcgggctaaacggaccgatgcggatccgagtgagcaccaacaaggagcaggcacaggtgaggtcgcaaggtaggataaatgggaaggaggcgacgcactctggcgaattggcggcgggaggagacaacgccgagggagatcgacagccgacgttgaggagcgctagggaggcacggcgatttggcagacggggaggaaactgtggccatggcgaggggccaaggatcaagctgctgggcgtggccgagcaggggaggatggggttcgacggcgcccgcggccggagcgagctggaggacagcgagcagggccttgagctcgacacggccagcagcaccgagcgattctccacaccagtgcgcgaaccaggggacgacacaggaagtcgccgccacgccacaggtaagtcgacgtcggatgctgcatcagctagagacggcgataggagaagacgagctgcaggacggcggcactcggcgaactccacggtggacgccatgtgcatgagcaggggtggcgagttgggggtcacggcgaccggagatggggaagagacgaggacgacctcggatccggctagcagagcacgcggtcgtcggcaacaggggaggtggaggcgagctgggtga

SEQ ID NO: 19656 - DNA, 158 bp, Zea mays
  Peptide Sequence Number=SeqID_63031
atggcggccacggcgcccgcgcccggccccgcgcgtattcgtcccgtcacccggcgactcagcctcagaccaactggccatggagcaacatggagagacagcgccgacaccgcccccgaccacggcgtgacactccagacctatcccctccatgagct

SEQ ID NO: 19657 - DNA, 306 bp, Zea mays
  Peptide Sequence Number=SeqID_63032
atggcgttgcccggcctcggcggccccggcgcggcgcacccgccttacccggccattgcgcgcggctcggcccccgtcccggcgcggcacgatcacccgcccgacatggctccccgacctcagcgccccgcggcgcgctcacccgccccggcgtgcgcggtcccggccccctccctacgtagcccggatggcgcggcgtggcacgcccaccccttgctcgcggcgccctgcatgcacacgcccgcctcggcgtgccctgcccctgtccagcgcggctgcggcatgtccgccccggcgcgaccttga

SEQ ID NO: 19658 - DNA, 453 bp, Zea mays
  Peptide Sequence Number=SeqID_63033
atgggcaagaacaacaaacgcaagcgtgagccgactcctccatcagaggactttggcgactcggaatactcagaggagttctcctctgagtccgaggggtctctggctcccgtctttcccccagcgttgtccgatgactcgaacgactctcaggggattgtcgcggaggtctggacttacatccgagccgtcgagcgctccgggctcgagggctcggatgagtcggagtactcctcggacgagaaggactcgtccgaggagggcggcgagggtgacgacgacgacgacggaggcgacggcagcgacgatgatggcggcggcagcaagggcggcaacggcggcggcaggagcagcaggggtggcaacggcggcggcaggagcggcgacagcggcagcagcaggggcagcggcggcggcggcagcagcaagggcagcaacaaggccagtggctaa

SEQ ID NO: 19659 - DNA, 282 bp, Zea mays
  Peptide Sequence Number=SeqID_63034
atggacaatgtttacaggtcttttatccttccagtggacccgggggatatctgtcccccacagctacgtagtgagaccctgcgtactcaccttgggagtgttcaagggtccgtacaacccgaggcaaaaagggaatcacggctcatgggtaaagtggcaatgggactgatggttcttggttctgactctggtaatggttgtccgcattgcaaccactgctcaggagaagatgaagccgtggaaggagacttccaggagttccaagactacgacgagttctag

SEQ ID NO: 19660 - DNA, 390 bp, Zea mays
  Peptide Sequence Number=SeqID_63035
atggaggagagtagggcgtcggcggccatgggaggagctcctgccgggcgccatggaaaagcagggggcatgggcgccatggctgctggtggctccctgctgctgccgtgggaagcagggctccctgccctggcgtgcgtgcaggaggaagaggagcatgggcgccgcgtttggaacctgcgccaaggagagagaggctggaaaaaatctgggcgccatgggtggaggaagctccctgcgctggctgctgctgccgtgagcagcgaggaagaaggcagggagtatggctggtggcggctagggaaaaatggagggtgggagtgcaaaattgccaatttgcaagggagagaggtgctatttatagaaggggcactagggttagggttttaa

SEQ ID NO: 19661 - DNA, 372 bp, Zea mays
  Peptide Sequence Number=SeqID_63036
atggaggccaagtcacaccagcaaccaatcatcctaaggagtacctgcaaaaattatgccacaagcaaggctgagtatactaatactcatctagacttacccggtcagcatggatcaagcagtctcattagctgcgagaagcagacgattcgaatcgagtttttaaaccttgcaaggattcagctgttagcaaggtcaaaaagtgcaattacagcaggactgtccagatttggacagattctgacttgcaacttcaaaaattcacaactgaagattcaggcatccaaacaaggtgatcctagactttctggaaagatcaccaaaaatagtgatccaagactttttggaaagcttagaaaaagccctacataa

SEQ ID NO: 19662 - DNA, 435 bp, Zea mays
  Peptide Sequence Number=SeqID_63037
atggcacgtcggcgctgcgcagattcggcgaagcgagacacggagacagccgaaccgcgcagatcaacggcgcagcatgggggctgctgcggtggaccggcaccgctgcgcagatcgggtcgacgctggcgacacggacgagatctcatggctgctgctgcagcgtgcagcttgctgcgcaggtcggcgatggagctcgctgcgcgacgagggagcgaggtagtggcagggacgacgagctcgctcggtgaagaggagcaggggctggcggaccatggacaggggagggggctgctgctcggcgtcatggacatggacctcgccgaggtcggcccaaggagctcatgtgcgaccaagggggaaaaacaggggcgagggaacactgtgcaggggcgccgtgaccgctggccggagatggagttcggtctgcaatag

SEQ ID NO: 19663 - DNA, 299 bp, Zea mays
  Peptide Sequence Number=SeqID_63038
cagttgcaatcacacctaatgcgagggacatggaggcgcgctgacagcgcgcgacggcgcggggacagggaggcacgcgacggcacggggacatggaggcgctcggcggcggtggggaagagggtggcgctcggcggcggtgggggagagggtggcactcggtggcggtgggggagagggtggcgcggggacagggaggcgcgcggcggcggggggcaggaaggcacgcatacaggaggccgaggcgtgctcgaggtgttattgcaggtgggtgcattcaatatagagaatgcacccag

SEQ ID NO: 19664 - DNA, 369 bp, Zea mays
  Peptide Sequence Number=SeqID_63039
atggagaggctgctggaatttctggacgcctgcttgggggctcggctgggggatttttctgggcgccatggcaagcttcgagtaggggaagagcaggcgctgtgcgagggggagcaggcacctgaacgagcagccatggggcaccaaggaaaggggagcgccagccatggagatgctcggccatggggaagaagggcctcgctgtcctctgctggccgtcgagcaaggagcagggagctcgcaccaagaggagaacagggagggcgctcggctgcttgccatggacaacagagagagggaggaagagatgggcgccatggtggccgaggggaggagctgagctccctgcgctggctgctgctgtcgtga

SEQ ID NO: 19665 - DNA, 147 bp, Zea mays
  Peptide Sequence Number=SeqID_63040
atgaggatggccaaattggggctgggtaaagcttcacgggttcaccagggtctatggacacattttggtttgggcagaacaaggcccaaggagtgggtcgacggggcaataggagatcaaatacaatcgagaacaaggagcaattag

SEQ ID NO: 19666 - DNA, 726 bp, Zea mays
  Peptide Sequence Number=SeqID_63041
atggagcttggcggagggacagctgtcggagcggtcgagtccttgctgacgtcctctttgcttccctcctccgaagccgaggtcgagtccgagcccccaggttgggcgaggcggagattgtcgtcttctggggccgagcctaagtccgagccctgggtcgggcgatgcggagatcgtcgtcttctggggccgagcccaagtccgagccctgggtcgggcgaggcggagatcgttgtcttcctggggccgagcccaagtccgagccctgggtcgggcggagttcgccgtcttccgggacttagcccgagtccgagccctgggtcgggcggagttcgccgtcttccaggacttagcccgagtccgagccctgggtcgggcggagttcgccgtcttctgggacttagcccaagtccgagccctaggtcgggcggagttcgccgtcttccggggcttagcccgagtccgagccctggatcgggcggagttcgccgtcttccgggacttagcccgagtccgagccctgggtcgggcggagcggagcttcccatgatgcctccggcagagcctgactgcctgtcagtcttactctgtccagtggcgccgcagtcggtgtggcgtaggcggcgctgtccttctgtcaggccgcttcgtgctgatgggggttaccagctgagaattaggagccttgagggtacccctaattatggtccccgacaaaaatattaa

SEQ ID NO: 19667 - DNA, 408 bp, Zea mays
  Peptide Sequence Number=SeqID_63042
atggccgacacggagcaggcgctccacaaggccgcgggcatggccgcgcgctgcttccagagccactcacgcctccgccgcttcttcacgctcaacccagtgtccgggctcccgcgcaccctcaccctgctcaacaccgcgctcgaggacatcgcctggatcatccgcgtctcgtccccacaggacaacgacggcgacggcgacctgcgggggctccccaacatcgcgcagaacgagcccgtgctcggcatggtctgggacaacatcgcgtgcctccacaccgacggtccagacgcagcacgttctctgcccaaaattcgcctgcaaccccgagcgacgacgatgggggaggggtcgaaggcgatactggccaagcccatccagctcgtgaacaacatgaatccttga

SEQ ID NO: 19668 - DNA, 363 bp, Zea mays
  Peptide Sequence Number=SeqID_63043
atgggcgagatcgtgctccgcggcggctgcgtccatgctcagctacctggacgacgacaaggccaccaaggcgacaacgggtggttctacacgggggacgtcggcgtgatgcatcctgacgggtacatggagatctgcgaccggtccaaggacgtgatcatcaatggtggggagaacatcagcagcgtggaggtggagtccgtgctatacagccacccggcggtgaacgaggccgcgatggtggcacggccggacgatttctggggagagacgttgtgcgcattcatgagcctcaaggaggagggatcgacgactgccgatgtcatcacgatatggtttaatattgaaaggatatggttctag

SEQ ID NO: 19669 - DNA, 458 bp, Zea mays
  Peptide Sequence Number=SeqID_63044
atgtccacctcgaccatgccaggcgtgcgcatgccttgcctcgccttgagccgcgcgcgctctgacgcggcgagcttgttccactcccccttccacgcgcagcagaccaccagcctcgccgtctcggtcagcccgtacccgtggctgacctcgaacccgatggactccgtgcggtgcagcacggcagccggcggtggcgcgccggcagttaggatgcgcaccctcgccctgctcgacatcgcgctcgaggacatcgcctggctcatccgcgtctcgtccctgcaggacaacgacggcgacggcaacctgcgggggctccccaacatcgcccagaacgagcccgtgcttggcatggtctgggacaacatcgcgcgcctccacaccggcggcctcgctgcgcgggacgacgcggccgccaccctcgcctccctccccgtgggcaactcctacttcgccaa

SEQ ID NO: 19670 - DNA, 198 bp, Zea mays
  Peptide Sequence Number=SeqID_63045
atggcggataatcctgttgaacacagccgcactaagcacatagacatccggcatcacttcctgagagaccaccgaaaaatagaaatgatatcaagttacaaatgtaccttcggcttcaaagaagaaacattgttaaatcatgtttttgaggaccttcggaagacgaaggcccccaacagtagcccctcgcaaggttaa

SEQ ID NO: 19671 - DNA, 270 bp, Zea mays
  Peptide Sequence Number=SeqID_63046
atggtctcccattccggttatggtgggtacaagtgcggtcactgcacgacggcagtcggggtcagtgaggcattgtacgccaaggcggtgagccctgatctgttgacggggaatcgatggggacgattgatgtgtgtggggacggagtgcctcgccacgtcatgttctttggaggacatggttgctggagtgacttggccgtccatcttgccaccaggttggacagtcgagtgggatcctgcctcggctgaggaggagcatgaggagtga

SEQ ID NO: 19672 - DNA, 97 bp, Zea mays
  Peptide Sequence Number=SeqID_63047
atggcagagctagctccacgtgtcgacgtggtgacactcgggcccgtcaagcacgccggcgcgaccccggcgccgcggcgccgtgacacccccgcag

SEQ ID NO: 19673 - DNA, 441 bp, Zea mays
  Peptide Sequence Number=SeqID_63048
atggcggtggcaggcgggcgggcgcagcagtcacgtcgtcagccaggctcacgtctcatcctggggcagcgagagggcctcctcccacggcgtgaagacgccaccccgccaaccactcgccccgtcgcattaactccgcggcgggacacgcggcgcctctggtgggagaagcgcgcgacgcttcaccttcgccgtaataaccgcgtcaaaaagagggaccgagaaaggggaataccccgaaaaggatccttttctgcgaaggaaccgggctccgagccccccctactgatcaggggttcgaagactggccccccgaagggttcaacagtcgcctcagatcgcgtgggcccgacacccactactggtcaggggttcgaaggccagccccccgaagggctccatggccgcctcaggctactcgggctccgcgcccattactga

SEQ ID NO: 19674 - DNA, 582 bp, Zea mays
  Peptide Sequence Number=SeqID_63049
atgcacccgagcaaagctatgagtacaaacttgttgttggttggaaaatctcttggtaaactttcattgacatgccagttgcattttgacagtgttctaactggtaaaggttttctgtgcagacagaaagatttcaacaatgctgtgtttgatgagcgcactgtgatactctgtgaccaatgtgagaaagagtatcatgtaggatgcttgcagagtcaatggcaagtagaactaaaggaattgcccgaggaggagtggttctgttgcagtagttgctctgagacacgatcatcattggacaagataatctccgatggagctcaactgttggcggacccagatcttgaaatcataaagaagaaacatgagacacgaggtttatgcatggacaccagtaaagatctcaaatggcaattactttctggtaaaagggctactgaagacggaagcatattgctctctgctgcagtgccaatttttcatagggccaaggtctccctggatcagtctttgctagccataacacctcattctgagagcccaagagaggtccctgagattggagatgccaagtccgcctaa

SEQ ID NO: 19675 - DNA, 1335 bp, Zea mays
  Peptide Sequence Number=SeqID_63050
atggcggcggcacttcagccacagcgcctcttctcgacggcctccacctccacctccgcctcctcttcctcgtcgttcgccacgcggccgcgccgtccgaccaccgccgccgccacctgccgcgccggcctgcgcgttccgtcgggcgtccagacgacaacaacagccgcgtcgccgtcctccagcccggcggcggacgccggcctcgggggaatcaagctcgactggatcgacgtgaccgcccttagcgtcggctctccgtctccagcgggccgcagcaacgcggccgagaagctccgcgcggtggcggaggccgcggcggaccgcgccgagatgcacgacatcatcgggcggcagcgggacaactggaaccacctgctgctccactccaccaattccctggcgctggcggcgtccgtgatggccgcgctggcgccggccgcgcccgcgcccgcgctcagggcctccgcgggggcgctcctggccacggccgcggtcaccatggccgccgccaaccggctgcagccgtcgcagctcgccgaggagcagcgcaacgccacgcgcctctggaggcagctggagcgcgacgtccgcgccacgctgcagcagcatcgggaggagggcgaggcgcagctggcccaggccgacgtgcaggacgccgtggacagggtgctcgcgctcgacgccgcctacccgctgccgctgctcccggggatgctggagaagttccccaaggcggtggagcccgcgcggtggtggccgcgccgccgcccgcagcagcaggccaagagcgccagcagctcccggtccaggagcttcgggcgccgcggcggcaatgggtggggccaggaagtggaggaggagatgcgcggcctgctgcgcgtgctgcgggccaaggacgagcaggagtacctgagggtggggaagctggtgctgggcgtcaaccgcggcctggccgtggcggggcccgcgctggccggcgccgcggcggtggccacggccttcatcggcggggacgcggcctgggcgtccggcgccgccgtgacgtgcggcgcgctggcggccgcggtcaacacggtggagcacggcgcgcagctgggcatgctgttcgagctgctgcgcaactgcgccggcttctaccgcaagctgcaggaggacatcgaggcggcgctgggcgagcccgacgtggagcgccgggagaacggggacgtgttccggaccaaggtggcgctgctgctgggccgcgacgcgtcggagctccgccagttcaggcggatggcgtccgtgtccgtcaaggacgacgacatcaaggactacgccgggaagctcttctga

SEQ ID NO: 19676 - DNA, 792 bp, Zea mays
  Peptide Sequence Number=SeqID_63051
atggagtcctggttgcctgctcagagggtccctacagcggcagctctcttcagtaccaggactcaggagttcttcttccgggcacagctatcagctcagattgccttgcgagcgcaccgacttttggatatacttgcttttctgctagcagccggtgccgattcagaggttcatctcccttatctgccaggactgctctctttgttgaccgcaagtggcaaatatattgaggagtgggtcagagtgttatatgctacactatggattgaccctgattgtgagtggatgcgattttgcttcgagagagaggatgtcactttgcatgccagccagatatgccagctctttggatttctgaagtcatcgactcggctccacaatttgtgctatggtacctcagatcctcctcatcgccctcatggtggagttgcacctactacagctcacgtcgcggccctgttcagacctcctttcacagatgggtcgcgacgatctcctgctgacttcactcctacagcgaagtacctatatgagctgatgagacggacactgctacccaggatgggatatagagaggccactactcatattctactatggctacttggtgccttggtctcacattcagagtttgatgtggttgacttccttatttgtgagatcgaggatacaatattggatggtccccatgctcgccgtcagctaccatatgcgcattatctctttcacatcttcgcgcagctgatcaggcctcctcagttccaaggcaccctcgaggcctctctcctctag

SEQ ID NO: 19677 - DNA, 681 bp, Zea mays
  Peptide Sequence Number=SeqID_63052
atggccatgatgggttcaacatcggaaaagatgtacctctgccaggaagatagcagcagcgacagcaattatcccattggtgatctagaagcccaggtggagcagcttcgtgcggagttacgtcatagaaacagtatgtgggtcgaggatggtcagcgcataaacgagttaagaactgacatccgacatctgcaagaccaacttgctgaacgagatttagcactcgattgggctgttaactcacgttcacttgcttgggccaaggaagccaaagctcgatcccgtgtggaggagcttagcatagccgtggacaacttgcagatgctgtccaggacttgtggacaggatagtgcgggaacctgtcgtggaagggagactactcctaatccgccaccagtacccccaaccttggttgaggctatcgttgccttagtcaatgcaacagccgacaacacccgcttccttcgcgaaatggcgggacatcaatatcagcaacaaggcgagcgagcttatccacaaataccccgcgaaacttcatatttggatttctcggaaacacgtcccccactattcgtcaaggctgaagatccccttgaagctgacgaatggatctgggttattgagcagaagtttggacttctccgatgcatagagactcagaagccattatttgcggcgtag

SEQ ID NO: 19678 - DNA, 390 bp, Zea mays
  Peptide Sequence Number=SeqID_63053
atgactactactttccgaaagtaccaaggtacatcagaggcatctttcaacagaatgaatagacgagtttctagccttgttgatcggatggataggttaggcaacgacgacaaatttgttattgtagcagttgatgagaggctttacatggattgggaaatgactattgaacgaaaaaatagttctcatcttattcctcggcatcataggacccttggtcatggcgttgttgcaatccttgcggacattgtcgatgaagaggatgccatggatgccatacttgttggcattattgatctccttgggggcatcgcccttggtgatagcaaggttggcctagctgtaggcgacgtaatccaggggggtgctaggcagtttgtgagattgtag

SEQ ID NO: 19679 - DNA, 270 bp, Zea mays
  Peptide Sequence Number=SeqID_63054
atgctgctacaggggctcgggctcgcctcctctgcacattatgacaaccctgctggctaccttttgcaaaagcttgtgctcgtgcctgctgcctcctgccaaagctcacctaacgctatcatctcagtgagagaaaaggaggggtcaacgacggcagctgtggtaggagaggttgacgatggtggcggcgacgcgagtcagggggagggggagaccggatcacgagaaaagggagggataaagaatgattcaaataatattgtttattga

SEQ ID NO: 19680 - DNA, 408 bp, Zea mays
  Peptide Sequence Number=SeqID_63055
atggtcatcattataatggtgatgaatgggggtgtcgatgaggacctctcataccttggtaattacgatcaaggtgtcaacgtggtggtgaaaaacgcggaggcatacacctacgacgacgaggtgatcaagcacgccgaggccatcgggaagccaggcttggtggagatcaccgccaaggaggacagcttcgtcttcaccgtagaaacaaccggcgccatcacagcctacgagctgatcatgaacgccatcacggtgctgaggcagaagctggatgccgtccgccttcaggacgacgacggcgaccttggcgagctcggcgcccaccttgagttatttgcaggttccccaggccgggcccagattgatatgctgaatgcaaggcagcatttgatgaggtacatgtag

SEQ ID NO: 19681 - DNA, 426 bp, Zea mays
  Peptide Sequence Number=SeqID_63056
atgaggccgacttcgagcgaggcggagttctctcccgaggctggggttgtgcctagacgtcgcatgtcccttctggagttgttgagaacagtgaccgaagtggaggagcaaagctcggtattcgtattagtcgcatttaatgtgcacgtcttcgtggttcctgagaagtttgggcgaggccgggctcaaggctggccttcgtccgagatgccctcgggcgaggcggaaattgttttccataaaaaagggggtccctcgggcgagtcgaggatccacgcgggcacaggcttcttaacaggatcggggaaactatttttaattcggatgatctgcgagatcaacttcgcaaatgcatggtttcgagttgatagtaagcatacgtgcgaccactttgaggatgcatcgattaagaccataaaatactga

SEQ ID NO: 19682 - DNA, 1204 bp, Zea mays
  Peptide Sequence Number=SeqID_63057
atgaagatccttgaagttgagggcggggcagaggccgcagcccggctcgcttctccccaccatcaaactggtggtcaccgtcttggcgacaagacgaaagcaacgcgagcgctccccatccgagggctcggaaggtggaagggcgcgatgcatgaggagagtgcgaagacatggttgtcatccaagggggttgccctacttttaaagacgactctccccacttgcgtcctcagccgttgcggactgagtcttcaccaacacgctccaaggtcttccccctatgacacgggggctgggtcccacgcgtcataccagcgggtgaaagggcggaccgccatgcaggcggcatgcaactgcaccaagggggcgcaccctttcgacttcgacgcgtccagcgtggggggccaggcccacacgtcatgtaaccggcgcgccggttactacatgcgagaaactgcaccgccacttgcgccattactgcgccttctcgactgcggaaccagtgacgtgactcgaggtgaccctgcgcacgacccaacagtgtcaaccgagcacatcggtcatgggtcagtcagccgcgggagaaggcgcgacggtcgatatggccaaaagctggcccctcggaaggtttcgatagccgcctcagagcactcgggctccgcgcccaccattggtcagaggctggcccccgaagggttcgacagccgcctcagagcacgcagagcgagggatgactctgggtacgtccgatacatggtcgaggcttgggctacgctcccgagaggactccaacttcaactcgtcaccttcgggaaaatccagaggcgctccgctataattcaccggactgtccagtgtacaccggacagtgttcggtgctccaaggaagggcggcctcaggaactcgccagcttcgggaatctccaatggctagtccactataattcaccggacatgtccggtgtgcaccggactgtccggtgtgacaacgaagcaacggatatttcggcgccaacggctacctgcagcgcattgaatgcgcgccagcgcgcgcagaagtcaggcacgcccatactggcgcaccggacactctacactacatgtccggtgtgccaccggacatccaggcgggcccagaagtcagaactccaacggtcggaacccaacagcattggtgacgtggctggcgcaccggacatgtccg

SEQ ID NO: 19683 - DNA, 495 bp, Zea mays
  Peptide Sequence Number=SeqID_63058
atggaccacaaatcctttgataacacaagagataaccatggcatcattgtgtgggtaatccttgagatgaagatcctcttgggagaagctggttctgaggacgaaccacctgtgatcgggagcaccggcttcgggtccgaagcagctccagcttggtcattgaacgaagccatcagttcgagaagtggaagtgagttcaccggaggtgggcgccaatgttggggacttgttctcaaatgctctgccttaagaacaaggcaacatagagtgttaaatgttaaatgtccttcgtccaacgaagggttattcctttggggattaatggaccttggacgaagttatacctctgccttggcaaagattggtttccgaatgatgcgattgcagatacaggaatgcgtgaacagtaaaggaatattgttcactatttataggcacagggcgcagcctgtgagagattacaagtatgtcccttatgaaagtttacaacattga

SEQ ID NO: 19684 - DNA, 264 bp, Zea mays
  Peptide Sequence Number=SeqID_63059
atggagttcaaatcgtgctcactgctttggggagagagattagaggtcagaggggtcagagaccagctgaactgcccctcaggaccagttcaaccggtcttgaccactgagtttaggagagaaaaccccagctcaactgcccggaggcaagttcagctggtgtatggtcaaagaggttcacagctgaagttgagttcagctgaagttgaagaaagctcaactcagctgaagttcagctcaactgaaaagctcagctgcagctga

SEQ ID NO: 19685 - DNA, 531 bp, Zea mays
  Peptide Sequence Number=SeqID_63060
atgaggctttcacaaaatacacttaatacgaagcaacccgctaaggtttctaaagacgatggtggtggccccttgggtgagggagctcggcgagggagcggacggctgcaaaggggcagagacgcggcggtggagctcggctccagtgaagcgcggcagcgaacgtccggcggcttgggcgagctgcgcgggttcctgggcgccggtcggggcgcgcctgggcgcggcggcctagcggctgtcgggctggacggccagggagaccgaggggcgtcgataatggctattgaagatttggcacagggcctcaaatttctctggcccggccctgccggcggcgaccaggcaatagcgcgaggcggcgccgaacgcgaacgaattgtagtctcgtacaggaaacgaatggacagcctagcaaagaacgaagaacatctgataaagggccccacacgtcaaggagattggacatgggtagagatggcaacgggtacaaacccgctgggttttgccatcctaaacccgtacccgtga

SEQ ID NO: 19686 - DNA, 699 bp, Zea mays
  Peptide Sequence Number=SeqID_63061
atggaccgcccttccggcacatcgtaccagcgcttcccccgcgttcggatccgcgagctcaaggacgactacgccaagttcgaactccgcgacaccgacgctagcatggccaacgccctccgccgcgtcatgatcgccgaagtcccaactgtcgccatcgatctcgtagagatcgaggttaactcctccgtcctcaacgacgagttcatcgcccaccgtctggggctcatcccgctcacctccgccgccgccatgcaaatgcgcttctctcgggactgcgacgcttgcgacggcgacggctcctgcgagtactgctccgtcgagtttcacctctccgtgcacgccaccgactccgaccagacgctcgaggtcacatccaacgacctgagatccatggaccccaaggtctgcccagtcgaccaagcacgcgcctaccagcacgcgctcggaggcaccgacccctttggagccaatgcctcgaacgaaaacaggcaagtcatccatcatttagctagtcgcccaacctgcttgtggggcatacttattgtaaagctgcgtcgggggcaagaactaaggcttcgtgccatagctaggaaaggaattggcaaggaccatgccaaatggtcaccagctgctaccgtgactttcatgtatgagcctgacatacgtatcaatgaagaactaatggaaacattgacg

SEQ ID NO: 19687 - DNA, 222 bp, Zea mays
  Peptide Sequence Number=SeqID_63062
atggacgaaggccttaagccgaagattttcaagctctctgagtttcggtttaaaagacacgttttcaccatgtttggagaaaaaatgtccgaggaaaagaaggttattgcggagatgaagctgactgaagaggcgaagctatttgaggagaagaaggatgtagatccttatgttgctggatttgttgagtcgatggaaagtcatcaaagagaaaattactaa

SEQ ID NO: 19688 - DNA, 324 bp, Zea mays
  Peptide Sequence Number=SeqID_63063
atgaaggatgtcatcatcaaggcagagcaaaagcggaagagagaggctgaggctgagtcttcggtggcacaccagaagtgtcaccatgcgaggaataaagagaagagggttgtgtgcctcgcccgtgtggagcctaggcggccccatcccacccacagggactttgaggttagctcccaatgttcaagcccaaggtggggagctagccctcgaacccctgtcatgctcgcggagtcctccggggcgccgcctggagggcaccgaatcccggtgatgacaaggttggagcgacgctggtggcatcacgccctgaaagtcacctag

SEQ ID NO: 19689 - DNA, 240 bp, Zea mays
  Peptide Sequence Number=SeqID_63064
atgggaggaagaagcgggctcaacagacatgggggatcgatggtagggaggcttctaagcgaaggaggaggcgactacttgaacgcgagaatgcggtcgatggaaggaggtcctcccctcgaaaaggaccttgtaaggccttttgagggggaggtgtgccaatcaaggatcaattgctcaggggacaaccaacccagaggatcaccacccaagattgtgtccgactccgacgctcaatag

SEQ ID NO: 19690 - DNA, 381 bp, Zea mays
  Peptide Sequence Number=SeqID_63065
atggcatactgcccgttcatttgtcatacggggcgtacacccggtatggtgtatctactgtgcattatccggtatacgggtcattgtagaagctctgatgctgagaacccccatgaccagggtcgactggactctcgaggcagtgggggcgcacctaggacctcgaccgttgatgctaggttaccgttgctccgttggctcaccagacatgtccgttgcacatcggacagtccggtgaattatagcggagcgcgccttggagaaacccgagagtggctggtttgggtgctgcttggcgtggggcaccggacactatccggtgcgccacttggcagcacactctcaagtcttgctccaaatattgttgagtccccaacttaa

SEQ ID NO: 19691 - DNA, 132 bp, Zea mays
  Peptide Sequence Number=SeqID_63066
atggcctacgcctcaacgttcactgacgctagggccaactccgacgccgacgaagcgctggaaagagcctgtttcgtggcaatgccgccacgaaacgacaatggcaagggggacaacgagtcccccaactag

SEQ ID NO: 19692 - DNA, 423 bp, Zea mays
  Peptide Sequence Number=SeqID_63067
atgcatgaaaaatctgcaacaacattgtggaagaaattggaggagctgtatatgaccaagagtcttgcaaataagctacgtctcaaggagcgtctttacactattcgcatagattggttttctgattatgttcagtctcatgctggtgaggttgatattggagatggatccacatgtgagattattggaatcagctctatttatatccaagttcatgatggcagtattaagaagttttctgattttggtgactccgggagctcggttgagtggactgaagagtcgtcggataaggacttggactactttgcggccttggtgtggcagcggcggaggcttcgccgcatgctgcggatgctgaagctgtgcctggtccgagtgctgggcgtaggcggcaaagggcggttgcgaagcgtagagtga

SEQ ID NO: 19693 - DNA, 453 bp, Zea mays
  Peptide Sequence Number=SeqID_63068
atgtctcaggcgatggacaagctacctaaggcggtttactgcgacgtggtatcgcttctcagtacatggcgtctgggcgacaagcggcagactccagcgaggtcatctggaccggccgtaggggcaagtgggtacggtggcccagctcacgacctcatccgtggtcaagatcttttcatcgccggccgatatctgcacccagagcgcacgaatcgtgacgctggcgaggatcacggcgcggagttcaccggcggcacattcactgcatctgaatatcttttcattcactgtaccatgtggatcttcttcagtctgtctgacagagcatattcaggggtgtttttgtttaatttctatgtgaaaagctaccgaccggattacaacaaagttatttacctatatgccagctccaattcgaccataggaactttggccatttgctcactcgattaa

SEQ ID NO: 19694 - DNA, 312 bp, Zea mays
  Peptide Sequence Number=SeqID_63069
atgaaggttttgacccaccggccacgatatattgaaacggacatagtacctgaatttggtgaagggacctcctccgctgtcgaagcgaaacaagctgctctcgccgaggctgaagccgaaggatcgactgcagtgccgaaggtgcctatagtcaggtcagccgaagccaaagatggtgtggccaaagagccagagttggaaaaaatagtgatgctgccaaaaatttcgagcccaccgatagaggcagaattgtcgaaggtgacaaagctcctaccacaactcccaagagaaggagaatggccagcgtgctag

SEQ ID NO: 19695 - DNA, 273 bp, Zea mays
  Peptide Sequence Number=SeqID_63070
atgtgtgaacaggtatcttcggactcgaatcgatatcacacatttgagaacaagtccccaacagaggatgaccatggtattatgaaagcaatgtgtgataaagcgatgaacaaagctgttcgtgctggtcaaatcctgatgaaaagacctggcgttgtggtgcctaaggacattgttgctgacgttctcgctgcattcgctgatatgagcaaaccttctccctctggtgatcctgctgggaaggtcccctgcgacaatgctattgcacagtaa

SEQ ID NO: 19696 - DNA, 624 bp, Zea mays
  Peptide Sequence Number=SeqID_63071
atgcgggactcagcccccgcgccgcaggggagggccctggagcgtgttggagaagactcagcccgtgacggttgggggcgcaacccggttgctcccctccgctggtggtcacccaagacggtgacctccagctcccggatggggagaggcaagccgggctgtgatcccgatcccgccctcagcgtcgagggtgttcgtcatcctcactggggcggggagcgaggcgagccgaggttctacctcctgcgctggtcggcgagccacctcttcttccagcttctggtggtggcaatcgccctccagccctgcggcggagacgtcctccagtcatgccggggaaggcgaactgttgctgtccagccaggatgcaacattccgccccctccctcgcattcgcggcgaggacggcagcgagaacctgtcgactcgcctgttgattatctgaaccgcttcaccaagcatgagtcgccccgtgtcaaggtgaagagtgagagtggagatcctcggaccgcgtcgccgtccgaggctaggtcggacctcaccgaaggcgtcgtcgatgccgagggtgctactgcccccgtccggcgtcaagacccgagcctgcaggatcagagtgtcttgtag

SEQ ID NO: 19697 - DNA, 963 bp, Zea mays
  Peptide Sequence Number=SeqID_63072
atgactcgtcttagacacacaacatggaagtcactcattcctttcttgccctctcgtcttgcggagcgtccgcttcgtcgcccagtgactggccagtccaaccacttggagagattgcaccaccgcctacacgatgagcaggagcgtcggcgccaagagctggagcagcagggctcttcctcctcgcctcagcaggaggtagagtctacgaggcgttgctcccctatgcccccgtcggaggcctcccctgcaccaccactaggtgccccggccgctggagtagctactagaggagaccctggtgatggagacgacgacgatagtagctcgagccacaacaccgacctctcagaggagcaggaggcggagggatgggtcgcccgacccatcactcgtgacgccgctcgcaggtgtcacttccatgatgtgctcgataccttgctgtgtcgtgcacttgaccgacacttggtccatcgagtatcgctgtgtggtctaccagcacagtcgcgggtatacccggaccgctgggaggtgactttcttggtgcgtcgtccggaggatggtctccggggtggggaggatgccgcatggtgtgcgctttctcattactgcttggtgctcggtggggcggccgactaccttgacctgaggtattaccctcaccatccatctggcagcactggaggtgtggttgtctcacatgttggtgaggacaatcctaggttgagcagcacagtcaacttagctgtcgtgctaaacacgaagctagaccacactttagacgagctgagtagggctcatgctgagatcgcccagttgcgggctgagcgcgcggagcgccgtcacctggaggatggctctcccgccttcgtcgggactcagcacctttattgctcgcctcggcgtggacaccatgtctacgacaaccccgactacatgacccggataactttggaatcatag

SEQ ID NO: 19698 - DNA, 243 bp, Zea mays
  Peptide Sequence Number=SeqID_63073
atggattcgactaggaaccctccagatggttcggcctcccatggttgtagcgtgtttgaacacgattgcctgctccttgctaaggaagacgaggtgcctgattattctgcctctggaactgacttcctcctcgctggctattctggaggtactgctgctgatgctgagggtactgcctctggaactgctgatgaggcgggcgttggttctgctgctgatatccctgagggtggatctgcttga

SEQ ID NO: 19699 - DNA, 783 bp, Zea mays
  Peptide Sequence Number=SeqID_63074
atggctcgcaaaaaggcaaccgtggagcagctccggacgctgaacaaggttcgtgaattcaagcgaaggagaaacatgcacaaggcagcaggagcaggaccgggcaacaaggttgctaagggagaaaatgtttgtgcaatttgtgacgatggtggtaatctaacttgctgcgaaggttgttgtcagaggtctttccaccttgataacgaacataattgcatcaagacacttgggctgactatacaagaggcaaagaacataatcgagaaggaagattttatatgcaagaactgccagtacaagcaacatcagtgtttcatttgtggatcgttagggtcttctgatgacactgacacatcgtcacagcaggtattccaatgtgagcatgacgattgtgcacgcttttaccacccaaaatgtgttgctcaaatgctatatccagatagccaagaactgttcgagctccacgtggctgccggagagagcttcacttgtcctatgcatgaatgtattgtgtgcaaggaagtagataataagaaagataagagtatgcagtttgcaagatatcattttcaaaccgaagaaaggtcgcaggggtcccatgcgaagggcgtggaagaacatgcttcccgatcgaattctgatattctgcatgtgataaaatactgtagaagtcgtagctggattaaagccactgcgaacatgaatcaatataagaatcaatataaggatgaagatttagtggagcttatgagtgtggtgatttggttgggtggattttga

SEQ ID NO: 19700 - DNA, 375 bp, Zea mays
  Peptide Sequence Number=SeqID_63075
atggccgagctcagcagcgcagagcgcccctatgctcctctcccggccgcgtgccctctgccgacgcctcctctctgccctgcctttttcctaggagccgagctccattctttcctggccgccaggcatggccagctccctagtgttgccgaccatggctgcctagcagcagcatctccctccctgtccgtggatgcagcagcacctccctccctctctgctcgaatttatgcgatgtgttgtttgatgtgtgcgctttgtagtttgtataattatatttttgtcgatatgatgtacattggtgttggaaaggatgctcccgatggtcatgtgactaaagggtggtgtagtggtgaagcgagaagtcttatatga

SEQ ID NO: 19701 - DNA, 339 bp, Zea mays
  Peptide Sequence Number=SeqID_63076
atgggggccgctggcctcctgctagcagtggagcaagggacgcgtagggaggagggcgtcgagcactgtggagaagaaagggtgtcgttccctgcacgtgagctcaagggaaaacagagaggagggagggcactgggcaaaggagatgagctgagcgcagggaggtggagctgttgctggacgccggtcagaggtggaagaaggagcgcctgcaccttcctgcgcgatggcgaggccgagctaggagatgcagcgtgcgcgaggagccggaaggaggaagttcgtggggagagaacagagcgaattagagtttcggcgaacggacgattgagcgattaa

SEQ ID NO: 19702 - DNA, 249 bp, Zea mays
  Peptide Sequence Number=SeqID_63077
atgcagttcttctgcccgctcgactaccaatgcagtgcttaccacgtacctacagactcggatcagaaccacagtgtgaagaagcacaaagaatacaaaggttggcgcagagccgaagctatgctcaggggagctggtcattctgcttttgcgtcacgcttcgcttatgaaggtacgcccttcataaccttcgtccgaaaatcattatatcccaagggaaataatgcttcgaaggacgaaggactctaa

SEQ ID NO: 19703 - DNA, 492 bp, Zea mays
  Peptide Sequence Number=SeqID_63078
atgtccttttttgttgacttgagccgtttcgatcaaatatgcagtcggaatcgtgtggaagcttccctgcaaggtcgaagtgaccgcagtcacttcgccctttcactgaccgacctgacaggaaaacagcgccgctcgctccgctccgactgctgtgccacccaccaggatgatgctgacaacagccaagttcagcctcaggcgcaacaggaagctctgcctcgcccgaccctagggctcggcctcaacctcggcctcggaaggtggtctccgcctcgccccaaccctagggctcggccctcaaacctcagcctcggaaaggtggtctctgccttgcccgaccccagggctaggcctcaaccttggcctcggaaggtggtctccgccctcgcccgacctcagggctcggcctcgggagaagtctctgcctcgcccgaccttggggctcagaccgaccgcgccatgggggatacatcattactctacccctag

SEQ ID NO: 19704 - DNA, 486 bp, Zea mays
  Peptide Sequence Number=SeqID_63079
atgggcacgattcaggtcaaggctttgtctacccaaggggcgcaatctcgcctcgcccgagcccagcctcgggctggaactgtagccccggacgaagttacgtctcgcccgagggcctccttaggcagtgggcgcaccctcggcacgcccgaggcccaactcgagcaggcttcgtcgagaagcaaccttgccaaatcgcctctccaaccgaccgtatcgcaggatgaggctgacaacagccaagttcagcctcaggcgcaagaggatgctccgcctcgtccgaccccagggctcggcctcaacctcggcctcggaaggtggtctccgcctcgcccgacccaagggctcggcctcaacctcggcctcgaaaggtggtctccgcctcgcccgacctcagtgctcggcctcgggagaagtctcctcctcgcccgaccttgggctcggaccgaccgcgccatgggggatacatcattaccctacccctag

SEQ ID NO: 19705 - DNA, 408 bp, Zea mays
  Peptide Sequence Number=SeqID_63080
atggcggcagcagatgagcggaagcagcggtcaaatcacctgcaggctcgcgtcccctcctggagcggcaggggagccctctcccacggcgtgaagacgacgtgcccgtgttccgttcctcgaacgactcgagcacgcgcgacggccgcccagcaaaccgcccgtcccatcgcattaactcctcggcagggcaagcgacacctttggcatgcgaagcgagcgtcgtttcacctccgccatgatgaccgcgtcaaaaaagggaccgggaaaggggatatttcgaaagggatccttctccgcgaaagaagcgggccccgagccctcctactgatcaggggttcgaaggctggcccctcggaaggtttcgacggccgccccagagcacttgggcttcaagctcattactga

SEQ ID NO: 19706 - DNA, 939 bp, Zea mays
  Peptide Sequence Number=SeqID_63081
atggggggcacccgcgttgccttcgtcttgctgccgttggaggagcgcgacctcacgggggggagacggcgctcatcggccttgtggaggggggcgaactccgacaacgcgggaccggtcggccgcaagcgtcgtcagctccagcgtgcctggctcgctagctcagctggctctgccgtggcctctgacgctgcatcttgccgcctgatccgggcgtggccgtccatctaccgcacgggtgactattgcgccgtgcgcaccgggggattgtccaagacgtcgtacgccgtatgggcggcgttcgtgttcttcgattttcttgtcctcactccggcacgacgcctccgcgcggaggtgggcgctgtcgtcggtgccgaggtggtggtcgccagaggaggtttctccgccgacgagaccatcagcgtgacccgcggtcagacctccggctctttggctttgatggcttgtcctcgccccttgagtggggacgtgggtgagggccttcttacatcagtgtttgccctgaggtcatcgctgctgctgtttagccgcccgaggcagaggtcattgtcgatgctggtgcagtggtcgccggcgagccacctggagtttgttgtcccgcaggccctccgccgtgtttcttcctcatttcgagcactaggactcgcctgtcggctagctgaactgcttaaccaaagtgtgagttgccctacgcggaaggtgacgagtgagaaccttcagccgctctgcgatgagctggagccggaggcagcggcgtcggcgtggacagaggcggagtcgactcaaaaagaggcttcgtcggcccgggagcatgtggcttccctagccgaggagaaggtgatgagtgaggtatccgtatcccggaggcgtaggagtccctcggctcggtcagccttgccgcttactgagagcacctag

SEQ ID NO: 19707 - DNA, 147 bp, Zea mays
  Peptide Sequence Number=SeqID_63082
atggggcacgattggtgtcccggttatggcgtctccgtcgtggccctgtgcagcaccgccgtggttcggtgctggaggtacctaggcgccaaagtaaatggcgccgacctgtgtattctcggcgacaatgatgacgccgacataagg

SEQ ID NO: 19708 - DNA, 135 bp, Zea mays
  Peptide Sequence Number=SeqID_63083
atggcgggcggaaatgagctcgccggagctaaggaacggtggctggccggtgagggcgacatgagcctttttccatctcttagagttaacctctacttttattttgataagcttgatcaaagcattgctatttga

SEQ ID NO: 19709 - DNA, 216 bp, Zea mays
  Peptide Sequence Number=SeqID_63084
atggccatgagttctcgccttcaacaaagctatcgtaactcaaatgagttcaagatcttcgactgtgccgccccaccccgcgctatggtcggctctgtcctcgtcgtcgtcgctgcacaccttgcaccccgctgcggtaggcgcaccatcaccaaggtgccactgatagaggaaggtgcctcaactattgatctcagtaggaatgaccgagattag

SEQ ID NO: 19710 - DNA, 1059 bp, Zea mays
  Peptide Sequence Number=SeqID_63085
atgaaagccacgtccatccagaggatcggcctggcagcgccgaggcgtccgcaagctctggtgagtagggattgtccctcgccgctcctcgatgggctaaactatgcccctggaatagagttgcaacatgttgtttggaatagatggaaccttcgcatccatgaccaatcggattatttttccatctatggaattttggtggccccaattgggctatggaatatcgtgatttctgtcttgaagataaatcttcgtgggctgaggttcaaagaaatggtgtttacttcatttgcggagttttccaaggaggttctcaaggcaagtgtccgtccagcttctggcggtgcggactcttcagtcatgctcgaactcttgcttggcaagaaaaccctctcctcctctcctctcctagagcactgctgccctctgcgctcggaccagtcaccggattcttcaatggtgtatcatcgagttgaccccacgccttttcttccacaaggcttcgtcacagaacatattcagcatcgggaaatcatggtgcaagttcttcacatgcagtgggaaagttcccctgaaagtatccatgaaagcatcttcaatgaacacacgatcaataaaaggttgcacacgtggaatagttccattgaaggcatgtgttatgacaataaagtcctaattccaaaagcttgggtgcatttctttactcagcacctgatggagcctggtacttttgattgggccaaaaagttcctctgctctggggcacccttggccctcattgacaaggacattgattatgtgcacttgtcaatccctaaaaagtgccctgcaaaggtggataaagatttgtgctcagaagatgcactctctgccaccaagtcaaagttgggagcaattcagtgcccatgcaagccttcctccagttccaagaccaagccagttaaaaagaaagatgacaagaagaatgggtctgagaagaaagggcctcggggccctgacatggagtatagccagggtcattattgtggcggaaaaactgcccgaattattctaacttaa

SEQ ID NO: 19711 - DNA, 267 bp, Zea mays
  Peptide Sequence Number=SeqID_63086
atggagcagaggattacccggtctacgctcgccggcggtcgggtggagtccggcgaccgtggactggcctctccggcgaagcaaactccgattcctcgctcggggagcttcaccgaggtgtgctcagtcttctccgaggactggacggggttgggaaaggtcctgctggccggctttaagagagaggacccaaggttcaatcctaccttgcccaaggtgatattgcctaaaagcttgggtaatgctttggcccttagcatttcttaa

SEQ ID NO: 19712 - DNA, 342 bp, Zea mays
  Peptide Sequence Number=SeqID_63087
atggtggacgtcgtgcgcatgcaatttgatgcccctcctttgcctgtgcccgagtcactgatctcccgcctcgagagcctcgtgtgtcgggtctgggagctcgaaacggaatccttctatcgggggatctgccaggccttcgccgttttgacatcccatttcgaggggggaatagagctagaggcgttgagcgtaggttattgtgacgcctggagtgacgcgaagctggctggaatggtgaaggttgtggagccttttgcccagaaactaggggttgccctgcttggtagcgctcctcggggggagttaaggaagacatgtgtcttcgcaatggccacatga

SEQ ID NO: 19713 - DNA, 414 bp, Zea mays
  Peptide Sequence Number=SeqID_63088
atgaacgtcgacgagcagggagcggaaccggggttcgacggacaggggggacggacgcgagttccggccggggtgctgcgtggacagcgaagctccggcggggaacgtggatggttcttggcggggtcgcgcgacgtcgggcttggacgggtcggtggcgcgcttcacggtactcggctggcggggctccaggcgggtgctcggcatcgagcacaggggcgcgtgcagggcgcccatgctgcgtgcggggtcgcggcttgtgcagggggcggagcctggcgcggcgggaggcgtcgggggagcgcgggatgcgctcggctgggcggctggacgtcgtgcctgggcggtcggtccgcggggcgcgccgggttgcgcaggcctctgcgcggtcgaggcagacgcggggagagctag

SEQ ID NO: 19714 - DNA, 597 bp, Zea mays
  Peptide Sequence Number=SeqID_63089
atggacatccatccacaggaagatgaccggggggagcggaaccagggttcgacggacaggggggacggacgcgagttccggtcggggtgctgcgtggacggcgaagctccggcggggaacgcggatggttcttggcggggtcgcgcgacgtcgggcttggacgggtcggtggcgcgcttcacggtactcggctggcggggctccatgcgggtgctcggcatcgagcacaggggcacgtgcagggcgcccgtgctgcgcgcggggttgcggcttgtgcagggggcggagcctggcgcgacgggaggcgtcggggagcgcgggatgcgctcggctgggcggctggacgtcacgcctgggcggtcggtccacgggtgcgcaggcctctgcgcggtcgaggcagacgcggggagacctaggctggcgcgttcggctgctggcacggcttggacgcctggggagagagtaggggagaagaggagagaagggagagaggcgctggggccggatgggtgcaggggcggcggtggcttgcagcaagggagaggagcgcgcacggctagcttagggttaggggagggcgctgcttcatgggcctaa

SEQ ID NO: 19715 - DNA, 1863 bp, Zea mays
  Peptide Sequence Number=SeqID_63090
atggggctctgtttcagcaagaagcagcaagcgaagcgccgagacgagcagccgtccagtgacgccaagaagagcagccgccggaaatccggcagcgacaccgtgcttgtggccgatgccaaaaaggcgcctcaggcaaaggcgccggcgccgcccaagaaggctgtagccaggccggaggagctggcagccgacaagaggacggtgttcgtcgtcaaggccgcggcggcggcggcggccgccgaggtcgcagccgccgcgaagggcgggtccgaggaggcggaggcgaagagggaggcgccggaggaggagccgatgcccgtcgccgtcgccgtggcccgggcgccggtgcggacgtcgagctgcaccaaggaggaggtggacgcgatcctgatccagtgcggccgcctcagccggacctcgtcggcgtcggggaatccgccatcgggcgagcacggcggcgggcgccgaaggtacgccggatccaagcggagctatgacttcgaccacggcacgaggggcggtggcggcgacgtcgacgagtgcgattggggcagggagggggccgcggtgaccaggccctccccgcgccggaggacgccggagcggaagcgctcatcgagccacgatggccgcactggcggcgggagcgggagcgggagccggagccggaggattagccggtcgccggggcggcgcgcggacgtcgtccccgccgcggggagctccgaaaccggcgagcgaggggcgaggcagcatcctggcaagatggtgtcggtcccggccagggagaaggggcgcgcgcagtcgcccgtgaaggctgcttcgtctggcaagagatacccatcgccaaggtcgaactcgcccgcgagggcagcggcctcggggaacgagaatgccggggtgcagtcgacgcacgggccgtcgctgagccgcaactcctcgaagaaggccgagcagtcgccattccgtcgcaaccccatggcggaactcgacgagaatgcgctcggcaacaaccaccatcacagcaacggcaagcctgtaaagaaatccgctgatggtgccattgcattgccacagaagactgcggagcgggcaaaggatcagatccccagctgccgaacaactgcgaaggagaaggaaattgtggaggaggccgtggcttcggacaccagagcagcgcccgcaaggatgaaggcgacccactcggtgagtattgtggctgagaacgtcaccaatccgaggccggggagccggtcgtcgaggcggtcctcgcgtgacttcgagcacaacgacaacacctacgcatccctgctactggaggacatccaaaactaccaccagcagagcgccagcgctgccaccgccactgccactccagcgccgaccttggcgctcccagcgtgcgtgtcgaatgccttctcgatccttgaagctgtcgccaacctcaactcctcgtcgcccgacaacaagagcttcgagctggagaggtcggtcaacgacaaggaatccttcgtcaacgggaggtacggcggcaatggtgcgagcaccaccctcgtggtggagtcggaggtcggcgtgaaggacgacctcatggagccgagcatgcacaagtacgtctccgtgcgtgacatccgtggggagaggagggagaccgagccgcaggagtctgcggggagcaacagctttgccagtgacgcctggacgtgctcgtgggagcccaagtccgttgactccacagaccggaccaggagtaggacggcctcgaagtcgtacaacggtgacaaggtggagcagtcgtggcagagcaagcagaagctgtcgtcatcccaggagcccagccaccgtggttctactagcaat

SEQ ID NO: 19716 - DNA, 1306 bp, Zea mays
  Peptide Sequence Number=SeqID_63091
atggaggcaaagagcgcggccgcggaggtgctcaggaagaccgacgctggcggagacaatgagaggtataggcatggggagctggggcgcgaggctgtggaggaggaggaggtgaaaccgcgaagggtggcggatgcgccgctgccggcggagaggaagaggaagcgcgcggcggacccggaggacgacggcagcgtgagcgacagcggcagcggcagcgaagggcctccgcagcagcagcagcaggtgaagccgtgtctttccccggtgccgcctctccaacggctcctgagtgcgtgccgcgccctgctcactggctcctcctccccgccgacgccttccgctgtcgccttgatccgtggcattatggtgttctcatcagacaagattgggccagacgacgtcgggctcagggacgagatccgcttcttcaacaagatgaacgccgctggtcttcaaaaccctcctatcgtcacatgcaaacctatttacgagggcgccaactttacgatcgcggtgttcttcttgccactgggagcggtcatgcctctccacgaccacccgggcatgacggtcttcacgaaggtgctcatcgggtcagcgcgcctggaggcctacgactgggtccgtccccgtgtcttggccggctgctgctcgggctcccgtcgccggacgctcgcgaagaaggtgcgggacgaccacggcgtcaccgcagcggcgtccgcctgggtgctgttccccaacagcggcgggaacatgcaccgcttcgcggccgcggaggacgcccactgcgcgttcctcgacgtcctcacgccgccctacgcgcccacggaccgaaggcgctgcaccttttaccaggacctcccctacgaacaccatcgtcctcgtccctgtacctgtaggtcgacagccacaggcggtgccatctgtgacgacgacgtgcttgttgcggaggagcagacgtgtcggctggcatggttggaggaggtcccgcagcctaggaacctgagggttgtggacgacaaagccactggcttctgtacttctgtttctgcgatgaaccagatcaccgccatagtcaatataataggctctaagatgcaaacgactcctaatgctcacgtaatgctcatgaaacaccaggacgatgatacaacttccatggtcagcgtgtccctgggctgggctatgatgcggacgaggcccaagctcgatggacggtgcggcggggctgagcccggcggatggtgcatcagaggtgagcctgagggtctggacggggtacagggcggccgtggccaggacg

SEQ ID NO: 19717 - DNA, 180 bp, Zea mays
  Peptide Sequence Number=SeqID_63092
atggtcgacttcgccagaaaaagaaggagatcgcgcaccggacatgaacagtggctgtccggatcacctattcacccccctctaggtgctctcaggaggttgctcaacatagacctcttccttgattggtccattgaggaaggcacttttcacgtccatttggtaaagcttaaagccatg

SEQ ID NO: 19718 - DNA, 273 bp, Zea mays
  Peptide Sequence Number=SeqID_63093
atgtccatatatgagcatcaaatcagatttgaaattcaaaatcagaaagtggataaagtttggagatttgagtaccaggtcgcggaccgtccggtggtcttggtggtcttcggaagaagcttacaggtcgtttcaaatcaaagcgccctcatgcagacgatgcacactattgtggcagaaccacccgaattattccagcttaagtgcctaagtcacgccccaggggtcgtaacacacttaaatcggaataacccgtcagtccctcagatctag

SEQ ID NO: 19719 - DNA, 201 bp, Zea mays
  Peptide Sequence Number=SeqID_63094
atggactccccgaacaggaagcagggcaggcccgtgtgctcctccctcgccctgacagcgcggaagaaggcgaggagccaacaggctgtttcggtctggggcaccggactgtccggtggtgcaccggacagtgtccggtgcgccaggctgcctcgacctgaagacgccgctctcgggaatttgccgacggcgtacggctaa

SEQ ID NO: 19720 - DNA, 90 bp, Zea mays
  Peptide Sequence Number=SeqID_63095
atgacgaagaaaggtgaaagtacaagcgtgacgcacgagcaagtacaagtcagcgtgaacagtacgagagtactgttcatctatttatag

SEQ ID NO: 19721 - DNA, 756 bp, Zea mays
  Peptide Sequence Number=SeqID_63096
atggaatactcaggcggcggtgcgacgctgtcggagatgtaccagagcgcgcggcggctgctactctcggcgcgggatggcgtgggccgcgtcgagcgccttgcctcggcacccacttcgtcctcctactcctcggcgccgctcgtcggtggtgcgtcgggggaccccgcggttgctgaggaggtgcggcgagaggtggcgcagatccaggggctgtgcgcgcagatggaccgactctggcgatccatccccgccaaaggccaacgggacctctggaagagaaaagtggagcagctctctgaagaggtagattcattgaaggaaacccttgacaggcattctctgcgacagaaaaaacggattctggaagcaaaagaaagagctgagctatttgaaagagctgtaataattcctctcagcaataatgcggtcttttcttttcccaacggtgaatcttcacacgtcctccgaatattcgacgacgaagcccaagcaaagcaatcagcccgtaactcctcacgaatgctcgaagaagcttacgagacaggagtgggtatccttcacaagtacgctgaccagagggatcgactgaagagtgctcaaaggaaagctttggatgtcctgaacactgtcggtctgtcaaactccgttctgaaacttatcgagaggcggcaccgcgtggacaggtggatcgcgtatgctggtatggtcatcaccgtggtggtgatgattgcgttttggcggttaacgcattag

SEQ ID NO: 19722 - DNA, 393 bp, Zea mays
  Peptide Sequence Number=SeqID_63097
atgacgaagacattgcagatgatgttgacgaatggttcgtactatccaaaccactcggaccaacaccaactacatccctccgccacggcaagttcctgtctacaagtggtagtcgaggaaatccctgcggatctccctcgcattcgtgtggagaacgaagtcattctggaagatagcttggaggagtttctgcctacgcccaccccgttggcagaatcactagccttcgctgttggatcgtcagcttcagtactgcctgcaccagtagtccaagcccctgctcctagagacgacgacccggacgactctggtgatgatgatgaagacgacgaagaagaagaagaggaggagaacatcaacgaagaagccaatgatgaacagcaggaccactaa

SEQ ID NO: 19723 - DNA, 258 bp, Zea mays
  Peptide Sequence Number=SeqID_63098
atgtaccttcggcttgaaagaaggatgccgccaaaatcaaagaagtcagtgaaggggctgttcaagggcctgggcctttttcagggcagttcttcgagcagcagcagacgtcgagagctgttgagcgcggtacatggagatgaggatgagcagcacactgaggagcagcacaatgaggaggagcaacacaatgaggctgagcagcacaatgaggaggtggagcacaatgaggaggtggagcacgtgacatgggactag

SEQ ID NO: 19724 - DNA, 303 bp, Zea mays
  Peptide Sequence Number=SeqID_63099
atggcgagagtagcgtgtaccctctgtggcaagaggctggacggtggtgtatctgtgctctcgggttgtttgaggtctgttggacaaggacaactgcaggtgggcctaatgacttgggaggttccgtcacagccagactcggcaatgtggtacccaatgctcctcgtacaactgcaccgtgtacagagggggcgtagggtaaccggcggagttaagcacctcccacaaaatggaaggaaaaccatcgtgagaaaggaagtaagagctgaaacgagtgtctcctccactggcgggggtgggtga

SEQ ID NO: 19725 - DNA, 168 bp, Zea mays
  Peptide Sequence Number=SeqID_63100
atgcggcttcatacccttagagatgatgtggtttttataccctcagaggttttgttgacgcagggaagtgttatagaatctattgtggttgttcgaggaaatgagatggtgcttgttgctcatccagggaagtgggaagtagcagcacttccaccttcactctcataa

SEQ ID NO: 19726 - DNA, 390 bp, Zea mays
  Peptide Sequence Number=SeqID_63101
gctgcttcggttagcgatgctgctaggcaaactctgtggtccctcaaccacacctaccggcagcagctgcacaacatgaagtacatgcatcttccaatgcgtcttcatggagaaagccagaccagcattgttttaggtagagctgatgaagatcgcctcaacaccctagttggtgtggtggtaggtcttaacaccgacctggatagtgctaccctggacctctctagggtacacctggagctagaggatgcacacgcaaggattgcagccctggaatctcaactagaaggaaggaatccgcccgaagttcaagtccatgccatggcgttatcccctccccgcaagaggatcctctatggagaaccaggatccatcaccaggctgctatag

SEQ ID NO: 19727 - DNA, 213 bp, Zea mays
  Peptide Sequence Number=SeqID_63102
atgcatatatcatactcattgcattcattagattgcaatctcgctgacggagagtacgtgctcatccccaagcaaggagctgtccacgaggaagaccaggagcaagctcccgacactgccattaaggatctccctgtagccccagctattgaaggtatcttcggactcgaatcggtaccacagtgggagaagcccaaagaatacgaaggttga

SEQ ID NO: 19728 - DNA, 171 bp, Zea mays
  Peptide Sequence Number=SeqID_63103
atggatgttttgatgattaggaactttggagaggaccagcaaggacttgggaaaggcctaggtgttgaggaggagcagcaagggcgccacaacaggaaggagatcaagtccgactcggctgaattagccctcgtggcgaggtcaatcgcgcagtacacagttgataactag

SEQ ID NO: 19729 - DNA, 397 bp, Zea mays
  Peptide Sequence Number=SeqID_63104
gggtatgcgcccagagccgtccgatcagagatcaagggctcagattaaacgtgcatatgcgctgaaccggtacgcgatcccgctggaaactgatccgacggcacaagtgcctccttcctcccacacgccggacagcggcggcggcgcccacaaaacacggcggaggttcgccggagtcgaccgtggagggttacgccgcggcgacgtgatggcggagaagcgtgtcaccgcggaagttcctgtcgtcgatgagcaattcagagcgcccactccaccacctgcgctcgatgaggcccccagcaacccaaagcgcgccccggtggagtccttaggctcgagctcgcgcagagacctctgcccacggagatgtgcggctgcggcgaactccaatgttcca

SEQ ID NO: 19730 - DNA, 348 bp, Zea mays
  Peptide Sequence Number=SeqID_63105
atgactcactggattgctcagtctatgcgcgtaggcggacgaccaaagtccgacgaggacgatcttgggtctccagggaggtcctgttgggtccgagcgcttggaaagctttacgggccactggcgaagttaaccgaagggcaggcgcggcttggaagcgactggagcaggctggccacggtggccgaggcttgggcagtgatggcgggcggaagagagctcgccggagctaaggaggggcgtctggccagcgaggaggggttagttagacactattttgtcaatgggagcattaggattagagctaaggatcaaggtgaacatgctcggttttggttcaagggctga

SEQ ID NO: 19731 - DNA, 342 bp, Zea mays
  Peptide Sequence Number=SeqID_63106
atggggaagcctgtccgatcactcctcatgctcctcctcagccgaggcggggtcccactcgacagtccaacccggtggcaagatggacgaccaagtcactccagcaaccatgtcctccaaataacctgtaaaatttatgccacaagcaaggctgagtatactaatactcagcttgacttacccgtgaccgcacttgtacccaccataactggaatgggagacctcgtctcaggtcgcgtgaggggatatgtccactgccaggttcactcaggtatccgcacgttaatccttattccaatttcatctcgtagaccacgtatccccatggatccgtgtccatag

SEQ ID NO: 19732 - DNA, 1317 bp, Zea mays
  Peptide Sequence Number=SeqID_63107
atgttcaaggataagaacgaggagaggagagatagtaatcatgcaagacatgggaatgaggaaagactgggcaagagtgtggaagatgatgacagagaaggtttcttccgcaaaattttcaaagataagaatgaggagaggaaagatgaagggcatcaaaagccagatgagagagaaaaggttggtgcgaacatagaagatgataagagagatggttttttcaggcaactctttaaggagaaaaacgatgagaaaaaggaaggcagcacaccaagcaagaaagaggaagatgataaaggccataaaaatgcagatgatgataatttctttcgcaggcttttcaaggataagaatgaagaaaagaaagggattgttcatgacaggaatgaagatgacaagtgtgaggaaggtgataaagaaaacttcttccgcaaattatttaaggataaacttgaggagaggagaactgagggacctgataaaaatgatgattatggtaagggaagtagtggtatcgaagaggaagataatccagagtttttgtcattccgtaggttgtttagagtgcacccagaagatcctaagagtgggcacatagaaagcagtcaatctaacaatctttctgaggggagcctaggatcagaaagcttttttaagaggctattccgtgatagagaccgctcacttgaagattctgagatttttgggtcaaaaatggcaaaagaggcaaggatctggtctcataaacaccctggtactacaggaatcaatgagaagcaaagtgggaaaccaccattaccaattaatgcagtagcagagcttcgaaaaggttcttactatgcttcgttggaacttgttcaggctttatgtgatacatcttatggcctggtagacatatttcctattgaggatcgagtatgctttccgatgggaaagggcatatatcgagtggttcatatacctgaagacgagtctgttcttctgaattctagggagaaagctccttaccttatatgtgttgaagttttaaaagcagaagctcctagccactctaaaggatcatcagatgggcacaaattatcaaaagatgggataccattggctaatggagatgtgcaactaccaaaaccacctccatgggcctatcctttgtggagcagacacgaaacacaaaactatgaaacagacataatgttgaagtctacttctcaggttattgaccaagcaatggctcaactctgggagactaaagaaataaatggttggagattaagtggaaatggggatagggctctagtatatgagtactatatttag

SEQ ID NO: 19733 - DNA, 411 bp, Zea mays
  Peptide Sequence Number=SeqID_63108
atgatccacaccaccactaatatgctccgctgcctcctcttccaggcatctctccctgccagctactgggcagaggccctgcacactgccacccacctcctcaaccgtcttccctcgaaggcgatgtgtttccccttgctggctccaccccacccaccgatcttgactccctcctcgagtccgatccgattcccccccaccttcggctccctgtcttgcgccgttacctgctcctcgtgcggcccccacgacctcttccgcgccacgcgcggccccgtcgaccccgcctgcgccacgcgcggccccgtcgaccccgcctgcgccacgcgcggccccgtcgatcctgcctgcgccacgcgcggccccgtcgaccccgcctgcgccactgaaagttgcctagagggggggtga

SEQ ID NO: 19734 - DNA, 501 bp, Zea mays
  Peptide Sequence Number=SeqID_63109
atggccgattctaaagatctcaacaaggcttctccaaacagctgcacaaggctgactaatttatcggccgctgagcataaaagattaaaagatgacatgaagaaaatagacgaggaggtccaacgacaaaaagatcaggtgctcaaggtggcggataaatggttcctctcgcacttcagggtggattgccaccagaagaccgtccaagagaggaaaatagacgtcgattacatgtcatctgtgctgcaacagctccccacaataggtgatgccaggcgccaaaacaattgcgccaaacacatcgacaacaaatgggtttccccagccatattctggtatgccgatggactcatatccaggaccaccgtcaccaccatcttctccaaatggtcggaccgtccggagcaccagaagtcacctgtgatccgcctagtgcggaagaccgacataaatataatcgtccacccaagcctcaagaacaaaaaagtcacatgtccctga

SEQ ID NO: 19735 - DNA, 1623 bp, Zea mays
  Peptide Sequence Number=SeqID_63110
atggggtggtggcaggggttcctgatcgggccggtgctctactcggcgtggtcgtcgccgttcgagctggccctcgacagggcggccaccacgccggttgtcgtcgcgagcctggtcatggacgcgttcttcgccgccgatatcgccgtctccttcttcgtcgcttacttcgacagatccgccaatctcttcgtcgacgaccgcaggaagatagccaccaggtacctcaagcggccgtcgttcgcgatggacgtggcctcgacgatcccgttcaacgtgatctaccagctggtgagcggcaggagcactgggtggttcaggtacctcaaccttctccgcctgtggagactgcagcgcgtcagcaagctctttgcgaggttccaccacggcgacagggagcacacctggctcggcagccaggtgcgcgacttcgcggacggcagcgtctgggtcaactacacctacgccgtgtactggtccatcaccacgctcgccaccgtcgggtacggcgacctgcacgccgtgaaccccggcgagatggtgttcgccacctgctacatgctcttcaacatcagcctcacctcctacatcatcggcaacaccaccaacctcgtcgtccacgccgcaaccaacacattcaagatgagggacatggtgcggcgggtctcgacgttcgggagcgtcaaccggctgccgccggagctgagggagcagatgatggcgagcgcgcagctcaggttcagcacagcggaggtgatccagcagcagctgctgtccgacctgcccacggcgctccggtcccgggtcgcgcaccacctcttcagggacgcggtccagcgctgctacctgtttcagggagtctccaacgacctcgtcgtgcggctggtttcggagatgagggcagagtatttcccaccccaggcggacatcatcctccagaaggtgaccaccaccgcctgctacatcatcgtctccggctcagcgcttgtgatgaagatagggccgcatggcatggcaggggaaatgggcgtcattctgggcgtcccgcagccgttctccgttcgtagcaggaggctcacgcaggccttgtgcatcagcaacagccatctcctggggatactccgttccaacaccgcagatgccaacaccgtatgcgccaattttgttaagcaactcaaatctctcaaggaactgcaggttgcagaggatgcgccgtttttcgaggagacattttccaaaacaaacatggatgagcttcagatcggctccatctttcagcagctgcttaacgacggcgacgctgccaggaggattccaaggcagaatcagaaagccagcttcggcaccgagcaacacgaagagaccgctccctgcatgttgccgcgtcgacaaggcggactacgagtggtcattcatgatcgctttcccagcgatggcgcggagaagaaccggggccttgcagcgggaaagcttatcctccttccggattcgctgcaagagctgatgaaagtagccgaggtgaagtttgggaaggcagcgaggagggtgctcaccgtcgagggcgccgaggtcgacgacgttgcggtgctgagggatggtgaccacctggtgttgtgttcctag

SEQ ID NO: 19736 - DNA, 539 bp, Zea mays
  Peptide Sequence Number=SeqID_63111
atggccggattcaccgtcggggacatcaccggccctggcacacccccccatcgcccctgctgcacccagcagcgagctcacccatgggggggcccctacatcgccggccttggtccgatccacgcctcctccccgctgcccctgcgtcgcagctccccaccgggctttcccgccttcgcttcaccgacctggagtcaccgagtcgcgccctccaccgactccccgctcgtcggcaccctcgccacgatccaggccgctgtgacggcctcgcgggagcgcgagcgcgctgcctccctcgccctggagcgtgagcgtgccctgggcgccgctctgaccacccagatggccaccatgcagcgcctcctcggccgtccgccactcgccgatgcggagcccccagcggacccccacgcctccgacctcgacgccgacctcatcgctgctctccacgctcaagccgccggcctgcacaacatccgggccctcgtgtccgtggtgtcggatccgccatcttcccactacccccggggcgaggacag

SEQ ID NO: 19737 - DNA, 996 bp, Zea mays
  Peptide Sequence Number=SeqID_63112
atgacctcaggtcagacgctgctgcgacaaggccctcgcccgtgtccccgcccaaggggcgaggacatgcagaaggccatagagttggaggtaccaacttccgcgaagttgcgttcctccaacgacgacaaggcggaagaaccgcgggcgctccccatccgggggctcggaaggtggaaggacgtgatgcatgaagggagtgcgaaaacatggttgccttccaagggggtcaccctccttttaaaggcaactctccccacttgcgtcctcagccagcgcggaccgagtcttctccaacgcgctccatggtcctccccctacgacacgggggctgggtcccacgcgttatgcaagctggcccagggcagaagaagccaaaccgccgcgcgggtgcgcgtaactgcccagcggttacaagcattcctccactatcgcccggaccagcgggtgaaagggcggaccgccatgcaggcggcatgcaatcgcaccaagggggcgcaccctttcggcttcgacgcgtccagcatggaggcccaggcccacacgtcatgtaaccggcgcgccggttactacgtgcaagaaactgcaccgccacccgctgcagtactgcgccttctcgactgcggaaccggtgccgcgactcgaggtgaccctgcgcaggacctgacagtgccaaccgagcacgtcggtcacgggtcagtcagccgcgggagaaggcgcgacggtcgatacggccagaaatgggtcggcagtaatggcggtggcaagcaagcggaagcagccgtcatgttgtcagcaagctcatgtcccctcgtggggcagcaggagaaccctctcccacgacgtgaaggcgacgcgcccgtgtaccgttcctcgaacggctcgcacacgcacaacggccgccccgcgaaccactcgtcccgtcgcattaactctgcggtaggacagacggcaccgttggcaggcgaagcaggcgacgcttcacctccgccatga

SEQ ID NO: 19738 - DNA, 693 bp, Zea mays
  Peptide Sequence Number=SeqID_63113
atggttgcccagttctatctaggtttctgtcggcgtttcgaccccggggggtccctggaccgacgaggggttacaagcgtccgcgtgagagacttaggcgtcggcccgttctcctgcgcggccaaccttctcggtaatgatggccccccttgtgtcatgatcggttcgagccctaggtcgggcgaggcggaggctcctccatggccgaggtcgagtctgtcttccgaggccgaggctgagtccgagccctggggtcgggcgaggcgaagttcgtcgtcttccgaggccgaggctgagtctgagccctggggtcgggcgaggcggagttcgtcgtcttccgaggccgaggctgagtccgagccctggggtcgggcgaggcggagttcgtcgtcttctgaggccgaggccgagtcagagccctggggtcgggcgaggcggagtccatcttccgaggccaagacgggggccgagccctggggtcgggcgaggcggagcttcctatggcgcccgaggccggacttggctgctgtcagcctcactctgtcgagtggcacagcagtcggagtgacacaggcagcgctgttttcttgtcaggccatccttgcattaaatgctcctgcgatatggtcggttggcgtggcgatctggccaaggttgcttctctgcgaagactgggcctcgggcgagccgaag

SEQ ID NO: 19739 - DNA, 195 bp, Zea mays
  Peptide Sequence Number=SeqID_63114
atggctagctcacctcaggtaaactttaaatattatttagaagccttagagaacgaggaggaaatagaagttgaagaagcgaggacttcaccaccaccacctgaggaacctcaggcaggaaactgcttttattttgatatctgtggaacagagcctgattcacctatcactgaaggcaagcaccggttggcgtga

SEQ ID NO: 19740 - DNA, 222 bp, Zea mays
  Peptide Sequence Number=SeqID_63115
atgaacgcgcctgaccctttccctaagcccctagagccccgtcatggccgtccccctcgtctccggcgagccctcgccatgagaccgagcggcgccaccgcgctcaggggactcaggctgtatcctgagcacctctccgtaaggacctatttggggagtgacaacctgggacaacaatgcaaccatgagggtggaatgggatgcccttacctgattaattag

SEQ ID NO: 19741 - DNA, 294 bp, Zea mays
  Peptide Sequence Number=SeqID_63116
atggtgagaaagaacacaatgcgaccagcaacaaatgagcgaaagcacacaaattcaacaatgcagattattgaaagaaggaaaaaaactctcgataaactcaccgatcaacctggaaatatgataccaattgatgtagctgaggtgcccgatctttcggcgagtagagataattctgatttggcggaagatgaaccttgcgatccgactatgacgagcaagctcgaggcgccaatgcaatcgctgaaccaactccctgtggttaccgaccttgctgatgcgagatcagcctaa

SEQ ID NO: 19742 - DNA, 492 bp, Zea mays
  Peptide Sequence Number=SeqID_63117
atggggagaaggaaggagagggaatcgtccatggcagagaagggagaagaggggatcgaccatggcagtctccacacctgggcaggggctcggctggcctggccggggcagaccgccgcgcgcaccacgctggcaggccttcaggccgccgcgatgggcaacgaagcaggggctgggcgggctagccggccggctgccgcgcgcaggagctcctggcacgggagcagggggtcgcgaccaggagctaccgagcctgggcgtgcctgcaggggcctgaggtcggctgggggcaaggccggccatgggcgctggaaggagagggatggagcaggacgttccgggacggagctgcagcagcgccgctgcggccagggtgcgctcgcgaggaggccaattcagcctgggcctatgctgcgcacgcagggggaggggcgcgacgagcgcacgccggagatcgggatgggcaccagttcaacctgctgcacgcgctag

SEQ ID NO: 19743 - DNA, 174 bp, Zea mays
  Peptide Sequence Number=SeqID_63118
atggagagtcatgatctccgggcagaaagggaatcacggcttgtgggtggcaatgagactgatggttttggttatgactatggtgctggttgtcagcattgcaaccactgctcaggagaagatgaagccgtggaaggagacttccaggagttccaagactacgacgagttctag

SEQ ID NO: 19744 - DNA, 703 bp, Zea mays
  Peptide Sequence Number=SeqID_63119
gatccactttagtaagcatttctgcaaaacagagtctttgattattgaaaagcctcaccttgactcccttaaccagcatacccttgagagtcttttctttagtcgggtgaaacgttcctggaaaggtaagaagaagataccgaacttgtcaagtggttcaggggcacctacagggttgtctgagctggccccaaggcaggataatagcagtagcggaagcaatgatcctataggggatcttgaagctgaagtaagtcggctccaagcggaactccgccgcaggacgactatctgggtcgtagatggcgaccgcataaatgagttgagaagagatgtccgccatctgcgagatcagctcgtggaccgggatttggcacttgactgggttgttcaatcccattcgcttgcatgggacaaggagcaaaaagctcaagctcgagtagccgagctcaacttgaccgttgaagaactgcagacatattgcaataccttacatgaagaggttcatgtattatattcgcaactgcatcccagtgagcctacgaatcctgatgagtcggaagccggacccttgcatgttgcgggacacgcgcttggtggtgagttagacctttttcagccccctccttctatgaggctggtcgacgaatggtctcccacacccgacgacgaggccgccaaaagcaatgggaagcaggaataa

SEQ ID NO: 19745 - DNA, 120 bp, Zea mays
  Peptide Sequence Number=SeqID_63120
atggcctccaccgtgtgggcgccactgtcgatgcctggggggaacgccgagcatggttgggagaagtcatggatggcgtttgggccgctgattggtgatccgatggccgttgaggcgtaa

SEQ ID NO: 19746 - DNA, 333 bp, Zea mays
  Peptide Sequence Number=SeqID_63121
atgcagtcggtggacgacccaaggaaggatggacataaccagtggatgctcgccaagcgaggagccagttatgccacgtctccccagtacgcggtgcagttgttcgaggagcaccgggtaccccgctgtaaggtgaggatgactttggatcctcatcccttgcagctaggctggcgttcgttggactccaagtctttcggtttcagggctgaggatactatcgagtccactgctctccacgtgctgacgaccttctgtggctttcaccccttggagctatcaactcatcccattggcttgttccccgatgagaaggaggacgacccaatgtga

SEQ ID NO: 19747 - DNA, 444 bp, Zea mays
  Peptide Sequence Number=SeqID_63122
atgggcaagagcaacaaacgcaagcgcgagccgactcctccatcggaggacttcggcgactcggaatacttggaggaggagttctcctccgagtccgaggggtctccggttcccgtctctccctcggtgtcgtctgacgattcagatgactcccaggggcttgctgcggaggtctggacttatatccgggccgtcaagcgctctgggctcgagggctcggatgagttggagtactgctcggacgaggaggactcgtccgaggagggcggtggcggcgatggcggagacgacgacgatgacggaggcgacggtgacaacgacgacagtgacggtgatggcggcagcaggggcggcaacggcgacagcaagggtggcaatggcggcagcagcaggggcaacaacggcggcggcagcagcaagggcagcaacaaggccagtggctag

SEQ ID NO: 19748 - DNA, 372 bp, Zea mays
  Peptide Sequence Number=SeqID_63123
atgaggaatagggcaaggcctagcccactactcctcctgctcctctcctgctggagcagcatcccactcgaccgtccaacccggtggcagggtggtaggccaagtcacaccatcaaccatacgctaaagcgtacctgcaaaaagtatgccacatgcaaggctgagtatactaatactcatctagatttacccggttacaaggggtcaagtagtctcattagctgtgagaagaagacgattcgaatcgagtttttaaaccttgcaagggagatcctcagtggcaggctcgggagctggctcctggtcttcctcgtggacagctccttgctcaggaatgagcacgtactctccgtcagcgaggttgcaatctaa

SEQ ID NO: 19749 - DNA, 426 bp, Zea mays
  Peptide Sequence Number=SeqID_63124
atggccataatcgtgaagatttggagccaatccgcgcttgaacttgacctctctctgcgctgcctcgtgctcgacgccgtgcccaagcgccagagcgcgcactggcgctcgcccgcgtacaccctgagcgcgtgcaccacccttagctccggcgagctctgtgccacccgcccgagccacccgagcgtcggccaccgcgaccagccatttctagagaccttcagcctccaccgagcctttggaaagattccccgaggagccgtgaagcttctccaagcgagaatcgaagccctgcctcaccggaacagcaagatcatcgtcgccgaacttcggtcgcccgccgccgcgcgtagaccgagctatccggctggagccctcaccgccgacgagctccctcgcctgcgcacgtggatcggcctactctga

SEQ ID NO: 19750 - DNA, 282 bp, Zea mays
  Peptide Sequence Number=SeqID_63125
atgtcccatctgatggcactattggaggcaacaaagattaccttggacaacagggaggagcttgtggttgatttgtccactgaaatggtggagaaggacttgcaggtggagcagctatccactgatatccaagagttggaggaactagtgggcaccagggagaacaccatcgagatggctgggaggcagcgtcgtgggcagaacgagcgcgttcctccaccgccgccaccgcctcccactctgcaggagctcatggctcagcagaatgagatcttgagatag

SEQ ID NO: 19751 - DNA, 315 bp, Zea mays
  Peptide Sequence Number=SeqID_63126
atggatcctcagaggacggaaatgcactgtcccacactgacgggcttgcacgagagggctttccccgcattttgtgggagggtgaggatgaccttggagcctcatcccctgcagccaggctggcgctcattggactccgagtcttttggataccgagctgaggacacgatcgaggcgatcgctctgcatggattgaccactttctgcggattccatcctttggagctggctacccaccccattggcttgttccccgccgaaagggaggacgaccccatgtggaaggatcgggtggagcatgccaaggatatctga

SEQ ID NO: 19752 - DNA, 65 bp, Zea mays
  Peptide Sequence Number=SeqID_63127
atggttagaaagaaatgggaaaagttctcgcgagagttaaagcttaagcccgagacgcactacgg

SEQ ID NO: 19753 - DNA, 279 bp, Zea mays
  Peptide Sequence Number=SeqID_63128
atgaagcatttgagaacaagtccccaacagctgcaatatgtccagggcttcaacgacctctgccaatacgcgggttaccatgcagactcttatgagaagaagagggaccgcttccggaggggacttagtaccaaactccgtgagcgccttaacactgttcgagccaacaactacaatgaactggtcaacctggccatctcccaggaagactgcatcttagcccatcgagaagataagaagaggaaggcaccgatggcaggatcctcggcccaaccctag

SEQ ID NO: 19754 - DNA, 1124 bp, Zea mays
  Peptide Sequence Number=SeqID_63129
atgcccttcataaaagtttacaacaatgactcagacccttatggactaaaagagttcggcatcatcgtcaccccggctaggattcctcctacacgtaggtctcctcttcacatcacacaacgccataggcctatcgcgcagccactgccggaggccgtcacgcagccgccgccactggagacctgtcgtgtagccgccgtcgtcggagacctgttgcgcagctgccgctgccggggcctaggtgctaccagggggacgaggactcatagaattccagatttgaaaacacaaatcttccagggcgctacgctaccccacgaccccacaccacgcccatcttcctcgcctcaacaccgccacccaatccaaccgcctggaccgctggacgccaccgccccgcccctcctcggcgccgccgctcctacgctaccccacgaccccacaccacgcccatcttcctcacctcaacgccgccacccaatccaaccgcctggaccgttggatgccaccgccccgcccctcctcggcgccgccgctccatccaactgcctcaacgccgccatccatccaacctcctcggtgtctcctcctcactacgtggccgtgatcaagatgccccgtggaaggatggatgggacaaggacacgcaaagaccttggtgaggtgccaattactgagtatgaaaaggagagggctttaaatgtgatgaggaacaacaaaatgttgagtagccttggtataactggattaacatcagttattcgatcaagtagtacaaggaagaactctatcgctcgtgaagacattgatccattgtatgaacctgatcatagtgaggacaatgatcatcatgtggctgatcaggatgaacctttctacattgaaagaaggaacaccaacatgtctaccggttttggaggaacaaaaggatccaagagagtggtagcacctaatgtagaagaccaagttggtagagtaactaggcagaagacaaaggaactatccttagttgagaaagatatacatggttcgactgcaaatacagatgagcacacattgatttctgccaattttcctgcacaccttgatgacgagattcagatgtgtgatgaaggcaagaaaaa

SEQ ID NO: 19755 - DNA, 672 bp, Zea mays
  Peptide Sequence Number=SeqID_63130
atgcaggcggcatgcaaccgcaccaagggggcgcaccctttcgacttcgacgcgtccagcatggaggcccaggcccacacgtcatggaccgggaaaggggataccctgaaagggatccttctccgtgaaggaaacgggccccgagcccccctactgatcagaggttcgaaggctggcccctcggaggggttcaacagccgcctcagagcgctcgggctccgcacccactactggctggccctcgaagggttcgacagccacctcagacgtagagcgagggatgaccctgggtacgttcgatacataaccaaggctcgggctgcggtcccaagtcacttcgccgctccactgatcggcctgacaagaggacagcgccgcctgcgccgctctaactactgtgccactcgacagagtgagggtgacagcagccaaggctcggactcggcctcggcctcggaagacgatgaactccgcctcgcccgaccccagggctcggactcggcctcggccccggaagacgacgaactccgcctcgcccgaccccatggctcggactcggcctcgacctcggaagacagactcgacctcgacctcggaggagcctccgcctcgccctacccatggctcggaccgaccacgtcacaggaggggccatcattaccctacccctag

SEQ ID NO: 19756 - DNA, 3072 bp, Zea mays
  Peptide Sequence Number=SeqID_63131
atgcaggacgagatcgcgagatgggatgacctcgtcatagttcttcgtccagcgccgtgtcgggcgaaggatctggcccgtgtgaagaagaccgcccgccgccgccgacggtacgtagcgatgccgtcctcttcctcttttgctgccgctacaccgccggccggcgcgtcgtccgaggagacgctgagcactgtggcggcggaggagttgcgcgccggtgacacagttgagttcggcgtgtcgcggatgtcctcggtccgcgtgcaagacatgcaacagcttggttatttcggcagcggagtggcacgtccaccagttgacgccaatgctgtggtggctctggcgaagtacgtctgggcaacgacttcgtacggcgggcagccctcggtcaaagtcttcacaaagtattattgtctgcactggccgaaaaggaaaattggaaataagattgctcaatttggatcttacacgtttacgccgaagacgggcaagacttcgatggaggtcgttgagttggttccttgtgcccgcaataaatggggcaactggtgggacttttggttttatgttgccgagggcaccgtcgaagaccatccggggcttcccgtggccgagatgtgttcgcattgttactctgcgtacccacagtttgaacgcgtggctgggcgctgggcgaaggggctgggcgaagtatgccctcgccagatgccttcccgtggtgggatgctggtgcgaagtcccgccttcgcactagatttgcatagccgcgatcccgccgcattcgtgcgtgaggcggaggatggggcagtgcggattgttggtcggtacgtgccaaggacggagggccagcgtagttgggatattcgtgggtccaacgatcgcttgaatagggtcttcaagttgaaccgtctgccgtatggcggttatcccgggcaggacgatgtcgaccgtcgcgggaagaaaccggcggcagagatcggagacgaccccgcgccggcggccgccccatcctctaagaagaggaagctaggtactgctatgggaggactgggggtctccgatagctttgctatggagttgatggggacatgcgcggcccccgggggaaggatgtcttcgccagagctccgggagtcttcggcgcggatgctaaaggttaccgggggttggtggcctaagaacgttccgatcccccgcgcggtcggcgaagacttttttacatctcgcatggttcgtgacttcagagtgtttccttatggacggaatgttgctgctgttgtgttagcagtgatagataaggatcgtcaggaagctgcgcaaaagcgtcggacggtcgtcaggctgcccgaggctaggccgaagaggccgcgggggaccgcgaaggctgctgcccccggcggtagccagccgacgctggcggcgaagtcggccggccctgggtccagcaaggtgccagatgtcgtgaaggcagctagcgccggtggagccaagtctacctcggccgaagccgcgaaggcccgagaattgtctccgccgggaaagcgcattgccgatttcggcactgatattagtgtagatgattatctcactgtgcctgtggcgaagggtggcgctttcagcgctggcggtgagatttcggcgctcgatgccgtcaaggacgaggcgggcgctgtgtcccgccggctgaaggaggcgtcgcagcggctaagtcaggcggctgacttcgctgacggcgtggcgtcgggggccctcacgacagttgtgtctgccgaagtcgagaggcttcgggcgcaacatgctgaggccgtccgggaaaagtcggccgccgatagcaagtgtcgcaaactggcggagaaggtggctgtgctggagggcgagaggactgagctccggcgccagctggcggaggagaggaggaaagctaatcaggccctcgccaaggcgcagtctgcgcaggcggaggccaatgtggcgcgggtggagggtagcctcgccaggcaacgcgccgaggaatgggaggagcggttcaacgctctgcaggcccgtgtggagagggccgaggcttcgacgcgctcggaggctgagcggacgcgcaagcagcttatggactcataccacgagctgggcgcacggaccgctgacttcgaagtgcctgaccgagagtcagaacttcgttgcctcgagtggctgcaagaggagttgttggcgctcccgaccattgtggagggatttatgtcctatgcctccctggtcacctgcgaaggggcgattaacgcgctatcccgcgaagggtgccgtcactatgaggtcttcgaccgatctgatgaggatttcgaacgcgagatttacaaggttgaggaccctgtggtgaaggaatccgcgggagccctctttgaccggatgtggggcccccacggtcgggaggtggtcagggagcggcggcgcgtgacaaagaaagtggatgacttcggggctttgaacagcgcgcggctgaggtggagtcgaacccggtggcggctgggcccgaggtcgctccggcgccgccccccggaaatcgtcgaaggctcccctgatgcccccgcagccactatggccggcggtggctcgtcgccaacggctgaggatcccccgaagacggcggcggagccggcagcggaggatcccgcggcggctgggtctttgcaggttcaagattttgggcctgcgcacgcaaccgctacttctaattttttggcggcttcgaccgtggatgatgggaatgaatcggatgagtctgcgtctaagttttgtgattttggtgactctgggagttcggttgagtgtacggaagagtcgtcggatgaggacttggattactttgcggccttggatgtggcggcggcggaggcttcgccgcgtgctgcggatgctgaagttgtgcctggtccaagtgctgggcgtaggcggcgaagggcggttgcgaagcgtagagtgagtgaggcggacggctgtcggcttcgtgtgggcagggctggcaggcaggaactgttgtcctcgccggccgccgcaagtgtaggtgagggggagctgtga

SEQ ID NO: 19757 - DNA, 273 bp, Zea mays
  Peptide Sequence Number=SeqID_63132
atgggtgtgtatgggtatacagacatgggaatactgagaagtgtaatgtacttgcaacgacacacctacgctcaggtaagaaggtacactaacctcaaaaacatactaatccttgaccttgtgatctctatgattgttggaacttgctttccggtgcaagttgatccaacgtgggagtgtagcaacgcaaacagggtttttgcacgagatggcaatagctttgttaatctagcctctcaagggcactgtgcgggggtatttataggtatctga

SEQ ID NO: 19758 - DNA, 387 bp, Zea mays
  Peptide Sequence Number=SeqID_63133
atggcgcgcctcaagcttctccctgcgcgcgcgaagttctctgctcgcccagtctgcgcaccactgtatctctccccatggcgctcctccctgcccctgctcggatttcccttccgtaccgcgccccctcggctcactccctcaacctcgccgactcgccaagcttcctgctcgcctctgcgcagcgctcagctccctctgtccgttcccagccgtgatgctccctggcgcttggcctgctccggatccgaggctggtcgccctgtgtgctcgactgtgtcttgtcacaaaaccccgacgccgtcgtcccctgccgtgccccggatgtcgtgcttgttgtggtcggctctggtggtcggcatcgtcgactgtcgattccgtcagtag

SEQ ID NO: 19759 - DNA, 216 bp, Zea mays
  Peptide Sequence Number=SeqID_63134
atgggcgctggagagagagagcgcgatggagaaagcgctagcaagctacgcgcgtgtggaaggagtgccagcagaggggaagaatataaggaagaagcagcgagcgtcgtgaaaaatctgaaggaggggtggcgagatttttcgttagagctgagcgacgcagagataagatcaaacgcaggaaaaatgaacgccgtgagcaatccaagacagtag

SEQ ID NO: 19760 - DNA, 192 bp, Zea mays
  Peptide Sequence Number=SeqID_63135
atggccggagctctggcggcaatagcgggcggaattgagctcgctggagctaagggaaagtggctggcccgctaccattcttgtgtgggggccataggattttgcctactggttgcagagatatggagccaggaaatccggtctgtctccgtgcccaaacccgaggcaaatccaaggttttgtcgtgtctag

SEQ ID NO: 19761 - DNA, 150 bp, Zea mays
  Peptide Sequence Number=SeqID_63136
atggaaggaaagccatcacgagaaaggaagtcagaactgaaacgagtgtctcctccactggcgggggtgggtgaattcatctgcggaagggaatcaagaatttgctccgataccagctgtggcagaaccacccgaattattccatcttaa

SEQ ID NO: 19762 - DNA, 887 bp, Zea mays
  Peptide Sequence Number=SeqID_63137
taagcactccgaatactgattcggcgtcgtccggatcgcgaaaatacgctatatacgacgagcttctctctcttcactctcacgcgcgcagccgctctgtcttcgcgcgccgccagccgcgtcggccttctgcgcgcgcgccgccgccagagcagcgctgctccggccgccgcccgccgtcgcccccggcgcgtcccgccgccagccgtcgcgttccctgcgcgctgccgcggccgccgcccgaccggcttccctgcgagctgtcgctgccccgacgagccccagccgcgctcgcccttgcccgcgcggcagccgcaagcgccgctcgtcgtcccggtcgtccgacgccgccagcgctgctcgccgtcgccaccggatcctaccactccaccgtcgcgtcaccatccatagagattggaagcggcgtaaactatttggccgatgaggcgcatgcgagatatgttcaggataaaatggcaacggttgagctgatggaggaggaggacgacgacacatctagattgagtgagcttatcgccctcgcagaggccggattacataaagaagaggaggacgacatgtcaaggttgagtgagctcatagcactagctgaggcaggattacgtgctcaagaggaagaggatgagtttctgtcacaggccaccgcagaggtagaggcagcttattacaagaagaagtctgatgaggctgaggctgaggatgagctattctcccaagctgcagatgaagcagaagccaattattacaaaagaactggtgacaagtgtgatgcaggacaatgcagcaagtggaatgaggttgttgttgaggattgcgagacggatgactccgaagatgagttactcatagattgtgattcagactga

SEQ ID NO: 19763 - DNA, 162 bp, Zea mays
  Peptide Sequence Number=SeqID_63138
atgcaaccccagtacctagtccactctagagcagtatacgacagatacgtccagtacccccaaatgatggacaagatatggacctcagtggttttctccacattaggaaagctggaagagccttttgaactcagttttttgctaacagtggtgttatggtga

SEQ ID NO: 19764 - DNA, 1389 bp, Zea mays
  Peptide Sequence Number=SeqID_63139
atggcgatagtggatgaaggcggcaaaggagaggcgcagccgcctggattagacccaagaacccgccgatctgcggtgaccagggcgaccggcgacatggatggcggtggccgaggagaggagtgggagggcccccccggctacgtgctctcgctccctgcggcggcgctgcccctgcccgtcgccgtctcctgcctggacgccaccgtccggcgcaaggggcgcagccatatccgccaccgtggccatccatcgggctggtgggccttcagtctccccgtccccgcgccggaggaggcaaaggggccggttcccccatcgtcgacggccaataatccgaccgaggagggcccaagtagcaacacgagaggaaagaatttggccgtgagtcgcgaccagggagctgtgcagatgtcgaccatcatcgtctcggtggacctggaatgcagccgctgtcgtgccaagatcgagaaggtgctcaacaggatccaagaaagtcaacctttgagcaggtataagcctggggactggattgagggagtcggaggcgcaaaggctggacattttgtcttgcctgaggtcaccacattgctcctggtgggccctagaggttctggcaagagcacacttgtaaaccgaattactagggtctttgacaaggatgatgatccttttgcaccagatcgagcacaggtgtcatgcaattcaaaatcaaatggtacaatgtttcttcgcgagtatccaattccaaggaattcaagtgccctccagaacataaaatctgaaatagctgatgtgtctgctaatcctcaaggtctacttctagaggcccttcattcggttggatattccggggcactggcaaaacctttgatggcttcagaatctgctgtaaaccggttggatgttagcagcttggaagaatttgttgctgaacattacactgctcccaggatggttcttgcagcatcaagagttgatcatgatgcgctgatttcagttgtagaaccacttctgtctgaccttccgtgcgtgaaacgtcctgaagagccaaaatctgtgtacgtgggaggcgactgtcgctgccaagcagattctccaaacacacacatcgcacttgcttttgaggtgccaggtggttggaatcaagagaaaactgcaatggttgtgacagtgcttcagacttgtcctgagatttctcaggcagtctcatctgtacttgagcgtgcggtgtatgccattgctcctgccggtgttaaaaaaacaatcacatgtgttgttgcatatgctaatctaatagtgcttcaaaggtatgttgatcaatttgagaatcggcaacaaccaaagctgcctgcaatggttgtggccggagcttgcccctggcattaa

SEQ ID NO: 19765 - DNA, 363 bp, Zea mays
  Peptide Sequence Number=SeqID_63140
atggcggcctccaccaacccactgccatcctccaactcctcccccaccggctgccttcaccgaaccctcctcttcaacgcgcggcacaaccgtccccacccccacgaccctcgggcagcggattcccctccctctacccacgacctccactcccgcatgctccctatgcacgacctctactttgcctgggtcatgcacggatgccagatgaagataaaacctgagcatgcacggacactagagtccgaggagttccctcgagagggaggacaacccactcagttcccatctcgctctgtcctctatgttcgagctcgagcacgtgtggacgccatagccggaatagttcccccgagagcgtga

SEQ ID NO: 19766 - DNA, 183 bp, Zea mays
  Peptide Sequence Number=SeqID_63141
atggaggatgcgaccaccggtgccattcaggcctcaaacaagtctatggagactgacattgtagttttgcttgcagccacagttccgcgtgtgtggaccaacgctgttcttcctcgttctcaacaccctgatgatcttgctgtaaatctgtactcctatgtgttttggccactagatgactga

SEQ ID NO: 19767 - DNA, 363 bp, Zea mays
  Peptide Sequence Number=SeqID_63142
atggcggcctccaccaacccactgccatcctccaactcctcccccaccggctgccttcaccgaaccctcctcttcaacgcgcggcacaaccgtccccactgccacgaccctcgggcagcggattcccctccctctacccatgacctccactcccgcatgctccctatgcacgacctctactttgcctgggtcatgcatggatgccagatgaagataaaacctgagcatgcacggatgctagagtccgaggagttccctcgagaggaaggacaacccactcagttcccatctcgctctgtcctctatgttcgagctcgagcacgtgtggacgccatagccggaatagttccaccaagagcgtga

SEQ ID NO: 19768 - DNA, 435 bp, Zea mays
  Peptide Sequence Number=SeqID_63143
atgagttgtttcaccactacattgcaaccatcagtatcatgcagacttcgatatatgccacgccacgatttgtatggtctcatcattggagagcacgttccacatatgctggaagaaattttctcgtacatcgttagtcatcagacacgcaccaccatacgctcttacttaaacaaaaagaacaacccgagagtcatcgacgttggcgacaatcatgaggcccccctgcttaacgatggacagcgcggtgcagctgctctggaccacgtccaagtggtggcttcgcgggagcttgtcatacacagcggcgtatacgaccacgtaggactgcttctagaggtcgaactgacagtcgtcaagcttcttctcgtcatcgatgagcgacgccaacgcgagtgccttctgcttatggtgtttgctcggggtttcaagtaa

SEQ ID NO: 19769 - DNA, 1110 bp, Zea mays
  Peptide Sequence Number=SeqID_63144
atgaacccggggtgcacttcatttggcagcccaaccaagagtcatcggtactcgttatgtccgcgcgcgttcgatgactactatatcgaggattgtggcgtcatcttggcgtcggagcccagcttccctatgagaacgacgcactacgcctgtcatcctctttggcaacctccgcctccgcgacggcgccgcacgcacgagctccactcccgtgacctcctccccacgacctcaaccagctctgccacttccacacgctcactgtgtacgccctcactaatcgcccatggccgaaacccctcgccccaccccgtgtctcctctcgacgtgtcggagctcacccctgcgccctccagtaagccactgcgcgccctctgctcggctgcagtgcctgctcctcttcagggcccgctccctctgcggcatactcgaagcatcgtgagatcggggccgaggaaacggggcccgctcctcccggccgcgccaccgtcgccgtccccctcctcgctcccgctccacctcaccgcgccggcgctggtgctcgccatatcctcgcacccgttccccacgctcgcggccttcctggcctcccgccgcgacgagcttctccgcgcggacatcacatccctgatcaaggcgctagagctctcggggcactgggagtgggcgctcgcgctcctccggtgggccgccaaggagggtgccgccgacgcgtcttcagctgctgccgaggtgagcaggtggatggtgctggaacggggaatgcgtcctgccctgccactgccgaaggcgtactgggacgagaccttggagtacgagagcctcggcgagcactttcaggacgaggaggtggtcgccgccttatgtgtcgttgtcaacacgaagcaattcgcttccccatccactacatctgtcctcaacagggcctggactagaaagcacgacgactcgatgaccaggcactgtgcttccgcaaccgccgctgccatccacaccaacctccagagcaacggaggaaactcgaatacaatagtggctcttgctgggaacaaggctgatttgttagataaaggtgggattctatttctaatgcccctgcagcttctgtaa

SEQ ID NO: 19770 - DNA, 1914 bp, Zea mays
  Peptide Sequence Number=SeqID_63145
atggccatcaacagcaatactttagcagagatggaggtcgctgaaccttatcttgactccctaccaaagaatggacggtcaaccttaggtgatatcatataccgctacataacctctgatcagttctcccctgagtgccttcttgattgcctggatctgtccacggagtaccaggccctggaagtcgcaaaccgtgttgaggcgtcagtgtccctgtcgctgtgcttggtgaagctcatgaggcgcgacgacgtcagcgctggtgcggctaacaggaacaggaatggcagcgtgatgagggtgaaggagaaatgcagcgaggaggagggcgactcagtgtgctccgtctgcatcgacggcggagagctgctgctctgcgacaagtgcccttcggcgttccaccacgcctgcgttgggctgcaggccactccggagggcgactggtgctgcccgttgtgcagatgcggcgtgtgcggcggcagcgacttggatgatgataccgctgaggggttcacggacaagacaatcatctactgcgatcctgaatgtggcgaggtgtttcagcatctgcagggccttgctgcgtcgtccagggcaagatccatcccaactacagtagagggcgtatcactcagcaccctgcggcggcggcggtacatgtccacggtcacacgaatcacgagatggcagcatgaggaggaggacgccgcagatcacgggcagctgtgcgcggctttggacgtgctccacgagtgcttcgacgacatggtggagccccgcacgcagactgacctcgccgccgacatcgtcttcaaccaagagtcgggtctgtgccgcctcaacttccgcgggtactacgtggtgggcctggagaaagccggcgagctcatcaccgtgggcacgctgcgggtgtttgggaaccaggtggcggagctgcctctggtgggcactcgcttcgcgcaccggcggcaggggatgtgccgcctcctcgtgacggagctggagaagatgctccgtcaggtgggcgtccgcaggctggtgctgcccgccgtgccggagctgctgcccatgtggaccgcctccctgggcttccacgccatgacccgctcggacgtgatggagatggccgtagagcacgccatcctgagcttcaagggaaccaccatacaagatggagtttcttctcttgatttttttcacgctcacgagatcaaggatggtgagaaaagagacgaggagctgcgggagtacctcattgatggcacgggattatgctacattgcagagaaactcatgcccgacattcaggagccgtgcccacccccgcgtcgagctcgcccgcgtagaagccgcccgccggagcacacctcggcgaccgagatccgcccgccgaagcgcccgcgtagaagccgcccgccggagcacaccgcggcggccgagatccgcccgccgaagcgcccgcgtagaagccgcccgctggagcacaccgcggaggctgagatccgcccgccggagcgcccgcggaggccgagatcctcctgccgtgcggcccgggcgaacgggtcctgcggctgcggggggcgccgtcgacgagctcgccggggacctgcccgcgcacgcctaagatctgccgcgcaacgcacaccggagacccgcccgcgccgtctgggacccgcgctgtgccatgccgcctggacacccttgccgtgccgcgcgccggagaagggcccgtccccgccgcacgccggtgaaggccgctggggctgccgcacgccggagaagggagtggtggagagcgatggaccagccgctgccagcgaacctgggagcgtgctcgcgtgcgattcaatttgggaagagaagcaggggaaaggggagcgggtcccacttgtaaggtgtcaggtccacctctaa

SEQ ID NO: 19771 - DNA, 516 bp, Zea mays
  Peptide Sequence Number=SeqID_63146
atgaatcatggcaccgagttcggccacgtcagagccgtgtcagcttcttgtcgccagaggagcacgcacctcggcgccaagatctgtggcgccaagccatgttacctcggcgccacaggctatggcgccgagcaaagggtccaaaatgagattaagtcatccaagggtctaaatttgaatatttttcaaaaagggctaaaatacaagcaccacaggctgtggcgccgaggaggcacaacagctatcagcaattacaactactacaacaaggagagtacagacacaacccacaaagcttcggatgacaacgatgcctcacttgttggcatctgcctcaccgatgacagcagtggcagttgcgggggcgtgtcacacccggatttaagggataaagccagggtgagctcacaaaagatcatagctcaacaagttgtggggaataatgtgcatgaactcaccaaaggtgggagttcatgtgaaggcgttgtgaccagcgacatcgaggctggaggctaa

SEQ ID NO: 19772 - DNA, 552 bp, Zea mays
  Peptide Sequence Number=SeqID_63147
atggcgatgctgatatgggatgccggtcataacagctctcctggcctccaaaaacaacttgtcctcgagctggacaacgagataagacgccttgaattgctccaaaggtacctcaatgatgtggactactatggcgggtttgagcaagatgagcttgatgagctgtttgaggcgatgcgatcaaactacaaggcctggtgctcaggttttgcgcccctgtgtgttggcggagacatggaatcagtggcagttcaggagtttagcaggacgctcttcaatatacgtccggacattgcgcttagtgttgcccagacgatcttccagagcgacgtgcgcagcctcctcccgcacgtcactgtcccatgccacattgttcagagcaccaaggatctcgcggtgccggtcgtggtgtctgagtacctgcacaggcaccttggtggcgactccatcgtggaggtgatgccctctgaaggccatcttccccagcttagctctccggacattgtaatccctgtcttactccgacacatccagcacgatatcgcagtctag

SEQ ID NO: 19773 - DNA, 234 bp, Zea mays
  Peptide Sequence Number=SeqID_63148
atgccgcccaaattggacccctctcaggtggtggaggtcttcgtccgcgtgacgggaggcgaggtcggcgcggcgtcgtcgctggctcccaagatcggcccgctcggtctctccccgaagaagattggtgaggacatcgccaaggcccaaggagaccgccaaggactggaagggcctccgcgtcaccgtcaagctcaccgtgcagaagggcgagaaagatggggtggaagatga

SEQ ID NO: 19774 - DNA, 450 bp, Zea mays
  Peptide Sequence Number=SeqID_63149
atggattggatagttcgtcgccggaggacgatcccgaggccgctagatcaaaggacgcctcagaagccatcagatcgaaggtggtcgtcagaggaggacgcccttcgatgcaccgcatcggaggagatcgttgtttttggatgccaccacggacggtcaccgcagctatcatcgctcgcgcctcggaaggtcgtcaccatcgccaccgatcgcgcctcgggagttcgcggtcgctgcaaccacttgcgcctcgggaagacgtggccaccattgctcgcgcctaggcagtcacggctgttgcggcgctcacgtcttgggccgccactcaccgacatcgcctgggaccaccgctcgcgtctcgcgtcgcaggaagttgtcgtcggcatctggctgccgctcgcacctcacatggttgtagccgtcaccaggccccgaaaccctaatccctag

SEQ ID NO: 19775 - DNA, 747 bp, Zea mays
  Peptide Sequence Number=SeqID_63150
atggccgccggtttcgaagcgcttcttgactccaccgcgctctcgctcgcgctgccagtgccagtgccgacgatgacgctcctggggctgaagaagctcaacagcgaggactacctagccatctgcctcgccgcgctcgcgggcacccgaggaagaagcggcctcagcaaggccgccgccgccgccgctggtttcgggcggcaggagggcggcggcagtcgtaagcagtggtcgtgcccgccgccggcgccggcgcgcgaggaggaggagctccggttccggtgcgcggtgtgcgggaaggccttcgcgtcctaccaggcgctcggcggccacaagtccagccaccgcaggccgcccacgggggagcagtacgctgctgctctcgccgccgcgcagcaggcggcagaccactccgaggagacgacgacgacgtcgggtgggccgcaccggtgcaccatctgctggagggggttcgccacgggccaggcgctcggcgggcacaagcgctgccactactgggacggcagctccgtgtccgtctccctgtcggcgacggcgtccgctacgggtacggggacggggtcatcaggcgtcaccgtcaggaactttgacctcaacctgatgcctgtgccggagagcgatgggatgaggcgatgggtcgaagaggaggaggaggtgcagagcccgctgccgatcaagaagcgcaggatttcgaatccatcattaactctcgctacctgcgactga

SEQ ID NO: 19776 - DNA, 555 bp, Zea mays
  Peptide Sequence Number=SeqID_63151
atggctcctgttctccggcaaggcaaccacaacatgagctcctcaagtgaagagatccatggtagccgccggggtgctggtaacgttgaggtcatctttcctgagtctcatgtggttggtggagcccctgcatcctctgttgctgacagcaccgagcctgtgtcgacatcgttggccactgcagattcttcggcagctgcagattcttcggcacttgctgagaaggacattgcagcgctgtctcctgagcttcgtgcacaagcaactgatccgaagagcaggcaaggtcacaggaccctggatggaagtttgggagggtcaatcagcggcgtcaaacaaccctcacgcttcgtccagcccttcgccgaaccagtccagatgcccacctcgttgatgacctattttgtgatgatccagacttatatttcgcactcggcaaagggactggcaaaggggtccactggaggactctttgccgagtgccagtccactagacactcggcaaagaagcctcctttgccgagtgcctacgagagctctcggcacagggactag

SEQ ID NO: 19777 - DNA, 174 bp, Zea mays
  Peptide Sequence Number=SeqID_63152
atggagattactaattatagactgttagaatttaagttcgtttatatcctttctccatcgctgtctgaggtgcgtggtcaagtcgaggcgaagatgagcaaggaggacgtgctcaaggtgcaggatgagatgcaaggaggggctactagtgtcacacccggttttagaaggtaa

SEQ ID NO: 19778 - DNA, 645 bp, Zea mays
  Peptide Sequence Number=SeqID_63153
cgtgcccctctttttttcctgctcgcgcgcgcccctgcccttccccgctcgccggcggcgcggccggccccgcccgtcccctgctgcggcggcgaccccgcccccgcccccgtcggtggcgcgaccccgcccctccccggccccgcggcggcgctcccccgcccctccccggcccgcggcggcgatcccgcccgcccctgctcgccggcgcgcggcccccggcccccggcgcggccccggcggctcggccccggtgcggcccccgccccctgctcgcccccccggttcaaccgccccgaccccggcccgatcgcccccgctctcggcctcggccgtgccctcgcccgaccgtgtcctcgccccgccgtgccttgctcgcgtcgcgtcggccctcggcgtggcctcgagctcggccaagcgtgccttcggcgcgcggcctcgagctcggccagcgcacggccccgacacccgttgtgccgtcaatggggctcggtgtatgcggctcgctctgccaaggttgatttgtcccttggggaggagtgcggtgacaatgagactgatggttttggtgatgactatggtgctggagaagatgaagctgtggaaggagacttccaggagttccaggactacgacgagttctag

SEQ ID NO: 19779 - DNA, 333 bp, Zea mays
  Peptide Sequence Number=SeqID_63154
atggtgtcactatttggattcaccattcttgatttcagatctctgaagctgattatgtacacgttttcttaccacgacttttattctgctttccggttctcaacgtcttggacattgccggtgagcgcggtctcctcggcaacttctactgctaactcgggtgcaagatgcccaacaaacttccaatccagctgccggcaaggagatgaggttcccgacggcgacaattttccactacacaaccggattcttcagcagcatatgaatccgttgaagcgccatgtgacaatgccaccaaagagcagcaacaaacaagctcaaagtcttcgctaa

SEQ ID NO: 19780 - DNA, 705 bp, Zea mays
  Peptide Sequence Number=SeqID_63155
atggccgccggtttcgaagcgcttcttcactccaccgcgctctcgctcgcgctgccagtgccagtgccgacgatgacgctggggctgaagaagctcaacagcgaggactacctagccatctgcctcgccgcgctctcgggcacccgaggaagaagcggcctcagcaaggccgccgccgccgccgctggtttcgggcggcaggagggcggcggcagtcgaggaggagctccggttccggtgcgcgggaaggccttcgcgtcctaccaggcgctcggcggccacaagtccagccaccgcaggccgcccacgggggagcagtacgctgccgctctcgccgccgcgcagcaggcggcgggttccgcggcaggccactccgaggagacgatgacgacgtcgggtgggccgcaccggtgcaccatctgccggagggggttcgccacgggccaggcgctcggcgggcacaagcgctgccactactgggacggcagctccgtgtccgtctccttgtcggcgacgacgtccgctacgggtacggggacggggtcatcgggcgtcaccgtcaggaactttgacctcaacctgatgcctgtgccggagagcgatgggatgaggcgatgggtcgatgaggaggaggaggtgcagagcccgctgccgatcaagaagcgcaggatttcgggtccattaactctcgctacctgtgactga

SEQ ID NO: 19781 - DNA, 954 bp, Zea mays
  Peptide Sequence Number=SeqID_63156
atgtcttcttcctcccttatgcgtcgtgtctttccatcttccaagcccccggatggggggtatccgccgtctttccgcctcctcgttggaggaacgcaactccatgggagttggtacctctcagccatcgttcggcttcaaggattttcatcagccggcccggtcgcacccccacgccggcggtcacccaggatggtgaccaccagttcctgggtggggaagagcaagccgggctgcgatcttggtcccaccctcagcttcaaggatgttcatcatcctcgctggggtgggggccaggctgagccggcgctctacctcccatgcgggcctgcgggtcaccctctcccgcggcgtttgggggtggaggcggtcactggccctgcgggcggcgcggacttagacaacgtggggctgatcgacggcgggcgtcgtcacctccagcgtgtcggagtcgtcggccgggctcccggcggcccctcctgccggagggcggctgccgcgccgtgtgcacgggaggaccacccacgataccacgcgctgctagggcggcgttcgtgttctggggtggccctgcttttgcactgggacggcgccctcgcgcagaggccgaggcggagttggctcgagaatgggaacctggttggccggagcctagccgggttgtccgtcagcggagccgacgccggagtcgatcagccgaggcctcgggtcgggctggcgcccttggaagtcggttggccgaggccccagggggatgcccgcgtgagcgagagttgcttctcgcggaaggtgatgagtgaggatcccctttccgaagtagtcaagaagcacgaaagaaattctgctaaaaagagatcctttttcgaggaaaatttcgacgcagagggggtctccccccttttagcccccgagggagggtcgggctttgccgaggcgaggccgacccttccttga

SEQ ID NO: 19782 - DNA, 1905 bp, Zea mays
  Peptide Sequence Number=SeqID_63157
atggctcaccggagttgctccggcccgcacgagaccctctcaccgccgttctaccctctctatccgtggattcatgacctcttccccgccattgagttcgccatggcgccctctccctctctgctcaactccagcgaccccggagccaccctagcccgcgccagcctcaacgccggcaacctcaccgcctcagagaggagcggcgccgcccgcagccgtttatttccccggcaagatcgacgaaggatcggaatggacgcgaagctgaggccgctgccgcagccggcggtgaggaaggccgcgtggcccgtcggcctgctcgtcgcgctgtgctttacgacgctgccgctcttcctcgcgctatcgcccggccggccaaccctgttcgacgtgtggcagcagatcggcatcagagtagcggtgcactacgacgacgagccgaagccgccggagccttcgggttcgccactggagggccgcgacatcctcctcggcggcctgctctcgccggaagtcagcgagaggacgtgcctgagccggtacctctcctcgctgtaccgcagggcgtcgccgcactcgccgtcgccgtacctcgtctcgcggctgcgcaggtacgaggcgctccaccgtaggtgcggccccggcacgcccttgtacgccaagtccgtgaggcagctcgcctccgcccacaacagcatgggcctcgccgagtgcagctacctcgtctggacgcccggcaaccacctcggcgaccgcatggtctccatggcgtccgccttcctctacgcgctgctcacccgccgcgtcttcctcgtcgacatggccaaggacatggcgggcctcttctgcgagcctttcccgggcgcgtcgtgggagctgccgccgggcttccccgtgcacaacctcacgcagctccgccgcggcagcgagcacagctacgggagcctgctgggggccaagaagatcagcaacgaggaccccgtcggcgtgcggtccgagtcgctgccgtcgtacgcatacctccacctggcccacgactaccagctgccggaccacttcttcttctgcgacgacgaccagaccgtgctggggaaggtaaactggctgctactgcgctccgacctctacttcgcgccggggctgttcctcgtgccgcagttcgaagacgagctccggtggatgttcccggccacggacacggtgttccaccacatcgggaggtacctcttccacccgtccaacaaggtgtggaagatgatccaggggtactacacgtcgtacatggccaagttcgatgagaaaattgggcttcagatcacgaccctcgcctggaaccccgtgtccacggaagcctacttcaaccagatcgcggcttgcacgagtcaggagaagatcctgcccgaggtagtagaccccaaagtggcgttgagtgacgagcacgaggccgctgtggcgtcgtcgaaggcggtgctcgtcatctcggcgcatccggagtacgctgagaggctcaagtccatgtactacgagcacgccacggtgaccggcgagcctgtaagcgtgctgcagccaccgggagccggcaaccagccgcagaaccacaaggtgctggtggagatgttcctgcagagctactgcgacgtgtccgtggtgagcgggtggtcgacggtgggctacgtcggtcacggcctcgccgggttgaacccgtggctgctactgccgccgacaaaccagacggtggcccacccgctctgtgtccgggcaatgtcgatggagccgtgcttccacgcgccaccgagttatgactgcagggccaagaaaaacggcgacctcggtgccgttttcccgtatctcaggcactgcgaggatgtggatgatggccttaaattgtttgatggactttcatga

SEQ ID NO: 19783 - DNA, 162 bp, Zea mays
  Peptide Sequence Number=SeqID_63158
atggtgggaacaagtgcggtcactgcacggcggcagctggggtcagtgaagcattgtttaccttgcaaggataaaaactcgattcgaatcgtctgcttctcgcagctaatgagactgcttgaccccttgtactacatcaagtgcgcttcagaatatggttga

SEQ ID NO: 19784 - DNA, 108 bp, Zea mays
  Peptide Sequence Number=SeqID_63159
atggcgggcggaaaagagctcgccggagttaaggaggggcgtctggccggcaaaggatttgagccaaggatcaaggtgaacacgcttggtctttggctcaaggtctga

SEQ ID NO: 19785 - DNA, 60 bp, Zea mays
  Peptide Sequence Number=SeqID_63160
atgtgggagcttcagacactgggcctccttttttcttcttttcttagaatccaaggttaa

SEQ ID NO: 19786 - DNA, 324 bp, Zea mays
  Peptide Sequence Number=SeqID_63161
atggcgcactcccccctcctccttgcggaaaggcgacgtaggggcgtatgtaaaaagtcgagtctgtccctgatcgtcctctcgccctgtgcagaggctcgggggctgctctcgcaaaaaccggctccggccaaaccgttgacagcgtcaacataccagcccgagagcttgggccccgaccgtgcacccgggctacggccagttcgcatgagggaacgaccagaccagccgaagcattacgcaaggggtaccctcaagacgcctaattctcagctggtaacccccatcagcataaagctgcaaaggcctgatgggtacgattaa

SEQ ID NO: 19787 - DNA, 396 bp, Zea mays
  Peptide Sequence Number=SeqID_63162
atgggcaagagcaagagaggtgggagttcctcacaccattccggcgataagcggaagcgcgagccgactcctccctcggaggacttcggcgattccgagtactcggaggaggagttctcctccaagttagagggttcgccggtccatgcctctcccctggcgtcgtctgacgactcagacgactcccaggggatcgccacagaggtctcctcggacgaggagaactcctcggactcgtccgaggagggcagaggtgacggcgatggcgggggcgacgacgacgacggaggtgacggcgatggcgatggcgacatcgatggcgacaaaggtggcggcaagggcggcagcggtgacggcaaggacggcagcaagggcagcaacaaggccagtggctag

SEQ ID NO: 19788 - DNA, 426 bp, Zea mays
  Peptide Sequence Number=SeqID_63163
atgctggtagactacacaacggtactcgatagaccatgtgtgtcagtcaaaggcccgacgcagcagggtatcgatagcgtcgtggaagtgacacccgcgagcggcgtcacgagtgatgggtctagcgatccatccatccggctccggctcctccaaaagctctgtgtcgtggctcgaactgccaccggcgtcgtcggcgtctccgtctccgttagggtctcctccagcagccgggttgccctgaggtggtgcagggggcatctctggctgaggtgcaggggacggaggccgctcagactccacctcctgctaaggcaagggggaagagtcatgctgctcctggtcctgcgcctgctcctggcgtcggcgctcctgctcctcgtgcaggtgacgatgcagtctctccaggtggctggattgatctga

SEQ ID NO: 19789 - DNA, 555 bp, Zea mays
  Peptide Sequence Number=SeqID_63164
atgtcccatctgaacattctctccttcaagtacaaccttgcgaagctccggtccaaagccgggcgccggcgaattgggcgggcgctgtcggccagggaccgccagttctccgacctgagcacctacaggcccgacgaggaggagatgaggaaggttttcggcatgatagctggccagccccgtggcgtcaacaagagagacctccagctgctcctggagcggttcgggaaggcggacgccgccgccgaggcccggcggatgctgtgcgtcgcggaccacaacaaggacgggtacatggacctggaggagttcatggaggtgcacaggaacggcgtgcagctgggggacatccggcgggcgttcttcgtgttcgacagggacggggacggcaggatcagcgcggaggaggtcatggccgtcctgcgcaagctcgggcagagctgcggcctggacgactgccgggagatggtgagggaggtcgacaggaacggcgatggattcgtggacatggacgattttatggccatgatgacgcgcccgcgtaggaggccgtga

SEQ ID NO: 19790 - DNA, 213 bp, Zea mays
  Peptide Sequence Number=SeqID_63165
atgtcgggagatcacgccaagaaggacatcgtgactggcggtgacaagtctacatgccacgggaaggctccttcgggggagtccggcaacaaaatgaagggatcgccttcacatgccaagtcgcatcggagcggcaacaagaaaaagaagatgaagaaggtaccatccgtaggggatgaaggatatgatttggacgaggtcgcccaaatctag

SEQ ID NO: 19791 - DNA, 480 bp, Zea mays
  Peptide Sequence Number=SeqID_63166
atgaagtgtggcgccgcgacggtgtatgagctccggcgagaaattgatggcggacaagacgctcccgagccccaggttcacgctgtgcactccaccgtggcccgcgcatccctcaatttctatctccccggtcgagtcgttgaccatggcgaggttcaacagcggcggcgcgaacaccgcaccgagggctcccgtgatctttctagggtggcggacgcgaggagtaagaagaggggaaaagtgaggagggtcctcggcccgcatttagcatcgggtcagcggggttggcggccgattcaggtattgccgaaagaaggggaagtgcgccgcgccgcccgccatgctcgggattccgttgggaatggagctgacgaagacggcccactgatcagcggtagagaaaccgagcgcgcgcaacggaagacagacaagcaggccccggtttccagcttcccagagtacgcccgaggtgatcggtga

SEQ ID NO: 19792 - DNA, 420 bp, Zea mays
  Peptide Sequence Number=SeqID_63167
atgggcaagagcaagaaaggcggaagttcgtcacaccattccggcgacaagcggaagcgcgagtcgactcctccctcggaggactttggcgattccgagtactcggaggaggagttctcctccgagactgaggggtcgccagtccacgcctctccccctgcgtcgtccgatgactcggacgattcccaggggatcgccaccgaggtgtggacatacatccgggccgtcgagcactccgggctcgagggatcgaatgagtcggaggtctcctcggacgaggagaactcctctgactcgtctgaggaggggagcagcagtgacgacaacgacgagggcgacggcaacgacggaggcgacggcgaaggtgacggtgacggcggcaagggcaacggcaagggcggcagcaaggccagtggctaa

SEQ ID NO: 19793 - DNA, 90 bp, Zea mays
  Peptide Sequence Number=SeqID_63168
atggagctctccctccccagccgagccctctcccttcctcccaccgccaacctcgctctcttctcgcgcccttcttccttgaagttataa

SEQ ID NO: 19794 - DNA, 855 bp, Zea mays
  Peptide Sequence Number=SeqID_63169
atggaagaaacacacctccacgtgttcgacgctttctgccagcgccagagcacgctcacgcgcgcccccgcatgcccagcgccacgcccgagccaagccagcaccatggcccgcgcccgcgcctataaaaccctcccagacttcgattgtacccttctgcgcaccctcaaacctcaacggagtctagctcgccgccgtttgcccgtgcgcagcgtgtccgcggccgcccaatccctctgccaccgtagaccggccagtggagccattcccaactccgtccagccctcggagaagactctgcacacctccgtgaggctccccgagcgaggaatcggagtttgcttcgccggagaggccagtccacgctcgccggagctctcaaccccgccggagtacgtggaccgggtaaaccactccaccatccttcgattctttgtgcacacggtcgctacgttaccccgtgaagctcaccgtgccctcggattgaaccagttcgccgtggtttggccggtatactcgccgccgacgaggacacccgcctgcgcgcgtggaccgggcgattctggccatccccgacgtcaagccgtacctcgacgtgaccgccagagcctccccgagccaatcccaccctccgccggacctccctcgccgccggtaagccgcgccacccttttctttcccgcggttactgtttgcataaggggaaggactacgggtgagagggagagaagagagtacatcctcgtgccggagcaaggagctgctcaggaggtagccccagatccagcacccgagcctgcaccagaggacctgcctgccactgctttggaaggcaagccccggttttatgcataa

SEQ ID NO: 19795 - DNA, 48 bp, Zea mays
  Peptide Sequence Number=SeqID_63170
atggatatcttcgggcctattgcttatcttagcatcgggggaagataa

SEQ ID NO: 19796 - DNA, 279 bp, Zea mays
  Peptide Sequence Number=SeqID_63171
atgaccatcagtacactcgaaaggaaaatgttagtgaactacatatgtccaaaagtaagtgttaaaatcagtgggatagattttctagctgatcttatagtgatggaatcaatgggaaaggatgtgattcttggaaataattggttacaaagaactaaggcagtaatccaacatactgagaaaaacatatgtttggaaactccatctagagaaagaatggtagttgaagacaatcgacctccagctctgaagattggtacatgtgacgaggaagaataa

SEQ ID NO: 19797 - DNA, 384 bp, Zea mays
  Peptide Sequence Number=SeqID_63172
atggccgaaaacgaagaagagagtgaagtgactcaagagaagacatcaccacctttggaatctcaggcagagacttggctctacttcgacatctgcgagtccgagcctgactcacctactaacaaaggcaagccccggcttgatgatcgaggaccctttaactggtcacatgcctcgtcatggcatacccttgagagtcttttccttagtcgggtgaggaagcgacaaagttttgttgcttttgctccatggtggtatctaatgaagaaaaacaagaatgaagatacgggaggacttggtcctccacataggatctttttgtttgataattattgggaggagtttttgcctcccttgatatgtgtactcagcactcgtttatag

SEQ ID NO: 19798 - DNA, 1371 bp, Zea mays
  Peptide Sequence Number=SeqID_63173
atgccagcactcactgctgtcagggacgaggcgggtgttgtgtcccgccggctgaaggagatgaaggaagcactaagtcaggcggctgacttcgcagaccgcgtgacgtcgggggccctcacggcagttgtgtctgccgaagtcgagagacttcggacgcaacatgctgacgccgtccgggaaaagtcggccgccgacagtaaatgccgcaagctggcggataaggtggccgtgctggagggtgagaagactgtcctccggcgccaactggcggaggagaggaaggaggccaatgaggccctcgccaaggcgcagtctgcgcaggcggaggccaatttggcgcgggcagagggcagtcttgccaagcagcgcgccgagcagttggaggagcggctcagcgctctgcacgctcgtgtggagagggccgaggcctcgacacgcgcggaggctgagcggacacgcaaacagcttatggattcataccatgagctggacgcgaggaccgctgattttgaagtgccgaaccgagagcccggactttgctgccttgagtgggtacaggaggagttgcaggcgctccccaccatcgtggaggggtttatgtcttatgcctccctggtcacctgcgagggggcgatgaacgcgctctctcgcgaagggtgccggcactatgaggttttcgaccaagctgacgaggatttcgagcgtgatatctacaaggttgaggaccctatagtgaaggaatccgccggagccctctacgaccggatgtggggcccccacggtcgagaggtggtcagggagcgggccgagacgacgaggggtcaggcggcgcatggcgagagggtggatgactttggggctttgaacagcgcgctccctgacccggagtcgaacccggcggcggctgtgtccgaggccgccctggagccgcccctggaaaccgccaaagtcgttcctgatgcccccgcagccgctgcggccggcggagattttgggcctacgcacgcaaccgctactgctaattttttggcggcttcgaccgtggatgatgggaataaatcagatgagtctgcatctaagttttccgagtttggtgattctgggagctcttttgagtggaccgaagagtcgtcggatgaggacttggactactttgcggccttggatgtggcagcggcggaggctttgccgcatgccgcggatgctgaagctgtgcctggtccgagtgctgggcgcaggtggcgaagggcggttgcgaagcgtagagtgagtgaggcggacgacggtcggcttcgtgtgagcagggctggcaggcaagaactgttgtccttgccggccactgtgagttcaggtgagggggagctgtga

SEQ ID NO: 19799 - DNA, 999 bp, Zea mays
  Peptide Sequence Number=SeqID_63174
atgcaatcccctactgcccttgcccctttcgggcagtcacgcggcggttcgctgcggcgccagcgtctcgctcatcagccgtggaaccttcggactgtcgccccgacgcgtcaggcgggatcggacgatgcgaccgaggccgcggagcgcgcgcctgcgccgacgccggaggtgaagaagcaggcgtcctccgtcgcgctgtccaagcaggagatcgcggacgacttcacggcaatccgtgggacacggcccccgcgctggcccaagaagcgacctcgcatggtgcagcagcagctcgacttgttgtacctaggattgtggttagcagatgtggcgcctggctcctacaagatcgaggagaaggctaccattggtggtgtaactatagatgggcttcttgcagcagcagctagattctcgattgggcttgcatttgtgctgataggatttttcaccactcaatgtgctcctgatgcgtccacatatcctggtggtgcacggttctgccttggttccgcgcgtccacgcccctgcgtcccaaaatctcgcaccgcgcgtccgcgcccctacgccaccacctcctcctctcccctcactgcgccgccacctcctcctcctcctctccccctcactacgtcgccccctggatcctcgccccagcctctccaaccgcctctgtgccgtcccctggatctcgtgtcgcacgtccgcaccacgctcgccgcacacgccgcgatgggtggaaagcggtccgtagatccccctactctctcgtcgccccagcctctccaaccgtcgcctcatcccgtggtttctcctgcaccaaaaacggagggcaagcgcggtaggggaggaggaggcaagggcggcggtcccggcgacgctgccctggcaggggtgcgcttttggatcctcatggccccctgtcttcatgccctggctcaggaaactattattgtcaaagctctaaaacttaatgatgttgaagaaggctgctag

SEQ ID NO: 19800 - DNA, 444 bp, Zea mays
  Peptide Sequence Number=SeqID_63175
atggcggacgcggggagggcggagctgacagggaaggcccacggtgcagagagagaaggggcgcgcggggcaacggctcggcgtctggcagaacgggcccacgaggcagagagggaagaggggagcaggggggaagcaactggcgccgacaatgctgggatccctcgcctgaccgccatcgcagcaaaatcaacccaaggacctccctacactgaccactcccctactgcccttgcccctatcgggtaccaggatgattcttcagatcctcgtgacctcgcgctagtcccgcccaggccagatcaacggtcgcagttcatcttccccccgccaaccaagcaggggcaccgccgccatgaccgcgcggtggagaaaaacgatcgtgacaccaatcgacctcccccgagcaccaccatcaaattgaacggagctacacaaagctag

SEQ ID NO: 19801 - DNA, 702 bp, Zea mays
  Peptide Sequence Number=SeqID_63176
atgggggtgcagagactctgtggatgtcttggacatcttgatgtaattaagtacctttccgctatttatttcaagcattgtgtgatggtgtccaattatgtaatcgctgtgtacttctactcttactcttgtgcttacgatgtcttctgtagatggcccgtatcaggtgcactgcactggagtgtccactgcgtcgcacggtgccagtgggaggctacttgcttggtgcgccgtccagacgatgatcttcggggtgcagaggccttctcacagcattattctattactaagagggttactgccgaggtagccatgcaagatgcagcacgatgggcactttttcagtattgctcgttgttcagcggggtagctgatggcctcgacctgaagtactatcctcgccgttcgaccggcagtgctggaggtgtgattgtctcgccagtgggtgagggcaaacccaggctaaacaacatggtcaatctggctgtcgtgctcaacacagagttggaccacgcccttgacgagttgggcaaggtttgggcggtggttgcggaattgcgtgctgagtgcgcagcacgccactatctggatggtggttctccctcccctgtcgggattcagctcccttaccgttcaccaccccgtagtcgcttcgactatggtaccccagactgcaggacccggatagatttggatccctag

SEQ ID NO: 19802 - DNA, 429 bp, Zea mays
  Peptide Sequence Number=SeqID_63177
atggcggtgggtgcgctgcaaaaggggtgtggggcggtggtagtgcgctgcaaagggggcgtgggtggcggtagtgtgctgcaaagggggcgtggggcggtggtagtgcgcatggaggcaggcacgcgtgcgaggggcacatatggcaagacggggtcgaactcttcttcaagcgtgactggctcttatagcttctcagagggcagctgtgctggtggggtgcttgcagcttcttctttgacctcacaggacggtgctgggatcttcttcatggtgaggggctcaaacaactctggcgggggatcttgggagaactcggggtgctcttgcttattcgtagccagagggaagactggaattccttacaagactatggctccttccgggagttcccaagccttcttttctcctctggtagagaccgggtga

SEQ ID NO: 19803 - DNA, 825 bp, Zea mays
  Peptide Sequence Number=SeqID_63178
atgccgtcctcttcttcttccgctgtcgctacgccgccggccggttcctcgccgccggccgccgcctcgtcggaggagacgctgagtagtttgatggcggaggagctgcgcgccggcgattctgttgatttcggcgtgtcgcgaatgtcgtcggcccgcgtggaggatatgcagcgtttgggctacttcggcggcggagttgctcgtgccccggggacggagaaagtccccgagccggagggcgagttggctgttttcgaggcgtttttcgccgccggtctccgcttgcctgcccaccgggtggcggaggccgcgaaggccgcccgagcgttgccgtcggcaggcaagcgtgtcgccgacttcgccaccgacatttgtgtggaggactatcttggtgggtcggacgaaggccaacttgttatggttgcgcctgccgcggcgacagcggttgctgccgcagcgccgaaggcgaagggcggggctcttagcgccggaggcgaggtgtcagccctcgcggttgtcatggatgaggcgggcgctgcgacccgccggctgaaggatgtgacagaggcgctaagtcaggtggctgacttcgccagccgcactgcgtcgggggctctcacggcagctgtggctgccgaagtcgagagacttcggacacaacatgctgacgccgtccatgagaagtcggccgccgacagcaagtgtcgcaagctggcggacaaggtggccacgctggagggagagaaggctgacctccggcgccagctggcgggggagaggagggagaccaacgaggctcttgttaaggcgcaggctgcgtag

SEQ ID NO: 19804 - DNA, 696 bp, Zea mays
  Peptide Sequence Number=SeqID_63179
atgtcgcgcacggaggcggagcggacgcgccagctgcttgtggatacataccgtgggctgggcgcggggacctgtgatttcgaagtgccggaccgggagtccggacttcgctgcctggagtgggtgcaggaggagttgcaggctctccccactgtcgtggaggggttcatagcgtatgcctccctggtcacctgcgagggggcgatgaatgcgctctcccgggaagggtgccggcacttcgaggtcttcgaccaagtcgaagaagattttgagcgagatatctttaaggttgaggaccccgtagtgaaggaatccgccggagctatcttcgatcggctatggggcgaacacggtcgcgaggtggtcagagagcgggccgaaacggcaaaggttcaggcggcgcgtggcgagagggtcgacgacttcggggcgctgaacagcatgctatctgacccggagccagccccggcggaggccgtgcctgggcccgtcctggggccgaccccggagaccgcgggagacgcgccgggtgcctccgtagccccagaggtcgccgaaggcgcacctgatgcctccgcagcggctgcgccgagtgccgtagatcccgcagcggtggcggcggagataacagcggaagcaacggcggagccaacggcggaggctcccgcaacgtcagggccgtcgcaggtggcgtag

SEQ ID NO: 19805 - DNA, 402 bp, Zea mays
  Peptide Sequence Number=SeqID_63180
atggcgaaaccgttgacagcgtcaacaaaccagcctaaaaactcggaacctgaccatgcacccgggctacaatcaggtcgcatgagggaacaaccaggtcgaagtgaccgcagtcacttcgccctttcactgaccgacctgacaggaaaacagcgccgctcgccccgctccgactgctgtgccacccaccagggtgaggctgacaacagccaagttcagcctcaggcgcaacaggaagctctgcctcgcccgacctcaggcctcggtctcgggaggaggtctccgcctcgcccgacccccagggctcggcctcaacctctgcctcggaaggtggtctccgcctcgcccgaccctagggctcggcctcaacctcggcacgggaggaatcgcgtcctcgcctga

SEQ ID NO: 19806 - DNA, 213 bp, Zea mays
  Peptide Sequence Number=SeqID_63181
atgtgcttgagtttgcttgatttagtctctaaggaggatgaaaggaaaaaggtggacttggaccatgcgagacttccactgcactccgatgagaggttgaagattttggtgaggcaatggggttcaagggccaaaattgaccctgttttggtgcttgatgccaaagggggagaaaataaggccaaagcaataaatggatcagctaccacttga

SEQ ID NO: 19807 - DNA, 597 bp, Zea mays
  Peptide Sequence Number=SeqID_63182
atggatcaaagatctatggccgcgcgagttattcaaacgaaggggtatgatcttctaatcgcagccgttcgttacaggatcgacgggcgagggcactcctatgccagatctaatcctagacgctcatcaacaaacggacggaccacgaacgtcttccccaccacagtcgagcagagcggccgggctcgtgcaacagtgacggcgacgccattgccggcgagatggaacctcaacaaaggcgcactaacttcgaataaaacagttctacccgttgcggaactgaaggcgaatacgggcaagggactcataccgagaatcgagctcgcaggcgtgcagttcacggcgaagcgcggtccgcggcggcggtgtaacaacggcgaaaaatccacgccgctccgcagcttccatcgcccaattacgcccctgtacacgatccacacttgcttccgaacccttgggatcgcatcacgggcgttgggagaggacactggtgacgaacgacgacggcggatctctcagcttgaagtgggtctcgatggtagcgacccagacacacaattaggcaagaggagagatggtcagagtgaggttagctga

SEQ ID NO: 19808 - DNA, 1515 bp, Zea mays
  Peptide Sequence Number=SeqID_63183
atgccgacatcagagcagaagggcgaggaacgatgggacaaggtgatgcgggtcctagatcgcctcgacagtaggttggaggcgatggagatgcccaacgattgtaagcaagatgttgtgcctgatgccccatggttgtttgttgtaatgtcacaacaagtaagtacatactcaatttccagtgaaatgggtcttacagtggcatgggatggggagatgcaagctaaaactcacacgcatgaaggattactgcagcagcttgctcaaggtgaagaagccttaaaagaatcagctaagaaggagggtgacgttgaagatgaggccagcaggcctgacccaccgagtgaggcaaccgcaatggttataaatggaggaaacagtgatgagtttattcctgctagtgtggtcagtgtgcttgaggaagaccctaagaaggagcaggatgctgaaaatgttgatgctactagtgctggcggtatcctttctcaagaattggctccagaatcaatcaatgaaactaatggtgcaggcgagattgtaggcgtcgatggggttgatgatcatgaagaagaggttgtgggtagcgacatacttgaggctatgacagatgaagtggatgaggaagaaggttgttttgaaggtttttcagctataagaatacatgatgaagacgtgaacctgaaatttcttttctatggagtaccgtgcaccctggatgcatgtttattgggcacactaaaagatggcttgaatgcactcttgaatattgagatttgtgcgagtaaacttcagaaccgagccagtgctcatccgcctcttcaagctgaagatctttcacatggagttcctacaatgcactgcgaaatcacaacttgcagttctgcacatgtggcgtatcttgtttatggcagtgcccaaacttgttttggtgatcagcttctagggagccgtatcaagaatgaaattattgagaagaggcagttagtttgtgttctattgaataatgaggatatcaaaccatcttcatttgagccttggctatccatgggagtggcttgcgaagcttctacttttgaagtatggataaccatgcaaaaatgggcagcacaagttttaaaacatcttgcaccagaaatctcctacagaagcttggttgcgcttggaatcgcctggataaatggtataccagtgtcctcatttggtaggcaggatgcagaccagtttattttcttttgttctgaccagtgcggagatcaagctattctaaatggctcattttctcatgtatccaactgggcagcaccctttactaaggatagtttcatgcttgttctatatgaaacatgtactgggcaagaggtgagattggaatgcaagaacgtgttgctctttgaggggaggcaaaacaaaggtagtgttcgacatgggatatctgaactgacacaatggtggctaaatggttttagcccaggaaacggtgctatggcagttcagtctcagccatacactcaataa

SEQ ID NO: 19809 - DNA, 201 bp, Zea mays
  Peptide Sequence Number=SeqID_63184
atgggccacgcggggtgggggcagaacgtggtctgttgggccggctggcaatttggcccaaaccgagcaaattacaaagtgggtgttacaagggataagcaacacactcaagacaagaaatcacagcaacaccacgcacacaagtcgcaacaagagctcacaacacaactcaatgagttcacaactcaactagagctctaa

SEQ ID NO: 19810 - DNA, 246 bp, Zea mays
  Peptide Sequence Number=SeqID_63185
atggcggttgaggtccggtggctggacactagtaagctccagtaccagggcacagcagccaacgatgttgggagccatgggtttgaggaagcagcggccggcgaggaaagggcacggttcggcgatgttgcgacacagggggcgacgaacgccggatctggggaaggggagctgctcgcctgggcgccatggacggaaaacaggagctgcatgggcgttgctgtgccgtggggaggagaggagtag

SEQ ID NO: 19811 - DNA, 1050 bp, Zea mays
  Peptide Sequence Number=SeqID_63186
atgtcttcttcctcccttaagcgccgggtcttcccgtcttccaagcccccggatggggggtatccgtcgcctttccgcctcctcgttggaggaatgcaactccatgggagttggtacctctcagccatcgttcggcttcaaggattttcatcaggcagcctggttgctcccttccgccggtggccacccaagacggtgacctccagctcctggatggggagagacagaccaggctgcggtcccaccctcagcgtcgggtgcgttcgtcatcctcgctggggcgggggccgaggcgagccggggctctacctcgcgtgcgggtcggcgaaccacctcctcttccagcttctggtggtggcaatcgtcctcccgcgctgcgacggggtcgtcctccagtcatgccggggaaggcgaactgttgctgtccagctaggacgcaacattccgtcttccccctcgcattcggggcgaggacggcagcgaggatctaccggagcgcttggaggcggcccgctctttggctttgatggcttgttcgcatcccttgagtgggaccgcgaacaagagccttccggtgactgcgttcacccggggccatggctgccgctgcagaggtcgtcgccccgcaggcccgaggtcgctcatacccccggggacggaaccggagtcccgtttgtgatggcaccttggatgccagcctcggatcgggctagcgcccttggaagccggttgcccgaggcctcaggggtaaccgggttgagccgcctgctcgggccggattcccggaggagcccctggacctcggcgccgcccgaggctgggtcgggctttgctgtagacgtcgtcgatgccgagggtgctgcggctcccttcggcgtgaagacccgagcctgcaggatcagatcatcttgtagcgtgcgctttctgcggccgccgaggccagaagaacacgccctcgtcgcgcttgcgaagctgcgtcttttttcctcctgcttcgagcatctggactgcgtactttcacccgtccatgaggccctgtccccgatttag

SEQ ID NO: 19812 - DNA, 51 bp, Zea mays
  Peptide Sequence Number=SeqID_63187
atggcggagaccaatacagagaagatcaccaaggaaattcttgaaggctga

SEQ ID NO: 19813 - DNA, 1248 bp, Zea mays
  Peptide Sequence Number=SeqID_63188
atggcgctccctgttgacgtggcgggcccgcgcccgaggccgggcgacgtgggggctcctccgaagctggggtcgaatctgtcttccgttgccgaggccgaatccgagcccctgggtcgggcgaggcggaagtcgttcggcagaggccagggcggagtccgagccctggggtcgggcgaggcggagttcgtcgtcttccggggccgagcccgagtccgagcccgggggtcgggcggagcggaagtcgttcggcagaggccagggcggagtccgagccctggggtcgggcgaggcggagttcgtcgtcttccggggccgagcccgagtctgagccttggggtcgggcggagcgaagttcgccgtcttccgggtcttagcccgagtccgagccctgggtcgggcggagcggagttcgccgtcttccggcccgagtccgagccctgggtcgggcggagcggagttcgccgtcttccggatcttagcccgagtccgagccctggggtcgggcggagcggagttcgccgtcttccgggtcttagcccgagtccgagccctgggtcgggcggagcggagttcgtcgtcttccgggtcttagcccgagtccgagccctggggtcgggcggagcggagttcgccgtggcgcctttggcaaggcctgactgcctgtcagactcactctgtcgagtggcaccgcagtcggagtggcgcaggcggcgctgtccttctgtcagactgctttatgctgatgggggttaccagctgagaattaggcgtcttgaggcccccgagcccctgcacagggcgagaggacgatcagggacagactcgactttttacatacgcccctacgtcgcctttccgcaaggaggagggggggagtgcgccatgttaccctcgatgggcaccgaacatggtgtctccggtgagctgcaagcgggtaatccgagtggacgtccgtgccccgttcgttgggggtcggctaggggcccagaggcacgcccaaaagtacctgcgggtgattttgccggacccggtcccctggcgacggggtccgagggctcgatgcctccctccgatgggattccgttacaagatcgttcccgctggtctcggaaatgtcctagggtacctcgggagcgcagcccgaacctcggttatgtatcgaacgtacccctggtcatccctcgctcggtgtctgaggcgactgtgaacccttcgggggccagccttcgaacccctgatcagtaa

SEQ ID NO: 19814 - DNA, 378 bp, Zea mays
  Peptide Sequence Number=SeqID_63189
atggccgttggaagtgtgctgtcgcatggtgcactggacagtccggtgcgccaccggacactgtccggtgcgccagccacgtcagcagaccattggggttcgaccgttggagctctgacttgtggggcctctgggctgtccggtggtgcaccggacaagtcatgtagactgtccgctcttgtattgaatgtgttggctgaaaacttggatgccttgaagtgttggtggttgggggtatttatagccccaaccaccaaagtggccgttggggaaggctgctgtcgaagggcgcaccgacgatcgttggcgcagttagccgttgctccgctggcacaccggacagtccggtgctacaccggacagtctggtgaattatag

SEQ ID NO: 19815 - DNA, 138 bp, Zea mays
  Peptide Sequence Number=SeqID_63190
atggcgggagctcctttctccccacgctccagtacctcgccgtgggatcccccctctcctccttgctccggcatcgacatggccagggacacaacctgccgcatcctcctgctgttcactggaaaagtttttctgtag

SEQ ID NO: 19816 - DNA, 408 bp, Zea mays
  Peptide Sequence Number=SeqID_63191
atggcccgcgcccgcgcctataaagcccactcaggcgtcgaccacactcttccgcgcacgctcaaacctcaccggagctcaactcaccgtcgtttgcccgtgcgcggcgtgtccacggccacccgagcccctgccgccgtagaccggccaacccagcctttcccaaccccgtccaaccctcggagacaagttaagaaaaatagaaaagatgatttaaataatgaaccagagggcacccctatttttgttaagacacttattcaatattgcaacctcgctgacggagagtacgtcctcgtgccggagcaaggagctgctcaggaggtagccccagatccagcacaagagcctgcaccagaggacctgcctgccactgctttggaaggcaagccccggttttatgcataa

SEQ ID NO: 19817 - DNA, 627 bp, Zea mays
  Peptide Sequence Number=SeqID_63192
atggacgcgaggtgcaccgtaccttacgaagatgcagacgcgatggttgggacgacgcggaaccttgacgacggagcaagggcggcggcgtcactgcggcaaccatacggacagaggaaaagggtgaaggaaacgcggcaatgcaaggagaagatggtggggacgacaatgggaggagggattcgtacctgcgtacaccagcggcgatgcgtgtgggtgcggaccggcggcgctccgttcggttcgcggcggcggcggaggagcgttcgagggaaccctaggctaactgcgcgcggcttcggacggaagccaactcagcggcgcttcgcgagcttctggcggccagaagccgcccagaagctgaaccaaacagccacattgtctgggcgtgggcgactttggcagggccgtggggcatggcgtggggtacaggctactgggacgtgggcactagccactgggcacaacgcgctagcgctactgctcggcctacgagctagcgtagggctggaaaaagagctcgaagcttgcgagccggctcgagctcgaagcagctcacgagcctcgagcgagccgaatcgagccaggttttcgagcttgttgagacaacgagtcgagtcgctctga

SEQ ID NO: 19818 - DNA, 690 bp, Zea mays
  Peptide Sequence Number=SeqID_63193
atgcaggtggcatgcaactgcaccacggagatgcaccctttcgacttcgacgcatctagcatggaggcccaggcccactcgtcatgtaactggcgcgccagttgctacgtgcgaaaaactgcaccgccacttgcgccaataccgcgccttctcgactgcggaaccggagccgcgactcgaggcaaccctgcgcatggcccaacagtgccaaccaagcgcatcggtcatgggtcagtcagccgcgggagaagacgcgacggtcgatatggccaaaagtgggtcggcagtaatggcggcagcaggcggacggaagcagcagtcaaatcatctgcaggctcacgtcccctcctggagcagcaggggagccctcccccacggtgtgaagacgaaacacccgttcctcaaacgactcgcgcacgcacaacggctgcctcgcaaaccacccgtcccgacgcattaacttcgcggcagggcaggcgacacctttggcaggtgaagcgggcggcgtttcacctccgccatgatgaccgcgtcaaaaaagggaccgggaaaggggatactctgaaagggatccttctccgcgaaggaagcgggccccgagccctcctactgatcaggggttcgaaggctggcccctcagaagggttcgacagccgccccagagcactcgggcttcaggctcattactga

SEQ ID NO: 19819 - DNA, 498 bp, Zea mays
  Peptide Sequence Number=SeqID_63194
atgtaccccccgtggcgtggtcggtccgagcccaaggtcgagcgaggcggtgactcctccgaggtcgaggttgaggccgagccctggggtcaggcaaggcggagaccgtcttccgaggtcgaggttgaggccgagccctggggtcgggcgaggcggagatcatcttccgaggtcgaggttgaggccgagccttggggtagggcaaggcggagtccaccttccaaggccgaggcgggggccgagccccggggtcgggcgaggcggagcttcctatggcgcctgaggctggactcggctgttgtcagcctcaccctggcgggtggcacagcagtcggagcagggcaggcgacgctgttttcctgtcaggtcagtcagtggaggggcgaagtgactgcagtcacttcggccctgctgactgaggagccttgtgctgatggtgattaccagctgagtttaggagtctcgagggtacccctaattatggtcctcgacagctag

SEQ ID NO: 19820 - DNA, 246 bp, Zea mays
  Peptide Sequence Number=SeqID_63195
atgcatatatcttactcagtgtattcattagattgcaatctcgctgacggagagtacgtgctcatccctgagcaaggagctgtccacgaggaagaccaggagcaagctcccgagactaccatcgaggatctccccgcagccccagcatttgaaggattcctttttgagatggatactagtatgctagtgtcggcgtttcgaccccggggggtccctggaccgacgaggtggatgcgcttgcagtag

SEQ ID NO: 19821 - DNA, 474 bp, Zea mays
  Peptide Sequence Number=SeqID_63196
atgcactgtagagtgtccagtgcgccacttcgcgcgtgcctgacttctgcgcgctctggcacgcatttaatgcctctgcagagaccgtcttccgaggtcgaggtcgaggttgaggccgagccttggggtcgggcgagggggcgtccaccttccgaggccgaggcgggggccgagccccggggtcgggcgaggcggagcttcctatggcgcctgaggctggactcggctgttgtcagcctcaccctggcgggtggcacagcagtcggagcagggcaggcgacgctgttttcctgtcaggcgatccttgcattgaatgctcctgcgatacggtcggatggcgagacgatctggtcaaggttgcttcactatgaagcctgtccgagctgggcctcgggcgagttgagggtgccaaaggttcacaaaaggccaataaaaggaccaagaaaagggttcaacaaaaagagcaagggataa

SEQ ID NO: 19822 - DNA, 1065 bp, Zea mays
  Peptide Sequence Number=SeqID_63197
atggggagcgcccgcgttgctttcgtcttgctgctgttggaggagcgcaacttcgcggaggttggcacctttcagccatcgctcggcttcaaggattttcatcattcagctcggctgcatcccctcaccaatggtcacgcaggagggggagagggcgctcatcggcctagcggaggggcggacttcgacaacgcagggccgatcggccgcaagcgtcgtcagctccagcatgcctggtttgctggctcagctggctctggcgcagcttccggtgccacatcccattgctgggcggtgtgtggctatctgcccgccatacgggcggctattgcgccgcgcgcaccgggggaccacccaagacgtcgcacgccgctagggcggcgttcgtgttcttgggttgtcctgccctcgctccggcacgacgcctccgcgcggaggtcggtgctcgcccgtccgggaggacttgagtggggatctaccggtgggcaggtggctgccgtcgtcggtgctgaggtggtggcagccggagaaggcttctccgccgacgagaccgtcatcgccacccgcggaccgacctccggctctttggctttgatagcttgtcctcgcccctcgagtggggacgcgggcgagggccttgtcgcagcagcgtctgccctgaggtcatcgctgctgttgtttagccgcccggagcggaggtcgttgtcgctgctgatggagcgggcggcggcgagccaactggagtttgtcgtcccaaaccctcggccgctctgcgatgagccggagccggaggcagcagtgtcagcgtggacagaggcggagttggctcgagaagaagctccgtcgacccaggagcagctggctgaggctacggagtggccggtcaagccgtctgctcgggccgggttcctggaagagaccctggcggtgatggcccaggcgcgaatcgcttatctgagtgagagttacttaccgcagaaggtgatgagtgaggagtccctcggctcggtcgaccttaccgcttacgtgtactccgtcgtttttaggatcccactatcgaagtag

SEQ ID NO: 19823 - DNA, 561 bp, Zea mays
  Peptide Sequence Number=SeqID_63198
atggcggtggcaggcgggcgggcgcagcggtcacgtcgtcagccaggctcacgtcccatcctgagacagcaagagagcctcctctcacggcgtgaagacggtgcacccgtgacccgttcctcgaacgaatcacccgcgcgcaacggccgccccgccaaccactcgccccgtcgcattaactccgcggcgggacacgcgacgcctctggtacgccacgccgtccgatttcgtatccttttccgttttcctctttctctatctcttgcaacagggaccggggaagggggataccccgaaagggatccttctccacgaaggaaccgggctccaagccccccattactgatcaggggttcgaaggctggccccccgagggttcaacagccgcctcagatcgcgtgggcccgacacccactactggtcaggggttcgaaggccaacccctcgaagggctccatggccgcctcaggctactcgggctccgcgcccattactgatcaggggttcgaaggctggcccccgaagggttcacagtcgcctcagacaccgagcgagggatga

SEQ ID NO: 19824 - DNA, 522 bp, Zea mays
  Peptide Sequence Number=SeqID_63199
atgaacatcgtcaagggcgtcgccgatctcctccgcaagtcgacgcccgcctcgccgggggccggcgccggcgggggcggcggaggcggagaccgaggaggcgtcgggtccccatccgccgacaggctcgccgccccgccatccccaagggtccgcttcagtgacaatggtgaggaaggagtccttaatgcgctttggcacaagtatgagagtggcattgacaaggctgagaagaagaagactctgcaaacatttgtcatgcattttgtaaaagcatttaaagattgggagccaggctatattgagcaatcaatcgatcatgaatcgttatcagatgatacaattttaggatgctctactggtcatccttctgaggtcatccttattctcattcaagagatttctcaaataacttcatctatcactgagagccaacactcagccccatataacatagcaggcctcactgatttcaagtcgggcgaccagctggtcgtcacagaggaccgaccaggcgcctaa

SEQ ID NO: 19825 - DNA, 1383 bp, Zea mays
  Peptide Sequence Number=SeqID_63200
atgagctggagacgaggcggaagcggaggcgatggcggggtctcgaggaggtgggccgtcctgctctgcgtcggcagcttctgcctcggcctgctcttcaccaacagaatgtggacgctgcctgaggcaagtgagattgctaggccgaatgcgaatgtggaggaaggcaccgtgccgattgccgcggagtgtggttctaaaaaggtccaagaaaagcaggattacagagatattttacaggttcaagatagccatcatgatgtacaaacactggataagacgatagcaagcctagagacagagctctcagctgcaagatcgctgcaggaatccctgctgaacggctcccctgtcgcggaagagtataaagtttctgaatcaatcgggaggcgaaagtaccttatggtgatagggatcaacaccgcattcagcagccgcaagaggagagactccatacgttacacctggatgccccaaggtgaaaagaggaaaaagcttgaagaagagaaggggatcattattcggttcgtcattggccacagtgctatatcaggtggaattgttgatagagcaatcgaagcagaggacaggaagcatggggatttcatgaggatagatcatgttgaagggtaccttgcattgtcaggcaaaaccaagacctactttgctacagctgtttcactatgggacgccgacttttatgttaaggttgacgatgatgtccatgtgaacatagcaacgctcggacagattctgtcgaaacatgcattgaagccgagagtgtacatcggatgcatgaaatctggacctgtcttatccgaaaagggcgtgagatattatgaacccgagcactggaagttcggcgaatcggggaacaagtacttccggcatgctaccggtcaattatatgctgtttcaaaggacctggcgacttatatatctataaacaagcatatccttcacaagtacataaacgaagacgtttcgttaggatcttggttcatcgggctagatgttgagcatatcgatgaccggaggctttgctgtggcactccgcctggtgagttttttcatcacttcatgcccctgactgacaaactcaagcttgtttgttcatcattcacgaggccgcgccatttgaattgctcttctgaaacatggctttgggaacctgctgctgaacaatgccaactatttttcatggagcctcatcttatgacgcctttaaccacagattgcgaatggaaggctcaggcggggaacgtctgcgccgcgtcgttcgactggaggtgcagcggcatatgcaactccgagggaaggatctgggaggtccacaataagtgcgctgagggcgagaaggcgctgtggaacgccactttctag

SEQ ID NO: 19826 - DNA, 657 bp, Zea mays
  Peptide Sequence Number=SeqID_63201
atgggcggcctgccggcctggctctgcgtctgcgatcgcacgcacgcggttccaccagtccaccgctcccgccgcgcgtcgaacgtgcgtgcctggaagcccccgcccccaactgcctgtgggggtgggcgccgcgcaggcaaactgcttgggggtaaaccaactaccgcaagcgacgtcacgcctccgttctcgttctgcgtccgtcaccgtgttcatctcgccggggacctccggaccaaactagacatctccctcacctccgtcgacgccgtgtccaagaggatcgccgaggacctctgtgacgatgtcgaagctcttagacagagggggtcaggtttcaggaaccctgaccattccccctttgtcgttgatgacgaaatcgaggctcctgaaacgaatggtcatagtagagccccgtacgacattgtggtcgaccatccggaacctggtgaagaagacgtcgagaacgtgcaaggccccagcctgacgcaccaactatcggtgtctcgaactaacattgatgagtacaattgtatatgtgtgttctgcatctggatggtgtgctctgtgggcacaagatttgtattggttcgtgtggaatgtccctacttctcagtcttcggtggcttgcgctaccgacaccttcttgcttga

SEQ ID NO: 19827 - DNA, 501 bp, Zea mays
  Peptide Sequence Number=SeqID_63202
atggcacccaagagagctagctcgaaggtagccccatccgttgacgaagcagcgatggcagcgctgctggctgagaaaaagggcaaggcccttgtcgacaccacccaccaagaagcctgcgaagacgacgcactcagcaagagacagcgcaatgaacaacctacacccgaaggcaccctccgcacttgcagctccggaggacaaccgcaacctcctccaggcttcgctccactagagggcgaggacgccactgaggatggcgaagtcatcggcgtttcagcagagaaacagctacaactgcgggccttgcgcatcaagaaccgcaacctccagaagcagaaagagatcctcgaggccaagcgccaacgtgtctctgcgcaggccaaggtgcaccagatgatacgggacgaggagcagagggctcaggagcttgagcaagagattgcgctcatgcagcgcgaaggccaacttgatctgcaacacggcccacccctccaatag

SEQ ID NO: 19828 - DNA, 993 bp, Zea mays
  Peptide Sequence Number=SeqID_63203
atgcagatcattccaggacccacgcatgctgcatgcatggctctacgagtggcgtgcacagccacagcgttctgccgctcgcgcgagacgcacccccgcggccgcatcccgcccaacccctcctgcggccaccaatcaacgccccgtggccaccaatcaacgcccgcgcccccacccgcgaccttccttcaataccgcatcacggaccggcttccttgccgtgggcggcgctcctccgccgcggcatccgacctcctctctcccgcgccctccctcaagtcccgcctcgccgacggagacaccctgtacgttctgttcctcctctccttctcccgtaccctcgccgagctcgccgccctcgccggctacgactacgtcgtcgtcgacatggagcacgggttgggcgggatccccgaggcgctcgcctgccttcgcgcgctggacgccgcgcgcacccccgtcgtgctctgcctcccggaggccagcgccgtctgggccaagaagtgccgctacccgccgcgcggggtccgcggcgctgcacaccccatcgtccgcgcctccgcctacggcttcgatgactcctacctctcccgctgcgaggacgataccctcgtcatctgtcaggtcgagaccgccaccgcgatcgcgaagatcgacgccaacgccaccgtcgacggcgtggacgtcgtgcagatgggcccgctcgacctgtcggctagcatgggatacctaaagcagaatgacccgctggagcagctcaaattgaggggttaccatatggtagctggcgcagtggacattgctatgttccggaaggcgacattggatgatgtcaggctgttccgagaggcagtgatggagatcgacgaggaggatgatgaggatgagaaatgtgagaaggaaaatgacgagtactggagtgaccgaattcttatcaaagctcgtgatgttgctaggagcagtgctcagaatagcttgtctggaaaggaataa

SEQ ID NO: 19829 - DNA, 1509 bp, Zea mays
  Peptide Sequence Number=SeqID_63204
atggaagtagtggagttggttccctgcgcccgcaataagtggggcaactggtgggatttctggttttatgtttctgaaggcgcagttgaagaccatctaggactctccatggccgtcatgtgctcccattattatgtggcgtacccgcagtttgaggtggcggaggatgatgaagacgagggaacccttcggtgcgctgcccgcatgagtagcggacgcgacttagtggaggaatttattgggtatggggtgtggcccttggggcatggttgggtgctgggcgaagtatgccctcgcgagatgctttcccagggcgggcagcgggtgcgaagtccagccttcgcgttggatttgcatggtcgagatcccgccgcattcgtgcgcgcagcggaagacggtgcagcgaggatcgtggggcgctatgtgccgaagacagagggtctgcggagctgggatatccgtggggccaacgatagattgaatcgagtctttgaattgaaccgtttgtcgtacggtggctaccccggagaagacgccgccgaccgccatgggaaaaatcagtgggcccctcgggggaaggatgtcttcgcccgagctctgggagtcttcggcgtggatgctggagatcctaggcgtgaggcgaagagggcgcaggggagcgcgaaggctgctgcttccggcagtagccagccgatgccggctgcgaaaccgaccgcgcccggactcagcaaggcgtcggcgggcgcgaagactgccgcctctggcggaaccaagcctccccagggcggatccgcgaaaggacgggagctgccttcgccggggagacgtgttgccgacttcggcaccaacatcagtgtcgaggattattttgttgggtcggatgaggggcaattggttgttgtcccgccttcggcggcaaccacgtcgccgacggcggtggtccgggcgaggggtgccacgcaagacccgtgggccgctttctgcgcgagcggcgagattctgtctgccgctgccgctaaggatgtggcgggctccatgccccagcggctgagggaggcgtcacagcagctgaagcaagcggtcgacttcgccgaccgcgtggcgtcgggtgtcctgactgcggacgtggctgccgaagtcgagaggcttcgggcgcagcatgcggatgccatccgggagaagtcggctgcggaaagtaaaaaccgcaggctggcggagaaagttgccgccatggaggccgagaagacggacctccggcgccagctagcggaggagaggagggaggcgaatcaggccatcgctgaagcgcaggctgcacgagcggaggccaaagtggcgcgggcagagagcagtatcatcagtcaacgcgccgaggagctagaggcaaggttcaacgccttgcgcagtcgcgtcgacaaagccgagacctcgacgcgctcgaaggttgagcggacgcacgcacagttcgtgaacgcgtacctgagagcacctagaggggggggtgaatag

SEQ ID NO: 19830 - DNA, 435 bp, Zea mays
  Peptide Sequence Number=SeqID_63205
atgacgtgcgttggtcacaggagacccacggccccaccgcaccagatgaccattacggacgcgggcggcgggccccttacctcggtgatggaacccgtgcggaactgcggacgtctcaattttggcaaacttccctgcaataacatgactgttggtcagccccacctgccattggttcagggggaggtgagggagcggcggcggaagaattatccccgtgaccgtctacctcctctcgcgccatcgaacacccgcctgtccaggcgcgagcggacgttgccggcctcgtctccggcgttcggcgttggagtggaaccgatcccgattcccactaggaattccatcgttttcgtggcgtttggtggcatcccggcgcgcaagcaggaccagatgaccagttgcaagcatgactatcatgtccagtgcattctttaa

SEQ ID NO: 19831 - DNA, 801 bp, Zea mays
  Peptide Sequence Number=SeqID_63206
atggactgcgccgcatgtcaccttcatcacgccgtcctggcaaccgacgtccccatctccatgggctgcgccgcatgccaccttcgtcacgtcatcctagcaactggtgtccccatctccatgggcaacatcgcctgccaattttgtcaccacatcctggacgccggcgtgcccatctccaaggacaacacgaaattttgtcacatcatcttcgttgacggcgtctccgtcccatgggcgacaccactaggggcaaccacgactcggcaatcaccagctccaccgatgggggacttgtggaccaacataaggactgatctcgcgaagatgcaagcctcgctccagaaggttgagcaaggactgctgcaaatcaaggctgcagtgcaacatgagcagcaccagctagcgttgtccgcacgactccagacgtcggcggctgtgggcatacaagctgctgctcgtggcttccttgcacgacggagagtgcgggagatgcgtcggcaaatgctcgaggcagccttggtgacgattaaactcggcacacgggggtgcgacctcgccttgtcggacggcgatcagcagcggcatcaggccgctatctccaagtgcgagcatggtacatgtcccgtgggcgacaaacttcaactctacggaagcggcggtaaggaaggcactcccctcgtcatcggcaagggcgcactatttagcgccaccacattccgctaccggccgccacgagggcgcctctgctggttattgtatagggctataggcaagttgaatgcagttatagaaaaatga

SEQ ID NO: 19832 - DNA, 1959 bp, Zea mays
  Peptide Sequence Number=SeqID_63207
atgcggggcgagaggtcgcgctcgtggcacacttgcttgccgccgatgcgtggcgcagccagaattgtcaacggcgctgcgccctccgactcctacgtcccggcctacgccgcccagttcgacggcttcaacctcgaccacgcggccttcctcagcaacggggccaactccgacctcatgggctccgccttcctcaaggaaagagaggaggccaacaagtgcatgccctcgcaggacaagctcgtcatcgatctagatccgccagacgacatggagacgtcgttttcggagtcagccctccacgacgttcccggcgccaactacatggaggcgctcaccacatgttcgactccaggcctcaccgaacgcgccatggacgagctcatcaggatggcgcaggccggcgagcgcctgtgggtcaattcgggtggttttgcgaggtgctccgcatcgacacgtacgacaacatcttcgccaagcccggcgactcgttcctcggcccagacgtgcacgtcgacgccaggttcggcgcgctcgggccaccttccgtcgggatgcctcatcgccgacatgcccgacggctcctccaaggtgacctgggtcgagctggagatcgaggacagggtttccatccacctgctctggtccggccaggaccgcgacgtgttcggcaccttcgacgccgacgtcacggtggacttcctccacgcgcaggagctggacatcatgtgcagggcgcaccaggtggtggaggacggatacgagtacttccccgaccgcccgttcgtcaccttcttctctgcccccaactaccgccagctcggctgctccttcactatcttcaagtcgaagacggatagcagcagcagctcgccccttgggtgttcgaccaaatgtcccagccaagcgttgcaccccattatcaagctcaatccggtagtcgtggtgaatattgcaggtgctgggggcaagttttgtggaggatttgatatcaacgttttcacaatggttcaccagattgggggtcaaggagatgtctggggttcattaccagttagttactctagctgcttgtgggcactgtgtgatggttgtgatggtgtcgtggtgcgcagcggaagcgtggcggcgttcggcagcaaactacgacacacatgtgtagacggccggacgacgcactgctacgactgcaagctgctgaccggtgaaacattggagtcttggcgaacgcgcagcccaagaaaacagccaaggaaagagtacctggagattccctgcgcagaactgtgcaagcacgcggactgtgaagttgtcaatggtgaagacatatttgagaaaaaaatgagggccttccttgacttctacaaagacaacctgaagtgcttgatcaagcacggtgaaatccaaggcaattacatctctggagcaacagagatatctatcctcaacagttcagatgcattagagaacctttttccaggaattgtcaacagagctgttgggaaaacacaaacgaacctagctagcagtagaaatctctgcctgtacattttctcagtacaatatagatccacttcagataagagagtaccttcagggaagattatacttattaacttggatggctctgtgacaattaagaaaattggtgccgaaggacggggtcttgcagatgcgaaggcaatcaacaatcttgaagagattgtattgggtctaatagccagtgaagccaggatatctggtctgggtgctgccagcagtggtcaaggtaatttctcagtctttctttgggataccggtgaatttgataacatgtatcggcttaagggcaagccgatttttaagaaggggggaatgttagggaatgtggtccccaacagaaagaagaagcagtcggtcatcgtcaagactcgagaggggagggaattgagagcacctagagggggggtgaataggtga

SEQ ID NO: 19833 - DNA, 699 bp, Zea mays
  Peptide Sequence Number=SeqID_63208
atgaggaacggcatcagcattcagcatcagctctctcgctcgctcatggtagcagttagtagtagcttgacgggcagcacgcacgaggacaaggtgcgcagtgcgtgggcggacgcggttgcggttggcttgctgactcgccccgtctgccggggccgcccgcgagtcgcgcggtcgcatcgtatccccaagtccccggccccaggccaatggccaagacgtggacggaagaaggtggaacccccgcccgaacccactgacaccgaccgacgctttcctcgtcgtcccgcgagatgccatcggtcatcggtggcagatagcagatcccagcccgcagcggaacggatggacccctgcgtcttcgtctcggcggcttcgatcgcttgccttggtcgcgccgtgtccgtgatcagaaccggacatccccgcgctgttagcacacgtgttttgtcctcctcgtatctgcggcggaatcgtggcgtcctccgccggttgcttctgtacgctaggcgctacaccgcacaaagggtcaggcgcgtcgcgaggcatggcttggcttggaagcggcggatggtgtttggtgaatggtggagaactgcatgtgaaaagagagagcagcaaactgtgagatggaaaggcacgtcgcactcgcaccggaaccgcatcagggcagggcagggatccgacggcaggcggtaa

SEQ ID NO: 19834 - DNA, 486 bp, Zea mays
  Peptide Sequence Number=SeqID_63209
atggcctcagggcaaacagtgctgctgaaaggccctcattcacgtcccctcacgggggacgagaaccagccattaaagccaaagagccggaggcccgtagcgcaggtgacactgatggtctcgccggtggaagcaaccaccgctgcggtgggaagcctctccagcggcaaccaccacctcagcaccgacgacagcggccacctgcccaccaacaccgcaccagcgagcggcggccgccccaaggcgcaccggcaggtcctcactctcgttctcgccatgagaacgagagcgggaccgttccagaacacgagtaccgccctcgcggcgtacgacgtgttgtgcgaccccccggtgcagccggccacagtcgtccaggtggaagacggacagttgcaccctgtcctagcagcagcagttcgccttcccccgcatggctggaggacgcctcctccgcagagctggaggatgcccttctcccccgaatga

SEQ ID NO: 19835 - DNA, 675 bp, Zea mays
  Peptide Sequence Number=SeqID_63210
atgcaggaggcgtgcaaccgcaccacggttgtgcaccctttcggcttcatcgcgcccggcggggaccgggaaaggggatacttcgaaagagatccttcccggcgaagggaaacgggcccccctagccctcctactgatcaggggttcaaaggttggcccctcggaaggccgccccagagcactcgggctccgcgcccactactgatcaagggtttgaaggctggctccccggaagggttcgacagccgccccagagcacgcagagtgagggatgactctgggtacgtccgttacatggccgaggctcgggctgcgctcctgagttggcaaggtcgaagcgaccgcagtcacttcgcccttccactgaccgacctgacaggaaaacagcgccgctcaccccgctccgactgctgtgccagccacccaggcaaggctgacaacagcaagttcagcctcgggagcaacaggaagctccgcctcgcccgaccttgggcctcggcctcaggaggaggtctccgcctcgcccgaccccaagactcggcctcagcctcggcctcgagagaaatcacgtcctcgctcgaacccggcctcggcctcaggagaagtctccgcctcgctcgaccttgggctcggactgaccgcgccacaggggatacatcattaccctacccctag

SEQ ID NO: 19836 - DNA, 669 bp, Zea mays
  Peptide Sequence Number=SeqID_63211
atgcaggaggcgtgcaaccgcaccacggttgtgcaccctttcggcttcatcgcgcccggcggggaccgggaaaggggatacttcgaaagagatccttcccggcgaaggaaacgggcccccctagccctcctactgatcaggggttcgaagccgccccagagcactcgggctccgcgcccactactgatcaagggttcgaaggctggctccccggaagggttcgacagccgccctagagcacgcagagtgagggatgactctggcaaggctgacaacagcaagttcagcctcgggagcaacaggaagctccgcctcgcccgaccttgggcctcaggaggaggtctccgcctcgcccgaccccaagactcggcctcagcctcggcctcgagagaaatcacgtcctcgctcgaacccggcctcggcctcaggagaaccccctacggaagcaaagagacgtcagcaggatcccagcaccaccgccagctgtgcttctacggggctcaggcacttctccgacggccaccatttgagaacaagtccccaacagtagacatgattaggatactcactatcttcaaagccgggaggttgctcaacatagacttcctccttgattggtccattgaggaaggcacttttcacgtccatttgatagagcttaaagccatg

SEQ ID NO: 19837 - DNA, 540 bp, Zea mays
  Peptide Sequence Number=SeqID_63212
atggcctcagggcaaacagtgctgctgaaaggccctcattcacgtcccctcacgggggacgagaaccagccattaaagccaaagagccggaggcccgtagcgcaggtgacactgatggtctcgccggtggaagcaaccaccgctgcggtgggaagcctctccagcggcaaccaccacctcagcaccgacgacagcggccacctgcccaccaacaccgcaccagcgagcggcggccgccccaaggcgcaccggcaggtcctcactctcgttctcgccatgagaacgagagcgggaccgttccagaacacgagtaccgccctcgcggcgtacgacgtgttgtgcgaccccccggtgcagccggccacagtcgtccagcagcagttcgccttccccgcatggctggaggacgcctcctccgcagagctggaggatgcccttctcccccgaatgacggaggaagaagcggttcgccagcccacacggaggcaggctccaactcggtgcacccccctccccagcccggatgatgaacatccttga

SEQ ID NO: 19838 - DNA, 789 bp, Zea mays
  Peptide Sequence Number=SeqID_63213
ccgtgcggcccaacaaccatccaaccagcccaccagcgcttccactgcgccaaccccggccgccatgctgctcgggtggatgacattgggtcctgctcgtcagccaccgtgtgtgtgcgtgcatcagccaggaagctcggactcgttgttccgctcccggacactgacagacgggaccatgctgtcagccgttccttcttcccggtgggtggatctgaacaatccccgtcgaactcgctggccgcgcgtccgcgaaactcggctgttgaatcaggccgcgctaacggtaacagtcaggggatctccatggatttaggtcgggtggttggcgcggtcttgggaataaaatcgagccccgacgcgcatcggaacctcgcctcagtccacgtctggtgccgtgatgccgagccctccgagtcccgccgtcgagtcgggctcgcgattacccaaaccgtagatcgaatttactcaccggagctctacaccgcctcggacccgcctgcttgcgtgtgcttggtagagcgtatcgctcggcaatggctccgccgcttggaacttgtccgccgtcgtggaactcacccgcgctaccgctcgagattccaccagtgggtatgggagcttcgattagaggcgtggatggcacacggtgcttcgctagatgggattgccgaccgaggaaaccgcgatttcacgccgaggttggtgctccgccgtgggttccgctcgcaccgtgggcaggacctcatcggtgtgggccattccaccgacggggcagctgtggagccatag

SEQ ID NO: 19839 - DNA, 66 bp, Zea mays
  Peptide Sequence Number=SeqID_63214
atggctgggaaaagaactggaatgggtcaatttggacttcaaatgaattttctaagaattaaataa

SEQ ID NO: 19840 - DNA, 484 bp, Zea mays
  Peptide Sequence Number=SeqID_63215
atgaagatcgccgactcagagtcccaaatcctgacgccctatgtgctctcggagtggcggcggcgccgctgttttctctatgccctatatgccctccgccccttcatgatggtcggtcgagctcgccggcctcaccctgctcgccagtcgcctctgcgccctacgatcgatctcgtgctcggctgctcgccctgctcgtcctgctcggctgctcgccctgctcgtcgcctcgtcggtcgtgctcggactgctcgcctctacgccctgctcgtcggtcgtgctcgccctgctcgtcagtcgtgctcggctgctcgcctctacgccctgcggtcgattggggatctcgtgctcggctgctcgccctgctcatcgcctcgtcggtcgtgctcggagtctcggactgctcgcctctgcgccctgctcgtcggtcgtgctcgccctgctcgtcactcgtcagtcgtctctggtgctccggctttgaaag

SEQ ID NO: 19841 - DNA, 609 bp, Zea mays
  Peptide Sequence Number=SeqID_63216
atgtacaacgccgtgcgccgcttcggcaaggtgcgctacgacacgctgcgcctgccgcacaaggtcgtggcgcgggaggccgacggctccgtcaagttcggccagggcgagggctccgcctacctcttcgacccggacatctacaccgacgggaggatctccgtgcagggcatcgacgccgtgctgttcgcgccggacgacaccaaggccacgcagacagccgaccctaacaggaagcctcccgccatcgtcacccacaagaagaagatcaagctccggcgagaagctgctgctgctgctattaatcaagcaggatggccaccggcgactgagaactccgtcaggaccatgtccgtcgtgaggcagcaggtggcgggcagagcgcctgagcctattcggctggggcggcggaacttggcccaacctaaccgagacgagacggcacgcgacacaagggcatccaccgcccaccgccacgcggctgccgtgccgggttggtggccggcggacggcagccggagaagacgacataatcccgtcacagagctcggcggccggacaggcaagacagacaggcagacatggctggcacatgcgcacgcgacatga

SEQ ID NO: 19842 - DNA, 4032 bp, Zea mays
  Peptide Sequence Number=SeqID_63217
atgtacccaagcccgtacgacggttccggcgccggaggaaagatccggcgccgcccgcacctccgcgccgcctccacgccctacgaacggccccccgccgccgcggcggcgcaccgcctcgcggccgctgctgcagcggcttccgcatcctcggagcccggcggggagcgcggcggcgggggcggtggctgggtgtcccggctggtggacccggcctcccgcctcatcgcgggtggcgccgcgcgcctcttcggctcggtgttccgcaagcgcctcgccccgccgccggccccttctccgccgctgtcgtcgcctcctggacgaaacaatgagccaaaacagggcttacctgattcaacacatgttgattcacttccaatcccagagggtggaatggagaaagggaagagcatagttgacacatcagatgtcaaagcaatgtctgaagtagagcacttgttaatgcgaaagacatttactaaggttgagtttgatcgtcttacagacttattgcgtgcaagaaccattgagtctgatccacctaaaccaattgtttctcgtgaggaaaagaatgaagaaagtatcaaagttgatggaattagaggctcagcgttacgtcatatggacctagatgattctcctgctgttaaatgctgctgctccctctctgctggttacacaccctatctgtggccctcttctgcgaccacccttcctgaaggggtacataatcatggtgctagttctcctgcagaactcgcgaaacaatatatgagctctcgttatttgagggaaccccaatccagtagtctgcggagccgattgtttcttgagaataaaggtgaagcaagcaacactgtcaatgataggaggtctgtaccaccaattgttcagacaccacttgaacttcggaatgaaaaccctggtctccctgtaaatggctatgtgacttcgggattacgtgggcgttcagcgatatatagaatgtctcgctctccatattttaagggtcagaactattccagtgatttgaacacgtcttcattgtcccaacgatcacaaagcttgcatgttggtggcaggcaggtcttgaaacgaagcggggctgaattagagaatgaacttggatctataggccccattcgtagaattcggcagaaatcaaatatgatgtcttcatttagagattctcgtgcaaatcctaaaggaaaccttcttactagccatataagtagtactgatttcactgaagacggtgcatccattcagtctccgagctcaaaaaaattattggttgggagtagtcaatctctgcgacccttagaatcccaaaagaatgagggagatggtaaatctagtgatagcattccacccataccagctcaatcaaacaagatggctgaaaagatatttgagcagcttaatataatagctccatcgccaaaacaacaacagtctgttactctgaatgctagtaactctatgtcaaagaaacctgtttttcaagatgctgggtcaagcagtatgtataaccaatctagttccctgaagtttcaagatttggatggtgcaaatggaccccatgatacaaacttgaatggttccctgctgaagaaagacaagctaaatataataaaagacggatcgccaaaagctgccttttctgatagacctgcccttttggggaactcggtttctgcttctaaatcatggacgccagcctttaaaatggctgtgatagaggacttaccagagttggatgatgatctggaggtccttattcaatcaagtaagatagaggttgaaacaactgagcagaaaattgattcaaatagaaaagaacagaaggttgaacaaaatatattagagcaaagggttgaaccgaacttgaagaacattgctggttctacgattagtgaacagcctgtagcatcactgtctaaaactgtcacttcatctggtggtttatttttatcaaatgatcctgggaaggcagttcccaaagcttctgtggacaataataccgaatttgcattctcaaatgggcctcctggcacccgccctgcaactggtgtatcagcaatgccacttgcttcagttaataacgataaacagactggtgcttcaaatttcattttcggcatcaagcagccaattacgtcagattttgaaacatcaactgcaaaaaacaaatcaacactcgggcagagtgtcaccaagcccacaacattagccagcactagttcagagagaggtgataaaacagaaaaagcagaagatgtagccaacccatctgagaaggtgttgccttcagctgcatcaacaacactgaatgcacctctccattttacatctgtggcatctacttcgagcctgagcaatggcttgtcatactcaccaccaaagctcacaactcctccacctactgataaacctgctatcagctcagctgtttccacttccatatttgccgtatccagtagcagtccagctatttcatcgtctcctgcatttacgggatttagtttttcttccagtgctccggttggattgtcattggtaacatcagctaaatctgatggcacaactgctgaaaataaggcagctagcaccttatcatttggtatagggggtacaaaagctgaagtgaaatctgttgcaccagatgcaagcagcaaggcatcatcggaactttttatttcacctgtgtcatcaagtattgcaagcttttcaagttcccccgccacatctacgcctactttcaccgcagttgcaccttcaagtgatgctgctggaatatctgtggctgcaccatctagtacttccactgcaccaggtttacagtctgcttcaaccccttcatttacatttccgagctctggaaacaacctttttgggttcagctccccagcccaatctactggcctcagtacatcgtcacttgctggtagtacctctcaaccaccagctgctagcacactctttggtagtaagccgacgcagtcagacggaacaatacaacaaacatcccagagttcaaaaccacaatctggctcaccattcccggtcatgactcctggagttggagcatcctcgtctggacctgggacgctatcttttggacttggagcttcctcaactggttcaggcactgcatcttttggtgtcggagcttcatcttccgcacctggaactttatcaacttttggtgcagcagctcactcttctggacctggagttttctcttttggggcaggaacttcctcatcaggacctagcactgcctcttttggtgcagcaacttccacatcagggactggatttggcaattcaccatttggaactggagctacttttgcgaatccatttagctctagttcaagcactgggttcacattttcttcacctagctcttctgctggtgcatcaacagcggccagtacgagtgtatttgccagcacctctacagcttcttcagcctcagcttttagcaacccttttggctcaagttcatccccacccagcacatttacatttgggcaatcaggttcttcaggcaacacttttgcatttggagcgcagccagctccaacgttcccatctcaaccatcacttttctcatttagttcagccaacactagcatgaattcgtctccacagcctgcatttggaatgataaataccaacacagccttcagcatggcttcccccggaaatgatcagatgaacgaagacagcatggcagatgacactagtcaggcagcacctgcgccagcgccagtatttggttcatcatttggacagcagaacaactcatctgctgccccggtatttggtgctcccgcggtccagccaggtggtgtttttcagttcgggggccaacaaggttcagcacagcagaacccgtccttcccagctgttggcagtctagagtttcagggtgggaacttttcgttgggcagcgggggtggtggcggtgacaagtcgaaccgaagagtgatcaaggtcaaaaggacaccaaagaagagataa

SEQ ID NO: 19843 - DNA, 596 bp, Zea mays
  Peptide Sequence Number=SeqID_63218
cgccggtggggggcccccgcggctgccggcgaccggtcgccgccgccgaggccgtcctcgccgccccgacattctccagctggcttgcagctgtttccggggtggtggattttcaaggaataaagaatgatcaacctcttcgaattgagcgttggagccagcgccaaggctctccggtgagaggaactcagtcggagcggaaggagtacgccggatcaaaggcgcatgatctatgtcggcagttgactggcagcacgaggaggagctcgtcggatagatcgggcggtacgcccatgaaaatgctgatagctcaggaaatggccaaggagggggacgcgaatcagaagaccactaacgttgtggcgaggctgatggggcttgacgataatgtggatcttgctaagcctgtcgtgcccccaaacaggaggagtttcccggacggccatttatctgctacactggcaagagtaaacaaccaaattccatttgagaagcacacgagttccgccgaagatgtggtgtacaaggatgtctacgaagttgggtaccagccaccaagagcccccccccctccaaggacccccccccccgagtga

SEQ ID NO: 19844 - DNA, 405 bp, Zea mays
  Peptide Sequence Number=SeqID_63219
atggtctacttccaagggggtcaccctccttttaaaggcgactatctctacttgcgtccccagccgtcacgggctgagtcttctccaacacgctccaaggccctcccctgcggcgcgggggctgggtcccacatgtcatgcaagccggctcagagcagaagaagccaaaccgccatgcgcgggaccgggaaagggggataccccgaaaaggatccttccccggaaggaaccaggctccgagcctccctactgatcagaggttcgaaggctgaccccccgaagggttcgacaaccgcctcagatcgtgtgggccctacacccactactggtcagaggttcgaaggccggccccccgaagggttccacggccgcctcaggctactcgggctccgcgcccattattga

SEQ ID NO: 19845 - DNA, 210 bp, Zea mays
  Peptide Sequence Number=SeqID_63220
atggagcctggcggagggacagctgtcggagcggttgagtccttgctgacgtcctcttgcttccgtaagggggctgagagccgccgtcgtcacagagttgggcgatgtggaggctcctccgaagccgaggtcgagtctgtcttccatggccgaggccgagtccgagccctggggtcgggcgaagcggagttcgtcgtcttctggggctga

SEQ ID NO: 19846 - DNA, 354 bp, Zea mays
  Peptide Sequence Number=SeqID_63221
atgaccgaggcgcaagcaggggcgatgttctacggcgacggcggcggcttcctcacattccgcttcaattccgacgatgctggagctagcggattggcgctccccaaggtctcgccggggtgccagctcaggcagcctgacgaggacgcggagtctaaggtgtctgctgaatggggcgctagtgatggccttcctcttcatctcgccaagctgaacatgtttgtcttcaagagctatggccttgtccagaagcttttggaaagatgggaagcagctgcatctaagcggcaaccacaacatcagtcccaatcggtggaggattcagaggaggattcatctacggttctagattag

SEQ ID NO: 19847 - DNA, 633 bp, Zea mays
  Peptide Sequence Number=SeqID_63222
atgaagactctgccgaaatcgagaggtagtcttgaccagaatgaagtgagctaccttggccagtttgtccacagtcacctatatggaatcataccccttcggggtgcgaggcaacctaataatgaaatccatatcgatttcttcccacttccattcaggtgcataaggttcaacacaaaccaagaaagaaaatcagttagggactcaatcaaagaccggagcaaaaccttgagtgtgctgatttttggcgcaccgaacagtgtctggtccggtgcgccaggccgtacagcagatgaaccagccactctcaagaatttggatgcgcgctccgctataattcactggactgtctggtgtgccaccggactgttcgatgagccagcggagcaacggctctctgcgcgccaatggtcgtctgccgcgatgaacagtgcatgtcagaagtcagagcgcagaagtcagagggcaccggactgtccggtgcagctagaagacaaacgcctccaacggtcaactgctccgaaccctaacagttgtgctgacgtggcatgcactggacagtgcacagtggttgtccggtggcgcactggactgtcccgtgcgccatcgccaacagcccttaccaacggctag

SEQ ID NO: 19848 - DNA, 1128 bp, Zea mays
  Peptide Sequence Number=SeqID_63223
atggagaacgggaatgactatgctatagaaggggatgtttacttttctgttgatagttttcctgaatatctccttctatctggaagaaagttggatcaaaatcgtgttggtgaacgtatcatacaagaaagcgatcttaggcctcatgtcactgttacatggtttagtggtatggtgaaagctgaggagcaaaacctggtcaacagacaccataaagctttcttggatagtatgtctgatgatcttaaaaccacagaggttctggatggtgaggatggcttcacggatctgctgaaggctataaacagcaatttgaatgatttgaagaagcttcaacaaaaattaaagcaacagcagcaaacacagaaacagcctgaagattacgttcaaggccttattgctctggagacagaaattaaggataaactatcattacttggtctggaggtactaaagccaccttggcccagagactcattaaccgcggacgtctacgaggccggagagaggccttgccattcgcggccacatgagcccagcccgactgcaatctcccgccagtggtcatctagagggatgatcaccagccttgtggaggagagaagtgagccaggctgcggcctcccccctgccctcagcttcaaggatgttcatcatccgcgctggggaggagggcgagccgagttggggtcccgccttccgcatgggctggcggcccacttcttcctccagcattcgggggagaagggctttcgccagccttgcgaaggaggcgaacttcgggtacgcggggccggccgactgcaggcgccgccagccgccgcgtgcccggtgcctcggctcgggtggcttcggcgccgcctccgacgctgcctccgatgctgcctcctgctgcttggtcggggcatggatgtccgtccaccgcacgggcgacggtcacgtcgtgcgcaggttcgccacatccacggcttctcccgcaccgtgggccgcaccggggggtcgtacaagacgttgtacgtcgtggggggcgttagtaaggtggctgccgccgtcggtgctaaggtggtcgcctccgctggcgagccgctcggagctagctatctcgcggccctactggtgtggaggtag

SEQ ID NO: 19849 - DNA, 543 bp, Zea mays
  Peptide Sequence Number=SeqID_63224
atgcaggcggcatgcaaccgcaccaagggggcgcaccctttcgactttgacgcgtccagcatggaggcccaggcccacacgtcatgtaaccggcgcgccggttgctacgtgcaagaaactgcaccgccactcgcgccactaccgtgcctcctcgactgcggaaccagtaccgcgactcgaggcaaccctgcgcatgacccaacagtgccaaccaggcacatcggtcatgggccagtcagccgcgggagaaggcgcgacggtcgatacgaccagaaatgggccggtagtaatggcagtggcaggcgggcggaagcagtgataccgggaaaggggataccccgaaagggatccttctccgcgaaggaaacgggccccgagccccctactgatcagaggttcgaaggctggcccctcagaagggttcaacagccgcctcggagcactcgggctccgtgcccactactggtcagaggtttgaaggtcggcccctcgaaagggttcaacggcggcctcaggccactcgggctccacgcccattactga

SEQ ID NO: 19850 - DNA, 3066 bp, Zea mays
  Peptide Sequence Number=SeqID_63225
atgccgccctccttcccctccctcccgctcccggaggccgttgccgccaccgcccacgccgcgctgctcgcgctcgccgcactcctgctcctcctccgcgccgcgcgcgcgctcgcctcccgctgcgcgtcatgcctcaaggcgccgcgccgccgcgggggccccgccgtcgtcgtgggcgacggcgccggcggcgccctcgcggcggcgactgccggcgcctggcacagggccgtgctggcgtcctgcgcctacgccctgctctcgcaggtcgccgtgctgagctacgaggtggccgtcgccggctcgcgcgtctcggcgcgggcgctgctgctgccggccgtgcaggcggtgtcctgggccgcgctgctggcgctcgcgcttcaggcccgcgccgtcggctgggccaggttccctgcgctggtgcggctctggtgggtggtctccttcgcgctctgcgttgtcattgcgtacgacgactccaggcgcctgataggccagggcgcgcgcgctgtggattacgcgcacatggttgccaacttcgcgtccgtgccggccctgggcttcctgtgcttggttggtgtcatgggttccaccggtttggaattggagtttacggaggatggcaacggcctgcatgagccgctgctgctcggcaggcagcgcagagaggcagaggaggagctcggctgtctgagggtcactccctacgctgatgctgggatcctcagccttgcaacattgtcatggcttagtccgttgctctctgttggtgcgcagcggccacttgagttggctgacatacccttgctggcgcacaaggaccgtgcaaagtcatgctataaggcgatgagcgctcactacgagcgccagcggctagaataccctggcagggagccatcactcacatgggcaatactcaagtcattctggcgagaggccgcggtcaatggcacatttgctgctgtcaacacgattgtgtcgtatgttggaccttacttgatcagctattttgtggactacctcagtggcaacattgctttcccccatgaaggttacatccttgcctctatattttttgtagcaaaactgcttgagacactcactgcccgacagtggtacttgggtgtggacatcatggggatccatgtcaagtctggcctcactgccatggtgtataggaagggtctccgactgtcaaacgcctcacggcagagccacacgagtggtgagattgtgaattacatggccgtcgatgtgcagcgtgtgggggactatgcatggtatttccatgacatctggatgcttcccctgcagatcattcttgctctcgccatcctgtacaagaacgtcgggatcgccatggtttcaacattggtagcaactgtgctatcgatcgcagcctctgttcctgtggcaaagctgcaggagcactaccaagataagttaatggcatcaaaagatgagcgcatgcgcaagacttcagagtgcttgaaaaatatgaggattttgaagcttcaggcatgggaggatcggtaccggctgcagttggaagagatgaggaacgtggaatgcagatggcttcggtgggctctgtactcacaggctgcagttacatttgttttctggagctcgccaatctttgtcgcagtcataacttttgggacttgcatattactcggtggccagctcactgcaggaggggttctatccgctttagcaacgtttcggatcctccaagagcctctgaggaacttcccggatctcatctctatgatggcacagacaagggtgtctttggaccgtttgtctcattttctgcagcaagaagaactgccagatgacgcaactataaatgttccacaaagtagtacagataaggcagtcgatattaaggatggcgcattctcttggaacccatacactctgacccctacactttctgatatacaccttagtgtagtgagaggcatgagagtagcagtctgtggtgtcattggttctggtaaatcaagtctactatcgtctatactcggggagatacccaaattatgtggccatgtcaggataagtggcacagcagcgtatgttcctcagactgcatggatacagtctggaaatattgaggagaatattctgtttggcagtcaaatggatagacaacgttacaagagagtcattgcagcttgctgtcttaagaaagatcttgagctgctccagtcagaaacaaagagttcagctttgctagagcactctaccaaagatgctgatatttatttgcttgatgatcccttcagtgctgttgatgctcatactgggagcgaactgtttaaggagtatatattgactgcactagcaaccaaaacagtaatctatgtaacacatcaagttgaatttctaccagctgctgatctgatattggttcttaaggatggccatatcacacaagctggaaagtatgatgatcttctgcaagctggaactgatttcaatgctctggtttctgctcataaggaagctattgaaaccatggatatatttgaagattccgatagtgatacagtttcttctattcccaacaaaagattgacaccaagtatcagcaatattgataacctgaaaaataagatgtgtgaaaatggacaaccatctaatacacggggaattaaggaaaaaaagaagaaagaagagcgtaagaagaagcgtactgttcaagaggaggaaagggaacgtggaaaagtgagctccaaagtttatttgtcatacatgggggaagcttacaaaggtacactgataccactaattatcttggctcaaaccatgttccaagttcttcagattgcgagcaactggtggatggcatgggcaaacccacaaacagaaggagatgctcccaagacagatagtgtggtccttctggttgtttatatgtcccttgcctttggaagttcactatttgtgttcatgagaagccttcttgtggctacgtttggtttagcagctgcccagaagctttttataaaaatgcttaggtgtgtctttcttttttccaatgtcattctttga

SEQ ID NO: 19851 - DNA, 651 bp, Zea mays
  Peptide Sequence Number=SeqID_63226
atgccggaaagccagcagaaagatgccgccccggcctcgccgtctccgtcccggcgagcgagggcgagagagagagagaggcgcgatgcggacaacacaacggaacaagcaaacaaacgcggaaaacgccgtgcagcagcagcggaccaccgcaccgccagtcgccagatcgagcggcgtggtggtaggtctgccgcgacgtggcacatgcatgcgcgccggctgcggggcgtaggctgcccaggtggggaggccgcacgcagcggcagcgcggcggcggcaccagatgggatggggggcgggaatctcgcgtggccccctatggtatatcgcggtggggcaccgagaagacgagagaagacgaggcggctcggctgctcggtggtcgcagccctctgcttgctgctcggctgctcggtgctagctgctcggtgctcgactactcggcggtcctcggtgctcgctgctcgacggtcggcgccctgtgctcggcagcttgttgctcgctgctcggtagccctgcaccatattctaaggacgcctggtggatggcgaaaactgggccagcgcctggtggaggtggatgcctgcagccctgcaccgcagacgagcagattgggatttgggagggagcttggccttggcggctag

SEQ ID NO: 19852 - DNA, 378 bp, Zea mays
  Peptide Sequence Number=SeqID_63227
atggcgcctcctgttgacgtggctggcctgcgccctaggttgggcgatgtggaggctcctccgaagccgaggtcgagtctgtcttccatggccgaggccgagtccgagccctggggttgggcgaagcggagttcgtcgccttctggggctgagcccgagtctgagccctgggtcgggcggagcggagttcaccatcttccgggacttagcccgagttcgagccctgggtcgggcggagcggagttcgccgtcttccgggacttagcccgagtccgagccctgggtcggggcggagcggagttcgccgtcttccgggacttagcccgagtccgagccctgggtcaggcggagcggagttcgccgtcttccgggacttag

SEQ ID NO: 19853 - DNA, 306 bp, Zea mays
  Peptide Sequence Number=SeqID_63228
atgggcgttgggcgaagtatgccctcgcgagatgccctccctgggtgggtggaaagtgcaaagtccactttttctctggatgtgcgaggccgggatcctaccgtggtcgtacgcgaagcggaggatggggtggtgcgaattgtggggcgctacgtgccgaagacggaggccctgcagagctgggatatacgcggatccaacgactgcctgaatagggtcttcgagttgaatcgcttaccgtatggcggttaccccggggaagacattgtcgaccgccgcgggaaaaaaaccagcggctgtgactga

SEQ ID NO: 19854 - DNA, 1899 bp, Zea mays
  Peptide Sequence Number=SeqID_63229
atggagttgatggggacgtgtgtggcccccgggggaaggatgtcttcgcccgaactccgggagtcttcggcgcggatgctggaggttaccgggggtcgatggcccaagaacgttcctatcccccgcgcgactggtgaagacttctttacatctcgcatggctcgtgacttgagggtgtttccttacggacggaatattgctgttgttgtgtcggcagtgatgaacaaggatcgtcaagatgctgcgcagaagcgccgggcggtcgtcaggatggtcgatcccgtgcgcgaggcaaaaagggcgcggagtagcgcgaaggctgcagcctccggcagtagcaaaccggtgccagctgcaaaaccggctgcacccggagctagcaaggcgtcaacgggcgagaaggctgcagccgctggcggaaccaagcctctcccgggcggaccgtcgcctgcgaagctacctccgccggggaagcgtgttgctgacttcggcacacatatcagtgtcgaggattatctgggtggtaaggatttttttgaccggaggcatgttgcagggtcgggcgagggacagttggttgttgtcccgccttcggtgacagccacctcgccatcggcggtggtaaaggcgaagggggtcgcgcaggactcgtgggccgccttttgtgcgagcggcgagattttgacagccgctgccgctagggacgtggcgggcaccatgtcccagcggctgagggaagtgtctcagcagctgtcgcagcagctgacgcagcagttgacgcaagcggccgacttcgccgaccgtgttgcgtcgggcgtcctgactgcggacgtcgtcgacgaagtcgagaatcttcgggcgcagcatgaggatgctgtccgggataagtcggctgcggagagcaagaaccgcaggctggcggagaaggtggccagcctggaggccgagaagacggacctccggcgccgactggcggaggagaggagggaggctaaccaggccgtcgctgaagcgcaggctgcacaggcgaaggctaaggtggcgctggcgaagggtagcctcgccagccaacgcgccgaggagtgggaggcaaggttcaacgccctgcgcagtcgcgtggacaggtcgagaccttggtacgctaagaagtcgtgcggacgcacgcgcagctcgcggaagcataccgcgatctggggattcatgtcctacgcctccctcgtcacatgcgagggggccatgaatgcgttgtcccgcgaggggtttaaacactatgaggtcttcgaccaatccaatgaaaactttgagcgtgaaatttttaaggtcaaagaccctgtggtaaaggattccgcgggggcactcttcgatcggatgtggggtcctcatggccgggaggcggttagggagaggtctgactgggcgagggagcagatggcgcgtgccgaggatgtcgaagaccttggagatctgaacggtgcgcggcccgaggctgaggtcaacccggtgccgcccgaggctgaggtcaacccggcgctgccctcggaagccggtgaaggctcctcctccgcacctgtgtctactgtgtccggtgaaggctctttgccagcccctgtgccgacggaggatcccccaaaggcaatggcggagccggcagcagaggatcccatggcggcggccgggccttcgcaggttcaggattttgggcctgcgcacgcaaccgcaactgacactgctaattttgtggcggcttcgaccgtggttgctgaaaatgaatcggatgatttcgtgtctaagttttttgagtctgatgattctgggagttcggttgtgtggacggaagagtcttcggatgaggacttggattattttgcggccttggatgttgctgtggcggaggcttga

SEQ ID NO: 19855 - DNA, 387 bp, Zea mays
  Peptide Sequence Number=SeqID_63230
atggcgcctggccagtacaactttcccctatgcccaaatcccgacctagaataccccaaccccctcaccgaaactcatgccggcctcagtgcaccagattttctcccaatacgacgagattgctcaccggagcaccctctagcccgcccaggaccccctccgtcgtctgcccgcccttggtcccgttctcacgaccggagctctaccgtggtgttcgttgggttctccccaacgaccctggcctgcttagacaatcccagacctcctagatccctggctcgcctcgcctccggcgactgcgccaccgagggtgcgagcgccgctgccccctggccggtcggaactgttaaacctcctggacgcctgatcttagcctcctacccctga

SEQ ID NO: 19856 - DNA, 2892 bp, Zea mays
  Peptide Sequence Number=SeqID_63231
atggatccccgccgtctccccatccttctctccctcctgcttgccttcttctccgccgttgtcgcctctgacgagatccacggatgcggcggcgtcgtcgaggtcgacgttcctcatgttgctctatctccgtgtacagcgagctctggcttggccaagtcgaggaaggcatcggattccaagctcgattactccgacatcacggttgagctctgcactgttgatggtttggttaaagaaagcacacagtgtgctcctaatggatactattttatccccgtctatgataagacaattagactactagttattgtgatcaaggttcctgtcatcattgatcacaatgggtgcaatggaaatgcggatataaatttccagttcactgggtttatgatatccggtaaagtagtgggagctgttggtggtaagagctgctcaaaacggggaggacctgctggtgtgaaaattgaactgatgacagattctgatgagttgattgcatctgctttgacgtcatcatcaggagaatattcatttacaaacataattccagggcgttacatattacgtgcttctcatcctgattatgaaattgagttgagaggctcaccagagattgacctgcgatttggaaatgccgtggcagatgatgtcttctttgtatctggttatgacatttatggcactgtggttgcacagggaaatccaatagtgggagtccacctatatttgtattcaaatgatgtaacgaaggtcccttgcccacaaggtttcagtgatgcacccaaggaaggtgcactttgccatgcaatatctggtgctgatgggaagttcacatttagatcactaccttgtggtagctatgagttgttgccatactacaagggagagaacaccgtatttgatatttcaccatcttcactttctgtttctgttgagcatagtcatttgacgattccccaaaaattccaggtcactggattttctgttggagggcgtgttatcgatggttatggtgctggtgtggagagtgccaatgttatagttgatgggcagttgagagccataacagatagtcttggatactatagactcgatcagaagtttgcatacaaaaatatgggttataattttgcatatggaaatacgggatacaccatgtggtcagagcagtgggtcggtaacaatgtaaaaacggaatataccgtatttgaatacgagtctgattggttgcctgcattagaggctatccaggttacatccaagaagtatactataactgccgagaaggatcattataagttcaaccgtttggaggattttatgattttaccaaatttggcaagtattgatgatatcagatcagttagatatgatgtatgtggtattgttcgaacagttactctgaattcaaaagcaatggttactttaacacatggaccagaaaatgtaaagccacagcggaaattagtgggtgaaaatggacatttttgctttgaggttcctgctggtgaataccagttatctgcattacctgtagattccgaacgctcttctagtcttatgttttcaccgggatctattagcgtcaatgtaaatagcccgttgcttgatctggaattctctcagtcacaagtcaatgttcatggtaaagtctcatgcaaacagcaatgcagccagaacattctggtctcacttgttagattggctggcggagttgaacaggaaaagaagacaactacattggaacaagataatgttaattttgtgtttaagaaagtatttcctggaaaatatcgtgtagaggtgaagaattctttacccgagggcttagctaaggatgattggtgctgggaccagagtatcttgaatatagatgttggtactgatgataaaggatcacaaagaatttgtgttgaaacttcagggcaacatgagattcatttaactaatccttgtatttcctttgggacctcgtctgttttgtttgatacagctaatttaatgccgatccatatcaatgcaaagaagtatcttgtaaaaggtgaaatccatgtggacatgagctccattcaggaaaacattgattccaaggacatagtcgtggatatcttgaagagtgatggcagtttcatagaaaagatatccacatcacttgttcttggaaaggacaatcaaaatgacttcactgcctttgagtactctatttgggctgaccttggggaggacttcatctttgtcccccatgattctagcattggaaggaacaaagtcctattttatccagcaagacagcagtattcagtttctatgaatggatgccaagatactgttcctctaatcactgcaagaactggtctatatcttgaaggatcagtgttacctgcaacttctgatgttgacatcaagattctagcagctggaaagagcaactatgcccatctgaacaaaggggatgtagcaacagaggcaaagacagattctgaaggatcattttttgcaggtcctttgtatgatgacatagtatataaagttgaagcttcaaaggatggttaccatctcaaacaaactggcccatacaccttttcttgtcagaagcttggtcagatattagtgcggatttatggtgaaaattcagagcttttaccttcagtattattatcattgagtggcgagaaagggtacagaaataactcaattagtagttctggtggaaccttcacctttgacaacttatttcctggaagtttctatctccgaccacttctaaaggaatataaatttaatccgtcagcagtagctattgatcttaattctggagagtctagggaggctgaatttcgtgcaaccagagtggcttacaggttttcttcactgtctatttatgaataa

SEQ ID NO: 19857 - DNA, 210 bp, Zea mays
  Peptide Sequence Number=SeqID_63232
atgtcagagatgtatacctgcatggacggaggtgctcccgccagatcaagttacgagagaaacaagatcgagttcgtcgccgttcaagctttagatctgaggctatgggtcgtaacgcgcgtagaccctaaaaccctcaaccccgacgccgagagactgggtcagagaaggtggacgatggaggcaaaggggctggaggtggggtcgtag

SEQ ID NO: 19858 - DNA, 309 bp, Zea mays
  Peptide Sequence Number=SeqID_63233
atggcgactttgccaaccctaaacaacatcgatctggcggttcagcaggtgagaggcgacccaactgagggatctggatttgttgtatcaaaagggggtctcggccggtggtatggccccagctccttggctaagggcaaggagcccgcgagtagcagttccacccccgtgtggtatcttcggactcgtatcagaaagggagaagctcaaaagatacgaaggttgacacagcgccgaagctgtgaagcaggaaagcttcggcatgttcgcagaaaagggaaccgacttaaagatgaaaaggccatttag

SEQ ID NO: 19859 - DNA, 732 bp, Zea mays
  Peptide Sequence Number=SeqID_63234
atgtcgaacgtgacttgctcacttcgtgcattgggtgctacaccgaaggagaggggtagctctattttgccgactagaaaggtgcccttgccgccgaagccatacagtgggttgtccgaaggcttaagcaagctgtggttgatgcccatgcggtcgaaggcatggaggaaaatgatatccgcctggctgccattgtcgactaagactttgtgcaggtcccagcctgccacgctgcagttggtaaccatggcatcgatgtggggtgcgctgcgcagtcttcttgctttggggcttgggggtggtggatgttttgctgttgcgggtgtggaggtgggagtgggggaggtacaatttgtacctcctggtggtgttggtatgcgtggtgagggtgcgcgcagtcttcgccgtggaacaagcagtagaatctgcgcggctgctgcgcacgtccctggcctcgaccacgagttccgtttccgcggccctggggggatactcctggcggcgaggggcctcaccagcggggtgctagttggcgatgttgtgtacctgctgctgactgcggccgtctcgaccggagtctgcctgcgaaggcctcgtccacgtacggctggactgcggagggtctttaggtttcctctgagactcgacttttgcgctggtggagctcttcggatcaggtgtatttttcgaatagctgatacagctcctggaggttccagggcggatctctga

SEQ ID NO: 19860 - DNA, 159 bp, Zea mays
  Peptide Sequence Number=SeqID_63235
atggtggacaaagtacaaaccaaggataaaggaaaaatccaattggaaatgtcttggctcgagcagccaagaatggtgcaccggacagtgtccggtgcaccaggctggctcgagcgaactggccgctctcgggaattcaccggcgatgtacggctataa

SEQ ID NO: 19861 - DNA, 168 bp, Zea mays
  Peptide Sequence Number=SeqID_63236
atggcgcgattgggacacgcggtggccaacggcgagggcacggcggcggtgagcactttaccgcgggcgggtaaagcttctatcagggtctattgcaaatataaacatacacttgttggaattttactaggaatgccccgaggtggcaacataccagccactgtttaa

SEQ ID NO: 19862 - DNA, 363 bp, Zea mays
  Peptide Sequence Number=SeqID_63237
atggcacactatattcctgctgatggcattcattgggattttcataatatgcatgaattggaggaggaggaggtcgctgaggcatgggatgaccatggaggctgcaaagcttctcacatcatcatgaagtgcctgggtctaacgtcggtgcacagcctcatcaacagcatgactgtgccacatagcaaaaaacctcgctatgtcgttggccagacgcacaaacagacctcgaccctaacccatgccctgacctcttcctcgatcgccacgatccatcggacgagaggcggcagcagcacgagaggaggtctcatggagaggaggctaaggtggtggctcattagaggatgcaggacctcctga

SEQ ID NO: 19863 - DNA, 147 bp, Zea mays
  Peptide Sequence Number=SeqID_63238
atggctatgtgccacgtcgacgagcgccaacggtcaaatggtgcactggacggtgcgccaccggacagtccggtgtgccaccagacagaaggcaagaattgccttccaaatggatttccaacggctctagctgccttggggctataa

SEQ ID NO: 19864 - DNA, 1359 bp, Zea mays
  Peptide Sequence Number=SeqID_63239
atgtcgtctgagagggccgatgagaaaactggtagagatgagaaagaagtccttaaagctattgagtatgtgcatgaattgctagacaaagaagtagccgcagaaatgagtccgacagacatattggtttctgggatgagccaaggaggtgctctggcgaaagcgagtgttctactctacccaaaaactttaggtagttgtgctgtctttagtgtttcagttcctctaagtaaagcattcgctcaaaaggtgtcatctgaagctagaaaggcagttgagctgaaggctttcatcatagcgttagccgaagatattttgacaattgcaaagcaaaccgagagtgcccagaatgttgtaggtctatcaccactaggttattcagctagagtccagtctgagtcttgtggcagggagtggatgatctttcacattcccataggtttgtcgttggtactagagttcaagctgggtggagtgaagatggagaatgtgtataaagcaacagttggagctatagcacaaaatggatactatgtagcctatgatggctggggaaacagggaagaggatgggcttgtgccaagcttgaatcctcttgtgaaggagtttctcaatgctgctgatgacaagcggaaggaagtcctctctaaaatagaagaggatgttgctaagctcagcgctaagaagctacaagtgaatgccgaggagagcagccatgacttggctaacccaccgaaggtagaggagaagcttggtgttgtccctcatggcctgtccaccgactctgaggttgcccagagggaagccgagtctatctctaggaagactctcaggagctcagccgagaagtttgagttccaagctgaggcgttggataagattaggttcctttcccttactgataaggaagttctgggtgaaggggacactgcaaagcttgagattcagattaagttggacaaagagaagaaaatcctctccattccggataggggtattggtatgaccaaggaagatcttattaagaaccttggaacgattgctaaatctggcacttcagtgcaggaacaggagctgctcgagtctcttgtcaaagctgatacaagaaggcaggaaagagctaaaaagatggaagaaaagaaagtgtatctgcaactgtacgaagcaatggaggcgctggtcaagatcgatctggagaccaacaagatcatggacttcatcaagtttgacgtcggcaacgtggtcatggtgactggcaggaggaacaccgggcgtgtaggagtcatcaagaacagggagaagcacaagggcagctttgagaccatccacgtgctgcttggagctttttgctatgtctag

SEQ ID NO: 19865 - DNA, 807 bp, Zea mays
  Peptide Sequence Number=SeqID_63240
atgggaaccaatgggcatctcgacctcgacacgggaggtaagtccgtggatcaaaaggtgtacaaggttcacactcagccaataaaaagaccaagttttggattcaataaaggagcaaaggggcaaccgaaggcacccctggtctggcgcaccggactgtccggtgtgccaccggacagtgaacagaacctgtccggtgcaccaggggactcagactccaactcttcactctcgggaattctcggaagccggcgcgctataattcaccggactgtccggtgtgcaccggacatgtccggtgctccaaggaagcgcggtctccggaactcaccagcctcggtttcgcgtggcagccgctccgctaaaattcaccggactgtccggtgtgcaccggactgtccggtgtaccagcggagcaacggctcttttcggcgccaacggctccttgcggtgcatttaatgcgcgcgcagcgcgcgcagacgtcagacatgcccataccggtgcaccggacatcaaacagtacatgtccggtgtgcaccggacacccaggagggcccagaagtcagaagctccaacggtcagaatccaacggcagtgatgacgtggcaggggcaccggactgtccggtgtgcaccggactgtccggtgcgccatcgagcagacgcctccagccaacggtcatgtttggtggacacaccgacctcaacaaaggagattccgactatgctggatgtaaggtctataggaagagtacatcagggatgtgccaatttcttatgaaggtccctggtgtcgtggaactctaa

SEQ ID NO: 19866 - DNA, 1053 bp, Zea mays
  Peptide Sequence Number=SeqID_63241
atgccccctcgtgacagcccccgctgcctgcccccgcctgcccctcggaaccgcaagctgaagatgctgctatggtcccaactgaagattcagatgatgacatcgaggacattgatattgaagaagacaacaccatcatcgaagacaggtcgcgtggactttggcaaatccacaatcaaaggtcttccttatcttttgcacactaactccggggatgacgaagttgttgagctacccattcttgaggaaactcccctggcaagcattgcctatgatacgaaggaatctctcacttcggagttttttctgagcagtgtaaaggaggatgaacgcttaactccagtgatgagtgtgttctttgttgatgatgaagatgacgacaacgaggacaaggccgaggctactgccacaacagccacgacagagaaggataatgtgttgtctcccgtagctgtggtggcaaacgacactatgaaggtccccatggcgcccccaatagtgatacaatcgctagccgaggtggctaagacaaaggttgaatctgcagggcctgcacttgtagatgaaaagggcaaaggggcagcagaaatcgaagaggaatctatagagggtgacatgtctatgggagaatgtccttttgaccaagagtttggtggttggcgttacagagtttatcactcagccaggaaagccatcggcgtcaaacagatggtcgaagctcttgattttgttgagcaactaggattgttagattgttctatgactcaactctatttttacttcgcaggggctaatcttgagcaaggcagtaaagaaccagaagaatatcgagggggaagctgcccaaaaggaaattatgaagcttcgaaaaaaacactcaacattatagagaaagactttactgagagtcgaagcgaagtccagaagttgactgaggaaaagaaagaagatataaagcctaaaggaacaatgagtgataagatctcagagcttgaagcactgaactcacatcgtttcaagtgccttgctgcacttgaagctgagatgaaatag

SEQ ID NO: 19867 - DNA, 438 bp, Zea mays
  Peptide Sequence Number=SeqID_63242
atgatggtccctgtcggccatcccaagttcctagcgcaggacatgcaacaatgggatagaagggaggcctctgaagcccgcacaattaacggtatgggactttatgaaaccaagtcaaaaggagcaaaagagaacaagaaagaaaaaggaaaaagtgtgctggactgcatagcaccggacagtctagtgcacggtccggccaactgcctgctctcaaaaattctagctgccacatcggccgagggccaacagtcaactggagcatcggatagtctggtgcccccaccggacggtccggtgccccccataacaggaaaccagccaatcacacgattctctgtccgcacactgttcactgtctggtgctcccacggacagaaggcaactaaagcctaccaaatggagctccaacagctcctaggttacttggggctataa

SEQ ID NO: 19868 - DNA, 759 bp, Zea mays
  Peptide Sequence Number=SeqID_63243
atggaggatgacgaggacatatgggcaaacaccgccagcagccccagcgcgtccccaccgcagcccgtggcggcgggctcggtctccacctgcagcgccttcatctccacgcagctgagcctcaactcccgcctccacctcctctcctccgccgcggccgggggcgggtcctccccggtccgcggcggcgcctacggcgcggacggtgtccgccaccaccacatggctctcggcggtggcttccgcaatgccgcggcgtcccaggggtccttctttccgtacaacctcgccggcgccggcgccgatgtcgcgcccttcgacggcggccgcggcgtgctcgaggacgacatgtctgtcggcgccgccgcgtccggcacctgggctggcgggggcaccgaccggcggaagaagcgcatgatcaagaaccgcgagtccgccgcgcggtcccgcgcgcgcaagcaggcgtacgtccgcgagctggagacgaaggtgcagctgctgcagcaggagaacgagagcctccgcgtcaagtacgacgaggatccaaaagttgacagcatgtttacaaataaacaagaagaagtgaaaggagattcaggtaataaacagggaaaagaagatgaagagtggtttggagatgtcagtggggatgatgaagaggatgttggttgcagtgatcatgagttacatggtaaagatgaggaaggtagtagttcagatgaagaatacaagcctccagaggatgatagctccacataa

SEQ ID NO: 19869 - DNA, 315 bp, Zea mays
  Peptide Sequence Number=SeqID_63244
atggaggaggggcagccatggtgggacaagcctggacgcctagtggaggaggagatcccggtggaggagcagcggcaggggcgctcaaggtgttgggcgccatggatctggagaaggggagctgcaggggcgctgctgtgccgtgggaaggagaggagtagaagttataaagttaagcaagaacaggcacaaaaaatcatggccaatgccgcggtggctggctgcctcactggcttcctgacggcgaccgcggccgaggggcggggtggcgtcgtcgacgagcggcgggatggggccgtgatggggcagaagtga

SEQ ID NO: 19870 - DNA, 258 bp, Zea mays
  Peptide Sequence Number=SeqID_63245
atggccgccgccgccccagccatctccctggtggccgacctcgcccctgccccagccacagctcccccttcggccctgctgctgcaagcactcagcccctcccatggcacacggagaaatcccatgatttgggggaagacgaagtccaagcacaacccccgccaatcgctcgatgaaaaatctaaaccaaaaccctcagcgttttcatgggttccggagggattttatgttggtaagctacttgatgaaatgttttag

SEQ ID NO: 19871 - DNA, 1305 bp, Zea mays
  Peptide Sequence Number=SeqID_63246
atggcctcccgcccaaagctgtctggtattcagaagcaggttttggcgctgtacaggggattccttcggacagcacgccttaaggcccctgaagaacgccgcaggatcgagtctgttatcttggcagagttccgtgacaacgcaaggagtgttgaccgtaggaactttgtacacatagagtacttgttgaggagagggaagaagcagcttgagcagctcaagaatcctgatattactggactcgctacccttgtatctagtaatatatgtatgtggaaatatgaaggtttccttatttctcttcttaaacagcaagagaagaaggaagacaagtcagacaaaacagaagacgagaagaggggttgtgacttgtatattgtcaaggatcacttggatgtggtaaatgctatactggacactgatgatagctgcataaggattgtgcgaaaaaacgggaagacatccctacatactgctgcaaggattggataccatcgtattgtcaaggcactcatagagagggatccaggaattgttccgatcaaggataggaagggacaaactgcacttcacatggctgtgaaaggcaagaacacagatgtagtggaagagttactgatggctgatgtttccattctcaatgtgcgggacaagaagggaaatactgctttgcacatagctacatggaaatgggagaattttgggattatgaaacaccgcagacgtggcttcgacgaaacggaggccagtattccggacagtgaacaaaaatctgggaacacatttcattttcactgtcattggctaccagagtccgggaacaaaatctgggaacaaaatctgggaacacaaaaatctgggaacaaaatctgcctttggctaccagagtttattgctcccatatcattcgctgtccatttcactgtccattcgctgaacacaaaaagctgggaacaaactcattttcccagtgaacaggtagcacaatttagttcacaaaatctgggagcacaatttagttcacaaaatctgggagcaataaacaggttgaacagcttcgactattggtgcttctacttcatttgcagcaacgacaagccacctgctttggcgcggactagggttgtggtcgcagcgccgccgccacctgctttggcgcggggccgcgagcagcaagggagaagacgcggagtttggagagaaggaggtgcagcgccgccgccacctgctttggcgcgggaccacgggcagcagatctccgggcagcaggggaggagactagcaggggagggaaatggagattga

SEQ ID NO: 19872 - DNA, 894 bp, Zea mays
  Peptide Sequence Number=SeqID_63247
atgtctttgcgctcccttatgcatcgtgcctttccgccttccaagcccccggatgggggatacccgcaagctttccaccttgtcgctgggggaacgcaactctgtgggagttggtacctttcagccatcgttcagcttcaaggattttcatcatgcagcccggttgcacccctccgccggcggtcacccaagacggtgacctccagcccctggatggggagaggcaagccgggctgtgatcctgatcctgccctcagcttcaaggatgttcatcatccttgctggggcagagagcgaggcgagccggggctctacctcccgcgcgggccggcgggccacctcttcttccagcttctggtggtggcaaccatcctccagctctgcggaggaggcgtcctccagccatgttggggaaggcgaactgttgctgcccagctaggatgcaacattccgccctcttcctcgctttcgtggcgaggacgggaacgaggagctgccgttaaaggaacccctcgaccgctcttcgatgagccgaggccaggggtagcggtgtcagcatggacagaggcagagttggctcgaaaggaagacttggttggccggagcctggccgggtcgtccgctagcgggaccgacgccggagttgatcttccgaggtctcgggccgggctgatgtcttcgggggacaactggccgaggcctcggggcgaccagccgaggcgcctgcccgagccggattctcggagaagaccctggcggcgatggcccgggtgtggtgatgacgccgtccttcggagtagagatccttggaccgcgtcgccgtccgaggctaggtcggacctcgccgaaggtgttgtcgacgccgagggtgctgcggctccctcaactgtctag

SEQ ID NO: 19873 - DNA, 1113 bp, Zea mays
  Peptide Sequence Number=SeqID_63248
atgggtacgttcgatacacaaccaaggctcgggctgcgctcccaaggtaccctaggacatttccgagaccagcgggaacgatcttgtaacggaatcccatcagagggaggcatcgagccctcggaccccgtcgacaggggaccgggtccggcagatcacccgcagaggctcgggggctgctctcgcaaacccggcttcggccaaaccgttgacagcgtcaacataccagctcgagaacttgggactcgaccgtacacccgggctacggccagctcgcatcagggaacgaccagaccagccaaagaattacgcgaggcattaagacctcggaggagtcaaaccactcctccgaggcctcgggggctacacctggcgggtgcgctcacgcgcacccaccggaacaaaacgcaaccgagaaaggctggtctccttgcaaaaaagtgcgacgaaagcctccaagcgagtgctaacactcccttcgaggctcgggggctactgtcggggaccataattaggggtaccctcaacgctcctaattctcagctggtaacccccatcagcataaagctgcaaaggcctgatgggcgccataggaagctccgctccgcccgacccagggctcggactcgggctaagccccggaagacggcgacctccgctccgaccgacccagggctcggactcgggctaagccccggaaagacggcgaactccgctccgcccgacccagggctcggacttgggctaagccccggaagacggcgaactccgctccgcccgacccagggctcggacttgggctcagccctagaagacgacgaactccgcttcgcccgaccccagggctcggactcagccctggcttcagccgacggtctccgcctcgcccgacccaggggcccggactcgaccactgccactgaagacagactcaacctcgacctcggaggaggctccacatcaccccaacctagggcgcgggctagccacatcaaacaggaggcgccatcattaccctaccccaagctgactcaggctacgaggaacaagaccggcgtcacatctggctcgctccgccaggaagacaatgatggcgccccgcacactccctga

SEQ ID NO: 19874 - DNA, 690 bp, Zea mays
  Peptide Sequence Number=SeqID_63249
atggccccaccgtcgctgccgcaccttgaatcgcctcgatgctcctcccctaattccttggcgattgttgtggctggaggtgttgatccgatattgccgtctccgattgcgacaacgggagcgggtgtacgcggcggatcaggtgtatactctaattgcaaacttgagtctctgtttttactcactgattacaatttgcatggtgtatcctctaattgcaaacttgagtctctgtttttactcactgattacaattgcatggtgtatcctctaattgcaaaacttgagtctctgtttttactcactgattacaattgcatggatgcaaacatacttgatgtgtttgtccccagggtgcagcaaacatttgatacaaaagaagaagcctacctcttttaccttgactatgcaaagttggctggttttagtgtcaggacaaaaaggactagtaaagaaaccacacactgggtttgcaaccgtgaggggtttctgaagccaggtcaagagaatgaggagcctatgacaaataagacatcgatgagaattggttgccctgcttatgtgaaggtgaaggaggacaagaagcgcaatatttggaaagctgagcaagcaagggaggagagggatggtgacatggataaactgttccaatttttcagggagtgcaaagaacacaatgaatacttttag

SEQ ID NO: 19875 - DNA, 414 bp, Zea mays
  Peptide Sequence Number=SeqID_63250
atggcagaagtacgcagcgaaccccgtagctcatggcgtgacctcgtcagcagggtggtttcgaactcgtctgtggcgctggccggtggaaacaacgggcggtgcgaacttaatcgctcgccagagttcagattgggagctgcgccgccgcgtaccgtgtactgggacattgccgccgagaatcgaggtgatgttgatactttggttctattacttaattgggatgaactcctgttatatagtaaagatgtgacattcgatcctgtgccactatgcatcatatgtgtgagacttggtcccagcacacctggtgtttatgttcgcgcccgggtcttggtgcccctaaaacccgggtgttacaataatgaaggggctgttggacatggaattggttgcgtaattgcgttggagtag

SEQ ID NO: 19876 - DNA, 353 bp, Zea mays
  Peptide Sequence Number=SeqID_63251
atggacgcgccgcccgccctgggacgatttcgcaccgcgacctggctgggggagccgcgccgccagccatggctggggatggacgcgccgcccgccctgggtggggccgtcgcctccctggttgagtgtcgacacgccgacgtggcttggggtcgacgcaggctaggggcagggcgccacagcgaggagccaggacgcgcgggcatgggggcagggcgccgcggccatggcgagctgcctgcttgccttgccgtccatgatgagctcttgcacctcaccgtggccatggacgacgatgcctttgacctcaactcgcaggcgccggagactgatggtttcccgaggcttcagct

SEQ ID NO: 19877 - DNA, 342 bp, Zea mays
  Peptide Sequence Number=SeqID_63252
atggcagaagtacgcagcgaaccccgtagctcatggcgtgacctcgtcagcagtgagctgtggagagagaaaagcgaggaggcggaggcagggaatcacggggtctcgtctccgttgccgtcgggcgctcgggtgctagtcggggacctgcgcagggtggtttcgaactcgtctgtggcgctggccggtggaaacaacgggcggtgcgaacttaatcgctcgccagagttcagattgggagctgcgccgccgcgtaccgtgtactgggacattgccgccgagaatcgaggtaaattcgcctcccaatcgattcaccatgctctcgtagggatttttcggtag

SEQ ID NO: 19878 - DNA, 504 bp, Zea mays
  Peptide Sequence Number=SeqID_63253
atggccacgacgctgagaaggctggcccagaatagggaggctgcaaggaaaagcaggctaagaaagaaggcttacatccagcaactcgagtccagcaggatcaggctagctcagctcgaacaagaacttcacactgcaagagctcatcatggacggcaaggcaagcaggcagctcgccatggccgcggcgccctgcccccatgcccgcgcgtcctggctcctcgctgtggcgccctgcccctagcctgcgtcgaccccaagccacgtcggcgtgtcgacactcaaccagggaggcgacggccccacccagggcgggcggcgcgtccatccccagccatggctggcggcgcggctcccccagccaggtcgcggtgcgaaatcgtcccagggcgggcggcgcgtccatccccagccaggtcgcggcgcggaatcccacccccaccggccatgcatcaagaacagagggaggaggaggctgagggaacggagggaggcgacggctga

SEQ ID NO: 19879 - DNA, 264 bp, Zea mays
  Peptide Sequence Number=SeqID_63254
atggccgccgccgcgcggctcccggcacgcgccgtggtggccggtcggagcgcagagactcgtcgaacgcctcgtgcctaccggcgcagcgtcgtagcccgagtaggagcaaggaggacggcggagagctttgaatgggtctggactctggaaaagaaaaaatgcatcaggcacgctggtagctttaatcatggcagggtaccgatcgtgcgtgctattccggtgtggctgtgtcaggtcccagctcccaagctttggtcctag

SEQ ID NO: 19880 - DNA, 672 bp, Zea mays
  Peptide Sequence Number=SeqID_63255
atggggagtgaggaattggaaactgctttgatggagatggtcgagcatgacaacagacgtatgttgagtgcaaaggttgagaagcttgaaacagaggcatatgaactgcgcaaagctttttcagacaagcaagagcaagagcaaatcttgttaagaatggagcaagaacagaaagtggcagaagatgcccgcatagccgctgagcgagatgctgctgaacaaaaacacgctgctcacttgctccaggagaagtatgaagcagcaatgacagcactttcacaaatggagaagagagctgtaatggcagaaacaatgctggaagctacaaagcaataccaggttgggcaggttaaagccaaccaatctttcacttcaagttcacctcgtgcagaccatgttcctgcgaagataaatcaagaaccaaaccaaactgcacctatcaggagaatcggcctgctttctaggggacttggatggcttgacaagggcaagcatgctgtgttcctagttccccctcttgacctgtgcaggctcatgctgcacgcccgtaaacaccttccacctgattggatgcctgagcacgccaagccgggagagctgcatatcattatatttaagaagaagaaaaaagtcggggccgaagcccttacaaaccataacactgaggtttaa

SEQ ID NO: 19881 - DNA, 351 bp, Zea mays
  Peptide Sequence Number=SeqID_63256
atggagctccgccaccccaccgtggtcagccccctcccagtcacatctggcaaaattagacccacccttaagctcgctagcctcttctcgtgctatggcacctgcccgatccctacgaaccgggccaccggcggagagtcaccgttgaacccgccggtggctggtttttccccgcgggtcggccggttcaaccctcccccatcggtcgctgacgtcgtctcccctcccgctctctctagcgcgtgggcccgtaaccacgacgccgtctcctcgcgcgcccgcgttgtctctcgcccatgggtcgtgctgggccggcacgcccgcgcccgcgcacgcaccgcgctcggctag

SEQ ID NO: 19882 - DNA, 861 bp, Zea mays
  Peptide Sequence Number=SeqID_63257
atgtcgcgcgcgttcgacgactactgtatcgaggattgtggcgtcattttggcgccggaggtgacacagaggaggatcgacaatagtgaccagttcgtcatcctcgccatcgtcagggtagcttttttgccgcggagaagcgcccaacccaacccgccgttcctcctccaaagcgccctcctgccccgcaaaatggagacctctttcctgcccaccacactccccaacacaaggcctctccccgcgctccgaacctacgccccagccgcctcgatccgttcccaacagcgccctcgtcgctccaccatacgcgcagccatcacccggggccggaaggaggagacggtgaccaccgtccgggagcaactggaggggtgctacctcctggcgggtatcaagtacgagggcctgacggtgaagcagctgcagggaatccgcgacgcgctccccgacacctgcaggctgctggtggcgaagaacacgctggtggggaaagccatcgagggtaccccttgggaggcgctcaagccgtgcatgaagggtatgaatgcctggctcttcgtccacactgaggaggtacccgcagcgctcaagccctaccgcgccttccagaaggaggagcgtgtcgaggagaccaacgacttcgtcggcgccgtctttgagggcaagttttacgggcccggcgacttcaaggcgctcgagactatgcccagccgcgcagaggtgtacgccacgctgctcggcgcgctgcagggacccgctacgtccctcgtcgccacgctgcaggcgccagccagagatgttgttgcggtgctctccgcctacgtgcgcaagctcgaggaggaggctggagccgcctag

SEQ ID NO: 19883 - DNA, 852 bp, Zea mays
  Peptide Sequence Number=SeqID_63258
atgggttcaacaaaaagagaaagggataaccgaaggcagccctggtctggcgcaccggagtcgctctcctctgtaccaccggacagtgtctggtgcaccaggggactccaagccaaactttgcaccttcgggaattttcagaggcgcttcgctataatttcaccggacatgtccgatgctccagaggagagcgactctgaactcgccagcttcgggaatccgctccgctataattcaccagacatgtccggcaagcccattgggcagcacgagcacgacacgattagcgacgacccatttagcccgatgattggcccgctcggcccagaaagcccagcacgacccggcccggtccatttacggcccgactaccactgccagagcatacgccacgccgccgcccgccagtacgcactcacggtctcaactctcacgcacagccgcagcccacactcccgcagcgcagttggccgaaaacctaaccctaagccgccagccgccacttctccagccgccgccgtccgccggtttccctcgccacgacgccagacgccagtacgccagtacgccacttctccagccgccagacgccaacgtctccagccgccagacgccacttctcttctccagccgacgccacttctcttctccagccaacagccgccgccacctgcggactcggcagccaacagccgccgccacctgcggtctgcggactcggcactatcggcaggctccagtgccctccagtgtggttatgagattgttgattctggttatgactatgatgctggcgaagatgaagctgtggaaggagacttccaggagttccaagactacgacgagttctag

SEQ ID NO: 19884 - DNA, 826 bp, Zea mays
  Peptide Sequence Number=SeqID_63259
atggagggggcgtttgtcctaaaaacgtcctattgctcggaggtagaagggttcccttaccttcttcgaggttgtgcgcttcacctgggagtccgcaagaagccgaagtatgcctggaaggagtaccaggagaatggagttgagaaatgctccatggtgatctacctcggggaaagccgaagctatccaaaccacccacctttccagatcactgccattggcaaccgcttccccgacacttgccaaaataccgccctaaaagctctccgtcagctatgccaaaactgtgacaaagaaattaccgaaacacccctctgctacttcccacccaccaacaaaaatagccccacgtggaggaaaagactccaatccctctcagggagagagcacaatgagtatgaccccacggtaatctacatggccagataccttcacacccttgacacccatttcgatgaccttttctcccactgcacccgcctaacctcccgggtagagaacctggaacagcagatcaaggaactgaaagaagaaaatgctgctcttcagaacagcctcgaggaggcggaaggagaggaagccaacacctgtgaagcatacaggagcctgaagaaggactatgccaggaggctaaagcgcttcgcccccgtcaaaaagattcagaagcacttcaagaaccaaggatgccagaccgtcgaggagaaagcggaggaagagcctccatcaccaattgccgccctaggactagataacctctccgatgtcgaggaggtgtctttagctagcctcgatgagatccttaaagagtttggggacgttctagcag

SEQ ID NO: 19885 - DNA, 1274 bp, Zea mays
  Peptide Sequence Number=SeqID_63260
atggaaaagtgcaaaccaatcaagacacctatgccaactaatggacatctcgacctggatgagggagtgaccttgcctgcccgtgagccgtctcctgtcctgcctggtttttcacctctcgttcgtcaggtcaggatgccgcgcacgaagaatgtgtcggcgccagggggaggagatgacgaggatcctcctcgccccttcaggcaggtcaagggaaagaccgtgtatttggagcagcaggaaggccgcaagaagtggcgtatggacagagcagcccgaggagcggcagcagcagcagcagccgctgagcaggcagagcaaggagctcagttgcagataccttccgatcagattgcgtaccgagttcgtcgtcacgcctctcgtcctcgctcctccgctcctaccactccctccattgctaccactccaccacccactttgcctgctccagtcactcctgcgccatccaccacctctgccatacctatcacctcctctactccagcttccactgctccttccgctcccctttccgctccacctatcccacctgctcacatccaggagcgtgatgagactaaggtgcgaccacttgttgcggatcctaggctctttgatcttcagcgtgctacagcggcacgggagtctttctaccgagcacagttgtcagctcagattgctctgcgagcgcaccgactcttggatcttcctgccttcctgctagccaccgatgccaactctgaggtgtttggatttaacgagtcatcgactcatcttcgcagcatgtgctatggcacctctgaccctcctcgtcgccctcacgatggagttgctcctgctgattcggccccacagttccagagtactcttgaggcctctcgcctcatctttgggtcgtaccgtccagctccagaggatcctgtgtcggcacctgctccagtgattgatactcaggccgaggataccacttttcaccagtttgagactcaggacgcagcagtccatgatgatgatgatgatgatgatgacgacgacgactttgggattcctcctcctcctccacctcctatgcctcctcgcacacatgatcatgaggctgggagttctagtgctgcccctgctgcccctccagccattgaccctgctcttgctgcgattctccagactcttactcaacagcagactcacttggcagccgagcaggcccgtcaggcagcggtccagcagcagttgtccgagagaatgctctcgatgttcctgacgattcaggacat

SEQ ID NO: 19886 - DNA, 171 bp, Zea mays
  Peptide Sequence Number=SeqID_63261
gagttgagcagttacttagcagtcaatactaccacatctgtgatcgttgataggagttcagatggggagtttttacggatagatttcaatatgaggatcgcctcggccgccctggtcctgcaggtgtcggacagcgagaacttccccaccagatcgccgttgcagatgtga

SEQ ID NO: 19887 - DNA, 1563 bp, Zea mays
  Peptide Sequence Number=SeqID_63262
atgaggaaaaaacacggctccgtgccgaaaatacatacatgttccggccccgacagccacaatgaacaagacaccagcactcagggtgccattacaaacgaaactccagttccacctctgcaggtacgaacaacccccacgattggagggcctgcggagcaacagaaggccgacggatggctcgccgccgctcgctccagcagcagcgacgacgacttctgctccgagcggccgaacaacagcagcgatgacctcagggcggatgctgctaccataaggcccttgcccacgtccccgctcgaggggcgaggacgagcagaaggccgtagagttggaggtcagtccgcgggcggcaccgactatctcgtcggtggagaaacctcttccggctgccgcggcggaaggtggtgccggaagcagcgccgaagccgctcggaccggagagccggacacgcggcagctgtcagcgtcacgaacggcgaacgcccttccccccgatcgctgagggaaggagcgggccgctgcccgcgcggagaccggccccaactcggcgcactcccctccccaacactaatgatgaacatcccgaagctgagggaggggcagaggtcgcagcctggcttgcttctcccaacccagaagctggtggtcaccatctcgggcaactctccccacttgcatcctcagccaccgcgggctgagtcttctccaacacgctccaaggtcctccccctacaacacgggggctgggtcccacgcgtcatgcaagctagcccagggctgaagaagccaaaccgccacacgcgggaccgggaaaggggatacctcgaaagggatccttctccgcgaaggaagcgggccccgagccccctactgatcagaggttcgaaggctggcccctcggaggggttcaacagccgcctcagagcgctcgggctccacgcccactactggctggccctcgaagggttcgacagtcgcctcagacgcagagcgagggatgaccctgggtacgttcgatacataaccaaggctcgggctacgctcccaagcgccgcccgcgtcgctccgactgctgtgccactcgatagagtgaggctgacagcggccaagtccggcctcgggcgccataggaagctccgcctcgcccgacccagggctcggactcgggctcggccccagaagacgacgaactccgcctcgcccgacctagggctcggactcgggctcggccccggaagacgacgaactccgcctcgcccgacccagggctcggactcgggctcggccccggaagacgacgaactccgcctcgcccgaccccagggctcggactcaggctcggccccggaagacgacgaactccgcctcgcccgaccccagggctcggactcggcctcggcctcagccgacggtctccgtctcgcccgacccaagggctcggaatcgacctcgacctcggaagacagactcgacctcgaccttggaggagcctctgcctcgccctacccagggctcggaccgaccacgtcacaaaaggggccatcattaccctacccctag

SEQ ID NO: 19888 - DNA, 486 bp, Zea mays
  Peptide Sequence Number=SeqID_63263
atgactgactcgccccgtactcgtgtcaacgagcgtcggtcggctcgcggctgcgaccgtgggcgggggcagcaggttggggtggaaaaacatggcgaaggcagggtgaaagcatctaggcccctgagacaaatgggctcggactcaggctcggccccggaagacgacaaactccgcctcgcccgacccagggctcggactcgggctcggccccggaagacgacgaactccgcctcgcccgacccccagggctcggactcgggctcggccccggaagatgacgaactccgcctcgcccgaccccagggctcggactcggcctcggcctcagccgacggtctccgtctcgcccgacccaagggctcggactcgacctcgacctcggaagacatactcgacctcgacctcagaggagcctccgcctcgccctacctagggctcggaccgaccacgtcacaaaaggggccatcattaccctacccctag

SEQ ID NO: 19889 - DNA, 2049 bp, Zea mays
  Peptide Sequence Number=SeqID_63264
atggacaaggatcgtcaaggggcggcacaaaaacgccaggcgactgtcaggattcacgaagctcggccgaaaaggcagcggggaactgcgaaggctgcggcctctggcggaggcaagccgccgctggcggcgaaggcgggcgcctctgcacctagcaaggcgccggaggcaacggtgggcgccgggggctccaaactgacgaaggtggtgccgccggccagcggagtggcggaggcttcgaaggcggcccgaacgttgccgccgccgggcaaacgcgttgccgacttcggcaccgagattaatgtggacgattatcttggggggtcggacgagggccagcttgctgtagttgcgcctgccgcggcgatcgcgacggctgcgctagcgccgaaggcaaggggcgagacccttggcgccggaggcgaggtgtcggccctcgcgttggtcagggatgaggcgggcgtggcgacccgccggctgaagggagtgacggaggcgctgagtcaggcgacggaggcgctgagtcaggtggctgacttcaccagccgtactgcgtcgggggcccttatggcagctttgtctaccgaagtcgagagacttcggacgcaacatgctgatgctatccgtgaaaaatcggcctccgacagcaagtgccgtaaattggcggacagggtggccgccctggagaaggagaaggctgacctccggcgccagcttgcgggggagaggagggaggccaacgaagccatcgccagagagcaggctgcacaggcggaggccaggctggcgcgggcggaaggcaatatagccaaggagctcgccggacagctgcaggagcggcttactgccctggagagccgcgcgaagggggccgaggccgcgatgcgagcggaggccgaacggacgcgcacgcagcttatggctgcatatcgcgagctgggtgcgcggaccggtgacttcgaggtgccggagcgagaggccgggcttcgctgtctggagtgggtgcaggaggagctgcaggagctccccactgtcttggaggggttaatgtcgttcacctccctggtcacctgcgagggggcgatgaacgcactctctcgcgaagggtgccggcactttgagaccctcgaccaggcagatgaagattttgggcgagatatctataaggtcgaagaccctgtggtgaaggaatccgccggggccctctatgaccggatgtggggtctgtacggtcgtgaggtggtcagggagcgggccgaggctgcgagggctcaggcggagcgtggcgagcgggtggacgacttcggggcactgaacagcgtgctgcctgacccggagccgacccctgcggaggccgcgactggagtcgccctggaaccaaccccggagactgcggaagacgcgccaggcgcccccacacctgctgcggccggcgaagacctgcccccaaaggtggccgaaggctcgcctgatgcccccgcagccgctgtgccgagcgctgaagatcccacggcggtggtggcggaaacagcggcggagccaacggcggaggctcccgcagcggcagggccttcgcaggttcaagattttgggcctgcgcacgcaaccgctactactgagtttttggcggcttcgaccgcggaaggtggaaatgaatatggtgggtctgtatctgagatttttgattttactgactctgggagctcggttgagtggactgaggagtcatcggaggaggacttggattattttgcggccttggacgtggctgcggcggaggcttcgccacacgctgcggacgcgccagacgtgccaggccctagcaccgggcgccgacgacgaagggcggttgcaaagcgtagggttagtgcggaggaaggggctcggcttcgcgtgagtagggctgtccggcaggagctgctgtctttgccggccgccgtgggtgcaggggaaggggagctgcgaagtctttttgcgggtgaggagcttaggataatgttatttaattatagggagatgggaattattcctaaggttgagccgatgtag

SEQ ID NO: 19890 - DNA, 507 bp, Zea mays
  Peptide Sequence Number=SeqID_63265
atgtcgaaagctggagggtcccgcttgtcaaagactgttgctgtcccgcttgtcaaagacttttgctattctagcaaggggaagcatttgagaacaagtctccaacagacgtcaacaccacgcccgggccatcgccgccagggtcttctccaggaatccggctcgagcaaacggctcggccggccacctcgaggcctcggccagctgtcccccgaggacatcggccaggctcgcggccccagcaactcgactccggcgtcggtcccaccagtggacgacccgaccaggctctggccgaccaagtcttcctttcgagccaactcagcctctgtccgtgctgacaccgctacctccggcttcggctcatcagagagtagccgagggtttcctttaactaagcaagagaagcctcggacagcaaggccgaccgagccgagggactcctacgcctccgggatacggatacctcactcgtcacctttgcacgaggcgactcacacttggtga

SEQ ID NO: 19891 - DNA, 114 bp, Zea mays
  Peptide Sequence Number=SeqID_63266
atgaaggcctactacaagcagacgctcagcttcgtaggcgccctcctcatcgtcctcaccacacagggcaatgggtcaggatattttgagcagcttggaatcagtccaccgtag

SEQ ID NO: 19892 - DNA, 462 bp, Zea mays
  Peptide Sequence Number=SeqID_63267
atggccgtcgccgccgctgctccagcgtctgtggcgccgttccctgcgcccaaggccagcgacaacaggaaggcgatggtgcccgtggacgcgtcggagctggagaagcacgtgctggcggtggacgacagctccgtggaccgcgccgtgatcgccaggatcctacgcggctccaggtacagggtgaccgtcgtggagtcagcgaagtgcgcgctggagctgctcgcgctggacctgctccccgacgtcagcatgatcatcaccaactactggatgcccgggatgaccgggtacaagctgctcaagtgcgtcaaggagtcagcggcgctcaggggcatcctcgtcgtcatcatgtcggcggcgatcaggggcatccccattcaaaagtacttttcagcaaattattcggaccattcggacccgctcaacattattttattggccacttcatatgcatattaa

SEQ ID NO: 19893 - DNA, 618 bp, Zea mays
  Peptide Sequence Number=SeqID_63268
atggctgaaaggtaccaacttccacgaagttgtgttcctccaacgacaaggcggaaggattgcgggtgttccccatccgggggctcggaaggtggaaagacacgatgcataagggagcgcgaagacatgctcgcctttcaagggggtcaccctccttctaaaggcgactctccctgcttgcgtccccagccgtcgcgggctgagtcttctccaacacgctccaaggtcctccccctacggcacgggggctgggtcccgcgcgtcatgcaagctggcccagggcagaagaagccaaaccgccgcgcacggtgcatgcaactgcccagcgggaccgggaaagggggtaccccgaaagggatccttctccgtgaaggaaacgtgccccgagcccccctactgatcagaggttcgaaggctggcccctcggaggggttcaacagccgcctcagagcgctcgggctccgcgcccactactggtcagaggttcgagggccggcccctcggaagggttcaacggccgcctcaggccactcgggctccgcgcgcactactgatcaggggttcgtaggctggccctcgaagggttcacagccgcctctgacacagagcgagggatga

SEQ ID NO: 19894 - DNA, 279 bp, Zea mays
  Peptide Sequence Number=SeqID_63269
atgtccccgcagagggcaaccatctgggcgttagatccattgagggcaaccatcgcgccacttatcggcggcgtcgacatcgcgcgagcgggagacacgccaaagggcctcggcccagactccatccaccaacctcatgtgatcacacaactgctcgtccagttgatctacactatgatattcaacgatcttcatcaagccttcgagatcgatctcatcttcgactacgctagagcaatctccactgtcggaaatgataagttttcctaccatgtttga

SEQ ID NO: 19895 - DNA, 357 bp, Zea mays
  Peptide Sequence Number=SeqID_63270
atgtcgccgccgccgataagtgccgcgatggttgccctcaatggcgctaacgcccagatggttgccctctgcggggacgtcgccaacctcaactttgctgactccgcgtggccgcctggagttgaggttgtgtctacgtcgtggcctggaccgcacagctctgggtgcgcactgcacgtgcgccggcgcagcgcccgggttctgtcgtaccagcgacccagcgtgcatgtgggtgctgtcattgtgaggccggtggtgaggctgaaaagcatgcatcattggtacgggaggccagatcctgggtcgtcatatggagacggcaggccacccaagacggatctagatgacatagagtag

SEQ ID NO: 19896 - DNA, 246 bp, Zea mays
  Peptide Sequence Number=SeqID_63271
atggcagatgaagctgttagcgacaatgagggaaaggctcaccaagccgccgaagcaaataaaaaggctggcgaagctttgcgattggagactcccaaagaagcccttgccccactaccggaggcatataatcttgaaaatgttctggagctgaaagatttcctggctgggctcgaggtggagcacaaggaaatagacgaagttgttgataacacgttgaataatattattgtaaaaactttttaa

SEQ ID NO: 19897 - DNA, 1410 bp, Zea mays
  Peptide Sequence Number=SeqID_63272
atgggcaaggcggcgcgctggttccgcagcttcctgggcaagaaagagcagcggcccaccaaggaccagcggcggctgcagcagcaggacgaccaggctcctccgcttccgccgccaagcgccaagcgctggagcttcggtaggtcgtcgcgggactcggcggcggccgcggtcgtctcggccggcgcgggcaacgcggcgatcgcgcgcgccgccgaggccgcgtggctcaggtccgccgcgtgcgccgagacgcaccgggaccgggaccaggaccaggaccagagcaagcacgccatcgccgtggccgccgccaccgccgccgcggcggacgcggcggtggcggcggcgcaggcggcagtcgccgttgtgcgcctcaccagcaagggacgcgcgccgctcttcgccgtcgccgccgccgtcaggatccagacggcgttccgaggattcttggccaagaaggcgttgcgcgcgctcaaggcgctcgtgaagctgcaggcgctggtgcgcggctacctcgtgcgcaggcaggcggccgccacgctgcagagcatgcaggctctcgtccgcgcgcaggccaccgtgcgcgcgagacgagccggcgccgccgccctcccgcacctccaccacctgcccggccgcccgcgctactcgatgcaagagcggtgcgcggacgacgcgcggatcgagcacggggtggcggcgcacagcagccggcggctgtcggcgagcgtggagtcctcgtcgtacggctacgaccggagtcccaagatcgtggaggtggaccccggccgccccaagtcgcggtcgtcctcgcgccgctcgagcgccccgctgctcgacgccggcagctgctgcggcgaggagtggtgcgccagcgccaaccccgcgtcctcgccgctgccgtgctacctgtccgccgggccgccgacgcgcatcgccgtgccgacctcgcgccagttcccggactacgactggtgcgcgctggagaaggcccggccggccacggcgcagagcacgccgcggtgcctgctgcaggcgcacgcgccggccaccccgaccaagtccgtcgtcgcgggccactcgccgtcgcttaacgggtgcccgaactacatgtcgagcacgcaggcgtcggaggccaaggcgcggtctcagagcgcgccgaagcagcggcccgagctcgcctgctgctgcggcggagcgcgcaagcgggtgccgctcagcgaggtggttctcgtggattcctcccgcgccagcctgagcggcgtcgtgggcatgcagcgcgggtgcagcaccggggcgcaggaggcgttcagcttccggacggccgtcgttggtcgcatagaccgctcgttggaggttgccggcggcgagaacgaccggctggccttgttgcagaggaggtggtga

SEQ ID NO: 19898 - DNA, 444 bp, Zea mays
  Peptide Sequence Number=SeqID_63273
atggagctctctgtgatctgtggtctctctctcctcgccattaataaaattaaaaaaacggaaacggatggcatcatcaaaaatattatattactagagtttgggagtagcgtgaagagcgagagacggagagagatttgtttgggggactcgaggttcgaaaagggacagcgtcagcccaaaaagacgcaaacgagaaaggggtgtgagaacgaagaggaggacgaccagtttgggagcaacaggagtagtggacgtctagaccgccgcatctttggaaccaagaagaccagcatgcctgaccgccggaacagatcaacagagtgcgatctcagagttgcacagtcggagtacgtggtgcccccggcagaaccaagttggggggagggagataggaatccgtccgaatcgacgttctctaccggtagcttgactcatctgtga

SEQ ID NO: 19899 - DNA, 519 bp, Zea mays
  Peptide Sequence Number=SeqID_63274
atggcaaatccgccaagaacagagctccctcaggggaaggaccccgatggacacgaggtggagaagttcgggctcggagatgacagacatgtggttacctgtgaaaggcaactggctgttgggatcgattggaggaatcaccgccgcagacgaactcgaggcttcctcttgggcgccatctcgattctaccggcgagcagagtgggaggcgaattgcagagaggattcggaagcaagaaagcaagaactagggcacggaaagcagaggcggctaaaagcgcagcacttatgggatattcccgagccacataccgtttcaaaaagcgcccagtcggcacccgacggttacttccaaaacaccgttacctcaaaaacgctgacgttgtcttcagtcgctcggcagttacctctaaaactccgacgtcgtctacaagtcactcggcagctacctctaaaaacgtcgatatgatgccagagttatttacttacaaattccaaggaaatcaacttcacaaataa

SEQ ID NO: 19900 - DNA, 243 bp, Zea mays
  Peptide Sequence Number=SeqID_63275
atgacgacggacatgccactagagttgctccacatggatctatttggctcgatcgcttatataagcatcgacgagaatacaaccgatcaagccaaggatggaggcaagaagagcttcaaggtaccgagtgcacgggagaagatcaaggagactaggaacccaaagccaggggtgaagaagaagacttgcaaagtcaaggttgatcgagttaagagttatggtgcatcaaggatcactacataa

SEQ ID NO: 19901 - DNA, 384 bp, Zea mays
  Peptide Sequence Number=SeqID_63276
atggcggcgagcgggggtgttcggttgcggagtagtggtgatggagtaggtgctacacggcagcgggtgcgacaaggggagggggggcttggtgttgtcggcgacgatggtggcggtgggtgcgctgcaaagggggcgggggcggcggtagtgcgcatggaggcgggcacgcgtgcgaggggcacagagaaaacctttttaagaaaatcaaaaagaaaacacacaagctcagcaatgataagcacaaacaaatcaaatgttttgaataagggaagaatagagtttttccaaagcacgggctactcagattcgggggctaagcataactactattgcttggctcctgaattgagaactatgctaaatgcaacttatgagcactaa

SEQ ID NO: 19902 - DNA, 258 bp, Zea mays
  Peptide Sequence Number=SeqID_63277
atggacggcgggttgaattctaatttacttaggggttcttttgcaaaacagacaggccgaagagccgtcttccccccgacggcccatggtggcgccgccctccagaccgcggtggaggaccgcaggagtaaagccaaccatcgccctagcgcactaaacttagaagggaaaggtgctatacgtcggtgggggcaaagtgaacgagatgagggatatctcaccagcgatttcggtgcagaggcccctggagacgataag

SEQ ID NO: 19903 - DNA, 483 bp, Zea mays
  Peptide Sequence Number=SeqID_63278
atggcctatgcatcaacgagcaccgacggtgagactttcacgccatggagccacatcatgttcgattctctcgacttccttgccaccgtcaccggcaagctttgcctcgccgacctcaacgtacctgtcaccacgggcacacgatccgcgagctccaccaggagtaaggcggagaagcgacaccttaagaggagcgccgccaccttaaagcgatgcctcaatagagcaccagaaagtgtctgtttcgtggcaacactgccacgaaacaacaatggcagggggacaacaagtctgccaaccaagaggaagaatatcaacgctagcgccatgtgcatatccttgaccgcgaggccacccttcggcaacaacaagaagagcttgatggttcttgtccgcaagttcgatcgagtttacaatgacattgaaatctcttttgcaggaaggaaccctttcttctcaagacctcgaagacgactcttctag

SEQ ID NO: 19904 - DNA, 513 bp, Zea mays
  Peptide Sequence Number=SeqID_63279
atgggggctagaagggaggcgagaagggccctctaccgtcccgcgcgaggcgataggcaggcgagagggagagagagggcgacggcactcacgtccggcgagagcgggcgatatcgcccaggggcgggcctggctcaattcaatgaaaagctgatgtggatgtgggctgaggctatagcctgctacagcctgtgcactggagcagcagaggcgagagtggaggcgagagctgacgtggcaggggcgagagagaggctgtgcactggactcagcctgacaaacaggaacaggggcgggcagggcacccagacccagcaaggccaaactgccgccggtagccgacacagatctgaggcgagcccggtccagcggggccgcgcagccgcacggagatctgtgactgtgagcttggagtgcaagggagccagccgccagcgaggaagaggccgatgccgagctggatggaaccaaaaggcattgcgttgcgtcctctcatctgatctgatctcatga

SEQ ID NO: 19905 - DNA, 1356 bp, Zea mays
  Peptide Sequence Number=SeqID_63280
atggaagcagagtacccccaccagcaggcggccccctcttactccacgaccgccaccgtcttctggccgtacgcgactcgccgcagaaagagagccgaggacggcagcgacctctcgctggcgtcggatatggatctcgacgccgacgcgcagcgcgccgcagataagctgaaagcagtgtcagaggaacttggacatgagatccgggttttttcaagtgagaactttgctctacaaccgagcaagctgcctagtgcagatcatgaggaaggtgacgacttttatgagcttcagcctgctgattactacaacttgatttcaaacaggatgggagagctatctaaaatgctaaagactcgcaagatgcgggaagcagaacttgctgctcagcgagcaaagcgaacaaaggcagtaatgagggtgcgattccctgatggctacatacttgaggctgactttcttccatcagagaggattcatagtctagtggacctgctcatgaaagtacttgctagaccagatctgccattctatctctatacagtacctccaaagaagcgaatactggacacatcacaggacttctatacatctggttttgttcctggagctaatgttcatttttcttatgatctgcccgaaggtttgttgttaaatgcagatgatctaaaagcaggacccttcctccgtgaaggaattctaagtttggatggattgtcacttctgctgaaacctgctagtcaacctgatgattctagaatgaactcttctactcatcaatctggtgcatctcaatctgaccctgtaccaacaacaaataagaagcctggcagaccaaagtggctgaaaagctctcatgcgtatttgagaagaataattccttatcgtcttttgctattttgtttcggaacatcttttgcctttgcaagaccacgacaaaataactggtacccacttgttgcaggtgataccactccaggcgtcaggtcactagtagttgtgtggttggaacttgaggcggaaaacttggatgctattgaatgtggggtggttggggtatttatagccccaaccaccaaaaatgtggccgttggaaggctgctgtcgcatggcgtactggacagtccggcgcgcattaaatgcgttgcagtcgaccgttgcgcgcgaagtagccgttgctccgctggcacaccggacagtccggtgaattatagcggatcgacctcccattttcctgaaggtggtaagttcagcttcgagttccctggtgcaccggacactgtccggtggcacactggacagtccggtgcgccagaccagggtgtcattgggatgtctttggctctctttatttga

SEQ ID NO: 19906 - DNA, 216 bp, Zea mays
  Peptide Sequence Number=SeqID_63281
atgaagggaggcacagtcgttccattggagcgttgcaccaaggtttctatggtaccacaagtggtaaaaagtaccctctccatcatcggtccgccgtcggccacgtcgctctgcgaccccatcttcattctgcacaagcgcccacctcgtccgcggcaccacacaacggctcaggcgaggcacccaccatccatcgacacagatgggatgaggtga

SEQ ID NO: 19907 - DNA, 666 bp, Zea mays
  Peptide Sequence Number=SeqID_63282
atgatcttgcccaaattcgcgaagatatgcgccctatcggcgttagaacaggagcagaagaaaccatgcgtccatgccacgtggtcgatcgcggctgacatgcccggtgcacgccagcccgcgcacccgcgccgagccgtgcgcgcccgctccggtccacgcccgcccgtgcaccgtacccgcgcctttaaaagccacccccggacgcgcaacacttcactccacgcttgccctcactgtcccgacccagttcttagctccggcgagctctgcgccgcccgcccgagccacccgagcgccggccatcgtggccagccattcctagagacacataacctcacccgagcctctggacaggttccccgtggagccgtgaagcttcttcaagcaaggatcgagaccctgcctcactggagcagcgggatcaccatcgtcggacttcggccgcccgccaccgcgcgtagaccgggctaccaggtcggaatccccccgccgaactcccccacctgcgcacgtggactagccgaccccgaccacctccgacgccgacccatacctcgatgtgactgccgtaacctccccgacctccctggacgcctcaccggagctatctcgccgcgggtaacccctccgccctttcctccgccgcgggtactgttccaatag

SEQ ID NO: 19908 - DNA, 1188 bp, Zea mays
  Peptide Sequence Number=SeqID_63283
atgtgttcgaccacgtgccgcagcagcgcctaccgaacctggccgcgggactccgcgcgcggcctgtcgccgcggccgcctggaggcccgcgcggcgctcggccgcatctgcggctgcccgcacctgtggcaccgtttcaggtgagatgttgggggttgaggacagtagtatctggcacaaaaggacagtggattttcataaatgggagcaagcttcagtctagctcgcagctaaaaaagacattcctgcaaatcccaacatcctcttcttcagcttatcgcgcactagtagcttcgtctgcattcttgccatcaagacggagctttgaaggctacattcctcgtagctgctccagctcatcgctccagatctacagccggtcaccgctgttaaatctatcgccgtcttcagctctcatggtatcctcccagctcacgggctcctccgacgtagcccaacgttcagaggaatggtttgctcttcgcaaggacaagctcaccacaagcaccttcagtactgctttgggtttctgggctggcaacagaagaccagagctgtggaacgagaaagtcttcggagcgacagagatcaagctagcagatgccgctagatctgccatggactgggggacgcatcacgaaagcgtagccatagagcagtacacgagcatcacaggaagaccggtgggcaccctcggcttcgcggtgcacaccgaggccagcttcggatggctcggagcctcgcctgatggggtcctcgggtgcgagccacacgacgggatcctggaagtgaagtgcccgttcaacaagggcaagcctgagctcgctctgccctggcgcgccatgccgtactactacatgccgcaggtgcaggggctgatggaaatcctgggcagggactgggtggacctctactgctggacacccaacgggagcagcctgttccgggtgccgcgggactgcgcgtactgggagctcatccacgaggcgctgcgcgacttctggtggggcaacgtggtgcccgcgcgggagctggcgctcctggggaaggacgacgaggcgaggtccttcgagcctcagcccaagcaccggctcacgaacctcgtgctgtataggagccggaagctggcctccgaagcgaagctactttgtatggatgttggcggccatgtagaattcttccaatga

SEQ ID NO: 19909 - DNA, 1521 bp, Zea mays
  Peptide Sequence Number=SeqID_63284
atggctctgaattgctcatcacgctcgctctgggtggccgatgattgtgccagcatgatgcttggttgtgggtgctggtcggaggaggcctcccctctgtcatcccgcggggtgaattcgctgtggtgggatgacctggagctggaagaggaggagtcggatcctgtggatctcttacccacggacccctttgggatgaacctggagactacgttcacagctgcgattgccagttgcatcggggacctcacaggcatgtctggtgctgggcatttgggaagcggtgacgatgatggtttctatgccgacctgagttattacttgaatcaggcttttgtgctcactccggagccatggagtggtgcctataccagtgtttttgaggattcttttgtgtctggatgcctctcgggcgctggaggcatggaacagttttcacggttgcctcctagctcgttctgctcagagcctattggggtcacggatgacccatctagctcttgtgacacagctttgccatgctgtgatatggttgatgtagctcctgtccaggagggaaatgatgcacatgaagcaatggtgtttgtcttgagctatcttggcttacgtgacatcctctctattgagatggtgtgcaagtcattgcgttcagctgtccggaacgaaccctttttatggaagtgcatccacattgactcgcacttgggtgagaagatgtctgatgctgatcttctgtgcctgacacagaagtccccaggttctttgcagtgcctgagtcttatgtgctgtgtaaacatcacagatcagggattgaaagctgttttagagagtaatctgcagttaacaaagttgggcattttcggtgctttccggattactcatcaaggtcttgttgacagtctgaggtcatttagtatggaagcagatattggtatcaagaaactcagagttgcaaatcgtgtcactgcatcagaagtgcaatatgtagagctgttgtccttgatgaaaatagacaaggagatgccattacacaaacaggagcctcggatctttcatgctgatcgtcttttaccagatcttcatggtggatatgttcctgattctttcgtaccagatcttcatgatgagtatgctcttgatattgagaagtgtcctctttgtccgaactacaagcttgtttatgattgcacatcaaaggaatgcaagaccagcggatctagtatttgcagaggggatgtttccttctggaataatgggagtgctctgctcaggagtgttgaagtgcctggttttgccaggtgcgtttcagttctattttctggtggctatatatctgtcatcctgttgtggttgtggctagtctgggaactgtccgtcttttatgtgctgacagacactacaaacctgctgaaccagcaggcttctgtattgctgggcattcgtgaccacaaatggcttaagatccacaaacctgataggagtgcactgctgcctgctgttctaattatagagccagactag

SEQ ID NO: 19910 - DNA, 2283 bp, Zea mays
  Peptide Sequence Number=SeqID_63285
atggctttattccggtttcttggagctgttttgaaaacaatggttgtggccaatacttttgggatgtttgtgctgctcattattttcatttttggaggatttgtcatacgtagaaatgacatcaaaccatggtggatctggggttactgggcatcacctatgatgtatagccaaaatgcactatctgtcaacgaattccttgctagtaggtgggctagtccaaataatgacacgattattgacgcgccaacagtaggcaaagcaattcttatatccaaaggcttgtttactggagaatggggattttggctttccattggagcccttgtaggattcattattttgttcaacatgctctacctttgggcccttacatatttaagtcctagtagtggctccaatgccctagtttcagaaggtgaagatgatgtaatggtattgaaaggaagaagcaaagatgaaatgtcccaagttgtatacagtgatccaggcactaatggagcgacaaacacagtagctcagtcgtcacgagtcactttgcctttccagcctcttgcactttgcttcaaccatgtaaactattacgtcgacatgcctgcagaaatgaaggaacaaggattcacagaaagccgtttacaactgctctctgatatcagtggcacttttaggccaggggttctaacagcactagttggttttagtggagctggaaagaccactttaatggatgtcctggcaggaaggaaaactagtggagctattgaaggagatattaccctgtcgggataccccaaaaaacaagaaacttttgcccggatcagtggttattgtgaacaaactgatatccattctccaaatgttactgtatttgaatccatcacctactctgcctggctgcgtctttcctcagatattgatgatggtacaaaaaagatgtttgtggaggaagtgatgacccttgtagagcttgatgtgttgcgcgacgctcttgtgggtctccctggagttaatgggttatcaactgagcaaagaaaaaggctgacaattgccgtggagctggtagcaaacccttcaatcatcttcatggatgagccaacttctggtcttgatgctcgagctgctgccattgtcatgcgtacacttctgcttttgaaacgtggaggtcaggttatttatgctggtgaacttggtcgccactctcacaaactagttgaatattttgagtcgatttctggtgttccaaagatcacagaaggatataatcctgcaacatgggtgctggaagtcagctctcctctatcggaggctcgattgaacatgaattttgctgaaatttatgcgaactctgtgctttataggaaaaatcaagagcttatcaaggagttgagtatccccccaccagactaccaggacctgtcatttcctacaaaatattcgcagaatttctacggtcaatgcgtcgcaaacttttggaagcaatgccgttcctattggaagaatccgccctacaatgctatgcgctatctgatgacatctctctttggccttgtatttggtacagtattttggcaaaaaggaaagaacatagattcacaacaagatttatataatctacttggagccacttatgctgctatcttctttcttggggcttcaaattgcatcactgttcagcctgttgtatcgattgagcgagcagttttctatcgtgaaaaggcagcggggatgtactctccattatcctatgcatttgctcagacatgtgtggaggtcatctacaccaccttacaagggatactgtacactgtcatcatatatgggatgatcggatatgactggaaatcagataaattcttctatttcctgtttttcatcactgcaagcttcaactacttcacattgttcggcatgatgttggtagcatgcactccctctgcattgcttgccaacattctcatcacctttgctctacccttttggaacctctttgctgggttcctcatcgttagaccggcaataccaatttggtggaggtggtactactgggcgaaccctgtgtcgtggaccatctacggtgttgttgcgtctcagtttggcgagaaccaaggtgagctttcagttcccggcgggaagcccatgctggtgaatcaattcttgaaggataatctcggcatccagcatgacttactcggctatgttgtgctcgtccatttcgcctacgtcattgtcttcttcttcgtattcggctattccatcaagttcttcaacttccagaaacgttaa

SEQ ID NO: 19911 - DNA, 1086 bp, Zea mays
  Peptide Sequence Number=SeqID_63286
atgggggagggaccggaggaggacgtgtcggcgcagggcgtccaccaggcgcttccgtttcgattagccgagcaacaagagatcaaagatcctacaggagcaagaacacgtctgcgcaccacaggacaggcggctggaggtccgagtactctcaaggggcaagaacagggcgaagcttgtagcgtgctgcccacatgccagggcgtgggcagaagcttaattggtacagcactacagcgtcgggagcatgagcaccgggacgacgacgaggagaacctgcgctgggccgcgctgcagaagctgcccacctacgaccgcatgcgccagggtatcctccgccgggcgctcgacgaccaagaacagcagagcggagacggcgacgtcgaggtcgtcgacatccacaagctggccgccggcgacgggggccgtgcgctcttggagcgcctcttccaggaggacagcgacccattcctgcgccggctcagggacagaatcgacatggttggcatcgagctccccaccgtggaagttcgctacgagcagttgacggtgcaggctgacgtggttgctgccggccgcgccctccccacgctctggaacgcggccaccaattttctccagggtctcattggacggtttggttcctcaaacaagaggaacatcaccatacttaagaatgtcaatggtatcctcaagccatccaggatgacgcttcttcttgggcctccatcctcagggaagagcacactcatgcgagcactcgctggcaagcttgacaaaaatctcaaggtctctggcaacatcacatattgtggccatccaatttcagagttctatccagagaggactagcgcatatgttggtcagtatgatctccataacgccgagatgactgtaagagagacgcttgatttctccaggcggtgcctaggcgttggtgccagatatgagatgattgcagaacttgctagaagggagcgggatgcaggcattaagccagatcctgagattgatgctttcatgaaagctacttcagtacaaggacaggagacaaatattataacggattcactgacgaatctctag

SEQ ID NO: 19912 - DNA, 47 bp, Zea mays
  Peptide Sequence Number=SeqID_63287
aacttttttggtgatcttttggcacatcctttgctgataccgacaaa

SEQ ID NO: 19913 - DNA, 705 bp, Zea mays
  Peptide Sequence Number=SeqID_63288
atggctcaggcgttgcgcggcgagcgggtggacgacctcggggcgttgaacaacgcgctgcctgacccggagccgacccctgcggaggccgcgtccgaggtcgccctggagccaaccccggagaccgcggaagacgcaccggatgcccccacatccgcagcggccggcgaggacctgcccccgaaggtggacgaaggcgcacctgatgcccccacggccgctgcgccgagtgctgaagaccccgcggcggcggcagcagaaacaacagcggaagcggcggcggagccaatggctgaggcttccgcagcgccagggccttcgcaggttcaagattttgggcctgcgcacgcaatcgctactgctaaatttttggcggcttcgaccgcggaaggtggtaatgaatgtggtggatctgcatctgaattttctaagttttttgatgttgctgattctgggagctcggttgagtggactgaggagtcgtcggaggaggatttggactatttcgcggctttggatgtggctgcggcggagacctcgccgcacgctgcggatgcgcaagatgtgccaggtcctagcaccgggcgccgacggcgaagggcggttgcaaagcgtagagttagcacggaggaaaggtctcggcttcgtgtgagtagggctggtcggcgggagatgggaattattcctaaggttgagccgatgtag

SEQ ID NO: 19914 - DNA, 297 bp, Zea mays
  Peptide Sequence Number=SeqID_63289
atgtcgcctccagatgcccaggtcctcgtcgtgtccttctccggcaatgaacagatgactgcatcagctcgaatggaagatataggtcgtctacccctttccggtgtcgtgggttgggatcccatcatcactgttgcatggcttctagatgcttccattgggccttctgttggtgaaagcttcacaactgctgggggcaagaaacttgacacccaagctgcatcgcaaagccacgttgctgcatcttccaagattgcaagccttttcgtaagaccccttataccaaggatcaaatag

SEQ ID NO: 19915 - DNA, 324 bp, Zea mays
  Peptide Sequence Number=SeqID_63290
atggccagtggggcccacgcctggggccacgcgagggacacagggcaggcttcacacgcgcgctcctgcgctgggctgggcatggtcgcggtgcaaggatgtcgtaccgggctggggcaggggccggctggccagaggccggtggcgtgggcatgcctgccctcggtggctgggggtgcggcacagggcttaaggggcgcgcggctcgctgctacagcagcagggctggccggtggtggcgcacagccgtggggacaagggaaggcgtgtggggaagcagatggcgcccgcggtcgccgtggaggtgaggatgaggggctttag

SEQ ID NO: 19916 - DNA, 333 bp, Zea mays
  Peptide Sequence Number=SeqID_63291
atggatgatgagctggcccttgacgtaggcagccgcggtgctagccgacgtgctcggctgacgccttcttttgttgcgctggcaggcaaggtgttagtggaagaggaacagaggggccctatcctacgcggtcgtcgtgccaaggccaatggaagctcgaccaagcctttcagggtggacaccagctatgatgaggaaaaggaggattcgaagcctgtggaggaccaggacgagtcacaaatcgtaggtgtgggtcggtgcagaggtgtcagccagcgtgctcagtcggtagctgctacagctacgcaagaagccaagataggggaggggtag

SEQ ID NO: 19917 - DNA, 365 bp, Zea mays
  Peptide Sequence Number=SeqID_63292
atggctgccccgcgaaccactcgccccgtcgcattaactccgcggcgggacaggcgacacctttggcaggagaagcgagcgacgcttcaccttcgccataatgaccgcgtcaaaaaagggaccgggaaagggggataccccgaaagggatccttctccgcgaaggaaacaggccccgagcctccctactgatcagaggttcaaaggctggcccctcggaggggttcaacagccgcctcagagcgcttgggctccgcgcccactactggctggccctcgaagtgttcacagccgcctcagacgcagagcaagggatgaccctgggtacgttcgatacataaccaaggctcgggctacgctcccgag

SEQ ID NO: 19918 - DNA, 486 bp, Zea mays
  Peptide Sequence Number=SeqID_63293
atgaacaaaacaccggcactcaaggtgccattacaaatggaactccggttccacctccgtgggtacgaacaaccccacatgattgggaggcctgcggagcaacagaaggccgacggatggctcgctgtcgcccgctccagcagcagcgacgacgacgacttctgctctggggggccgaacaatagcagcgatgacctcagggcggatgctgctgcctggcggaaggcggcgccggaagcagctccgaagccactcgggtcagagagccgggcacgcggcagctgccagcgccacgaacggcgaacgcccttcccccgatcactgagggaaggagcgggccgccgcccgcgcagggaccgaccccaactcggcgcactcccctccccaacactgatgatgaacaaccttgaagctgagggaggggcagaggccgcatcccggcttgcttctccccacccaggggctggtggtcaccgtcttgggtga

SEQ ID NO: 19919 - DNA, 381 bp, Zea mays
  Peptide Sequence Number=SeqID_63294
atgggggttacgcgggggaggggcatcgggggtggagacagaatcgggaatgagaataggaatgagaacggtagaaacaggaatgagaatggcagaatcagtaatggcagcctacctcttaccttcttcatagtagtaaagatatcttgttcctggacagagggggcccacggatgggaatgggatcagcatagagccgtggtggcgcagcccacgatgcaatttcctcagtaccctccgtattttgtttcagaccagcaggctcagctccagcatcaacaacagctctgggaggttacacagcaggagtctcagttccaccaccaccaccagcagcagagggctgacggggttccacaattgatcatcaacaatatctag

SEQ ID NO: 19920 - DNA, 252 bp, Zea mays
  Peptide Sequence Number=SeqID_63295
atgcgcgtgctcgccgtcgacgacgacccgacctgcctcaaggtcctcgagaacctcttgttccgctgccagtaccatggtacttcccttgacaacaatgggacaggcagccacggccctgagctgctgagggagaagaaggaccagtttgaccttgtgatcagcaacgtccacatgccggacatggacggcttcaagctcctcgagcttgtgggcctcgagatggaccttccggggattagttcaaaataa

SEQ ID NO: 19921 - DNA, 522 bp, Zea mays
  Peptide Sequence Number=SeqID_63296
atggagcccaacgaggccatcgccaaggaccaggaagcgcagggggaggccaagctgtcgcgggaggagggcaatcttgccaaggagctcgcagaacatctgcaagagcggctcaccgccctggagagccgcatgaagggggccgaggccgcgatgcgtgcggaggccgaccggacgcgcacgcagcttatggatacatatcgtgagctgggtgcgcggaccggtgacttcgaggtgctggtttgctcagccccggaagacgacgaactccgctccgcccgaccccagggctcggactcagccctggcctcagccgacagtctccgcctcgcccgacccaggggctcggactcgacctcggccttggaagacaggctcgacctcgacctcggaggagcctccacctcgcccaacctagggctcggaccgaccacgtcaaaggaggcaccatcattaccctaccccaagctgactcaggctacggggaacaagaccggcgtcccatctagctcgctccgctaa

SEQ ID NO: 19922 - DNA, 139 bp, Zea mays
  Peptide Sequence Number=SeqID_63297
atgagaagagccaccgtctttctcatggcgctcgccctcgccctcgccctcatcctcatcccgccgcccattggttctcccgccgccgggtcgtcttcccctcaggagaagtcgctccgacgaatctctgatcgtactg

SEQ ID NO: 19923 - DNA, 381 bp, Zea mays
  Peptide Sequence Number=SeqID_63298
atgccgccgcgcacaaggaaaacaacgcgcaagtcaactggcccaatcggtgtgccccagcctcaacttgcccctcgacatgaggatagtagcagcgggagcaatgatccaataggagatcttgaagcacgagtaaatcaacttctaacagaattgcaacgcaggaccaacatatgggttgcgaatggagatagaataaatgaattaagaagcgacatccgccgcccgcgggatcagcttgctgatcgggacttggcgctcgactgggcagttcagtctcgtttgcttgcttgtgctaaagaggcaagggctcaagcccgagtcaaggaacttagctcagctatcgacaacctgcaggtctattgcaaatactttacatga

SEQ ID NO: 19924 - DNA, 354 bp, Zea mays
  Peptide Sequence Number=SeqID_63299
atgggccacgcgagaatatcctggagttctttgagtctgccggttttcggtgccctgacaggaaaggtgtcgctgacttttcttcaagaggttacttccaagaaagaccaacaacagtactggtatcttgatcaggagcagtatcgttatgtatctgtacccgactttgccgaacgtttcaaatcattccatgcttgccagcagatgcacaaggagttgcaaataccttttgacaagtccaaaacccatcctgctgccttgaccaccacaaaatatgggctttccagctgggaatcattcaagaataaagatgccccatggcaggacgaatctcagaacgtctgcaacccctaa

SEQ ID NO: 19925 - DNA, 1395 bp, Zea mays
  Peptide Sequence Number=SeqID_63300
atgactttcatgcctttcgactatatcggtaatggaatcctaaagacgagcgagagggaccttgaaaaggaagggcgaccgagccgagggactcctacgcctccaggatacggatacctcactcatcaccttccgcgaaaagtaacttgcactcagataagtgattctgctaccgaacaagtcctaatgctcgaaataagaggaaagaagcacgactttatactcaaatacccaaatgttcaggcctcagcatccacagagaacaaacacacatacttagggaatgaactacctccacaccagaagggctacgaggcaacaaactccaagcggctcacgggcgaccactgcaccagcagcgacaacggcctctgcctcgggcggctagacagcagcagcgattgccttagggaaaacgctactgtgaaaaggccctcgcccctatcccccgcacaggggcgagaacaagccattaaagccaaagatccggaggtccggccgcaggtggcactgacggtctcgtcggtggaggcaaccccctttgcagtgggaggcctcaccagtggcggccaccaccttagcaccgacgacagcggccacctgcgcaccaacgctgcaccggcgagtggcggccgccccaacgcgcacaaggaggtcctcactcccatcctcgccacaggagtgaggacaaaactatccaagaacacggacgccgcccctgcggcgtacgacgtgttgtgcgaccccccgttcgccgcctccgtaaggctggtggacgcccttatgccccaaatgctagaggaagaagcgggtcgccagcccatgcggaaggcaggacaccaactcggcttgccctcctccccatcatggatgatgaacatccttgaagatgagggcaagggagaggccacggcccggctcgctcttccccaccacaaggctgccgaccatcattctggggcacgcgacacctctggcaggcgaagcgggcgccgtttcgcctccgtcatgatgaccgcctcgaaaaagggatcgagaaaggggatatttcgaaaggatccttctcagcgaaggaagcgggccccgagccctcctactgatcaggggttggaaggttgcgccctgcggggttcggcaaccgcccagagcactcgggctccgagccctttactgatcaggggatcgaaggctggcccctcggaagggttcgacagctgccccagagcatgtagagtcagggatgaccctgggttcatccattacatggccgaggctcgggctacgctcccgaggtaccctaggacatttccgagaccagcggcaatgatttgtaatggaatcccatcggagggaggcaccgagccctcggaccctatcaaatgggtccgggtctag

SEQ ID NO: 19926 - DNA, 708 bp, Zea mays
  Peptide Sequence Number=SeqID_63301
atgcctcgcccgagggccccctcaggcagtgggcgcacccccggctcgcctgaggccaagctcgggcaaactttgtcgtacagcaacctcggccatatcgccttaccaccgaccgtatcgcatgcacatgaaaacaacactattcaccccgttccgactactgtgccaaccaccagggtaaagctaacgacagtcagtcacgacctcctccgagatccgcctcggacgcaacagggagctccgccacgcccgacctcaggcctcggcctcagcctcggcctcgggagaaggtctccgcctcgcccgacctcaggcctcggcctcagcctcggcctcgagagaaggtctccgcctcgcccggcctcaggcctcggcctcagccttggcctcgggagaaggtctccgcctcgcccaacctcgggcctcagcctcagcctcggccttgggaggagtcacaacctcgcccgacctcagcctcggcctcaggagaaatctctgccttgcccgacctcggcctcggaccgaccacgccacaggggatacatcattaccctacccctagctagctgcctcaggctacgaaggaacaagaccggtgtcccatctagattactccagcaacaggcaaagaaacatcagcaggaccctgggctgcaccgtcagctacgcttctacatggctcaagcacttctccgcctgccacgttag

SEQ ID NO: 19927 - DNA, 522 bp, Zea mays
  Peptide Sequence Number=SeqID_63302
atggccgggactgccctcgacgccgtcggtggcggtcgaggcgcgggtggagagggcccgacggaggtggagcaatggaaggggcatgcgagtgggagctcagggaggcgtggagcatgggcatcggccccaacagtattccaagcatctcgatggtggggtgggggaatggacctatgtggggcggtcgcagtgtgtgggcgaagaagggggtggttgtggacgagacagagcgacgatagggtgggggaatggacctatgcggggggagcggggcacgtgggctgccatggatttgcgcgatttgtgtgctcgcgtcgcacaaggaaagggggagtggggcacaggggaagccggcactgttgggggagcggggcaaggctgccatgccgtcccgcgatttgtgggcaatctcgtcgatctcacgtcgcacaaggaaaggggagccgggcgcgcgggcagccatggatggaagccgacactgctcccgtggctgggggagcggggcacgcgggctgctag

SEQ ID NO: 19928 - DNA, 216 bp, Zea mays
  Peptide Sequence Number=SeqID_63303
atggaggaggcctgctcggggaggtggaggacaagtgagagcgcatggaggttcatgggcatgaagaggcaccgtgcggtcacgctggcgtcacgtgcggcggtgaagaaggttatcccgaactggtcggtcatgaacacgacgaggtgggtggtgtcatggagctccatgagtaggcccgcgagcatcgaaatgaaatttggttcgcatgtctaa

SEQ ID NO: 19929 - DNA, 291 bp, Zea mays
  Peptide Sequence Number=SeqID_63304
gtggatgtcgattttttggttgacaagttgaaggttacgaactactttgatcctgaggtgaagaaagaaaaacatcctaagccaatagctgcatcccctcaagattcacgcttactctctgaaatacaagagcagcagaatttgttgaagacctatgtcgtgaagaacatcatcctagaagaaggtgcggagaggccaaaagtcggcctgatggtgatgcctggtttcctgatcgggaccagcgtcatacagtcacgtgtgtacctttcagatgccaagtgtgctgactga

SEQ ID NO: 19930 - DNA, 438 bp, Zea mays
  Peptide Sequence Number=SeqID_63305
atgcaggggaggtatattgctgcacactcagccaatgggggaaaagagatcacagaagaaggggagggcagcagtggcgtcggacagaagcacaagagaagaaagggactctactgtcggactccaacaccagagaagaaggggagggtagcagcgccgtcggatgcctgcaccgaagaagaaggggagggcagcagcgccgtcggacgccagcaccgaagaagaagggtagggcagccgtcgggcaccggcaccggagaaggagagggcagtcgtcggacgccggcactggagaagaaggggatagtagctgtcggacgctggatgtccagagatcaagaactgatctatcttaaccaagacaccaatacgaagaagatcaacctcatcaaggaaaggataagagtcaccgtcaaggaaggtaatcgtcaaggataa

SEQ ID NO: 19931 - DNA, 759 bp, Zea mays
  Peptide Sequence Number=SeqID_63306
atggatcaagcagtctcattaactgcgagaagcagacgattcgaatcgagtgtttatccttgcaagatcagggctcaccgccttggcgtacaatgcctcactgaccccgactaccgtcgtgcagtgaccgcacttgtacccaccataaccggaatgggagaccacgtctcaggtcgcatgagggctaagcacggcggcgccagagctaatgcggcggtgcatcgccggcgcaaacgcggcctaacacccaggatcccattacttcccgcgcgtggtgattcagagggagatcacgagggtgacttagtccggctaacttctatggtgattgatggagcacggagctctgcccacggcgaggtgtggtatgtggcggaccgcaagtcgacggcgagaaatcctaaggtgctgggctccgattcgccccagaaacatcgctggcaaccttcaccgcgaccagtcgaggttgatagagcgaagtctaggaagttctcgtaccttggatcgacgagtctggggacgtgtaccatcggaccgcggagttgcgccaattcacccagtccggcgagcaattatcaattcccatacggttcctgcgccgagcccgagatgacgaagacaaccacacgcgatggcgagtcccgcgagctcgcccccgaggacgaggcagcggcgaggacggagttcaccgttggtgccctcccagccgcgcgatacccagcactgcagacctcactttcgctctcctgtgttcaatga

SEQ ID NO: 19932 - DNA, 444 bp, Zea mays
  Peptide Sequence Number=SeqID_63307
atgtggaaggatcgagtggagcatgctaaggatgtgtgggctctttacccagggcagactcctcacctgacagtgcgatgcatgaatgccctgtaccgtctgcaagccgtgcgaggtgaggtaatgtcccaggtgatgggtctggtggaggctaccaagatcaccctggataacagggaggaccttgtggtagacctgtccactgagttggtggagaaggacctccaggtggagcagatggccacccagattcaagagcttgaggagcaagtaggatccagggagaacaccatcgaggaaatccaagacatggaggccgaaggggccaacgaggatgttgacatcgagggaggagaggagccggagcctgcatccaacttggacaccgctggctcaggaagaccaccttcccccgagtccagtgttgcctcgtttgcccattag

SEQ ID NO: 19933 - DNA, 414 bp, Zea mays
  Peptide Sequence Number=SeqID_63308
atgacgcttccagagccgagaatcgagctctacgtcgccggaaaccccagatcgacgtcgccggacatcacccgaccgccggcgtacgtagaccgagtccacgattccttagcaccccgtgaagctccctgtgcccttggattgaactctaccgtcgtgagcaagccggagcacacgccaccgatgagctcgcccgcctgcgcacgtggcccgaccgactccggccatcaccgtcaacaagccgtacctcaacgtgaccgcaaggacttcccggagctaaccccacccttcgccgaacctccctcgccgccgcaaggagttgctcaggaggtagcccaggagccagcaccagagcctgccatcgaggatctgcctgccccagctttggaaggcaagccccggttttatgcataa

SEQ ID NO: 19934 - DNA, 381 bp, Zea mays
  Peptide Sequence Number=SeqID_63309
atgaggactttacccctcacgcgacctgagactgggtctccccatgctagctatggtgggtacaagtgcggtcactgcacagcggtagccggggtcagtggagcattgcatgccaaggcggtacgcttcaggatatggttgatgatgacctcacctacccccgccagtggaggggacactcattttagctctgacttcctttctcacgatggttttccttccatcttgtgggaagtgcttaactccaccggttaccctacgccccctttgtacatggtgcaactgtacgaggagcatcgggtaccacatttgccgagtctggctgactttggaggctcatcccctttcagccgggttggcgttctcttgactccgagatga

SEQ ID NO: 19935 - DNA, 414 bp, Zea mays
  Peptide Sequence Number=SeqID_63310
atggcgatcctgatggagttattcggtggatcggtggcgaggctgaagcttttgacgaaattctcagtgatagaggagatttctgcgccttcgcggcaccccagagctatgtcacttcttgagaagtttggatactggttgggaggcggccaagagatagtcgatgaagctaccagaaaaaatgagaaggagtctcatactaccttggaagaggccaggaaagctaaaaaagctgcagaacatgcaagacttatagctgaactctctccccctccggtgccatatgaccctgaagccgatccagctatgaagggggcacttgatgtaattagaatagctaacgaagatgttgacgaagctattaacaggctactaaacgaagctgctcataaagttttgaaaaaagatgactag

SEQ ID NO: 19936 - DNA, 633 bp, Zea mays
  Peptide Sequence Number=SeqID_63311
atgaggcagagaagatggctagagctaatcaaggattatgacctggagaacagccaaggggcattgaagagaacagcaagggcgctcagctatgggatggaagcaggggcgccatggaggttgctgccgctgcttggggttttggagggtgggctgttgttcttccctgtgcgtgaggggtttcctgcgcacgagcagagagggagggaggtgccatggctgccacaaagggcgtcggccaagggaactgctcgctgcgcgcaggggagaaaaggctccctactcttaacgccatggagaagagggggcattgggcagaggaagaagaagggcttgggcaccatggctgaggagcttcagcgcaccgaggaaggaggggcagatagcacgcagggtggtggaggctcgcgtcatggaaggaggaggcgagcagagctactggcttcctgtgcaccggccatggaggaaggagtagggatgcccgcggccatggagcagggaaacagggagccaagggaaggggcgccaagcacagggggcagagggaggcgctcgacatctgctggacagccgacaccggagggaagctgggcggccatgggaggggaggaagctcccggcgcgcagccgtga

SEQ ID NO: 19937 - DNA, 432 bp, Zea mays
  Peptide Sequence Number=SeqID_63312
atggattatcgagttcgcatttgtgccgagaacaaaagttttaacaggctccaaatttggcattcgtcgagatcgaatagctccgaattcggtgaaattgcaatctcgctgacggaggagtacgtgctcatccctgagcaaggagctgtccacgaggaataccaggagcaagctcccaagactgccgtcgaggatctccccgcagccccagctattgaaggcaagccccgggaggatgtgacagaacctcccaagtcattaggcccacctatagttgtccttgtccaatggacctcagacaaccctgcaggtgcacctgatcacttgacaagttcggtatctgaatttcttacttttcccaagagcgtttcatccgtcacgcagacattacaaaacatcggagatacagaaatacggaagcagttacaataa

SEQ ID NO: 19938 - DNA, 156 bp, Zea mays
  Peptide Sequence Number=SeqID_63313
atgggcggggccggggtggcggacagagctggaggcgagccgaggcgggggcggcggacggggccgaggctgcactgcgggggctggggcagccacggcgtggagtggacggcgggggcggatggcggcaccaagaaacagagagagacgggttga

SEQ ID NO: 19939 - DNA, 456 bp, Zea mays
  Peptide Sequence Number=SeqID_63314
atgtcacctggtatcagctccaggttatcctcaccaccaccagccgcccatccctcaccaccaccagccgccgcgcaatcagccgccgcaacgccctcccacccgccctctccaactccagatgcattcactcggctcgaagagagttttggtcgtctcacagagaagtgggatcagtttgttgtgatgttccaccgctacaaggagaagacagagaaggaactccaagcagcggtgcggcttcaggcggcagcgcgagggttcctggcacgccgccagaagtcgaggtctgggtatgcagccccctgcacggccaaagagggtcgtctccttcattcgggcaactgccttggtgctggacagacccaacataagaacaggctggttcctccttcacctttcatccaacgtgaagtccgcagttcagctctttccttgggatccaggaggacatag

SEQ ID NO: 19940 - DNA, 426 bp, Zea mays
  Peptide Sequence Number=SeqID_63315
atgccgttggattccgaccgttggagttctgacttctgggcccgcctggatgtctgttgcacaccggacatgtactgttcaatgtccggtgcgccagtatggacgttcctgacttctgcgcgcttctggcgcgcattgaatgtgcctgcagcggagcagtcgctgcgttttctcgaggctggcgagttccgaaggccgctcttccttggagcaccggacactgtccggtgtacaccggacagtccggtgaattatagcggagtgcctctggaaattcccgaaggtggcaagtttgagttggagtcctctcgtgcaccggacactgtccggtgtacaccggactgtccggtgccccagaccagaggtgccttcggttgtccctttgctcctttgttgaatccaatatttgatctttttattggctaa

SEQ ID NO: 19941 - DNA, 492 bp, Zea mays
  Peptide Sequence Number=SeqID_63316
atggcgccaatgtcgactgagaaacgccacctagatcagatcgaactcctcagtgttaggcagctcctcttcaacaacctgttcttctcctgtggggggggtgtgagacagcaagatttatgggaagatccagtacagggttcctggctgacagccatcgcagcaaaatcaaccagggacctccccgcactgacctctcccctactgcccttgcccctttcgggtaagatcattaaaattaataagaacatggctgggaaagtgtactgcattcacagaggtaaccgaaggctcggcgatgatccttaccttagtttggcgaccgcaggcgcaccgtcgatggcgatgtgcggatggcacggcgaggatggcaccccggtgaggaattcaccgcgctccgaagacgtccaagccagcacaaggtccccgaaagcttcccggcgcctcggcgatcccgataggtggtacgccgagggtggatcgctagtctag

SEQ ID NO: 19942 - DNA, 351 bp, Zea mays
  Peptide Sequence Number=SeqID_63317
gtgctgacgaggatcatggttatgattatgcatatggtaatgagactgcaccaccgcctgcacgagaagcaggagcatcggcgataggagttggagcagcagggctcttcttcctcgcttcagcaggaggtagagtctgtgaggagctgctcccctatgcccccgctagagtagctgctggaggagaccccgacgacggtgatgactacagtagctcgagccacagcaccgacctttcagaggagcaggagccggagggatgggttgcccgacccatcactcgtgacgccgctcgcgggtgtcactttcacgatgcgctcgacaccttgctacgccaggcacttgatcgac

SEQ ID NO: 19943 - DNA, 396 bp, Zea mays
  Peptide Sequence Number=SeqID_63318
atgcccgtgggaaacaatgtgttgtgcgcagccccgcttgcgacgtcgtcgacccccgcaaccgtcgatgtcgcgcttcgctctggtccgttcggcgaaatgtcgagccatgtggacagcccctgcgacttgtcccatttcgctcagattggagttttcatgagagaagaatgtatgagaaaaaggtggcatggttgcataggaaaaattggagggcagtcgagttgtgcttgtctgaagtggcgacgagaattaaaaatgtctatctcattgaagcggagggcgaatcggtggatgattgtgtgtgccgaaatgcgttgtagtagtgatggcgttaagttaaacgataatgtctcgagtgcacgccacaatatggttgtatgcaagacaaggtag

SEQ ID NO: 19944 - DNA, 999 bp, Zea mays
  Peptide Sequence Number=SeqID_63319
atggcgcgcgcgcgtgacgccgccctccacctcctcctcctggcagcgggcgcactcctacttctagccgtggtgtctcaggccaccgtggtgccgccgagcgttccggcgggcgcccccgaggacccgcggtgccgcgcgctggcgccgcggcgtggcgcgctggcggtgtacccgagcgacatggagcaactgcagttccttctcaacgccaagttcgtggaggcggagtggttcctgcacgcggcgctgggacgtggcgtggacttcctggaccgcaacctgtccggcggcgggcctcggccgtccggggccaggaaggcggacctggacttccgcacaaccgaggtcgccgccgagctcgggtaccaggaggtgggccacatccgcgccatcaggcaggccgtgggcgggttcccgcggccgcccatcgacctcggcgccgaccgcttcgccatggtcatggacgacgccatgggcgtccgtctggacccgccgttcgacccgtacgccgggcccgtcaacttcctgctcgcctcctacgtgttcccgcacgtcaccgccgccgccgccatgggcatcggccccagcctcatgggctacgcctccaagcgcctccaggcgagcatcctggcggtggaggccgggcaggacgcggtgatccggctgctgctgtaccagcgcgccgacgatgccgtcccaccgtaccagggccacaccgtggccgacttcacgcgccggatctccgactggcgcaaccggatgtccgggtgcggcgccaaggacgaaggggtcaaggtgctggaccggcggcagggcgccgagcgccgcaccataagcaacatcctcggcgccggcgaggactcgctcgggttccaacgcacgcctgcggaggtgctccgcatcctctacggctcgcgcaacgagcagatccccggtgggttcctccccaggggtgccaatggaaccatcgctagaggtttcttccagctcgcgtag

SEQ ID NO: 19945 - DNA, 123 bp, Zea mays
  Peptide Sequence Number=SeqID_63320
atggcggagtcggtcgtgttgccggcgcagtcgaggactagttgtacatgtgtccaggacgtgaggaacgcgcacgtgtttgtggctgtgattttagctgatcttattttgagttcgttctag

SEQ ID NO: 19946 - DNA, 243 bp, Zea mays
  Peptide Sequence Number=SeqID_63321
atggtcatcggcgtcgtgcccagcatgggcagaagtttaagttgtaggattcaagtcagaaaaagctccgagcagaaggagtgtaaattcaagacgaagtggttatggaagaggagtttgctccagtgcctattcagcaagtggatggagctatctaactggttattgggtagaaaggtcttgagcctcttcactgcaacaaaggcaagccccggtgcatttgccacctccttgctgttttaa

SEQ ID NO: 19947 - DNA, 203 bp, Zea mays
  Peptide Sequence Number=SeqID_63322
atggctcaccggagttactctggcccgcccgaggctttctcaccgccgttctcccctctctgcccgtggattcatggtcccttccccgccattgagttcgccgtggtgccctcttcctctctgcccaactccgacaacgagcagtctgaggttcctgagtgtgttgttggagacctccctgatcaaccacctggtgaaggcaa

SEQ ID NO: 19948 - DNA, 825 bp, Zea mays
  Peptide Sequence Number=SeqID_63323
atggctcgtatcaggtgcactgcacttaagtctgtgatcccctttttgccttctcgcctggcgaagcgtcgcctgcatcgcaaggatcaggagcagcaggactcttccccctcgcctcagcaggaggtggagtctgagaggctgccttcccctgcacctcagctagagatgccccctgcaccacctcagggcatcccggctgctggaggagaccctgacggagacgacgatgacgctagtggcagttcgagccacgacatagagctctcgaaggagccgaagccggagggatggatcgctagacccatcacttgtgacgctgctcgcgggtgtcacttccatgacgctctcgataccctgctgcgtcgggccttcgaccggcacacttggtctatcgagtaccgttgtgtagtctaccagcatcgccgtgggctatactcggaccagtgggaggctacttgcttggtgcgtcgtccggacgatgatctccgggctaatggcctcgacctgaagtactaccctcgccgttcgaccggcagtgctggaggtgtgattgcctccccagttggtgagggcaatcccaggctgaacaacatggtcaacttggtcgccgtgctcaacacagagttggaccacgcccttgacgagttgggcaaggtttgggcaaaggttgcagaattgcgtgctgagtgcgcagcacaccactatctggatggtggttctcccgcccctgttgggattcagcacccttaccgttcaccgccccgtggtcgcttcgactatggtaccctagactgtaggacccggatagatttggatccctag

SEQ ID NO: 19949 - DNA, 64 bp, Zea mays
  Peptide Sequence Number=SeqID_63324
atgacatctatcgaagatgagcaacatgataaagaggggacatgtgggagtttcagccgtggcg

SEQ ID NO: 19950 - DNA, 186 bp, Zea mays
  Peptide Sequence Number=SeqID_63325
atgactcttagcggtgttgggagcagtagtctgtttgaggccaagggtgtgacatctattgagctaatgattgggaagaagaccacgtccactgcattcttcgtccccaaggtcagtgatgatgttgagacagtacatgcagattcatcagcttgcattgttatggtcgatgcccctatgctttag

SEQ ID NO: 19951 - DNA, 345 bp, Zea mays
  Peptide Sequence Number=SeqID_63326
atgttgcgattcgtctcaaaagcgcttcgtgaactcgcacggtcgcacggcacggggaggagcaagaacacccagcccactgcccacgccgtgctggaagtggtccgtgctccggcagcggcggcgggaggaagagggaagcgaggggatggcgcagccgagcaaggagccgtgcaagaaggaggcgtgcgacatccaggcctgcctctccaagaacatgttcgactccaggaagtacgcactcctttgttccccaaacccgaagagttcgattgcttcgtcagtctatgggtagttggtgatttcgtttccgttgatgggatgggggcgtggggcacaacataa

SEQ ID NO: 19952 - DNA, 864 bp, Zea mays
  Peptide Sequence Number=SeqID_63327
atggaaattcttagcatacacaataatgagctaactactaagctagaaaacattggtagcaccccagcagcatctttagttgaaatacctgaaataattaagaaagatgtttctacttcctgctttgatttaattgatgattctaacccctgcaaccaagtcgttgttgagaatattattgtagagacatgttcagatgaggttgcaaaggaaaatgaacaattaaagcaagaagtggctcgccttggcaaggctttgtatgacaagaaaggcaaagccaaacaaatccaacctccacaggataacaccactgcgggagtgaacaagcctatggagggagaaactgtgatttgtaggctatgccacaaggaaggccacaagtctttccaatgcaaggcgatgaccggggataaacaaaggcaaaagctcaagcaaaagccatcaagcaaaatctccaacacctacatcaaaaaggtgaacaaaaaggatgctacaccatacttgatcaagaagaaaaagaatggaaaggtgatagcaatcaaggccaacaagcaagccaacaaaggaaagggggccaaacgcatttgggtgccaaaggaaataatttcaaccatgaaaagcaccaagaaggtttggatcccgaaagggaatttattgccaagtggtttagtgaaaattttggacccaaatttcccacccatgactaagatatgcgtatctatttatcttttatctagtttacctttcttgcctagtattacatttgttatgtacttttgttcaaaatcatgcatactagttcacaggatgcgaagagaattggaccaaggcaatgaggacgcaacacctcaaaagaagacataa

SEQ ID NO: 19953 - DNA, 243 bp, Zea mays
  Peptide Sequence Number=SeqID_63328
atgtactaccttgctgatgagcccgaggtgcacttcgtctggcaaccaagccaagagtcatcggtactcgatatgtcgcgcgcgttcgacggctactatatcatggacggtggcatcatctcggcgccgaacatgacgcagaggaggaccaacaacaatgatcagttcgtcatcctccccaccgtcgggtatctttttgtgctggcgtggggcgtgctctccaatgatgagacatggaaatag

SEQ ID NO: 19954 - DNA, 327 bp, Zea mays
  Peptide Sequence Number=SeqID_63329
atggcgggcgaaaaggagctcgctagagctaaggaggggtgtctggccggtgatggatttgagttagggatcaaggtgaacacgtttgatctttggctcaagcacttgagagaaaccctaggtgacactggggtgtcacagccttccccccttaaaggaatctcgtcccgagattcaggtcagagtcctcccggggtgaagcgaaggattcgaagggcaggaggaggggttgtgtgtgattacgtaccagtttccttaggtaggcaatcggggaagttggatctcaagaattcctcggtctcccaagtagcttcttcctctgagtga

SEQ ID NO: 19955 - DNA, 111 bp, Zea mays
  Peptide Sequence Number=SeqID_63330
atgggcgccgccgcggcgagcctgtgcgccgccgctctggtgaccgggggtggaagaaggcgcgctcaccgtccgatttggattgagtggaggagattaggtcctaagtaa

SEQ ID NO: 19956 - DNA, 351 bp, Zea mays
  Peptide Sequence Number=SeqID_63331
atggagcctggcggagggacagctgtcggagcggtcgagtccttgctgacgtcctcttgcttccgtaagggggctgagagccgccgtcgtcacagagtatgcgggacgccatcattgcctatctggttgggcgatgtggaagctcctccgaagccgaggtcgagtctgtcttccgtggccgaggtcgagtccgagcccctgggtcgggcgaggcggagttcgtcgtctcctagggctgagcccaagtccgagccctgggtcgggcggagcggagttcgccgtcttccggggctgagcccgagtccgagccctgggtcgggcggagcggagttcgtcgtcttctggggctga

SEQ ID NO: 19957 - DNA, 153 bp, Zea mays
  Peptide Sequence Number=SeqID_63332
atgctggacgagaacgcgagatgggacgacctcgtcacaggtcttcgtccggtgacgtatgggacgaaggcgattacagcggaggcatcgagcgaagggtggcgtcttcgccttcgccccaacatttgccctccgagggaccagttcgactaa

SEQ ID NO: 19958 - DNA, 387 bp, Zea mays
  Peptide Sequence Number=SeqID_63333
atggcacccaagagagctagctcgaaggcagccccatccgttgacgaagcagcgaaggcagcgctgctgtccgagaaaaagggcaaggcccttgtcgacaccacccaccaagaagcctgcgaagacgacgcactcagcaagaggcagcgcaatgaacaacctacacccgaaggcagtctccgcacctgtagctccggaggacaactgctacctcccctaggcttcgctccactggagggcgcggacgccactgaggttggcaaagtcatcggcgtttcagcagaggaacagctacagctgcgggccttgctcatcaagaaccgcaacctccagaagcaaaaagagatcctcgaggcccaacgccaacgtgtctctacgcaggccaag

SEQ ID NO: 19959 - DNA, 450 bp, Zea mays
  Peptide Sequence Number=SeqID_63334
atggatcaagcagtctcattagctgcgagaagcagacgattcgaatcgagtttttatccttgcaaggcagatcctctagggcaggctctggtgctggatccggggctacctcctgagcaactccttgctccggcacgaggacggaatcggaaaatggcgcagagactcacccggtccacgtgcgccggcggggtttcaaactccggcgagagcgattgcgcctttccggtggcggaggtccttggttcaagctctggcaagcttcacggcctcctagggaagctacctaggggcttggatcgagcgaaggagggcgggaaatggttcggccacagtggttgtcctcgggcggctctgtcgggtcgcggagaggtcgccggagctatgggcgagctctggggagttgggcacgggacaggggatgcaacggggaagatggctgggcactag

SEQ ID NO: 19960 - DNA, 111 bp, Zea mays
  Peptide Sequence Number=SeqID_63335
atggcgggcggaaatacgctcgccggagctaaggaacggtggctggccggtgaggatccagactcccctacaacacaaggcaagccccggtacatttacctttccttgtga

SEQ ID NO: 19961 - DNA, 138 bp, Zea mays
  Peptide Sequence Number=SeqID_63336
atgagggtgcctcagggaatctttgtaaaggatggtgacgaggatgatggttttgattatgcttatggtaatgtttctggagaagatgaagtcgtggaggaggacttccaggagttccaagagtacgatgagttctag

SEQ ID NO: 19962 - DNA, 162 bp, Zea mays
  Peptide Sequence Number=SeqID_63337
atggtgggtacaagtgcggtcactgcacggcggcagccggggtcagtggagcattgtaccatgcaggatgtagttgatggtgtgacttggcctaccaccctgccaccgggttggacggtcgagtgggatgttgctccggcaggagaggagcctcaggagtag

SEQ ID NO: 19963 - DNA, 189 bp, Zea mays
  Peptide Sequence Number=SeqID_63338
atggcgagagtggcacgtaccctcctagcaaaggatcgcctaaaaggggtggttatagtctttgtgctgctgttgatggtgttaagtgccggtgggctcggccttcttatagaagtataccccgtctttatcttcttactgaggatggagaccgttcgtcagcaaggttcatggaaggaggaggcctaa

SEQ ID NO: 19964 - DNA, 342 bp, Zea mays
  Peptide Sequence Number=SeqID_63339
atgacccaatcggagacttggaggccatggtggaacaactccggacagagctacgtcatcggaataggatatgggcgtaggacagccaactacgagatttcagaacaagattcagccattgattgggccgtcaactcacgttcgatcgcttgggaccgcgaagcaaaagctcgagctcgtgtggcagagcttagtgcggccctcgacagcctaccatcggggacagtagatgaaggacctgatggggagttggacctttttaggcctcctccttccatgaaccttgctgacgaacggtctcctgcagcaggaaatgaagaaaccaaggatgatgaagactag

SEQ ID NO: 19965 - DNA, 435 bp, Zea mays
  Peptide Sequence Number=SeqID_63340
atggcccgtgctcaacgccggcgagcaagcgaccatgactgcggcggcgctagcctcggcgcccccccccccaaccactactgcaacctgtccccgaccaacacaaaccggtcacaagtttaccatgtcctcgccaagcactcaccggccctaaccacgacgccggtgagctcctcggtccggcgagctcgagcccgagacaacaaaacagtagaactccaatcaagcgtatggagagcatcactcaccctccaggcacacggtgctcacacgaagtcagccggagaagatgcggttaagcgggttgacggtcaggctgccaacggcgccgatctgcggtggcgagatcctgttccaagcagcatacactggaagagttcaaaactcgagttgtgtgagcttcactggtccatggcgatcacagaacaaacatag

SEQ ID NO: 19966 - DNA, 516 bp, Zea mays
  Peptide Sequence Number=SeqID_63341
atggcgcgcaccaggactactcaacgaaaggcaaccggaccccgaggggatctagaggccaaggttgaacgactcacttcagaactgcaccatggaaatagggagagtgcgcgagataaccgccacattgctgggctatcggcggaggttaatcgcttgcagcaggaaatcgtggaacgagacacgaccatagactgggccgtaaattcgcgctcttttgcctgggattgcgaggcaaatgctctagccccggtagcagaactaagcgcagctctagagaatctgcaagcatactataacactctgcatgaggaagtgcacgtgttattcgaccgactgcatctgaatgtgccaccagaagttgcagcaatgggagccgggacatctggagcacctagtggaggacctgatggagagttggatctttttgaagcccctccttccatgaaactcgcagataaacgttctcccaaagatggcagtggagcgggagcggccaaggacgaagataattag

SEQ ID NO: 19967 - DNA, 489 bp, Zea mays
  Peptide Sequence Number=SeqID_63342
atgaagctgagcttttcagctaagctgaacttcagctatattgagctttctcaactccagttgaacttcaagttcaaccggggtccaggcaagttcaaccggggtccaggcaggttcaacaggggtccagggcaagttcaaccggggtccagagagactaaaatctactcgaaaagtatttcgcaagttcttgagagaagcgggtcagacaggccaggaccggttgaaccgccccctagggcggttgaaccgccccctgacacccctggcgacctgactgccagtctgactggcagactgcagatcagaggtcagagggtcagagaccagttgagctgcccccaggaccagttcagctggtctagaccagagagttttggagagaaaaccccagctcagctgccctggggcaagttcaactgggtatggtcagagaggtccacagctgaggttgaagttcagctggagttgaaagttcaacttagctga

SEQ ID NO: 19968 - DNA, 640 bp, Zea mays
  Peptide Sequence Number=SeqID_63343
acattatggtataggtggctatgagatcgatggttctggttatgactatggtgctggacgacaaggaatcgcggtggcggtgagctccgacctgtgcaggggagaggttgagcgtggaccgggtagaggagtcgaggaaaggggaaaccaccgtgggttcctggtgcgccatgctcacgtgaagctcacggtggccaaggctttggcagaagcccagcgacgacagtggaatggcgaagcaaaaagagggggcagcgctgcgggctgggtgagtgtgagggtggggagagagcgaatgtgggccaggacgagctgggggagtgtgcggggtcttcatctagcgctcaggcgatgtgggcgagtcgtggggacgtgggcgcggtttgatcgcgcgcgggacgaacgccatgggcgcggtcacggtggttgcggggaggggacggatctgacgagtgggacccgcgggcaagcgagagcgggtgcgcgcgagtacacaacggcgctgacggggcaaccccactgtttagagagaaagaaagagcgggcgcgcgcaggcgagcgaggcgcggcgccgacaagtgggacccacctgtcagcaggcgtggacgcgcgggaggctagctggggtgtactaggctga

SEQ ID NO: 19969 - DNA, 2493 bp, Zea mays
  Peptide Sequence Number=SeqID_63344
atgccgtcttcttcttcatccgctgcgaacacaccgctgggcaaatcgtcgtctgaggaaaccatgagcgatctggcggcggtggagctgcacccgggccacacggtggagttcggcgtttcgcggatctcctcggttcgcgttcaagacatgcaacaactggggtattttgggaacggaattggccgagttccgggggcggaggacattccggagccggagggtgagattgttttgttcgaggcattttttactgcgggccttcggttacccacgcatcattttgtggcggagaagaggaaagttggagacgagattgcacagtttgggtcatgcacctttacgccgaggactagcaagacttcggcggaggttgtggagctcgttccttgcgcccgcaacaagtggggcaattggtatgattattggttttatgtggcggaaggcgaagtcgaagacctcccgggactcccggcggccgttatgtgctcgcactgctatgtggcgttcccgccgtttgatgtggcggaggaagatagtgacgaaggggcccttcattgcgctgcccgcgtgagtagcgagcgcgatttagttgaggaattcatcggctatggagtgtggcccttggtgcatggcggggcgttgggcgaagtttgccctcgccagatgccctccttgggcgagcagctagtgcaaagtcctgccttcacgttggatctgcgtggctgggatcccgccgcattcatgcgtgaggtggaagacggggctgtgcggattgtggggcattatgtgccgagaatagaggctctgcggagttgggatatccgtggatccaacattcgcctgaatagggtcttcgagctgaattgcttgccatattgcggctatcccggggatgacactaccgtggccgtcgaccgccgcgggaaaaagccagtgcccatgactgagaaaggccctttgcaagaggctgccccagccgcgaagaagagaaaaataggtactgcagtggggggactgggggtctctgatagttttgctgcggagttgatggggacgatcggggatcctttccacgaggcgaagaaggcgcggggagccgtgaagtctgccaccccgggcagtagtaagccattgccggctacgaaaccgaccgcccccaggcctagcaacgcttcggctggtgcgaaggctgctgcttctggcacgggcaagccaccctcaggcgggcccgcgaaggggcgaaggctgccttcgccagcgcgtacgggcgaggcggcggcgcgtgttgccgacttcgacacggacatctgtgtcggggattattttgttgggtcggatggggggcaactagctgttgtcctacctccagtggcggccacttcgccaacggcggtggttggggcgaagggtgccacgcgggactcgtgggccaccttttgcacaagcggcgagattctgtcggccgctgccgctaaggacgtggcaggctccatgtcccagcaactgaggcaagcgtcgcagcagctgaagcatgcggccgacttcgccgacctcgtcgcgttgggtgcctttactgtggagtttgctgccgaggtcgagaatctccgggcgcagcatgtggatgctatgcgggacaagtcggctgcggaaagcataagccgcaggctgtcggagaaggtggccgccatggaggccgggagggcagatctccggcgccagctggcggaggagaggagagaggcgaacaaggccattgctgacgtgcaggctacgcattacgaggtctttgaccagtcggacgaaaactttgaacttgaaatcttcaaggtcgaggaccctgtgctgaagcagtcggtgagggcgctcttcgataggatgtggggtccgcacggccgagagacggtccgggagcggtccgaccgggcaatagatcaaatggcacatgccgaaagcgtcgaggactttggttttctagacggcgcgctgcccgaggccgtggaggtggatccggcgccgccatctgatgccggcgagggcccctcatcgacccctgcgccgactgcaaccggcgaagaccccacaccagcccctgcgccgacatgtgaggatgcctcgaaggcgatggttccgacgtttgggcctgcgcaagcaaccactactgaaaatactgattttgcggtggagacttcagctgtagtgcccgccgatgatagtgtgcctggctctatgtctgaatgttttgagtccgacggtgagtctgggagttcgtttccttggacggaggagtccttggatgagggcttagattattttgttgcgttggatgtggctgcagcggagacttcaccgcgtgtggagggtgctgaggatcttcatgttgcgagtaataggtgtaggcggcgaagggtggtgggaagacagtgtgtgggtgaattttcgcggagtgcaggcgctgtcgcatggggatggagcgtggccgacttcgagtag

SEQ ID NO: 19970 - DNA, 297 bp, Zea mays
  Peptide Sequence Number=SeqID_63345
atggggtctcctgaactgtgttggcctccaggtggttcacctttccgtactagtggccttgttccccacagtggaaacatctgcggcctcctccttgcactggcgctgcctggttgctctgattggttgctagggcaggaaggcgaggtgcctggatgttttggcggtactgctgttgttgctgaggaaaatgcctctaatactactgctggtgttggcgctgatgctggtgcttgtgtccttaaggacctgctggaacatgacatcgacgggaaattattgctgaattcttcctag

SEQ ID NO: 19971 - DNA, 741 bp, Zea mays
  Peptide Sequence Number=SeqID_63346
atggctgaaaggcgactctccctacttgcgtcccagccgtcgtgggctgagtcttctccaacacgctccaaggtcctccccctacggcgcgggggctgggtcccacgcgtcatgcaagctggcccagagcagaagaagccaaaccgccgcgcgcggtgcatgcaaccgcccagcgattacgagcatccctccaccttcgcccagaccagcgggcaaaagggtgggcagccatgcaggcggcatgcaaccgcaccaagtgggtgcgcccctccgacttccaacgcacccagcatgggggcccacgcccacgcgtcacgcaaccggcgcgccggtagctacgtgcaagcaactgcaccgccactcgcaccactaccacgcctcctcgactgcggaaccggtaccgcgactcgaggcgaccctgcgtacgacccagcagtgccagcctggcgcgacggtcaatacggccaaaactgggccggtagtaatggcggtggcaggcggggaccgggaaagggggataccccgaaaaggatccttctccgtgaaggaaacaggctccgagcctccctactgatcaaaggttcgaaggttggcccctcggaggggtttaacagccgcctcagagcgcgtgggcccacacccactactggtcagaggttcgaaggccggcccctcggaagggttcaacggccgcctcaggctactcgggctccgcgcccactactgatcaggggttcgtag

SEQ ID NO: 19972 - DNA, 598 bp, Zea mays
  Peptide Sequence Number=SeqID_63347
ggtaatgatgacgcctcctgttgacgtggtcggtccgcgccctaggttgggcgatgtggaggctcctctgaagtcgaggtcgagtctgtcttccgtggccgaggtcgagtccgagcccctgggtcgggcgaggcggagaccgtcggctgaggccaaggctgagtccgagccctggggtcgggcgaagcggagttcgtcgtcttctagggctgagcccgagtccgagccctggggtcgggcggatcggagttcgccgtcttccggggctgagcccaagtccgagccctggggtcgggcggatcggagttcgccgtcttccggggctaagcccaagtccgagccctgggtcgggcggagcggagttcgccgtcttccgaggctgagcccgagtccgagccctgggtcgggcggagcggagtttcctatggtgcctgaggccgggcctgactgcctgtcagcctcactctgtcgagtggcacaacagtcggagcggcgcaggcggcgctgtccttctgtcaggccgctttgtgctgatgggggttaccagctgagaattaggagccttgagggtacccctaattatggtccccgacagtag

SEQ ID NO: 19973 - DNA, 183 bp, Zea mays
  Peptide Sequence Number=SeqID_63348
atggcgggcggaaaggagctcgtcggagctaaggaggggcgtctggccggcgatggtggtgatgaggatgatggtttcggttatgactatggtaatggttgtccgcgttgcaaccactggtcaggtgaagatgaagtcgtggatgaggacttccaggagttccaagagtacgatgagttctag

SEQ ID NO: 19974 - DNA, 645 bp, Zea mays
  Peptide Sequence Number=SeqID_63349
atggcgcctcctgttaacgtggtcggcccgcgccctaggttgggcgatgtggaggctcctccgaggtcgaggtcgagtctgtcttccgtggccggggtcgagtccgagcccctgggtcgggcgaggcggacccaagtctgcgccctgggtcgggcggagcggagttcgtcgtcttctggggctgagcccaagtccgagccctgggtcgggcggagcggagttcgccgtcttccggggcttagcccgagtccgagccctgggtcgggcggaacagagttcgccgtcttccggggcttagcccgagtccgagccctgggtcgggcggagcggagttcgccgtcttcaggggctgagcccgagtccgagccctgtgtcgggcggagcggagttcgccgtcttcaggggctgagcccaagtccgagccctgggtcgggcggagcggagcttcctatggtgcctgaggtcgggcctgactgcctgtcagcctcactctgtcagatggcactgcagtcggtgcgacgcaggcggcgctgtccttctgtcaggccgctttgtgctgatgggggttaccagctgagaattaggagccttgagtcctcaaatttcccgcttctcttcggctctatgtcgattagaggtgtctag

SEQ ID NO: 19975 - DNA, 147 bp, Zea mays
  Peptide Sequence Number=SeqID_63350
atgaacaagaacacaagagacacaagatttatcccgaggttcggtcacaccaccaagaccccggttgaacctgcctggaccccggttgaacttgaagttcagctggagttgagaaagatcaactcagctgaagttcagctcagctga

SEQ ID NO: 19976 - DNA, 165 bp, Zea mays
  Peptide Sequence Number=SeqID_63351
atggctaaggaatcgtcgtactataaagagggatccaaaaagaaggttggtgtttgccaaagctcaagcctctatattcaaaagctatttttgaaaaccaaaaatctcttgaacgttctttggttaaccgcgctgagcttttcagctgagctgaacttcagctaa

SEQ ID NO: 19977 - DNA, 606 bp, Zea mays
  Peptide Sequence Number=SeqID_63352
atggtggagattcgccagacatatgacgcagatgaagccgcagagggcgcgcctgtgccgacgacggaagcaaagaagctggcgtccttcgtcgcgaggtccaagcaggagatcacagagaacttctcgtcgattggcgggacatcgcccccgcggcggcccaagaagagaccaggtgcaacgacaaatcaattcttccctgctctgattgataccagctttctgctgctgtgcaggatgttagcaagacaaccagcactggctttgcacaacgtctcgggtgcactggtcgccaagcttactggtaacaaaaacaagtgtggaggaagatcgaatgtccagcagcagaatatccaacctgggaaaagtcgtcgtcgggagtggcgggcgctctcagcagctgaccaggcgcaggcttctaccccggacgtagatgaggagtgcaaacgggtgctcactccattgggtttctccagcgaagacgccgagaagatgctgaagaaagcgtttggctggacccaatcgccgtactggagcgaggagagggagaaggaggttccgaccacggaggcggtagctggagtgccggggtcatgcgatccgtag

SEQ ID NO: 19978 - DNA, 249 bp, Zea mays
  Peptide Sequence Number=SeqID_63353
atggcggtctgcccaagggtggaggtcgtcgtcctctcgcactgcatcgccaccggcgacagggagatgaccgccctcaccatgccagcctcgggcacggattcacatccccaaggacacctcaccgcacgaaatctacgccacgtacaagaacctcgtcaagaagtggcaccccgacaagcacccgccgtcgtccaggccgaaggccgaggcgatcctggaccagcaggagaacaggggcgtgtttga

SEQ ID NO: 19979 - DNA, 366 bp, Zea mays
  Peptide Sequence Number=SeqID_63354
atggacagtggcggctcctcgggcagcgtgacagcacaaggaatggccggcaacaccagcgtgagcctagagcgtgtagaagcgggtggaggaagagaaggaggcgacatacgtgacctcgtccacgctcacctccacagaaatttagatctaaccgacctcgtccagcagtatatgcctcctatcggactctctcccggtgctcgttcatcctccatgtcccgccgctgtgaaagcgaggcgctcgatgtcgtcggggagcgggctggagaaggtgtcgtaggagaggttgagggatcgggttgtgtcataggagtaggaggcagggcgggcgtggatctcttgatcagcgtttatggcggatag

SEQ ID NO: 19980 - DNA, 144 bp, Zea mays
  Peptide Sequence Number=SeqID_63355
atgaagcttcggcaaggtgacatgtctcaagatgaaggagtgaaccgacttaaagatgaaatgaccattagacccatgatagtttgtgtcatggttgtaatcgattgtaaagggtacgtccttcatgaccttcgtccgaagtga

SEQ ID NO: 19981 - DNA, 601 bp, Zea mays
  Peptide Sequence Number=SeqID_63356
gatgtggggggcacatggtcgggaggctgtcagggagcgatccggccgggcgagggagcagacggagcgcgccgaggacgtcgaggacttcggaagtctagtcagcgcgccgcccgaggctgcggagggcaaaccggtgctgccctcggatgctggtgaaggcccatcggacgcgcccgtgcctgctgctgccggcgaagaccctgtgttggccgctgtgccgacagccgaaggcacccaggaggattttgggcctgcgcacgcaaccgctactgaaagtgctaattttgtggcggcttcgaccgtggttgcggaaaatgattcggatgattttgtgtctaagttttttgagtctgatggttctgggagttcggtggtgtggacggaggagtcttcggatgaggatttggattattttgcggcattggatgtggctgcggtggagacttctccgcatgtgatggatgctgaagttctcggtccgagtgctgggcgtaggcggcgaaggacggtggcgaagcgtagggtgagtgaggtggagggtggtcgtcttcgtgtggacagggctggcaagcgggaattgttatcctcgccggctggg

SEQ ID NO: 19982 - DNA, 559 bp, Zea mays
  Peptide Sequence Number=SeqID_63357
acgcctctcgtctcgggtacgctccactccagacatatttgacccctctgctccagccagacactaccactctagtcgtcgctacttaagtcaccactaccctctctacacccacagcctccaccacgcctacttccactgctcctgctcccgctcccactctgcgagtcctctagctttcttccaagagcatgacaagactcaggttcggccacttgctgcagatgcgagactgtttgatcttcacagagccactatcgctagagtttgtcacttcagggacgtgctagtggactcatggcttcttgctcaacgtgatccaacagctagtccactattcaacactcagacacatgagtcctactatagtgctcaactgacagctcagatagccttgagggctcaccgacgtttagatatggcagcacttcgtacaacagctggttctaaggttgagggacacatcacctacctatcagacttgtactcttttttgacctttggtggtcactacgttgaggcgtgggtccacatgttcctacactatagtatggattaa

SEQ ID NO: 19983 - DNA, 1284 bp, Zea mays
  Peptide Sequence Number=SeqID_63358
atgcgggggaaggcgaactgctactgcttggacaaggtgcagctatccgtcctccaccccgggcggcggtcgtgccgtgcgcgggtggctgctgtcactggcctcacagagggggcgaacttcgacaacgcgggcctcgtcggccacgagcgtcgtcagctgcagcatgcctggcacgctggctcagctggctctggcgctgcctccgatgttgcctcctaccgcttggtccgggcgtggttgtccgtccaccgcacgggcgactgtcgcgccccgcgcaggtcgggcatgtctgcggcccttcccgcatcgccgactgcaccgaggggatcgtccaagacgtcgtacgccgctagggcggctggggcggccgccattcgtcggcgtggcgctggcacgcaggtggccgctgtcatcggtgccgaggtggtggcagccagagaaggtttctccgccgacgagaccgtcggtgccacctgcggtcggaaccccggctctttggctttgatggcttgtcctcgcccctcgtgtgggggcatgggcgagggcctttccacagcagcgtttgccctgaggtcattgctgctgctatttagccgcctgaagcggaggtcgttgtcgctgctggtgcagtggtcgccggcgagccacctggagtttgttgtcccgcaggccctctggagtggaggttgttcatacccacgggagtggaaccggagttccgtttgcaatggtaccctgagtatgggtaaccttcggccgctctgcgatgagctagagccggaggcagcggtgttggcgtggacagaggcggagtcggctcgaaaagaggcttcgtcggcccaggagcaggtggcttcccaggccgaggaggtgcagcagctgcggctggagcttggccaggtcatccgcgagcgggaccaaccacggagtcacgctgccgaggtcgtgagccaggctgaggtcctcgggggacagctggctgaggctacggagcggccagccgaggtggagatccttccgcccgtgtcgccgtccgaggccgggccagattccgccgaaggtggaaacgacgccgagggtgctgttgttccctctgccgatatccgaacctgcaggaccagtttgtctgtagacttgttcgtcggtagcagaatcgcttacccgagcgagagttacttttcgcggaaggtgatgagtgaggactctgttatcgatatactcgagaagacacaaaagtcattccggcagaaaagttttcgagcgttaggacttgttcggtag

SEQ ID NO: 19984 - DNA, 924 bp, Zea mays
  Peptide Sequence Number=SeqID_63359
atggaagaagccaaaccgccgcacgcagagcatgtaaccgccccgcggttacaagcactcctccatcctcgccgaaaccagcggtcgaaagggcggactgccatgcaggtggcgtgcaaccgcaccgtggtggcgcaccccttcggcttcgtcgcatccggcatgcaggcccaggcccacacgtcatgtaaccgacgcgccggttactacgtgcaagaaaccgcaccgccacttgcgccaatgccgcgccttctcgactgcggaaccagttctgagactcgaggcagccctgcgcatgacccaacagtgccaatcgagcacaacgatcacgggtcagtcagccgcgggaggaggcgcgacgggaccgggaaaggggatatttcgaaagggatccttctcagcgaaggaagcgggccccgagccctcctactgatcaggggttcgaaggctggcccctcagaagggttcgacagccgtccagagcactcgggctccaagcccattactgatcaggggggttcggaggctggcccttcggaagggttcgacagccgccccagagcacgcagagtgagggatgactctgggtacgtccgttacatggccgaggctcgggctacgctcccgaggcctcggcctcagaaggaggtctccgcctcagggctcagcctcaacctcggcctcggaaggaggtatccgcctcgcccgaccccagggctcgaccttaacttcggcctcggaaggaggtctccgcctcgcccgaccctagggctcggcctcaacctcggcctcggaaggaggtctccgtctcgcccgaccccagggctcggcctcaacctcggccttaggagaagtctccgcctcgcccgaccttgggctcggatcgaccgcgccatgggggatacatcatttccctaccgctag

SEQ ID NO: 19985 - DNA, 405 bp, Zea mays
  Peptide Sequence Number=SeqID_63360
atgggcgcatttgtaaggagtgcctttaagtttccgagggcttccttggcctcgggggttcaagtgaagcgctcggtcttccttaagaggctatacaagggcagccctctctcgccaaggcgcgagatgaagcggctcagagccgcaaggcatcccatgaccctctgtactcctttcaaatctttgataggccccatgttggtgattgccgcgattttctccgggttggcctcgatgcctcgctcggagacaatgaaccccaggagcatgcctcgggggactccgaagacacacttttcgggattgagcttcacgcccttcgctctcagacacttgaatgacgtttcaaggtcagagaggaggtcggaggctttcctcgtcttgacaacgatgtcatcaacgtaa

SEQ ID NO: 19986 - DNA, 510 bp, Zea mays
  Peptide Sequence Number=SeqID_63361
atggacatcatgagggttttaaaggtaataactgacaaggatgtaggagaggaggtaattaggaataagacaaaggatataagtactataaaggatggagttaagaccggacctgcaaatggaaaaggagagggtgatctaccgtcgcaattcgcgcttgcctgggagattcgtgccacgggaagagtggataacgtcgggcatggtgagaatatccagagcggggtgaatccgatcgctggtcggaccgttcgccgtgtcccgccgtggttaatcgcgttggcgtcaccggagttcactgtcgcgataaaccgctctagatgctcatcagtccagctaattgaattagacctgggtagatcattaggaacacctcggattatcctcgagaacgaggaagaaataactgttgaagaagaggagactgctccatcgacagaaaatccagctgctgggaactgtttctattttgatatttgtggaacagagcccgactctcctacaaaataa

SEQ ID NO: 19987 - DNA, 150 bp, Zea mays
  Peptide Sequence Number=SeqID_63362
atggctgaggcgatgaacgagctacctagagcggtttattgcgacgtggtgagcgagaattgcgacgatggatcacctgcggtgaagggtgatgaatcttgggatctttttcagctcctgtacaatggaatcctcattgagagtgcttga

SEQ ID NO: 19988 - DNA, 1827 bp, Zea mays
  Peptide Sequence Number=SeqID_63363
atgcaggctcggaccttgacgagggagagaagcagcaccctcggtggccttctccaggaatccggcccgagcaaacggctcggccggccaccccgaagcctcagccagctgtcccccgaggacatcagcccggctcgtggcctcggcaactcaactccggcgtcggtcccgccagcggatggcccggccaggctccggtcgacgaagtcttattttcgtgccaactctgcctctgtccatgctgacaccactacctccggctttggctcatcgaagagcggccgagggcgagtcctagtgctggaaatgaggaaaaaacacggctccgtgccaaaaatacatacatgttcaggccccaacagccacaatgaacagacgccgacactgaaggtgccattacaaacggaactccggttccacctccgcaggtacgaacaacccccccccccgattggatggcctgcggagcaacagaaggccgacggatggctcgccgtcacccgctccagtagcagcgacaacgacttctgctccgagcggccgaacagcagcagcgatgacctcagggcggatgctgctgccataaggccctcgcccacgtccccattcgaggggcgaggacgagcagaaggccgtagagttggaggtcagtccgcgggcgacaccaactatctcgtcggcggagaaacctcttccggctgccgcggcggaaggtggcaccggaagcagcgccgaagccgctcggaccggagagccggacacgcggcagctgccggtgccacgaacgacgaacgcccttccccccgattgctgagggaaggagcgggccgctgcccgcgcggagaccgaccccaactcggcgcactcccctccccagcactgacgatgaacatccttgaagctgagggaggggcagaggctgcagcccggcttgcttctccccacctaggagctggtgaccagcgggtgaaagggcggaccgccatgcaggtggcatgcaaccgcaccaagtgggcgcaccctttcgactccaacgcatctagcatggaggcccaggcccacacgtcatggatcgggaaaggggataccccgaaagggatccttctctacgaaggaaacgggccccgagcccccctactgatcagaggttcgaaggctggcccctcggaggggttcaacgaccgcctcagagcgctcgggctccgcgcccactactggtcagaggttcgaaggccggcccctcggaagggttcaacggccgcctcaggccactcgggctccacgcccactactgatcaggggttcgtaggctggcccccgaagggttcgacagccgcctcagacgcagagcgagggatgaccctggcggccaagtccggcctcgggcgccataggaagcttcgcctcgcccgaccccagggctcagactcggactcggccccggaagacgacgaactccgcctcgcccgaccccagggctcggactcggcctcggccctggaagacgacgaactccgcctcgctcgaccccagggctcggactcggcctcggccccggaagacgacgaactccgcctcgcccgaccccagggctcggactcggcctcggcctcggaagacgacaaactccgcctcgcccgaccccagggctcggacttagccctggcctcagccgacggtctccacctcgcccgacctaggggctcggactcgacctcagcctcggaagacaaattcgacctcgacctcggaggagcctccgcctcgcccaacccagggctcgtaccgaccacgtcacaggaggggccatcattaccctacccctag

SEQ ID NO: 19989 - DNA, 240 bp, Zea mays
  Peptide Sequence Number=SeqID_63364
atgaatcgacagtcaagcttcggtgtccaagagatcgaactcttcgagttctacgaggctgaagaccctgagcatctgtttggtgaaggcaagggactcgagcggtttctcgagtgcctcttcataaggacctattcattggatgaccacccgggaaaacagtgcagccatgagggtggtatagaaggtgccaaggcagatctccaggagttccaggacttcgacgagttcgaggattag

SEQ ID NO: 19990 - DNA, 441 bp, Zea mays
  Peptide Sequence Number=SeqID_63365
atgtcacaggcctggtcatcaactgcgcgctctcggcggcgaagcacagctagggatgtcgtagaacccaggccacttgttgttgttgctgcaggaactgtgcccattggcgtcgatctggaggcgccgatcgatgatgtgaccgggttgccgttgataatgtgcccagattgcaaggatgtgagggtgtttgctgctaataccacgtactccaataacgttggaaagagatttttcaagtgtcctaggaagaaccgtagaaatgggacatgtgataggttttggttcgaggaagaatatttggtgttccttcaagataatggatatctaccgtcagcatcctccaccattgcagcaggttcgacaaccaaggttcctgagctcgtgggaaaaaattgtcagcttagagcaaaatctgaacaaggtgacggaaatggttag

SEQ ID NO: 19991 - DNA, 741 bp, Zea mays
  Peptide Sequence Number=SeqID_63366
ggggaggatgaggtcgggccggccaccaccgcggggccgagcgccaccggggccacggactggggaggcgcgcagggcacgcacgaggcgcggccgagccggcaccaccgtggggaggctggttcagctggtattcaaaaaactggttcagctggttttcaggctgtttcagctgggaggattagggttgaaagagacccggctctttatgggcgcctcaacgaggaagtagggcaccttggtgatgttgatcctagggcagtagatcttgccatgagaatcgtcgaaaggatgttcctcaaaatgaaggaagatgaggcgaagaacaagattgaagaagaagaaaatgatcgatggagaccaaacgacgaatccacctcttcacaaggttcgtctttcaaatccacttctcatatgtgctttgtcgctagtgggagtgacagtgaaagcgaaagtgaggatgaggatgaacatgaaagtgacagtgaagataaggatgatcttcaaaaattcttcgctcaactaagcaagaagaaccagatgagcttgctcaaactcatggaaagagcagaagaacaaaaggaaatgcttcataagcaagaagatatcctcatcgaaaaaatcaaagacttggagaagttgaccaaagagcatgagaagctaaagtgctctcatgatgatttggtccaaagggaaagtgtcacgctcaaccttctcatgataatcgtgataacatggtga

SEQ ID NO: 19992 - DNA, 429 bp, Zea mays
  Peptide Sequence Number=SeqID_63367
atggtcgctgctggacgagagacgtgtcgtggtgggcactggcgcgctgctggacgggagaagggaggaccggacgtccagaccggagaacggcggaggaccgctggtggctgctggctgctgccgcggtgggcggctgagcgctgctggacgcctggattggaccgctgggtgctggtggccaatggcgccactgtggcggcgtgcaggagcaggactgcaggcgaccaggcgtcgaccgagcgagtagtgcagcgactcagccaagtaggcttcctcctggactcgggatgtctagggtttgctcttcttgggcctctgggatatgccccaatcgtcttcctcgctgcaatcgcactactggccaatgaacagagcacgcagttctatccattatcgtcaacacggctggctgcctggcacagctag

SEQ ID NO: 19993 - DNA, 72 bp, Zea mays
  Peptide Sequence Number=SeqID_63368
gtaaagaagaaggagaacgatgtcgaggcgaatctccaggagttccaggacgtcgatgagttcgaggattag

SEQ ID NO: 19994 - DNA, 1272 bp, Zea mays
  Peptide Sequence Number=SeqID_63369
atggctgaaaggacagaaggagccaaaccaccgcgcgtggagcgtgcaactgcccagcagttacaagcactcctccaccttcgcccagaccagcgggtgaaagggcagaccgccatgcaggcggcatgcaactgcaccaagggggcgcaccctttcgacttcgacgcgtccagcatggaggcccaggcccacacgtcatgtaatcggcgctccgattactacgtgcgagaaactgcaccgccacttgcgccagtaccgtgccttctcgactgcggaaccggtgccgcaactcgaggcaaccctgcgcatggcccaacagtgccaaccgagcacatcggtcacggggaccgggaaaggggatactccgaaagggatccttctccgcgaaaaaagcgggccccgagccctcctactgatcagaggttcaaaggctggcccctcggaagggttcgacagccgcctcagagcattcgggcttcgcgcctactactgatcagaggttcgaaggctggcccctcggaagggttcgacaatcgcctcagagcactcgggctccacgcccactactggctggccccagaagggttcgacagccgcctcagagcacgcagagtgagggatgactctgggtacgtccgatacatggccgaggctcgggctatgctcccgagtcacttcgccgctccactgaccgacctgacaggaaaacagcgccgcctgccctgctccgactgttgtgccactcgacagaggctcggactcaacctcgacgccggacgacggactccgccttgcccgaccccagggcttggactcagcctcgacctcggaagacggactccgcctcgcccgaccccagggctcggactcagcctcgatctcggaagacggactccacctcgcccgacccctgggctcggactcaccctcgacctcggacgacgatcaccgcctcgcccgacccccgggcccggactcagcctcgacctcggaggagtcaccgcctcgcccgaccccgagctcggaccgaccacatcacagggggacatcattatcctacccctagctagctcaggctacggggaacaagaccggcgttcgatctggctcgccccggtaaaacatttaatgatggcaccccgcgtgctccatgacgacgacggttctcagccccttacggaagcaaggagacgtcagcaaggatccgacagccccgacagctgtacttccatggggctcaagcgctcctccgacagccacaacatcacatga

SEQ ID NO: 19995 - DNA, 231 bp, Zea mays
  Peptide Sequence Number=SeqID_63370
atggcgaccgagaaatggctcaagaaatcattcaaagaagtgaaaaaggcatccatggtgctaggaagtaatatagccgtatcctctcctccctcagaacctgctgaggcgtctccgggcccccacccaaagggcgacgatgaaattagaaaaatggccgaagccatcatggataaagttgtcaatcagctactgaacgaagctgcagaagtagttcttagggaagattaa

SEQ ID NO: 19996 - DNA, 711 bp, Zea mays
  Peptide Sequence Number=SeqID_63371
atggaagtggtggagttggttccttgtgcccgcaataagtggggcaactggtgggatttctggttttacgtttccgagggcacagtcgaagaccacccaggactccccgtggccgtcatgtgtttccactattacatagcgtatccgcagtttgaggtggtggaggacgatgaagacgaaggggcccttcggtgcgctgcccgcatgagtagcgggcgcggtttagttgaggaatttatcaggtatggggtatggcccttggcgcatggttgggcgctgggcgaggtgtgccctcgcgagatgccctcccagggcgggcagcgggtgcgatgtcctgccttcgcgttggatctacgtggccgggatcctgccgcattcgtgcgggaggcggaagatggtgcggcgaggatcatggggcgctacgtgtcgaagacggagggtctgcggagctgggatatccgagggtccaacgacagattgaatcgggtcttcgaactgaaccgcttgccatacggtgtttatcctggggaagatgccgccgaccgccgtgggaaaaaaccgatgggcgtgaccgaggaagggccttcgcaggaggctgccccggccactaagaagagaaagttaggtactgtagtgggggaagtgggggtgtctgatggttttgttgtggagttgatggggacatggttgtatggttgtgggagttgctga

SEQ ID NO: 19997 - DNA, 2160 bp, Zea mays
  Peptide Sequence Number=SeqID_63372
atgggggacgaggagaagagcactccgaggagaacgaagctgggcggtgccgttggcgacaatgataggggacgagaagagcgctccaaggagaacgaagccgccgttgggtcagcgaggggatggctccggtttcctgatccccccacctcgttcgccgaggccgcagcgagcccgcccgtcctccgtccccgcgggagaaatatcatcaggcccctgttctttgagatctctggtgttttatctcattttgttttccaccattgttatattgtctcaactgtgatggataacggcttcatggacatccctcatccgcctctggtgaatgacccctttgtgttagtgggatgcccagcgccagcctccacgatggagaacatgggccaaagcacaatctgtatggatggcctgaacccagcaatggttagttgcagccatgttaatggaaacacacatataatgaacggcttaacagcaagagatgatggcagcaggttactccttggtttgggcccaacaccgaatttttattctgcagtgtccacgggctcaaaacaagctcagagattgtctggccagagttcaacttccattgattcagggatgctgaagcttggccttcagacggatgacagggaagcaattcaatatctgcaacaagcaccgaatggagcactccattctttagatattgttgacgaggcttcaacatctgctgctgtaaggaacatgggtggttacatgccatccctactctttgctccctgctccaattctattgccaatgagacacaagtagaaaaccaagattctctagacctcacgcacagcaccagcaacagtcagcaccttcaacatgacctccagctcagccccgaaccttctgcaacgaccgagtcatcatttggtatgagttctgatgttgtcactgcaacaactacatcagagcgtagccattcccgacatcctaagaaatgcaggtttaagggatgttccaaaggtgcaagaggagcatcaggattgtgtattgctcacggaggtgggcagagatgtcataaacctggatgccataaaggtgccgagagcagctccgcgtactgcaaagcccacggtggcggtcgtcggtgtgaggagcttggttgtaccaaaagcgcggaaggaaaaacagattattgcatcgctcatggtggaggctgccgctgccaacatcctggctgtcctaaagctgcccggggtaagtctgggcggtgcatcaagcacggtggtgggaagaggtgctcggttaaaggttgcatcaggagcgctgaggggaaggctgggctgtgcatttctcatggcggcggccgacggtgccagtatcctgattgcggcaagggggctcagggcagcacattgtactgcaaggggcatggtggcggcaagaggtgcatctttgatggttgcagcaaaggcgcagagggtagcacacctctgtgcaaagcacacggtggtgggaaacgatgcatgtttgaaggaggcggcgtctgtgcaaaaagcgtgcacggggctactgaatactgcgtggtgcatggaggagggaagcgctgttccgtgcccggctgcaccaaaagtgcccgtggccgcactgactgctgtgtgaagcacggtggcggcaagcggtgcaaggttgacagctgtggcaagagcgcccaggggagcacgcacttctgcaaagcccatggcggagggaagcggtgcacatggagcacaggctgcgaaaagttctcccgtggcaagagtggcttctgtgcagcacatggtaccttgatggccaggcagcgagaagaagaggtggtgaagaatgtagggagcatgattggaccaggtctcttcagcggcattgtggcgtcatctgccaccgcagcaagcagcatgacgaacgagcactcggcctctggtgtcagcaccgcttccgactgtgacggcacggtgaggagccaatcaatgattcctccgctggtgctggttcctcgctctatgatgccttcatggtcgactgagcctgtagatggaggcagagagggaggtcatgttgttcctgaggggagggtccatggtggtggcctactgtcacttctcggtggcagcttcagggacgccgacgtggaaaagctttga

SEQ ID NO: 19998 - DNA, 384 bp, Zea mays
  Peptide Sequence Number=SeqID_63373
atggcacccaagcgagctagttcgaaggcagccccatccatcgacgaagcagcgaaggcagcgctgctagctgagaaaaaaggcaaggccctcacggacaacacccaccaagaagcctccaaagacgaagctgtcagcaaaagacagcgtcaggagcaccccacccccgaaggcaccctacacacttgtagctctagaggactaccgcaagcaccacctctaggcttcgctccaccagagggcgaagatgcaatagaagacgacgaagtcatcggcatatcagccgaggaacagctacagttgcgggccctgcacatcaaaaaccacaacctccaaaaacagaaagacatcctcgaggccaagcgccaacgtgtcaccgcatag

SEQ ID NO: 19999 - DNA, 663 bp, Zea mays
  Peptide Sequence Number=SeqID_63374
atgcaccaagatgatgtccgcttggctgccattgtcaaccaggactttgtatcaacatctctggcgtcgaagtcgacgttggaccctccggtgatcatgtggatgactccacgatatggatgctcggcaaagtcttcctgctttggagcttggggtgattttggtggtgtgggttcgggtgatgcggaggcagaggtgggggtggaacaacttgtacttcctgatggtgctgatatgtgtggttgggtggatgctagacgtggtcgttgttgtatggttgttgttggtggtggtggtatgtgtgcgcgacgactcgctggttgtcagctggctgtgctcgagacatcctgtccctggtggcctttgtttccggacaatgtcttgttgggtgcgcgcaatcctcgccatgaaataggcagtaaaatctgcgtggttgctgtgcctgtccccggccccgccctcttgtgccattaccgcggccctgaggggatattcctgacggcggacggcctcgcctgcggggtgctggttggctatgttgtgcacctgctgctaactgcggctgtcccgtccggagtctggctgcgaaggcctggtccaggttctgctggactacggagggtccttaggctttctctgagattcgacctttcgctgatgtag

SEQ ID NO: 20000 - DNA, 165 bp, Zea mays
  Peptide Sequence Number=SeqID_63375
atgagcataataaaagatgaagctgaagtaaggattgtaaccgataagggagagaatgcatccaaggtcaggataggtaaaacaccattctcgaatcgatatgggaaagatgatatttccaaagggatgcaaaagaggaggcttcaaaggataggttcaaggtaa

SEQ ID NO: 20001 - DNA, 543 bp, Zea mays
  Peptide Sequence Number=SeqID_63376
atggaaaacaagagccacaggctgatggagaagctggtggctgcggaggccaagagggaggacctcagccgtcagttggcggcggagaggaaagacgcaaacagagcctgcactgaggcacaagctgcacaaaccgaggccaaacctgcgcgagcggaagccagtctcgcccgccaatgcgccgaggaggtggaaacgagctacaacagcctgctcgaccgcctggacaaagaggaggccgctattcacgcagaggtcgatcggacgcatgcacagcttgtggacgcgtaccgggagcttggtgcacggaccgctccctttgatgcgtccggggccgtgaatgccctgtcccgcgagggatgtgggcacttcgaagtcttcgaccgattggacgaggacttcaagcgcggaatcttccaggttgaggacccggtgctgaagcagtcagccagggcactttatgataggatgtggggccttcccttccatgagactgtccgggagaggtccgaccgggcgatggagcaggtgacgaatctctag

SEQ ID NO: 20002 - DNA, 414 bp, Zea mays
  Peptide Sequence Number=SeqID_63377
atgaagtcccccgcccccggtagcagcaaaccaccaccggctgcgaagccagccgtccctgggcctagcaaatcttcgtcgggtgcgagggctatcacttccggctcgagcaagccgccttcagctaagcccacgaaggagcaagggccaccgtctctgctgcgcactgctgaagctgcggcgggtggggctagcctcgccatggacatctgcgtggataactaccacgtgggtggtgtcatgatgtttgatgcccacacgggccggggacttgttgtggtggcggccgaggcgaagggtgcttcgcaggacccatggtccatgttttgtgccagcggcgagattacgtcgaccgccaccgttaaagacgtggcaggttctgtttcccaacagctaaagcatgcgatgcagtag

SEQ ID NO: 20003 - DNA, 204 bp, Zea mays
  Peptide Sequence Number=SeqID_63378
atggcggtgaactccgcgccgttcgctatggagtggaagaggggcgacgcatggatcttgagcgacaattcaggtaggttagaatctcttgctaggttaaaattgtggggttatgcaactattggatggttaagatgtgattgtggacattactccacaactaatcacactcaatcaaagatccaaatcaaacaagtatcataa

SEQ ID NO: 20004 - DNA, 441 bp, Zea mays
  Peptide Sequence Number=SeqID_63379
atgtcttcgcgctcccctcatgcatcgtgtctttccatcttccgagccccggatgagggatgcccgcaatccttccgtcttgtcgtcggagagatgcaacttcgaggaagttggtacctttcagccaccgttcggcttcaaggattttcatcacgcggcccggctgcatcccctcaccggtggtcacccaagacggtgaccaccagcccctgggtggggagaagcaagccgggctgcgatcttggttccgccctcagcttcaaggatgttcatcatccttgctggggtggaggccgggctgagccggagctctgcctcccgcgcgggttcgtgggtcagcctccccctaagcattcaagggagagggcgctcactggccctgcgagcagggcggacttcgacaacgcggggctggtcgacggcgggtgtcgccagctttag

SEQ ID NO: 20005 - DNA, 1002 bp, Zea mays
  Peptide Sequence Number=SeqID_63380
atggctcgccttagacacactgctcgtaagtcggtgattcctttcctgccgtctcgccttgcggagcgtcccctgcgccgcactgtgtccggtcagtcgagtcacctggagagactgcaccaccgcctgcgtgaggagcaggagcgccagcgtcagcacagggagcagcagggctcttccttcccacctgagcaggaggtggagtccgtgaggcgccgctcctctgttccccagctggaggcgccccctgcaccaccgcgggacgccccggctgctggaggaggtcctggaggagaccccgacgacgactcagaccacagcacggagtcctctgagccacaggaggcggaaggatgggtcgcccgacccatcacccgtgacgccgctcgcggttgtcacttccacgacgcactcgacaccttgctgcgccaggctttcgaccggcacacctggtcgatcgagtatcgttgtgtagtctaccagcacagccgtgggaggtactcggaccgctgggaggctacctgcctagttcgccgtccggaggatgacctccggggtgcagaggccgtttcggagcactactccatctccgagagggacactgcagcccactatgcaagatgcagcacgacgtgcactttcccagtactgtccttgttcggtggggtggccgacggtcttaaccttaggtactacccccgccgttctactggcagcacagagagtgtggttgtctcacctgttggtgagggtaaccctaggttgagcagcacagtcaacctagtcgcggtgcttaacaccgagctggatcactctctggacgagctgagcagggctcgaacggagattgccgagttgcgggctgagctagcagagcgccgccaccaggagggtggttctcccgctcctgttgggactcaggacccataccgctcgccgccacgtggtcaccacacttatggttcccctgcctgtaagaccaggatagatctggatccttag

SEQ ID NO: 20006 - DNA, 192 bp, Zea mays
  Peptide Sequence Number=SeqID_63381
atggcgaacgacacggacgcgcacggggttagacggggggaggtagacgggggtaccaccttggagcaaaagcaacaaaaatatgtcgcttcctcacctaaaaacaacaaagggataaaccctgagtatggaatactcagcaagtcttacccgactaaggaaaagactctcaagggtatgctggataaatag

SEQ ID NO: 20007 - DNA, 552 bp, Zea mays
  Peptide Sequence Number=SeqID_63382
atggctgtagcggggcacggccctccggcgacggggacgcagagagcgggggcgaggcgaggctccggcggcggaccggcgggacgaagcagcgatgggcgagaaaaactgggcaacggcgcgccgttcgtgggcgcgaaatgggcggcggcggcgctgggcgctccacgcgagcgagcgcagcagagcgcacggctgagcgcgcggcctgggcgctgggccaagcgcagtcgggggggaggcgcgtgggctgctttgcctgcagcttgcgcgcgcgcgctggggtgggctagcggcctacgcgggggctgggccgcgcaaacgcgagctgggccgagcggctgctggcgcgctgggctgggagctggctgcgcgcgcggggtgggctggggtgggcgcgacgcgcgggcccgcgaaagagtgcaggcgcgggggggaagaaaaggccaggagctgggccgcgcgctgtgggccgagcggggggagaatgaggggggaagggggggcgcgggtgggctggccgaaatgggccagggagggaggctgggctga

SEQ ID NO: 20008 - DNA, 468 bp, Zea mays
  Peptide Sequence Number=SeqID_63383
atgaacaaaagaccggcattcaaggtgccattacaaacggaactccggttccacctccgcaggtatgaacaaccccactcgatcggggggcctgcggggcaacagaagaccgacgaacggcacgccgtcacccgctccagcagcggcgacgacgacgacttctgctccggggggccgaacagcagcagcgatgacctcagggcagatgctgctgccaggaggccctcgctcgtgcccaaactcgtgaggcaaggacgggcagaaggccgtagagttggaggtcggtccgtgggcggccccgggtatctcgtcgggtctgagagccaggcacgcggcagctgccagcgccacgaacggcaaacgcccttccccccaatcactgagggaaggagcgggccaccgcccacgcaggggccgaccccaactcggcacactcccctccccagcactgatgatgaaaatccttga

SEQ ID NO: 20009 - DNA, 644 bp, Zea mays
  Peptide Sequence Number=SeqID_63384
acctcatgcccagctcttctgccgagtcccctcagcgcttctcgtccccccccccccctccgttggctgccgtcatctctgtccagctccaccacgctggcgatgtagcactacagctctacctcgccgatgttctcgtcttgactgcgcccgtcgggtcctccgccgacgttttcaatcagccgcgccgacctccacttcaacttagaccggcggtggacgcgtgccttcctgtcctcgcgttcggatcgacgtcgctcagtgtctcacgccatcgtgccgtctcagccatccccagctcttcctcgtttgtaccgtgtgtcgcagcaagctcgtcgtcggcccaggcgctcgcctcctcgccatcgctttacggattcggcgtcgtcgtgtttcacctcgctgttacaacatcttggtcttttggagcttcaacaaatcattgtcttgctgcgttaccgtgtggtgctccctacttcctatctagtgccgacggtctccgtctcgcccgacccaagggctcggactcgacctcgacctcgaaagacatactcgacctcgacctcggaggagcctccgcctcgccctacccagggctcggaccgaccacgtcacaggaggggccatcattaccctacccctag

SEQ ID NO: 20010 - DNA, 900 bp, Zea mays
  Peptide Sequence Number=SeqID_63385
atgaaaatccttgaagccgagcgatggctgaagggtgccaacccccgagaggtcgtgctcctccaacagcagcaagacgaaggcgacgcgggcggctctccccactcgcgtcctcaagcgtcgcgggcgaagtcttcaccaacgtgctccagggtcctccccctacgacacgggggctgggtcccacgcgtcatgcaagctgacccgaaacggaagaaaccaaaccgccgcacgcggagcgtggaccgggaaaggggatattttgaaagggatccttctccgcgaaggaagcgggccccgagccctcctactgatcaggcgttcgaaggctggcccttcggaagggttcaacggccgccacagagcacacgggcttcaagctcattaatgatcaggggttcgaaggctggcccctcgaaagggttcgacagccgccccagagcatgcagagcgagggatgactctgggtacgtccgatacatggccgaggctcgggctatgctcccgaggtcaaggcttcgtctactcaagggacgcgatctcgcctcgctcgagcccagcctcgggcggaggaggtctccacctcacccgaccctagggcttggcccctgcctcggcctcggaagatggtcttcgcctcgcccgaccccagggctcggcctcaacctcggcctcggaaggaggaatccgcctcgcccgaccccagggctcggcctcaacctcggcctcggaaggtggtctccgcctcgcccgacccagggctcgacctctacctcgacctcgggaagaatcgcgtcctcgctcgaccccgacctcggcctcaggaggagtctccgcctcgcccgatcttgggctcggaccgatcgcaccatgggggatacatcattaccctacccctag

SEQ ID NO: 20011 - DNA, 180 bp, Zea mays
  Peptide Sequence Number=SeqID_63386
atggctcgcgcacgcgcaacggccgccctgccaacaactcgccccgtcgcattaactccgcggcgggacaagcggcgcttctggcaggagaagcgggcgacgcttcgccttcgccgcaataaccgcgccaaaaaagggaccggggaagggggataccccgaaaaggatccttccctatga

SEQ ID NO: 20012 - DNA, 240 bp, Zea mays
  Peptide Sequence Number=SeqID_63387
atgacggcggcgctgctcctctgcttcctgttccttgtcgtagtggttgccttcgccaagggccacaagatgggaaggaaaaatatgaagccctctcagtgcggtaggaactaccggcggcggtgctccaagttgcaccagaagaagtcgtgcctattttctacaacaagtgctgcaccaagtgcctacagggcctcctggccgcggacccggtggcgtcgctgtggagccttggcttga

SEQ ID NO: 20013 - DNA, 411 bp, Zea mays
  Peptide Sequence Number=SeqID_63388
atggatccgaagaagcatagcccacctttggcccatgatggacctgcggcctttctcggcctcggaagccctgcgcttctgcactgggccctcatattgattgatacccgtgctgcggcctctgtgcccgccaccgccggcggcggaggttcctcgcagcaggctgcccatctgacgccagcgtatgcagtccagcatcgtgttcttagtggtgacgtggcggagcagagcggagcgggtcccgagcgctcgtgcttcgggacgacccgcctgttctcgtcggcgtcgtctggagttggagatcacgtcgtcgcagcgccgcgccccgccccgtgggaagacgtcgtctcgctcgccgccacggaaccgcgcagtgcttgtgtctctggcgacgagtactgtactgcctga

SEQ ID NO: 20014 - DNA, 108 bp, Zea mays
  Peptide Sequence Number=SeqID_63389
atggcccggcttcgtgccatcaaggacgagccgggaggatggaagaattttatttttatagattgcagctgcaatagtccaaacaatagcaatagtccaaacagctag

SEQ ID NO: 20015 - DNA, 1359 bp, Zea mays
  Peptide Sequence Number=SeqID_63390
atggacgcggccatcgccgggcagcaggcgaggcgccggatccagccgccggaaccactcgtgatggccgggacgccgccaacgcccgcagcgttccggtgtccgatctcgcttgaggtgatgcggtcgccagtcagcctccccaccggcgccacgtacgaccgcgcgtccatacagcgttggctggactccggccaccgcacctgcccggccacgcggctgccgctggcgtccaccgacctggttcccaacctgctgctgcgccgcctcatccacctgcacgcggccacgctgccgccttccccgtcgcccgaggaggtgctgtcgcagctggccgccgcagacggggagcccgcggccgcggagaaggccgtgcggtcgctggcggccaagatcgcgccggagaaagggaagcgggcctcggtcgcgtccgcggtgtccgccgatctcgactccgcggtgccggcgctcctctcgttcgccaagggcggggcgggcgccgacgcgcgcgtggacgcggtgagggtccttgctaccgtggccccggagctggtcccttacctgacgggggatggcacggagaatcgcgacagggtgagtatggcggtggaggccctggccgccgtgctgtccgcggaagggatcgcggaagaggccagggagggcctcgtccttgctcttgtcgccgaggatctgggccgcgtcgtgacgacgctgctcggcgcgggcgcgaacggcgccgcggtccttgaggcgatgctgacgtcggcgcgcgtggacgcggacgccaagaccgcaatcgccgacaggccggagctgttcccggacctcgtgcggatcctcagggacgccgcgtcgcaggcggccatccggtgcatggtcgccgcggtgcaggtccgcggccggccggcgcgcgcgtccatggtccgggccggggccgtccccgcgctggcgctggccgtggcggccgcgcccacggccgccgcggagtccgcgctgcggctgctggcggaggcggcgcgctgtggcgacggcaaagcggccatcggcgccgacgccgcggaggtggcggccgccgtgatggggcggatgatccgggtggggccggcggggcgggaggctgccgtggtggcgctgtggctgtgctgctgcgcgggcggcggcgaccggaggatgcgggaggccgtggcttccgcgcccgaggcggtggggaagctgctggtggtgatgcagggggactgcgccccgaccacctcgcggatggccggagagctgctgcgagcggtgcggatggagcatgagaagaagggcatggccgccgcctacgacagccgcaccatccatgtcatgccgtactga

SEQ ID NO: 20016 - DNA, 560 bp, Zea mays
  Peptide Sequence Number=SeqID_63391
atgtgcccatggcgcgtcgccctgcttcgtgtttggagagtgcttcacatgatcggcgccaaatcgccaatcatgcacacacagctagctcgtactgtattcatcccgatagcacacagcgtcgtcgtcgctacgcggatgctgtcttctcaccgcgagagcctgctgccctacgcgccggggcggcgggcggcggtgctgctcgaccaccggcggtaccgcccgaacgtcgaggtggcgcccagctgcccgcgctgcgactcgcccaacaccaagttctgctactacaacaactacagcctcagccagccccgctacttctgcaagggctgccgccgctactggaccaagggcggctccctccgcaacgtgcccgtcggcggcgggtgccggaagaaccgcagcaggggcaagccggtccgagccgtggccgtcgattccgtggcgcccagcagcggtggcgcggcggcgttcacgcaccgggcgtcggcgtcgtcgtcgtcggcatcgcccgtcacgcacggccgaacatcatattggcacacacagccgcatcacaa

SEQ ID NO: 20017 - DNA, 147 bp, Zea mays
  Peptide Sequence Number=SeqID_63392
atggagacccgaccctcttccatcccacggactcgggagaccgggacgaggctgtgttgcgcactgctcaaccgttgcgacgtggtccggggcaccaaggagccgtgccgcgaccacgtgcatggcagtgcgggactggactgctag

SEQ ID NO: 20018 - DNA, 789 bp, Zea mays
  Peptide Sequence Number=SeqID_63393
atgatccgtgagagcggcgcagtccacgccgtccaaggggacacccgttggggaccgagtgcccattggtgtctgcggtgccgccgcggcgaagtcttgatcgaggttgcggccctcgatgttttggcgacgctcgcgcgccctctccaaggagacctggcgtcctctcccgcacgcctgcggtcgagttctgctcgaaggtcgttggtctgtgcgcccctcactgagggtgagcacacagatgccgacgcctcatgttggcgccgggatgaccgtggccttgacctggttgaggtagagtgtgccatgtcgagcagtcggtcgacgtcatcccaccattgcttcatggcccctggtgaggctgtggagcttggagggtgtcgcagcaactccctggctgctgacaatgctcccggagtcgccctcgacggagtccgagatgtctgtgcagctgtatgctgtcgtgcgacgtgcatagtagcagcgcccgacacagggcggttgggaaccagtgagacaaatggggaagcttcttgtataagggatggtgagcacagtgagctgcttggcacgggcgcacagtttgacaacagactggacaggctccgcccgttggcttatgtcacgggccaccagccacgcggcagcagcgggcttccaccttcgcgggtagcacgagcacgcagggttgtgcgtataggggtcgggtccggtattcatccgtggaagtccggacccaatgatgcatcctggggtgcatcatcttcctttgtcgcgcggtgcccctag

SEQ ID NO: 20019 - DNA, 96 bp, Zea mays
  Peptide Sequence Number=SeqID_63394
atggcgcgctcattgaggtggtcaccactgctggtttcagtccgggtggccaagttgcgtgtccggaccccctcgggtcgcagctctaggtactag

SEQ ID NO: 20020 - DNA, 213 bp, Zea mays
  Peptide Sequence Number=SeqID_63395
atggcgtacgacgtcttgtacaacccccccgggcgacatcggagcagtatggccggcgacgcgggagacgccatggatgtggtggacctgcgcacggcacgaccgtcgctcgtccggtggacggacagccgcaccccgaccaagcggcaggaggtgaccactggcgggaggttgcagccgggctgcatgatgaaaatcattgaagccgagtga

SEQ ID NO: 20021 - DNA, 627 bp, Zea mays
  Peptide Sequence Number=SeqID_63396
atggctgaaaggtaccaactcccacggagttgcgttcctccaacgacaaggcggaaggactgcgggtgtcccccatccgggggctcggaaggtggaaagacacgatgcataagggagcgcgaagacatggtcgcctttcaagggggtcaccctccttttaaaggcgactctccctacttgcgtcctcagccgtcgtgggctgagtcttctccaacacgctccaaggtcctccccctacggcgcgggggctgggtcccacgcgtcatgcaagctggcccagagcagaagaagcaaaaccgtcgcgcgcggtgcatgcaaccgcccagcgattacgagcattcctccgctttcgcccagaccagcgggcgaaagggcgggcggcatgcaaccgcgccaagtgggcgcgcccctccgacttccaacgcacccaacatgggggccccacgcccacgcgtcatgcaaccggcgcgccggtcgctacgtgcaagcaactgcaccgccactcgcaccactgccacgcctcctcgactgcggaaccagtaccgcgcctcgaagcaaccctgcatacgacccagcagtgccagccaggcgcgacggtcaatacggccaaaaatgggccggcagtaa

SEQ ID NO: 20022 - DNA, 405 bp, Zea mays
  Peptide Sequence Number=SeqID_63397
atggcgtcccgccagttcgccttcgaacggtctgagcttgagcgagaccgcaaggactacaagaaagacctccagaaggtgttcgcccgagagctagaggtggcccggaaggagaagaaggtgaccaagaaggaggaacacttggaccagagggaggaggtcatcacagagctccaggcgaagctagatgccttcaacaagatgctggaggaggagcgggtccagcagcccgcgactgtggagaccctgcaaacactgcagtgggggctggatgatagggccagcagccttgccctggccgaagagaacctcaaggagaaggatgcttccctggataagcgggcggtggatctcgcctggcaggagaaggacctcgccttcagggaggagatgtttgaaaggtga

SEQ ID NO: 20023 - DNA, 549 bp, Zea mays
  Peptide Sequence Number=SeqID_63398
atgacctacggcgagaagctaatgcatcagttgtccaaaatagtagtgctactgaattcgcagcagctgtgcaaacagcacgctgtcgctgctcccaccaacggaaccgcgcgcagaggggccttaccgcggtggtctccacctgcattggcaagcggcgaggatgaccggatgccgcggcagcggcgacgaagtttctccttcgattctggtgggaacaggcgacgggacgatgtcacggcaagatctcctgttcggtggacgccgccggtccgccgcctctgctctctcgcgacacgcgggctcctcgcggctccgctccgcctaccactccctactggctccggatttgatttggttgttggtttcgcagtgcggcgtagggggggtaacggtgtgggcgacggagttttgctcggcagcttttatatggcgcggccgcaacagcgtgcggtggcggtgcggtgggggttaaaaaggcacatcaacatcagaagagtttttgctaaagctccagatatacagcctatagtgatatctaaagtttag

SEQ ID NO: 20024 - DNA, 471 bp, Zea mays
  Peptide Sequence Number=SeqID_63399
atgtggccccctctacgcctgcctgtagctttcgttgttggcttgtccggtgtcctctcctcctcgtcctccagcgcgatcgcggtggttgcggcgtcctcctcctccctctgctccggtcgccggccggccgggacaacgtcatcgtggggctgcgcggcgacgagagcggcggccgcgccgtcggtcggacgccaacggggcaccaacctgagatggggttcgtacagctttttccggccggctcgaaatcctcgaactggattttcattggaaccggaaggttggcaaagaaaatacatgtacggtggtggttatactgcagaggttttggcctcggcgggaccgggaacatggagaatcaccggcacgccgccactgggttgtgtgacctgcaacagtacttctgacaagaggacaggtcaatgctttgggaggaggccaaccggcaagcgccccagccatgaatga

SEQ ID NO: 20025 - DNA, 991 bp, Zea mays
  Peptide Sequence Number=SeqID_63400
accttcagagccaactctttcgtggcggccagatcgtccgccgggtcccggtggaagtctgggtcctgttctcgcagtaagccctgctgcccccgccacgctccggccggacatgctactggaaggcatgctcggcagcccaagcgagctgtgccagctgacggtgacggacgacgacgcagcggaaaacccggctgtggcgcccgatggacccaggatcgacctggcgttgctgtacgccaagttcttgaaccaacagccgccggcgcccgagcggcgcgccgtcctgccggaatcgctcgtcgtcgacaccttgagcgggtcgtcgtcgagcgacgtgggtcccgtcgtcccatcgcgggatcatcagccgttcacgacgcaagacgacgggctgggcgagctgtccgcggcggcgagcgcagagccgagcgctcctccgccacagtcgtcgtcgtgtgcggaggcgcttattggggcgttcggcatggaccagcgctgctacgactctctgggtttgccaccagacggcggggatctagtcctaccgtcgacgtggcctcttcttggggccaagtacgagctgttcgatccgctacctgaggacgccgtgagccttcaggacggcttcgccggcgacgaggacgtgtggagcggcgccttggcttgtcaagggctggaagcagctctctgcaggcctgaactagtgaagcgggcaggctcgcgtgcaggcaacgtgccgctgctccctcacatcacagtcaccggattggcatcttctccgtggccaacgctgacgcacgtggacgccaccacaagtcccctacagcagtacaccctcgctctcgccgatcgtcggatccaggtcgcgggacgccgggagcaggaagcaggcagcttcgtcgccaaattatttcctgttgcggggttcagacgtcctggcccaaatggctcgctcattctgcccggtctaatcggcttccaaatctag

SEQ ID NO: 20026 - DNA, 114 bp, Zea mays
  Peptide Sequence Number=SeqID_63401
atggggctgattggttgccgtctggagggcgtcgggtggggcaaccaaacaccttctcacgtctggtcaacgcatgccgcgagcctggacagaattaaagttacccttgattga

SEQ ID NO: 20027 - DNA, 1518 bp, Zea mays
  Peptide Sequence Number=SeqID_63402
atggcaacggaagtcaaacaaacttatttttcatggtcacaaggagagtcaactgaacgggatggtcctcaaggagtatctgtatcccagacacttgatcatggttccatttccttcggaagatttgaattagagtcactatcatgggagaagtggtccgtatttactaatgacaggcgcaatgaagaatttggaaaattcaatggtttagtcgctcagaaaaaggcttattttgaagagtattacaagaagatcagggaactaaaggcttcacagcagcaaaaccagcaaactgaacttattctggaatacagcggtgatggtagtgactccagccaaacagcagaagaggagcagggtgctgatcttgaaacccccactggatctggagcagctgttgatgtttatgtggaagaagtggatttctgcagcaaactgaccatgatgttagagttcctgtttcgtggtgacaattctaccagtaaactgtatgcggcgccgcagaatgctagttctgttcacgatggtactagaaaaacatatgaagctgcaaggactcctagaaggattattgagaaagattccaggcttagacacagccccaagataataccaaaatccgtcaaagccctttcacaaagtgctatggattacacatttactagtgagaggcctggttcagtgaagcccaatacaactacgagccagaaggctaagccagtgcaaagaccaaatgcagcaagccagaagatgtctgcatctacagaaaggagcaagcttacaggtctcagaagaccttcctcagcaggtgcgcaacggccttctactggagagcgacatgctattgccagggagaattcacaattacctgtggtcgtttccaccccacggcgaccttccactgctgagagacgcccagtcacccgagatcgtgcagagaagcaagccaatgtcaccacaccacgccgaccttctacttctgaaagactccccatcaaaagagagactgcagcaaagcataatgatatttccgctgtacgtcgaccctctacaggagagagacgtgctttttctagagatggtgttctgagaactgatgtgaagacacctagtaaggcaagagcaactgtggctcatccgatgagtgaaatgactacagtgggcaatacgagaaaggctatcactccaaatgcagctagaagtagcaagctggaaacaaaaaggttgctcttacacaccgatcgacagattcttgaaagtaatatggctgtaaaagttgtcttagccatatttcctgattataacttctggttttgtagttctgttaaccttcctccaaggaaaattttcagttctactgctggagaaccatcagttggaaccatttctaggtcaaaaaagaaagagactttcataaggaaacaaactagctattacaaggtaataatccggactgctatcagtcctgatcttgctgattggatccgtccatataagactgatccactaccatactag

SEQ ID NO: 20028 - DNA, 663 bp, Zea mays
  Peptide Sequence Number=SeqID_63403
atggagcttgacgggaagctgttcgtcaacacgcagcagtcccctacctggcgcgccaactgtcggcgtttcgaccccggggggtccctggaccgacgaggggttacaagcgttcgcgtgggagagagagagagagagagcgtgagcctgtgcgtcagcccgtcctcccgcgcgaccaccttctcgtacgagagccctggaccttccttttatagatgtaaggagagggcccagagaccgtcgtccgaggtcgaggtggagtccaagccctggggtcgggcgaggcggagaccgtcttccggagtcgaggttgagtccgagccctggggtcgggcgaggcggagaccgtcgtctgaggtcgaggtggagtccgagccctggggtcaggcgaggcggagcttcctatggcgcccaaggctggacttagctgctgtcggcctcactctggcgagtggcacaacagtcggagcagggcaggcagcgctgttttccttcaggataaagtgtcaggcgatccttgcattgaatgctcctgcgatacggtcggttggcgtggcgatccggccaaggttgcttctccgtgaagcctgcccgagctgggcctcgggcgagtcgaagctttgtgctgatgggggttaccagctgagattaggagtcttgggg

SEQ ID NO: 20029 - DNA, 93 bp, Zea mays
  Peptide Sequence Number=SeqID_63404
atgaaggatcgatctggcaatggggaggaggtctgcgatggtagggtcggcggattgaaatcattggcgctcggtgataatactgttggctag

SEQ ID NO: 20030 - DNA, 927 bp, Zea mays
  Peptide Sequence Number=SeqID_63405
atggttctcaacagctcaactctctcggatgaaggcttcaagctcaatgcacgtgactggctttcgtcctcgacctcgaggaaggagagatggcacccggcatgggctgaccttggcggtgcacggactgcgcgcgtatttatagctttgacccttgagaggaaggaaaagaagaagagaagagaagcagctggagagtggacgaaggccggtatgcatggcatggcaggcaggcaggcgggcacgccattccctccctcgttccttgactgcaagttgccaaaagcgaccggatctgcgagcgcagatcctccgaggcagccagacgcggcggatcctccgctgctcgccgtctcggggctctccggtgttggctcgacgcgccagcgccccccaaggtacccggtgtccaaggtgctcctggagaaggaggcgagcaggttcgcggaggagcacggcatcggcctcgtcaccgtctgccccggcctcaccgtgggcgccgcgccggccccgaccgcccgcaccagcgtccccaactgcctctcccttctatccggcgacgaagccgcgttcgccgtgctggacgccatcgagagcgccaccgggtgcctgccgttggtccacgtcgacgacgtctgccgcgccgagctgttcgccgccgaggagggcgcggccgcgaggaggtacgtctgctgcagcctgaacacgaccgtcgccgagctcgcgcgtttcctggcggacaagtacccgcagtacggcgtcaaaacgaacctgttctccggcgagcggcttgagaagccgagagtgtgcctgtcatcggcgaagctggtgaaggaaggtttcgagttcaggtacaggacgctggatgacatctgtgacgacatggccgagtacggcaaggccctgggaatcctgcccgacttgtga

SEQ ID NO: 20031 - DNA, 414 bp, Zea mays
  Peptide Sequence Number=SeqID_63406
atgggcaagagaaacaaacgcaagcgcgagccgactcctccatccgaggacttcggtgactcggaatactcagaggaggagttctcctctgagtccgaggggtctccggctcccgtctctcccccagcgtcgtccgacgatttggacgactctcaggggattgccgcggaggtctggacttacatccgggccgtcgagcgctccgggctcgagggctcggatgagtcggagtactcctcggacgaggaggactcgcccgaggaggacgacgatggtgacgacgacgacgacgacgacgacggaggcgatggcggcgacgacggtgacggtgacggcaagggtggcgacggcggcagcagcaggagcagcaacggcggcggcagcagcaagggcagcaacaaggccagtggctag

SEQ ID NO: 20032 - DNA, 537 bp, Zea mays
  Peptide Sequence Number=SeqID_63407
atggcactgtttcggttgcaacacatgcaaaaactctgtggctccctctttgctgagcctggcgtttgcatcccaatggtgaggagtctggaacgaacggaccgagcccatcgagatcaaaagtccaacagttcgaacgtcccgttggcacgccaaaaaggatttaaccccaacttggcgatggcgagggtaaattttgacttggctcgtgcagccttgacttaccttctccggcgatgcactgatcgtcaggtgatagagaagccgcttcggctgcccccagctttggacttgtggtccccgactcggtcgcgaccagaagagaaagaggccgaggctcaaccctatatcatgtgtctcgtgtgtttcctctgtcatgcttatgggaagggagacgggttctctacagcttcttgtgcctctactgctgacgggatggaagggagcggatctggtgatccatggtgtgggggacagatatccctcgggtccactggaaggataaaagacctcacgaaaggcccaagagcccaataa

SEQ ID NO: 20033 - DNA, 222 bp, Zea mays
  Peptide Sequence Number=SeqID_63408
atggcgatttggccaaggttgcttcttggcgaaggctgggcctcgggcgagccgaagccttgtgctgatgggggttaccagctgagattaggagtcttgggggtacccctaattatggtccccgacacaaagagtcagtactctcccctagtcctcgttggagcacccacgcaagggtatcgctcccccttggtcctcgcaagaaccaagtgctcactatga

SEQ ID NO: 20034 - DNA, 228 bp, Zea mays
  Peptide Sequence Number=SeqID_63409
atgaggtgtcaggccatccttgcattaaatgctcctgcgatacggtcggtcggcgtggcgatttggccaaggttgcttcttggcgaaggctgggcctcgggcgagccgaagctttgtgctgatgggggttaccagctgagattaggagtcttggggggcgccgaacatggtgtctccagtgagctgctaacgggtaatccgagtggacgcccgtgccccatttgttag

SEQ ID NO: 20035 - DNA, 1566 bp, Zea mays
  Peptide Sequence Number=SeqID_63410
atgggcgtgcctgacttctgcgcgcactggcgcgcattcaatgcgctacaggtagccgttgacgccgaagtatccgttgcttcgatggcacaccggacatgtccggtgaattatagcggactagccgttgtgaattcccgaagctggcgagttcctgaggcgccgttccttggagcaccggacactgtccgcccggctgcatcccctcgccgatggtcacccaagacggtgaccaccagtttgatggtggggagaagcaagccgggctgcgacctctgccccgccctcagcttcaaggatcttcatcatccttgctggggcggagggcgagctgagccggagctctacctcccgcacgggttcgtgggccaccttctccttcagcattcaggggagaaggcgctcaccggcctagcggaagggggggacttcgacaacgcgtggtcgagcggccgcaagcgtcgtcagctccagcatgcctggttcgctggctcagctggctctggctcggctcccggtgccccctcccgccgtcgggcggagtgtggctatctagccgctgtacggagttgcgccgcgcgcaccaggggtccgcccaagacgtcgcgcgctgctagggcggcgttcgtgttcttgggctgtcctgcccttgcttcggtacgacgcctccacgcggaggtcggtgctgaggtggtggcggctgaagaagtcctcgtcaccgacgaggtcgccgccgccatctgcgctccgggcctccggctctttggctttgatagcttgtcctcgcccctcaagtggggacgtgggcgagggccttgtcgcaccagcgtctgccctaaggtcatcgctgctgctgtttggccgcccggggcgaaggtcgttgtcgctgctgccggagcgggcggcggcgagccacatgggattttgtcgtcccgtaggccctccaatgtgggggttgagtccctcggctcggtcggccttgccgcccgaggcttctcttgcccagttaaagaaaccctcggccgctctgcgatgagccggagccggaggcagccggtgtcagcgtggacagaggcagagttggctcgaaaagaagctcccgtcggccggagcctggccgggccgtccactggcgggactaacgcccggagtcgggttgccgaggccatgagccgggctgatgtcctcgggggacagctggctaaggctacggagcggccagtcgagccgtctgcttgggccgggttcctggaggaggccctggcggcgatggcccaggcgcgaattgtttatccgagcgagagttacttttcacggaaggtgatgagtgaggattctattatcgatatagtcgagaaggcacgaaaaatcgtttcggcagaagagttttcgagcgttaagacttgttcggtcagcggaatcgcttacccgagcgtgagttacttatcgcagaaggtgatgagtgaggatcccactatcgaagtagtcgaaaagcacgaaagatgttctggcagaaagactttttccgaggaaaatcttgacgcagagggggttccccccttctag

SEQ ID NO: 20036 - DNA, 468 bp, Zea mays
  Peptide Sequence Number=SeqID_63411
atgggcaagagtaacaaacgcaagcgtgagccgactcctccgtcggaggacttcggcgactcggaatactcggaggaggaattctcctccgagtccgaggggtctccggctcccatctctcccccggcgtcgtctgatgattcagacgactcccaggggattgtcgtggaagtctggacgtacatccgggccgtcgagcgctccgggctcgagggctcggatgagtctgagttctcctcggacgaggaggactcggacggcggcgaggacaaagatgacgacgacgacgacggcgacgacgacgacggtggcgacggcgacggtgacggcagcggcagcggtgggggcagcggcggcaagggcagcaccagaggcggcagcagcacgggcagcaccagaggcggcagcagcaagggcagcaccaggggcggcggcggcaagggcagcagcagcaaggccagtggctaa

SEQ ID NO: 20037 - DNA, 690 bp, Zea mays
  Peptide Sequence Number=SeqID_63412
gaaaacagcgccgcctgccctgcttcgactgttgtgccactcgccagagtgaggccgacagcagctaagtccagcctcgggcgccataggaagctccgcctcgcccgaccccagggctcggactccacctcgacctcggacgacagtctccgcctcgcccgaccccagggctcggactcaacctcgactctggaagatggtctccgcctcgcccgaccccagggctcggactccacctcgacctcggacgacggtctccaccttgcccgaccccagggctcggactcaacctcgactccggaagacggtctccgcctcgcccgaccccaggctcggactccacctcgacctcggacgacggtctccgcctcgcccaaccccagggctcggactcagcctcgacctcggaggagtcactgcctcgcccgacctcgggctcggaccgaccacgtcacaaggggggccatcattaccctacccctagctagctcagtctatggggaacaagactggcgtcccatctggctcgccccggtaaaacaggtaacgatggcaccccacgtgctccatgacgacggcggttctcagccccttatggaagcaaggagacgtcagcaaggccccgacagccccgacagctgtgctcctacaaggctcaagcgctcttccgacggccacgacctcacatga

SEQ ID NO: 20038 - DNA, 342 bp, Zea mays
  Peptide Sequence Number=SeqID_63413
atgctttggatggctagccacgacatcatatgggctcctagagcaaccgtacgctttgggagcctcgagtttatcgtcgccgatgaagggggactggttagggcttcgactacccggacccccttgatggaagacatcgacaccatcacagaggcctttggtggcctccaacttggcctccctcagaagcacaatctggggcagggtccattgagaccctactacatcaagttcctaggaatggttgaccctatcatggattcgtttcacgacctgttcttgtcagaatctggttgtagcctcaacaccccatctagtagggcaagctatgaccccatgtag

SEQ ID NO: 20039 - DNA, 876 bp, Zea mays
  Peptide Sequence Number=SeqID_63414
atggctttggccgacacaagaattgcttaccagcctgaagtcgacaagcatgctggagttctggcctatgaactggttcaagggaatcttgttcagtggaattcatttatggacaaatcaatacctgatccaccaacagctgttcttcttcatggcatccttgggagcaggaaaaactggggatcttttgcgaagagattggctcaggaattcccaatgtggcagttcctcttggttgatttgcgctgccatggcgactcaacatcaattaagaagagtggaccacacactgttgcctcaactgctcttgatgttctaaagctggtatgggttcttgatgctactcctggcaaagttcgggccgggggagatggtgaagatcaccctgctgaacttattgaatttctcagaagaatgcctgagcaggtttcttcaaaacaggaggttgttgatgctcttgttaaaggacaattttctatggacgttgcacggtgggtggctacaaatctacgtcgaaccagtccattgggtcagcgaccatcttcaagcttctcatggacttttgatctaaatggcatctctgagatgtacaagtcttatgaggatactaacttatggaggattgtagagaatgtaccaaggggtgttcatattaattttctaaaagctgaacgaagtttgcatagatgggctctcgaagacctccaaagaatttatactgcggaggaattagctgcagatgagggtggaggagttgaaatgcacgtgcttgaagacgctggacactgggttcatgcagacaacccagacggtctctttagaattctttcgtcaacctttcgaatcgaaactactataagaggaatgcaggactga

SEQ ID NO: 20040 - DNA, 429 bp, Zea mays
  Peptide Sequence Number=SeqID_63415
atggagtactgtcaggtggggtcatatacgggaaaagtccgcctggcggcggtgtgtggtcggtgggcggctgggctgggagactgggacccaccagtcgagtggctgtggctccagttggtcctcccgtacgtcagtcgtcagccttcagtgcgtggtggggacgtggcgaccggacgtagcgctgtgccaaccatcaaccatgtgtccatgtgggagaagaaatatgttatggcaaatgcacctgatgatcatggactaaatgaattaaatgcaccagacgagcaccatatgagtgaggagtaccagacgagttatggaatgaatggaggagcaccatttggagcatcatatggaggggtaccatacgattcatatagaggagcgtcatatagatacccatacatgtatggaggagcatatggataa

SEQ ID NO: 20041 - DNA, 351 bp, Zea mays
  Peptide Sequence Number=SeqID_63416
atgcctattggccacaatagagcaacaactcaacggaaagtggacccaataacaagtagcagcgagtcgcgcatccagacttctcctgaggccgaggtcagatcgacacacgagtacacaatcatgctggaaatggttggaacagcagcggagtggtctcctgtgggattcgcgggagagttggtgacatttaatgcgctattgtcagggcagttggccgaggccgagttcaggcgaggcaaagtttcctcccaaggctatgaccgagcttcgggcaaggcaaagtttcctttcgaggctgaggccgtacccagtcgtcatacttctggtccggagttgttgaaacagtga

SEQ ID NO: 20042 - DNA, 411 bp, Zea mays
  Peptide Sequence Number=SeqID_63417
atgccacctccgctgtcacgcatgatgagctgcttcgcctctggcaccgccttgttccttcgcgatctcacattgacatggatgcacccgattttccctgccctgttctatgcctgtgaaagagtcatcagaaatttcatgagaacgactaccattcagcgtttgctcgacttcatggttttaggctgctgctccaccaagaatcagataactctgcgcagttgtcccaagattgtgattctgaatgcccaacaacaactcaatcaaaacaatgctcttggacgtatctccctgcatatgattgcagttggattgactggctacatgacaactgtggctaatctgaaagaccctgttgacaaatggagatgtgctgctgctcctttaattaatgtgacattggatctctaa

SEQ ID NO: 20043 - DNA, 390 bp, Zea mays
  Peptide Sequence Number=SeqID_63418
atggctatcaatagtacagttattggacacaactgtatttttgtactccctagcgaccttccacttttcccatttttagcttttagtaagcaatacaaggatcaaaaccatgatcatgaccatcacgatgaacaaaagaagcatgaacaaaccttcaacgaagaagcagaaaaaatgatcaagagtgtgaaacaagcactcggaaatggtgaaggctgccgagtctatgggatgttggatgtgcagagggtggctggtaacttccatatctcagtgcatggtttgaacatttttgttgctgaaaagatttttgaagggtcaaaccatgtttttcttcagtcatgttatccacgagctgtcattggcccaaagtatccgacgaatctctag

SEQ ID NO: 20044 - DNA, 810 bp, Zea mays
  Peptide Sequence Number=SeqID_63419
atgcgtatgctaaatgtcgaccccatgttttttgttttgtgtgcacgcgcagattgttacttgatcttcttcagtgagactattgttgaggttgagaaaactaagctggaagaggaggcagatgttctatctgagatagaggaggaaaaacttgaatctgaattagacgcacaagaagggagttttgaggttgcaaagcttcgccatggtgtcagaaaacaatctcctgatgccgaactggtggtgctacctccaccattttggggttcgcaggacccaaattctgttttccaagtgtttcttgtgcctgctccaaaactgcttgtagatcagaatcactgcagcagtagcacaactccattttatagacactataagtgggacttagttggaccattaaaattagtagcagactttggactccaatattggagtgcacaggtgcacttgggccaacaaggcgcagcaggcttccacagcacgggaggtgcggagaggacagcttgcagaatgaggaagaacacactccacccgttccaaatcatagttcacttcggctgcattaaaccatgtttattcctttcagtgagcagcctttgcatgctgcatgagatcaagcaaaccattcagtttgttggtgagttgatcagcggaaatgtcccgtatccagttgatcaacaccaccttgatgatccacatattgaagccaacttactctttcaggcacatttctccaaagcagaattgccaataagcgactatctcactaacttgaaatcagttcttgatcagagcatacgtatcatatag

SEQ ID NO: 20045 - DNA, 391 bp, Zea mays
  Peptide Sequence Number=SeqID_63420
cagagagatcttcgaaaccccccttcgttatttcccacctaacaacaaaaatacccccacctggaggaaaagacttcaggccctgtcagggagagaccccaccattgtctacatggccagatacctccacactctcgataaccactacgatgatctctcctcccactgcacccacctaaactcccgggtggaaagcttggagcagcaggtcaaggaacttaagaaggagaaggcgtccctccaagagtgtctcgatatagcagaaggcgaggaggccaacacccgtgaagcctaccgaaccctaaagatggattatgataagaagctgaagaagctcgcccccacgaagaaaaatccaaaagaagaccaagaaccaaggaggccaagctga

SEQ ID NO: 20046 - DNA, 84 bp, Zea mays
  Peptide Sequence Number=SeqID_63421
atggccgccagctccgcccccgacaacttcggtgccggaacacattttaatgctagcgcaaagcccacatctacaatgtgctga

SEQ ID NO: 20047 - DNA, 375 bp, Zea mays
  Peptide Sequence Number=SeqID_63422
atggccatgatgggttcaacatcggaaaagatgtacctctgccagttcgactacctcatcccaccgatggggatggacaagtgttgcgctaacaacgtggacaacaacaacgtacacaaggcggacatggtgatgaatgggttgcacatcagtgtgtacgcatcagagacgttggggtggtgcggcggccatgtccacagacggttgatgagcaagatgctcgggcgcattggggattcaccgccgatcaagttcggcacatatagatgcgacgcatgcgccgtgtcgtgcacgctcaagtgggacatggccactttcatggagtacaagggcctacccctgcagcaggccgtcgactactatgtcagggcatga

SEQ ID NO: 20048 - DNA, 297 bp, Zea mays
  Peptide Sequence Number=SeqID_63423
atggccgtcccagacggcgtggtaggttcctcggaatcctactacctcgaacgtgagggtttccttcctgaagttggagggggttccaaagcagacaggcaggtagatttggccgagaggctggaccctcttaccgggagctatgccgtggaacggagcagcgccagcctagatctgggactcatcgatcctcataagacccagagtctcggcgtagatgatgttgaggctgctaccgccgtccatgatgactttggagagcctggtgttgctatgatggggttcgacgaccagcgg

SEQ ID NO: 20049 - DNA, 303 bp, Zea mays
  Peptide Sequence Number=SeqID_63424
atgacgtggcaggggcaccggactgtccggtgccaaaggttcatctacaactatactaaatcgactgtccggaataccgtagattattccggacaggagaagctttttggaaaatcaggccaagcgcggatcgtccgggcctttgcggcggaccgtccgcgacacctaaatgaccctcggatagaaccaatgcaaaaacacatgtctctactgcggaccgttcgagccgttgatctacaggggcggaccgtccggaccaggggcgcagaccgtccgcggtcggcagaaaggtgcaacggctag

SEQ ID NO: 20050 - DNA, 535 bp, Zea mays
  Peptide Sequence Number=SeqID_63425
atggaagcagcccgccagcacccgtcgtgcccctccccccacgaccgcacaggcaccgtcccccgccgcccctgccccggatctcgcccccgccgcggatcccgcgctggccacgaccgccaatctcggccagcccccgccgtaccctcgcctatgtctcgccccgtgatcctcttcccctcgtcgtcgtcgcccgcccttccatccacgcgtcgtgcccccatccacgctctgtatcgatccccttccatcggcgcatccgatgaggatccacatctgtcgcgcccgttcgtcgtcggcgccccacatcaatccccgcgcatcgtcggctcgcccaactctccgtccacggccgcctccgccgcgcacctcctccatgccgtcaagaaggcggaggatgtgatgtcgagccgccatcaggaccttgggaagctggagtctgacgcgcaaaaggaggacacctactacgtgctcatgcagatccagtcgcgcgtggtctccttcgaggagcaggttggtgaaacagagctgagag

SEQ ID NO: 20051 - DNA, 471 bp, Zea mays
  Peptide Sequence Number=SeqID_63426
atgaagctcaccggagtgaagggggaacgcggcggcgctagctcaattgggctcggggaggagtggaggagatggccagggctggtgtggagaaagcggagctcgggcggtcgcttttataggcgcccgggagggggaaggaagggaggggacggcgagcacctacgagcttgccatgatggcggggatggagcaaacggcgacgggatggctcgggcaggtgagggggtgaggggacggctcgggtacagtggcggggaggccgctgaggctggtgcgagcgttaatggcgaagcgatggggcgggaggcggtcggcggcgaacgcgccgatgatggcatgggcgagacgatggtcctgacaggcgggcccaggctaccagtgggagagcggcgcgagagggagaggggtggagccgctgaccggttacttagatttaaaccaattgaaagattatgtacatatgtctaa

SEQ ID NO: 20052 - DNA, 336 bp, Zea mays
  Peptide Sequence Number=SeqID_63427
atgcaccggcgcgccgccatcgccgtggccagggagttgaaggagggtggattaaatgttgaagcatctgctcacctccacgagctgggcgaggcagggagctcgagggcgcagggttggcgcaggctgggcggggacctagggcggagggttggtgcaagcagggcagtgttggcggagggttggtgcgggcggcagaaggagaaaggggccgacctcgtacgagggatgggtcgcggcctcgcgagcgagggcgagagaagcatcgagaaggttctggggcaagactgtggagggagagtgctcaacgaggggtggaggccggtgctccgttga

SEQ ID NO: 20053 - DNA, 513 bp, Zea mays
  Peptide Sequence Number=SeqID_63428
atgtgccaatggggaaaacatcgactgctatacgccatctctcgcaccctctggttgtcacaacgagctgctgtctacagattgacaccaggtccccttgccggatgcactctgtcgaggatcgatcaacgggcgcaacttggaacagtggcgacgatggatatccctccttgcctccacaacaaaaatggcgcgcgaaggtggacatcggcatgggaagtagatggattgggggattctaggttcacgcaaatatgcgggagagaggctgctgatgggggaggggcgaaaaagttggggaaagattggggttctcttggggacggtctggccgacatcgtaccttcactcaccgttggacggggtcgctacggtctaaccatggggggctgtcggtgccggaagcgttcagcggcgtcggctgaacacggagtcgatttcacaaaatcgcgagcgtgggaacatggagccgtcggtgctggaagagttcgaggacatgaagctgctcaatga

SEQ ID NO: 20054 - DNA, 405 bp, Zea mays
  Peptide Sequence Number=SeqID_63429
atggcttggtatggcatgagggagccctttgcccctctatttataggcaaggtgggggattatggggaggaggtattttcggattcagaattatggatatggagcacgaccaggacgaaggctgagccagacgaaggtcgggggcagccgaagctaaatgattctatgatgatgcttatattatatttcgtgctttacgtgagtccttcgtcattacttgttatgtttacgaaggacggaactgagggagctagtgggggttatgcgcgagcagtacacatggtggtgcacagggtgcagagtggtggtgatgtagtaggtgccattaccctaatgtctatgcttattccaggcttcaaggataagcttcctggtatcttcttgggtaatgtgcttttcccttga

SEQ ID NO: 20055 - DNA, 630 bp, Zea mays
  Peptide Sequence Number=SeqID_63430
atgaggagctactcccctatgctcccgctagaggcgccccctgcaccaccactgagcgccccagccgctggagtagctgttggaggagaccccgacgatgggggcggcgacagcagctcgagcttcagcaccgacccttcagctggccaggagccggaaggatgggttgctcgacccatcactcgcgacgccgctcgcgggtgtcacttccacgacgcgctcgacaccttgctacgccaggcactcgaccggcgtacttgtcgtggggtttacccggaccgctgggaggcgacctgcttggtgcgtcgtccggagaacagtctccggggagcggagatctgctcagagcactattccatctctgagcgggactcggctgaggcggccacgcaagatgtcgcacggcgtgcgctttcgcactactactcagtgctcgacggggtagccgatggtctcaacctgaagtattacccctgccgcccatctggcagcacaggaggcatgattgtctcacctgttggtggggataatcctaggttgagcagcacggtcaaccttgtcgtcgtgctaaacacagaactggaccatgcattagatgagctgagtagggctcatgctgagatcgcctag

SEQ ID NO: 20056 - DNA, 624 bp, Zea mays
  Peptide Sequence Number=SeqID_63431
atggtgaccaccagttcgatggtggggagaagcaagccgggctgcggcctctgccccgccctcagcttcaaggatcttcatcatccttgctggggaggagggtggggcgagccgaggttctacctcccgcatgggccggcaggccgcctcttccttcagcattcaggggagagggcgctcaccagccttgcggagggggcaaactttgacaatgcggggccggtcgaccgcaagtgtcgtcagctcaaatgtgcctgtcttgctggctcagctggctctatcgcggcctccgacgctgcctcctgccgcttgatccgggcgtggccgtccgcccaccgtacgggcggctgttgcgccatgcgcaccgggggaccgtccaagacgtcgcacgccgctagggcggcattcgtgttcttggatagtcttgtcctcactccggcacgacgcctccgcgcggagaaccctcggctgctctgcgttgagtcggagccggaggcagcggtgtcagcatggacagaggcggagtcggctcgaaaagaggcttcgtcggcccaggagcaggtggcttcccaggccgaggaggtgcagcagcgacggccggagcttggccaggtcgtccgctag

SEQ ID NO: 20057 - DNA, 1005 bp, Zea mays
  Peptide Sequence Number=SeqID_63432
atgggcttcaagctcattactgatcaggggttcaaaggctggcccctcgaaagggttcgacagccgccccagagcactcgggctccacgcccactactgatcaggggttcgaagactggcccctcggaagggttcgacagccgcctcagagcacgcagagcgagggatgactctgggtacgtctgttacatggccgaggctcgggctacgctcccgaaggaaaacagcgccgcttgcccctctccgactgttgtgccacccgccagggtgaggctgacaacagctaagttcagcctcaggcgcaacaggaatctccacctcgcccgaccccagggctcggcctcaaccccggcctcgaaaggtggtctcggcctcgacaccggcctcggaaggtggctacgggggaacaagaccggcgtcccatccaggctcgccccggtaacaagtaatgatggctccccgtgtgcctccatgacgatggtggttctcagccccctacggaagcaaggagacgtcagcaaggtcccagcagccccgacaactgtgcttctacagggctcaagcgctcctctgacggccacgattccgcgtacacagggctctagcacctctccgacagccacgttggcatgtacacagggctcaggcacctctctgccggacacattagcgcatagctacacccccattgtacacctggaccctctccttgcatctataaaagggaggtccaaggccttcatgcgggggggaggtcgcgcgggagaacgggctgacgaacaggctcaccctctctccctcgcaaacgcttgtaacccctactacgagcgcatccccctggcgcaggataacacgagccgcgtttttcccccttatgttccatctcgcgccaacccatctgggctgggacacgcagcgacaattttactcgtcgatccagggaccccccggggtcgaaacgccgacaattctctagattgtgttgaggatcttttgttagtttag

SEQ ID NO: 20058 - DNA, 315 bp, Zea mays
  Peptide Sequence Number=SeqID_63433
atgagccgccacctcgccgtgctcggaccgtccgtggagctcgccggaccgtccgcctgcaccgtgccctcaccgcgctcgtgccctgctcgccggagctgcgccacccgccgtgtcgagccttcgcctagacacgcgcccaagccccgtctgccgttcgtcgcgaggtcatcgacctcagcaccgccagcaccagccgttcaagctactgcacccggaggcgatgacccagacgactctggggacgatgatgaggatgacgacgacgatgaggatgacgaggaaaacgtcaacgaggaggccaacgatgcttag

SEQ ID NO: 20059 - DNA, 348 bp, Zea mays
  Peptide Sequence Number=SeqID_63434
atggcaggaatgtactgcaacgcccgcgactgcctcaacaagagaatgcagccgccggcccgcaccgctgcacggatcctcctctcccccgtcgacaaggcgaaaggctcggcgaggaagaaggaccgggaaagggggataccccgaaagggatccttctccgcgaaggaaccgggctccgagccccccattactgatcaggggttcgaaggctggccccccgagggttcaacagtcgcctcagatcgcgtgggcccgacacccactactggtcaggggttcgaaggccagccccccgaagggctccatggccgcctcaggctactcgggctccgcgcccattactga

SEQ ID NO: 20060 - DNA, 162 bp, Zea mays
  Peptide Sequence Number=SeqID_63435
atggggttcggtgtatgcggctcgctctgccaaggtggtgatgagaatgatggttttgatattgactatggtaatggttgtccatgttgcaaccactgctcaggagaagatgaagccgtggaggaagatttccaggagttccaagattatgacgagttttag

SEQ ID NO: 20061 - DNA, 165 bp, Zea mays
  Peptide Sequence Number=SeqID_63436
atgtacagcgcgggttttgtttcgatcaaagctaagctcgtcgtgactgtggtcgagtgccctagtggccagggggtcacgctccacaagatcgtgacagccataggaggtggtgtatcgattgctaaggcgcagcgtctttggaaggctgtagtcaggccgtga

SEQ ID NO: 20062 - DNA, 558 bp, Zea mays
  Peptide Sequence Number=SeqID_63437
atggcggtagggttcaatcaaagtgcacgaggagctccacagggtgatgtagaggctatgtgcgcaaggaatcgaaaaatggttcagtggtttacccggtccatgcgctccggcggggtcacgaactccggcgagcgtgatctcactgctccggtggggctggtcctcggctcaagcttgggaaagcttcacggtctctcgaggaagctatccgagggctcggatcgagcggaggtgggcgggaatggtctgtccacggcgggcgccctcgggtggctctggtgggtcgtggggaggtcgtcggtgctacgggcgagctcaagaaagttaggcgcgtgctcgagtgggtttgacctctggttggcaagttatgaggaggtgaagttgggtctgtccgaccagacttgtctggtggaaaatgggcgccaaaacatgtcaaaccaattgggtttgctttcaaatttttctagagtgttcaaggggtctttaggcgccattttgttaattgggccctttggttttgaggtttggaaaaatgttaacatgcttgatctttga

SEQ ID NO: 20063 - DNA, 396 bp, Zea mays
  Peptide Sequence Number=SeqID_63438
atgacttctcacggatcctcggacggagggaacgcacagtcccacacggacggacttgcacgagaggtttttccccgtatcttgtgggaggtacttcagggagccggttacacgacgcctccccagtatgcggtgcagctgttcgagaagcaccgagtccaccgctctaggctgtctactcatcccattggcttgttccctgctgaaaaggaggacgacccaatgtggaaagaccgagtggagcatgccaaggatatatgggctctttacccagggcagactgctcacttgacggttgtgatgcatggatactctgtctcgtctacaagtgaggcaaggaaaggcaatgtctcatctaatggcattgttggaggctaccaagatcaccttggatag

SEQ ID NO: 20064 - DNA, 246 bp, Zea mays
  Peptide Sequence Number=SeqID_63439
atgacaaactcaacttccctatatggtggcatccctggtaactcttctaggaagacatccgaaaaatctctaaccacacggatgttgacaccaacaaacttcccatctactaagaatgtcgctagtctggtggcagtagttactgcaattccaacttcaaatctttctcctttagaactggatcctcagacacgtgctcgtctactcgccacaacacaaacaagcacagtatacagggaaaattaa

SEQ ID NO: 20065 - DNA, 600 bp, Zea mays
  Peptide Sequence Number=SeqID_63440
gaagaggaggatgaggaggaggaggtacaacaccatgaagaggaggaggtgcaggcccatgaggaggaggtcgcgggcataaatgctgaggcggatgacgataccatcgaggctcctgtcattcgacggaggggcactcggaagggccactttgtcctacctccaacagcgcctacacaatccgaagctcgggtactgatcatcccggttggtgatagctggtcgcacttcgcactagatccacatgctacatatggaacagctcaagacaccgtcaagcacgacttttggagatgctatcatgtggaatctaaggctcaagagcatgcagaccgagtattagagaaaaatgcgaagaaggtgtacaaggatgcattttccaatgctcgtctacaggttgtgaacgcatacatgaagcgccgagggcattctatcaacaactttcgacaatattcggatgtctatttgattgtagaccagtacatagaggcgggttgtggtagcagccgtagtcggcgctctagcatggaggatgctatgagggagcagcaagaaaggttttatgaagagatgcgacaacaacaaatgacattcctctaa

SEQ ID NO: 20066 - DNA, 444 bp, Zea mays
  Peptide Sequence Number=SeqID_63441
atggcgaaacagggcgggggtgcggaggaggagagcggcggcggcggagcgggggctggagaaatagaagggcgccggcgcgcgttgctcggtggtgacggcggaggtggattctgtgctgggagcctgggaaccatccgtagtttcttaaatgataacaagttacaaatgtaccttcggcttgaaggaaagcaaaaataccagcgtgaagcaaaaacaaaatgcacaatgcgtggttacaggagagtgcgtgaacagtacaggggtactgttcacctatttataggcacagttcacagcctgtatataattacatttataccctttacaatgaactacaataatgacacagaatatcatgggtctttaagtcatttcatctttaagtcggttcaccccttcgtcttgaaacatgtcactgtgccgaagctttatagtcgatag

SEQ ID NO: 20067 - DNA, 789 bp, Zea mays
  Peptide Sequence Number=SeqID_63442
atggaggctggaggcgcaggaagtggtttgaatggggcggtgcaggcaaaggggactggggctgatgatggctctgccaagcggctgccgccttgctgcgtcaaggccagagccgccgcgccggagtccgaggccaggtgccacgccaccgtcgtttcaggatggttcactgaaccgcgatcgcgctgtggcaaagccagcaaagttcagtattacaataacccgatgtggccaggagaggccaattctttgaaagtggagaagatcttataccaggggaaatcgctataccaagaagtcttagtcttcgagtcgtcgacctatggtaaagtccttgtgcttgatggtattgttcagttgactgacaaggatgaatgtgcataccaggaaatgattactcacctgccactttgctcaattccatcccctaaaaaaaaatccattggaagactttctgcagctctatctcagcatatgggatatttctttttacctgaatttgaatggaaactttggtggcttatgtccttaagaaatacttcgcaggttttggttattggtggtggtgatggaggtgtacttcgagaggtgtgcaaagatttcttcccacacttgtctgttggatttcaagatcctcgtgttcaacttcatgtcggcgatgctgtggagttcttgagaaatgctcctgaagggacatatgatgctatcattgttgattcgtcagatccaatagcttctagcttctggcggccagaagccccccagaagctgaaccaaacaggggcttag

SEQ ID NO: 20068 - DNA, 111 bp, Zea mays
  Peptide Sequence Number=SeqID_63443
atgacgtacttctttagtggcttcatcaatctgcctttgaaggtggtcgaaaagagttcaccagaggtgggcgccaatgttggggacttgttctcaaatgttatgagttaa

SEQ ID NO: 20069 - DNA, 354 bp, Zea mays
  Peptide Sequence Number=SeqID_63444
atgaagaaggtggtctactacgagactaactcttcgtcaccctccacgtccgacaccgagtcgtccactacttctaagcgccatgagcgcaagaagtataaatcagagaaaagagaagaagaaaaggacttggctggagcagccaagactcagctcggtctggcacaccggactgtccggtggtgcatcggacagtgtctggtgcgccaggctggcttccggcgaactggccgctctcgggagaatttggcgtcgtacgactataatttcaccggactgtccggtggtgcaccagactgtccgggcgagaggctccaagttgtggagattcctcgcaaaagggagaaagtctaa

SEQ ID NO: 20070 - DNA, 141 bp, Zea mays
  Peptide Sequence Number=SeqID_63445
atggagccgcctcggtctaccgctcgtgctcccttccctctacctcaagccttcactgactttgcgttgtcattaaagttgtactcaaaggagacaacaaacaacctaggcctgagtcttcttcaagtgctccagcaatga

SEQ ID NO: 20071 - DNA, 759 bp, Zea mays
  Peptide Sequence Number=SeqID_63446
atggcccgcgcccacgcttataaaaccctcccagacttagattgtacccttccgcgcaccctcaaacctcaccggagtcgagctcgtcgccgtttgcccgtgcgcagcgagtctgcggccgcccaatccctctgccaccgtagaccggtcggtggagccattcccaaccccgtccagccctcggagaagcctgtgcacacctccgtgaggctccccgagcaaggaatcggagtttgcttcgccggagaggccagtccacgctcgccggagctctcaaccccgccggagtacgtggaccgggtaaaccactccaccatccttcgattccttgtgcacacagttgctacgttacctcgtgaagctcaccgtgcccttggattgaaccagttcgccgtagtttggccggtacactcgccgccgacgagcacacccgcctgcacgcgtggaccgggcgattacggccatccccgacgtcaagccgtacctcgacgtgaccgccagagtctccccgagccaaccccacccttcgccggacctccctcgccgccgattgccctcctcacgcgacctgagacgaggtctcccattccggttatggtgggtacaagtgcggtcactgcacgacggccagtcggggtcagtgaggcattgtacgccaaggcggagatggttgctgggataacttggtcgtccaccttgccaccgggttggactgttgagtgggaccctgcctcggctgaggaggagcatgaggagtga

SEQ ID NO: 20072 - DNA, 687 bp, Zea mays
  Peptide Sequence Number=SeqID_63447
atgggtgcactggacagtccggtgcgccaccggacactgtccgattttgacgtgggtgcagatgttacttggactttggagcaatttagcaaggctatatgtgatcagcaggcttggaatgtcgatgatgaggtgcatttcagttactttgacaagtttgagaataagattgtcaaaatttatagtgacttagatttatctctaatgtttgctatgcatattggagaaaggtctgttgttatcgaaaatgatgtggttattggagcaagggataatcaggaaatacactatcaaccatcttatagccaaaaacatccaatgtttgactatgatgttgttaatgacaatgaggatgagaggttgtatccagatttggttcaaagccatccaatgttggcactagatcacagacctgcacaatttgagggcactgaccaagaagaggaagacgagaccattgacatggggatgtctgggcatgaaggtgatgaggacagattaatgatcgattatgacaaggacaatccttccctagcagaaggcaccatatttccattgatggttgattgtcggaatgcactcgctacttattgcattaagggtgaatatgactttgaaattgacaagagtgagccaagcaggttgagagtgcactgcacatatgagaggtgtagatggaggatttga

SEQ ID NO: 20073 - DNA, 525 bp, Zea mays
  Peptide Sequence Number=SeqID_63448
atggatcagtggagtcgccctacggcttcacggacgggacgcgtgacgcatgtccgctcgcgctcagcctcctgggtgctcgtcggtcgtcgtccggctagccgctggctgctagccatccaccggaccgagctgaacgtacgtcacgttacgcgctctggaaacttcgtccaacttccactgagcgctgaccaaagtttggctggggtggtgcgctctggaaacttcgtccaacttccattgcgtgctgaccaaagcttggccggggtggtgggcggtgcggcgacggacgcattcgacttcttggtcagggtcgctggcgtggtggtggcagctagggccatggtggacttctacgccatggctgcgtgtgcggccatggcacagagcaacgctaggccgagagcgctggcgcgcgccattgctgtggaagtgtgcggcgtatattgtgctgctttgtatcgggttctgggtgcttctgcctcagcggttgaagtggtagagacaggtgcagagagggattga

SEQ ID NO: 20074 - DNA, 1113 bp, Zea mays
  Peptide Sequence Number=SeqID_63449
atgtgggcggtggggcgcggcaggccatacagcgggacacggggcccatgtccgtgcggctcggggctgccgctggatggcagtgtcggcaagcagatgccagatactcctagatgcgtattgaatgttgatgtgggcacctgccctcaggcctcagctcccggcggtgcaccgccgccatgggagtatgggactatgggagacgcgagcgcgagatgtcatgtgccgtgggcacgcttcaatgcaactctaatgctagagatgttgcggggtaaacgaatgttgtttgttggagattctctgaaccgtgggcaatatgtatctttggtttgcctcctgcaccgaatcatccctgagagctccaagtcaatggagacagttgattcccttacagttttcaaagcaaaggactacaatgccaccattgagttctactgggctccctttctggccgagtcgaattcggatgatgctgttgtgcaccggatcgcggatcggatcgtaagagggacatccattgagaagcatgccaagttttggaagggggctgacatcttggtattcaacacctacctatggtggatgactggacaaaagatgaagattttgcggaactccttcgaagataaaagcaaggatatcatagagatggaaacggaggaagcctatgagatggtacttaatgctgtgctgaaatgggtggagagcaacatgaaccccaggacatcaagaacattctttgtcactatgtcacccacccacacaaggagcagagactggggcgatgatactgacgggaactgctacaaccagacagcccccatcgaggacctgtcctactgggggccagacaccagcaagggcctgatgcgcgtgatcggagaagtgttcagcgcgtctaagtccaggatccccgtgggggttgtgaacatcacccagctctccgagtacaggaaggacgcgcacacccagatatacaagaagcagtggaacccgctgaccccggagcaggtcgcggaccctaagagctacgcggactgcacgcactggtgcctgccggggctccaggacacgtggaacgagctgctctactccaagctctttttcccctga

SEQ ID NO: 20075 - DNA, 234 bp, Zea mays
  Peptide Sequence Number=SeqID_63450
atgggcccaatagtgtcaccaacacgccctattaaccgcgataagaaaaatgcaaggcataaagatgctgcagtggtgccgctagttaatcccatcaaatgcccaagatggccatccgagagcaatcatggctccttgttgctggaggttgatacttctgcactgcacatagggcatacctacaagaatcgggatattgtcacattttggagcaacaaaaactgttgtgtataa

SEQ ID NO: 20076 - DNA, 450 bp, Zea mays
  Peptide Sequence Number=SeqID_63451
atgggtaagaacaacaagcgcaagcgtgagccaactcctccatcggaggattttggtgactcggagtactcagaggaggagttctcctctgagtctgaggggtctccggctcccatccccctgcgtgagtcgtctgacgactcagatgactcccaggggctcgcggcggaggtctggacgtacatccgggccgtcgagcgctccgggctcgagggctcggatgagtcggagtactcctcggatgaggaggactcgtccgaggaggacggtggtggcgacggcgaggacgacgacgacaatgatgacgacaacgacgatgaaggtcgtggcggcggtgacggtgacggcagcggcaggggcagcaacaggggcggcagcagcggctgcagcaacaggggcggcagcggcggcggcggtagcagcaggggcagcaacagggccagtggctag

SEQ ID NO: 20077 - DNA, 735 bp, Zea mays
  Peptide Sequence Number=SeqID_63452
atggaaggttcgaaggggagtggaggtggtggggccggtgccgggtccgaaaagccaagcgccgagtcgaaccctagtctgaatctgccgccacctaccgcagcggatgtcgaagccacggatgacggtggcgccacggccgcggccgcggcagctgccgaggcggccaggcggccgttcactgccctcagccaggaggaggctgacctcgccctagcccgcgtcctgcaggagcaggagcgggcgtacatgttgctccggatgaacgggagcggtggcgagggcagcgactacgggagctctgatgcagggagctacgagtacgacgaagagggagatgactacgaagaggaactggagcaccacctccgcgtccaccaccacgaacacccctcgggcgatggtgatggagagggagagggcgagggcgccgaggggagcgattacgacgaagagtacgaggaggacgaagaaggggagccggaagtagatcccgcggagtttgagaacgatgaggcttatgcgcgtgcgctgcaggatgctgaggagcttgaggtcgccgcgcggcttatggctctcgctggtctcagcgattggcgaactgtggatgtggagcatgaggaggatcatgtgaatgacccacaggttgtgattcatctcattgttgatgaattttacctttggtggcttggtgctagggaagatcacttgagtttgcaattaatggtctcataa

SEQ ID NO: 20078 - DNA, 441 bp, Zea mays
  Peptide Sequence Number=SeqID_63453
atgggtccgccactgcggctgaccgcgccgatgcagatcgctgcggaggacagcggcagtggcacttcctcctcgtttgcgccgcccgcccaggactacacccaggatctgcccgacgagatcctcgcgctcgtcttcgtgtcgctctcgcccaccgaccgcaacgcctgctccctcgcctgctcgcgctggatggaggtcgacgccaccacacgccgctgcctctccctcgacgcctgcgccgcgctgggcaacgctgcttccgcgctgttcgcgcggttcacgaccatcatgaagttggcgctccgctgggcgcgcgggtcgggcgcggacagcctctccgataacagcgctgtggccgtcacgaagacttattatggcgtgggaggagggtggggcgaaggcatccatcgtggagacgggatctgcgtgctggtgtag

SEQ ID NO: 20079 - DNA, 153 bp, Zea mays
  Peptide Sequence Number=SeqID_63454
atggtttatgctttatttttctttcaggctttttaccctcttagttcaaaaagaataaaactgacatctgtgaaggagaagtcccttgggctcctcacccagaattttgtcaagctcttcttcaccatggaggttgagacaatctcactttga

SEQ ID NO: 20080 - DNA, 567 bp, Zea mays
  Peptide Sequence Number=SeqID_63455
atggatggaagcagttggtggtacgggaacgtccgcacgccgaacccagtcatgtcacaggcggcgtccatatccgctagccccgggctcaccatctcaacgaatcatgctcttgaaagcgagtcagactccgatagcgaatcgctgtatgaggtagagggagttccatacgagcgaggtaacagatccattgagacgaagcgaataagaaggatggtgtccaacagggagtctgcgcggcggtctaggaggaggaaacatgcacagttgtctgaccttgagtcacaggtaaagatggcagaggatatggtagcgagaagtgttgtatcgtgtggcctaggtgaccttggcctggcaccatacgtgaactcaaggaagatgtgtcaagctttgaatgtgctcacagggttggatttactagggagtgatgcgttcagtggtccaaccgcagggaggccgatcgcaagtgcaccagaatcatggtttgatgttgttgagcgaacctcaaaggacaataacaagacactacagaagctgaagtatgaggaaatagttgccaacatatga

SEQ ID NO: 20081 - DNA, 645 bp, Zea mays
  Peptide Sequence Number=SeqID_63456
atggttccacgccctggatccaccacctcctcctcctctccccataactgcgccgtttgcccccgccgtacacctccaccgcgcccccgtctccggcgtcgggagcgagacccccacggtggcagtgaggtccgggagcgagacccccacggcgtccttgtccccgtctgcgtccccgtccccatccgcgcccgggacgcccacagccgcggtcacgtctccgacgccggttgcggggcccaggctcgcgacggggtttacggagaaatcgccgcttcacctcgccgcctcccccaccgcgcgttcgcaagagccaagagtgggcgtctagattcctacaccatgcccccgctcgcgcaatcctcgctcccacggaaccctaaccaagaatccgactccgcgctagacgaatcggacggaaggaagacgagaaggccccgaggcgagcgggggaacaaagaagaagatgaaggtccgtgcggcggtgaagcgcctgtgccggttctgcaaggtggtgaagcgtcggggaatcgtcttcgtcaaatgcacggccaacgccaagcacaagaagcgccagggcttctccaccatcgccgaagcagccgctgtctcgtgcgttcacctgcctccgccgccgcccgctag

SEQ ID NO: 20082 - DNA, 144 bp, Zea mays
  Peptide Sequence Number=SeqID_63457
atgttcggattgcaggtggcaatgagactgatggttcttggttttgactctggtaatggttgtcagcattgcaaccactgctcaggagaagatgaagccgtggaaggagacttccaggagttccaagactacgacgagttctag

SEQ ID NO: 20083 - DNA, 378 bp, Zea mays
  Peptide Sequence Number=SeqID_63458
atgaggaaggatgagaaaagggaagtaacacctgaatttgtgaatatgagcaaagaaattttatacccccaaattcagggtgttacaagaatggctcactggattgctctgtccacgcgctgtggcgggcgaccgaagtccggcgagggtggatccgcctctctggtgaggcaatgcctcgactcaagcttggagaagcttcacgacttcacggggaagcggtccaggggctgggtgaggctgggggtcaacagaaggggctggccacaatggccatgctcgggaagtgatggcgggcggtggtgcttgctttccacggtgaactccggtgatctctggctggagcggggctttgggtgcgcgagtgcaaacggctaa

SEQ ID NO: 20084 - DNA, 180 bp, Zea mays
  Peptide Sequence Number=SeqID_63459
atgggagacccagtctcaggacaagtgaggggaaaagtccacgcccggcttcactcagggcttgccttcaatagctggggctgcggggagatcctcgatggcagtctcgggagcttgctcctggtcttcctcgtggacaatgtgggggatagatatcccccgggtccactaaaagagtaa

SEQ ID NO: 20085 - DNA, 786 bp, Zea mays
  Peptide Sequence Number=SeqID_63460
atggctcgtcttagacacactgcacgtaagtcggtgattcctttcctgccgtctcgacttgcggagcgtcctctgcaccgcaccgtgtctggtcagtcgagtcacctggagaggctgcaccaccgcctgcgtgaggagcaggaacgccggcgccagcacagagagcagcagggctcttcctccccaccccagcgagaggtggagtctgtgaggccccgttcctctgtggcccagctggaggcgccccctgcaccaccgcgggacgccccggctgttggaggagctactggaggagaccccgacgacgacgactcagaccacagcacggagtcttctgagccgcaggaggcggaaggatgggtcgcccgacccatcacccgtgacgccgctcgcggttgtcacttccacgacgcactcgacaccttgctgcgccaggctttcgaccggcacacctggtcgatcgagtatcgttgtgtagtctaccagcacagtcgcgggagcacagagagtgtggttgtctcacctgttggtgaggctaaccctaggttgagcagcacagtcaacctagtcgcagtgcttaacattgagctggatcactccctggacgagctaagcagggctcgaacggagattgcggagttgcgtgctgagttggcagagcgccatcaccaggagggtggttctcccgctcctgttgggactcagcacccttaccgctcaccgccacgtggtcatcacacttatggttcccctgtctgtaagaccaggatagatctagatccttag

SEQ ID NO: 20086 - DNA, 396 bp, Zea mays
  Peptide Sequence Number=SeqID_63461
atggagatttttcctgaggtcgaggctgggtcggcatatggatatgcagtcgtgcttggagtggttgaaatagcagtcggagtggtctcctgcgagatttgcgcgagggttggtggcattgatgctgtcggcgtttcgaccccgggggggtccctggaccgacgagtaaatttgtcgctgcgtgtcccagcccagatgagttggcgcgagatggaacataagggggaaacgcggctcgtgttatctcgcactaggggggataaggtgtcaggcgatcctcgcattgaatgcgcctgcgatacggtcggttggagaggcgatttggccgaggttgcttctcgacgaagcctgcccgagttgggcctcgggcgtgccgagggtgcgcccactgcctga

SEQ ID NO: 20087 - DNA, 900 bp, Zea mays
  Peptide Sequence Number=SeqID_63462
atggctaccgcccgggggatcaatccctttttaaaggcggctctccccactcgcatcctcaagcgtcacgggcacagtggtcgcagaggtgctgcagggtcctcccccttcgacatggaggcggggtaccactcgtcactcaagttgactcgaaacggaagaagccaaaccgccgcacgcggagcgtgtaaccgccccgcggttaaagcactcctccattctcgccgaaaccagtggtcgaaagggcgaaccgccatgcaggtggtgtgcaaccgcaccacgagggcgcaccccttcggcttcatcgcatccagcatggaggcccaggcccacacgtcatgtgactggcgcgtcggttactacgtgcaagaaaccgcaccaccacttgcgccaatgtcgcgccttctcgactgcggaaccggtgccgcgactcgaggaagccttgcgcatgacccaacagtgccaatcgagcacaacgatcacaggtcagtcagtcgtgggaggaggcgcgacgggaccgggaaaggggatatttcgaaagggatccttctccgtgaaggaagcgggaaccgagccctcctactgattaggggttcgaaggatggcccctcgaaagggttcgacagccgcccagagcacttgggcttcaagcccattactgatcaggggttcgaaggctgccccctcagaagggttcgacagccgccccagagcactcgggctccgcgcccactactgattaggggttcaaaggctggcccctcggaagggttcgacagccgccccagagcacgcagagtgagggatgactctgggtatgtccgttacatggccaaggctcgggctactctcccgaggtaccctaggacatttctgagaccagcaggagcgattttgtaa

SEQ ID NO: 20088 - DNA, 453 bp, Zea mays
  Peptide Sequence Number=SeqID_63463
atgatgaccaccagcttcgtggtggggagaagcaagccgggttgcggcctctgccccgccctcagcttcaaggatgttcatcatccaggctggggaggggggtgcaccgagttgggccctgcctccgcgtgggctggcgacccgcttcgtcctccgacatttaggggagaagggcatactccagctctgcggaggaggcgtcctctagccatgcgggggaaggcgaactgctgctgcttggacaaggtgcagctgtccgtcctccacctcgggcgacgatcgtgccgcgcgcgggccggccacgtccaggtcctccctatgccgtcggctgcacaacgcgtcgtacgccgcaagggcggtactcgtgttctgggacggtcccgttcttgttctcgtggcaagaacgggagtgaggacctactggtgcgctttggggcggccgccgctcgctag

SEQ ID NO: 20089 - DNA, 264 bp, Zea mays
  Peptide Sequence Number=SeqID_63464
atggcgcggtcgatccgagcccaaggtcgggcgaggcggggacttctcctgaggccgaggccggggtcgggtgaggacgcgattcctcccgaggccgaggttgaggccgagccctggggtagaaataatattgaattacatgtgtaccttcagcttgacagaaggcacaggacacagcctatgagaatttacaattatgccctttacatttactattggcttatagaaaaatctatgaggactgaacaaccttttcccttttaa

SEQ ID NO: 20090 - DNA, 164 bp, Zea mays
  Peptide Sequence Number=SeqID_63465
attgtaatctcgctgactgggagtacgtcctcattccggatcaaggagttgctcaggaggtagtccaggagccagcaccagagcctgctacggaggatctacctgccccagctttcgaaggattgtattgtgcacttaagtgtaggagttgcctgaaaccatag

SEQ ID NO: 20091 - DNA, 261 bp, Zea mays
  Peptide Sequence Number=SeqID_63466
atggacacttgtctcctggggtggtccggagcccgtgtagccgctcagtctggttccgtactgtgggcctgcacgctccaccactctgcgacagagacaaccgatcaagccaaggatggaggcaagaagagcttcgaggtattaagtgcacgggagaaggtcaaggagactaggaacccaaagccaggggtgaagaagaagacttgcaaagtcaaggttgatcgagttaagagttatggtgcatcaaggatcactacataa

SEQ ID NO: 20092 - DNA, 2588 bp, Zea mays
  Peptide Sequence Number=SeqID_63467
cctccgtcgcagctttaactcttcagagagctaacagtggggccaggcacagcaaagactatgtccaagcaaggaaaaggaaggataaggctaacaattctgaacatggggagaaagaagaagagaaggaagaggttaaaacaatcagcggcataatcaactcagcccgctcgctaggcgatgacgacgatgatatgctttccgagatcgaaagcctcctatcaggagacattgacatccctataccaagcgatcgcttcgacgttaatggacggtcacggtacaacaacgcttacatggctaacgaggcctctgagatagagaagctgcgcagcctggtgagggaaatggaagagagagaggcgaagcttgagggcgagctgctagagtactatggaatgaaggaaatggagactgacatcgccgaactgcaaaagcagctcaagatcaagacagcggagatcaacatgctcaacgacaccataaactcactgcaggcggagcggaagaagctgcaagatgacgttgcatgtggagaggttgccaataaagagcttgaagcggctagaggcaagatcaaggagctgcagcggcagatacagctagaagcaggccagacaaagggtcagctgatgttgctgaaacaacaggtcatcggattgaaggccaaggaggaagaggcggggaaaaaggaagctgaggttcaacggaagctgaagaagctcagggagttggaagtggaggtacttgagctaaggaggaagaacaaggagttgttgtatgagaagagagatctcattgtgaagttggatgcagctgaagggaaaataactgagagtgatgtagttgccaatgcaagagaagagataaacaagctgaggcatacaaatgaggacctcacaaagcaagtggaaggcctacagatgaacaggttcagtgaagtagaggagttggtatacctgcgctgggtcaatgcctgtctgagattcgagctccgcaattatcagactccatcagggaaggtctctgcacgtgatcttaacaggacactgagccccaaatcacaggagagggccaaacaactgatgttggagtacgcaggatctgaacggggtcagggtgacacagaccttgagagtgttgtttcttcaatgccttcttcacctggaagcgaagactttgacaacatgtcaattgacagttcttccagcagatacagcttcctaagcaaaaggtctaatctgatgcaaaaattcaaaaggtggggaaggagcaaggatgacagcagtagtttagcctcctccatcagtggctctccaaggaggaaaccaaagggcccactggaagctctaatgctaaaaaacgctggagatggtacagccataacaacatacggaaagagggatcccaatgatgtcttggatgacgaaaatgtcgcgtcctcattccaattgatgtccaagacagttgaaggttttgctgatgagaagtatcctgcttacaaagataggcacaaacttgcaactgaacgggagaaggctataaaagagaaggctgggcaagcaagagcacaaaggtttggtggtggccacagttcagctctaatttcctctccaaaaggtgcactccctccaaaacttgctcaaattaaggagagatcccctgcagctaatgctgaatccagtgagcaatccagtgacaaccaaaacaacaccctggtggtgagccagatgaagcttgccaacgttgagaagagagcaacaagagttcccagaccacctccccctcgatcaaccgctgcttcaggggctaccagtattgcaagtggagtacaaacgccacgggcaccaggtgcaccacctcctccaccaccacctccagggaaagttggtggcccaccgccaccaccgccacctccaggtgctctaccaaggaaccttggcgggggtgacaaggtacaccgtgcgccggagattgtagagttctatcaaagtctcatgaagcgtgaagcaaaaagggagacatctttagggtcaatatcatccaatgtatctgatgccagaagtaatatgattggagagattgagaacagatcaacattcctcttagctgtaaaagctgatgtggagacacaaggagaatttgttgaatctctagcaaatgaggtccgagcagcaagcttcataaatattgatgacgttgttgcatttgtaaattggttggatgaggagttgtctttcttgagtgtctatgcactactccgtacaagagacatgaccgtctcacgctacaaggagtacgggatcccatttgactggctgtcagattctggagtagttggcaagatcaaagtggcatctgtccagcttgcaaacaagtatatgaagagggttgcctcagaacttgatgcattagaaggcactgagaaagagcccaatagagagtttttgcttctccagggtgtgaggttcgctttccgggttcatcagtttgctgggggctttgatgcagaaagcatgaaagcttttgaagagctaagaagcaagatgaccacacaggcatctgctccaccaatatctcaaggctga

SEQ ID NO: 20093 - DNA, 558 bp, Zea mays
  Peptide Sequence Number=SeqID_63468
atggttatatactatgtactgtactgccatcgtagggcagcttgggaagctcagctgatctgtggctggaaatggaggtgccaggtcaatgtgtgttcacgcgatgtgatatctggctacgtgaacgtgaccgcgaggcttgagttctttcttgccggcgggcgctacgctggagtcgcccgcgttgaaaaggtcctgctcggcgggtcgtggttctttctttggagccgccaaaccttcactgtttcttcgctcagcaaggtccgtgtcggcggacaaactgacggacagaatcgcccgtggggcccttccgtcagttactcagttcggaaaggaagctggaagccaaaccaaggagagggagggggcgaggaccgtgccgaacaggattcgactgggctccgagtttttgctgacaaaactgcttatgggctcaccctcacgggagattttcaaagtacttgggccggccgaggacgatggatcccgcgcagtcgaatcctatccaggcctcgtgggtctactttacgtctacgaatttttggtcatatatgctga

SEQ ID NO: 20094 - DNA, 495 bp, Zea mays
  Peptide Sequence Number=SeqID_63469
atggccagcctcgtgtcgcagccgcgccacagcatccagacgtactgggcgcggaggagctacctgcgcctgcgctcgccgtcgcggcgcctcagggtggcccgcttgggtgccggcagcggcagggcagcagcgggatccgcttccgccgcgtcgacgacgacgtcgtcgtggaaggccagcagggtggcgcgccgcgccgcggcgttgctggcggcgccggggctcctgctcgcgcggctccgcgacgcgtacgtcgacgccatggtggcgctgggcgggtccggcggcgccgtgcggccctgcgccgcgctggcccggtcgcgcagcggcgccgaggccgggctgtgggacaggcgggtgccgctggcgcgccgggggagcgggcgcgcgagccggcggggcggcggcgccgccgacttcgagcgacgtatgatggcgcacatatacagcgtggtcgtcacgccggagctgccgtgcgccgccagggcttga

SEQ ID NO: 20095 - DNA, 1530 bp, Zea mays
  Peptide Sequence Number=SeqID_63470
atggccgacgacgacccaagaacgacggcggcggcgagcagcatgccggacttcaagcagtcggtaaagctcaagtacgtgaagctggggtaccaccacctgatcagccacggcgcgtacctgctgctggccccgctgccggggctcgtggcggcgcacctctccaccttcacggcgcgggacctggcggagctgtggcagagcctgcagtacaacctggcgtccgtgctcgtcgcgaccacggcgctggtggtcacggcaaccgcgtacgcgctgacgcggccgcggcccgtgtacctggtggacttcgcgtgctacaggccccgcgacgagcgcaggtgcagccgcgcgcggttcatgaactgcaccgagtcgctcggcaccttcacgccggagaacgtggagttccagcgccggatcatcgagcggtcggggctgggcgaggacacgtacctcccggaggcggtgctcaacatcccgcccaacccgtccatggccagcgcgcgggaggaggccgagatggtcatgttcggcgcgctggacgagctgttcgccaagaccggggtgcggcccaaggagatcggcgtgctggtggtgaactgcagcctcttcaacccgacgccgtcgctgtccgccatggtcgtcaaccactacaggctccggggcaacgtcgcgagctacaacctcggcggcatgggctgcagcgcggggatcatcgccgtggacctcgccagggacctgctgcagtgccaccggggcacctacgccgtggtggtcagcacggagaacatcaccctcaactggtacctgggcaacgaccgctccatgctggtgtccaactgcctgttccgcatgggcggcgcggcgctcctgctgtcgaaccgcggctcggcgcggcgccggtccaagtaccagctggtgcacacggtgcgcacgcacagggccgccgacgaccgctgcttcggctgcgtgaggcagcgggaggacggggagggtagggtgggcgtgtcgctgtccagggagctgatggccgtggccggggacgcgctcaagaccaacatcacgacgctgggcccgctggtgctgcccatgtcggagcagctgctcttcttcgccacgctggtggcgcgcacggtgctgaagcgcaaggtgaagccctacatcccggacttcaagctggcgttcgagcacttctgcatccacgcgggcgggcgggcggtgctggacgagctggagaagaacctcaggctcaccgactggcacatggagccgtccaggatgacgctgcaccgcttcggcaacacctccagcagctcgctctggtacgagctcgcctacgccgaggccaagggccggatcaagaagggcgaccgcacctggcagatcgccttcggctccggattcaagtgcaacagcgccgtgtggaaggcgctccggtcggtgaacccggccaaggagaagcggggcaacccctggatggacgacatcgataggtaccccgtcgccgtccccaaggtgtcagccatctga

SEQ ID NO: 20096 - DNA, 285 bp, Zea mays
  Peptide Sequence Number=SeqID_63471
atgagcaagaacacaagagacacaagatttatctcgaggttcggtcacaccaccaaggtgccctacttcctcgttgaggcgcccacaaagagccgggtctctttcaaccctaatcctccctttgccgaccacaaaggtcaagctcacacactaatctttgctcaaacgagcgggagagaaaaccccagctcaactgcccggaggcaagttcagctggtgtatggtcaaagaggttcacagctgaagttgagaaagctcaactcagctgaagttcagctcagctga

SEQ ID NO: 20097 - DNA, 162 bp, Zea mays
  Peptide Sequence Number=SeqID_63472
atgtcgtgcgcgttcgacgactactatatcaaggattgtggcatcatctcggcgccggagaaggtgaagacgatgaagtgtgtggagatatgtgggatagtgttcctaactaggcagaaacgttgtacaaagggcgcggtggatagggctgctactgaatag

SEQ ID NO: 20098 - DNA, 435 bp, Zea mays
  Peptide Sequence Number=SeqID_63473
atgaggaataggatcatcgtcgctaggagcgggatcaacaggactcttccccctcgcctcaacaggaggtggagtctaggagaggcctactcagagcattattctgtcactgagcgggacactgccgaggcagccatgcaggatgttgcacgccgtgcactttcgcaatactgttcgttgttcagtggggcggctgacggtctcgacctgaaattgagcagcatggtcaacctggtcgtcgtgctcaacaccgagctagaccaagcccttaatgagttgggcaaggctcgagtggagatcacggaactgcgtgctgagcgcgcggagtgccgccatccggaggatggttccctctcccctgttgggactcagcacccttacctcttgtcgccccgtggtcgttatgcttatggcaccactgactgcatgacctag

SEQ ID NO: 20099 - DNA, 390 bp, Zea mays
  Peptide Sequence Number=SeqID_63474
atggggaagcctgtcccatcactcctcgtgctcctcctcagccgagcaatcaacaacttttgccaagtcatcacatttccacttgttactcaatgtagcagcatggatcaagcagtctcattagctgcgagaagcagacgattcgaatcgagtttttatccttgcaagatcagggctcaccgccttagcgtacaatgcctcactgaccccgactgccgtcgtgcagtgaccacacttgtacccaccataaccggaatgggagaccacgccttaggtcacgtgaggggatatgtctgcgggcaggttcactcaggtactaggcttaccgatttaccatatttctcggcatgtgtttggctgtcctataaatttgaggtggatactgattaa

SEQ ID NO: 20100 - DNA, 327 bp, Zea mays
  Peptide Sequence Number=SeqID_63475
atggtgaaggccgaatgtgcagggtcgggcacggtcgcagcgaggcatcgcgacctcaatgaagctcacgagatcgacgcgcgatgctcgagaccaactgatgcaattcttgaggatctcctagacctgtgggttaggacccacacgcgcttttgttgcgccactttgatcttgttggttgatgttgatcgcattgtcttcattgggaggttggaggatgccgaccggacaggtgcaagagggcagggtatagatagaaaaggggaaactgctctaaggccatcgaaagacaagaggaaagataagacatgcaggataggggcatga

SEQ ID NO: 20101 - DNA, 738 bp, Zea mays
  Peptide Sequence Number=SeqID_63476
atgagtctgcacgccctgctacccgtcggatcaaggatccacggcccacagtatgatcgcacgcggatcccatcagagccccaggatgttgatctaacggaggacgaggtgatccgttcggatgggtttcttaccgggattagaggcggcgagcacccagtccgcggcgtgaggcgggtctgcggcggcggagttgctccgtcgagcaattgcctagacgtcgaaggtccgcacgccaaattgatggtttccggggctccacgaaataatgacgctgccccagagtaccacaccgaagtccaggcaacccagccgtgcgcgcgcgtcggcagcggactgcccgcaccggtggttgggatcgtcgcgcatgccacggagaagatgacaccagctgcgcaacgtagagggtccaccgcggcgcgcgagcggaacaaggggaaggagactggcgagatccgtggaggaagcgcgccagatggggagtccgcgcgggggtcacgccatggttcacggagctcggaaatcctgggcgccgagcgggttgttggggaaggggatgagcctgacgagtgggtcccacctggaagtgccacgatcggaaaagaaaaggaagaggagcagattgggctggcgcggtggaaaagtagtgttgggccgaggcgcgcgagaattcggcccaagatcacctggttcaacctctacttctgcatgatgggcatgtccccggttgatagatag

SEQ ID NO: 20102 - DNA, 357 bp, Zea mays
  Peptide Sequence Number=SeqID_63477
atgggtgctactgtcacaaaagaatgcgtggctccagtatcaataacatatttgcagaatgagattcgactgagaacgtacctagtgccactcctggggtctcctgaactgtgtcgacctccaggtggttcacctttccatattgaacatggggttttccatggtagcttgctccttactgaggtcaggaaagtgaggtgcctggttgttgtctctgatactggtttcctgccggttgattgttctggcgatactgctgctgctgctgagggaactacttctagaaatgatgttgatgtagacgttgattctggtgctggtgttggtgctggtgtccctgagggtggctctgcttaa

SEQ ID NO: 20103 - DNA, 321 bp, Zea mays
  Peptide Sequence Number=SeqID_63478
atgacaccagctacgcaacgtagatggtccaccgcggcgcgcgagcggaacaaggggaaggagactggcgagatccgtggaggaagcgcgccagatggggagtccgcgcgggggtcacgccatggttcacggagctcggaaatcctgggtgccgagcgggttgttggggaaggggatgagcctgacgagtgggtcccacctggaagtgccacgaccggaaaagaaaaggaagaggagcagagtgggctagcgcggtggaaaagtagtgttgggccgaggcgcgcgagaattcggcccaaggaacatttttccaatgtctga

SEQ ID NO: 20104 - DNA, 501 bp, Zea mays
  Peptide Sequence Number=SeqID_63479
atggggactcacatacaagagacagccctaggtgctaggaggaggcctgcgccggatttttgccaagattcgcacgcttgcgatctcggcgagctgttgaacaagggcagaataacacttccacgtgttcgacgcgctctgagcgcgccagagcacgcccagcgcccgaccccgcgcgccccgcgccgcgccaagccgcgcccgtgtctcctgctcgcgcccacgcctataaagcccatcgaagcttcaaccgtactcccccgcgtgctctcgacctcactggagccagagatcaccggcgtttgccctgcaaacggcgtgcccgcggccacccgatcccccgccaccgtagaccggccagcagagcctctcccagccgcgcccgaccctcgaagttccctggaggacatggttgctggagtgacttggccgtccatcttgccactgagttggacagtcgagtgggaccctacctcggctgaggaggagcacgaggagtga

SEQ ID NO: 20105 - DNA, 399 bp, Zea mays
  Peptide Sequence Number=SeqID_63480
atggataagacattctgtcatggccatggatggagccttgagcgcctcgatgctggccatgagcccctcgagatccttgtcggaggcgcgggcgtcgaggaggaggcgaaggacaaaggtgagggaggggacaaagggagggggtctgttgcagcagggaaggggatgaggaggcaggggcaacacgcgggggcaggcgcaggcgcaggcgagggtcgaattggatggaggcaaggatggtggacgtttggcgcgagccaggagcgcggaatgtgcggcggtgcgtggagcacaagatatgtggggtttgcggccgatgatggcgcggagggggagcgtcggtttagatgggaaaatgggtcgtgcctagcgggtcgacctgaggcacgacccatttaa

SEQ ID NO: 20106 - DNA, 819 bp, Zea mays
  Peptide Sequence Number=SeqID_63481
atggctccgttctacttggctcctcaaccaaacactaccttagcgtcttcgaattctccgaggcaccgcgaaacattatccagtgcagagcgtacatattccgctgcgtctagcgaggtagcagacatcgacgacgacgacaggacaggctatacttttaccacatctgctgggttcttgatcgagctacggcggcctatacggatgaacaagaagaagcggcggcggcggcggcagcagcagggtgggaggcctgtgctggtgacgttctacgtgacacagccaagggaccgcggcggctccacggcgtcgtcgtcgtcgcatcaccaccaccacaacaggcaggagcgtcacgatgaccaccaccgtcgctcgcatggcggtagtggtggtcgtcctggcatgcagcggcggcgacggaacgacggcaaagcccagagcggtgaccggcgggcggacctgctcgagtactcgcggcagctgagggcgttggcgcggcagacggcgtcggcgaccacgcctgccgctgttggtgttcatagcgaagagcagcagggagctccagctgtgaatcatcggctggggcgcgcgatgagccagcagcagcaggtccgcccgcgttgcttcggtggtgacggctggagctggaagaaggtgctcgtgctcgtcctcccttcccacagcgagagcaggcgtccaagaaggagcaaccgtgatgacagcgaaaagaacgtcaagatcaatcagacgggccgggcggctgcgtcgtcgttgctggtcggcaagctgacggtgggtacaaggcgcaataatatataa

SEQ ID NO: 20107 - DNA, 288 bp, Zea mays
  Peptide Sequence Number=SeqID_63482
atgactagggcaatgaacggagaaatagaggcgcggggaggttgcttaccacaagcgcaaacccaggagcgcctggaggacggcggggaggcggtgaagtcccaggtcgacggcggcggactccggctgcacgggaaacactccggtgagcatggaccgggcaaaccagaggggctgggggcgaaccgaggggtgtcccgagttgctgacggtgaggcggagctcaccagggcaatggacgcaacgcaggcacaacgagagtcgcggaacggcggtggtccctggtga

SEQ ID NO: 20108 - DNA, 249 bp, Zea mays
  Peptide Sequence Number=SeqID_63483
atggggaagcctgtcccatcactcctcgtgctcctcctcagccgagtgaccgcacttgtacccaccataaccggaatgggagaccacgtctcaggtcgcgtgaggggatatgtctgcgggcaggttcactcagcttcggcgcttgccaatgagaagatcttccgaaggtgttctctttctttaggatcttcggctatgaagcatatccccaacagtagccccttcgcggtgctagatcgtttttcgtaa

SEQ ID NO: 20109 - DNA, 915 bp, Zea mays
  Peptide Sequence Number=SeqID_63484
atgaacggcgccgcggcaccggagcgctcgccctcaccctcgcccccgcctccggcccaggcccaggcccaggcgccgccgtcgccctctccggctcagccgctcgagtggaggttctcccaggtgttcggtgagcgcagcgccggggaggaagtccaggaagttgacatcatctcagcaatagagttcaataaatcaggacatcatcttgccactggagacagaggtggacgagttgttttatttgaaaggaccgatgtcaaagatcatgcttgtagaaaagatgctgagaaagctgatcattctatcagcaggcatcctgaatttcgctacaaaactgagtttcaaagccacgaaccagagtttgattatcttaagagcttggaaattgaagagaagattaaccaaataaaatggtgtcaagcagcaaatggtgcattgtatcttctatccacaaatgacaaaacgataaagttttggaaggtccaagaaaagaaggtaaaaaagctatctgagatgaatttggaccgttcagctgctcctgcaaatggtagtcctggtggcgtgggatatctgagcccatctctctcaaatggcaatgctctaaaacctggcaggcttcctttgcttcgcctgcctgtggttacaagccaagaaacaagtcttgccacaagttgccgaagagtatatgctcatgcacatgactaccatataaattcgatatcaaataacagtgatggtgagacatttatatcagctgatgatttgcggataaatctatggaatttggaaatcagcaatcaaagtttcaatattattgatgttaagcctacaaacatggaagatctcaccggtataacttctaaacctacaaactttcttatctgtgctgattatgtgtgtgataggtcatag

SEQ ID NO: 20110 - DNA, 552 bp, Zea mays
  Peptide Sequence Number=SeqID_63485
atgggcgacaccgtgctactgcccgccccccgtcatccccttctctgtcatcccctcgatctggcgcacgcgctcgtgttcacggtcggcgttgtccgggtaaggctcgcggtcgaagggagcgaggagggcgcgttgagggagggcgcctgcgggcgaggcggtggtcgaggagaggaggaaggaggaggggtcgagggtggagaccgggtggaggcgcgcgagcgcgaggagctcggcctcgcggttgcggggctcgacctcgcgctccatggaggagagcacctcctcggcctggcgcgcgacccagcggctgaggaggcgcgactccctcctccgcctgcgcaccgccgacgactcagcctcgccgtattcacgcggaggacgccctggatggtggatccgaggcgttccatggcctgccctatggcgtcaaggttcgagagatgtcgaggggctgtacctcgccagcgatttggacaagcggctattgatctacttccccttcatgcaagtggtcaagctacattccgtgctattcaaaggccctaa

SEQ ID NO: 20111 - DNA, 303 bp, Zea mays
  Peptide Sequence Number=SeqID_63486
atgggggtcgacatcccctcctccccctctgcaccatggccggttccttgctcccctcggaacccagcagggagagcaggcaccattctcccagcacgcatggagctccctaggctccctcgcttggagctcgaccaaggccgagcactccactgttgcagccctatcgacgctcgccgggtgtttgctgtttttggcgcagacccgctcgcgacgtcgtcgaccctcgccaccgtcaaagtcgcgctccgcgccttgcagttcgacgaaatgccgagccatgtggacaatccatgcggctaa

SEQ ID NO: 20112 - DNA, 186 bp, Zea mays
  Peptide Sequence Number=SeqID_63487
ggagagcaggcgccattctcccagcacgcatggagctccctaggctccctcgcttggagctcgaccaaggccgagcactccactgttgcagccccgtcgacgctcgccgggtccaccgtcaaagtcgcgctccgcgccttgcagttcgacgaaatgccgagccatgtggacagtccatgcggctaa

SEQ ID NO: 20113 - DNA, 156 bp, Zea mays
  Peptide Sequence Number=SeqID_63488
atgcaggtggcgtgcaaccgcaccacggaggcgcaccccttcggcttcatcacatccagcatggaggcccaggcccacacgtcatggaccgggaaaggggatattttgaaagggatccttctcacgaaggaagcgggccccgagccctcctactga

SEQ ID NO: 20114 - DNA, 774 bp, Zea mays
  Peptide Sequence Number=SeqID_63489
atgggtcggcgcgagacgggacacaagggggaaaatacccgaggtcgggcgaggcagagaccgtctttcggagtcgaggttgagtccgagccctggggtcgggcgaggcggagaccgtcttccgaggtcgaggtggagtccgagccctggggtcgggcgaggcgaagaccgtcttccggagtcgaggttgagtccgagccctggggtcgggcgaggcggagaccgtcttccggagtcgaggttgagtccgagccctggggtcgggcgaggcggagaccgtcttccggagtcgaggttgagtccgagccctggggtcggacgaggcggagcttcctatggcgctcgaggctggacttggctgctgtcagcctcaccctggcgggtggcacaacagtcggagcagggcaagcggcgctgttttcctgtcagctttgtgctgatgggggttaccagctgagattaggagtcttgggggtacccctaattatggtccccgacaatactgctcttcatcagttcgaagctcaggacgcagcagttgatgacgatgatgatgattttgggattccacctctgcctcctatgcctccacgctcacatgattatgaggctgggagttctcgtgctacccctgctgcccctcctgccattgacccttctcttgctttgatcctccagacacttactcagcagcaggctcacttggcagccgagcagacccgtcaggcagcagcccaccagcagttgtccgagagaatgctctcaatgttttag

SEQ ID NO: 20115 - DNA, 636 bp, Zea mays
  Peptide Sequence Number=SeqID_63490
atggtgacctccagcttgatggtgggggaaagcgagccgggctgcggcctctgcccctccctcagcctcaaggattttcatcaccagggctggggaggggactgcaccgtgcctggctctcggacgcgagtggcttcggagccgctcgcggcgccggcgtctgccacagcagctggaagaggttcttccgccggcgagatagccagggttggccacggaccgacctccaactctacggccttctgcccgtccttgcctcacgagtttgggcatgggcgggggcctcctggaagcagcatccgccctgaggtcagtgctgtcgctgtccggccccccggagcagaagtcgtcgtcgtcactgctgctggagcaggtgacggcgcgccgttcgtcggtcttctgttgctccgcaggctctcccccatggagtggggttactcgtctgttgattatctgaaccgcttcaccaagcatgagtcgccccgtgtcaaggtgacgagtgagagtggggatcctcggatcgcatcgccgcccgaggctaggtcggacctcgccgaaggtgttgtcgatgccgagggtgctactgcccccttccagcgtcaagacccgagcctgcaggatcagagtgtcttgtag

SEQ ID NO: 20116 - DNA, 849 bp, Zea mays
  Peptide Sequence Number=SeqID_63491
atgaactccacatcttctcagcgtggttaccctgccaagaggtggtgtgcagcgaacatgagctccacatctatgcgtcactctgcatggaagtctgagccctggactcaccttacccacaaacagagacgaccacaatggattgcttataatccaaggacaatgaggcctccaccacttagcactgataccaattctatgaagattctgtcctggaacgttaatggactgcaagctattgtacagtcagggttttctgcagatgaattggttgccagagagaactttgacgtcttatgtcttcaagagacacacttggaggcaagttgttttggtgtttccattgctgctccctcatatacagcttcgtcctgggcagtgggatgctttgatgtgtacatggggtttctaaataatccaatatatcatgatatggagcgcaatgttgacctttttaaaaacctggtacatgaatatgattacacctgttggtcatgcagtgttgcaaggcttggttattcaggaactgctgttatatcacgggtacaaccaatctcagttcaatatgggcttggcataccagagcatgatcaggaaggcaggcttattaccttggagtttgatgatttttacttggtcaatgcttatgtccctaaattctgggccgtggtttacgtagactggatatctaattttgttctgttgcttcttggtcttcagaattacaggatcaatgattgggatccatgctttagcgacttcataaagaaactggaatgttctaaaccagtaattgttgctggggatctaaactgtgctcgtcaaagtattgacattcacaatcctcaa

SEQ ID NO: 20117 - DNA, 417 bp, Zea mays
  Peptide Sequence Number=SeqID_63492
atgagggcgcccacgttgctccccgccgtagtcgcgctggacggcttggcggccgcggtagcctggtggcgccagggcgagcgagatcgtgaggtagtggccaatagaagacggcacggcggcggcacgcggccatgcgggcgcagtgagactcgatccccgtcggcggcggcgtggagccattcccctgaacataagttcctgtacatggatttagttgagacttctccatacttttcaaaaacccaagtaaaggaatcctctccattatcattatggatatggatgttctccaagtggttcagggggctcgtggagtgttcgaacccttatagatcgggggtctttgacgcccaggtgctcgaggacttctggtcctgccctgcatctataggagtgaatttggaccccctctag

SEQ ID NO: 20118 - DNA, 459 bp, Zea mays
  Peptide Sequence Number=SeqID_63493
atggctgaaagggaccgggaaagggggataccccgaaaaggatccttctccgtgaaggaaacaggccccgagcctctgaaagggaaatgtgcccttgggccatttctaagtattttggtgattgagtgccaacacaggagaaatcgagtcaaagaaaagttggctgtgtacagccaaggggctgttcggtctggagcaccggactgtccggtggtgcaccggacagtgtccggtggtgcaccggacagtgtccggtgcgccaggctgcctcgagcgaagtggtcgctctcgggaattcgccgacggcgtacggctaaaattcaccggactgtccggtgtgcaccggtctatccgtcttgtgtgcgttgctcattccccctttgctctgtgttctttgtgaacttcaattgtaagggcgagaggctccaagttgtggagattcctcgcaaacgggattga

SEQ ID NO: 20119 - DNA, 195 bp, Zea mays
  Peptide Sequence Number=SeqID_63494
atgggggatggtgttgctggcggtaatggtggcggtgggtgcgctgcaaaaagggcatggggcggtggtagtgcgcatggaggcagggcacgcgtgcgggagcacggggctctagccaaagtgaagaaaaacttcactacccaatgcatgcagaggactgggcatactaacttcagaccaagcaacttctattaa

SEQ ID NO: 20120 - DNA, 156 bp, Zea mays
  Peptide Sequence Number=SeqID_63495
atggagaaaaagaagaaggcctatagcaatcttgtggaggaccagatcatcgaagcttataagtttttggatgagaagtggttacccaagcagccggatgctccgcaagggccagattttgttgaagttacatctcctcgaagagttgcaaagtga

SEQ ID NO: 20121 - DNA, 387 bp, Zea mays
  Peptide Sequence Number=SeqID_63496
atgctggcccttctgctcctgctactgaggaagtgcatgtgccagtttttgctgaagctgaccccaatggatgacgctgaacccaatgggtgtgaccaagctgaggctgaacccaatgggtgtgccatccgcattgttgatgaagatgaggaagaggaggatgaaatccctctagttcggaagaacagccgacgctacatagtcagcggggaaagtagtggtgttccttctccagccttgtctactctcattggtctgcaagaattgtctctggcaaactttgatcagactcttgaagacatggtcccagaagatatgttgtcggagccggcagatggtggaatgatggatatttgtgctaatgtgcctgatgccgggctagagtga

SEQ ID NO: 20122 - DNA, 357 bp, Zea mays
  Peptide Sequence Number=SeqID_63497
atggagggggacgacgccgtggcgcggggcccacacgccagcgaggggggggtaacggtgtggacggccacagaaggagagggggggttcgaccggagtccggccgacggtgaaatcccgctgcggttctccgccgttggtctggttctacgacggggaggcggtggcgaggcacgggcgggtgcaggggatcacgggggtggggttaatttgactggcgggggcctatggcggccggtccgcggcaaggtggcgggtgtccacggcggcgaggtcgccggtgccgtagttgggtgcaatagggggcggggaggtgtgcctcgtgaccgtgatcatgtggcggagctcaagcactag

SEQ ID NO: 20123 - DNA, 165 bp, Zea mays
  Peptide Sequence Number=SeqID_63498
atggaagtgggtgaaggtcctttagctttagaggtggctgttatggagagctcggccctcaaggacggcactagcgtttacccagcccccgagggtgttgtcggggatgacccggctcggatgggtagcgcgagctatgacccagcccccgagggcattggttga

SEQ ID NO: 20124 - DNA, 429 bp, Zea mays
  Peptide Sequence Number=SeqID_63499
atggcagcggcggaccaggcggtcggtgacgctggaggcacagatccgacgaggagggacgaagagagctcggtgcggtcaggtcgacgactcaacagtgctgcaggaggagcagtgggtctaaggccagacgacagtggcggtgtgaatccgggcgccaacagcgggaaggagaggaacctgttcatcgggagtctcgccgacgaagaaatcgacgccgaaatattcggcgacatcacgaagccggagaacgggatccggcgcaacccgtatcgcgagacgaggtctcagaagtgggagaaactccagaagaacgagtcctccgagaaagaaggaattctcgacgacgtgaccgtcggcaggctcaagaacaggccgagcaggaaacaaggcaacgtcgggaaaatccactcttcggacgcaatctga

SEQ ID NO: 20125 - DNA, 129 bp, Zea mays
  Peptide Sequence Number=SeqID_63500
atgccgcaattcgcagtggaggcactgtcggcgcggtcgaatcgcgaagagcccgttgttggggaccctggtgagcagcagattgaagtagctgagcaggagctcattgaaggcaagttgtgcccttga

SEQ ID NO: 20126 - DNA, 354 bp, Zea mays
  Peptide Sequence Number=SeqID_63501
atggcgagctcagtggagaggcagcggtggcggcgggctccgaggctgatgcgatggcaatgggcgcgtgggattgtcggtgcggcggttagggcttcagagaaaatatttggcagcctgacggcgctcaggtgtgaatcatctaggccccttagtgttgttttggtaattaatgacaaccatatgtggactaacaattcttggagaaataagaatgcaggttggaccacagagaaaagaaagtcttggagacttaaagcattggttgtggatcatgtgaagacaaaggtgtttagagaaggaattgaccggattagtgggctagatagccgtactataaagaggggtcaatga

SEQ ID NO: 20127 - DNA, 507 bp, Zea mays
  Peptide Sequence Number=SeqID_63502
atgttgcagtttgaggtgttctggggtcatcttcttgatactaattttcataagcatcaagttatagactggcaatatatgcagaatgaggttgtgatggcagggctcattcccaaattccagacttgtggcttatatgagtttatggggaagaagactcactacaatgagatggtggttagacagtttttggccacatctgagattgacatagaagaagagactatcatctggatgacaggtcacagaaggtactttgctacttttgctgagtttgctgcagcaaatagcctagactataacttgatctcagcaggcattgatctatacactgaagacatctttgagaactatgagccgtactatgagcctgcgaggcttggtattcctagaaggtttggagagactccaggactcaggcaccaccctgctgtcatcaataagattgcaagggtcaccattctcccaaagagtggagataagagcaagatcagagacaaattctag

SEQ ID NO: 20128 - DNA, 357 bp, Zea mays
  Peptide Sequence Number=SeqID_63503
atgggtgctctgtcctctcagtttgagaccttgtccacaaatgaaagcatccatgacattcgtcagaggcaacagcagttgcagtcagacttcagccagttctcctctgtcttcgacaccttcagctctcactattataacatgtatcctcgtcctccatgtgggggagattgtgaatcatctaggccccttagtgatgttttggtaattaatgacgaccatatgtggactaacaattcttggagaaataagaatgcaggttggaccacagagaaaacaaagtcttggagacttaaagcattggttgtggatcaggtgaaggcaaagtacttttcagtcacactcaagatgcaataa

SEQ ID NO: 20129 - DNA, 201 bp, Zea mays
  Peptide Sequence Number=SeqID_63504
atggcggctgggctgggcggcgggcggccggaccgggcgggcagggaggcggccgaaccggccatggggaaaggggagaggggatgggggagggaggagagggggagggggagctcaccggggaggggcgcgacggcgaggggcggccggcggcaggggcggccgagggcggcggttgggcagggggcggcggcggcttag

SEQ ID NO: 20130 - DNA, 162 bp, Zea mays
  Peptide Sequence Number=SeqID_63505
atggggctcggtgtatgcggctcgctctgccaaggtggttatgagattgatggttctggttatgactatggtgctggttgtcagcattgcaaccactgctcaggcgaagatgaagctgtggaaggagacttccaggagttccaagattacgacgagttctag

SEQ ID NO: 20131 - DNA, 240 bp, Zea mays
  Peptide Sequence Number=SeqID_63506
atggaggcgatcagcaacaccaggttagccctcgggatcctggtggccgacagtgtggtcctcgtcggcgagaaggtgacatccaagctcttccaaatctcgcgctccgctgatgtccggaggcctccgcccctttgggatctccttcttattcacaaggtgggacaagcaccacggcgtgatgggaggccggacttggagcagtgcgttggggaacggcgtgatgggaggccgagctag

SEQ ID NO: 20132 - DNA, 150 bp, Zea mays
  Peptide Sequence Number=SeqID_63507
atgggggaggtctgcgaggaaccaaacccggaggggataaaggttgatgaagatagcggtgggacaagcaccacggcgtggtcctcgtcggcgagaaggtgcataagttcatctataactattctaagtcgactgtccggaataccgtag

SEQ ID NO: 20133 - DNA, 135 bp, Zea mays
  Peptide Sequence Number=SeqID_63508
atgaccactttcaagacccctggagctgctgcatatggatcctcttcggacctgtcgctttctgagtatatgatggagataagtcggaacccaatggaatcttctagtgtctttcttctggagagtttcaaatga

SEQ ID NO: 20134 - DNA, 204 bp, Zea mays
  Peptide Sequence Number=SeqID_63509
gatttgagtagtggcgtccaggctgtattttgggctcggatggcgagcactgaccagcatgctgccgcggctatggcgctcggtcgcagagggttggctggggagaaaatagcgacggaaccaggggaggaagacgggtccctggccgtaggattgagatggacggctgggattaaaagtagcatttaccccttcgcgtactga

SEQ ID NO: 20135 - DNA, 1703 bp, Zea mays
  Peptide Sequence Number=SeqID_63510
atgtgtcgaatttatttggctgaccgttatgaggcccatctatcaattcaattgtataccgctaaggcccaatcgcgtcagctccactcccgcggcatccctcaccacggcctccacttctccgagtcagttcccctccgcgcccacaacccccgccgcgcccacccccactcccgatgcgtccgctccaaccccgatagtcctcgcccctccccggacagggccaaggaggagcagtacggccagcccctgcaggctgagttctcctccccctccccggactccggcggcggcggcggctcctgcgtcaccaccgagtccgacgaggacgcctcctcgccttccccggacgtggtgcggcgtagcctggcaccgcaggagcgcacggtcctcctggagcgggaacactcgctgccgccgtcgcaggccgtggacggcgacgacgacgacgacctggacgccaacgtggaacgccatcatgcagaagacgcgcccggcggatccgactgctacccctccagctccagctccagctcccgtcacgcaccatcagcaacggccgccgccgagggcccgggacccgtcggtcggcgccgaggagatgaacaggcgattcgacgacttcatcaagaagaactgcaactccttcggccggcaataggcgacctctgctccgttacgattcggccacctccccgccgtacgatgcgtatatacagtacaagcaggacgcatgcatctttggttttccatctcggtgtgccgccggagctagcggagggaggcggccgtgatgatgagctgtcgtgttcgatcggcgccgctttccgcaagaaagcaaggaaattggtcggcttctgcgctaccagtctgatcagtgacgatactccagttattcgagctggtgctggaacaggcatatctgcgaagttattcgagcttcacagacacctttgtcatgccgccgcggctgccctctccatccagcccagtttgtgcggcccaacagttggtgcggcccattgttgtcgatttgtgcgttcacatcttctccctggcaactgcttccgtcgtctccaccaccgtcccacgttctcctccctccgcctctcgctctgcacacatccccatgcccacgccgagcgcttgcgcctcaccgcccccgtcgcaaccgcggccgtggcggcgtcgacgacctcccccgactttcctgccgtgggcgccgtcctggggaagcccacaatgctccgccgccacctcgcccccgtcctcggagccgtcgtctccaccctgtcctcggagcagcatacaccatcgcgtcctcgagcacccccgagatctcgctccttcctctgcaactgcagccgcccggcgtctccccctccgcgtgagctggcccctcaccgctcgggccccagacctcctcctccagagcttcaccgcccgtcctaccgccgttggccaaccgtctggtggccccagacctcctccagagctaccggcgactacgactgtccaggaaaggtgcattcgagccccagatctatattgaccccctttcctcgtatatgggctataactgctatcgaatccttgaagccaaagctaaaggagcttctgaagtatagggatgcaacacaaatggttgctgttgaaaccacgcaagaagctgctatggcagagatccttgttcgatgtttaag

SEQ ID NO: 20136 - DNA, 615 bp, Zea mays
  Peptide Sequence Number=SeqID_63511
atggtgtatgctgctccgaggacagggtggagacgacggctccgaggacgggggcgaggtggcggcgctgaggatggacgagccttcagcatgaacctcgcggctccgatcttctcagccactacctacgagcattgtgggcttccccaggacggcgcccacggcaggaaagtcgggggaggtcgtcgacgccgccacggccgcggttgcgacgggggcggtgaggcgcaagcgctcggcgtgggcatggggatgtgtgcagagcgagaggcggagggaggagaacgtgggacggtggtggagacgacggaagcagttgccagggagaagatatttttgggcggcgcgggactgtctgtccatggcagaacggggcggtggcagaacagtcagaggcagactactattacttacttaataagtagtagagatgtagagcacaaaggcctcattggtgatgtccctgtaatgcttgccaagccacagacttttatgagtgcaagtggtaagtctgttgggcagctggtttcatacttcaagataccattaaatcatttagttgtgatatacgatgatcttgatctaccctttgcgaaattgcgtctgctaccatag

SEQ ID NO: 20137 - DNA, 156 bp, Zea mays
  Peptide Sequence Number=SeqID_63512
atgagattgatggttcttggtattgactctggtaatgccttgctctacacaccaaaccccccttccccaggttgtcctcattgcaaccactgctcaggagaagatgaagccgtggaggaagacttccaggagttccaggagtacgatgagttctag

SEQ ID NO: 20138 - DNA, 204 bp, Zea mays
  Peptide Sequence Number=SeqID_63513
atgtggaaggattgggtggagcatgccaaggatatctgggccatctacccaggacagactgcgcacttgaccgagatccaggacatggaggccaacgaggacgtcgacatcgagggaggagaggagcctgcctctagtgtggacactgctggctcagggagaccaccttcccccgagtcgagtgttgcctcgttcgctcactag

SEQ ID NO: 20139 - DNA, 429 bp, Zea mays
  Peptide Sequence Number=SeqID_63514
atgggcaagggtcacaaacgcaagcgtgagccgactcctccgtcggaggatttcggcgactcggaatactcggaggaggagttctcctccgagtccgagggttctccggctcccgtctctcccccggcgtcgtctgatgattcagacgactcccaggggattgccgcggaggtctggacgtacacttgggccgtcgagcgctccgggctcgagggctcggatgagtctgagttctcctcggacgaggaggactcggacggcggcggggacgaagatgacgacgacgacgacgacggcgacgacgacgacgatggcgacggcgacggtgacggcagcaacggcggcgggggcagcgccagaggcggcagcagcacgggcagcaccaggggcggcggcggcaagggcagcagcagcaaggccagtggctaa

SEQ ID NO: 20140 - DNA, 558 bp, Zea mays
  Peptide Sequence Number=SeqID_63515
atgaagggaaacttcgctgttttggctgtagagtatcagcggaggctggatttgatccacgacctgaggttcgagaccgccaccaccaagatcaagctgacgcccgatgaccagtacctgatcgcctcaggtatttaccccccgcaagttaaagtctacgagttgaaggaattgtcgatgaagttcgagcggcacatgatctcagaaattgtagatttccagatccttggtgatgactattccaaactcgcgtttttgtgtgctgatcgttctgtaaatttgcacgctaagtatggaagccattatagcttgagaattccaagagtgggaagggacatggcctacgattgctggtcctgcgacttgctatgtgctgcttcatcaccagatctgtacaggataaacctagagcagggacgattccttgcttctctttcctccgaatcaccagcaataaatgcggttacacgaaggaggtcacgtctttgcaatttgatgaagatcaaggatactttatggcagtggggaccagtacaggaaaggctattgcatgtttga

SEQ ID NO: 20141 - DNA, 477 bp, Zea mays
  Peptide Sequence Number=SeqID_63516
atgacttggatgaagactgacgtcggcggtcatccccccattccgcttcctcccggtggtgccccaacgagcaattcagtggggtatgcgctgctcgacagaaggggatacgtggcacagggaggtggagcagagaaggcgagcgcgctagcgccggtgcccagcgcgacggaggagctcagccgctggagagattcgctcgcccattgtggagcgaggttccatgacgactctggtggaccgaccagaaattcgacgccccgggttgccgtcccgtcgcagcaaggccacaggtacgagtggtgcgcaccggcggtcacaaagaaccacattccgagctccaatttagtggggtggcgcgatacagccagcggtggctccctccaagttctcagctaccgccggttctgttcttcggatggacgagaggagggttacggtcgtcttatagggcgaggaacgagtccggagctgtga

SEQ ID NO: 20142 - DNA, 585 bp, Zea mays
  Peptide Sequence Number=SeqID_63517
atgacgtggatgaagactgacgtcggcggtcatccccccattccgcttcctccctgtggtgccccaacgagcaattcggtggggtatgcgctgctcgacagaaggggatacgtggcacggggaggtggagcagagaaggcgagcgcgctagcgccggtgcccagcgcgacggaggagctcagccaccgaagaggtttggcatgggacagggagacacatcgtcgagcacaaaaaaatcagcggtggcggatcccggcagcaatttctctcatctcgcacaggcttcctggtgacggcgcagattcgctcgcccgttggggagcgaggttccatgacgactctggtggaccgaccagaaattcaacgccccgggttgccgtcccgtcgcagcaaggccacaggtacgagtggtgcgcaccggcggtcacaaagaaccacatttcgagctccaatttagtggggtggcgcgatacagccagcggtggctccctccaatttctcagctgtcgccggttctgttcttcggatggacgagaggagggttacggtcgtcttatagggcgaggaacgagtccggagctgtga

SEQ ID NO: 20143 - DNA, 585 bp, Zea mays
  Peptide Sequence Number=SeqID_63518
atgacgtggatgaagactgacgtcggcggtcatccccccattccacttcctcccggtggtgccccaacgagcaattcggtggggtatgcgctgctcgacagaaggggatacgtggcacggggaggtggagcagagaaggcgagcgcgctagcgccggtgcccagtgcgacggaggagctcagccgccgaagaggtttggcatgggacagggagacacatcgtcgagcacaaaaaaatcagcggtggcagatcccggcagcaatttctctcatctcacacaggcttcctggtgacggcgcagattcactcgcccgttgtggtgcgaggttccatgacgactctggtggaccgaccagaaattcgacgccccgggttgccgtcccgtcgcagcaaggccacaggtacgagtggtgcgcaccggcggtcacaaagaaccacatttcgagctccaatttagtggggtggcgcgatacagccagcggtggctccctccaagttctcagctgccgccggttctgttcttcggatggacgagaggagggttacggtcgtcttatagggcgaggaacgagtccggagctgtga

SEQ ID NO: 20144 - DNA, 448 bp, Zea mays
  Peptide Sequence Number=SeqID_63519
ccgtagaaggcacaaggaagagtcgtctagcgacgatgaacccaagggtgtcaaaaagagagctgtgcagccgctgggcttgaagcagggaaaagccgagttctatatgtttggcggaaatcgtggcagaggggttttggccgcagccatcgccgtgatgctgtccctgtcgagggcgatcgggaggcggctcttctcgtccgccgaggccgcgtcgacggctgcggtgaggacggcgcagaacccgctcgaggagttcttcgaggtcgagcggagcaccgaggagggcaagcctcctccccactacgatggtcgacgaagccagcccattgaggctatgttcggtcaatttctcatccgaggggattggaaaggatctaaggaggttgagggggatttttacttgtatgatgttgatttaagtgcgctgttgccccctgatgtgtag

SEQ ID NO: 20145 - DNA, 375 bp, Zea mays
  Peptide Sequence Number=SeqID_63520
atgaccccctacccctacccgtgctttgccacctccccaaccacctggaaccggatcaccggcggagagccatcgtcgagctccgactaccggttttccctcccagctggatcccccgtctcgctccctaacgtcatttccccctccccctcgctggcacgtgggcccgtgcccacggcaccgtccccgcgtcggtcccgctggcaggccgagttaggcgaagagggatccgacccttcggaaatcgtagttccggaagaagggcatgagaccgacctctcggaaatagatctttcatgccaagagaacttcgacaaaggcaagtccattctccccttgatgcataaattacctactctttctaccactgcctaa

SEQ ID NO: 20146 - DNA, 1395 bp, Zea mays
  Peptide Sequence Number=SeqID_63521
atggggatgatccgcaagattaatctaatgggtgtgcccctgcaggttgaaaatattctctttaacattgacaggaaaaaacaaagaaagagaggatgcttcgcatgtggagagaagggccacttcagggacaactgtccaactatggctgaacccaaaaaggagaggagcaaaggcaaggcgctaacaagcgtcaaaacttgggacgactcttccagcgaagatgaacctccaaggacgcgtagccaccgatcctcatcacgctcatcactgtcatcacgcaagtgccttatggaaagtggtttgctagaaaaatttgaaacctttgcaaacttaaatagtgagctgtcaactaaaattgagctattagagtctagtgctccatccactgctaccgatgatggccttcttaaaaagaatgaaaaacttaaggctaagctagctagctcccaagaagctattgaaaatttgctaaagaaaatggaaattcttagcatacacaataatgagctaagtactaagctagaaaacattggtagcaccctagaagtatctttggtcgaaatacctgaaattattaagaaagatgcttctacttcctgctttgatttaattgatgattctaacccctgcaatcaagttcttgttaagaatgttgttatagaaacttgttcggacgagattgcaatggaaaacaagcaattaaagcaagaagtggctcgccttagaaaagccttgtatgacaagaaaggcaaagccaaacaaatccgacctccacaggataacaccactgcgggagtgaacaagcctatggagggtgaaattgtgatttgtaggttatgctacaaggaaggccacaagtctttccaatgcaagacgatgatcagggataagcaaaggcaaaagctcaagcaaaagccatcaagaaaaatctccaacacctacatcaacaaggtggacaaaaaggctgctacaccatatttgatcaagaagaaaaagaatggaaaggtgatagcaatcaaggccaacaagaaagtcaacataggagaaggggctaaacgcatctgggtgccaaaagaaataatttcaaccatgaaaagcaccaagaaggtttggatcccgaaagggaattcacaggatgcgaagaggattggacttaggaaatcaggatgcaacacatcaaaagaagacataaaaagatgcataaaagtccaagactcaataacaaaagaagcccaaaggaatcaacaaagaaaccctagaaaagggctgtcagccaacgcctggtggcgcaccgacagtgaacagtacatatccggtgcgcaccggactgtctggtgggacaaccggacagtctgcgcaaaggggccgcggacacgcgccctcgggctgtag

SEQ ID NO: 20147 - DNA, 270 bp, Zea mays
  Peptide Sequence Number=SeqID_63522
atggctcaccggatagctcgacctacgcgcggtggcgggcggccgaagtccggcgttgatgatcttgctgttctggtgaggcagggcttcgattcttgcttggagaagcttcacggctcctcggggaaactttcaaagggttcggttgaggctgagggtctccggaaatggctggacacggtggccggtgctcgggtggctcgggcgggtggcgtagagctcaccggagctaaggatggtgtctgtccagcgaagatcagtgcggagtga

SEQ ID NO: 20148 - DNA, 499 bp, Zea mays
  Peptide Sequence Number=SeqID_63523
tgaccgcggcggaagaaagggcggaggggcttaccggcggcgagattgcttcggtgaagtggtcgaggacgtaggggaggtctcggggatcacaacgctgtgcgggtcgccgtcggggatggtcggagttggccggtccacagaaaatatggatgcaaggaattgggcggagactcaccggttagctctgtccacgcgcggcggcgaaagaccgaagtccggtaaggtcgatctcgggcttccggtgaagtccggcctggttcgagggcttggaaagcttcatgggccactggcggagctagccgaaccactggctcgactcgggggtggctggagtgggctggccgcggtggccgaagctctggcggcaatggcgggcggaaatgcgctcgccggagctaaggagagggggctggccggtgaagagatatggagcccggaaatccggtctgtctccctgctcaaacccgaggcaaatccaaggttttgtcgtgtctag

SEQ ID NO: 20149 - DNA, 552 bp, Zea mays
  Peptide Sequence Number=SeqID_63524
atgtgctccgccgtgggtgcatcagccacggtggagttggacgcgtcgacgagcggcaccaagtttgttggccggcgagaagatgtgcgggacagggatctgctggtggtggtttttgaggtcgacaacagcgccaatttgcttgcctcgaagaccaccagcatcgacgacgggcgcaagtgccacgactaccaccgctgccacaaggtctgcgaggcacactccaagacgcctgtcgtcctgaagtatagatacagcgatgattttcctaggattgcggtgattcatacacctttctaccaatctcatttaccacacatgctgccatcagaagaggctttcacagcagcaatttctgagctagatataaaacaccaggataaagttattgtttatgatggaaagggcttctttagtgcgccttgtgtttggtggatgtttagagtgtttgagcacaagaaagtgtgggtattagatggtggtttgcctcagtggcgagcttctgggttcaacgtggaaaatgccagccctgacgatgacgcagttctgtaa

SEQ ID NO: 20150 - DNA, 567 bp, Zea mays
  Peptide Sequence Number=SeqID_63525
atggggattggttgtctatgggataaaaatttgaataaggattatggtgtggtacccagattgccctcctcacgtgacctgagacgttgtctcccattccggttatggtgggtacaagtgcggtcactgcatgatgacagtcgggatgacttctcacggatcctcggacgaaggaatgcacagtcccacactgacggacttgcacgagagggttttccccgtattttatgggagatacttcagggagctggttacacgacgcctccccagtacgcggtgcagctgttcgagaagcaccgagtgccctgctatagggtgaggatgaccctggagcctcatcccctacaaccaggctggcattcactggactctgagtcttttggatacagggatgaggacactatggaggcaattgctcttcacggacttaccaccttctgcggattccaccccttggagctatccactcaccccattggcttgttccccgcagaaaaggaggacgacccaatgtggaaggaccgagtggagcatgccaaggatatctgggctatctacctagggtag

SEQ ID NO: 20151 - DNA, 411 bp, Zea mays
  Peptide Sequence Number=SeqID_63526
atggcacaagcggttgagatggcacatcaaatgctatcaatgcgggttcctatttatatgcccaccgcattacaacttggtgggccctacatgtcattgactttcactattctagtgaagggaagcatccgagaacaaggaccaacagtagccatgcaggatgctgcacggctgagcagcatggtcaaccttgtcaccgtgctcaacaccgagctggaccacgcccttgacgagttgagcaaggctcgggcagagattgcggaactgcgtgctgagcgcgcggagcgccgccatcaggaggatggttcccctgctcctatcgggattcagcacccttaccgctcgttgtcccgttggcgtcatgcttatggcacccctgactgcaggatccaaatagatttggagccatag

SEQ ID NO: 20152 - DNA, 873 bp, Zea mays
  Peptide Sequence Number=SeqID_63527
atggcgtcccgccggttcttcgtccacgatccctacgactacgaccaatactacacagccgccccgtaccattacgagccttactaccagccgcagtccacgcccatattccgcagagccagggacgtctttgcgggcgccgagccggcggccgcgagagcgagatccgcgcccagggcaacggagacgcagacgtctttctcgatcccagtccacgggcccgactcaccggagagggagcccaaggcagcggaagccactcgcgcgggaccggtggcgccggcgatgtcggcggaggacgccgcagcgaggatacaggcggcggcgcgcgggttactggcgaggaagtcggtgcgggccgtgcgcgaggtggagcgggaggcggagcaagtcggggggaagatggcgtgccaggcggaggctctgcgcgtggatcccagggcgcgcgtcgccgtctgggaggcgctcatgaggatgctgctgcgtctcgacgcagtgcgcggcgcgcgggactaccggaggagggtcaccaagcgggtggtcacgctgcaggacgccgtcgacgcgttcgagactaagccggcgccggccatcgagatggcggcggaggagagcgcggtagcgccggagctgccagacgctgcgcagcatagcaatgagacggagagcatcaagaccacgactcacatgcccacccagttggaggtcagcgaagcagtagccgcctccgacggtgtggacgcgtggaagatgatggcggcgctgtgcgagcagatcgcgcagcagagcgcggtgatcagcgcgctggccgaccgtgtggaaaagctggagcgttccgtgcggaggatcagcggcggcgagccaagaagctga

SEQ ID NO: 20153 - DNA, 312 bp, Zea mays
  Peptide Sequence Number=SeqID_63528
atggggaaggggacacaaatcgagcagaaggccatggacacgatgcgtactgcagtgctggtggacatggaggtcgatgaggagtcacggttgttgccgctcgaggagccatccttcttcaacgaccagcagccttgtgttcttcttaagataaaagtctccgtagaagcaaggtctagactctggaggcggagctactatcatcaagagccaactcaaaatgaccaagatgctgcagaaaaactgattgatgatgaagaagaatctggagttgctggtgatcaattcaagctggatgatgatctcatatag

SEQ ID NO: 20154 - DNA, 189 bp, Zea mays
  Peptide Sequence Number=SeqID_63529
atgtgggtaaagtgcacaacctctgcagagtgttatgaaactgatatatcagccgtgctcacggttatgagcggccaagggagctccagtttgtcagcattggcaacccctgctcaggagaagatgaagccgtggaaggagacttttcagggagttccaagactacgacgagttctaggcatgggttag

SEQ ID NO: 20155 - DNA, 171 bp, Zea mays
  Peptide Sequence Number=SeqID_63530
atgaacgtatgtgagctcacccttgctctattcacaccaggtcaagaaatgtaccgccaaaatgaggagcatgaaggatgttacgatgagttcggagagataaaagaggatttcacaccttggaatcctgtacctgaagtgatgcttaggaataatgtcatcttgtcctaa

SEQ ID NO: 20156 - DNA, 618 bp, Zea mays
  Peptide Sequence Number=SeqID_63531
atgagggtcgtcgcaggaattcaggatgggatgaaacaaggaattattaatccaagtgatattgatgttacctttgaggattttccttattatgtcagtgagaacacaaagaatgtgctcttgtcatgtgcattcatacacttggaaaagaaggagttcatcaagcagtttgctgagatttcatcaataaaccaacgaattttgttattcggtccagcaggttctgagatttatcaggaaacattggtaaaggcacttgcgaaacattttggtgctagacttcttgtcgtggattcacttttgctaccttggatccctgatggtaatgatcttggtggtttgtgcgaggaagatcatggcttcttctgctctgctgaatcacttcgcccagacttttctgctggtgaagaagttgagaggctagctatgaccgagctaatagaggtcatttcagaagagaacaaatctggacctctgattgtgttacttaaggatgtagagaaatcattcattggagttaccgagtcactttcatcttcacggagcaaatttgaatcgcttccatctggtgttcttattataggatcccacactcagatggacagccgcaaagaaaag

SEQ ID NO: 20157 - DNA, 1662 bp, Zea mays
  Peptide Sequence Number=SeqID_63532
atgaggcagtatgtaggacctgcttcggctaattctgttgtgcctcagcttcggcaatctccttttgcttctgaattccgaggcagcccaggccaccgcctgtggtgcctgggcggtaagtccgccactgctcggagggacctggggctcacccgagggacccggcatgccctcttgggagctccggacttgtacgttcagggggtccggtgtccctctatggagcgtcttcatactgtagaagagggtacccctgattcagggtaccgacagttgccctcgggcccgcctcaggggaggatgcaagcttgcagcgaagctgagggggcgcacaatcgtggggcggttgtacgcttcttgcgtggcggttcgccttttcgaccgctggtttcggcgaagtggttcgccttcttcatgctttgggtcagtctgtatgaaatgtggggcctggccccccgtgtcatagggcgatggggtgcgccggtgttctctggagggatccgcgtcagggtcgccccctccggcgatctaaccaccggagagctcgcgctcgtggtgcccggccgcaacctccggccggtggtcatccacaaggatgactaccagccttgtggtggagagaagcgagccaggctacggcctcccccctgccctcagattcaaggatgttcatcatccgcgctggggaggagggcgagccgagttggggtcccgccttccgcatgggctggtggcccacttcttcctccagcattcgggggagaagggcgttcaccagccttgcggaggaggcgatcttcgggtacgcaggaccggccaactgcgggtgccgccggccgccgcgtgcccggttccccggcttggatggtctcggcgccgcctccaacgctgcctcctgccgtttggttggggcgtggctgcccatccaccgcacgggcgacggtcgtgccgtgcgcaggtctgccacatccacggcttctcccgcgccggcggccgcaccgggggcggtacaagacgtcatacgccgcgggggcggtggccgcattcttggatggtcttgtcctcactcccgcagtgaggacgagagcgaggacctcttcgtgtgtgctaaggcagccgccgcccaccggtgcagagatggccgctgtcgtcggcgctgaggtggtcgccgtcgctgaggttgccgccgccgttggtgctgaggtggtcgcctccgctggcaagccgctcggagctagctatcccacgaccctactggtgtggaggcttgatttgttgaggttggataccagcgtatctgaaaaggttgtcaataattctcgggaggcagcctcgccgagggcggttgagcgtgcaggcccacggtacgggaccagactgagcggctacatgggcttcggaccaccccaggagactaatgctaaacggccacacaggctccggaccaccccatggaacggggtcccgttctctggagccggctcccaggctgtcggacctcccaactttcgtatcgggggccctaaactaccaataggccgggtttatggggacatacctcaccggtttgtcatacatcctggacccgtggggaatccagaagggttttcggaggaaggcacacttcagctctgtagaccggggaactcggggtccctctag

SEQ ID NO: 20158 - DNA, 318 bp, Zea mays
  Peptide Sequence Number=SeqID_63533
atgggtggtgtcgcggtggggggtgatgggatcggatccggacgtacagtagggcaggcaccgttcgtgtgcttccgtatcctccagatctctattggcgtcgcttcgtcgtcaggggacggccatggattggggcagtgcagtggtaggagcagttggcctggggcatctccaacatggacagatggactagacactcgttcgaatgcgctcatcgggctctgcaaaggttttgggcctgtacaactcgtagcccattcaacagcagcccagcagagagcgaacggcctgatcacttgcggtcaaagcggcgcctga

SEQ ID NO: 20159 - DNA, 402 bp, Zea mays
  Peptide Sequence Number=SeqID_63534
atggctctgttgcatgggagcttcatagcgcgggaaagtcggatctctgttgcgatttactcgttcgacgttgtgggccgtccaggcccacgaaagaacgaccttacgatttattgggcctttgggcctttcgggaggtcttttacttctttagtggacccgggggatatctatcccccacaagcccccgatctttgggttgatttagaggtcagcattatgtcatcaaaatttcgctgcagaggtatttactgcgtgctctgcacggatgtgaccgttttgaaaaatatactgatacttcctgggcgtccccccccaatgggtgtgggcaagggacggcttgatgggtgggagtgcttattgaatgctttgcgactgttcagtgaccgcggttggaagtga

SEQ ID NO: 20160 - DNA, 522 bp, Zea mays
  Peptide Sequence Number=SeqID_63535
atgggcagcgccgtcgccttcgcgaagctcgacggggagcgctaccccaaggcggctgccgccgtcggggtcaagggcttccccaccgtactcctctttgttaatggcaccgagcacgcctaccatggcctccacaccaagcttcagtctaaggattcagttgaggagttcctcaaaaaggacatgacctttgttattggtctattcaagaattttgagggagcagaccatgaagaatttgtgaagacagcaaccacagacaacgagatcttcacctttgcagaggcttatgattttgaagatctggaatctatggttgaagaaataggcagagcattcaagacaaagataatgtttatatatgttgacactgctgaagaaaaccttgcaaaaccattcctcactctttatggccttgaatcagaaaaaaagcctactgtacaagaaaataccagttgtagtgtagtcatgaagcatgagacttccagatataagctaaagctatccacgtcagatacatag

SEQ ID NO: 20161 - DNA, 1362 bp, Zea mays
  Peptide Sequence Number=SeqID_63536
atgctgaaatgctcgcattctgcgccgccaaagcgtccgagagctcggttcgcgaggctgagcgcagagactgaggccgcggggaaggcaccggcggagcccaagccaagggtcgagcggatctgcgccatgcgagcatccccaattcacaccaagacagcgagggtcaaatgtcccagcgagaggaagaaggcactgaccacgccgcggagcaaggccgttcggtcgaggcaggagctgttccacagcgtgaagcaccagaaggagccgttggccgctgcagctaggaaagggacggtcgtcaagtctctgttcatgagcacgacgccaaaaaaggaaccggtccagacgccagcggcagacaagagcaagggggcggtgtccgaggtctgttcgaagctgaggaagctgaacttggcgtgccgggaggtgccgagcaggtacatgtctcagcctcagccgaagaatacaaagactgccaagaagagtgaagagaccacggtggccaagagcgagaagcgggggctggaatccaagaccaatgccaagaagaaaattttaggacgctcagtgaagcgtgctaatgccggacctgatggagagaaccgaaatggttgcagcactgctgcagacgagaactcgcttgtagaaactgctggctcccatcaggaaaggaaggttgtgctgcaggaattgagaatcgaggtggatgtatcgcgatgtggcaattcagatgacaacaaggagaatgtgtccagtgctccaagtgaagaagcattggacaattcatcatattatggaagtgaaaacagactgttggagaacaatgataatgttcctctgaaggagaatgttgctctgaaggtggccaaattgcagaagaaagtgcatcaagagcaagcaggaaagctcaagaaaaccaccaatcctagggtggtctttgttgaagcaactgaagcccaatacgcattcaaaaaactaatatatacacgatatagtctttggcaagatacacacgaagggaggcaacatgcctatcattatctgctccaatcccagcctaaagaagcatgtgcgatgaactaccgtgtttctaccatgttcttgcctccatttatcgaacaaagcttgcctaagtatggccacaggccatatgaaactttactcgacgtatggtggacagtgggagaggggacaaatatggtagtagggatgacaagtatggtggcagtggaggtcgttatggttctgatcgtggcggtgactgatactctggtcatagtcgagatgacggtagctatcggggcgatgaccgttatggccttgatcgatcaggtccttcctgatggtgttagttcttga

SEQ ID NO: 20162 - DNA, 300 bp, Zea mays
  Peptide Sequence Number=SeqID_63537
atgcgcttttttccaacagcaattctgattacatgggttgcttacacgcccaggcgcaacaacaatggaacgtggccgatgcctcagtggggattacatgctccgccacctccacctccacctcagggatccggggtcatgggccacaacacgccaccaccggtcataccagcaccaggaggagcttatgcaggggagggagcttatgcaggagaggatccaaacccgttacacgacttcgtcgaccagttattggcttctggaggtagtggacacaactccaacgaccccaatgtgtga

SEQ ID NO: 20163 - DNA, 559 bp, Zea mays
  Peptide Sequence Number=SeqID_63538
atgtccatagtccaaacgatattgatatgtcgcggctgcttcctcggtaacacgcgagtgatgatgagcgtaatagaccacgcggcccagaggccttacgtcaggcttcgtctgctggcttacgtcacaggcagtaggccatgtggcagcatcgggtctccgcctgaccggggagcagaagcgtacacggtatggttcggacacgtgtcggctctggacccctaccaggccttgattaaggcctgggtattctttgtcccagaatcccgggaccctgctgtgagtggcccggagcccacacataggggtctggaacccgtcctaggggtccggttcctggcccgtggaggtcctggaccttacccgaaggtccggtctgtatatcaggggtccgacactttcccatgggggtccggacccactgttgataccttagagtatatcgtcttctctggccacgtggcggccccggagccgtccacgtggtggggtcgggtgctgtttaccacgcgactagagatagccgcgcgggtaccgcgtcttcatactgtagtaaggg

SEQ ID NO: 20164 - DNA, 629 bp, Zea mays
  Peptide Sequence Number=SeqID_63539
atggaggtggtggaggcggaggggatgaggtgcgcagttttctattctctgggcctgggcgagatccacccaaaacttcgcccgaacccgccgcgaaattcaaactcgaagggcaagcgacacttccggaggcaaagcgggcgccgtttcacctccgtcatgatgaccgcgtcaaaaaaggacgagtgccctagtggccagggtgtcacgctccacaagatcgtgacagccataggaggtggtgtatcggttgctaaggcgcagcgtctttggaaggctgtagtcgggcctgggcgcacccttggctcgcccgaagcccagcttgggaaaactttgtcgtgcagcgaccttggccaaatcgccttaccaaccgaccgtatcgcatgcgcatttaatgaaaacagcgctattcaccatgttccgactactgtgccaaccaccaaggtaaggctgagtcacgacctcccccgagttcagcctcaggcgcaacagggagctccgccttgcccgacctcaggcctcggcctcggaagaaggtctccgcttagctcgaccctgggcctcagcctcagcctcggcctcgggaggagtcacaacctcgcccgacctcagcctcagcctcaggagaa

SEQ ID NO: 20165 - DNA, 585 bp, Zea mays
  Peptide Sequence Number=SeqID_63540
atgtcgtcgtcttcgtcatcatcatcatcgtcgtcgtcaggcgtttccggcgacggctccaacgggagcccatccctcgcctgcctccgacgatgcttctccaaggcttcccgagctcgcatcctctcgcgagctcgggccttttccgcgtccttcttctccttttccttctctgcggcgagcctacgcacggcacggtccgctgcgtcctccaggactagtggccgggcaggtttaaaaatcctcaacccctggggacgaacaaaaattccaacagtaagaatcaaaggcgtagagaactcggcgcaaaacagaaggaggatcggacacttaccaggacacatacccacggtcaggacgcatcacgggctggctaagggcgccagcatccagcctccctaccttacctgctacccgcttgaggagatcgtcagtggagagggaggtcgaggacatccgcgagccctccaaatcgacccccgacttcatctctgcaagccgcaaccgccgctctgccaaagggagcaccctccgacgatggatggcggcgatgacccccgcagcggtaaggccctcatctcgtaa

SEQ ID NO: 20166 - DNA, 351 bp, Zea mays
  Peptide Sequence Number=SeqID_63541
atgcggaagcgattacataacttacatttatttaaaaaggtttcaaggaagaccaaggtccacgacggcgttctcgcgcggccaaagtccggcgaactcctggaccggccgattggggctatgaccggcgctaatcttcggtttaccccagattctaccccagagaagtacttcccccaacataattgcactaataaacaaggggtgtgctctggccacggtggccgtgagcagagcggcaagatcgtcgtgttcccggcgaccagagagcttctagcgcaattacgtgggtcgtcaagcatcgtggagttacgagaaagctcaaacgagagagagagaaggatgagctga

SEQ ID NO: 20167 - DNA, 276 bp, Zea mays
  Peptide Sequence Number=SeqID_63542
atggctgtcaagggcccaagcacggcgctggcttcctcctttgaggtggagatccttccgcccgtgtcgccgtctgaggccgggccagattctgccgagggtgggaacgacgccgagggtgttgctcctccccctgccgatgacttgttcggtagcagaattgcttattcgagcacgagttacttttcacggaaggtgatgagtgagagggggttcccccttctagcccccgagggagggtcgggctttgccgaggcaaggttgatccttccttga

SEQ ID NO: 20168 - DNA, 72 bp, Zea mays
  Peptide Sequence Number=SeqID_63543
atgccgtgggacgaggagagtgtagcaaatacgaaaagcatcatcaacctacaatcctgccatggggcctaa

SEQ ID NO: 20169 - DNA, 153 bp, Zea mays
  Peptide Sequence Number=SeqID_63544
atgaagaagtacaaagaatgcgaagatgaacagtgctcccgtactgttcacgctgactgggcatttgcttttgcgtcacgcttgtacccttaccttctttcaagccgaagatatgtccttcataaccttcgtccgaagatcattatatcctaa

SEQ ID NO: 20170 - DNA, 585 bp, Zea mays
  Peptide Sequence Number=SeqID_63545
atgccgccgcgcacaaggaaaacggcgcgcaagtcaactggaccaatcggtgtgccccgacatcaactggcccctcgacatgaggacagtagcagcgggagcaatgatccaataggggatcttgaagcacgagtaaatcaacttcaagcagaattgcaacacaggaccaatatatgggttgcggatggagatagaataaatgaattaagaagggacattcgccacctgcgggatcagcttgctgatcgggacttagcgctcgactgggcagttcagtcccgtttgcttgcttgtgctaaggaggcaagggctcaagcccgaatcaaggaacttagctcagctgtcgacgacctgcaagtctattgcaatactttacatgaggaagtccatgtactgtattcgcaattacaccctagtgcacctgcgcaccctgttgaatcggaagccagaccctcccatgttgcgggacacgcgcttggtagtgagttagacctttttcagccccctccttccatgaggctggtcgacgaatggtctcccacacccgacgatgaggccgccaaaagcaatgggaagcaggactag

SEQ ID NO: 20171 - DNA, 327 bp, Zea mays
  Peptide Sequence Number=SeqID_63546
atggccggttcaagggatagctctgatgtttctccaagcaacatcatagagccgacttgggaaaccttgccggctgacgagcagctccagttcgaggagcacaaggagcggatgatccaggaggcgaaagcacgattcttggccaacttcaaagtggacaggaacaacaaggtcgtccgacatcgggcgacggatccggcttcgctccaacctacgccagatatccccaatgccaaatcttcggcttgtgcctccttacagccggttcaaaagaaacggcaagaggaggttaagtttacatttaatgttgattcaatcggccattaa

SEQ ID NO: 20172 - DNA, 1011 bp, Zea mays
  Peptide Sequence Number=SeqID_63547
atgtcttcgctctcccttatgcatcgtgtctttccaccatccaagcccccggatgggggatacccgccgtctttccgtctcatcgttggaggaacgcaactccgcgggagttggtaccttttagccatcgttcggcttcaaggattttcatcagccagcccggctgtacccccccgccggtggtcacccaagacggtgaccaccagcccctgggtggggagaagcaagccgggctgcgatcttggtcccaccctcagcttcaaggatgttcatcatcctcgctggggtggaggtcgggctgagccggagctctacctcccgcgcgggttcgtgggtcaccctctcctgcggcgttcgagggagagggtgctcactggccctgcgggtggcccggacttcgacaacgcggggctggtcgacggagggcgtggtcacacccagcgtgtcgagctcgttggcttggctcccggtggcccctcctgccggaaggcggttgccgcgccgtgtgcacgggaggaccgcccaagatgccgcgcgctgctagggcggcgttcgtgttctggggtggtcctgcctttgcaccggcggaggcggctcgggaagtccccgtcgccgacgggatcaccgccaccatccgcgcttcgggcctccggctctttgtacttgtcctcgcccctcgagcgtcggcgtgggcgagggcaagattgcagcagcgcccaccctgaggcctgcgctgctgcagttcggccacccagagcgggggtcgttgtcgtcgcagtcggagcgggcggcggcgagccgcccgtcagtcttctgttgctccgcaggccctcccccatcgagtggggttactcgcctgttggttatctgaaccgcttcaccaagcgtgagtcgccccgtgtccaggtgacgagtgagtcgaagcctcgggtcgggctggcgccctctaaggacggctggccgaggccctggggcaaccggccgagccgcctgctcgggccggattcctag

SEQ ID NO: 20173 - DNA, 444 bp, Zea mays
  Peptide Sequence Number=SeqID_63548
atgaagaagtctaatgttgtcaagagacagatggtattttcaagacagttcagtaagcgacacatattcggtcgtctgggcacttatgggtgtgaaaccagagtttttgcaggcagggacctgttcggcagtaagctcaacttctcaatgatccatggagaactaaggcttcttggtggatggcccctctttgtgaagagtcaccgtatcgaagcaggacactctgggcagacccttggtcatgatgtcggcgaactggtgtgtagacggaacatgaagaacacagaactgccccagagctaccttctcacggacgaagtggatgtcgatttcgatgtgcttcgtacggctgtgatggactgggtgggctgccatgtacacaacgctcgcattgtcacagtagaccacggtcgcacgtgggatggagatgtgcagctcatgtag

SEQ ID NO: 20174 - DNA, 417 bp, Zea mays
  Peptide Sequence Number=SeqID_63549
atggaccagattggatcacgcgaagggatacattctgatctaatctcggccgtctcctggccagatcaacggcgcacaagcccccgagccaaacagctcataaccaatctggacgaaccagcatccatacctaatcgtggccacacgcttgggatccaatgcccagggatccatcgacttgaatcgctttcacaacgtttaatcctggtcgtccgttgctggatcaacggagtcagcgcccatcacgccatcacccatcgtccccagcccagaccgtggcggtgtccccaactacggtggcgaactgcgtacccgcgacggagtaacgccgacgagcgaaaacagggtgacctcgcgctaggaaatcgagaacgggatgtggcagcacggagcgggtaccatggcgaagagagttaa

SEQ ID NO: 20175 - DNA, 147 bp, Zea mays
  Peptide Sequence Number=SeqID_63550
atggccgtgatgggttcaacatcggaaaagatgtacctctgccaggtgaggaaacagcagacttttgctgtttttgcactaaggtggtgcccaaggatgaacctcaacagtaacgtggttgcggaaggacgtggtccttccttttga

SEQ ID NO: 20176 - DNA, 228 bp, Zea mays
  Peptide Sequence Number=SeqID_63551
atggcgaacggctcaatcgcgcgactagacgaaggcacagcaggatcggcgaacgatggacaatgcgtaggcacgggcggagctctgttgaacgacagacggcgtggactgtccggcgacgaacggcggcgaactctggcgaactacactgtgagagcgagggaggcgcgagaagagagagcgagctcgggcagggagaaggagagggctcggcgtcggattttatag

SEQ ID NO: 20177 - DNA, 2022 bp, Zea mays
  Peptide Sequence Number=SeqID_63552
atggacaaggatcgccagggagctgcacagaagcgccaggcggtcgtcaggcttcatgaagccaggccgaagaggcagcagggggctgcgaaggctactacccccggcggaggccagccgccgctggtggcgaagtcggccgtccctgcatccagcagggcgccggaggctgcgaaggcggctgctgccggtggttccaagtctgcgaaggccgcccctgtgcccagcggggtgtcggaggctgcgaaggcggcccgagagttgccgctgccgggcaagcgcatcgccgacttcgccaccgacattagtgtggaagattatcttgttgggtcggacgaaggccaacttgttgttgctccgcctgccggggcgaagggcggtgcgcttagtgccggtggcgaaattccggcgctcgctgcagtcagggacgaggcgggtgctgtgtcccgccggctgaaggagctgaaggaggcactaagtcaggcgactgacttcgctgaccgcacggcgtcgggagccctgatggcagttgtgtctgccgaagtcgagagacttcggacgcaacatgctgacgctgtccgggagaagttggccgccgacagcaaatgccgcaagctggcggacaaggtggctgtgctagagggtgagaaggctgacctccggtgccaactggcggaggagtggaaggaggctaatgaggccctcgccaaggcgcaggctgcgcaggcggaggccaatttggtgcgggcggagggcagtcttgccaggcagcgcgccgagcagttggaggagcggctcagcgctctgcagagccgtgtggagagggccgaggcctcgacgcgcacggaagctgagcggacacgcaaacagcttatggattcataccatgagctgggcgcgcggaccgctgaatttgaagtgccggaccgagagcccggactttgctgccttgagtgggtgcaggaggagctgcaggcgctccccaccatcgtggaggggtttatgtcttatgcctccctggtcacctgcgagggggcgatgaacgcgctctctcgcaaagggtgccggcactatgaggtcttcgaccaagctgatgaggattttgagcgtgatatctacaaggttgaggaccctatagtgaaggaatccatcggagccctctacgaccggatgtggggcccccacagtcgggaggtggtcagggagcgggccgagacgacgaggggtcaggcggcgcgtggcgagagggtggatgatttcggggctttgaacagcgcgctgcctgacccggagtcgaacccggcggcggctgtgtccgaggtcgccctggagctgcccccggaaaccaacgaaggcgctcctgatgcccccgcagccgctgtggccggcggaggcccgcccccggagaccgccgaaggcgttcctgatgccactgcagccgctgcggccggcggaggcccgccgccaactgctgcgccgagggctgaggatcctgtgacggtggcggtggaggcgacggcggaggctcccgcgacggctgggtcttcgcaggttcaagattttgggcctgcgcacgcaaccgctactactaattgtttggcggcctcgactgtggatgatgggaataaatcggacgggtctgcatctaagttttctgattttggtgactctgagagctcggttgagtggactgaggagtcgtcggatgaggacttggactactttgcggccttggatgtggcagcggcggaggcttcgccgcaagctgcagatgctgaagttgtgcctggtccgagtactgggtgtaggcggcgaagggcggttgcgaagcgtagagtgagtggggcggacgtcggtcggcttcgtgtgagtggggctggcaggcaggaactgttgtccttgccggccgctgtgagtgcagatgagggggagttgcgaagtctttttgcgggtgaggagcttaggataatgttatttaactatagggagatgggaattattccgaaggttgggccgatgtag

SEQ ID NO: 20178 - DNA, 171 bp, Zea mays
  Peptide Sequence Number=SeqID_63553
atgaagccgacacgcgagctcggaatgacaacgagaagaacaagtgaggggaaaacgattgcgcgcacagcacgtgaggcactacgcgatgaggcgaggcaatgtggtaaagaagaaggtgtcgaggtggatctccaggagttccaagactttaatgagtttgaggattag

SEQ ID NO: 20179 - DNA, 690 bp, Zea mays
  Peptide Sequence Number=SeqID_63554
atgccccctgccccaccacagggcatccaggctactagaggagaccctgacggagacggagacgacaacgctggtggcagttcaagccacgacacggagctttcggaggagccggagtcagagggatggatcgctagacccatcacttgcgacgccgctctctaccagcatcgtcgtgggttatacccggaccagtgggaggctacttgcttggtgcgccgtccggacgatgatctccagggtgcagaggccttcttagagcactattctatcactgagagggatactgccgaggcagccatgcaagatgcaacacgacgggcactttttcagtattgctcgttgttcagcggggtagcggacggcctcgacctgaagtactaccctcgtcgtttgactgacagtgctggaggtgtgattgtctcgctagttggtgagggcaatcctaggctgaacagcatggtcaacctggccgccgtgctcaacacagagttggaccatgcccttgacgagttgggcaagggtcgggcggaggttgcggaattacgtgctgagtgcgctgcacgccaatatctggatggtggttctcctacccctgtcgggattcaacacccttaccgttcaccgccccgtggtcgctttgactatggtaccccagactgcaggacccggatagatttagatccatag

SEQ ID NO: 20180 - DNA, 444 bp, Zea mays
  Peptide Sequence Number=SeqID_63555
atggcgccccgcacgctctgtgacgacggcggctctcggcccccttacggaagcaagaggacccggccgatccctatgatcccggccgcgaacccagcgccatacgcccaggccccacgcgcgactccagccggccgatcccgcacgcccggccgccctgctagcacccggaacgccgcccaacccgactgcaacgccgcgccctgcctcccgcgccctgcccctgccacgtcgctgaccccggtagagcagcgatgcccaggcgccacccgcaccgacccggccgaccgtgccaagccaggccgccgagcagctcgtgcgcccaacgctgaccgcgctagggcagtgcgacccagcacccgcgcaggaccgcccctagccccgacgcccgacgcgcagcacccgacgccgagcaggagcacgcgccaggacccgagccgctag

SEQ ID NO: 20181 - DNA, 234 bp, Zea mays
  Peptide Sequence Number=SeqID_63556
atggcgagctccctccaatggcccctgcagtgccttgaccgcggactccttcttccccgccccacaccgactcgtttcaacgtggtcatcaaatccgtccagccgctgattcgccgtacgctggggctggggtttattggtgcacaatccacgattgactcgtaccccttcgccgaggcaaactttctaaagagtcctcaggaaatcttgaaactaacccgccgtcctctatag

SEQ ID NO: 20182 - DNA, 411 bp, Zea mays
  Peptide Sequence Number=SeqID_63557
atggtgtcgtcggcgttttccaacggcgattgcgcggggttcctggacagggagcagatcaggaaggccaagctcatgagcctcaattgcttcgccgccaaccgcgacgagacccacactgcggagtccctctcctgtcaatattgggtgagtcttgcaattgagacaacctatcggctgcgaggccactccaatccccctttaattcttcactgcattgaaccttgtggaacaccgaccaccagttacaatcatcaccgtccacggcaggcccgacgcgtcccctgtcctgatccaagccatatttgttctcgagtggattctttgcctgttacctcgtttactattccttcaaatggatttgccatcagcgctagaatattagtattaatcacatgttgtaaggcataa

SEQ ID NO: 20183 - DNA, 69 bp, Zea mays
  Peptide Sequence Number=SeqID_63558
atgatcaaggttgctgatcaatttttaagcaagaaatctagtatgacgcatgacaaggttgtctgctag

SEQ ID NO: 20184 - DNA, 168 bp, Zea mays
  Peptide Sequence Number=SeqID_63559
atggacgttgtgggctcgcaggcggggcctcgcgtcgagggcatctcgcggtgcgcatggaaagttttcatcaggtcagtatccaacaaggtatctttggacccgaatcggtaccacagtgggagaagctcaaagaatacgaaggttgatacagcgccgaaggagtga

SEQ ID NO: 20185 - DNA, 450 bp, Zea mays
  Peptide Sequence Number=SeqID_63560
atgaagagcacggcggccgacatggaactggacggtggcaaacgcggcgccgacccaccaccagcacaccgcagggcttccgcttacgccagagcatcgtcctccctgcatgtagaggagacactgcgacccgcagctggcaccgccgaaggatggggcggtagctgccatggcggccacgagaggagaggtaaggtaaatcttgacgagaacaagattgaaaattgggagcttggcaagcggcgaaaatgcggcgtaggacccccgccgctacagagccctcgtccgtcgcacttcgccgccgcgtcggagtcatccagctcgtcgacgcctggcggggagatccccagtgcgaggggaacctccacgacgaacggagttttatgggtctattatttgggtcctcgagaggagccccggcttggtagcatagacttgacagatgtctag

SEQ ID NO: 20186 - DNA, 792 bp, Zea mays
  Peptide Sequence Number=SeqID_63561
atggaggtgcccaaggcggtggcgctcgtggccgccctggcgctcgtagcgctgggagcgctggccaccaggtggctgcagcgcatggaagcgcggaacgaggaggtacgccgcctcgcgttgctcgcggcggcggaagaggagaccatcgcgagggaggaggcctactactacgggcagtacggcgggtttgtgcgctcgtccgacttgccggaggcaccctcgctgtgggcggcgcaggaggtgcctcctgcgccgaaggaggtgatggctgaggcggcggcggcggcggcggcgacggtggcctcccctacggcggggaagggcgtctgtgcgatgtgctccaagccaacgacgctccggtgcaagcgatgcaagagtgtcaagtactgtagcaagggcggagggctatacacactgccaagcaagcgacaacgagtcctcatcgagcaaagccaagtcgagtggtggctttggcaacccagcgacaatgacgacggggaggctcccgctcccggtaggatgaagtacatcctgcgaactaaccacacatggggtgttgttgttcgtggggctgctgaggccgttgatgatggcatggaccaactggccttatcgatcatcttccaagctgtcgacaacgagacaccactacacgttgtggaggagatcgccactgatgtgtgggctacattgttccatgcatgtggggacaacgagacaccactacacgttgtggaggagatcgccactgatgtgtgggctacattgttccatgcatgtgggcattga

SEQ ID NO: 20187 - DNA, 2694 bp, Zea mays
  Peptide Sequence Number=SeqID_63562
atgcagcagttggggtattttggtaacggtgttgggcgcgtcccgggggcggaagagattcctgagccggagggcgagttagttgtgttcgaggcgttcttcatcgccggccttcgcctacctgcgcatcgtctcgtggtggagccctccgtagaggtcttcgccaagaactattgtctgcactggcaaaagagaaaaattggaaataagattgcacagtttggatcgtgcaccttcacgccgaggaccggaaagacttcgacggaagtcgtggagctagtcccctgcgctcgcaacaagcggggcaactggtgggattattggttttatgtttccggaggcgaagtcgaagacctcccagggctccccgcgatcgtaatgtgctcccactgttatgtggcattcccaccatttgaggtggcggaggatgatgaggacgaaggggccctccggtgcgctgcccgcatgagtagttggcgtgacttggttgaggaattcattagttatggagtgtggcccttggcgcatggcaggatgcttggcgaagtgtgccctcgccagatgcctaccttgggtgagcaggtggtgcgaagtcctaccttcgctttggatttgcgcgaccgggacccagccgcgttcgtgcgtgaagtggaggatggggctgtgaggattgtgggtcggtatgcgccgaggacggaggctctacggagttgggatattcatgggtccaatgttcgcttgaaccgtgtcttcgagttaaaccgtctgccgtatggtggttaccctggggacgacgttgctgctgctatcgatcaccgcgaaaaaaagccagcggctgcggctgaggaaggcccctcgcgggaggcagcgtcggccattaagaagagaaaactaggtactgtggctgaggggtcaggggtctccgatcgttttgctgtggagttagtggggacttgtgcggccctcgggggaaggatgtcttcgcccgagctccgggagtcttcgacgcgaatgttggaggttaccgagggtcgatggccaaggaacattccgatcccccgggcggccggcgaggacatatttacatctcgtttggcccatgagatgaagatttttccttatggacagaatattgctgctgttgtatcgacagtgatggacaaggatcgccaagatgcggcgcgaaagcgtcgggcattcactagggtcggggaccctagtcgcaaggtcaagagggcgcggggaggcacgaagtccaccaccctcggcagcagcaaaccaccgctggctgctaagccggccgtccctgggcccagcaaatcttcgtcgggggcgagggctgtcgcctctggctcgggcaagccgccctcggctgagcccacgagggagcgaaggccaccgtctccggtgcgcatcgacgaggcggcgacaagtggtgccaacctcaacatggacatctgcgtggatgattaccgcatgggtggtgtcatgatgtttgatgcccacacgagccaaggactttttgggtcggaggctgggcaactggctgttgtcccggctccggtggtggctacgcctgttgcggcggcggccgagttcactgccgagaggcagcgtcacgagggcaggattgagcgcctctgggcgcagcatacagaggctgttcgtgacaagtcggctgcggagaacaaaagccacaggctgacggagaagttggcggctacggaggtcgagaaggaggatctcaggcaacaagtccccaacacccgccaacgcgccgaggagaaggaaacaagcctttgcggcctgcacgaccgcctagacaaagcgaaggcctctactcgcgccgaggtcgaccggacacatgcacagctcgtggacgcgtatcgggagcttggtgcacggaccgctccctttgaggcgtccggcaaggaggtgggcctccgctttctcgggtggctgcaggaggagctagaggtgctcccgacgattgtgacgggcctcatgtccttcgcctccctcatcacctgcgaaggggacgtgaatgccctgtcccgcgagggatgtgggcacttcgaagtcttcgaccgatcggacgaagacttcgaacgtgaaatcttccaggttgaggacccggtgctgaagcgatcggccgaggcactttactataggatgtggggccctcacggccgtgagactgtccgggagaggtccgaccgggctatggaccaggttccgacgtatgggcctgcgcaagaaaccactgctgctgatactaattttgtggtggctgcaaccgtagtgcctgccaatgacagtttaactggttctggatctgggtgtttttcgtctgatggtgagtctaggagtccgtttttctggaccgaagagtcttcagatgaggacttggattattttgttgcattagatgtggccgcagcggagtccgcgccgcgtgtggaggttggcgaggcggctgatcttcctagtgcgaggaccaagtgccggcggcgaagggtggtgtcgaagcatagcgtgggcgatttttcacgaagtggtaggcgccgccgtatggggatagagcgggaccgtcttcgagtagaccggattggtaaacgagaactattgacctcgccgattgggacgagcattggtgaggggatctgcagaatcttttcgagggtgaggaattga

SEQ ID NO: 20188 - DNA, 2040 bp, Zea mays
  Peptide Sequence Number=SeqID_63563
atggcgtccatctccggagcggcggcggcgccatcttccgctgcgtgccggctgcggctgcgtaggcacatcctgctgcggccctcgcacctccgcctccgcgcgccccactccatcgccgacctctcccgctcctccagctcctctagttccgccccgacccgggcccagccgctgggctccaggccggagaacggcggcggcgtccgcgcggtggagaaggacccgatcaagctgtgggagcgctacgtcgagtggctctaccagcacaaggagctcggcctcttcgtcgacgtcagccggatggggttcacggaggacttcctgcgccagatggagccgcggatgcagcgggccttcgccgccatgcgggagctcgagaagggcgccatcgccaacccggacgaggctcgcatggtgggccactactggctccgcgacccggccctcgcgcccaactccttcctccgcagcaagatcgagaccacgctcgacaggatcctcgccttctcccaagatgtcgtctctggcaaggtcgccgcaacattttccatttttctatttgcttacatacctgcaattgcttctgctgcagatttcgaattgcatggcatgcttggagtgcaccatttagggggcaagtactccaacaggcatggtaggtacattgtgcaaccgatagatgctatgtatcttattgagacttttggcactttcctttttgtgctgatgtattataacaagggatttcgtataagatttattgacaacaccgatcctgctgggattgatcatcaaattgctcaactaggacctgaactggcaactactcttgtaattgtcatttctaagagcggaggcacacctgaaacccgcaatggtctactagaagtacagaaagccttcagagatgcagggctgcaattctcgaaacagggtgttgcaattactcaagaaaattctctgttggataacactgctagaatagagggatggttagctcggtttcctatgtttgattgggttggtggtaggacttcagaaatgtcagctgtgggtttacttccagctgcattgcagggtattgatatcaaggaaatgctagctggtgcagctttaatggatgaggaaacccggaacactgtggttaaagaaaatccagcagcattgcttgcattatgttggtattgggcatcagaagggataggcaataaggatatggttgtacttccttacaaggatagtttgttgcttttgagtagatatttgcaacaacttgtcatggaatctcttgggaaagaatttgatctggatggcaaccgggtaaatcaagggctatctgtatatggaaacaaaggaagcactgaccagcacgcttacattcagcagctgagagaaggtgtacacaacttctttgttacttttatcgaggtcttgcgtgacaggcctgctggtcatgattgggagcttgaacctggagtcacatgtggtgactatttgtttgggatgttgcagataacagaagtatacgatattttacagggaacacgttctgctctttatgcaaatgaccgtgaatctatctctgttactgtgcaagaggtaactcctagagctgttggagcactggttgcactttatgaacgtgctgtggggctttatgcttctttggtaaatatcaatgcctatcatcaacctggtgttgaggctgggaaaaaggcagcaggagaagtgttggcccttcagaaaagggtgctgactgtattaaatgaggcaacctgcaaggacccttgtgagccattgactatagatgaaattgcagatcgctgccattgccctgaagataaacacaacgcttttcccccctctataacacatgcccaacgtttgcttcctcagattgagatgatctacaaaatagtccagcacatggctgctaacgacagagcaatcatagcagaaggcagctgtggctctcctcgcagcgttaaggtgtacctcggtgaatgcaatgtagacgaagacttgcaggccgcgtag

SEQ ID NO: 20189 - DNA, 1215 bp, Zea mays
  Peptide Sequence Number=SeqID_63564
atgcaggtggcatgcaaccgcaccaagggggcgcaccctttcgacttcgacgcgtccagcatggaggtccaggcccacacgtcatggaccgggagaggggatactccgaaagggatccttctccgtgaaggaagcgggccccgagccctcctactgatcagaggtttgaaggctggcccctcggaagggttcgacaaccgcctcagagcactcgggctccacgcccactactggtcagagctggtaacccccatcagcacaaagttgcaaaggcctgatgggcgcgattccggtcaaggctccgtccactcaagggacacgatctcgcctcgcccgagcccagccttaggcaaagatagccgacctaggaagattcacgcctcgcccgagggtctcctcaagcaacgggcgcaccttcgactcgcccgaggcccagctcgggcaggcttcgcggagaagcaaccttggccagatcgccacgccaaccgaccgtatcgcaggagcattcaatgcaaggatcgcctgacaccttatcctgacgcacgctcctcagtcgataaggccgaagaagctccgcctcgcccgaccccagggctcagcccccgtctcaacctcggaagacggtctctgcctcgcccgtccccagggctcggactcaacctcgacctcggacgacagactccgcctcgcccgaccccagggctcagactcaatctcgacctcgaacgacgaactccgcctcgcccgaccccagggctcggactcgacctcggacgacgaactccgcctcgcccgaccctagggctcaaactcgacctcgaccttggaagacggactccgcctcgcccgaccccagggctcagactcaaccttgactccggaagacggtctccgcctcgcccgaccccagggctcggactcagcctcgacctcggaggagtcaccgcctcgcccaacctcgggctcggactgaccatgtcacaggggctcatcattaccctacccctagctagctcaggctacgaggaacaagaacggcgtcccatctggctcgccccggtaaaacaggtaatgatggcaccccgcatgctccatgacgacagcggttctcagccccttacggaagcaaggagacgtcagcaaggatccaacagccccgacaactgtacttccacagggctcaagcgctcctccgacggccacgacatcacatga

SEQ ID NO: 20190 - DNA, 441 bp, Zea mays
  Peptide Sequence Number=SeqID_63565
atggtaacacctgaggtgttacacaccctcgccccgacctcccccgcggcagcgcccgcccctgccccggccccgtgcgtggtggtgcccgcccccgccttggccccgcggcggcgcccgccccggcgtggcccgcccttgccctcggcgcgaccgcccccccgatgcggcctccccagccctcggcgcggcctccccggccccggcgcggcccctgcctccggcgcgcagctacctgcgcgcggcctcggctccctgcgcgtggcgtcccagctcccgatgcgactcgcgtggcctcgtttaccccctaacgcaatcccgcagacactttggtttacaggtggcaatgagatggatggttctggttatgactatggtactggcgaagatgaagtggtggaaggagacttccaggagttccaagactacgacgagttctag

SEQ ID NO: 20191 - DNA, 162 bp, Zea mays
  Peptide Sequence Number=SeqID_63566
atggatgttttgccttttgatggtctggcacagcctgctgttggagctgacagaaggaaaggggaggctcaaggcaatgttcttcttgcatcaattgagaatatgcaatatgctgttactatagatgttcttcaaactaagaatgggggacacaagctttga

SEQ ID NO: 20192 - DNA, 663 bp, Zea mays
  Peptide Sequence Number=SeqID_63567
atggagcttaaaggaacaatgagtgcccgaatctcggagcttaatatgctgaactcacaacaagacgagtgccttgctgcacttgaagctgagatgaaacagctaaaagaaggccatgaagctaaaatcgataaactaagaagggaagttgttgaagtgaaggttgaattcaaacttgaaaaggttaaaaaggaggatgccatagcacagaaggaccatttggataaacttgttggaaacttttggagcttaaaggatgattgcttttgtgtggctactagatgctgtgaagaattggaaaggagcttctccatggttggagcaaggcccagaagaaaaaactttattgatgacgacatagttggggtgatgaggcacaaagggcagctgaaaaggtggcgaccattaggaaagctctccaaccgaatgagtctgaaggtgtggagcatagggatgattgttgacggcaaaggtgaaggtcatgcgggtttgtaccaatggaccgaaagcgacgaaagacgagcgctgggacttgaccgaggtacaggagaagtggggtggctagccatagtggctaacacctgggacacacaccggtgcgaggacatggcagagcggatcgtgtcaccggtgcgatcgaggactggcgggacacgtgtctag

SEQ ID NO: 20193 - DNA, 588 bp, Zea mays
  Peptide Sequence Number=SeqID_63568
atgggggcactatcatccttcccccttcctttttgtgatgaacaagtcttctgggtcttctttttcttctttgcttcgtacatcaaaaccttcggcggccttcgcaacacctatgcacagatggtagcggaacaaccagtttctgagctagctctagtgattgcttcagacgcccctgaaacaaagggagacaactcgattgtggtagccaaagctaccacaccacaagctgaagatgctgttgtggacctagctgaagggtcaggtgatgatagcgaagacattggcattgaagaagacaataaaattatccgtcccacgaagccaagtcatgtggactttaggaaatcaacaatcaaaggaggacatattgagaaaaagcgtcgattaaatcgcgtgtttgatgctattgggttcttttatcctgactacccccgtgtaatccatgaggtgaagaagaagaggaagcagaagcatgttgaggtgacttcatggtgtcgtaaattttcagctttgaagaagaaacccgaagcgaaggttgttcaagctttggaagagccaagctttgttgaattacctatttcttga

SEQ ID NO: 20194 - DNA, 1218 bp, Zea mays
  Peptide Sequence Number=SeqID_63569
atgtcttcgcactctcctcatgcatcgcgcccttccaccttgcgagcccctggatggggagcgctcgcgttgccttcgtcttgtcgttgttggaggaacgcaacttcgcggaaattggtacctttcagccatcgttcggcttcaaggattttcatcaggcagcccggctgcatcccctcgccggtggtcacccaagatggtgaccaccagtttgatggtggggagaagcaaaccgggctgcggcctctgccccgccctcagcttcaaggatcttcatcatcctggctggggcggagggcgaggcgagccggagctctacctcccgcgcgggtcggcggaccacctcttcttcgagcttctgggggtggaaaccatcccccagctctgtggaggaggcgccctccagccatgccggggaaggcgaactgttgctgcccagctaggatgcaacattccgtcctctgtcctcgctttcgtggcgaggacgagagtgaggacctgccggtgcgctttggggcggtcgacgctcgctggtgcggtgttggtgggcaggtggacaccaccgtcggtgctgaggtggtggcggctggagaaagcttctccgccgttgagaccgtcagtgccacctgtcgaccgacctccggctctttggctttaatgtctggttctcgtcccttgagtggggacgcgaacgagagccttcctgtggcagcgtccgtcctgggaccatcgctgctgctgcagaggtcgctggcgggtcgcttggagttcgtcgtcccgcaggctctccgatgtggaggttgttcatacccgcgggagtggaaccggagttccgtttgtaatggcaccttgagtgccggagccggaggcagcggtgtcagcatggacggaggcagagttggctcgaaaagaagacttcgtcggccggagcctggccgggccgtccactggcgggaccagcgccggagtcgggttgccgaggccatgagccgggctgatccttcgcccgtgttgtcgtccgaggctcggtcggacttcgccgaaggtggagttgacaccgagggtgctgctgctccccctccatcgacgtctgagcctgcaggatcgaaggcgatgagtgaggtatctgtatcccggaggcgtaggagtccctcggctcagtcggccttgcctgcttacgtgtactccgtcattttcatgatcccactaccgaagtag

SEQ ID NO: 20195 - DNA, 648 bp, Zea mays
  Peptide Sequence Number=SeqID_63570
atggcggtggcaggcgggcggaagcagcagtcaagtcgtcagcaagctcacgccccctcctgggacagcgagagaaccctctcccacggcgtgaagacgacgcgcccgtgttccgttcctcgaacggctcgcgcacgcacaacggctgccccgcgaaccactcgtcccatcgcattaactctgcggcgggacaggcggcacctttggcaggcaaagcaggcgacgtttcacctccgccataatgaccgcgtcaaaaaaaggctggcccctctgaagggttcaacagccgcctctgagcaatcgggttccaagcccactaatggtcagaggctggcccccgaacggttcgacagccacctcagaccacgcagagcgagggatgaccgtgggtacgttcgatacataaccaaggctctggctacgctcccgaggtaccctagggacatttccgagaccgacgggaacgattttgtaacagaatcccaccagagggaggcatcgagccctcgaaccccgtcaaaaggggaccggggccgaactgaccgcagtcacttcgccgctccactgaccgacctgacaggaatacagcgtcgcctgccctgctccgactgccgtgccactcgccagagtgaggtcaacagcggctaa

SEQ ID NO: 20196 - DNA, 669 bp, Zea mays
  Peptide Sequence Number=SeqID_63571
atgccgacaggtcttaacccatcctttgcttgtcagggcttcctctccctctactcccaaggtcgtgcctccactgcccctggctgctatcgccgagacagcgccatcgggaccctaggctctagctgtgggtctggctacggcggcgccaacaccaagtggtgccgcagcgacggagggggtccctactgccccgacggctgccacagcctcaacgacggcgatgccgtcgagtacaccgtcggcagcagcagaggaggccgcagctgcgcctgccgccgctatcgaggtcgacgcggggggtgcatccagctccaacccgccgcccactccaaaggagacggaggtgatttttgggtggcgactccgatggaggagcgcaccaaggcagcgtcccgccagttcgccttcgagcgcaggggcttgatgacagggccagcatccttgccctatccgaagagaacctcaaggagaaggatgtctccctggataagcgggcgatggatctcgcctggcgggatgtttgagaggtggaataagctgctggccgatcatgagctcgaggcggaggagaaggagcggatgctagaggagaaggagtggacgctaggggagcgggtccgccagttggaggcggcgcgggcggcacagacagccctaggcccttag

SEQ ID NO: 20197 - DNA, 456 bp, Zea mays
  Peptide Sequence Number=SeqID_63572
atgggcaagagcaagaagggtggtagttcttcgcatcacttcggcgacaaacgcaagcgtgagccgactcctccctcggaggacttaagcgactcggagtactcggaggaggagttctcctccgagtccgagggttcaccggctcctgcctctcccccggcgtcgtctgatgactcagacgactcccaggggatcgccgcagaggtatggacctacatccgggctgtcgagcgtgccgggctcgagggctcggatgagtcagagtactcctcggatgaggataactcctcagactcgtccgaggagggcggcggcggcgatggcggtgacggcgacgacgacggaggcgatgatgatggcggcgacgacgacggcaagggcggtgacggcggcggcaggggtggcagcggcgacggcggtggcggcagcaagggcagcaacaaggccagtggctag

SEQ ID NO: 20198 - DNA, 309 bp, Zea mays
  Peptide Sequence Number=SeqID_63573
atgaccgcgtcaaaaaagggatcgggaaaggggatatttcggaaaaaggatccttctcagcgaaggaaacggaccccaagccctcctactgatcaggggtttgaaggttgcgccctccggggtttggcaaccgccccagagcactcgggctccaagccctttactgatcaggggttcgaaggctggcccctcgaaagggttcgacagccgcccagagcacacagagtcagggatgaccctggaggctcgggggctgctctcgcaccaggctacggccaaatcgtcgaccacgtcgacaaagcagcttaa

SEQ ID NO: 20199 - DNA, 435 bp, Zea mays
  Peptide Sequence Number=SeqID_63574
atggttgaacaaggagtggaccaaacacatacgaagccaaagttcatttccaatggtgatgatgatgatgagggtgtcatattcgaagaggatgaggatgatgatgagaatgatggatacctattcgctgggcaatataatgagaccaacgaggacatcaagatcgatggtactcaagatgaatctactgccactgatttgcctgacctctacgacaaagtgtacagtaacgtgcctgaagaaacacatatgctgaagtctgttcccaactgcggttattgcactgcgaagaagtttgagtatgagccacctgggttttcttgtcgtggtgggaaggttgagctagtcccactggagaccctccccagcttcgaaggttgtgggatagtacagactctgatgctagacactttcgtgataacattaggtttttaa

SEQ ID NO: 20200 - DNA, 1122 bp, Zea mays
  Peptide Sequence Number=SeqID_63575
atgaagacgaggcgcggtgcctgctactcctgccatgcggcgccgggcgagggcccggaggtgcaacgccggaagaggcgcaggacggcggccgaggcatcgccggcggctgccgaagatccaggtgtccgcctgggcgccagagacatgttcgaggatctgcccgacgatctcgtcgtctccatactgagggacgtcgccgcgtccgccggctcgccggccgatctcgccggcgccatgctcacgtgcaagagattcagggagctagtagcgcggagcaaggtggtggtgctcgcgcgggcgtcgccgcggtgcctctcggtgcgcgccaaggcctggtcggacgaggcgcaccggttcctgcagcgctgcgccgacgccggcaacctcgaagcctgctaccttctcggcatgattcggttctactgcctggggagccgcggctcgggcgcggcgctgatggcggcggcggcggtgggcgggcaccgcgaggcgctgtactcgctggccgtgatccagttcaacggcagcggcggcgggaaggacgaccgcgacctccgcgccggagccgcgctgtgcgcgcgcgcggcggcgcggggccacgtggacgcgctccgcgagctggggcactgcctgcaggacggctacggcgtgcgccggtccgtgctggacgggcggcgcctcctcatccaggcgaacgcgcgcgagctcgcggccgcctcggtggcgcacccgtgcctcctcatgagcgacctggggtgccgcgccggcgaggcgcacgcggccaaccggttcctggtggactggttcgcgtcgcggccgctgggcttgacgcccggcggcaacggcaacggcagcgccgggacggcgggctcgccggaggaggacggcgttggcggtctccggctgtgctcgcaggcgctgtgcgggcggcccgagacgcggcggcacgagttcaggcggtgctcggtgtgcggcgtggtgaactactgctcccgcgcgtgccaggcgctgcactggaggatggcgcacaaggcggagtgcacgcccatggaccggtggctcgacgcggtgcagcccaacgccatcgccaatgcggacgcggcggccccggcgccgtga

SEQ ID NO: 20201 - DNA, 516 bp, Zea mays
  Peptide Sequence Number=SeqID_63576
atggagcagaggattacccggtctacgctcgccggcggtcgggtggagtccggcgaccgtggactggcctctccggcgaggcaaactccgattcctcgctcggggagcttcaccgaggtgtgcacagtcttctccgagggtcggacggagttgggaaggggtctgctggccggtctacagtggcagggagatcaggcggccgcggacacgccatgcacgggcaaacgccggacttggatcgacgactcgttcacaggcacaggacactataggcagaaacggtacaagttgtcggatgatggatcatatgatatgaacgctcgttacgtgtttgagtataacgcgaacgatgtcattgcagatgcaatgtactatgcacgaattcaggctataaaggcatggtatagagcaaatgctgatgatcgaccgatgccaaatgccaaggccgagtggtcatcaatttacttgacggagaagcaatacctagaggtgtcggtgccgtggatggccacctga

SEQ ID NO: 20202 - DNA, 249 bp, Zea mays
  Peptide Sequence Number=SeqID_63577
atgcaggcggcatgcaaccgcgccaagtgggcgcacctctccgacttccaacgtgcccagcatggaggcccaggcccgcgcgtcatgcaaccggcgcactggatgctgcgtgcgagcaactgcaccgccacccgcgccactgccacgcctcctcgactgcggaaccagcgggcaggagcagcggtcacgtcgtcagccaagcttacgtcccatcctggggcagtgacagagccctctctcacggcgtga

SEQ ID NO: 20203 - DNA, 729 bp, Zea mays
  Peptide Sequence Number=SeqID_63578
atgggtccacaaatcccaatggggggcgatccccaagtacccctcgcacaccgctacgaagatggcggcctacgagatggagttgggggtgaggttgtgcaactccaccccatagtggtacaggatcgcccgcataaagcggctcgccggcacaccgaatccccgctcgtggaaggagacgaagctcacgatgtaccccggcggtggggacggagcggctccgcccacgggaggaatccattccggtcgctgctcatcggtgagagggtgaagcaaaccctcgtcgaccagatcctccagatcactcgccgtcaccgtggaaaaaggccatggatcgcgcggcgggatgatggtcacccggtcggccatcaccgagtggaagggatggcggcgcaaggggcaggaagggcggtttcctcttctctggctaagtctctcgggttgcgaaaacctaagagggaggcaggaagcggagcaaagaaccgtcaacaggccctctcccagggaccgggaaagggggataccccgaaaaggatccttccccgtgaaggaaccgggttccgagcctccctactgatcagaggttcgaaggctggccccccgaagggttcgacagccgcctcagatcgcgtgggccctacacccactactggtcagaggttcgaaggccggcccctcgaagggttccacggccgcctcaggctactcgggctccgcgcccattactga

SEQ ID NO: 20204 - DNA, 684 bp, Zea mays
  Peptide Sequence Number=SeqID_63579
atggcccaagggcacatttccctttcacaactggaggtctgctacctcggcaccctgctgagagaggcgcgcagtagccccggcgagcgaggtcctcagggatcgcagcgagccccagacgtcgacctcgcgacggatgaacgacgacttggcggcgctccgatccgtcagatcctgagggaaggaagcggggcgtcacgaagaacgccttggtcacagaagaggaaaggactggtcctcccgttcatcatcaagaacgaaaacggggtccgaggcctcatgggtccggaaccggagcagctggcgccggcccccggagctctgccgcacagcgacgaggctgccgcccggcgggacggatcgcgcctccacgcccccctcttccgaggcaccaagcgtcgacgcatcagccgtctcgacgttggcagcaaccggtcgctctccgactggagcggcggcaacttcggtagcgacatggccggcacgaccggtaggctcgggaccgcgccagcgtcagccgcctcccctatcacaatggtcgcctcggcagaagagccagcctcgggaacctgccccacggcgaccggtgccgcccgagcccctgaggtggaacgccttgcgagagggacggtcgaacggcaaggcccggagcggcgctggccgcacaggccggcgtcgtcttaa

SEQ ID NO: 20205 - DNA, 138 bp, Zea mays
  Peptide Sequence Number=SeqID_63580
atggcctctgccaggtacgaggcgctgggtctaagctccattgatgctcgagctgtgctggtggaagtggagcaatggggcggcgccaatggagcaggggctgaaggtggcatcatgagatgcaagcaggaggtctag

SEQ ID NO: 20206 - DNA, 552 bp, Zea mays
  Peptide Sequence Number=SeqID_63581
atgacggagtggctgaccttaagagctagtgcaaatcgaccgaacgctactagagaggagaggacggagctcaccagagtgaagggaggacgcgacgacgctagctcaatcgggctcgggaaggagagggggaggtggctgaggctggtgtggagaaggcggagctcgggcggtcccttttataggcgcccaggagggggggaagggaggagggatgacaacgccgacgagctcgccatgatggcggtgatggcgcaaacgacgacgggatggatcgggcaggcagggaaccccaccagcgagttcgtcgggcccttctcgccggtcctggccaactccggtgacctcggagcccctgtagcttgcactcgccccagctccagcgacttcaccgccgtggacaggagcagcgccactcgtagccgtcaacccctggcatttgatctcaaccgcctgatctcgatcgcgcggtccagatctccggatactgtttcaggcacgcgccctgcccctgggccccatctgtcggtcgcctgcgccccctggcgctag

SEQ ID NO: 20207 - DNA, 729 bp, Zea mays
  Peptide Sequence Number=SeqID_63582
atgggcgtcgccgttgggggcatgttcaccgtcgtagggcgccgtcgggtggagaagatggcctccggggctatggatttagatggacgcggacagggggtgagcgagcgggccgaggattcatctcgtgtcgacgacgccttcgccctctccgagtctccgtccgtcttccgcgtcctccgcagctggactcggggcgcctgccccaccaccgcctccgcttcgccgtcgccctggttggcctcgccgcgggacgccatctttgccgcgccggcgaggcccctacggtcccgccgcgggacactccggctggaagctaaggccgcgtggagggctgccggagggggacggggcccgcgggtcccggccaagggcgctgtgctcgcctcctatatgggcgccgaggaggtggtgggaccatcgtcgctgcttgacgaggaagagttcatttctcacatcagaaaggaactggataatggaaaacttcctgcagatgttgccagtaacctggaggagctgtattataattacaggaatgcggttctgcaaaatggagatccaaatgcatatgaggtcatgctttcaaatatgatgaccttgtttgatcgtgttctactggatgtacagaatccatttaactttccaccttatcataaagctttgcgagaaccgttcgactattacatgtttggtcagaactacattaggcctctggtagatttcaggtaa

SEQ ID NO: 20208 - DNA, 399 bp, Zea mays
  Peptide Sequence Number=SeqID_63583
atgtggaggcctccgagagtgcgctatccgcgctactcctccaccagccaccgcgaggaaacttccgcctcctcctaccccgcactggcgactgcatctaccggggccgagccctcgatccggcgtgcttcgccgccggcatcgaggcaggtgggcgagaagcgggcatgcggtggcgggtctggcggcgtagagctcgcagcacttgcaaccgacgaggctcgacccaccgcaatcgaagttccaagcgaggttccccctgctcgtcgccggagagtcgccatcggcaaacggcttcgttgtccgccaacttcgtccaaggttgctggcaaaaggaagcgaagctcgtcgccgtcgtcgtcttcgtcttccattcgctccaccgaaccagatccgtga

SEQ ID NO: 20209 - DNA, 825 bp, Zea mays
  Peptide Sequence Number=SeqID_63584
atggggagtgattggaaccaggtgatgtctcaatatggaagcttccttagccagattgacgagctgcctatgggaactcaacattctgaatttccagttgatgggcaagccgagggctcaagaacactagctgttcctaaaaagccaactcaaagaacaatgctagcaaacttcactgctgatgaggacactaggtgttccacttttgctggttacatgatgacagtcctccgacagaatcctagtggactcactgacgcagacaagacatcactggcagcctctaggtttgcagctattgagaagaagcctttccactttttacattgttgggccatacttaaggaccaaccaaaatggatggacaaacacatggggcaacaaaatcagcatggcaacgctaatcccacccattctaacactgtcgatgtggatgcagaagaatctgtaccatctagcttcacatcgaagaggccactgggtcgagattcttcgaaggaaaaggccaagaggactaaatcagtggacacatcttcatcagattctgagttcatgacacgcatgggagatctttctttggagcgcctttcagtgtacaaaacagctgttacaactaaggaaaagaagttggattcaatgaacaaaaatgagaggcaaaaactgctcctagaaaagaagaagttgaacctagagaaattaaggctggaaaggcagaaactaaaggaggacaaggaagaggagatcatgatcttaagcatggatctgagcaaatgtaacctcttctccgcaagtactatgaagccaagcaccaaagatattggctag

SEQ ID NO: 20210 - DNA, 177 bp, Zea mays
  Peptide Sequence Number=SeqID_63585
atggccagtcctacaggtgagttcgtcggcacagacctgaggcccaaggcgagtccaagcatggctccgttgatggatcccgccatggaatcggtgaaggagcagatggcacgatatccggatgggagcaaatctggcggccatcatggtcggatagaagatgcctttaaagcatag

SEQ ID NO: 20211 - DNA, 135 bp, Zea mays
  Peptide Sequence Number=SeqID_63586
atgggtgctaggctctacctcgctcaatggtcagagatggaagaagatcattatgttaattggaacatggagaaccacccgagaaaacagtgctaccacaagggtggtatgggacgcccttggctgaataattag

SEQ ID NO: 20212 - DNA, 129 bp, Zea mays
  Peptide Sequence Number=SeqID_63587
atgagcagctcgtggttcctgagtgtgttgccgaacatcttcttgagcagcaacctggtgaagtgctcaggaggagatgtaggcaacttggaggactttgaggagttccaggactacgacgagttctag

SEQ ID NO: 20213 - DNA, 777 bp, Zea mays
  Peptide Sequence Number=SeqID_63588
atgctccggctgtcgtactcgcggcgcctcctccagagcagcagcgacagcggcggcgccatccccgacccgaaccccaaacgcatcccgggcatcccgcccgccgacccgcccgcggccgtcaactccgatgtggtggtgatcctcgccgcgctgctctgcgcgctgatctgcgtcgtggggctcgccgccgtcgcccgctgcgcccgatcccggcgcaacaggggcgctggcgcggggggcgacggcgccccggcttccccctcgagcgacggcggcagcgggcaccgccaccacgcgcaccaccaggccaccggcgcgagcgcggccgccacgaccacgaccgcgaccgcgagcgcggccgccgccagcaaggggctgaagaagaaggcgctgaaggcgcttccgaggctggcgtacgcggacgcggtggcggcggccgcggcggcccggggcgcggcgccggcggcggagggcgaggaggagcaggagctgctggcggagtgcgccatctgcctggcggagttcggcgagcgggaggaggtgcgcgtgatgccgcagtgcgggcacgggttccatgtcgcgtgcgtcgacacctggctgcgctccaactcgtcctgcccgtcctgccgccgccccatcgtcctggacgacccggcgccgcccaagcggtgccgcaagtgcgaggccgtcgtcctggaggccgtcctcgccgcctcctcgtcctcctccgccgccgccagcggaggccgcggcggtggcgggttcttgccgtag

SEQ ID NO: 20214 - DNA, 438 bp, Zea mays
  Peptide Sequence Number=SeqID_63589
atgtcggacgaccttgttgttcctgtccactttgaagttggtcaagaactttgctttcgcctcctggatcatccgctccttgtgctcctcgaactggagctgctccggagtcgccaaaagtatgttgacgccttttcggagcgccaaacactcaacaagaaccgtggcggtgccctctgcacaggggcggacggtccgcgcgcaggggccggacggtccgcggcctggtgcgaggcgcggtggtgctctctgcgcaagggcggactgtccgcggcctggggccggacggtccgcggcctggtgcgctgctgggacttctgcctgacggccggacggtccgcgccctggggccggacggtccgcacgtacgcagggacggcggaaaatcgccgacggcgcctggatctcgctcccgggagggaccccgtcggggagtag

SEQ ID NO: 20215 - DNA, 309 bp, Zea mays
  Peptide Sequence Number=SeqID_63590
atggccggtgatgtttccaccagtaatatcatcgagccgacatgggaaaccttgccggccgaagaaaaactcttgttcgaggagcgccaggagcagctgatccaggaagcaaagacgaaatttctggccgacttcaaggtggacaggaataacaaagttattcggcaacgggtgacagatctggcttcgctccgacctactacgaatacccccaatgtgcataagttcttctacaactattctaaatcgactgtccggaataccgtagattattctggacatgagaagctttttggaaaaacagactaa

SEQ ID NO: 20216 - DNA, 489 bp, Zea mays
  Peptide Sequence Number=SeqID_63591
atgaaggaaaataaagggaccctcgccgtgaggacctggaaacggacagataacctgagtgatgctagtttgcttgaagcggagatagagaggcgagatggtagtatggtaccgaatttccgtgcagaatctgagccagctctctttccctgtgatccagcgcatccatccgttccaggtggagatggtgccgacaaagtccaaggaaggagtgaaggaccactctccccgtccgccagattcgtcgagatcgcctgccccggtaaaacaggaacaggacaggccgcacggccagacgcgacggtccacggagctgcctcgcccgctgtcgctgtcccggccacgcccagcgtcgcgtcgtgcgcacgcaggccgtggaggttagaaagacgtgcgcgacttgcggcacccgtgattcgtgggcggacgacggcacggcggggtggtgctgctggtgcaccgaatgcgcttatgcgcgtgcacaggtag

SEQ ID NO: 20217 - DNA, 396 bp, Zea mays
  Peptide Sequence Number=SeqID_63592
atggtggtgaaggatcgtgctaaccgctgctggcgaagtgtggcccctgtgctgtgctcatgcagcttcaatctttggttctttttaaactccacttcccaccgtgaaaaaaagaagaagaagaagaggaggagcaagaactctggagtaacgtcgtgccgggcatgtcgttacgctgaccacgcggtccttgggtcccgactccccatcccgttgttgttcgtccctttgtgctcagttctcagcgcgtcggggatccggtgcacaggcgacagcccgtacgttggtagcttctgcgattttctccgggtccctgtagcagcccagtaccgccagtacgagctccggtcgttgtactccagtccaagagtggacgtgtcgcggtcgtttgattaa

SEQ ID NO: 20218 - DNA, 396 bp, Zea mays
  Peptide Sequence Number=SeqID_63593
atggagtgtggaattatggaacccaaggtgcaacggaaccatacagttgtttcatcctttgtccatggtgcagtcaattgtagtaaagctgtggagaaagtgcaacatgctgagttgcgtgtcccccatgcttttggttttggacgtaggctgagaggagaaaagcacagaactgtgtgcatctcaatcacttcatctgccgtgagttccaagatgcttagtttggcgttccaggacaggaaaaacaatgcatggtccaggcgattctccctggctgcacagctatatgctatgtctccattcattagccaacttgaccaaaaaatcagcactaggagtgtgaactgtccaagctacagtgtggacatgtgtgcctcaacacataatcaccagtaa

SEQ ID NO: 20219 - DNA, 1860 bp, Zea mays
  Peptide Sequence Number=SeqID_63594
atgcactttccggccttcctcgccgaccagcgccgcctccgccgcgtcctctcctcctctcgcaccacgctcgcgacactcacccgcctacacgcgctcctcgtcgtttcctcctcccagcatatcctctcctcgctcgccgccgcatacgcccgcgctggcgcgctcgacgctgcggagtccaccctcgccgcctccccctcctccccctcctccatagccgcctggaacgggctcctctccgcgcactcccgcgccggtgcccccggtgccgcgctccgcgtctttcgcgcgctcccttcctccgcacggcccaacagcaccaccttcacgctcactctcaccgcgtgcgcgcgcctcggggacctcgacgccgctgagtccgtcagggtccgcgcgtttgcggccgggtacggtcacgacgtgttcgtctgctcggcgctgctccacctctactcgagatgcggcgccatggaagaagccatcagagtgttcgatggaatgccgaggaaggaccgcgtcgcgtggagtacgatggttgctgggttcgtgaccgctgggaggccggtggaggcgcttgcgatgtacagtaggatgagggagcatggcgtgtcggatgatgaggtggtcatggttggggttatacaagcgtgcatgtcaactgggaacgcccgaataggggcctccgttcacggccgtctcttacggcattgtatgaggatggatgttgttactaccacgagccttgtgagcatgtatgccaagaatgggcacttggatgtggcatgccaagtgtttagaatgatgccgtacagaaatgatgtcacatggagtgcgctgatttctgggtttgcacagaatggccgtgcagttgaggcacttgatttgttcagagagctgcaagctgatgggcttcagccttgttcatgggcacttgttagtgcactgcttgcttgcgctagtgttggattcctgaagctagggaagtcgatacatggtttcatcttgaggaggcttgagtggcaatgtattttgggtacagctgtccttgacatgtactccaaatgtggctccctggaaagtgcccgaaagcttttcaataagctttcctcaagagacttggttttgtggaatgcgataatcgcatgctgtggcactcatggatgtggtcatgatgcccttgctctgttccaagaactgaacgaaaccggaataaagcctgatcatgcaacatttgcttctcttctgtctgccctaagccactctggtcttgtggaggaagggaaattctggtttgatcgcatgattaaggagtttggcattgaacctgcagaaaagcactatgtatgtatagttgatctcttagcacgttctggtcttgtggaagaagccaatgacatgcttgcatcaatgcaaactgaaccaaccattgcaatttgggtcattctgctttcaggttgcttgaataacaagaagctagagcttggagaaaccatagcgaaaaagatccttgagttgcgacctgaagacattggtgtccttgcactggtatcgaatctctatgctgctgcaaagaagtgggacaaggtcagggaaatcagaaagctaatgaaggatagcggcagcaagaaagtgcctggctacagcttgatagaggtcaagggaacacgtcacgcattcgtgatggaagaccagagccaccctcagcatcgggagatcctgaaaatggtcgcaaaactcaattctgagatgaggaagctgggctatgttccaagaacagagtttgtgtaccatgatctggatgaagacgtgaaagagcagcttctcagttaccatagagcagcttctcagctaccatag

SEQ ID NO: 20220 - DNA, 744 bp, Zea mays
  Peptide Sequence Number=SeqID_63595
atggcgtcttcatcgacgctgacgctaatgaacactgttgacgagcaaggaagtgaagttactttcattgggttctacgactaccagtgtttgtcttctctgcaagcctatccacttcatcagaaggaagtccatgccaccaaagtcgctcagattggaactggaggttgcgcacgcttccttgcagcaaacaaggcggaagctaggagcagattagagctggggagagaggggagcaacaatgggttcgaaggtgcgaggttagggttgaggcgaaggaggtcgggaaaagggtggcatgtccaggaggtagaggcgggcgagtgtggacgactactgacgcggaggttgtttgcggagcgacagcgtcgggtaggacgcatggcgcggcttgtgctgggaggcaccgagatccatggcgcctacctcggcatcgagatattatcgaaatttaggaagggtcctttgaccggaactgccttcgacccactgcctttgccaactggtgttccagagtcaatgtgtttttgtggtgatccttgcaaggttgacaagtctgaggatcatgacacctatcgtcagaggtattggatgtgtgctaactgtgcatttgagcaaatgatttttcagcgctggatgaatttaatgtggattgacatagaaatctcacagaaagacaagaagtggttggagaatcttaaaaagtgggatgcagaggacaaagagaggatagagaaaagatga

SEQ ID NO: 20221 - DNA, 246 bp, Zea mays
  Peptide Sequence Number=SeqID_63596
atggtgcacggcgacatcgggacgtcgccgctctacaccttctcgtccttcaccatgtactcgttcctgcgccagcacgtcaacttcagcggcaacaggctggcgggcgtggttctcaggactcagggatttctcgccatggagtctcgctcggccgcggacggtgtatctgcgctccaaatctcggtaaggcctcgctcgcgctttcctgtggccatcgcgacgttttgctctgggattcgctag

SEQ ID NO: 20222 - DNA, 444 bp, Zea mays
  Peptide Sequence Number=SeqID_63597
atgggcaagaaacgcaagcgcgagccaactcctccgtctgaggattttggtgactcggagtattcagaggaggagttctcctctgaatccgaggggtctccggctcccatccctctgcgtgagtcgtctgatgattcggacgactcccaggggctcgcggcggaggtctggacttacatccgggccatcgagcgttccgggctcgcgggctcggatgagtcggaggactcctcggacgaggaggactcgtccgaggaggatggcggcgacggtggcgagggcgacaacgacgacgacgacggaggcggtggcggcgacgacgacggtgactgcggcggcgggggcgacagcagcggcaggggcagcaacagcggcggaggcggcagcagcggcggcaggggcagcggtggcagcggcaggggcggcaacaaggccagtggctag

SEQ ID NO: 20223 - DNA, 303 bp, Zea mays
  Peptide Sequence Number=SeqID_63598
atggccgcaacaacgtggatccggctgggaaggccgcagcggcgacggaaccaacgaaggcgacgaaggagggaggcgcgcggcagggtgggtccagccgggcaggggcctgcgccggacctagcaggggaggtggacaccgacaacgagagaagcttgaaggtaagaagcgctactgggcatcgacgcagtcagggacaaggtggacaacgcgacggtaggggctgcataacgcaagagcgggtagggacgccgattgtcgagggggaggagatctgggccatggactggaggctctgctag

SEQ ID NO: 20224 - DNA, 435 bp, Zea mays
  Peptide Sequence Number=SeqID_63599
atggccgcgccagcgccaccacctactgacggcgaggtgaggattcagaaagttgacaagatcgagctcgtctacaacatcctttccaagccgaaactgaaaacagcgtcgttcaccccgctccggcaaccgtgccagctatcagggaagggccgacaacagcaagtcacgaccttccccgagttcggcctcgggcgcaactgggagctccgcctcgcccaaccccaggcctcggccccagcatcggcctcgggggaaggtctccgcttcgcccgaccccgacctcggcctcggttttggtctcgggagaaggtctccgcctcgcccgaccctgggcctcggcctcagcctcggcctcggaggagtcaccgcctcgcccgaccacggcctcgtatcagctacgctactagggatccatcgttgccctacccttag

SEQ ID NO: 20225 - DNA, 1881 bp, Zea mays
  Peptide Sequence Number=SeqID_63600
atgccatcctcttcttcttccgacgacgccacgccgccggccgccgcctcgtctgaggagacgttgagtgacgtgatggtggaggagttgcgcgccggcgactctgttgaatttggtgtgtcacggatgacgtcagcccgtattgaagatatgcagcggttgggctactttggcggcggagtcgctcgtgctccggggacggaggaagtccccgagtcggagggcgagttggttgttttcgaggcgttcttcgtcgccggactccgcttgcctgcgcaccgggtcttcgaattaaatcaactgccgtacgacggctaccctggtcaagacgaagcggaccgccgtgggaagaaaccggcggtggagactggaggcgaccctgcgctggtggccgccacctcctcgaaaaagagaaaattagtgatggacaaggatcgccaaggcgcggcgcgaaaacgccaggcgactgtgagggttcacgaagctcggccgaaaaggcagcggggaacggcgaaggctgaggcctctggcggaggcaagccgccgctgccgacgaaggtgggcgcctccgcgcctggcaaggcgccggagacgacggtgggcgccggaggccccaagctgtcgaagggtcggacgagggccccgcttgctctagttgtgcctggcgcggcgatcgcgacggctgcgccagcgccgaaggcggggggagagacccttggcgccggaggcgaggtgtctgccctcgcgctggtcagagacgaggcgggcgtggcgacccgtcggctgaagggagcgacggaggcgctgagtcgagcgacggaggcactgagtcaggtggctgactttaccagccgcactgcgtcgggggcccttacggcagcgttgtctgccgaggtcgagagacttcggacgcaacatgcggacgctgtccgtgagaagtcggcctccgacagcaagtgccgcaaactggcggagaaggtggccgcccttgagaaggagaaggctgacctccggcgccagctggcgggggagaggagggaggccaacgaagccatcgccaaagagcaggctgcgcaggcggagtccaggctggcgcgggcggaaggcaatatcgccaaggagctcgccggagagctgcagcggcggcttactgcccaggagagccgcgcggagggggccgaggccgcgatgcgagcggaggccgaacggacgcgcacgcagctcatgacttcatatcgcgagctgggtgtgcggacgggtgacttcgaggtgccggagcgagaggccggacttcgctatctggaatgggtgcaggaggagctgcaggagctccccactgtcttggcggggttgatggcgttcacctccctggtcacctgcgaggcagcaatgaacgcgctgtctcgcgaaggctgccggcactttgaggccctcgaccaggtggatgaggattttgggcgtgatatctttgaggtcgaagaccccgtggtgaaggaatccgccggggccctctatgaccggatgtggggttcatacggtcgtgaggtggtccgggcgcgggccgaggctgcgagggctcaggcggagcgcggcgagcgggtggacgacttcggggcgctgaacagcgcgctgcctgagccggagacgacccttgcggaggccgcgactggagtcgccccgggaccgaccccggagactgcggaggatgcaccaggcgctcctgcatctgccgcggccggcgaagaccttcccccaaaggtggccgaaggcgcgctagatgcccccgcagctgctgtgccgagcgctgaagatccagcggaggtgggggcggaggccgcgggggaggctcccgcagcggccgggccttcgctggtggcatag

SEQ ID NO: 20226 - DNA, 1080 bp, Zea mays
  Peptide Sequence Number=SeqID_63601
atgaggctcgggcgagatccaccgaaggcttcgaccgaacccgctgcggaattcaaactcgaaggtgaaacggtctttctgcgaatcgcccgtcccgtcgcattaactccttggcagggcaagcgacacctccggcaggagaagcgggcgctgtttcgcctccgtcatgatgaccgcgtcaaaaaagggaccgggaaaggggatattgcgaaaaggatccttctcggtgaaggaaacgggccacgagccctcctactgatcaggggttcgaaggttgcaccctccggggttcggctgccccagagcactcgggctccgtgcccattactgatcaggggttcgaaggctggcccctcgaaagggttcgacaaccgccccagagcatgcagagtcagggatgaccctgggtacgtccgttacatggccgaggctcgggctacgctctcgaggtaccctagaacatttccgagaccagcgggaacgatttgtaatggagtcccaccggagggaggcatcgagccctcggatcctatcgaatgggtctgggtccagcaaatcacctgcatctcaccggaaacaccatgttcggtgccccccggggaggcttgggggctgctctcgcgccaggctacggccaaactgttgaccaagtcaacaaaccagcgtgaaaactcggagcttgacctcggcaaggtcgaagtgaccgcagtcacttcacccccctttactgaccgttctgacaggaaaacagcgccgttcaccctgctccggcaaccgtgccagctatcagggaagggccgacaacagcaagtcacgacctcccccgagtttggcctcgggcgcaacagggagctccgcctcgcccgaccgcaggcctcggccccagcatcggccttgggggaaggtctccgcttcgcccgaccccgaccttggcctcggtttcggtctcgggagaaggtctccgccttgcccgaccctgggcctcggcctcagcctcggcctcggaggagtcgccgcctcgcccgacctcggcctcgtatcagctacgctactagggatccatcattgccctacccttag

SEQ ID NO: 20227 - DNA, 369 bp, Zea mays
  Peptide Sequence Number=SeqID_63602
atgacgtcgggtgctctcaaaccccctacggaaggaaggaaacgtgagcaggatccatgccgcatcgccagatatgcgtctacaaggctcaaggcactcctccgacagccacgtcggtacatctacgaggctcaagacgctcccccgatgaccacgttgtcatctgtacagggctcagggcacatccctgccagccacgttagctccaagctacacccccattgtacagctgggcatctccttgtgtctataaaagggggtgtccagggccccacggggggaggacggagggggcgagaaagggagacaaacatgcaacgtacggacacacggacgcacgacgcagacgagcggaggcgggcagagtag

SEQ ID NO: 20228 - DNA, 564 bp, Zea mays
  Peptide Sequence Number=SeqID_63603
atgggtttgttaatggattcaaatggaaacccaacggtgggtatgggaaacccgttgggtacccgaaacccgcatgggtatgggtttgggcaaaatttcatacccgtcatgggtatgagttttttagcgggcgtattttttcttcgcgggtatgggtttgggcacgtaatacccagcgggtttttacccattgccatctgggactcggaggcctggaaaattggcagtaatggtggtaatcatagtgcagctggtaatctccagattattccttgcagtgtaaaaggcttggctgccagcgaggccggatcccgcggcttgtgtgcacagcagcctccatgccttcagctggtgatccgagcgccgttgcccggaagaggaaccccacaaaataaaactgccccacccatcagcccatcacccaacccaaccacctcaccagctttttatatacccgcgcaccccggcgccagctacccatgtcagacgacgcgccatcgcgcctccaccaccccgaccctgaccccgaactcgccgtcgcaacaggccaagacgcagcagtag

SEQ ID NO: 20229 - DNA, 246 bp, Zea mays
  Peptide Sequence Number=SeqID_63604
atgaacaagaacacaagagacacaagatttatcccgaggttcggtcacaccaccaaggtgccctacttcctcattgaggcgcccacaaagagccgggagtttctcgtggagcccttctccacttcattagaactccacaagttcgatagacagaggcagaagaaggtcaccgacttcgagacccaccaccatgattatattgatgaatgggatcagcagtcggatctaaactatgtgaacgactag

SEQ ID NO: 20230 - DNA, 369 bp, Zea mays
  Peptide Sequence Number=SeqID_63605
atgaaggccaaaaccgagtgcgacatgtctccgatccccgccctcgccggcgacggctctacctccgtcaagcgcggccacagtaagctcccccaaagtcccttgcaggagttgacgtgcagcttcatgtgcttcctttgcatgctctcgtggagcctactccacaacgccatgatattcccgcgcccgcagttggaccttctgcagctgcatagagctcctcgcgttcgatgtgggacgtttgcagacatggacgatgacgacgacgacgatgacgatgacactaaggacgagggggacgaggacgtcgtggccgcacgtcacgacatcattggatcgtcccagttgcaggacgcttccacgacttag

SEQ ID NO: 20231 - DNA, 756 bp, Zea mays
  Peptide Sequence Number=SeqID_63606
atggcggcggcggcgacgaacgccgatgtggaggtggtcgacttcgacctcgatgacgacgacctcatggacgaggacgccgggccggatccagcaccgccccccgcctcccgcctccgctccaccatcgcgggcgacgacgcgccgcgtaggaccaagggccgcggcttccgcgaggaccctaactcctccgcgacccgcgactcgcgctttggcgcggggggacgcgccgacctcgactcgcttggcggccctggacccatccagtcaattgaaggatggattgtgttggtcacaggagttcacgaagaagctcaagaagatgaccttcaaaatgctttccaagaatttgggcaggtcaaaaacctgcatttgaatttggaccgccgtaccggatttgtcaaggggtacgctttgattgaatacgagaagtttgaagaagctcaggctgcaataaaagaactggatggagctgagctttataaacaaagaatgagtgttgattgggcatttagcagtggccctgctaaacgcagaaatactcggaaaagctgtgttagtctgttggacccaaatatttgggtggtactggtcaccaccaagagctcgttcaaggaccccacccaggagaaggcactgatgtttccccagcatgtcttgaactacttgctatgtgtgacagagagcaagaagtctggggattccaaatattaccttggtgtatgtggatcacctgatttcgatggtggttattaa

SEQ ID NO: 20232 - DNA, 174 bp, Zea mays
  Peptide Sequence Number=SeqID_63607
atggctaaacaaactcttcaggcaccgctactggaggaaacggaggatgagctctctgagtggatcaaaacaacctccacagaatcagaatatgtaagcaaggccctttgtgaagatattagcaaacactgccgatctacaagtgctaccatccagattgatgatgagctatga

SEQ ID NO: 20233 - DNA, 873 bp, Zea mays
  Peptide Sequence Number=SeqID_63608
atgccgacgctgaccttcaatcactcggcgctgcccctaaaacgccgatcacgtgctcaatcgctcggcattacttctaaaatgctgacgccgaccttcaatcacttggcgctgcctctaaaacgccgaccacgtgctcaatcgctcggcattacttctaaaatgccgacgccgaccttcaatcactcggtgttgcctctaaaacgccgaccacgtattcaaacgctcagcattacttctaaaatgctgacgccgaccttcaatcacttggcgctgcctctaaaacgccgaccacgtgctcaatcgctcggcattacttctaaaatgccgacgccgaccttcaatcactcggtgttgcctctaaaacgccgaccacgtgttcaaacgctcagcattacttctaaaatgctgatgccgacatttaatcactcagcattatttctaaaatgccagccgcgtattttgtcgctcggcattacttctaaaatgccgacgccgaccttcaatcactcggtgttgcctctaaaacgccgaccacgtgttcaaacgctcagcattacttctaaaatgctgatgccgacatttaatcactcggcgttatttctaaaatgccagccgcgtattttgtcgcttagcattacttctaaaatgccgatgccgaccttctatcattcggcattgcctctaaaacgctggtcttgtgttcgattgctcagtgttacttctaaaacgctgatgtcaatcttcacatcgctcggcgttgttcctactatatcaaaaagaatcagttcaacattcagcaaaagcaatgacaagtcatcaataagaggggataaacgacagatgttggagacttgttctcaagtgctatga

SEQ ID NO: 20234 - DNA, 435 bp, Zea mays
  Peptide Sequence Number=SeqID_63609
atgtcgctctcgccggtgatcctcagggccacgacggcctacgacgacaactgctctactcctccacctccgacggccgtactgccagcaccacacatggtgaggtgcgcggtagcggtagcacacgagcagcttccgccggcacgcaaggacgacaatggtgaccacgaagtcggggtcgggctcgtgctcaacttcagcaacgcacatgtcgtgccttccgcgcgtcacctggccacgatcttcctccgattcgggcctgtcaaggaggtctgggcagacaactctaccgctctggtggtcttcgacagtggtgcgcatgctgatgaggcgttctcgggcgccaccgagattggctccatcagtgtgtccctcgtcagctttcatgtcacttcttcgcttcctgccgcaccaggattggagataaagagatag

SEQ ID NO: 20235 - DNA, 180 bp, Zea mays
  Peptide Sequence Number=SeqID_63610
atgccgcgcgcgttcgacgactactatatcaaggattgtggcgtcctctcggtgccggaggtgacatcccctaccctctccccgccatcaacgcgtaagcggatgccgcggatccgcctatccgccataaacgccaacccagagatccacgcccgccctgcctcctacgacaccacctga

SEQ ID NO: 20236 - DNA, 886 bp, Zea mays
  Peptide Sequence Number=SeqID_63611
aagtcagatggaggttcgctgccaaaccagcctttgccagaatgaagatggtttccccaagttgctgagagaatgcacagttcgcctcgaaattaggagtcagccagagtatgatggtcgtgaattcgtcgagcatggcacagagaagtgtgtcgtgactgtatatattggatccagtccgcaccatgtggaatggagtgtcactgctgctgggcacagattcaaagacacctgccaagtcgtcgcccgcaaggcattgagggccctgtgtcagatctatgaagaagaatatgatttcttggctcggcaccaccgtcagatgattgctcgagcagaagacacagagaagcgcaaccgtcagctgcatgtggatctcaccacagctcaagcccgtgcaactgccttggagagtcgtgaagtcattgctgttgaagccctgaagcaagccaaggatgagcatgtccagaagctgatggaggcctacttggtaacccacaaccaacgtagagccctacggatccaagagcccgcttcatccagcccagttcaacccatgagagatccccagattcttgaaggtcatcagatctctaccagaggagaaaagaaggcttgggaactcccggaaggtgccatagtcttggaaggaattcctgtcttccctcaggctatggataagcaagagcacctcgagtcctcccaagatcccccgccggagttgtgtgagcccctcaccatgaagaagattccagcaccatcccttgaagtcaaggaagaagctgcaagcaccccgccagcaccgccgccctctgaggagctacaagagccagccccgcttgaagaagagttagaccctgtcttgccatctcaatcactgccagaagaa

SEQ ID NO: 20237 - DNA, 1584 bp, Zea mays
  Peptide Sequence Number=SeqID_63612
atgagtgtttttgacatgggaaacaaattactgaataagattagaaatgtgaacttcactggggtgtctggccaagtgcaatttaatgctcagtttgaactcattcatcctgcctatgatatcataagcataattggcaacggcatgcggaccattggtttttggtcaaactatacaagattgctatcgaccgtccttcctgaagacctatattcgaagcctcctaatacttcgcttgccaaccaacaactctatgatgtcatttggcctggtgagactgcacagaggcctcgaggttgggcttttccttccaatgccaaggagttgaaaattggtgtccctaacagatttagctttaaagactttgttagcaaagataatgctactgggtcaatgaagggctattgcatcgatgtcttcactcaagcattggcattgcttccttatccagttacatacaggtttataccttttggcaatggtactgaaaaccctcattatagccaacttgtgcagatggttgctgacaatgattttgatgcagcaataggggatatcgtaattacaatgagccgaactaaagctgttgatttcacccagcccttcattgagtcaggcctggttatcttgtctccaataaaaaagcatataacaaattcttgggcattcttgcagccatttacattggggatgtggttcagtttttcgactctgttttttgcacatagagaaaacacaatgagtaccttaggacgtggtgttttgctcatatggctatttgttgtattgatcattcaatcaagctacactgcaagtcttacttccatcctaaccgtgcaacagcttgatacatctataagaggacttgatgacctgaaaaatagtgattatcctattggtttccaagttggttcttttgtcgaagaatacatgattaaggaactgaacatctcacagtcgaggctaaaagctcttggttctcctgaagagtatgctgaaaatctcaagctaggtcccaagaaaggaggtgttatggctattgttgatgagcgcccctatgttgagctgtttttgtcaacttactgcaagattgctgttgctggctcagatttcaccagcggtggatggggctttgcatttccaagggactcccctctgcaaatagacctgtccaccgcaatcctgacactgtcggagaacggggagctgcagcggatccatgacaagtggctcaagacaggcgactgctcaacggacaatgctgagttcgtggactcgaaccagctccgcctcgagagcttcatgggcctgttcctcatctgcggcgcggcatgcgtcctcgccctgctcatctacctcggcatcacgatacgccagtacctgagacacgaacagccgggaccagcgatctccgtggacgcagggtcgtcgacgtcgaagcgcagtctccgaaaattcatctctttcgccgatgacaagcagccgccaccgaagaaaaagcgggccatgagcctctcgagaagttcaatgccaacgatgccgatgagtaaccgtcctggggctgatattgatgtagaaagctag

SEQ ID NO: 20238 - DNA, 438 bp, Zea mays
  Peptide Sequence Number=SeqID_63613
atgggcaagaacaacaagcgcaagcgtgagccgactcctccatcggaggagtttggtgactcggaatactcggaggaggagttctcctccgagcccgaggggtctccggctcccgtctctcccccggcgtcgtccgatgactcggacgactcccaggggatagccgcggaggtctggacgtacatccgggccgtcgagcgcgccgggctcgaaggctcggatgagtcggagtactcctcggatgaggaggactcggacggcggcgacgagggtgaagatgacgacgacgacgacgacgacgacggcgacggcagtggcaggggcggcgacgacggcagtggcaggggcggcggcgacggcagcagggacagcaccaagggcagcagcaggggcagcaccaagggcggcggcggcggcaggggcagggccagtggctag

SEQ ID NO: 20239 - DNA, 864 bp, Zea mays
  Peptide Sequence Number=SeqID_63614
atgcagacgctgaccttcaatcactcggcgctgcccctaaaacgccgaccacgtgctcaatcgctcggcattacttctaaaatgctgacgccgaccttcaatcacttggcgctgcctctaaaacgccgaccacgtgctcaatcgctcggcattacttctaaaatgccgacgccgaccttcaatcactcggtgttgcctctaaaacgccgaccacgtgttcaaacgctcaacattacttctaaaatgctgacgccgaccttcaatcacttggcgctgcctctaaaacgccgaccacgtgctcaatcgctcggcattacttctaaaatgccgacgccgaccttcaatcactcggtgttgcctctaaaacgccgaccacgtgttcaaacgctcagcattacttctaaaatgctgatgccgacatttaatcactcagcgttatttctaaaatgtcagccgcgtattttgtcgctcggcattacttctaaaatgccgacgccgaccttcaatcactcggtgttgcctctaaaacgccgaccacgtgttcaaacgctcagcattacttctaaaatgctgatgccgacatttaatcactcggcgttatttctaaaatgccagccgcgtattttgtcgcttagcattacttctaaaatgccgatgccgaccttctatcattcggcattgcctctaaaacgctggtcttgtgttcgattgctcagtgttacttctaaaacgctgatgtcaatcttcacatcgctcggcgttgttcctactatatcaaaaagaatcagttcaacattcagcaaaatcaatgacaagtcatcaataagaggggataaacgacagacttcattaaagggaagttaa

SEQ ID NO: 20240 - DNA, 345 bp, Zea mays
  Peptide Sequence Number=SeqID_63615
atggagccgagatctgcaatctacagatccggcgccttccttctcctcgccgccatccttgcggaggtcgtcatccctgcatccgccatcggagacaagtgcgccgcctgcaaggccgttgctgcggagctagagattggaatttcgagtgagaagccgagaaatcacttggacttgcgcaaccgcttaaattctaaaggccagagggaggggaaggtcattgattataggttggaatcaggcgaaaagggatgggttaaagtaacagactggaatagctttcaaactggatttcccccgagcatggaagcctttcgctatgagccgagaggtgccattgcataa

SEQ ID NO: 20241 - DNA, 591 bp, Zea mays
  Peptide Sequence Number=SeqID_63616
atggttctctgtcctgctcttaaccgttgtttggtgagcgtattggcacttccagtgaaccaacgctggagtagctcaccgagttgtgagcaccaacaaatcagccaactcggccatggttctctgtcctgctcgcaatgcaaaggcgggggaactacagccaagtatagtctaaagcttaaggcactacagcaggcaagtacaccttcaattgaatggcaaacacacacgcacgcccaaagaactacagccaagtacagtctaaagaaaaataaagaagctaatggatacagacacaagacagtcttatattgggactcgatcaacttggtgtttgggaaagatcatgcaaccggtgaagcggcaaagaacccagctgatggtgcgagagatatgagtaaggaagagggaaccggtaaagagtttacttcatcaacaacctcaggaagcttgaagaggcaacagtccagtgattccttcacctcaatgatggcagagaaattagacaagttcactgaagccaagccattagggatgaagcaccaaaaggcccgacatcaaaagaaatttttagcacattggaggagatag

SEQ ID NO: 20242 - DNA, 1209 bp, Zea mays
  Peptide Sequence Number=SeqID_63617
atgcatcatcggatcaaaacacaccagagcagcatcattcccatctcctcactggttatccacgtgtctgaacttggagatgaagagggtgtcagtgtagttgaggcggcagtgcggcacagcttgagcagcaccagcactttctgcttcagctccggtgcacaaccactttggatgacaagtagaagcttcatggtcaacccagcctccacggcattaggtgcacactcttcaagagccatccgacacaccgtccacaacattgacagcgcctgttgcgtgcatacctctgaaactctcatcagcaagcgaacaacattgagaatcgtccacagacaatccttaagagccatcctctcctctggaactacagacagggcatccaagatgtccaaggccgactcgacacactctgttactaactccagcaacaattccaccagctgcagtactgcacctactaacaatcatactcctcgctggtgtggaggggtcgacgagctggagagcatctatgttatcgacttaggatcagttcatggcacgtttgttgcgaatgagagattaacaaaagacaaccctgttgaactggaagttggacagtcacttcgctttgctgcatcaaccagaatctatatcctgcgaaagaacacagctgctctattcccaactcctagccttccatcagatgtcagtttgccatctcctccagaccccaatgatgaagatgctgttgtggcatacaatacagtacttaaccgctatggtattagtaaatctgacatattatccagttccaaagattcttcagggagtgccagctctggtgcaaatgatgataaacatgcagttgaaaggcccttgaagagaagtaaaaagcgcagagtgtcatttagagatcaggctggaggttactgtcataccgaagggaaaaggagcaaagcatcacggaaagactttacctctacctcaccaagtggggtaacggataagctacaagaggtgcttaaaagagtaaagagcacgaccaggcctggaatttacgacgacctttatggggattctattgcgacaaaagtgggctcatcttgggcgtacaaatcagatgatctgtcagacaaagcccagcctgttgaggagaagacacttggcatggattcaaacttgaattcagccgatgacagtgatgacttgttcggtgacacgtga

SEQ ID NO: 20243 - DNA, 225 bp, Zea mays
  Peptide Sequence Number=SeqID_63618
atggaacagacaagtctagaggaaggggaaggcaagaccaaggaccttggtttgcacatgccatgtgaggaaacgattatgtcggctccaaggaacaacgaggatcccatcatcgaggaaatcttgaccacgacgagtggtgaggagttggattctcaaatcgtcggcatcgccatgaagcttgatcaaaaagatgttcatcaagatgaaagagggcgaggctaa

SEQ ID NO: 20244 - DNA, 462 bp, Zea mays
  Peptide Sequence Number=SeqID_63619
atgggcaagagtaacaaacggaagcgcgagccgactcctccatcagaggacttcggcgacttggaatactcggaggaggagttctcctccgagtccgaggggtctccggctcctgtctctcccccggcgtcgtctgatgattcagacgactctcaggggattgccacggaggaatggacttatatccggaccgtcgagcgctccgggctcgagggctcggatgagtcggagtactcctcgaacgaggaggactcttcggactcgtccgaggagggcaacggcggtgatggcggagacgacgacgacgacggaggcgacggtgacgacgacgacgacagcagcaggggcggtgacggcggcagcaagggcggcaacggcggcagcaagggcggcaatggcggcagcagcaggggcagcaacggcggcggcagcagcaagggcagcaacaaggccagtggctag

SEQ ID NO: 20245 - DNA, 1236 bp, Zea mays
  Peptide Sequence Number=SeqID_63620
atggccagcgtcgtcggcgaggcgccgctgctcagcggcggcgggaaggcggccgtatggcgcgagcgctgccctgtgtgcagggctgcaggcaggagaggaagcactgccggtccagtcactgttcccttatctatacttcatgaaaaaaaacaagtattcacctttattgcaatcaaacagatcagggacttgaaagtggcgaaagaggagcaagacattgggttttatgctggttttgttggggctacctatttccttggaagggccatcagcgccgtgccatggggcatgttcgctgacaagtatggaaggaagccatgcattgtgatcagcatcctctcagtgtacggaccacggagtctaattgtgaaatcagccttagcatccatccaatttgacaggactaacctagttacatcttcacgagccatagctcttgttattgggcctgctattggaggcttccttgcacagcccaatcaccagactcaaaatatgcctgcacagaagtacccaaatcttttctctgaagagtccatatttggaaggtttccatacttccttccttgctttgtaatatcgttgctagcagcaggatcatgtattgcatgcatttggcttccggaaacgctacactttcatggtgatgacaaagtagaagctattgaagaactggaggcacaagttcgtggctccgaatctacaaaagatctgcataagaattggcaattgatgtcagcaataatcctctactgtgtcttttctatgcatgacacagcttatcttgaggtattttcactgtgggctgtgagcagtagaaaatttcgggggcttagtttgacatcccaggatgttggtactgtgctagccatctcaggttttggtgtacttgtataccaactcgctatttatccttttcttgcgaagtattttggaccaatcaagacatttcggcctgccgcgatcctgtcgatcattctcctcactacgtaccccttcatggccaatttacatggcctggagcttaaaatactcatcaacattgcatctgttttgaagaacatgtttgcggctaccatcactattgcctgcaacatcctacagaacactgcagtgacgcaagagcagagaggcgttgctaatggcatctctgttaccctgatgtccgtgttcaattctgttcctccagcagcagcaggaattcttaaatatcttccatattcccttcattag

SEQ ID NO: 20246 - DNA, 717 bp, Zea mays
  Peptide Sequence Number=SeqID_63621
atggaggaggggaagcgcgatgaagccatcgaagtcgacgacccccgcgccatcgccctaaggaatgtgttgctgctaaagaatgtgatcagcctaaaccctgacgcggaggtgtcgcagcagaggttgctctcgctcgtggccgagcgcctcatcccaacattcctggacagcccaaatccagttcacggcgccggcaagcgggccatgcgtgtcagccttaccgcgcgcccaccactcactggtgtggtggcccccgctgtcagattccctgagctgcgaacgacatctgtgaccgcccggtgggccatgcgtgtcagctccctctgctcgctgaaccgcgaaggaaacgccgccgtgaccgcaaccacccttccctgggtcttccggctccagctggctagcattcattccgcgcgcagatatatggagaccagggatccccggttgcgctcaccgcacccccgaattcccaagaaccccgccaccattcgagagaagcagagagaggggagaatagcaccgccggtcaatccctctgcaccagcgtccggtcctcctcgtgtggccgtgaaggagcgccagggtccgggagggctgtctctgccctccggtgggctaagtgtttccaaaaccagaggaatttctcgtcgattggcaaggaaagcgtcacaccgcacggcatcgcgggctgcctcaccatcatcgtcgttctag

SEQ ID NO: 20247 - DNA, 552 bp, Zea mays
  Peptide Sequence Number=SeqID_63622
atggcgggggcggttgttggcggcgtgcggtggatggcgggggaggtcgttggtggcttggggacgaggatagcagggtcggatggccgacgctatatggcgagcacggcaggcggcggatggggcgggaggttgttggtgggtggagcagatagggatgggtacaggaggatgaggccggtggaggtggccgtgaggaggcgccggagggaggccaccaccgtggaggtagaggtggtggtggcacggcaggagaggtgcgtaaggaaggcggctgccatggtggtggtggtcgtcggtggtggagaggtgtggagaggagatcggagcaccactgtgccgcagaagtgttttttgtcggacactcggcaaaagaagtctttgtcgaatgccgcactcggcaaagtcatgctctcggtaacaaccgcgttactgagaagcaagacactccggcacagaaatacactcgggcaaagatatttctttgcccgagtgtcaaacacttggcgaacggcgacgctcggcaaaagggccgtcagctgccgtctatag

SEQ ID NO: 20248 - DNA, 471 bp, Zea mays
  Peptide Sequence Number=SeqID_63623
atggcccacaggcacatttccctttcagtcttccagctccagctggctagcattcgttccgcgcgcagatatatggagaccagggatccccggttgcgctcaccgcacccccgaattcccaagaaccccgccaccattcgagagaagcagagagaggggagaaatagcaccgctggtgaatccctctgcaccggcgtccggtcctccgcgcgtggccgtgaaggagcgccagggtccgggagggctgtctctgccctcgggtgggctgagtgtttccaaaaccagaggaatttctcgtcgattggcaaggaaagcgtcacaccacacggcatcgcgggctgcctcaccatcatcgtcgttctggggattagaaggtcgcgataccccttcgcaaatgaaattcgagccacaggttttagatctgacggcagtcgtagcttaccgattcatacgcatcgggatctaatctaa

SEQ ID NO: 20249 - DNA, 525 bp, Zea mays
  Peptide Sequence Number=SeqID_63624
atgggttaccaagtaggcctccatcaacttctggacgtgctcatccttggcttgcttcaaagcttcaacaacaatgacttcacaactttccaaggcagttgcacaggcttgagctgtgaagagatccgcatggagctgacggttgcgcttctctgcatcttctgctcgagcaatcatctgacggtggtgccgaaccaagaaatcatactgcgaatccagggtgagcagggccctcaatgccttgcgagtgacgacttggaaggtgtctttgaatctgtgcccagcagcagtgacactccattccacatggtgcagactggatccaatgtatacagtcatgacacacttctctgtgccatgctcgatgaattcacgaccatcatacactggctggctcctgattctgaggcgaactgtgcatgctctcagcaacttggggaaaccatcttcattctagcaaaagttggtttggcaatggacctccatctgacttctgagagaaggaaagagggaaagcatttttga

SEQ ID NO: 20250 - DNA, 204 bp, Zea mays
  Peptide Sequence Number=SeqID_63625
atggcgccgccgtatcgtgctgctccgccgccgcgtccggatactattcgcgcgcggagagccgtggaccgtagatcgtggggtgaacagttaagatttgacgactgcgggccgtcggatgacgagcaagccactgtggaatttgaggttcagcaagtagagatagctgagcaggagctcattgaagacaagttgtgcccttga

SEQ ID NO: 20251 - DNA, 393 bp, Zea mays
  Peptide Sequence Number=SeqID_63626
atgtctttaagtgaatacagggacaaattcatccaactatcccgatatgctctgggggaggtcgatgatgatgagaaaaagcaggagctatttctggaagcaagcactccaattggacctgttgatcataatacatccacaagcaggtcatgcttcaagtgtgggcaggcaggacactatgccaactactgtcataacagggctgcttatactactccggctccaatgaagcaaagtcagacctcgggaggcaagagtcagcccttatccatcaatcgggggcaagttaaccacgtgaaagcagaagatgaacccggtgaacccaaaaaccctgaagaagtgctggttgaaggtgaagaagccagtgaagaaggcaatgaacaacaagattag

SEQ ID NO: 20252 - DNA, 276 bp, Zea mays
  Peptide Sequence Number=SeqID_63627
atggccagctccctccattgccctctagttgcgctcctgttgtttgccgtgagctggaagatgaacggtggccgaccaccacagaccagggcactgtcccacgtcgacgaacacgcaggagctttgcttcaccgaaccgcgctcacgaccacctccttcgagcttcgtcgtaaggtgagacaacctgtgcaaacgcctccccgctctgttgcatccagcgccgctgcatccaacctcgggaggaagaagaaggcgtactggccgtggattcagtaa

SEQ ID NO: 20253 - DNA, 840 bp, Zea mays
  Peptide Sequence Number=SeqID_63628
atggctgcggcggcgatcctgccggagctggcgacgcaggtgctcatcccggtcgcggcggccgtgggcatcgcgttcgcggtggtgcagtgggtgctggtctccaaggtgcgggtcacccccgagcgccgcgcggacggcggggccgtgaagagcgggcccagcgactacctcatcgaggaggaggagggactcaacgaccacaacgtcgtcgtcaagtgcgccgagatccagaccgccatctctgaaggagctacatctttccttttcactgagtacaagtatgttggattattcatgggcatctttgcaatccttatattcctcttccttgggtctgtcgagggattcagcacgaagagtcaaccttgccactatatcaaggaccagacttgcaagcctgcccttgctaatgccatcttcagtactatagcttttgtgcttggtgcagtcacctcactagtttccggctttcttggaatgaagatcgcaacttatgcgaatgcccggacaactttagaggccagaaagggtgtcggaaaggcatttattactgccttccgagctggtgcagtaatgggcttcctgcttgctgccagcggtcttttggttctttacattgctatcaatttgtttggaatttattacggtgatgactgggaaggtctttttgaagctattactggttatgggccttggtggttcttctatggctctttttcggccgcgttggtggtggtatttataccaaagctgcaaatgttggtgccggccttcaggaaaggcagaaagaaacctgctcgaaaaccagtaatgaatcctagccgtacagaattatga

SEQ ID NO: 20254 - DNA, 123 bp, Zea mays
  Peptide Sequence Number=SeqID_63629
atggccatgatgggttcaacatcggaaaagatgtacctctgccagatccccagctgggtattaatcgatttagatcgccgctacttctcggatatgaagacttggtcactgccctacatgtag

SEQ ID NO: 20255 - DNA, 1405 bp, Zea mays
  Peptide Sequence Number=SeqID_63630
atgaaggcaacgcaggcgctccccatccgggggctcggaaggcagaagggcacggtgcatgaggagagtgcgaaggcgactctcctcactcgcgtcctcaggcgtcacggactaagtcttcaccaacgcgctccaaggtcctccccctatgacacggggttgggtcccacacgacatgcaaactggcctaggacagaagaagccaaaccgccgcgcgcggagcgtgtaaccgcccagcggttacaagcgctcctccatcttcgcctaaaccagcgggtgaaagggcggaccgccatgcaggcggcatgcaactgcaccacagagatgtacccttttgacttcaacgcatccagcgtggaggcccaggcccacacgtcatgtaactggcgcgccggttgctacatgcgaaaaactgcaccgccacttacgccaatgtcgcgcctcctcgactatggaaccggtgccgtgactcgaggcaaccttgtgcatggcccaacagtgccaaccaagcacatcggtcacaggtcagtcagccgcgggaaaaggcgcgatggtcgatatggccaaaagtgggctgccagtaatggcggcggcaggcaggcggaagcagcagtcaaatcgtctgcaggctcatgtcccctcctggggcagcaggggagccctctcccacggcgtgaagacgacggaccgggaaaggggatactccaaaagggatccttccccgcgaaggaagcgggccccgagccctcctacagatcagaggttcgaaggctagcccctcggaagggttcgatagccgcctcagagcactcgggctccgcgcccactactggctggccccccgaagggttcgacagccgcctcagaacacgcagagcgagggatgactctaggtacatccgatacatggccgaggctcggactacgctcccgagggctcggactcaacctcgacctcggaagacggtctccgcctcgcccgaccctagggctcggactcaacctcgacctcggaagacggtctccgcctcgcccgaacccagggctcagactcagcctcaacctcggaagacggtctccgcctcgtccgacccccgaggctcggactcaacctcgacctcggaggagtcaccacctcgcccagccttgggctcggaccgaccacgctacaggggggacatcattaccctacccctagctagctcaggctacggggaacaagaccagtgtcccatctggctcgccctgggctcgagcgctcctccgacggccatgacatcacatgaacagggcaccaacacctctccgacagccacgtcggcatggccctcgtacgagagggtggccgcgcgggaggacgggctgacgggcagtctctctctctccctctccctcacgaacgctt

SEQ ID NO: 20256 - DNA, 369 bp, Zea mays
  Peptide Sequence Number=SeqID_63631
atgtgttccctgaccgtaattcgtgggatgtcccacccgcaccggacgctggccgagcaccacaacgccaggtccagggcctccaccaccaccacatcgtcctcgtcctcctccgcccgccgcgacgacgaccccgacccgccgccgaggtcgctcagggaccctccctacatgctgggccccaagatcttcgactgggacgagcagcgcgctgcctggcaccgccgccacctggagacgccgcccttcctcaacgacatcaagccacgggttcttgacaaataccagcttcatgaagctgtccaggagaaagaacgaggagtagactcgcttggtaggactccttgctacaaaggtgaggttacctag

SEQ ID NO: 20257 - DNA, 471 bp, Zea mays
  Peptide Sequence Number=SeqID_63632
atgcagctctgcgccgccacgcccgagcggaccccatggttcgtgcccactccggaatggggcgctggcgccgccgcgttcccgcagacgcccaagcggagcccgaggttcgcggcgacgcccgactggggcactgggttcatgatgccgccggacgctacggctgtgccgaggacgccagagaggtggcccgcgctgccccgcactccggagtatgcgcctgcgccgaggcgagagcaggcgaggtggggcggcgaatccaaggcagaagcgcctgcactttatgaatccggagctgaatcgctccgtccagcctttctccccactgttgcttttgcactctgcttttcacttgccttgcgtggatctgctcaacgtgcgaaccaccgcctcgccgagaaggaaatcgtcgtcgtcctctcctctgcctccgtggtcctcgtcgacagtagtgttgccgttgtcgactag

SEQ ID NO: 20258 - DNA, 738 bp, Zea mays
  Peptide Sequence Number=SeqID_63633
atggcgcctcttgttgacgtggctggtctgcgccctaggttgggcgatgtggaagctcctccgaagccgaggtcgagtctgtcttccatggccgaggtcgagtccgagcccctgggtcgggcgaggcggaggccgtcggctgaggccagggcggagtccgagcgctggggtcgggcgaagcggagttcgtcgtcttctagggctgagcctgagtccgagccctgggtcgggcggagcggagttcgccgtcttccgggacttagcccgagtccgagccctgggtcgggcggagcggagttcgccgtcttccgggacttagcccgagtccgagccctgggtcgggcggagcggagcggcgctgtccttctgtcaggtcggtcagtggagcggcgaagtgacggcggtcacttcggctctgccggctggggggcgtgcgtcaggataaagctttatgctgatgggggttacctgctcagaattaggagccttgagggccactctcgggaaagtctggcggtgtacggctataattcaccggactgtccggtggtgcactggactgtccgaggcaaagctataagccttgagagagtggagaagtgctgcaaagagctagagcaaggtcttgagcatatagttactctaccggagtgctgccaagaagattatctgagcaaacggaggaaggagttgaaacagactccaagcccaggtgtggctaactccaacgaggactag

SEQ ID NO: 20259 - DNA, 1905 bp, Zea mays
  Peptide Sequence Number=SeqID_63634
atgaccggcggcgcagggaagaagagggggttcagtaagctgctggtgctcttgctgttctttgtgggcgccatcgtcatcgtggcgctgcttgtccgcggcaacggctgctgcgtcgtcgtccaagtggcagtactgccacggatagttccagttccctcttgggacgcccgtcctaccactacaactccaattggcgaaatcatcatccctgcaataacgtctacgaggggagcatcgtcgtcagctcatgatcgtcaggagaactcagagccagtagcagcctcagaggaagaggagccccctgcagctgccccgtacgcggcagacagcaggtgggacatccagtgggagagcatcgccagtgtcctttcaacgttcagcagtaatggcactggcatcggcatagtgggtctgctcaacttcaactcgtcggaggttgcgctatggacgagcacgttgcctgccgccgacgttcgggcggtgcgcctggcgccggccgccgacgcggtcacctgggaagccctctatccgaactggatcaacgaggagagcaacagaagcagctgcccctccctccccgaccccgatgcctcccaccatcacaattacgacctcgtcgccgtcaagcttccctgccgccgccaaagctggtccagggacgtgcgcaggctccaccttcagctctccgccgccaagctcactctccacggcaccagcagtaggtctggcatggtgttgatcctgagcgagtcgaggtgcctccccctgcccaacctcttcccctgcaagcacctcctcgcgcgccgcggccacgcctggctctaccgccccgacgccacctacctccgccgccgcctcaacctgcccgtcggggcctgccagctggccgttccttttctccggccttcgcctaaaccaccaagtgcaactgcaacgccaggaacaagcaggatcggcaggcaggcctacgccaccgtgctgcactccgccgacgcctacgtctgcggcgccatcgcactggcgcagagcatccggcagtcagggtccacgcgcgacctggtggccctggtggacgcgcgcaatgtgggcgccgagcaccgcgccgccctcgccgcggcaggctggcacgtccgcccggcgccgcgcatccgcaacccgcacgcggagctccacgcctacaacgagtggaactacagcaagttccggctgtggcagctgaccgactacgagaaggtggtgttcctggatgccgacctgctggtgctgcgcaacttggacttcctgttcgaggaggcgcccgagctgagcgcgacggtcaacagcggcgcgcgcttcaactcggggttgatggtgctggagccgtgcaactgcaccttcgacctgctcatgtcgggcatccacgacatcgaatcctacaacggcggcgaccagggctacctgaacgaggttttcacttggtggcaccgcctgccgcgccacgtcaacttcctcaagtacgtctgggccgaaggggaccgcgcggcacaggcgcggatgattgccgcggagccagcggaggtgcacgccgtgcactacctgggcatgaagccgtggctgtgctatcgtgactacgactgcaactggaacgtggcggagcttcggcggttcgcgagcgacgaggcgcacgcgcggtggtgggcggtgcacgaccggatagagcccgcggaactgagggacaggttttgcgcgctgccggcgagccacatggcggtgctggagcagcaaaggaggcaggcggcgactgtcaacgcgccagacggtcactggaaccgcaccatcaccgacccgcgccgccgcatcaaatcagaagcactgaccacgacggttgagtctgtcacatcccgcagatcaagcattgactga

SEQ ID NO: 20260 - DNA, 1392 bp, Zea mays
  Peptide Sequence Number=SeqID_63635
atggcccctgccccggtgcccccacccctgttaccctcgtccgatcctcttcctcccccgcagtctccgatccgcccggcttcaccaaatccacccctccccacgcaacatccaccgaccgtgttcgccgccccacctccctgcctggcgtccgtgttgctcgtcgccctggaagggacgcgtccacaagaggcaaggtcgtgcccccgcccgcccccgcgcaaccgccgccatccatctccctctctgccctgcgtccgcgatgctcgccacggcgctcgcttccccggccatcatggcggagcccccctcccaccctgtgtcgatggcaaagttatcctcgccctcttcgtctttgggtgcgcccccaacattggcatggacgctcgtcaaccttggccactttgcaaggctggaatggggtttcagctgttcctattaatgaagatgtattgtgggggccttgaccgcttcgagaaggcacaagccttggagcccttctcagtgaagtccaagacaggcaccaagaaggcacctgcagctgcaggaacaactaaagcactgtctctattgacgctgccacaaaattctaattttttgccaggggtctactatcttgatgtggtgaaagatggggaggtctttgataggatcaatctacaaaaaatgaggaatctattcgggaggcggattcttgcttctgacttcatgttggaccatcagtctatgtcgcgtcagcatgctgatattccccattcgccctccaccgagatcggcatgggcgcgggcgcggagcctggcggcaaggtggtgcgtggcgccgggctgggtgacctcccggagctgtgcaccgtggaggtgctgctccgcctcggcgcgccgaacatatgccggttcgcgcggctcaacctcgcgttccgcggcgccgcggacgcggacttcgtgtgggaggccaagctgcctctccaaggatccggacaagagaaggacttgatcgtgctggcaaagacggggttcgggagaacgggcgcgttcgtgttgcccattctacaagagctgctcagcaaccgcgaggggacgacataccagtttgaggcgctcggatcaactattggtttgcgttactcagtggtgagtgttatcgatgctaatgtggaagagaatgtcatgggcgacgaggagaacattggggagatcggaggagcgattgggattgagaatgggaacacaggggaagcgaggaagtggtgcggtgttgtcaccagcagttatggcaggatcgccgggagcagcctcgtcggggtcgccatcaaggcgcctaggatcatgtctaagaacctcattaggactggtataatcaaagtagaccgtgcagggcttaccatcagttag

SEQ ID NO: 20261 - DNA, 741 bp, Zea mays
  Peptide Sequence Number=SeqID_63636
atggctcgtagaagatcccaaaagaacaagaagactcctccaacgaacgcaactcaaaaggaggtaactcttgagatattatttgatgattgttctaattatgattcatggtctactaatgtgataaatgcctttagaaccatacatcctcaattagaacaaattattgacaagagtattttcccctctagttttaatggaaaaattaattccgaggaggatcaaagatgttatcgcttaaactacctagcttttgacatcttaaacaattctcttagcaaagaagattatcgtgccttcatatcaaactatgacgaatccattcccgatgcgcatgatatttggactagaattaaaatcaagtttgatgagtccaaacataatagttcatttaatgcctcaacttcctttagtttttgtgatactaacccttgcaaggaagaaggagaaaatgaacgatggagaccaaacgatgaatccacctctccaaaagctaatgaaaatgatagcggaagcacaaacgaggatgaggaggaagaaagaagctttgtgcatctctacgctcgcctaagccaagaagataaggcggtcatgctcaaacttctagaaagagcgagagaacaaagcaaagctcgtcaaaggctagaagatattctctccataaagatgcaacactttgacgagttgactaaagaacatgaggagctaaagtgctctcatgttgatttggtccaaagatga

SEQ ID NO: 20262 - DNA, 276 bp, Zea mays
  Peptide Sequence Number=SeqID_63637
atgatgaactatgtcatcttcggcgtcctgctcttggtggtcggcggcggtctcaggccatctccggcagccgccgacgtattctgcgacaaccttaaacaggtggccgccactctgccccaaaacacctcctcctcccccgtgcagttcgccaccgccatcgtcggccaggcccccgacgtcgtctacgctctagccttcaaccaaggcgacacaacgcctctgcctccgcgaatgcgtgtccacatgaacaatatcacggcagactacactttg

SEQ ID NO: 20263 - DNA, 711 bp, Zea mays
  Peptide Sequence Number=SeqID_63638
atgaagcgtcctgaacgtgagcggaataagaatttgacggtaaaaaagaataatgtgaacgctggttttaggagggatgtcagggcctcaattagtagaggaggtgtcgtatgtgcatacgaatccggacctttgccgagtgctttttattgggcactcggcaaagaagattttaccgagcgccgccctcgacaaagtcctgcgctcggtaaagagcttggttaccgagtgcaggacactcggtacagcgaagcactcggcaaagactgctttgccgagagggacatagcactcggcaaagaaccaagacctgggcaccggtataggttctttgccgagtatagtggccctgacactcggcaaagaaccacgctttgccgagtgccatatcaggcactcgacaaagtacctgacagggggacccctctggcggattctttgtcgagtgctgtcaggcaaacactcggcaaagtgaactccctttgccgagtgtcgcccgggacactcggcaaagactccgtctccgtcacccgtcgtcgtaacggctgtttttttgccgagtgcccaagaaaaagtactcgacaaagacggctttgccgatgcactgtatgccgagccctctttgccgagtatgacactcggcaaagaatttgccgagtgtttttaaagctttttcgaggtgctttgggcacttcggcaaagacttggtga

SEQ ID NO: 20264 - DNA, 483 bp, Zea mays
  Peptide Sequence Number=SeqID_63639
atgctgagcgagaaaacaagcaaaaactcaaagcctaggccccctacctggcacgccaaatgggaagcttcttgcggaagagaagatgagtatagcgcgccgctcggcacggggactgcacgacttctcgtcaggttcggcccgatagcttatgtcatgggacacaagcagcgggaccctgctggatttcggacctacccggaggctccggacttgtatgtatataggggtccggtgtccttctgtgggggtccggacttactgaggtgtggcgtctttctttgccacgtggcgccctttggcctgcccatctggtggggtcaggcgcggtcctccgcgtgcctaggagacgtcgcacggggtgaggtgtcctcaggcgatgcggagacttgctcgaggcggaggttttggagggccctcggagagggggctcagttaggatggcgctcttatgggaagacccgtgaggcgggcctcgggtga

SEQ ID NO: 20265 - DNA, 231 bp, Zea mays
  Peptide Sequence Number=SeqID_63640
atgaccctcggacaggaacactgcgtaaacacaagtcaacactacggaccgtctgatgaagaagcgagcaccgtccgagaccaagcgcggaccatccagcctcaggcgcggaccgtccggtcggtgaaaaaccagaaaaacccgaaggggcggaccgtccgtaccaggggcgcggaccgtccgcggtcggcagaaagggagcaatggctagaaagtggttgggggctataa

SEQ ID NO: 20266 - DNA, 267 bp, Zea mays
  Peptide Sequence Number=SeqID_63641
atggctgtcatggaagctcgtgtgtcgagacaggaggcaaagctggcggagtttcaccaacaaatcgacatggtgacacagagcgttcgtgctcgcggggcgacccgaatgcagcgtctgctagacatctcgagtcgcgttcagaacgtcatggatcttggcgtcgaccggggtgccaccatcgcccttgctgtcgcccatcttcgcaccgaggccgaccttcatgccctgacggggcttccccaaggcaccccgtccatggcctga

SEQ ID NO: 20267 - DNA, 789 bp, Zea mays
  Peptide Sequence Number=SeqID_63642
atggcgtgctgttcactgcgctttaaaaaaacagcgagcccgcagagcgtggagacgccgggcctgctgcaggaaatcgacgacgcgtggcttgctgcgcatttcgtcgagcacacagcgagcgtcaatggcgcactgcgcagcagcagagaggaggcatcggcagagggctcgcggccgggagaggagcacaggggcgccctgcgctgcggagatgaagggcgcagcttccggcaaaccaacgacatggagaacagggagggcgtggctggaggaaaggggcgagctgcttgtggccatggggggaagaagaaagggcgccgtcgagggagcttcaacagtggagcgctcggctgctgggctgctcaccgtggacagcaaaggaaggcagatgcagtgcagaaagggcgctcaaaactgctggccggagctagggctcggccatgggaaagaaggggaaggaggaaggggagccggctggtggagatgggagagctcggctccatgcagatgtggagctcgccatttggagcagtggcaggggcgtccatggctgctggccgggcagaggcgtcggcgtgctctcaaggagcttctgctcctgcgcgcacgaagcagagaaggaggaagatggggcgctggtggtctgctgctggaggaagaagaagaggggcagggggcaccgcgccattgctggccgaggggaggaaaggcgctgctgctgggcgccagccagaggtggaagaagggctcggcagccatgggaggaagagagttcctgcgcgctga

SEQ ID NO: 20268 - DNA, 414 bp, Zea mays
  Peptide Sequence Number=SeqID_63643
atggcggagcgggccatgttgccgacacggtcgaggactggcaggacacgtgtccaggatgtggggacgcacatgcgagaccgcgtggcccagaggccttacatcaggctccgcccgctggcttacgtcatgggcagtaggccacgtggctgcatcgggtctccgcctgagcggggagcagaagtgtacatggaactggcacccaaggaggatgactcgtgggcccgggcccccgtggcagagactgggttgttggtttcaacggaggtgaagaggcgcgctaccgcaggcggtggcgtgctcctcgcgtggcggttcgcctccttcgcacccaagaaccggcacgccaggtgcatgacatgtgggcctgggcccccatgccagaggctgggccgttggtggcggcaaaggtga

SEQ ID NO: 20269 - DNA, 1527 bp, Zea mays
  Peptide Sequence Number=SeqID_63644
atgaactacctccacatcagcaagggccgtgggataacaagccccgagcggctcaccagcagaggcaaccgcatcagcaccgacggcgacggccgcctctgcaccgacgactcgccaacagcgacaatcatcccagcatgtgcgtcgctgcgagtaggacctcgcccccgtcttcctacgacgggtgataacgaggccattaaagccaaagagtcgggaactcagcggcagatggctctgatgccctcaccagcggaggcaaccacctttgcaagaggtagcctcaccagcgacggtgaccacctctgcaccagtgggcagcagctgcaccagagcgcacgaagaggtcttcgttcccgtcctcactacgggagtgaggacaggaccatccaagaacgccgcccccacccgcacggcgtacaacgtcttgtacgacctcccagtgcggctggtgccacgggagaagccgtggatgtggccaacccgcgcacggcgcgaccgtcacccgtgcggtggacgggcagccacgctccgccccagtggcaggaggcagcgccggagatgaccaccggcgggggactgcagccgggctacgtgatgaaaatccttgaagccgaatggtggaaggatgccaacccccatggggttgcacccctccaacagcagaaggaagaagacaagatcggcgacaccaccacgagcgcacgctctccgacggtgaggtcgccggaagagacggccttgatgcggatccctctagaggacaccggcgcaccccatctggaggcccggaaggcgaaagggcacgcggtcaaagaggcgaatcgccgtgcaagaagcgtacaaccgtcccacggctgtgcgctccctcagctccaccgcaactggcggtccaactcaggggcccaggcccacatgccatcgactcgaggcagccccgcgcatggcccaacagtgccgttgagtacgattgtcacgggtcagtcagccgtgggaataggcacgacagttggcgtggccatagacgggccggcagtaattgcagcaacaggcgcacagaagcagcggtccaactgccaatcagactctggtcccacctgcaggctcgcatcctcccctgaggtgggaccgggggccactatcggtaccctaaatcaggggtaccctctcctacagcatgaagacatcgcacccatgcgacgtctcctagccacgcggagaatcgtgcttgaccccaccagatgggcaggccaaagggcaccacgtggcaaagaaagacgccacacctcagtaagtccagacccccacacaaggacaccggacccctatatacatacgggtctggagcctccgggcggcgtcaaggtcatccagcaggcggcgcgcctgctgggtctgctggcaaacagtgcgcccgtgccgagcggcacgctatactcatcttctcttccgcaagaagcttcccctgcacgccaaggatacgcagacctcgagcaccagggcacaagaagattgcctcggcaatag

SEQ ID NO: 20270 - DNA, 909 bp, Zea mays
  Peptide Sequence Number=SeqID_63645
atggtgggtggcgccggcgggcgggacccgctcatcgcctccgagatccacggcttcctcacctgcgcaggtcaccccgccccgcccccgcacgagggcggccttttctccctccgtttttctcttcttctcctttggtactccgattctgttgctcgtcttggtcctgcatctcttcttgacgtggttggattgagctctggagtcttggggctgctgccatctgatgcctggaactcgaggcaaagaagtacagagggaggaggcgggcagcagatacacgacgtgacagacacccaggagggagggtgttgtttatccatgctgctccggctgaagattgtcgtcggcgtccactcggtggtgctcccggttcctgttcgaggcggctttggccatggtgcttgctacgcggcactagagccctgctggcgccgcagtcggaggccagcgctagcggcggcaggtggcctcgtcacgaggcggccgaggagcgccacggtggtgatggcgctaaaggaggagcctgagggcagccgccgcggcttcgtcggcagtgggtcgagctgggaccccgggctggagatccaagtcccctcagatccgttccttctctggattaggaaggagagcctcaacgtgggggatcacatctactcctggaaggcgacttcttggaaaaggctacttgcattgattcggcagtgggaagttgtggatgctaaagttattcatctgggctataataatagctgcatatttttgtcacttaaagatgtaaaggtgatggtggagacaacacttggcaaagaagagttgaaagaggcagttttgatgattggaacagcatacagactgagggcaaggatcgtagatggagctgccaagttaaatggtttgttcaattga

SEQ ID NO: 20271 - DNA, 907 bp, Zea mays
  Peptide Sequence Number=SeqID_63646
cctccttggactagtaattgtatcacatttgagtcctagagggattggggcgcttcaggtggtatcagagctgttaggttggccgcaggacaaggaggtccgcttccaaaccaacttttgccagaatgaagatggtttccccaagttgttgagagcatgcatagttcgcctcagaatcaggagccagctagagtatgaaggtcgtgaattcatcgagcatggcacagagaagatgcgtgcattggaagggcagcagttacttgaggacgaccccacattcgtgtacctcactacatacctgctcaccctggatgcacaatatgatttcttagctcggcaccacagtcagatgattgcccgagtagaaggtgcagagaagcgcaaccgtaagctccatgtggatctcaccacagctcaagcccgtgcaactgccctagaaagtcatgaagtcattgctgttgaagccctgaagcaagccaaggatgagcatgtccagaagctgatgcatgcctacttggtcacccacaaccaacatagagccctgcgggtccaagagcccacttcatccaacccagttcaacccatgagagctgaagatccccagattcttgaaggtcactcggtctctactagaggagagaagaaggcttgggaactaccggaaggagccatagtcttggaaggaatgccagtctcccctcaggctatgggtaagcaagagcaccccaaatcctcccaagatcccctgccagagttgtttgagcccctcacgatgaagaatgttccagcaccctcccttgagctcaaagaagaagctacaagcaccccaccagtaccaccgccctctaaggacctacaagagccagtcccgcttgaagaagagtttgaccctatcctgccatcttag

SEQ ID NO: 20272 - DNA, 657 bp, Zea mays
  Peptide Sequence Number=SeqID_63647
atgggcaacagagctaatgcaatcaaccttgacttctcagatgtaattgttgacatctatatattgtctgatgaagagctagaaacatatctaaaggtgattgcagtaatatccatgggaacagaagttattgaacatgacttgttaaatatcagagagctatatgatcatgtgttggccctactatatgactatttaagaagcaagatgaacactatcaccgcaattctaacagcactggatgcccttggtgttgatgaggacaactccattggcactaagagtcgactgaaggatcagcaaacgatctgccaacggtgggttccatgcttagaaatagttgtaccgttaggattaatatatggttcagactttgagaatccagacttgaacctagaagttcacttcattgatatgcttgtcatggtcgtgacggttgggctggagagcacgctggtaggggaggacctcaacgaccgtgcctttgtctatggcttccttagcttcctggacaagatctcttgcgtaatcgtcctatttgtcttggaattgtacgaaggctggcaactgatcgggcgggcacaacacatccttcttccgctgcagacacgaatgagatgtagcgagatgaggggacacggtgagcagaaactatag

SEQ ID NO: 20273 - DNA, 366 bp, Zea mays
  Peptide Sequence Number=SeqID_63648
atgccgatctcgtctttcttcgtgctgctgctgaaggagctcggcctccaacctcagcacttcacgccttgcctcatcctacgggcggccatcatcgcctacctctgcaagcattcggagggaaggatgttcaccagccttgtgaaggtggacagcgggccgagctgtggctccatccctcgcgcccaactctttggggtgggaaccgagccatgctgcggctccatctctttggctttgatggctttggtgccgcctgcaatggtgaccgctgacctagctgctgaagacgctacccaggaggtcgtacaagacgccgtacgccgtggagatggcggtcgcgcgcttccagcgcgaccttactga

SEQ ID NO: 20274 - DNA, 765 bp, Zea mays
  Peptide Sequence Number=SeqID_63649
atggagccgcagcatggctcggttcccaccccaaagagttgggcgcgagggatggagccacagctcggcccgctgtccaccttcacaaggctggatgaggcaaggcgtgaagtgctgaggttggaggccgagctccttcagcagcagcacgaagaaagacgagatcggcatcgccaacccgctggggaggttggagatgaagatcacaaactctccggtggcgagatccccatgaggaaactcacgttgggccgcttctcatcccctcggcccagcaaccttctgcccacactcgtccacgcggccactcgcgccgacgggtgggtcctagttggcgcggatttcgctgaagctctcaacatcgtgcatatatacgtgtcccggttcccctctactctccatccgaccagggacatctacggcgagctgagtgtggtggcgctgtggaaagtcccgccgcgggggatctcgcccacactggtgctcgagattcaattggtagcctggggggacttcaccggggtgtgtggacggcatgccctgcttcattggggggattacgggtcgggtggccgtgaaattgcttgccggggggtcgtgattcgtcgcctgactgcaatccgatgtggccagcacgccatcgtctaccagctacgattagatcgggttcaaaataaacgtggaccgtccgatcggatcgaagggttggggctgatgcgcatctttgttgaatatcacccattggatctggatccgaggctttag

SEQ ID NO: 20275 - DNA, 573 bp, Zea mays
  Peptide Sequence Number=SeqID_63650
atggcccccgggcccacctcaggggaggatacgagcctgcaggtggggccaaagcttgaccagcgattggcgcgctgcttctggccatgcgtggggtgcctcgataccgctgcactggttttgaaaattcaccttctttgtcctctgcggcggccccgaggaggcgcggtactggcgcgagcggtggttcgacttctctgcacccaggaaccggcgcccaaggaggatgactcgtgggcctgggccccccgtgtccgagattgggctgttggtttcagcggaggtgaagaggcgcactaccgcaggcggtggcgtgctcctcacacggcggttcgccttctccgcacacggaggccgacgcctgaagagtatgactcgtgggcccgggcccccgtgtcagaggctaggccgctgctttcggcggagatgaaggggcgcactgccgcaggcggtggcgtgctcctcgcgcggcggtttgccttctccgcacacggaggccgacgctcgaagagtatgactcgtgggcccgggcccccgtgtccgagaccggtccgctgctttcggcggaggtga

SEQ ID NO: 20276 - DNA, 78 bp, Zea mays
  Peptide Sequence Number=SeqID_63651
atggcgccgtcgcatgggctgggcgccgccgcctctgctcagtttagtcctggaaactatttaaggtataaaaattaa

SEQ ID NO: 20277 - DNA, 351 bp, Zea mays
  Peptide Sequence Number=SeqID_63652
atggcgggcggaaatacgctcgccggagctaaggaacggtggctggccgatgagggtgagtgcggggcgaagagaggattcgagttagggatcaaggtgaacatccctgatctttggctcaaggaagtaatggctcttggtgtggcttttttaagagaaaccctaggtgacactggggtgtcacagccttccccccttaaaggaatctcgtcccgagattcaggccagagtcctcccggggtgaagcgaagggtgagactgataggaaaaagggtgatgattgttattattagggcaaaactgctcttcgaatgtcattctctttgcaacttcagaaggaagtccttttaa

SEQ ID NO: 20278 - DNA, 114 bp, Zea mays
  Peptide Sequence Number=SeqID_63653
atggtggcctattctatcctgcccacgagaaccgcgaaaggccatgagcatttgatcgcgttcccgatgattggtggtctctcagttcgaattggtgactcgccaacacaatag

SEQ ID NO: 20279 - DNA, 543 bp, Zea mays
  Peptide Sequence Number=SeqID_63654
atgcaggatgtagttgatggtgagaacagcgccgctcgcccctctccgactgttgtgccacccgccagggtgaggctgacagcagctgagttcagcctcaagcgcaacaggaagctccgcctcgcccgaccttgggcctcggcctcaggaggaagtctccgcctcgcccgaccccagggctcggcccccgcctcagcctcggaaggtggtctccgcctcgcccgaccccagggctcggcctcaacctcgacctcggaaggtggtctccgcctcgcccgaccccagggcccagcctcaacctcgacctcgagaggaatcgcgtcctcgcccgaccccggagtctccgcctcgcccgaccttgggctcggaccgaccacaccgcagaggccccttacggaagcaaggagacatcagcaaggtcccaacagccccgacagctgtgcttctacaaggctcaaacgctcctccgacggccacgacaccgcgtacacaggactcaagcacctctccgacagccacgttggcatgtacatagggctctag

SEQ ID NO: 20280 - DNA, 156 bp, Zea mays
  Peptide Sequence Number=SeqID_63655
atggccgtgatgggttcaacatcggaaaagatgtacctctgccaggtgaggaagcgacaaatttttgttgcttttgctccaagatggttcctaatgaagagaagcaagagtgaagtgcgggaggacatggatcctccatatagaacttttgtttaa

SEQ ID NO: 20281 - DNA, 300 bp, Zea mays
  Peptide Sequence Number=SeqID_63656
atggcgagagtagcgtgtaccctccgtggcaagaggctggacggtggtgtatatgtgctctcggttggcgtgaacccggttcccttccttcgtcaggggcacgagctttggttggttgatgaggtcacgggtccactcgtcagcgatgatgtagatgttgtcctcatggaagagttatttggaggtcactggagccttttggaggatggattgtacgaagacctcatcatgagacccccgatagaagtcctcgatcactgcctcatcaccgatgtcgaggatgtgattcctcatcgatag

SEQ ID NO: 20282 - DNA, 420 bp, Zea mays
  Peptide Sequence Number=SeqID_63657
atggccgaccattttaagcacttcctctaccacctcctcgacgggcccagggttcacaacctcagaggtggtcggaaaccacgatcacctttagtcgggccgactagtgcctcagtttcgatcactcgaaaaagtaatgatgagtacatggacgtcaactatatgtccaaggcccaatcaatcatagagtcccaagctcaaggggagttcaagtccagtttattcgcgaatcaggttacgcttgatgccttggatgttttgatgattagaaaccttggagaggataaacaaggatttgggaaagggcaagatgtcaacgagaagaagctagtacattcacaacaagagaaagtcaagtctgactcaacttcgtctccacctcgtaatccgagaccagtctgcactaaaacgaacggctag

SEQ ID NO: 20283 - DNA, 84 bp, Zea mays
  Peptide Sequence Number=SeqID_63658
atgggggggtcacggccagaatttataccagaggataggggcaaggtccgagcggaaaaggaggcggtgaccgatattttttaa

SEQ ID NO: 20284 - DNA, 396 bp, Zea mays
  Peptide Sequence Number=SeqID_63659
atgggggtgggaggcggaggggaggccgcgacggtttcggcgccggcgccagcggaggaggcggggaaggacgcggaggatggcaacgactggaccttgaaggcgaagctgatcgccgtagcggtgctgggggccacggcgctcggggtgttcctgcactcctacttccgccacgcggcgctgcgcaaggcggaggaggggctcgtcagcatgtgcgaggagcgcgcgcgcatgctgcaggaccagttcgccgtctccgtcaaccacgtccacgccctcgccatcctcgtcgccaccttccactacaagaagcacccgcccgcgctggaccacatccacctgtgcgcagctgcacgacaccttcatagcgcgggggaccagagctggagggagtaa

SEQ ID NO: 20285 - DNA, 168 bp, Zea mays
  Peptide Sequence Number=SeqID_63660
atgcgccatgtccccagacaaatctttctaccgatgcgctctgctttgcttcgcttcgtggtcgtggctgccatcactggtgctctgtcaaaaacacgggtgaagtgcgattactggatagtggagcagcagttcgtgcgtgcggcctccaagcgtagagtatactag

SEQ ID NO: 20286 - DNA, 2448 bp, Zea mays
  Peptide Sequence Number=SeqID_63661
atgggggttctcggttggggcagcaaaaggctaagaaagcgacagtcagacgaagcagaggccaatggaagcagctgcgctgccgctgtcgtcctcgacagcgtcgtcacctcctgctatgataccgtcaagaagacgtgcaagcggcaacaaagacgtggtcaagatcccccctctttaatacaatctaggacagcacaggagatgaagcgatctctcccactagtccccaacctgcagactgcagtcgcagcgcaaaacggccaaagggccccatttctcccatcacctctcccaaattcaaattcccgcacgctcctcctcccctcccccaatctcacctcctcgccgaaaccctatcagcctccgccgccatgggggggctcgcacagccgcgaggacctcgacctatccgattccgactccgacgacgccgagtcccgggcctccgacaattcctccgactacggcacgcctaccccggcatctgcctcctccaagttggccagcggcgcaggggcggcggccacgcccgcctccatcgacgccatcgaccgccacctccgccagctccacctcaagtacaacgagcccatctccccgaaccctagccccgggctcaccctcagcgccaaccccgccgcgctcaacgccgtcaagctatacctccacatcggcggctcctccccctccgccaagtggatcgtctccgacagcctcgccgccgcctccttcgtacgcaccggcgacgacgaggacgacgacgcgcccgccggcgggccgtggtgcctcgtcgtgggctcgaagatccaggccagggtcgggcccgagctgcagctcaagaccttccccgcgcagcgtcgggtggatttcgtcgccgacggcgtatgggcgcttaagttccgccacgctgacggcttcggtgacttctgcgcgaagtaccacagctgtatgtttgagaacagctacggcgtcgccgccacggacgagggccgcgccaaggtgtttgggaaggacttcgcggcgtgggcgcgcccggaggacggcgacgagtcgatatgggaggacgccaccgacggcttcttctctccgggtcccaagggcagcccgatgcccccgcggacaccagtactgaagcctttgttagaggatctgcgcgagtttgaggagcctgttgaggaaggcagcggaattaacagtcttgcgcttggcgcactggataacagtttcctcgttggagacaaaggcattgaggtcgtgaggaatttcgagcatgggatacacggcaagggcatgtccgtgaagttttctggagggagcacaaacttctcgacaccgaaaaaggctcttcttatgcgggccgagactaacatgctcctgatgagcccagccactgatggaaagccacatgccaagggggtgcatcaatttgatatcgagacggggaaggtggtttcagaatggaagtttgagaaggatggagcggatattaacatgagggatatcacgaatgatagcaaaggtgcccagttggatccatccgaatccaccttcttgggactggatgacaaccggttgtgccggtgggatatgagagatcgcaggggcattgtacagaacttggcaagtgcaactgagtcgccagtattgcaatggactcaggggcatcagttttcccgggggacaaacttccagtgcttcgcttcaactggtgatggttcgattgttgttggatcattggatgggaagatccgcttgtattctaagagttctatgaggatggcaaagacagcctttcctgggttgggttcacccattacccatgtcgacgtgacatatgatgggaagtggattcttgggacaacagatacatacctgattcttatatgcaccatcttcattgacaaagatggaaaggagaagaccgggtttagtgggagaatggggaaccgaattgctgctccaaggctgctgaagctcaacccactggattctcatctagcaggagcaaacagcaggttcagggagggcagattctcatgggtgacagagaacgggaagcaggagcggcatctagtggccacggtggggaagtacagcgtggtgtggaacttcttgcaggtgaagaacagccaccacgagtgctaccagtaccaggaggggcttaagacctgctattgctacaaggtgatccccaaggacgagtcgattgtggccagccgctttatgcacgacagtagtggtacgcagtctcttagctttggcagctttcgtacgaaaattacatattcagactgctacgctgcgtcaaaaggtacaaaagagttccagatctaccacacgacctcaagagaggaaaagataagggagttgccctttaacaacacaagtcctaaaggaattgctttgcggaaatcagagctgaaaacggtgctgcctccaaggtag

SEQ ID NO: 20287 - DNA, 552 bp, Zea mays
  Peptide Sequence Number=SeqID_63662
atgggtcgagcgtgtgggcgagcgcgaagggggagaggcgaggtggccggagccgagcgtgagacaggtggaagtcccgcggccttcgagttcgtcccgcgcccaggtcagggcgacgtggggtttcctccgaagccgaggttgagtctgtcttctgttgccgtggccgagcccgagccaaggggtcgggcgaggcggaagtcgttcggccgaggccagggcggagtccgagccctggggtcgggcggagcggagttcgccgtcttccgggtcttagcccgagtccgagccctggggtcgggcggagcggagttcgccgtcttccgggtcttagcccgagtccgagccctggggtcgggcggagcggagttcgccgtcttccgggtcttagcccgagtccgagccctggggtcgggcggagcggagttcgccgtggcgcctttggcaaggcctgattgcctgtcagactcactctgtcgagtggcactgcagtcggagtggcgcaggcggcgctgtccttctgtcagactggccagtggagcggtggagtga

SEQ ID NO: 20288 - DNA, 165 bp, Zea mays
  Peptide Sequence Number=SeqID_63663
atggactatcagaaggagaagcgagcaccgtccgaggccaacccggaccgtccggtcgttaaaaacccagaaaaccccaaaggggcggaccgtatggaccaggggcgcggaccgtccgccgtcggcaaaaaggagcaacaactaggaagtggttgtaggctataa

SEQ ID NO: 20289 - DNA, 723 bp, Zea mays
  Peptide Sequence Number=SeqID_63664
atgcgggaggacttggcggtgcggctcgtgggacgttacgtgccgaggacggaaggccagcgcagctttgatatccgcgggtcaaatgaccgtttgaacagggtcttcgaattaaatcaactgtcgtacgacggctatcccggtcaagacgaagcggaccgccgtgggaagaaaccggcggaggcagcggcggagccgacggcggaggctcccgcagcgtcagggccttcgcaggttcaagaatttgggcctgcgtacgcaaccgctgctactgagtttttggcggcttcgaccgcggaaggtgggaatgaatatggtgggtttgcatctgagttttttgattttaccgactccgggagctcggttgagtggactgaggagtcgtcggaggaggacttggattattttgcggccttggacgtggctgcggtggaggcttcgccacacgccgcggacgcgccagacgtgccaggccctagcaccgggcgccgccgacgaagggcggttgcaaaacttagggttagcgcggaggagggggctcggcttcgtttcggctgcgcccttaggcggctgctgcgcggagtctttgcgatagacttcgggttttttcgcacttgttgtgctagtccggctgcacccttaggcgacttctgcgcggatagtcttcgcgatagacatcggattttttcgcacttgttgtgcttagtccgtctgcacccttag

SEQ ID NO: 20290 - DNA, 669 bp, Zea mays
  Peptide Sequence Number=SeqID_63665
atgtggatctatggccgcgacgaaaatccggcgagaaattgtggcgacggtgcgcgcccaaagagtcgagcgacaccccggccggccatcagggacccgacgacacccacgcttgaatcagccacggcggcgcacttcactcacctccccaacacctccctgctggcgcatccagatggtcgaggggatggggacaccgcagggctgggctttatagcggaggtacggaggttggttggggacgcgacgggaggagaggatccgcggtggttacagctgagcgcggaattcgcgcggcggcacatacggagctatgcgtgttctgtttctggggtaggagacgattctatggcacggggcccacgcaccagaggcagcggacgacacgcccaggtgattgcgtggaacaggaagggagggaggctggagctggggcggtgggcaatcttgtccggattccacgcgtgccgttcggcggagtctgtttactgggtggaagatgaacctgacgactgggccacacattgtcagcggcacagcgaggcgacaaggagatgtatggctgatgtatatgcagatgtaattgtggacattgatccacaacccatcacactcaatcaaagatccaaatcagacaaatatcataagaacaagcattcaagcatataa

SEQ ID NO: 20291 - DNA, 456 bp, Zea mays
  Peptide Sequence Number=SeqID_63666
atgaaggggcatagggtcgggctaattcggccagtgaccgtgtgggcgtggcgaaccaccgcggccgaactccggcaaagccgaattggccaagacaaggcggaattgggagaaactgagcatgggaacagatgtcttacctcgggagggagctcgaggcgacttggtgcggcttctggcgggttggatggccagcacggtgggcgcggaactccgacgaagccgagcggcgagagcatagcgcgcgagagggtgagcttgcgcgacatgaggcagggggtgagtgtgggcgcgggcggtgctcaaaagggagctgggatgcgtgggcaggtgacgtggccgaggatctcggcatgcgtgcacgctcgtccacggcgcttcgcggggaaggcggagctgacagggcagtcccacgacgaaatggttcatcatgctgacggacaggcccggttttaa

SEQ ID NO: 20292 - DNA, 297 bp, Zea mays
  Peptide Sequence Number=SeqID_63667
atgaagatcgcgatggctcccgcggagctcgggattcggttgacgatggaaatgacgaggtcggcccactggtcagtgccacagggacgttggcacggatgtgagaccgagtcgtggatagccgctgacagaagagggcccgcagactctatttacaaagtaggtgttacagttcctaaagacccatttgttcccattcacatttgtttgggtttttgggctaagggcccaacttccatcccggagaaattgttccacttcttctgccaggcaattattccaatcggatccctttaa

SEQ ID NO: 20293 - DNA, 2085 bp, Zea mays
  Peptide Sequence Number=SeqID_63668
atgtccggtgtgccaccggactgtccggtgcagctagaagacaaaatacttcaacggtcaaccgcttcaaaccccaacgggcagctgacgtggcatgcaccggaccctgaacactgccatgtccggtgcaccaccagactatcctattggatctatggaagtttaaatgagaggcaccacggtcggcaaggtttccggggcaagcctaagattctcaagctcatcaacaatgaatctaaagggtgccgaagaaaatctcgtcttctaacctgtgctccgcgctcgtcgtttcacccaagctgcttgccgcggagcttgctcagctccggcgagcaggggaggagcaaaaagagcaagctccaccgcgtcagggcgcatgttttcaagtccaagaaccagtctttgcgctctcaatcccacctggttgatagccacgggggccctgcggataaaatcccgagaaaggattttccttgttccgcagcgccgtcgctgccggacgcggaggcggtcgcgttctggctgcgtttctgccggagggagctcgacgtccggagagcgcacgcggttgccctgcggtcgctcggcagcctgggggtgttcgtctccaacaatctgatcagcgcttatgtgcggttcgacgaggttgctaatgcgaggaaggtgttcgacgaaatgcccgagaggagtatcgtgtcgtggacagcaatgatgaatgggtatcagaagcttggctgccacggtgaggttgcgaggcttttgatggatatgctgatcgctggcgtccaaggtaacagcttgacttttgtttgcctgttgaaatcttgtggggagcgatgtgatgccaggttggggcaacaggtccactgttgcgttgtgaagggtggctggagcaatgtgatagttgacagcgccatcacacacttctatgctcaatgcggtgatgttgctgctgcttcaactgtgtttgataggatggcatcccgcgatgttatctcatggacaacaatgatcacggcttatgtgcagcatggccatagtgacaaagctcttcagatgttcccaacaatggtgtctgagggatttcgccccaacgaatttactgtttgcagcgccctcaaggcttgtgcagaggagaaggctctaagatttgggaagcagttgcatggtgctattgtgaagaagctatacaaatatgatatccatgtcgggagcgcacttgtcaccatgtatgccagatgtggggaggtatttgatgctcagacagtgttcgataagatgccaagaagaaacactattacatggacttcaatgatctctggatatgctcaaagtggctgtggtgaagaagctgtcttgttgttccgcaagatgaagatgcgcagagtatttgttaaccaccttactattgttagtctccttagtgcttgtggctctatgcagtcaatttatcatggaaaagaacttcatgcccagataataaagaattgtatggaagagaatctccagattgggagtacgcttgtttggttttacaacagacgtggggagcatacttatgccacaagaattctagaagcgatgcctgaccgtgatgctgtcgcatggacagctatgatttcgggctataacaatcttggccataatgttgaagcgcttaaatcattggatgaaatgttatgggatggtgtggtaccaaacacttacacctattcctcagctttgaaagcttgtgccagattggaggctctgcaagatgggaggaggatccatggtgttgttaacaagacccaagctttctcaaatgtgtttgtgggatgctcactgatagatatgtacatgcggtgtgggaaagttgatgaagctcgaagagtcttcgacgccatgccagagcacaacttagtaacatggaaagtaatgattacaggatttacacaaaatggccgcagtgaagaggctttgaaatacatgttcctaatgcaacaagaaggttatgttgttgatgaatttgtgctttcgacagttttgtcgtcatgtggagattttcagttgaaatcagaccgcatctcgttcatagttcaataa

SEQ ID NO: 20294 - DNA, 1092 bp, Zea mays
  Peptide Sequence Number=SeqID_63669
atggagaagaatatggaacagttgggcacctcctcgctgcccaatgttcaggaagtttttagggctgttagggatgaaggtgattctggtttacgacgaatgcaatttggtgtagcaaaaaaaataaaaaatggagcccgcaaaattgtcctggaggaggcagaagccgccagagtagcagcattctcagctttcaagtcacttggtgtggaagttccccagttcactgcacctccactcgcagctattgaggaatatccaactcacgataccatagaccaagctaagttaaataagctagcttctggtacccattctagagatgataaaaatatgaatacttgctctgattatgctactccaagggcttctacatacagtctaagaaaggacacaagtcctgctccttccattcaaatgaaagagaatgcaggactatctaaaaatgtgcaaatcactagacagggagcatcatcatctttgtcaacagaaattgctgatggatctagtagagatgtggctgaaaaaggtcctgtccatgcatataacttcccagggggatttgattgttttcttgatcaatggtccacagctagtaattttttctttgatgttcattttatcaagagatcgatgaaaccatctttgaacctttttgaagtttttgggttggctgtctgttgggaaaaatctcccatatactactgcaacttcccaaaagatctagtcactactggcaacaataacatcaaggaaatgtggggtaattttcagagaagatgggaaaaaatagcggacattatgaaacaaaagagtgtccaaaaaatgacatggaatttaaagatccagatccaggcacttaaatcaccttatatttcttgccaacggcttgaaaggtttcatcttgaccataaaatgctggacaaagttgaagtgcttaacaactcatatatgttgttatcaccagtctctgtctacaatggattggatatatgtctgctggcgtgggttctatggccagatgaggaaagcagagcggttccaaatcttgagaaggtatttgatatatgtcgtgttctgcaatatctttag

SEQ ID NO: 20295 - DNA, 558 bp, Zea mays
  Peptide Sequence Number=SeqID_63670
atgggtgctcttagtgaggcaaacaagtgccaaacctgcaaccatgacataggagatggtgggcttgctcaggcttgcgttggtgtttgttggtacctcaagactgggcttttcacctgcaatggctctgaactagctcgagagttgcatgcggtggtggacgacaagcaacttcaccaggactacatgagtaactatgttgactacacatgttggtgtgaggagagatcttggtgcaagatttgccactgcggctggactcctacccccaacctctatagcagcctcgacctccctggctacctgacctccacggccgccttcagtgccgcctcgacattcgggactctccccgaccgacttctcccggcagccgcccctcggtttcaccgcccgcctgtcgtcgatgtcacttgggctccaccacgtgccgtcgcgccgtccaacgactccgccttggtcgctgccatcgccaccatccaggccgccgtggccgcctcacaggagcggcaacgcgtcgcattactccctctggagcaggaatgggccatgggttag

SEQ ID NO: 20296 - DNA, 726 bp, Zea mays
  Peptide Sequence Number=SeqID_63671
atgcaggaggcgtgcaaccgcaccatggttgtgcaccctttcggcttcatcgcatccggtggggaccgggaaaggggatatttcgaaagggatccttctccacgaaggaagcgggccccgagccctcctactgatcaggggggttcgaaggctggccccttggaagggttcgacagccgccccagagcatgcagagtgagggatgactctgggtacgtctgttacatggccgaggctcgggctacgctcccgagtcacttcgcccttccactgaccgacctgacaggaaaacagcgtcgctcgtcccgctccgactgttgtgccacccaccagggtgaggctgacaacagccaagttcagcctcgggcgcgacagggaactccgcctcgcccgaccttaggcctcggcctcggaaggaggtctccgccttgcccgaccccagggctcggcctcggaaggtggtctctgcctcgcccgaccccagggctcagcctcaacctcggcctcaggaggaatcgtgtcctcacccgaccccggcctcggcctcaggaggagtcgccgcctcgcccgaccttgggctcggaccgaccgcgccacgggggatacatcattaccctacccctagctagctcaggctacgggggaacaagaccggcgtcccatctggcttgccccgggctcaggcacttctccgacggccacgttaccgcgtacacagggctctag

SEQ ID NO: 20297 - DNA, 207 bp, Zea mays
  Peptide Sequence Number=SeqID_63672
atgagttatgggcttacttttgggcaccctattcctgggtacatgtcagcagcccacgagcattcgtgtaacttcttggagttgttcggaggctttcttgttgggaactggggtgtctggtgcgcgcaagcgcgtctactagatgcagtccctgagccttcgagcaactacttggagctatttcgaggctttcttgttgagaactag

SEQ ID NO: 20298 - DNA, 672 bp, Zea mays
  Peptide Sequence Number=SeqID_63673
atgatgaccaccagttcggtggtggggagaagcaagccgggctgcggcctctgccccgccctcagcttcaaggatcttcatcatccttgctgtggcggagggcgagctgagccggggttctacctcccgcatgggccggcaggccaccttttccttcagcattcaggggagagggcgctcaccggccttgcggagggggcgaacttcgacaacgcgggaccggtcgaccgcaagcgtcgtcagctccagcgtgcctggctcgctggctcagctggctctgtcgtggcctccgacgctgcctcctgtcgcttgatccgggcgtggctgtccatcaaccgcacgggcgacagtcgcgccgcgcgcagcacggtgcctccacgtggaggctggtgctggtccgtccgcgaggacttgagtggggatctgccggtgcaggctggggcggccgccattcgtcggtgtggcgctggcgcgcaggtggacgctgtcgtcggtgccgaggtggtggcagccagagaaggtttctccgtcgacgagaccgtcggcgccacctgcggtcggaccccccggctctttggctttgatggcttgtccttgccccttgtgtgggggcgtgggcgagggcctttccacagcagcgcttgccctaaggtcatcgctgatgctgtgtag

SEQ ID NO: 20299 - DNA, 513 bp, Zea mays
  Peptide Sequence Number=SeqID_63674
atggcgaaaaggtggaagttgtggcatcgtggccacaactgtgatccactagggaactctgttgattccaagtctcacgggtattacaagaagtttaacaaggactttggggtcatcgtagcacctctcatgaagctcttgaatgagggtttaggtggtgccaagaagcagaagatgccatgcaggggactcaatgggctgctatcaaccgcacctatactgcagttgttggcatttgacaagctgttcacggtttggaagggtgactcccttgacttcatggaaggccttccaagggtgcacgagaagtgtgatcctcacagtcgccgaccaatttttctaacatccattgtaagcgaccaggaccccgtgaaaggtaacttttggctggacctcttcaagatggctggttatgaagaagctaagctatttggttcagaactgaacctgtattcagtcttagctgttggagataactctgattactcatttctgttagccagaggcttttga

SEQ ID NO: 20300 - DNA, 1344 bp, Zea mays
  Peptide Sequence Number=SeqID_63675
atgaacgttgttcgtgtccttcccaaagtagctgaccatggtggcaaggatccagatcatattgttgaattgtgtaatgaggttgttcttcagggccattctgtgcttttgttttgctccagtcgtaaaggctgcgaatcaactgcaaggcatgttgccaagttcttgaaactaccctctgttggaacaactgatgttagttcggagttttcagatgctgcagctgctattgaggccttgaggaggtgccctgctggattggatccaatattgggagaaacccttccttttggtgttgcatatcatcatgctggtcttacggtcgaggagagggagattgtggaatcatgctaccgtaaaggccttgtccgtgttctgactgccacttcaactttagctgctggtgttaacttgcctgctagacgggttatattcaggcagcccaagataggtcgtgattttattgatgggactcgctatagacagatggctggtcgtgctggtcgaactggaatagacacaaaaggagaaagtatacttgtatgcaggcctgaagaggtcaagagagttacaggtattattagaagcaattgccctcccttggagtcctgcctctcagaagataaaaatggaatgactcatgcaattatggaggttgttgctggtgggattgttcaaactgcaaatgatattcatcgttatgtgcggtgtacgctgcttaattccacaagaccttttgatgatgtcgtgaagtcagctcaagactcccttcgttggttatgccataaaagctttcttgagtggaaccatgagaccaagatatactccgctactccccttggtagagctgcttttggaagttcactcaaccctgaggaatcattggtagcatacttgtcttttgctccttcattattttattgcattgagaaagggcctctagctgagttggttgttcttgatgatctttcgagggcaagagaaggctttgttctggcatctgatttacatttagtttacttggtcacacccataaatgtagaccttgaacctgattgggaattatattacgagaaattcatgcaactttcttctcttgagcagtcagtaggcaatcgggttggagtaattgaacccttcttgatgcacatggctcatggggcgtcgataccttttcgtgcaaggcctgagagaaacaccgggttaagtaacaagtctgcacaagctgctggaaatactcttgttagtgagcacacaatcagagtgtctaagcgcttttatgtggctttaatgttatcgaggcttgctcagaatacacaagagagctatgtatcatttcattga

SEQ ID NO: 20301 - DNA, 2025 bp, Zea mays
  Peptide Sequence Number=SeqID_63676
atggcgtcgggctcgtctcgcccccaaatcgaccagttcttcccggccaagaagcggaggccctcgtcgcggaagggcgagtcgccgcgacccgggacgcagcatgagagccccggcggcgccaaggggtccctggaagggtacctcgtccgttcgccttgcaaccgtgccgtggcagcggcatcggtggtccccgtgggctcgcccaggggcggggacccgggcgccaggcgtagcctctcggccgcaatggatgtcgacgtcggttcctcggcttcggtggctgcggcggcaggtgacggggcagactttgatctcaggaggagcacggcggatttcttgtcccattcctgcagtgctatcctgcctttgaggggtgactgtgattacagcgagcagtgccagatgaagcagaagcggagtgcgtcccagtcattcttggttccttgtgacaacgactatgtcaagaagcagcgagttgcccattgtggtggctttgaagctctaaaggagttagatgataatgtagcttccatgaagcaatgcatcaatcaccatggtggctcagaggctgtggaggaatctgttgagggggaacatgtgagttgtgttgggttttcggccttgcaaagatgtagctttaccccaagtactgcacagataaaagttgggttttctctagcacctgtggaaaccctaaagtctgtatcgaggaattcccttacttcacctggtgaggagttctggaatgcagcaattgaactcgctgatgggatatctgcccaggctgataaggtccgtggaaggccagaatttgatgcagcagaagacaagtcatcttgtgcagtagcagcattctttaagactcttcctagatcaggaagggatgagcttgactgtcaaaacacagtaggcagcaatgatacacatcatatagagaaattgtcaaataaagttgaatcactggcagtaaactgtcagcatataattagctcacctttgcctgtgaagcagctagatttctttcatgaggatgatattaaagtttcaggttcaaaatttgaaacaaaaggcagctatgaaacttgtaatgcacaagcagaccgtgttccactgaaaggcagtggccgcctagaaaaggaaaatctcatggaccctgtggatgtgttgaagagaagtgctattaatttgcacactgattctgcagccatgagatgtcagggtgttttcaagtcaacaactgaagggaaggttcatccaactcaagaggctgaaagagattctaatcttattaggagagatctcaatcagccaacccacaatgaaaataaatcacttgctgcatattcaaataatcgcaagacttggatagattccaagagtaaagttgcttctcaggaagtggaagctagcacacctactagctccattcctctaaaggatcactcaaagatatcaagttggcttcctcctgacctttgtgctatatacatgaaaaaaggcatttcagagctgtacccttggcagggcatgcttatcaagacgtccattaagtgtcacattagcgtcgctttagcgctaaggcgcactcacagggcaaggcgtctagcttgccttgtgctggggactgcagctgctgcctccttcctcgtcagcgtgcagtgctccggccatcggagtgctggtaaaagttttgttgctgaagttctgatgttgaggcagatactgtcaactgggaatatggcaattcttgtccttccctatgtgtcaatatgcgctgaaaaggctgaacatcttgaacaacttcttgagccactgggtaggcatgtccgtagcttctacggaaaccaggggggaggctcacttcctaaagatacagcagttgctgtatgtaccatagagaaggcaaactctttggtaaacaagttgttggaggatggccgcctctctgaacttggtgtaattgtcatagatgaacttcatatgcaatctaggtttgtgacagcattgagagtactaacgtaa

SEQ ID NO: 20302 - DNA, 690 bp, Zea mays
  Peptide Sequence Number=SeqID_63677
atgacttcccacggatcctccgatgacagaaatgcactgacccacactgacggacttgcacgagagggcttcccccgcattttgtgggaggtacttcagggggccggatacacgacaccccctcagtacgcggtacagcagttcgagaagcaccgagtgcctcgctgtagggtgaggatgaccttggagcctcatcccctgcagccaggatggcgctctttggactccgagtcttttggataccgagcagaggacacgatcgaggcgatcgctctgcatggattgactactttctgcggattccatcccttggagctggctacccaccccattggcttgttccccgctgagagggaggacgacccaatgtggaaggatcgggtggagcatgctaaggacatctgggccatctacccaggacagactgcgcacttgacagtacggtgcatgaatgctctgtaccgtctgcaggtgatgcgcgaattggtggacaaggacttgcaagtggattattatcctccaaatatttcaagatttggaagaatggtggtcaacatgaaatctctttctttgtccctagaggatctcctcattaacactctccagcacccttgccgaggctatcgagctccctgggacttgctccgcaatgatatccaggacaataggctaatgaaggcttctccttga

SEQ ID NO: 20303 - DNA, 525 bp, Zea mays
  Peptide Sequence Number=SeqID_63678
atgtggcctggccccacatgtgggccacaagaccgtggtggccaaacgccatttgttgagactttattaggccggcgacgtgttcttacaaaaataacggctggcaatagcaaagagaaagctaaagcacagaggcaagcagtaaattctatttgccagggttctgctgctgatattattaaggtggctatgattagagttcattcaataattactaacagaactagtgcagctgattccacagatgaagttacaaggaaattttcagaacttggtggccagtgtcaccttattttgcaggtgcatgatgagttggtattagaagttgatccgtgcatggtagcacaggctggaagatatcaacgaggtggtcgggatgtggaggatgcgaacatcacttatagtgacatgctcgcggacaaagtggaggttgatttctacgtgcttcatgtgctggtgctccatgagattggtgttgagggctatgaatctgtaagaaaagctgatgaagcgagaatgccttga

SEQ ID NO: 20304 - DNA, 1032 bp, Zea mays
  Peptide Sequence Number=SeqID_63679
atgtttgtcaagaggcgacttcatagtcaagaagctgctgctgcaaatcgcgatggaagatggagaaatcagatgcacaaagcagcacacaatggctgctgtagacgtgctgcacagacacgggctttgtatactgttctgaagaaattacttactcaaaatctttctgttttggttgaaacaatcgaggccccattggttaatgttcttgctgatatggagctttggggaattggcgctgacatggatgcttgtctccgtgcgaggcatattataacaaaaaagctgaaggaactagagaaagaagcttacagattggcaggcaagaatttctctctaaatgctactgctgatatcgcagacattctatatacacacctaaaattgccagttccaaaaggctgtgagaaagggaagctgcatcctagcactgacaagcagtctttggaccacctaaggtacatcatacatggaaattggcttcagacgtcaactgccactggccgtttgtccatggaggagccaaatctgcagtgtgttgagcatgtggtggaattcgatacagggaaaagcgataaagattactcaagcatttcagttgatgatcatcataaaatcaatgcccgtgattttttcatacctaccaaggagaactggttattcataactgctgattactcacagattgagttgcgtttaatggctcacttttctaaagatcatatgttggttgaacttctaaagaaacctgatggtgatgtttttaccatgattgcttcaagatgggctgagaaagaagaggccttgatttcttccaaagagagagaaaacactaaaagattcatatatggcatcctttatggaatgggtgcaaactcccttgcagaacaacttcagtgcagcactgaggaagctgcacagaaaattcaaagctttaggagattttttcctggtgtttcctcatggttacatgaagttgtgttatcctgtcgccaaaaagggttagtctacttggtagcaatttctgtttag

SEQ ID NO: 20305 - DNA, 549 bp, Zea mays
  Peptide Sequence Number=SeqID_63680
atgaggaaatgggcaaggcctagcccactactcctcctgctcctctcctgccggagcaacatcccactcgaccgtccaacctggtggcagggtggtaggccaagtcacaccatcaatcatttcctaaatcgcacctgcaaaaattatgacacaagcaaggctgagtatactaatactcagctagacttacccggttacaaggggtcaagcagtctcattagctgcgagaagcagacgattcgaatcgagttttatccttgcaagggcagagggggtgatttgaactacaactaccatataatagtaggtgggcggccgaagtccagtgaggtcgatcttcgcctttcggtgaagttctgccaggtccgagggcttggaaagcttcacgggcctatggcggagctaaccgaagcgctggcgcgacttggaggtgactggagtgggctggccacggtggccgaagctctggcggcaatggcgggcagaaaggagctcgccggagctaaggaggggtgtctggccggcgatggtgagcgcggggtgaagtga

SEQ ID NO: 20306 - DNA, 402 bp, Zea mays
  Peptide Sequence Number=SeqID_63681
atggagtacaaggggtcaagcagtctcattagctgcgagaagcagacgattcgaatcgagttttatccttgcaaggcgggggagctcgtcggcggcgaggagtcaggcctatccagggcgaatttgaccaatcaaacgggcgggcggccgaagtccggtgaggtcgatcttcgccttccagtgaagttctgccaggtccgagggcttggaaagcttcacgagcctatggcggagctaaccgaagcgctggcgcgacttggaggtgactggagtgggctggccacggtggccgaatctctggcggcaatggcgggcggaaaggagctcgccggagctaaggaggggtgtctggccggcggtgggatcaaggtgaacacgcttgatctttggctcaaggtctga

SEQ ID NO: 20307 - DNA, 369 bp, Zea mays
  Peptide Sequence Number=SeqID_63682
atgtacctcatcggtgcacttgaagaagcgtcattgagcaccgttcggagattccccttcccagcatcatcgcctgaccaagatttgacacagttcatctgtcgctcgagccataacgggcgtgatgtgatgaagaaactgaattttgtagtggaaatgaggcaccagttgcagccagcaaaagcaaacttacaagtgagctatgtaattgacccaaaaggcacttcaagcgggcaggaaagtctaaggcccttactaagtacttccaaggtgttctggacaaagaaatcttgtacattaaaacaggaggatacaagaagctggagtggttgtctgaaggcttttgaactgtttgaagcgttagtgtag

SEQ ID NO: 20308 - DNA, 123 bp, Zea mays
  Peptide Sequence Number=SeqID_63683
atgaagaaagtggtctactacgagactgattcttcgtcgccctccacctccggcttcgacgcgctgtccgtcacttctaagcgccatgagcgcaagaagtttagtaccatccgtgggggatga

SEQ ID NO: 20309 - DNA, 186 bp, Zea mays
  Peptide Sequence Number=SeqID_63684
atgggaagtgctgctgggacgggtgagaattccggtaacaatcctcctcaaaaaggtcatgtgcggactgtccggacattggcccggaccgtccgtgattatgtgcggaccgtccgttgttttcacagaatgcgaagagaattggaccaaggcaatgaggatgcaacacctcaaaagaagacataa

SEQ ID NO: 20310 - DNA, 453 bp, Zea mays
  Peptide Sequence Number=SeqID_63685
atggctgagcagcagctctgctcgccccctcccatggcgcctccgcctccctgcgtgctctctcctcgctccttggcgcagcagcaaattaccatgccgcccctctgttgctgccgagctccagctctggccagcagccatggcgccgaggattacctgcaggcgagcagctcggcccttcttccctgcgcccagctattctccctgcgcagcacctccttcttctacctcttgccggcgcccagcagcagctcaccccatggatggcgcccagaaaatttcagccggcgccccttctttttcccctgctcgttctccctcgcgcagcagcagctcgccccacctcccctcgctgcgcagctcctcggcgaaacgccgctgttcctgcagccccggcacatcccccagcttcctcgctgctaccgctgcgcgcatgccaagtgctcggcataa

SEQ ID NO: 20311 - DNA, 453 bp, Zea mays
  Peptide Sequence Number=SeqID_63686
atggctgagcagcagctctgctcgccccctcccatggcgcctccgcctccctgcgtgctctttcctcgctccttggcgcagcagcaaattaccatgccgcccctctgttgctgccgagctccagctctggccagcagccatggcgccgaggattacctgcaggcgagcagctcggcccttcttccctgcgcccagctattctccctgcgcagcacctccttcttctacctcttgccggcgcccagcagcagctcaccccatggatggcgcccagaaaatttcagccggcgccccttctttttcccctgctcgttctccctcgcgcagcagcagctcgccccacctcacctcgctgcgcagctcctcggcgaaacgccgctgttcctgcagccccggcacatcccccagcttcctcgctgctaccgctgcgcgcatgccaagtgctcggcataa

SEQ ID NO: 20312 - DNA, 66 bp, Zea mays
  Peptide Sequence Number=SeqID_63687
atggcgaacgaggtggcgacaaatgaggcgaggaccatcattatcgtgcggaggagttttgtgtga

SEQ ID NO: 20313 - DNA, 1596 bp, Zea mays
  Peptide Sequence Number=SeqID_63688
atggccaccgcacccgccgccccgccgccggcctccgcggacgacgagatcatctacgagtccatgccctgcatccgcgtctacaaggaccgcgtggagcgctacttcggcaccgagttcgtcgccgcctcgacgaacgactccaccggcgtggcctccagggacgtcgtcatctcccccaacgtctccgcgcgcctctacctcccgcgcctggacgacgggaacgccaagctccccatcttcgtctactaccacggcggcggcttctgcatcggctccgccttcaaccccatcttccacgactacttcaactgcctcgtggccctcgccgacatcctcgtcgtctccgtcgagtaccgcctcgccccggagcaccccgtccccgccgcctacgccgactcctgggaagcgctcgcctgggtcatctctcacctcggccccgccggcgacggcgcccgggacccgtggatcgcgggccacgccgacttctcccgcctcttcctgggcggcgagagcgcgggctccaacatcgcgcaccacatggcgatgcgcgctgccgcggaggggctggcccacggcgcccggatccggggactcgtcatgatccacccctacttcctgggcacggacaaggtgccctccgacgacctcagcccggaggtgcgcgagagcctggggtccctgtggcgcttcatgtgcccgaccaccacgggggaggacgacccgctcatcaaccccttcgttgacggcgccccgccgctagcgtccctgccgtgcggccgcgtgctcgtgtgcatcggcgagggcgacgtcctccgcgaccgcggccgcgcctactacgaccggctcagggccagcgggtggcccggcaaggcagagatttggcaggcgcccggcaagggacacacgttccacctcctggatccgtgctgcgacgaggccatcgcgcaggataaagtcggcctgcccgagcctagacaccacctaggatctccactccccgacggggtccctcccgggagcgagatccaggcgccgtcggcgatcttccgccgtctctgcgtacgtgcggaccgtccggccccagggcgcggaccgtccggccgtcaggcagaagtcccagcagcgcaccaggccgcggaccgtccggccccaggccgcggacagtccgcccttgcgcagagagcaccaccgcgcctcgcaccaggccgcggaccgtccggcccctgcgcgcggaccgtccgcccctgtgtagagggcaccgccacggttcttgttgagtgtttggcgctccgaaaaggagtcaacatacttttggcgactccgctggggacgacatatctaagctcatcaaatcggccctcaatggccggttcaagggatagctttgatatttctccaagcaacatcatagagccgacttgggaaaccttgccggctgacgagcagctccagttcgaggagcacaaggagcggatgatccaggaggcgaaagcaaagttcttggccaacttcaaagtggacaggaacaacaaggtcgtccgacatcgggcaacggatccggcttcgctccaacccacgccagatatccccaat

SEQ ID NO: 20314 - DNA, 230 bp, Zea mays
  Peptide Sequence Number=SeqID_63689
atggagggcgcgacggcggcgaaccggacggcgaggggcgcgtcgaggggcgcgacgacggcgaaccgggcgggcgcggcggcggcgaaccggatgggcacggcgaggggcgcgggtgcggcgggcggccccggcacggcgagggcgagggcgagggcaagcgacgcgggggcaagcggcgcgggcgggcggcggccccggcgcggcgagggcgagggcgaggggcgcgg

SEQ ID NO: 20315 - DNA, 75 bp, Zea mays
  Peptide Sequence Number=SeqID_63690
atggagtggaaaatggatttgcttgcgatttggcagaggggattttatcagtttgactcaggggaattgctttga

SEQ ID NO: 20316 - DNA, 378 bp, Zea mays
  Peptide Sequence Number=SeqID_63691
atgcccaaaccggacaaaacattccccctccttatcctcccggtgctccccagccttcataaccctggggttagaccgtgcgagttcagattgagtgactgcccacatagtctcgagtggttgtacttatcaagagtacaggagagttatatagggaataattcgataagaatttataaagaagaattattggaatctgagtttggaagcctggttcgaaggaatctcaaagttaagcatgctcaacttggagaaacctgggatgggtggccagatgggaagttccctactagaaggaaaatcatagtcactggagttcatatgactggaatattggtctggcaggtcttaggtggactggacaacatgatggattag

SEQ ID NO: 20317 - DNA, 432 bp, Zea mays
  Peptide Sequence Number=SeqID_63692
atggcccaaagtgagagagcattttttataccaacaaatgtacgcatgtttaactggcacataaggatagagaagactctatttgtcactgagaatgctgacatgttaatggttactgcaaaggtgccaaaggttcacaaaaagtcaataaaaagaccaagagtgggttcaaacaaagagagcaagggacaaccgaaggctgccttggtctggcgcaccggactgtctggtgtgccaccggacagtgtcctgtgcaccagggaactcgacgcccaactcttcaccttcgggatttctcagaggcgcttcgctataattcaccggactgtccggtgcaccaccggacagtgtccggtgctccaggggagagcgactctgaactcgccagcttcgggaatccgctccgctaaaattcaccggactgtccggtga

SEQ ID NO: 20318 - DNA, 543 bp, Zea mays
  Peptide Sequence Number=SeqID_63693
atgaaggaggagcacttggaccatagggaggaggtcgtcacggagctgagtgccaaggtgagttctatgaacgcagttttggaagagcagcggactcagcagaccgcagccatggagaggatccagaaatgggagcgggaagtggaggacaaggccaacaacattgctctagccgaggagaacctcaaggcgaaagatgcctccatggataagcgggcgacggatctcgccttcaaggaggagatgtttgaaaggcaggaaaagttgctggctgagcatgagcttgaggtagagcagaaggagaaggagctaaaggagcggatacttggcgcccgcttggaggccgagggcggtaggctctgctgggcagtgatagagtacatcctaacgtgcttccagagtcacgacctgaccatctccttggagctggtgatcgctagtcctgtggccgacaccgaagacgccgcccggcagggcgtacaagatactttggaggtggtagccgagcgcttccagcgggaccccgccgagatgagtagttag

SEQ ID NO: 20319 - DNA, 348 bp, Zea mays
  Peptide Sequence Number=SeqID_63694
atgggcgggtccgaagccgccatgtgtccagagaaggtggcatactccaaagcatcaacaaccctcgaatatatagtccgggcccccaaggttggtcccggacctccacgtgtgcaagccagacccctggaatgggtcccagaccccccgaatggggtctgggccgcccgcagaggggtcccaaggtcccaggacagggcatacctggaccttgaacaggacccaggcgggggtccggtgccgacacgtgtacaagcccagtctggtgcggacctctctgcatacacttctgctcctcgcccaagcggaggcccgatgctgccacgtggcctactgcgcgtgacgtaa

SEQ ID NO: 20320 - DNA, 93 bp, Zea mays
  Peptide Sequence Number=SeqID_63695
atggcgctttacacattacatgaactcccacctttgcccaagggaggcacatacaaggttgctgagccccgacatgtgggcctagggacataa

SEQ ID NO: 20321 - DNA, 585 bp, Zea mays
  Peptide Sequence Number=SeqID_63696
atgggcgtgctgcctgccaatggaatggaccgggatgccacctgccagcggaatggacaagtctcattaaatgctgaggtggcacactgcttgccagtggaatggacaggcaccacccgctggcttacgtcacgcgcagtaggccacgtggcagcatcgggcctccgcttgggcggggagcagaagcgtatgtggagaggttcgcaccagactgggtctggacacgtgtcggcaccggaccccgcccgggtcctgttcaaggtccaggtatgccctgtcctgggaccttgggacccctctgcgggcggcccggaccccattcggggggtccgggacccattccaggggtccagcttgcacacgtggaggtccgggaccaaccttggggcccggactgtatattcgggggtccgggaccaaccttgggggtccgaactgtataccaggggttcggcgctctcccgttggggtccggactcactgttgatgctttggagtacgccaccttctctggacacgtggcggcttctgatccgcccattttgcggggtcgggtgttgctgtggacccagaatagccgcctga

SEQ ID NO: 20322 - DNA, 336 bp, Zea mays
  Peptide Sequence Number=SeqID_63697
atggcgtggtggttatcagatttgtggcggcaaatggatgagccgtggcgattgtatttgaagattggcacaatagctagacgctccgcgcgagaagacgacagtttcacattacagacagaaaatctgaactggagactgactagtatttttatggatcagatgttgagcaatgagcagcaaggaagcgagtaccgagaagatgaccttgtgctcctcgctggatactattccaaggtcgtagatctgagcacggacgtcatgatgcttttaggttcgatgcacgatgccgctcgttggtgctgcgtgctggtgtttgattttgctgccgattaa

SEQ ID NO: 20323 - DNA, 1128 bp, Zea mays
  Peptide Sequence Number=SeqID_63698
atgccgcgtctcctcgactgcggaatcagtgccgcgactcgaggcaaccctgcgcatgacccaacagtgccaaatgagcacaacgatcgcgggctggcctctcggaagggttcgacagccgccccagagcactcgggctccgagcccattactgataaggggttcgaaggctggcccctcgaaaggccgcccagagcacgcatagtgagggatgactctgggtacgtccgttatatggccgaggctcgggctacgctcccgagcgccgctcgccccgctccgactgttgtgccagccacccgggcaaggctgacaacagcaagttcagcctcgggcgcaacaggaagctccacctcgctcgaccttaggcctcggcctcgggaggaggtctccgcctcgctcgaccccaagactcggcctcgggaggaatcgcgtcctcgcccgaccccggcctcggcctcaggagaagctacgagggaacaagaccggcgtcccacctggctcgtcccagtaacagggctcaggcacttctccgacggccacgttatcgcgtacgcagggctcaagcacttctccgacggccatgttggcatagtgaggctgacagcagccaagtccggcctcaggtgccataggaagctccgcctcgcccgaccccagggctcgaactcggcctcggccccggaagacgacgaactccgcctcgcccgaccccagggctcggactcggcctcggccccggaaggcgacgaactccgcctcgcccgaccccagggctcggactcggcctcggccccggaagacgacgaactccgcctcgcccgaccccagggctcggactcagccctggcctcagccgacggtctccgcctcgcccgacccaaggggtcggactcaacctcgacctcgacctcggaggagccctccgccttgccctacccagggctcggaccgaccacgtcacaggaggggccatcattacccctacccctagctagctctggctacggggaacaagaccggcgtcccatctggctcgccctgcgctcctccgacggccatgacatcacacgaacagggtgccaaaacctctccggctgccacgacggcatgtacttagggcactag

SEQ ID NO: 20324 - DNA, 348 bp, Zea mays
  Peptide Sequence Number=SeqID_63699
atggcaaggggcaactaccctcaggattgtttggatgttatggaaatggtgatgattgcaagatgctccatggttcctggctcaagaaacccaatgtggggagaggaattcaatttttttgttgatagtcttcctgtaaagataaatgtcacgatatatgactgggacattgtatggaaaagcacaatccttggttctgttactgttcctattgagtctgagataccgagtgggccagtttggcatacacttgatagcacatcgggccaggtttgtcttcatattaaagtaatcaaggttcatgaaagttcctccaggttaaaatctcactctgtctatttaatttaa

SEQ ID NO: 20325 - DNA, 942 bp, Zea mays
  Peptide Sequence Number=SeqID_63700
atggcggtggtcctgtgtggcgtcgtccccgaaccaaactttaccctcgacaaagaaaatcttgaggaaagtaccaccgctggttgccctagcgtcggtatcgtgcaaacgcaaagccagaaccgcagaagcagagcgctcggagaggaaagggaaggccaacaaaatcatggagcaggggggaggaggaggaggaggaatcggggggacgcgaacctcgcggcggaaatccgggcgcccagtgggttcttcacttcttctccgctctccttgtgtgggcgcacggaggggggcaaaggctggctcggattggagcaaagcaggccgggctcgtgggacacgcagctccgcgctgctgcgacgcgggaatgccggccgagggccgaggccgcgcgcgtcagtcgtcacatccaggaaaaacaagtcaaagggtcctcacccgctccgcggtcttcactcgttgccccctggctgtggctgcgttgggctgtggtgtggactgtggagactgggggtgggtgcccaatcccaatcccaggcggcagtagtaaccgtagcacgcagctgacgaagcggacgcatcctgacactgtggtgcgtgcactgcagcagcacagggcacaggcacagggcagcccacccgtcgtgggcggccttgcgtggtgtgcaatagccagtaggtgcctaggtggtggtgcctgggtggggtggtggtgcgggcgagccgttgccttcctcgggacaaggggtgtgtggagaggaggttccgttccgttctttattcacgccaccgttgtttatttattatcccctctcgaaaaagtgaggcgcgcagaaaaaccgaggaaacctaaccctgcccgtgattttgcacaaccaacagcagtgatgggtatggatggattccgaagagtagccggtcctgccgccgccaccgattga

SEQ ID NO: 20326 - DNA, 2241 bp, Zea mays
  Peptide Sequence Number=SeqID_63701
atggcttcgctggtgccgggcgtcctggtgaagctcctgcagcacatgaacacgggcgtgaaagtcggcggcgagcaccggtcctcgctcctccaggtggtcagcatcgtgccggccctcgccgggagcgacctcttcaccaaccgagggttctacctcaaggtgtcggactcgtcccacgcgacctacgtctccctgccagaggagcagcacgatctcatcctgagcgacaggatccagctgggccagttcgtccacgcggaccgtctcgaggcggccactcccgtccccatcctcagaggggtccggccggtccctggtcgccacgcctgtgtcggcacccccgaggacctcgtgctgaccgcctcctcgtcgaactctcacggcggcggcaagaacaagaaggcgcgaccgtcgaatgcgaaaacgaaggacgccagcgccagcgtcctgtcgctagacaaggaatcgagcaagctggagaagataaacgcctcgcgcaagcctaccgctaccggggcggaaaacaagaagccgacgctcaccagatccaactcttcgctgccaagagaagctctggatgggaggatcggtgatgacaaggtagcggcggttaagtcaaaaaaggtgaagccaggtgttactaggtccacaccttcgtcaccaaccagcgtctattctctgcctgcgtcgttcgacaggttctcgaatgacctgaagcagaggaacagagtgaaaggagcggagaataaagcttcgtcttcctctaggctttcattgttggaaaaggccgcttctgttttgaaggccactagtgccgccgggagagtgtcctctgctggcattccgatcggtagctctgtgctgagcattggatcgtcagggccaaaggccctgagaagaagctgggaaggaaacacggatgttaaagggaaaggaaaaccagaatcgaggacagccaaacctgacaggaagtctgatagcaagattccaatgactcctagacggaaatcaccagtggatgagaaggtggcgccacataaagatgacaacagtcagaaagctgctaggaagagcaccacaagtgctcccgcctcagacgacgctgctgacaaagcagtgaagaagaagcatattcctacagcgaagagaacttccgggggtttagggaactggagtgtcacaaatctagtgaagattcctcccagcagcagaaaactagcagacgttagcgcttcatggacatcactcccgccatcacttgccaagctaggaaaggagcttctcaggcacagggaatcagcacagatagctgctgttgaagccatgcaagaagcttccgctgcagagagcttgctgagatgtttgagtgctcttctgctgttccattgttctagaaatcctcttaacagaaatgagtcaactatgatccccggggacaagccctacgaagccttcaaagcctcgccagattgctcggcagccagcgacgctgggacggtgtgttccgctaccgacgaggaggccgctgccatcacggccgagcgccggcgccgagctacgtcctgggtgagcgccgctctcgccacggacctgtccgccttcggcatttacaagctcaaaccgccccccgccaccgtgtcctcgccgctggccgtggtcgtcgtggacgagcccgcgaagctggcggcggccgcggctacgaaatcgtcgccgtcgccgaagtcgcggctgtcccccgcgaaggggaaggcgaggacgggcgctgctgcggctgcaggagcgctggccacgacgcccgcgccgccggagtgggagaggggaggaggggccgaggagaggggcgaactggcgacgcggctgggagaggagtcaaggggctggttcctcggcttcgtggagcggttcctggacgccgacgtggcggcgaccgcgcagtgggaccgcgagcgcgcggccaggatgctcccgcagctaaagcgtgtcaacgactggctcggcgagatcgggaagcgcagcgagaccgagacttcgtcgctgccgccggccgacgcggacggtgaggcgaccaccacgagcaccgcccccgtcccctcgaacggcggctgcggggtacctgaggaaacgatagagcggctaaggaagaagatctacgagtatctcctcaccaatgtcgattctgccgccgcgatgctcggaggcggcgggctggccgcgccgacgaatgggaagaaaggctga

SEQ ID NO: 20327 - DNA, 762 bp, Zea mays
  Peptide Sequence Number=SeqID_63702
atgtcgcgtcttctcgactgcagaaccagtgcagcgactcgaggcagccccgcgcgtgacccaatagtgccaattaagtgcgacgatcacaggtcagtcagccgcggggatagacgtgacagttggtatgaccataggcggaccggcaggatcgagaaaaggggatatttcggaaggatccttctcagtgaaggaagcgggccccgagccctcctactgatcaggggttcgaaggttgcgccctgcggggttcggcaaccgccccagagcactcgggctccgagccctttactgatcaggtgttcgaaggctagcccctcggaagggttcgacagccgccccagagcacgcagagtcagggatgaccctaggtatgtccgttacatggccaaggctcgggccgcgctcccgaggtaccctaggacatttccgagaccagtgggaacgatttgtaatggaatcccatcggagggaggcaccgagccctcggaccctatcaaatgggtccgggtccagcaaatcacctgcaggaaaacaacactattcaccccgttccgactactatggcaaccaccaagcctcagcatcgggagaaggtctccgcctcgcccgaccccaggcctcggcctcagcctcggcctcaggagaaggtctccgcctcgcccgacctcgggcctcggcctcaggagaagtctccgcctcgcccgacctcggcctcggaccgactacgccacatgggatacattattaccctacccctag

SEQ ID NO: 20328 - DNA, 456 bp, Zea mays
  Peptide Sequence Number=SeqID_63703
atgggcaagggcaacaaacgcaagcgcgagccgactcctccatccgaggaattcggtgactcggaatacttggaggaggagttctcctctgagtccgaggggttttcggctctcgtctctcccccggcgtcgtctgatgactcggacgactctcaggggattgccgtggaggtctggacttacatctgggccgtcgagcgctccgggctcgagggctcggatgagtcagagtactcctcggacgacgaggactcgcccgaggaagacggcgatggtgacgatgacgacgacgacgacgacggaggcgacggcggcgatgacggtgacggcggcggcaggggcggcaacggcgatgacaggggcggcaacggcgacggcaagggtggcaacggcggcagcagcaggggcagcaacggcggcggcagcagcaagggcagcaacaaggccagtggctag

SEQ ID NO: 20329 - DNA, 312 bp, Zea mays
  Peptide Sequence Number=SeqID_63704
atgggcgttggagagctgaaggtgccagacacgtggtcgagtggtcacgtgcagccgtgtaggggcgatggagcactggagtcactgtggcgtcgctgtggaggtgtggaggtggagccgtcggcgctcgacgagccggcgaggggtggacgacggctctccctcccgccgaaccctaaccccatcctcaactccgttctcagtcgctcaaccactttgccctggcacaaaaaatccctaatctccaccctccaagcttatcaaatagtccccaaaaaattcccccaaaatgaaaactcagtatcaatctaa

SEQ ID NO: 20330 - DNA, 612 bp, Zea mays
  Peptide Sequence Number=SeqID_63705
atgacgatcgacgacttgtttgaactttttgtcgagcacttggtgaatatcacgctgctagcttcatcttcacccgactcttatgatttcttgatgacgtacggaacgatgacgagatcgagtctggagcgagctggcgaggtgtggttgagcaggacaacggcggccggagaaatccgagctgggaaaacgacgcgcgcaggaaaactccggtcgggcgagctgagaacaccgacgagcacgcgggcagcagcaggaacagagcagaggctaagctgggcgactgcgcgcgaccacgggcaagcacagatcggcgccatggagagttccaggacacgcgcgggggagcagaggagatggccgtgcgccggaagctcgacggcgtccatgagaacgagcagaggaactccggagtccatggcagggagggtttcaccatggccgagcagacagggagcgccgcgagcagagaagcttcgcgcgcccggctggacgcaggagaacgcgcgcgcagggacgagctcgactgagctggagctgagcgtgcgtgtgatggagctcgacgtgggtgtccctggccggaccatggaggacagaggtgagctaaaatag

SEQ ID NO: 20331 - DNA, 162 bp, Zea mays
  Peptide Sequence Number=SeqID_63706
atgggtaaaaccctaagtacgcaagtactcgacaagacttacccgactaaagaaaagactctcaaggatatgctggatgaaaagagcattatagggaactttgcagtaagatcccaccacgctcccaaggaaaatattcttgcaggaatagcacaaatctaa

SEQ ID NO: 20332 - DNA, 2607 bp, Zea mays
  Peptide Sequence Number=SeqID_63707
atgtgctctcattattattctgcgtatccgccttttgaagtggcagaagaggatgcagacgaaggggccctccgatgcgccgccggtcagagcagtgggcgtgatttggttgaagagttcgtggcatacggggtctggcccttggcgcacggctgggcgttgggcgaagtgtgccctcgccagatgccttttcacggtggaagggtggtgcgaagtcctgccttcgcactgaacttgcggtatcgtgacccggccgcctttgtgcgtgatgcggaggacttggcggtgcggctcgtgggacgttacgtgccgaggactgaaggccagcgcagctttgatatccgcgggtcaaatgagcgcttgaacagggtcttcgaattaaatcaattgccgtacgacggctatcctggtcaagacgaaaaggaccgccgtgggaagaaaccggcggtggagacaggaggcgaccctgcgctggcggccgccccctcctcaaaaaagagaaaattaggtactgcgatggggggacttggggtgtctgatagttttgctagagagttaatgaggacgtgtgcggccccgggggaaaggatgtcttcgcccgagctccgggagtcttcggctcggatgctgagggttaccgggggttgctggccgaaaaatgttcctatcccctgcgcggctgaggaggactgttttacatctcgtatggttcatcggtggagagtttttccttacgggcgaaatatcggtgctgttgtgtggacagtgatggacaaggatcgccaaggggcggcgcaaaaacgccaggcgactgtcaggattcacgaggctcggccgaaaaggccgcggggaactgcgaaggccgtggcctccggcggagggtcggacgggggccagcttgctatggttgcgcctggcgcggagatcgcgacggcggccatagtgccgaaggcgaggggcgaggcccttgacgccggaggcgaggtgtcggccctcgccgtggtcagggacgaggcgggcgcggcgacccgccggctgaagagagtgacggaggcactgagtcaggcgacggaggcgctgagtcaggtggctgacttcgccagccgtactgcgtcgggggccctcacggcggctgtgtctgccgaagtcgagagacttcggacacaacatgctgatgttgttcgtgagaagtcggcctccgacagcaagtgccgtaagctgacggacagggtggccgccctggagaaggagaaggctgacctccggcgccaactggcggcggagaggagggaagctaacgaggctatcgccaaggggcaggctgcgcaggcggaggccaagctggcgcgggcggagggcaatcttgccaaggagctcgtcgaacatctgcaagagcggctcaccgccctggagagccgcgctaaggaggccgaggccgcaatgcatgcggaggccgaacggacgcgcacgcagcttatggatacatatcgtgagctgggtgcgcggaccggtgacttcgaagtgccggaccgagagcccggccttcgctgtctgcagtgggcgcaggaggagctgctggaacttccagccgtcgtgggggggttgatgtcgtacgcctccctggtcacctgcgagggggcgatgaacgcgctctcccgcgaagggtgccggcactttgaggccttcgacaaggtggatgaagattttgatcgagatatctataaggtcgaagaccccgtagtgaaggaatccgccggggccctctacgaccggatgtggggtctgtacggtcgtgaggtggtcagggagcgggccgaggctgcgagggctcaggcggagcgtggcgagcgggtggacgacttcggggcactgaacagcgcgctgcctgacccggagccgacccctgcggaggccgcgactggagtcgccctggagacaaccccggggcctgcggaagacgcgtcgagcgtgcccacctctgctgtggccggcgaagacctgcccccaaaggtggctgaaggcgcgcctgacgcccccgcagctgctgcgccgagcactgaagattccgcggcggtggtggcggaaacggcggcggaggagacagcggaggctcccgcagcggcagggccttcgcaggttcaagattttgggcctgcgcacgcaaccgctactactgggtttttggcggcttcgaccgcggaagatggaaatgaatatggtgggtctgtatctgagttttttgattttactgattctgggagctcggttgagtggactgaggagtcgtcggaggaggacttggattattttgcggccttggacgtggctgcggcggaggcttcgccacacgccgcggacgcgccagacgtgctgggtcctagcaccgggcgccgacgacgaagggcggttgcaaagcgtagggttagtgcggaggaaggggctcggcttcgcgtgagtaggggtggtcggcaggaactgttgtctttgccggccgccacgagcacaggggaaggggaactgcgaagtctttttgcgggtgaggagcttaggataatgttatttaattatagggagatggggattattcctaaggtggagccgatgtag

SEQ ID NO: 20333 - DNA, 1164 bp, Zea mays
  Peptide Sequence Number=SeqID_63708
atgaagcaagtggaccgtcctccaaataaccccaagcgtataacaattcagtcaagccaggagtgtttcagtgttgacattccctctgtagaacagcctaatccatgtccagaagttgaaaatcctccaaatgttgacagtcaaaatttgaccaatgaaacagttcagattgattctgatgaagatgacttcatgctagctctgaagaagtgtaatgtttctgaaagccacacaagagtgttaagaaaagtcatgacaaagaggattaaacatgaggagctaccccgacaggaaaggaactcaagatcacaaaaggacattgttcatcttatccttggcgtgccaaatcatggcggtggtaaacctttggggattgacgaagcagttgcagcaagcaacttgagggcagagcttggtgtggccaaagatgagttcaatgtgacatttctacaggatcgtttaaggaaaggcgaggatgatgacctttcaatcagatgtttcttcctcattctattcaaccgtctgctgtttccaactgctagctggggcataacatatcatgaggtgcttctcacagaagaaatgcaccgtttccatgagatcgactggtgccagttgatttttaatgatctatgtgaagctgccaagaagtggcacaaccgaatcaccacaaatgtctccacgactatatatggatgctccattgttgtccttccgctgccccccaaaataagactggcacacctcgcattaaatttttttgataagaatatcataaaagctttgaccaaagctgacaagaggaagccagagtgtaggaccaatatttttgatgcaccgcgccctgcccccatgcctcggccaacttttaacatcaaacttccatctatcaaagagatgatgtcaagtaagatcaacgatctcccacatcgtcatcgatctaaattcacagatattcttgctgcatatgacttggaggttgacaagtcatgcgtagccataaaagacagcattgacaaaattattgagaagcaatacgacatagcagacaagtttatagaattgatagacgaggtactacgtgccgagtctgaaaatttagaaaacgagactgatgagccacatcaaccggggaattcggctgattcagcagggttgtcatag

SEQ ID NO: 20334 - DNA, 339 bp, Zea mays
  Peptide Sequence Number=SeqID_63709
atggactaccaattggagcggtacccgttgacggcgacgaatgttgaggatggcgaagaacgtggaagcagtcgggtcggcggagagcgaagaagcagaagcgtcggcagagaaggtagggttttctccggtctccggacgcagcggcgcgaatattggagcgaggattggggacaccgaggacgcgccgctcaaatgccgtttgcgactggatcgacaacgagcggcgaggggttggaagagtcgtcggaaaggggagcggagtcgccggggatggaagaatcggcggagattcccggagtcgtggcggggttggggttttgcagttatggaaactga

SEQ ID NO: 20335 - DNA, 2634 bp, Zea mays
  Peptide Sequence Number=SeqID_63710
atgccttttcacggtggaagggtggtgcgaagtcctgccttcgcactgaacttgcgaaatcgtgacccggccgcctttgtgcgtgatgcggaggacttggcggtgcggctcgtgggacgttacgtgccgaggactgaaggccagcgcagctttgacatccgcgggtcaaatgagcgcttgaacagggtcttcgaattaaatcaattgccgtacgacggctatcctggtcaagacgaagcggaccgccgtgggaagaaaccggcggtggagactggaggcgaccctgcgctggtggccgccccctcctcaaaaaagagaaaattaggtactgcgatggggggacttggggtgtctgatagttttgctagagagttaatgaggacgtgtgcggccccgggggaaaggatgtcttcgcccgagctccgggagtcttcggctcggatgctgagggttatcgggggttgctggccgaaaaatgttcctatcccctgcgcggctgaggaggactgttttacatctcgtatggttcatcggtggagagtttttccttacgggcgaaatatcggtgctgttgtgtggacagtgatggacaaggatcgccaaggggcggcgcaaaaacgccaagcgactgtcaggattcacgaagctcggccgaaaaggcagcggggaactgcgaaggctgtggcctccggcggaggtaagccgccgctggcggcgaaggcgggcgcctctgcacctagcaaggcgccggaggcaacggcgggcgccggaggctccaaggcagcgaaggtggtgcccccggccggcggagtggcggaggcttcgaaggcggcccgagcgctgccgctggcgggcaaacgcgttgccgacttcggcaccgacattactgtggatgactatcttggtgggtcggacgagggccagctggctatggttgcgcctggcgcggagatcgcgacggcggccatagtgccgaaggcgaggggcgaggcccttgacgccggaggcgaggtgtcggccctcgccgtggtcaggggcgaggcgggcgcagcgacccgccggctgaagggagtgacggaggcgctgagtcaggcgacggaggcgctgagtcaggtggctgacttcgccagccgtactgcgtcgggggccctcacggcggctgtgtctgccgaagttgagagacttcggacacaacatgctgacgctgtccgtgagaagtcggcctccgacagcaagtgccgtaagctgacggacagggtggccgccctggagagggagaaggctgacctccggcgccaactggcggcggagaggagggaagctaacgaggccgtcgccaaggggcaggctgcgcaggcggaggccaagctagcgcgggcggagggcaaccttgccaaggagctcgccgaacatctgcaagagcggctcaccgccctggagagccgcgctaaggaggccgaggccgcagtgcatgcggaggccgaacggacgcgcacgcagcttatggatacatatcgtgagctgggtgcgcggaccggtgacttcgaagtgccggaccgagagcccggccttcgctgtctgcagtgggtgctggaggagctgctggaacttccagccgtcgtgggggggttgatgtcgtacgcctccctggtcacctgcgagggggcgatgaacgcgctctctcgcgaagggtgccggcactttgaggccctcgaccaggtagatgaagattttgggcgagatatctatgaggtcgaagaccccgtggtgaaggagtccgccggggccctctatgaccgaatgtggggtctgtacggtcgtgaggtggtcagggaacgggccgaggctgcgagggctcaggcggagcgtgacgagcgggtggacgacttcggggcactgaacagcgcgctgcctggcccggagccgacccctgcggaggccgcgactggagtcgccctggaaacaaccccggagcctgcggaagacgcgccgagcgtgcccacctctgccgtggccggcgaagacctgcccccaaaggtggccgaaggcgcgcctgacgcccccgcagctgctgcgccgagcgctgaagattccgcggcggtggtggcggaaacagcggcggaggagacagcggaggctcccgcagcggcagggccttcgcaggttcaagattttgggcctgcgcacgcaaccgctactactgggtttttggcggcttcgaccgcggaagatggaaatgaatatggtgggtctgtatctgagttttttgattttactgattctgggagctcggttgagtggactgaggagtcgtcggaggaggacttggattattttgcggccttggacgtggctgcggcggaggcttcgccacacgccgcggacgcgccagacgtgctgggtcctagcaccgggcgccgacgacgaagggcggttgcaaagcgtagggttagtgcggaggaaggggctcggctttgcgtgagtaggggtggtcggcaggaactgttgtctttgccggccgccacgagcacaggggaaggggaactgcgaagtctttttgcgggtgaggagcttaggataatgttatttaattatagggagatggggattattcctaaggtggagccgatgtag

SEQ ID NO: 20336 - DNA, 900 bp, Zea mays
  Peptide Sequence Number=SeqID_63711
atgcaggtggcgtgcaaccacaccacgagggcgcaccccctcggcttcgacgcatccagcatggaggcccaggcctacacgtcatgcgagcggaagcggcggtcaaatcgtctgcaggctcacgtcccctcctggagcagcaggggagccctctcccacgacggcaagcgacacctttggcaggcgaagcgggcgacgtttcacctccgccatgatgaccgcgtcaaaaaaaggctggcccctcggaagggttcaacagccgccctagagcactcgggcttcaggctcattactgatcaggggttcgaaggctggcccctcggaagggttcgacagccgcctcagaacactcgggctccgcgcccactactgatcaggggttcgaaggctggccccacagaagggttcgacagccgcctcagagcatgcagagcgagggatgactctgggtacgtccgttacatggccgaggctcgggctacgctcccgaggcgcgttcaatgcgaggatcgcctaacaccttatcctgacacacgttcctcagtcggcagggccaaagaggaggtctccgcctcgcccgactccagggctcggcccctgcctcggcctcaggagaaggtctccgcctcgctcgaccccagggctcggcctcaacctcggcctcggaagatggtctccgcctcgctcgaccccagggctcggcccccgcctcggcctcaggaggaggtctccgcctcgcccgaccctagggcttggcctcaacctcgacctcagaagggatcgcgtcctcacccgaccccggcctcggcctcggcctcgggaggagtctccgcctcgcccgaccttgagctcagaccgaccgcaccgcgggggatacatcattaccctacctctagctag

SEQ ID NO: 20337 - DNA, 852 bp, Zea mays
  Peptide Sequence Number=SeqID_63712
atggtcacgcaggatggtgaccaccggttcgatggtggggaggagcaagccgggctgcggcctctgccccgccctcagcttcaaggatcttcatcacccgagctggggaggagggcggggcaagtcagggcctgtctccgcgtgggccggcgacctgcttcttcctccggcatccgggggaggaaaccatcctccagctctgcggaggaggcgtcctccagccatgcgggggaaggcgaactgctgctacctggccagggtgcagcattccgtcctcccgtccgggcgactgtggccggctgcaccgaggggtcgcacaacacgtcgtacgccgcgagggcggtactcgtgttctgggacggtcccattctcgttcttgcggtgaggacgggagtgaggacctgccggtgcgctttggggcggccgacgctcgctggtgcggtgttggtgggcaggtggccgccgtcgtcggtgctgaggtggtggcagccggagaaggtttctccgccgatgacaccgtcagtgccacctgcgctccgggcctctggctctttggctttaatggctggttcttgtcccccgcgaggggacgtgaacgagggccttccagcggtagcgttcgccctggggccatcgctgctgccgtcttgccgtctgagacggaggtcgttgtcgctgctgcagtggacggcggcgagccacccggagtttgtcatcccgcaggccctccgatgtggaggttgttcatacccgcgggagtggaatcggagttccgtttgtaatggcaccttgagtgtcggtgtatgttcattgtggctgacggggcctgaacatctgggtatttgggcgtga

SEQ ID NO: 20338 - DNA, 1248 bp, Zea mays
  Peptide Sequence Number=SeqID_63713
atggggtgctacgtgccgaggacagagggtctatggagctgggatatccgtgggtccaatgacaggttgaatcgggtcttcgaattgaaccgcttgccgtacagtggttatcctggggaagacatcgccgaccgccgcgggaagaaaccgatgggcggtaccgaggaagggccttcgcaggaggctgccccggccactaaaaagagaaaattaggtactatagtggggggaaagggggtgtttgataattttgatgtggagttgatggggatatgtgcggcccccgggggaaggatgtcttcgcccgagctccgggagtcttcggcacgaatgctggagaagcgccgggcggttatcaggctccccgatcctaggcgtgaggctaagagagcgcgggggagtgcgaaggctgctgccctcggcggtagccagccgacgccgactgtgaaaccggccgcgcccggatccagcaaggtgtcggaaagcgcgaaggctatcgtcgccggcggaaccaagactaccccgggcgaatctgcgaaggttcgagagctgccttcgccggggaaacgcgttgccgacttcggcacgaatattagcgtggacgactatttcgttgggtcgggcgaggggcaaatggttgttgtcccgcctgcggtggcaaccacgacgtcaaccgcggtggttggggtgaacggtggcgctttctgcgcgagcggcgagatttcgtcggccgctgccgtcaaggacgaggcgggctccatgtcccactggctgagggaggtgtcgcagcagctaagtcaagcggccgacttcgtcgaccgcgtggcatcgggtgcccttaccgcagacgtggctgccgaagtcgagagacttcgggcgcagcacacggatgccattcgggagaagtcagctgcggagagcaaaaaccgcaggctggcaaagaaggtggccgccctggaggccgagaagacggacctccggcgccagctggtggaggaaaggagggaggccaaccaggccatcgccgaggtgcaggctgcgcaagcggaggccaaagtggcgcgggcggagggaagtctcgccagccaacgcgccgaggagtgggaggtgaggttcaacgctctgcgcggctgcgtggacaaggccgaagcctctacgcgctcgaaggttgagcggtcgctcgcacagctcgtggactcataccacgagctgggtgcgtggactgctgacttcgaggtgcccaattga

SEQ ID NO: 20339 - DNA, 813 bp, Zea mays
  Peptide Sequence Number=SeqID_63714
atggttactagcatccgcgtcatagttggaatcataggatctgtagtctgtgtgctcctctacgcggttccagtgctgacgtttaagagagtggtgaaggaggccagcgttggggagttctcgtgcgtgccatacatcctcgcccttttcagcgccttcacctggggctggtacggcttccccatcgtcagtgacgggtgggagaacctgtcgctcttcggcacgtgcgccgtcggagtgctcttcgaagcttcgttcgtcgtcgtatacgtgtggtttgcgccaagagacaaaaagaaatctgtcgtcctaatggtgtctctggttgtggcaacgctctgcgtcatcgtatccttgtcaagcttcgtgttccacacgcaccatatgcgcaagcaatttgttggtagcattggtatagtcacctccatatccatgtacagcgctccgcttgtagccgtgaagcaagtcatcctgaccaagagcgtggagttcatgcctttctacctgtcgttgttctccttgctgaccagttttacatggatgctgtacggcatcctaggaagggatccctatcttacggcaccaaacggcgccgggtgtttaactggacttcttcagatcgctgtgtactgcatttacagcagatgcaatcgaccgccgaaagcagtcaatggtgcgacaactagccgtgaagatgcaaatgattgcaaggttctagtttacagcaaagcagggcagcttcgagaactaggccgacggagatcatcactgcaccacgcattaaatgttaaaagagtaatagttggaagctaa

SEQ ID NO: 20340 - DNA, 339 bp, Zea mays
  Peptide Sequence Number=SeqID_63715
atgacgaaaatgtgtcctccaaccgaggctcaaaagttaaagagctatcaatcactagcaagcaaaagttataaaattgaggaaataaggcaaatggcacaagcagtgtgtcaagtgcagtcggggtactacctcgctgatgagcccgaggtgcacttcgtttggcagcccaaccaagagtcattggtactcgtcatgtcgcgcgcgttcgacgactactatatcgaggattatggcgtcatcttagcgtcggaggtgacgcagaggaggatcgacaacagtgaccagttcgtcatcctcgccaccgtcagggtagcttttgtgccgacctacctttaa

SEQ ID NO: 20341 - DNA, 423 bp, Zea mays
  Peptide Sequence Number=SeqID_63716
atgccatcggcgccgccatcattggatctgccccaggacgcctccaccccagccatgttcccttccatcctctccgtgacggacacctccctctcctccgccccaccctcctccccacgccatccgcgccgccatcatcggatccgccccaacaacagacggacggaggcgtcttggttggaaggcgtcatgcatttggatccacaccttcacgacacccctgcccagacggtcgcccgtgcgacagtgaagcaaggaggccgcgataggcggtgcagggagggtgcgatggaggcaaagtgcaagcacctgggacttcaggctgcacttggggaatcaaagaaaagtgaaagtgccatgtcaaagttgatgaccagaagcttgctattggaaccatctctattgaaaaatacccctggatag

SEQ ID NO: 20342 - DNA, 1065 bp, Zea mays
  Peptide Sequence Number=SeqID_63717
atgagtatcaggccgcggaccgtccgcccatggaccgcggaccgtccgcaccatcaggaaatggacagtccgttcagcttcgcagaccgtctggacacatcagggcgcggaccgtccgccgccccagcgcggaccgtccgcgacagggcagaaaaagaggcagtgcccgcagacttgccagttgtgccccttttgcttgttctctctagctctcttctcaccaaatactcccctgtgtcgagtgtgcgcggacgtggttttggtggtctccgcaagaaacttgcaggtcgctttaaatccaagcgccctcgtggcaatgatgatgactatacaccgaccactgattcagaggcccaatcctcagctgggggcactgaatccatggatgctgaagattttcttcatgttcatccagattatcccattgatatccaaggatggacttatcccaagcagagattttctatggctgagtactgctctagacggactgtgaaccagtatgctctgccatcagatacaaatatccagtttttccacactcagctgcagtttgatgtcttttggggcaccctggtggataccaattttcataagcatcaggtgattgattggtccttcttgctcagtcaatcagtcatggagggtctcatccccaaatttgaaacatgtgggttatatcagtttatggggcagcgcaccgatttcaatgaaatggcagttaaacaattcttggctacctcagagattgatattgcagcagaatctatcacctggatgactggcttcaagcggtattctgcttcttttgctgactttgccgctgcccaacagtctggactatggcacccatttctgctggggtggatctttatactgaagataaattttgaggattttgtgcagtttaatgagccagccaggctcggtatacaccaggaggtttggagaaaacagcaggactcaaaacatcatcctgctgtcatcaacaagattgccagagtcacccattctttcccaagagtggtgataagagtaaaattcgagataagttctggaacataa

SEQ ID NO: 20343 - DNA, 450 bp, Zea mays
  Peptide Sequence Number=SeqID_63718
atgggcaagaacaacaagcgtaagcgtgagccgactcctccatcagaggagtttggcgactcggagtactcggaggaggagttctcctccgagcccgaggggtctccggctcccgtctctcccccggcgtcgtccgatgactcggacgactcccaggggatagccgcggaggtctggacatacatccgggccgtcgagcgcgccgggctcgaaggctcggatgagtcggagtactcctcggatgaggaggactcggacggcggcgaggagggtgaagacgacgacgacgacgacgacgacgatgacgacggcggcagcagtggcgggggcgacggcgacggcagaggcggcaccaagggcggcagcggcggcagcggagacagcaccaggggcagcagcaggggcagcacccggggcggcggcggcggcaggggcagggccagtggctag

SEQ ID NO: 20344 - DNA, 552 bp, Zea mays
  Peptide Sequence Number=SeqID_63719
atgaactctaggttgtttgatctggggaggcggtcgtgggccatgagggtggcgattaccgccggtgtgtggcgcggtcggggcagaaaggcgctgaagcccctgctagagtcctcatggcggagtgggctaggtgggcaccatcctaaccatgccaccctcctggctgatggtgaaatcgagactcctgaagcggatgatgagcagcacactgaggagcagcacattgaggaggagcagcacaatgaggctgagcagcacaatgaggaggtggagcacaatgaggaggtgaagcacgtgacatgggaccaggccgcacagcatcaccagccatgggaccagaattgggaggacctgttctttgacggcaagggacacgacactcaggttaaccttacgttgggttctctttaccaccttcactaccctggtatagtgaaggtgtcaaacggtgataccgaggatgagcttcgatatcggttgcctgacggagaggattatatggggcacgctgaacgtgtcttccaaaacaatgcaaagaagctggtgaag

SEQ ID NO: 20345 - DNA, 201 bp, Zea mays
  Peptide Sequence Number=SeqID_63720
atgtggccaaccgtcggcacatccgaggcatgctcaaccctgcttgatggagtcctcaccaagaggacgagctacaaccatggcatggaggaccccgagccagaatgcaatggcatccagttcatgcatgcgaccggatttcttactacaatgagaaaactcaagtcaagtgctcactatccaggagtgatggtgatttga

SEQ ID NO: 20346 - DNA, 801 bp, Zea mays
  Peptide Sequence Number=SeqID_63721
atgtcagacttagaaaattataggaaaattctaggttgtgaaaatgaagaagaggatgtagtcgaggaagaagttgtcccgcaagctgagaatccaccggttgagaacaacttctattttgacatctgtgggacagacccagaacctccttcaacacaaggcaagcccggctttgctttagaaaacaaaatgttttgtttaaaacaaggggtaatgcttcatatgggatggggattttacaaagaaaagtctggtaatggtgaatccatcatgaccgtgatgggttcaacattagaaaagatgtacctctgtcagctggcctctagacatgaaggaagcagcagtggaagtaatgacccaataggggatttggaggccagagtggagcgacttaggtctgaactacgccatgggagtagggagcgtgcgcgcgatagctgccgcattgctgaattttcaccagaagttagtcgcctgcagcaggaaattgcggaacacgatacgaccattgactgggccataaattcacgctctttcacctgggattgtgaagccaaagctctagcccgggtagcaaaacttagtgcatccctggaaaacctgcaagcatattgcaacaccctgcatgaaaaggtgcacgtattgtatgaccggctgcatccgagcgtgccacaagaagttgcagcaatgggagtcggaccatctggaacagctgatggaggacctgatggggagttggacctttttggggcccctccttccatgaaccttgcagatgaacgatctcctaaagcggattag

SEQ ID NO: 20347 - DNA, 180 bp, Zea mays
  Peptide Sequence Number=SeqID_63722
atggaggaaagtggagacaaaaacgacgatgaggagggacatgatgatagcaaggatgaatctatatcacaacaaggtacatttttccgtattgcttctgttaatgatgatgacaggggaaatgagactgatgatgtgggagaagaggaaattctccaaatctacaccaatctcaactaa

SEQ ID NO: 20348 - DNA, 336 bp, Zea mays
  Peptide Sequence Number=SeqID_63723
atggaggtcggttggggcgccagctgcggacttgctagcggcaatctcggtggagggtggttacaggggaggaggaagatctacatggtaaaacatcctcccgtcaacaagtttactgattttccttctgctttggcaccacctttgagcaaaaacagcaaaactcggcagtttcatcacctacaacaacatgggttcgaaaaccctgagtatggagtgtactttcgcaagtcttaccagacaaaggaaaaagactctcaaggatatgctgctttcaggaatcaaggaaaagcttatcaagattcaaagacttttttgcagaaaagcttactataa

SEQ ID NO: 20349 - DNA, 450 bp, Zea mays
  Peptide Sequence Number=SeqID_63724
atgggtgctacgaaatctaaggaacagagcgagtcaaatatagtgactcttactggagatgagtgtgctggagtgcgcggtccacggcggcaactgcacactgagacccaaccgaaaggcggggtgcacaccggcggcgttttcttcttatggcagtggaaggaagaggagtctagggttcggtgccactctgtatggcctccagggaggtcggttggggcgccagctgcggacttgctagtggcaatctcggtggagggtggttacaggggaggaggaagatctacatggtgcgcagcagctgacacacgggacccgcgggtagaggcagccgcagactcgcgcgcgagagcagtgactggcgtgcaggcccgcactgtcggcgagagcaggtgcgacagcgaaggagaagatgggccgcgcagggaatttttggcccacgcggggtga

SEQ ID NO: 20350 - DNA, 315 bp, Zea mays
  Peptide Sequence Number=SeqID_63725
atggtgttcgacacgactgtgaacaccttcagatatgacatgctaccttttgaccgtctccgattagctttgtgccttcgtcaagtttttgaaggcaccaacacaatgcgtacaagtcccacggacagggactacaacatgtatgtgaagtccccctcgcacgacgtgaaggactacaagccccacagaaaaagggagacggtggtcaatagtgaaggtgaaggtcatgcgggaatcatgagcagcatgtcacattatcgtgaagggtgtgtcaatgggaagcaacttcgtggagagtgtgtggccgtaagatag

SEQ ID NO: 20351 - DNA, 309 bp, Zea mays
  Peptide Sequence Number=SeqID_63726
atgcacgcaaacaaggtgcagttgccctatgatgaacacgagagagcactcatgttactacatgttctagatcggaaggtttgggaggtgaaggtcttagcgatcatagagtcaccaaactatgagaccgtcaccatggatgagcttttcaacaagctcaagtccatcaagattgaacatgaagttcagtccaagattgagaaccctggtgcacccaccatggcccttgtgtctggaggtggttcttcctctaaccctttgcctgctctgtttgatttgtctactttgttgaccattacagaggaatag

SEQ ID NO: 20352 - DNA, 318 bp, Zea mays
  Peptide Sequence Number=SeqID_63727
atggtgggcggtgtgatgaggacgaggagggggaggaggagcactcgtaggatggcggaggaggcacaacaggatgatgacgtccaacagttggtggagcagcaggccgctgtcgatgcaacgcagacggtgtcaccgactgtagctcgatggttcgtaccagatgcacgagaaacagtggacaatggtgtacagccgacccatcttcgcttggttccgttgtacggggctcctacgtgggaaggtcgggtcactgttgtgattactgctcgagtttgttgggccgtctgggcttgcgccgacccggccttgtgttaa

SEQ ID NO: 20353 - DNA, 726 bp, Zea mays
  Peptide Sequence Number=SeqID_63728
atggacttcgacatgctgaattcccacccggaggcgcagcttgagctgatgaaagcaatgctccagctggagcagctcactgcgttccctctccctgatcacggcgccatgatgatggtgccttcaactcccccgtcgccaggcatgccgcaagctactacccaccaccattatttctcttcggtgccgcaccacatgtctgcgggcgccaacggccgtggcgtttacgacgacgaccaccagtactcccagggcacagctgcgccctgcaacggcagcgcccggtcgtcggagtacgtggcgcatgcgcagggccctgtcgccggcggcggaaacagcggggagagcaccgccgccacctccgtcgggtcgtcgtcgtcggcgatgcgggagatgatcttccgcgtggctgcgctccagcccgtgaacatcgacccggagatggtgcggcccccgaagcggcgcaacgtgcgcatctccaccgacccgcagagcgtggcggcacggatgcggcgggagcgcatcagcgagcgcatccgcatcctgcagcggctcgtcccgggcggcaccaagatggacaccgcgtccatgctggacgaggccatccactacgtgaagttcctcaagacgcaggtgcagtccctcgagcgcgccgccgccgccagcggccgccgcccggcggcacctgcagtggccgataacggtgccatgaacggccagtggtag

SEQ ID NO: 20354 - DNA, 648 bp, Zea mays
  Peptide Sequence Number=SeqID_63729
atgaagccaaatacacattacttcacatgtgggggtcatttgttttcggcggtgatcgagtccgatgaaccgacggtggatggcgaggcgcgcgggacgtgcgggatggggtgccttcggcgtatgggccaccgcgcggggaaagacgaggtgggccgagcagagtgcgggagggggttcacaggtcgtgcgccgaagcgagcccaaggcgggaagggggtggagaatgacagcgggacatgcgggatggggcgcctttggcgtatgggccactgcgcggggaaagacgaggtgggccgagcgaagcgagggagggggttcgcaggccgtgcgtcgaagcgagcccaaggcgggaagggggaggagaatgacagagttgggcgggcgctgggggctgaagatgtcccggagccagatagggagttggttgtgttcgaggcgttttttgctgctggccttcgcttaccggtgcatcgtttcgtagtggatgttttgcggaagtttgaaattcaaattcatcaattgacgctgaatgctatggttgcattagcgaagacggtgtcgccgactgtagcaaaatggttcgtgccagatgcacgagggacaatggacagtgtttacaggttcgggtcgcttagagatgcgtaa

SEQ ID NO: 20355 - DNA, 738 bp, Zea mays
  Peptide Sequence Number=SeqID_63730
atggcgtcgttctcggaggctcccccagggaacccgaaggcgggcgagaagatcttcaagaccaagtgcgcgcagtgccacacagtcgagaagggcgccggccacaagcaaggtccaaacttgaatggtctttttgggaggcagtcgggtaccaccacaggctactcctattccgcgggaaacaaaaacaaggctgtgatctgggaggagaacactctgtatgactacctgcttaaccctaagaagtacattcctggaaccaagatggtcttccctgggctgaagaagccgcaggaacgtgctgatctcattgcgtacctgaaggaagcaactgcgtacttcgagaaagtcacgttcagaaggatgcccgagtcggcgaccgcgaccgaggaggacggcatctgcacgaccacggtcacaacggtcatcttcaaggccggcgattgcgacaccgttgggggtgcggacgtctccatcgccggcgggcgcgcactctgctgcacgcgggacatggcgaggctcgaggcctgcacagagggggcagtgacgtactgcgcgtggaacggcagcaccggctggcccatggtgctcacggcctccatcctcctgggcggcctcgacgcggctttcccggatgagaccgtcgccgtggcgcgcaccgacatgtacacgctcctgttcgtccactgcaacgcgtcgcttgccgaccagcaagtggccacggtgaaagtcgcctag

SEQ ID NO: 20356 - DNA, 387 bp, Zea mays
  Peptide Sequence Number=SeqID_63731
atgggcgggggcctcctagcagcagcgcccgccctgaggtcagtgctgccgctgttcggtcccccagagcagaagtcgtcttcatcgccgctgctggagcaggtgacggcgcgccgtttgtcggtcttctgtttgctccgcaggccttcccccatggagtggggttgttcgtacctgcggagggggaaccggagttccgtttgtaatggcactttgaatgccagtgtttttgttcattgtggctgtcgaggcctgaacatggatgtttgtgcgagcgagagttgcttctcgcggaaggtgatgagtgaggtatccgtatcccggaggcgtgggagtccctcggctcggtcggccttgctgcttacgcgtactttcacccgtccatga

SEQ ID NO: 20357 - DNA, 402 bp, Zea mays
  Peptide Sequence Number=SeqID_63732
atgaagcaccaagctctgataccaattgaaagtcgcctagaggggggcggacggaatgacggcgaatcttcagatgtaccggaggttgaacaacgccttgatctcatggtggccgtgtcactcggctggatcacatttgaggtccacttcaagtcgatggatgagtacaacgagcggtggcgcgcgacgtgggtcataccgacggtgtggcagctcatcttctcgctgctctgcgccttctgcctcatgtggacgccctcgcagagcgcgacgaggcccggcccgctgtcgtacgtggacaacttggcgatctctgtgtacaaggatgccaccatcatcatcctaagaaccgactccgacgtgtacgcgaaagccgccggcgatggaggcaagcgggtgtag

SEQ ID NO: 20358 - DNA, 168 bp, Zea mays
  Peptide Sequence Number=SeqID_63733
atggcgcccagctcacactcccaccgcctcgcctgcccggttttagttctatgcgccgccccgcccttgaagccgacccggccgcccgagctcaagccccgagctgcgcagccacccagccccacccgcaggtgccgcgacccggccacccgcgtccgaccgcactag

SEQ ID NO: 20359 - DNA, 414 bp, Zea mays
  Peptide Sequence Number=SeqID_63734
atgtcggagactggagggtcccatttgccaatgactattgctattctagcaaaaggaagactcggatcagagccgcagtatgaagaagcacaaagaacacgaagaaatcatattaccttctgtattttgtttgaatattcttcattctttattacaattatgaagtacaatgtatcaagcagtctcattagctgcgagaagcagacgattcgaatcgagtttttatccttgcaagtgactgcacttgtacccaccataaccggaatgggagaccacgtctcaggtcgcgtgaggggtaaagtccactgccaggttcaatcaggtatccgcacgttaatccttattccaattccatctcgtagacaaccaatccccatggattgttgtccacagaccaacatcattatgatatga

SEQ ID NO: 20360 - DNA, 690 bp, Zea mays
  Peptide Sequence Number=SeqID_63735
atgcagtctctccaggtgactggactgacctggcatcgtgcgacgcagcagacgctccgccaggcgagaaggcaaaaaggggatcacagacttacgtgcagtgcatctgatacgggccatctacaaaagacatcggacctgcgcgtaaagtctaaggacgacgggttctattcgcagaaagccgaggaggtcttaagtaaatcgaccaccgtgaaaggcggcccgggtatccccggtgcgggatgggagcgcgggcgctccctggtgggcggggtccacgggtcggcgactgggaccaaccaggtgggaaacggagggagcctgacaatcggggtagcggggagatcgggcccgctagtcagcggtggagggcacgcgcaggcgcgatatcgcggtcgcgcgctgacagacagggccctccaggcagtgaccaagagtggggaaagaaaaggggaggctgacgggtgggtcctccttgtcaggaccgccgtctaccatggcagtgcgcatggcgcgagcgccatggccggagccggcgactccgcgcgggggaacaaggcacggggcggctgcgggttttcaagtccaaatttgtcgcggaccataattaggggtaccctcaagacgcctaattctcagctggtaacccccatcagcataaagctgcagagacctgatgggtgcgattaa

SEQ ID NO: 20361 - DNA, 711 bp, Zea mays
  Peptide Sequence Number=SeqID_63736
atgtcgtcgattccaccgccggcgggcgggttgtcggccgccattgtcgtcgtcgcgcggcagtggaaggagtatcatgtcgtaactgccgtcgagggacatgaactcaaggctcccgaaacggagcaccgtcccgggttggagaggttgctggagactgcccatctggagcttgatgggaaactgctcgtcaacacacagcaggcccctacctggcgcgccaactgtcggcgtctcgagaccggggggtccctaagccgacgacccgagtccgagccctgggtcgggcggagcggagttcaccgtcttccgggtcttagcccgagtccgagccctgggtcgggcggagcggagttcgccgtcttccgggtcttagcccgagtccgagccctgggtcgggcggagcggagttcgccgtcttccggggcggagcccgagtccgagccctgggtcgggcggagcggagttcgccgtcttccggggcggagcccgagtccgagccctgggtcgggcggagcttccgatggtgcctttggcaggacctggctccctgtcagcatcactctgtcaagtggcgctgcagtcgaagtggcgcaggcggcgctgtccttctgtcagaccagtcagtggagcggcgaagtgacggcggtcacttcggctctgccggagggcgcgtgtcaggataaaggtgtcaggccacctttgcgttaa

SEQ ID NO: 20362 - DNA, 282 bp, Zea mays
  Peptide Sequence Number=SeqID_63737
atggcgctcgcgccatgcgcactgccatgtcgccgacccgtggaccccgcccaccagggagcgcccgcgctcccatcccgcaccggggatacccgggccgctgaagcgtgggacccgccgtgtgctgttcatttgtactttccaaatgtattgaatgcatgctcgctttatttagacaacgagcagtccgaggttcttgagtgtgttgctggagacctccctgagcaacaacctggtgaaggcaagtgtcctctgacctattatgtcctacatactttatga

SEQ ID NO: 20363 - DNA, 780 bp, Zea mays
  Peptide Sequence Number=SeqID_63738
atgccccctacaccaccacagggcatcccggctgctggaggagaccctgacggagacggagacgacgacgacgccggtggcagttcgagccacggcacggagctctcggaggagccagagccagagggatggatcgctagacccatcacttgtgacgctgctcacgggtgtcacttccacgacgctctcgacaccctgctgtgtcgggccttcaaccgacacacatggtctatcgagtactgttgtgtagtctaccagcatcgttgcaggctatacccggaccagtgggaggctacttgcttggtgcgccgtccagacgatgatctccggggtgcagaggccttctcagagcactattctattactgagagggatactgtcaaggcagccatgcaagatgcagcacgacgggcactttctcagtattgctcgttgttcatcggggtagctgatggcctcgacctgaagtactaccctcgtcgtttgaccggcagtgctggaggtgtgattgcctcgctagttggtgagggcaattcgaggctgaacagcatggtcaacttggctgtcgtgctcaacacagagttggaccacgccctcgatgagttgggcaaggtttgggcggaggttgcggaattacatgctaagtgcgcagcatgccactatctggatggtggttctcccgcccctatcggcattcagcacccttaccgttcaccgccccatggtcgcttcgactatggtaccccagattgcaggacccggatagatttggatccatag

SEQ ID NO: 20364 - DNA, 567 bp, Zea mays
  Peptide Sequence Number=SeqID_63739
atggcacgcgccggaatcagcagggtcgacgatgtcgaagtagcgaaatcagcaaggtcgacgaggtcagcagatcacgagcagtcgcgtgaagacgcttcccaaaaaccttattcgccctctcccggtgcaggatctagaagacgaagggttccggagacctgctctcctgatcgcagatgcacctctgcggtcgggacgaagggaactaaaaggcggctcagctatgaagagaggcgaaagcgaactgggatctgggatgatttggaggctggctgccgggctccttttatagggccaagtccgcgaccccccgtgcttatccgcccacgaaaatctcgcaatcagttgagattttatagcgatcgtttttcagcagagactattaagttgaacttccgcctagaactccaagctacaccaacccacaacttggacaatggactatgccttgaattgcaagttttgcgtgaatgggtttcacttgaagtcatgaccagtacttggctaccagtagtccccttctcgggtggagcatatacgtcgtactccaaggtctcttcatga

SEQ ID NO: 20365 - DNA, 1110 bp, Zea mays
  Peptide Sequence Number=SeqID_63740
atgacggtggcaggcgcgcgggagcagcggtcacgtcgtcagccaagctcacgtcccatccgggggcagcgagagaaccccctctcacggtgtgaagacgacgcgcccgtgatccgttcctcgaacggctcgcgcacgcgcaacggctgccccgccaactactcgccccgtcgcattaactccgcggctggacaggcggcgcttctggcagaagcagcgggtgacgcttcgccttcaccgaaacaaccgcgtcaaaaaaggctccgagcctccttactgatcaggggttcgaaggctggccccccgaagggttcaacagccgcctcagatcgcgtgggccctacacccactactggtcagaggctggcccccgaagggttcacagtcgcctcagacgccgagcgagggatgaccaggggggaccgggtccggcagatcatccgcaggtacttttgggcgtgcctctgggcccctagccgacccccaacgaacggggcacagacgtccactcggattaccccgcttgcagctcaccggagacaccatgttcggcgcccatcgaggaggctcgggggctgctctcgcaaacctggctccggccaaaccgttgacagcgtcaacataccagcccgagaacttgggccccgaccgtgcacccgggctacagccagttcgcatgagggaaccaccagaccagccgaagcattacgcaaggcattaagacctcgaaggagtgaaaccactcctccgaggcctcgggggctacacccggcgggtgcgctcgcgcgcacccaccggaacaaaatgcaaccgagaaaggctggtccccttgcaaaaaagtgcgacgaaagcctccaagcgagtgctaacactcccttcgaggctcgggggctactatcggggaccataattaggggtaccctcaagacgcctaattctcagctgaaggacagcgccgcctgcgccactccgactacagcgccacttgacagagtgatgctgacagggagccaggtcctgccaaaggcaccatcagaagctccgcccgacccagggctcggactcgggctccgccccggaagacggcgaactccgctccacccgacctag

SEQ ID NO: 20366 - DNA, 795 bp, Zea mays
  Peptide Sequence Number=SeqID_63741
atgctggcgtgtcgggagtcggagaagcgcgtccacttggcgcggttgcatgccgcctgcatggctgcccgcctctttcgcccgttgggtctgggcaaaagtggagggtcacttgtaaccgctgggcggttgcgtgcaccacgcgcgacggtttggcttcttctgctcggagccggtctgcatgacatgcgggacccagcccccgcgccgcaggggagggctttggagcgtgttggagaagactcagcccgtgacggttgggggtgcaagcagggagagttgcctttaaaaggagggagcaagccgggctgcgatcttggtcccaccctcagcttcaaggatgttcatcatcctcgctggggtgggtgccgggctgagccggcgctctacctcccgcgcgggttcgtgggtcatcctctcacgcggcattcgagggagagggcgctcactggccctgtgggcggctcggacttcgacaacgcggggctggtcgacggcaggcgtcgtcacctccagcgtgtcgggttcgtcggcttggctcccggcggccccttctgccggagggcggctgccgcgccgtgtacacgggaggaccaccctagatgccgcgcgctgctagggcggcgttcgtgttctagggtggtcctgcctttgcaccgggacggcgccttcacgtggaggccggagtccctcggctcggtcggccttgctgtccgaggctcctctagcttagttaaagagacccctcggccgctcttcgacaagccgaggccaggggtagcgatattagtatga

SEQ ID NO: 20367 - DNA, 2325 bp, Zea mays
  Peptide Sequence Number=SeqID_63742
atgtcggccgaggagggcgcgtcggcgtcagcgtccgcgccggcggaggcgggggcaatggtggccgaggaggcggcggccaggaagcggtacgaggcgctggtgcaggtgcgcgccaaggccatcaagggcaagggcgcctggtactgggcgcacctggagcccgtgctcgtgccgccgcccgcgtccgggcagccgcccaagatggcgcgcctgcgctgcacgctgtgcgccgccacgttctccgcctccaacccgtcgcgcaccgcctccgagcacctcaagcgcggcgcctgccacaacttcacgtcgccgctggcagcctccgcgcctgtctccaccccgccgccgccgccgccgccgctctccatcgtcgcggcgtcctccgtcgtgcccatctcctccttcccgccgtcgtcgcagcgccgccactccaccggcggcggccgccgcaagcgccacgcgctggcagcggcgtacgcggccgtggaggcggcctcctcgcagcacgtggtggttggcgagccggccatctactccacgcctcccacgccaccggcgctgcccgcgccgcgccaccaggtcctctcgggcggccgaggcgacctaggtgcgctggcgcgcctcgaggacagcgtcaagcgcctcaagtcgcccgtcgggtcaccggggtcgatgctgccgcgccaccaggccgacgcggcgctcgcgctgctcgcggactggttcctcgagtcgtccgggagcgtctccctggccgcggcggagcaccccaagctcaaggctttcctgcgccaggtcggcatcccggagctgtcgcgcgctgacctaacccgcggacgcctcgaggcgcgcttcgccgaggcccgcgccgacgccgccgcgcgcgtccgggacgcgcgcttcttccagctcgccgcggacgggtggcgcgaccgggtagtcacgctcgccgtcaacctccccaacggcacgtccgtcttccaccacgccgtgcccatgccggcgccgccgtcgtccgactacgccgaggtggtgctgctggacgccgcctcgtccgtcgcagcctccgccgacctccgccattgcgccagcgtcgtcgctgaccgcttcggctccaaggctctgcgcgatctcgagagcaagcacccgtggatggtgaacctctcgtgccaggcccattgcttggcacgcgtggcgaaagacctggcgcgcgagctccctgtggtccattccgccgccaccaactgtgccaggatggccgcctacttcaacaccaccccggccgtgggggcgctgctgcgacggcaccaagtccaggagcttgggcacgctgggctcctgcgcgtcgcggctccgctgtcgaatggcgacaccgagatcagcgcggcattcgcgatgctcgatgacgtgctgacctgtgcgcggccgctccagctctccgtgctcgaggagccgttcaagctgctgtgcgtcgacgactctaccgcgcgggagatggtagacatggtgcacagcgcggcgttctgggccgaggtggaggcggcgcactcgctggtgaagctgatcaccgacatggtgaaggagatggaggccgagcggccgctcgtcgggcaatgcctcccgctgtgggaggacctgcgtggcaaggtcagaggctggtgccgcaagttcaacgtggacgaaggcgtcgccttgagcgtgctggagaggaggttcggtaggagctaccacccggcgtggtcggcggcattcatcctggacccgctgtatcttatcaaggacgtgagtgggcggtacctcccgccattcaaatacctcaccccggagcaggagaaggacgtggacaggctgatcacgaggctggtgtcgccggaggaggcgcacctggcgatgatggagctgatgaagtggcggtcggagggcctggacccgctgtacgcgcaagcggtgcaggtccggcagcccgacccggcgacggggaagatgaagatcgccaacaagcagagcagccggctcgtgtgggagacgtgcctgagcgagctgaagtcgctgggcaaggtggccgtgcggctgattttcctccacgcgaccgcgagggggttcaggtgcacgccgacgatggcgcggtggctgaccgcgcccggggcctcgttgcgaggcgtcgcccgcgcgcaacggctggtgttcgtggtggccaactcgaagctcgagcggagggagccgtggagcgacgacgaccgggacgcggagctgctcatggagggagacgatgacatgctgactgatccgaccaccgccatcgtggttccctcatcggtgtaa

SEQ ID NO: 20368 - DNA, 261 bp, Zea mays
  Peptide Sequence Number=SeqID_63743
atggacattgtcctggccttcagccttcatggtcttagaactgaaccagcatggacaggcaatgaaccagactaccagacgttgaacactaatgcactggtagcccagacccgcctgtcagccacaagacattacacccactcaggaccagaaatacggacattggcgcggcgcttgcgaccgacctgtttctccaccaagtctggcttcaacgtctcccctggtgacggatcagtccagggcttcgacgctgcatgctaa

SEQ ID NO: 20369 - DNA, 793 bp, Zea mays
  Peptide Sequence Number=SeqID_63744
atggcggcgggattttgtggcgcgcaggcggcgctatggaggggacgcgcgggcggcgctgtggagggggcgtgcgggcggcgctatggaggggacgcgcgggcggcgctcggcgctgtggagggggcgtgcgggcggcgctatggaggggacgcgcgggcggcgctgtggagggggcgtgcgggcggcgcgctaacaaaggtcggtaaaaatcctccgtggtatagtgccaccttgaccttggcgctggaatcccaaaccagagccctcctatcggagttggacaagaggctgcaactcctcgacagcaaatgggaatctcgggtcagcactctagagtccagggcgacggaggctgcgcaatccttgtcggagttttcgggcacccttcgtgctgatgttgaggcacaccttaccgctgcggatgcctcgacggacgccaaaatcgggcagatcgaggccgacctgggttatcgggtggcggcgctcgagtctaccgcggggatctatgagttctggcgtccacgcgtggatgcgtccctcgaagatctccactcctccgtggattggcttcgatcggaagtgtcgaagatggagatccagtggtcccggggtgcgcgcgccgacggcttccacatgccgggcgtgctgggcgcgcacgggtcggcaccgggacgctcatctgtcgccggggatgtcgccgacggctctcgttttgggcaccgcaacgactcacatcaccgggatagcggaccttggcaccccggtgctgacgcccgctacccggtcacgg

SEQ ID NO: 20370 - DNA, 243 bp, Zea mays
  Peptide Sequence Number=SeqID_63745
atggccgaaccatttcccgccctcctccgctcgatccaagcccctagtggactttacccctcacgcaacctgagacgtggtctcccattccggttatggtgggtacaagtgcggtcactgcacgacgacagtcggggttctctggaggacatggttgctggagtgacttggtcgtccatcttgccaccgggttggacagtcgagtgggaccctgcctcggctgaggaggagcatgaggagtga

SEQ ID NO: 20371 - DNA, 750 bp, Zea mays
  Peptide Sequence Number=SeqID_63746
atgacttctcacgtatcctcggatgaagggaatgcacagtcccacactgacgggcttgcacgagagggtttcccctatatcttgtgggaggtacttcagggagctggttacacgatgcctccccaggctgaggatactatggaggcaattgctcttcacggactgaccaccttttgcggatttcaccccttggagctgtccactcaccccattggtttgttccccgcggagaaggaggacgacccaatgtggaaggaccgagtggagcatgccaaggatatctgggctatctacccaggacaaactgctcacttgacggtgcggtgcatgaatgccctgtatcgtctgcaagtgatgcgtagagaggcaatgtcccatctgatggcattgttggaggcgaccaagatcactttggataacagagaggaaattgtggttgacttgtccacggagatggtggaaaaagacctacaagtggaacaattgtcaaatgagatccaagagcttgaggagctagtgggaacgagggagaacaccatcgaggttctcgaggatcagcttatcaacactcaacagcaactcacggaggctaaccagcatctggatatgcaccaccaggagatccaggatatggaggccaacgaggatgtcgacatggagggaggagaggagcctgcctctagcttggacactgctggctcagggagaccaccttcccccgagtcgagcgttgcctcgtttgcccactag

SEQ ID NO: 20372 - DNA, 357 bp, Zea mays
  Peptide Sequence Number=SeqID_63747
atgaccttgtatccactcctcttgttcgaacccctaatcatcagcatcacgatcagccaacccatgttcctactgatgataataaaatatcggaacaggtctatcattgattttggaggatatggtggttctgtcttggatgttgtccaatcttttggccctaataaatgtcttgagaactttttcatgcagagattcattgactatatttatgatgatgatatattatacaatccagatatcataatcaacacaatcatactaaatgtcaatgttaggactgttttgaatatcgagaagctcaaacaacatagtacaaatccgcagccttctcaacatcagttcttaaagatttaa

SEQ ID NO: 20373 - DNA, 393 bp, Zea mays
  Peptide Sequence Number=SeqID_63748
atgcctttgccagtctcgctgcgccaacgaagacgacgaccggcagtcttcgctctttgtctgggacgccgaaggacgaagacctatggcgaggtcgccccgtcccacggcgtcgcccgacactggagcccacgtgcaatccggcccgtcataacgggccccgcgctatcactgcgcagtacgggcctaatttgtaaagctctggaggacaaccacaacttccccccaggcttcgctccaccagagggcacgaacgccaccgaggacggcgaagtcatcggcgtttcggcagaagaacagctacaactgcgtgcattgcgcatcaagaaccgcaacctccagaagaaaaaagagatcctcgaggctgaaagtcgcctagaggggggtgaatag

SEQ ID NO: 20374 - DNA, 911 bp, Zea mays
  Peptide Sequence Number=SeqID_63749
atgaacgcgctgtcccgcgaggggtgcagtcactatgaggtcttcgaccgatctgatgaagattttgggcgcgagattttcaaggtcgaagaccctgtggtgaaggactccgcgggtgccctctttgaccggatgtggggcccccacggccgggaggtggtgagggagcggtccgaccgggcgagggatcaggcggcgcgtgccgaggtcgtggaggacttcggacccctgaacagcgtgcggcccgaagcggaggccaacccggtggtggccgaggctgaggtcgacccggcaccgcccccggaaactgctcctacggctactgcggccattgtgtccggtggaggctcatcgccaaccactgtgccgagggcggaggatcccccgaagacggcgacggagccggcagcggaggatcccacggcggcggctgggtcttcgcaggttcaaggttttgggcctacgcacgcaaccgctactgctaattttgtggcggcttcgaccgtggatgctgggaatgaatcggatgagtctgcgtctaagttttctgattttggtgactctgggagttcggttgagtggatggaagagtcttcggatgaggacttggattactttgcggccttggatgtggctgcggcggaggcttctccgcgtgttgcggatgctgaagttgtgcctagtccgagtgctgggcgtaggcggcgaagggcggtggcgaagcgtagagtgagtgaggtggatggcggtcggcttcgtgtggacagggctggcaagcaggaattgttgtcctcgccggctagggcgagtgtaggtgagggggagttgcgaagtctttttgagggtgaggagcttaggataatgctatttaactatagggagatgggaatcattccgaaggttgaaccgat

SEQ ID NO: 20375 - DNA, 516 bp, Zea mays
  Peptide Sequence Number=SeqID_63750
atggcgcttcctgtcgacgtggctggcctgtgccctaggttgggcgacgtggaggctcctccgaagccggggtcgagtctgtcttccatggccgaggccgagtccaagcccctgggtcgggcgaggcggaggtcgtcagcagaggccgagtccgagcccctgggtcgggcgaggcggaggtcgtcagcagaggccgagtccgagcccctgggccgggcgaggcggaggtcgtcagcagaggccgagtccgagcccctgggtcgggcgaggcggaggtcgtccgcagaggccgagtccgagcccctggggttgggcgaagcagagttcgtcgtcttccggggccttagcccgagtccgagccctgggtcgggcgaagcggagttcgtcgtcttccggggccttagcccgagtctgagccctgggtcgggcgaagtggagttcgtcgtcttccggggcttagcccgagtccgagccctgggtcgggcggagcggagttcgccgtcttccggggcttag

SEQ ID NO: 20376 - DNA, 1056 bp, Zea mays
  Peptide Sequence Number=SeqID_63751
atgccgtcctcttcctcttctgctgccgatacaccgccggccggcgcgtcgtccgaggagacgctgagcaatgtggcggcggaggagttgcgcgccggcgacacagtggagttcggcgtgtcgcggatgtcctcggtccgtgtgcaagacatgcaacagcttgggtattttggcgggggggtggcacgtgtcccgaggacagaggaggtccccgagccggaaggcgagttggtcgtcttcgaggcttttttcgtcgctggtcttcgtctgcccacgcatcgatttgtgggagaagttctgcgtagccagccggcgctggcggcgaagccggccgcccgtgggtccagcaagatgccggagggcgtgaaggcggccggcgccggcggaaccaagtctgcctcggccgaagccgcgaaggcccgagaattgccttcgctgggaaaacgcgttgccgacttcggcaccgatattagtgtggacgattatctcgttggatcgggcgaggggcaacttgttgttgttccgcctgtggtggcgaccacggtgtctgccacggtgcctggggtgaagggtagcgctctcagcgctggcggtgatatttcggcgctcactgccgtcaaggacgaggcgggcactgtgtcccgccggctgagggatgcgttgcagcggctgagtcaagcggccgacttcgccgaccgcgtggcgtcaggggcccttactgcagacgtgtctgccgaagtcgagagacttcgggcgcagcatgccgatgccgtccgggaaaagtcggccgcggacagcaagtgccgcaagctggcggagaaggtggctgccctggatggcgttaggacggacctccggcgccagctggtggaggagaggagggaggctaaccaggccatcgccaaggcacaggcggaggccaatttggcgcgggtggagggtagtctcgccaaccagcgcgccgaggaatgggaggtgcggtttaacgctctgcaggaccgcatggagagggccgaggcctctacgtgctcggaagttgagcggacgcgcaaatag

SEQ ID NO: 20377 - DNA, 885 bp, Zea mays
  Peptide Sequence Number=SeqID_63752
atgagtcgcgcggcgcagacaggaggagccggggccgggggcggaggcgcggcgaggctcaaggcgtcgccgcgtgcgctcttctcctgcggcatcttcagcacctgcacgcaccctgcgctgagcccgacggcgacgcccaacaacaatgtggtgtcggggagcggtggcggcggctcgggcacgccctgcgccgaggcgtcgaccgcgttgccggcgccggcgtcggcgtcctcgagcgggggggacgcgctgctgggcgcagaggagaagttcgcggcgggggaggtggtggcggcgctgcgggcggtggagcgggagatggaggccgcggcgaggccggtgccggcgggggtggtggccggggtggtcgcggcggtgcgggagccgttgacggcgccggcgcggctggccgccaaggcgctgctcgccgtgctgctggaggaggggaaccgggaggcggcggtggaggccggcgcggcgtcggctgccgtggaggcggtggcggcgtccgggccggcgggggccacggccgagcgggcgctggccgcgctcgagctgctgtgcacggcccccggcggcgcccccgcggtgcgcagggaggccctggccgcgccggtgctggcgcgcgcggtggagggcatggccggccgcggccgggagtgcgccatcggcgtcctggccgccatctacggcgctggcggtgaggatgatcggggggcctcgtcctcgccgcctccgccgccggaggtggtgaaggcggttgtggcggcgatgcagggcgagtgcagcgcgcgtgggcggcgcaagggcgcgcagctgctgcgcgcgctgcagcaggccggccgcctcgggctcgcgtgggacggcgtcggcgaccagtga

SEQ ID NO: 20378 - DNA, 240 bp, Zea mays
  Peptide Sequence Number=SeqID_63753
atgcccggttccttattcatttctgctgttacagcttccgaatgggtcaagggcaagcaagtggaggaagtagtagccatcaagaacaccgagattgtgaagcacctgtctcttccaccagtgaagctccactgcagcatgctcgctgaggacgcgatcaaggccgccgtgaaggattacgaggcaaagaaagggaagaagatggccaaggcagaggagcaggacaccccatgcccgtaa

SEQ ID NO: 20379 - DNA, 735 bp, Zea mays
  Peptide Sequence Number=SeqID_63754
atgtcgggcatcttcgcgccctccgccgtggggctcgccaacgccgtcacggccggctgggccaacgtcggcagcgccgcggcgcagctcgtcatgccgctcgcgtacgagctcgtcctccgcctcggcatgcccatcaccgtagcctggcgcgtcacctacctcctcccctgcgcgctcctcatcaccatgggcctcgctgtcctcgccttcccctacgacttcccgcgcggcgccggcgtcggcggcggagccaagaccggcaagagcttgtggaaggtggtacgcggaggggtcggcaactaccgcgcgtgggtgctcgcgctcacctacggctactgctacggcgtcgagttaatcatggagaacgtggtcgccgacttcttccggaaacgtttccacctccccatggaggctgcgggcgcgtcactgtcctcctcctccaagaggagcttcggcgcttcttcggacgcaaccgttagcagcacaccaagcaagctgcaagccctgaggtttgcagaggacctctcgctgccatcggggcatttcttgccgatgtgcttcaatgcatttgacgaggaagctgacctcgatgttcttgaccatccagttctgaatttgttctattacctgcagcttgtggagattctcccttcatctcttgtcctgtacattctaaggaggattcctgcaaagctacggctatcccagtatcaccccgtcagcagcagctag

SEQ ID NO: 20380 - DNA, 870 bp, Zea mays
  Peptide Sequence Number=SeqID_63755
atgacggtggcaaacgcgcgggagcagcgggcacgtcgacagccaagctcacgtcccatccgggggcagcgagagagccccctctcacggagcaacgggcgacgcttcgccttcgccgaaacaatcgcatcaaaaaaggctccgagcctccttactgatcaggggttcgaaggctggccccctgaagggttcaacagccgcctcagatcgcgtgggccctacacccactactggctggcccccgaagggttcacagtcgcctcagacgccgagcgagggatgaccaggggtaccctaggacatttccgagaccggcgggagcgatcttgtaacggtatcccatcggagggaggcatcgagccctcggaccccgtcgccaggggaccgggtccggcagatcacccgcagctcaccggagacaccatgttcggtgcccatcgagggctcgggggctgctctcgcaaacccggctccggccgaaccgttgacagcgtcaacatactagcccgagaacttgggccccgaccgtacacccgggctacggccagctcgcatgagggaacaaccagaccagccgaagcattgcgcaaggcattaagacctcgaaggagtgaaaccactcctccgaggcctcgggggctacacccggcgggtgcgctcgcgcgcacccaccggaaccaaatgcaaccgagaaaggctggtccccttgcaaaaaagtgcgacgaaagcctccaagcgagtgctaacactcccttcgaggctcgagggctactgtcggggaccataattaggggtaccctcaagacgcctaattctcagctggtaacccccatcagcataaagctgcagaggcctgatgggtgcgattaa

SEQ ID NO: 20381 - DNA, 600 bp, Zea mays
  Peptide Sequence Number=SeqID_63756
atgcagcccggccgcgcccctccaccggcggtcacccaagatggtgacctccggcttgatggtgggggaaagcgagctgggctgcggcctctgcccctacctcggcctcaaggattttcgtcatccaggccaagatggaggatgaggcgagtcggggggctgcctccgtgggggtcggttgccctcttcttccccgagcgtctgggggagaacggcatcctccagctccacggagacttcctccagccatgccgggagagcacccgccccgaagccactgctgaagctgcttcgtcgctcggggcgagggtggttatcgctgtcgccggatcgggcggcgacgggccacctgtcggcccgcgatcgctccgcgggctccccaatcttgtggggttgttcgtgcccagggggacggaaccagagttccgtttgagacggcgcttcgaatgccgatatttctgttcattacggctttcggggcctgaacatgaatctctcggctcggtcggccttgctgtccgaggctcctctagcttagttaaagagacccctcggccgctcttcgacgagccgaggccaggggtagcgatatcagtatga

SEQ ID NO: 20382 - DNA, 1867 bp, Zea mays
  Peptide Sequence Number=SeqID_63757
tcgtcaggacaggatgccgtgcacgaagaatgtgtcggcgccagggggaggagatgatgaggatcctcctcaccccttcaggcaggtcaaggggaagacggcctacttagagcagcaggaaggccgcaagaagcggcgtttggatagagcagcccgagcagctctagcagcagcagcagccgctgagcaggcagagagaggtgatcagctgcggatttcctcatatcagattgcttatcgtgttcgacgtctcgcctcttggcctcgctcctccgcacctaccactcccaccactgctaccactccaccacccacttcacccgctccagacactcctgtgccatccaccacctcagccatacctaccacctccactgctccagcttccactgctccttctgctccccttttcgctccacctaccccacctgccctcttccgggagcgagatgagactgaggtgcaacctctggctgcatatcccaggttgtttgatcttcagcgtgctacagcggcctgggtacgtcggttcagacatgtacctgtggagacttggctaccggctcagagggaccctacaacagttgatctcttcagtaccaagatacaggagtccttctttcgagcacagatgtctacacagattgctctccgagtgcaccggcttttggaccttcctgcgtttctgctagccaccggtgctgactttgaggtacacctctcatatctaccaggacttctcactcttttgtctaccagcggcaaatatgttgaggaatgggtccaagttttctatgcttctgtatggatcgaccctgatcaccagtggatgagattccgctttgagcgagaggatgttacacttcatgccagtcagattcgacagctgtttggattcaacgagtcctcaactcgccttcatagcttgtgctatggcacctctgatcctcctcgagtcctcgtcgccctcatggcggagttgctcctactcatgagacgaacgcttctgccacagatgggttatagggaggcggccactcatatccaactctggctacttggtgccctggtctctcactcagagtttgatgttgtggacttccttatttgtgagatcgaggacaccgtactggatgcccctaaggaccctgtgccggcacctgctccagtgattgacactcaggctgatgataccgcttttcaccagttcgagactcagggcgcagcagtcgctgacgatgatgatgattatgatgatgatgatgactttggggttccgcctccgcctcctatgcctccacgcactcatgatcatgaggctgggagttccagtgctgcccctgctgcccctcctgccattgaccctgctcttgctgcgatcctccagacccttactcagcagcaggctcacttggcagcggtccagcagcagatggccttcatgactctcatgcttcagcatactggtgtttcgattcccccagttcagtcagcaccacctccacctcttcaggctgctattgtgccagccattcaggcaggacctcctcttcctatagttggtccttcttcctctccgctccggacggtcaccatggttttctcttcgccggtcatcagctccgtcagcactcagccgctagtgccaccagctcctgttgtgaccactgctgttgtggcggtgtctgtgacctcttcagctccggcagctccagcagcgcagcctcaatctgagtcagtactagctccagcttctacgacagatcctggatccgagactgactctgaccctcagctggcgtttgctcttctgcctcgactgcgaccggatgcgcccccgccacctccttcctcttctggtgtgtag

SEQ ID NO: 20383 - DNA, 1218 bp, Zea mays
  Peptide Sequence Number=SeqID_63758
atggcaggggataacgaccaattacatgggatatttagaggaagagataattctaggcagatgtacattaaagaaaatctgcaggagcctggcatggatgaagactaccagaaattgaatatccgttgcatcccgtatgatgtcattgtgtcaacttggataatgagtgatcgacagcgtgatgctattgctaggttgggatttcaaagtatatttgatttgcgtaccgatgcattagagagcaggtctctcataaggtggttgatggataagctggatccagacgacatgacaatacgcccaggggctggtaaagaactcaagatcacaaaagagacggtttgtcttatattgggattgccaagtgctggaggtggcagggatttcactgattggtatggtgaaattgacgctacttcaaaactgagacgggatctcaacatttgtaaagaagagtttgatgttgttaagctacaggacaagctagtttttgggaatgatgatgagttatccatcagatgtttttttctgattttattcaatcgacttatattcccatctgcttcatggggtattacgaacaacgaggtcctaatgacaacaaacatggaccggatggctgagattgattggtgtcaactagtatatactgatctgtgtgatgctgccaatcgttggcacaagcggaacagaacaaacattactgcaacagtatatggatgttcactcattattcttatatattaccttgaccacttacaccaccctgcatcacctgagaacaagtatggtactccccgcatcaagtattttgacaacgagacaataagagatttggctaggggtgacagacgtggcccccgccaaactggggaaccatttggtcgtgcagagatgtttcgtagccgcacagagacatgttatgtcattgctccagaacggccaatttctgaagtattcaacatatatgtgccacgcataaagcatttgattggcaacaagctgaaatgtctaccctcccagcatcgccccatgttcgaatcaatgtttgatgcgcatgacaaggaggtggataagtattgtgcttctcttcaacagatccatcagatgcttgtttctaagcagattgaactatctgagacatttggcggaattgaaaggatcacgatgcccaagaggggggtgaattgggcttttctaaaaatcaacactaattaa

SEQ ID NO: 20384 - DNA, 576 bp, Zea mays
  Peptide Sequence Number=SeqID_63759
atgcgttgtggatctcagctcgtcgattcgtacattaacgatcgcatacgcgacatgcgtaggtacgcgaaatctgcccattttgacagcccgatgcgtgcagaacagaggaggttgaaggcggcaaatgagaagagagcacatgatgcaagagaatgggaggcggctagagccaagaaacaaatgttggataatcttgctgatcgtctcaagggaaagattggatatggcgtaaactatatggcagatgaggcacatgcaagatatgaggaagacacatcaaggttgagtgagctcatcgtactagctgaggcaggattacgtgctcaagaggaggacaagtttatgtctcaagccgccgaagaggtagaggcggcttattacaagcagaagtctaatgaggctgaggctgagctattctctcaagctgcagatgaagcagaagccaattattacaagagaactgctgacaagtgtgatgcaggacaatgcagcaagtggaacgaggttgtcgttgaggattgcgcgatggatgactccgaagatgagttacttatagattgtgattctgattga

SEQ ID NO: 20385 - DNA, 645 bp, Zea mays
  Peptide Sequence Number=SeqID_63760
atgtggagaggaccgagggccgcgacgcgcacggaggctgagcggacgcgcaaacagcttatggattcataccatgagctgggcgcgcggaccggtgacttcgaagtgtcggaccgagagcctggactttgctgcctggagtgggggtgccgacactttgaggtcttcgaccaagccgatgaggattttgagcgaaatatctacaaggttgaggaccctatagtgaaggagtccgccggagccatctacgaccggatgtggggcccgcacggtcgagaggtggtcagggagcgggcgaagacggcgagggctcaggcggcgcgtggcgagagggtggacgatttcggggcgttgaacagcgtgttgcctgacccggagtcaaacccagcggaggccgtgtccgaggtcgccctggagccgcccccggagactgccgaaggcgttcctgatgcccccgcagccgctgcggccggcgaaggcccacccctagagaccgccgaaaacgttcctgatgcccccgcagccgctgcagccggcgaaggcccgccgccaactgctgtgccgagggttgaagatcctgcgacggtggcggtggaggcgatggcggaggctcccgcaacggctgggtcctcgcaggtggcgtaa

SEQ ID NO: 20386 - DNA, 117 bp, Zea mays
  Peptide Sequence Number=SeqID_63761
atggcgacggctctctgcgcctccactctcgcgctcgtgtggttagtgctccgcttctgcttggacggcgaccacgcaagagatccaacagtgcagagggagaacaacatattttag

SEQ ID NO: 20387 - DNA, 804 bp, Zea mays
  Peptide Sequence Number=SeqID_63762
atgggggcgccgagcagccgcgcgctggcgctgggcgcggccttcctgctgctcctcgtcgcgctgccctccgccttcctctacctcacctcctccgcggccacccgcgccaccctcctcgacctcaagcccttctccgccaggtgcgcgcccgcagtcgcgccgctccgcgtcttcatgtacgacctgcctgcgcgcttccacgtcgccatgatgggggccgccgccggcgcggggttccccgcgtggccgccgtccgcgggcgggatcaggcgccagcacagcgtggagtactggatgatggcgtcgctccaggatgggggcgcgggaccggagcggggaagggaggccgtcagggtgcgggatcctgacgccgccgacgccttcttcgtgcccttcttctcctcgctcagcttcaacgtgcacggtcgcaacatgaccgaccctgacaccgaggccgaccgcctcctgcaggttgaacttgtggatattctctggaagtctaaatattggcaacgttctgcgggccgtgaccatgtcattcctatgcatcaccctaatgctttcagattcctgcgagcaatggaagggaaaatccggtcaaaacttgagaagatattaaaaggcaaggaaggggtgcgctttgaggatagcattgccacgggcgacggcattaacatatatccccccaggaagggcgacgcggtgaacatgatatggaggcaggtgaggcacaagatccccgcagttaaccttgctattcacaggaacagaagactgaaaattccagactggtggggataa

SEQ ID NO: 20388 - DNA, 198 bp, Zea mays
  Peptide Sequence Number=SeqID_63763
atggctagagatgtcaatgggaacccgatacctgccaacccgtggggaattcccctattagggtacatgtatgtgacaaaaattatccccatgggtatgggatatgggacaaaatctccaccattgggtaaacggacggcagtgacgaccatggattctcaggcgccaatgaactcagatggtgaccaaggaaggtga

SEQ ID NO: 20389 - DNA, 544 bp, Zea mays
  Peptide Sequence Number=SeqID_63764
atgaagcaatgccaggttgaggatgctaattcatcgtctgatggtcacgaagaagaaattttaggtggcggtgacaacagcacacctgaccccagctcaattgtgaaaggtaagcgtaaggtgttgcatgattctcctaaacctaagaagaaaagggatgtaaaggaagaatacatgaaacgccttgtcaaagcttatgagtctaggtccttgtgctctaacatgtccataacctcatttgagaacgaccccgttcgtaaagaggttgctgctcaattgcaacaagtcattgaagatggttcaccggaaggaagcgacttacatttctttgcgactcatttgttgatggaaaaacgttacagagatttgtatgtctttgaacaatgtcattgtgtgaaccatattggatttcaacaaatgtctgagcctgatacagactcatatgatgatgagagggatggagaattgctagttgcactttttgctgtggacatatgggggagctcgccaagtgggttttcgagaagaaccatggttgtaacag

SEQ ID NO: 20390 - DNA, 267 bp, Zea mays
  Peptide Sequence Number=SeqID_63765
atggacgagagttgcactcaactcctctcaagtgatccaatgatcaacttgaataccacggtgttcttctttgtttactctttcccgtttgcgaggaatctccacaacttggagtctctcgcccttacaataaggatcaaggtgaaagcactagatgtccggtgcaccaagggacttcaagctgaactcaacaccttcggaaattctcagaggcgctccgctatgagtgggcggtctgtccggtgctccaaggaagagcgactctaa

SEQ ID NO: 20391 - DNA, 756 bp, Zea mays
  Peptide Sequence Number=SeqID_63766
atgaccggcggcggcagcagcacccgccgtccggccgccgtggccaggagccgcgggaggccctctgaggcttctgaaccagatcccggcgctcgacgagccgcggccgcagcggcgcagcgccgtggccgcggcaaccctggccccttgcgcctgatggacgtgaggccccgaaccctcgcgtacttcgtggttgcttccttcgccctcgtgtcagtcacattcgtggtgtatactggtgggtggtgggaggaggtggaaggagagggcgcggcgacgctgcgaaaggtcatgcgctccgtaacgccgctgccggcgcccaggatgatggatctgcctcagtttcaaaataaccacaaggaaagtttgtattggggcacttatagaccaaatgtgtacctcggaattcgtgcaagaacccctctgtctctaattgctggattaatgtggattggcttgaaaaatggtcaatattttcttcgtcatgtttgccaagattctgatgagctgagaacatttgggtggacagctcacaatggtagggattatgggcgtcaagtgctggttgatcatggtcttttcctaactactagttttctgaaagagaaaggagagagcagtggttatggtggagactgggccgttcgattggatgctaacaatgagaggtcaggtttaagtgatgctgaagaaagcccctcccatctttttttctatattgctgatgaaacaggaaatccgacgaatcaagcttga

SEQ ID NO: 20392 - DNA, 726 bp, Zea mays
  Peptide Sequence Number=SeqID_63767
atgcaatattgctcctatcagcagcaagaactagtgaatcttcagtcaaatgaaaaagtaagctgtgacctcagtgcactgaagacaaaatgcccactcatgatcggtacccatatacctctccacttgccagacattatattcgaccggaagatattggtgaacaacttggttgattccaaagagttatctgttggtagagctgccttatcaagtcttctgggtggtgttggctacttctatgggcagtccaaaattgcactcccgaaaggttttacacaaaaaaatggggataagtacatttcatattggcctgctgcattatatacagctgtccccagccgctctttcttcccaaggggatttctgtgggatgagggcttccatcagttagtcatttggcgttgggatgtgcatatatctatggatatcattggacattggttagatctgcttaattcagatggatggattcctagggagcaaatcttaggagctgaagctttaagtaaagttcccgaggagtttgttctgcagtatccttccaatggaaatcctcctactttatttcttgcgatacgtgatttagcaagtggaatacatgcacagcagttttcagatgaggaagcggaaaagatttcaagttttcttgaaagggcttatatacggctaaatgcttggtttcagtggttcaacagtacacaatcaggtgtggttctcagctag

SEQ ID NO: 20393 - DNA, 522 bp, Zea mays
  Peptide Sequence Number=SeqID_63768
atggtggatgaagtgcaaatcaacacaaagaatcagagaaaatacaaaaggaaaaagacttggctggacaaccaagactctgtgcagtctgggtgcaccggacaatgttcggtgcgccaggctggcgtctgctcaattggccgctctcgggaattcatcggcgttgtacggctaaaattcactggactgtccggtggtgcaccggactgtccggtgagccaacggtcggccgcgcaatccgcgcgtgacggtggccgagccaacggtctgatgggggcaccggacagtgtccggtgcgccaacggctccaagtcttcaacggtcggctgcgccaatttagaaaggcgatctgcaccgaacagtgaacaggggatgtccggtggtgcaccggactgtccgtgctttcaccttgatccttattgtaagggcgagagactccaagttgtggagattcctcgcaaatgggaaagagtaaagaaagaagaacaccgtggtattcaagttgatcattggatcacttga

SEQ ID NO: 20394 - DNA, 1032 bp, Zea mays
  Peptide Sequence Number=SeqID_63769
atgggcaggccgccgtgctgcgacaaggaggggatcaagaaggggccatggacgccggaggaggacatcatcctggtgtcctacatccaggagcacggcccgggcaactggcgctccgtgcccatcaacacgggcctcatgcgctgcagcaagagctgcccgcctccgctgggaccaactacctccgccccggtatccggcgcggcaactttcaccccgcacgaggaagccatcatccgtccaacctccagtccttgctcggcaacaggtgggccgccattgcttcttacctcccgcagagaaccgacaacgacatcaagaactactgggaacacccacctcaagaagaagctcaagaagcagcaggccatcggcgccatcttcgcaccacccgactcctcctcgtcgtcctcctccatcgtagtaccacccgccgctaccaccaccaccaccaccgtcgaccaccaccaccgtgacatgctcggcgccaacctcctcgtctcctccaaggacacctactactacgcgcgcccaccagccgaggccgccgccgtcgcccgccgctcgccgttcgccgccgacggcgacagctcctcgtcgtcgtacgcctccagcatggacaacatatccaggctactcaccggcttcatgaagcagcagcacgacgacgctgctgctgctgccgacaccaagcccccggccccggccgcccaagtcaacagcccgccgcctgctgcttttctgtcgccgtcgttccaccaccacatgtccgccggcaccgggagtggcacgccacctgcagcttcagcggcctacttcaacgacatgatgccgccgccgccgccgcagcagcaggcggcgctgatgggcgggcacggcgactacgatgacgggcccagcagccggcagcacctgcagccgtccccgctgtctcccatcgagaagtggctgttcgaagaggctgccgagcaggtcggcgacctcatggatctgtccgaagactgctgctcgtcggttccaatgatgttctag

SEQ ID NO: 20395 - DNA, 1362 bp, Zea mays
  Peptide Sequence Number=SeqID_63770
gaacttctggcacaagggacactttacagaaagatgactggtgtcgaagctgccgccatatctgctgtagcatctggaatattaaagattgtgggcaacaagttggcaccactggttataagaaagtatagctcaatcgtgggtgtggaaaaagatctccagaagctccagctgaaggccgagagaaatgatgcttctggtgatggtgattttgtatccagatatatgcgtagaaaaccagaatcgttcatatttcagtgtaaggcagctaagaagatcaaggcaatcaagaagagatttgctgcaatcgtgaagcaaagagccgacatcaatataatagctactagtttaactggtagtggtcattctatttcccatatgaaaaagacagctgtggggctgccatcagtgcctaccatggatgcaacattaatactcggaagagaaatggagaagcaccagctaatatctaaattaactgaaaccaatgaccaacaaaaaaccatgatagtttccatcgttggacttggtggatctggcaaaactaccttggctaaacttgtttttaacgatggtaccactatagcaaagcattttaaagttagactatgggttcatgtgtcacaagagtttggttttgaaagtattgttgggaagctgtttgaagctattgcccatggcaagtctgaaagccataacttgcagcacatggtcagaagaatatcagacgagttgactgaaaaggtgttcttgcttgtactggatgatgtctggactaaggaccgaatggagttggaacaatttatggtacttgtgaggagcggtgcatctggaagcaggattttactaactactcgcaatagcgatgttgctgaagcggtggaatcttcatatctgatcaacctgccactcttgtctttgtctgacagctggcaactatttattcaaagctttggtacgacggtggaaggtttggacagagaattcctagatgttgggaatgccattgtaaacaaatgtggtggggtgccactagcaattaaagtaattgcaggtgtcctccatgacaagaaacggatacaagagtggcaggccattagagacagtaatctattcgatgctgagggcaaagagcgtagagtatctgcatgtttgaggttgagctatctgaacttgccctctcatctgaagcagtgcttcacgatttgttcactgtttcctaaaggtcacaagattgacaaggaacgtttgattgaccaatggattgctcacgacatgttcgctagtgcggatgctgttgattacttggagtacactggatatgagtgttttagttctcttgtgcaaatgtcttttttgtag

SEQ ID NO: 20396 - DNA, 2937 bp, Zea mays
  Peptide Sequence Number=SeqID_63771
atggaatccatgtttgtggcaacaattcccaatgccatattccaggcgaaacatttgaaatatcttgagatttcgaggctaagatgtgaagtactcccggaagccatttcaaatttctggaccctacaagctcttcacctggcatccagtgatctccttgatttgcctgaaagctttggtaagctaactaggttaagaacattgaacctatccaagtctgagaagttcaagcgtttaccagactccatcggcgactgtcaaatgatgtcaaccattgatctttgcggttgtaacagtcttacagtgttgccagacactattggcagaattgaaaggctaagagttttgagattaagttacacaaagatcgagaggcttccatcaaacatcataacattgagaaatcttgagtgtttggatctctgcacgtgtcaagagctggtagagttgcccgaaggcattgggaatctagataggcttcaagtcttgaacctcaaaggttgtaaatcattgggaggcatgcctgtaggtgttgggcggctcagtcggctccaaaagctgggcttgtttgttgtaggtgacagtgaaaagtttgcaggaatctcagagcttgcaaatgtacctcggattagtgaggaactgagtattagaggtattccacatggtatggacccagacgatgcacagatggcatgcttgcaacaaaaaacaagcttacagagcttggacctagaatggatggcacataaggcatgtgaggtggacctggaatggatggcacatgaggcaggtgaggcgaacatggacttggaacggatggcacacgatgcaggtgaggtggacctggacctggaaaggatggcacttgaagcaggtgaggtggacttggactctgagtggatgccacttgaggcaggtgaggtggacactgagttggagcaggctgtacttgatggtctagagccaccgtcacagattaaagagttgaaaattaatgggtattctggaagccaacacgcatgctggatgcagaatcaagtgagtggcagaagaggaccacaagagcttgttcacttcccatttctgagggtggtgaagctatctgatttccctaacttgaagcatctagatgggcttgtggagctgccttgtttggaagaccttgagctgcgagcgatgccttgtctcgagagcatgagtggaggcccatttccttccttgtcgaggttagaactggacacgctgcctagtctaggagaggtgtggctggtagccgagacaacaatcctacctagtggtgaaggagcaggccacaacgtccatgacactggcacgcctggctctggacgacaggtccgtgttggtggtcgcttgtcatatctgtttatacaagactgtcccaggttgaggctcaggccgcacatgccttcgtcgttggagagcctgcacttgtccgagagcagcgagcaactgctgcaactgcctgcagaccaatgcctggggtcttcctcttcctactccaatttcagccacctgaagaagcttgggctatgggggatgacaggactaggatctggacgccggtgggagcttctgcaacacatgacggcgctcgagtcattggagatcaactcctctctggtgctaagagagctgccagaggggttgcggagcctcacgtgcctccagtcactaatcgtgttcgcgtgctcagatcttctcgtgctgcccgagtggataggggagcttgcgtccctgcagcagctgtgcatctggacctgcgatgtcttaagcagccttccccagtcactggggcagctcacatccctccagatgctctccatagaagcatgctacgagcttcaccggctgcctgaacgcataggggagctctgctctctacgcaagctcaggatcagggattgcccgaggctggcttgccttccgcaaatgtccggcctcacctcccttcaagaactcctgatcagcgactgcccaggcctcacatccttaccgcaggggatgatgagcggcctcgcttcccttgaaaagctgattgtcagtgactgcccggggatcaaattcttgcctcaagacataaaaggcctcaccactctgatggaattgcggatccgtaggtgccctgatctggagaggcgttgtgagacaggaaaaggggaggactggcacctcatctcccacatccctaatttgaggatttgccaagcagacgtgcggccaagcaggaagcagcggcaggcggcagccctgcggccgtgcgggtcggcgcctcggcgggaccaagcggcaaacagcctgcagccggccgccgggtgggacaagacaaccggtcaaccggacaagcagatcagcggagcgccggagcgggtggctggagcgtggagcgacggagcgtggcgaatccgaggctccgagcggctggaggcctggaggctggagcgccggcaggagcggccggcggccgagcgggcagttgtgcgggacgccggctgtgcggcagcaatactgggccatactgggccctccgcccctgtcccgaacggattcacggctcgcccgagggtcccctcaggcagtgggcgcacccccggctcgctcgaggcaaagctcgggcgaactttgtcgtatagcaacctcggccaaatcgccttgccaccgaccgtatcacaccactgtgccaaccaccggggtaagactgacaacagtaagtcaccgcctctcccgagatcggcctcgggcgcagcaggaagttccgcctcgcccgaccccagcctcggcctcggagggaatcgtcgccacgcccgacccaggcctcggcctcaacctcagcctcgggaggaggtcttcgcctcgcccgacctaggcctcggcctcagcctcggcctggggaggaggtcttcgcctcgcccgacctag

SEQ ID NO: 20397 - DNA, 1149 bp, Zea mays
  Peptide Sequence Number=SeqID_63772
atggacgtcccggccgtggcggaccctggaacggagcgaggcgaaggcgcgctgatccagtgcccgtactgcgactcggaggcgatgcacaagctggcgcagatcctcctcccgggcctcgccgccgtctgcgtggacggcaccacgggggacccgttccgcagcccgtccgcggtggccgtggacctccgcaaggagatggtggactacatcacgcagcggagcgacagcttcatcgcggacgcgctgatcgagtcggaggcgaaccaggacgcgcccggggccgaggtgcccgacgaccccttcgagaccgtgtccgtcttcatggacgacttcgccagcaccaagcgcaacatcatcggccacgtctcagggtggctgctcaccgacagccgcgacgacaagatcgacgacttcgtgcaggagatggaggccaccaagttctggccgctggagcgccgggaggccgtcgccgagctcctgctcaagaacgtcgacctcaagaccaggttccactgccccgagaagtacgagaacgaggagcgcctcgaggaccacaaggcgcagtgcagcttccgccccgtcgcctgcgccaacgacggctgccgcgccaaggtctccgtccgctgcgtcaaggaccacgacgccgcctgcgtgtacaagctgctccagtgcgagcagggctgcgacaagcgcctgctcaggcgcgacatggaccgccactgcgtcaccgtctgccccatgaggcccatgaagtgccccttcggctgtgattcctcattccctgaccgtgacctcgagaggcactgcgccgagttccttcagccgcatctgctcatggtccttaaggccatccataagaaaggccggtcggaacaagacctcaaggaccttgctcaaaagctggaaaaggttttgtttttctcatccccactcatcgacctgctttttcaattggattcagcgctcaccgtcctatttgcttccgaaatacgtacagtgattgtgatgagattcagttttaacagagaagcccagtttggtctgtttgatggagatggtaaactggctaaggctctagatgcaagacctcttactaatgttgtcaaggacctcgaagccaagatgaaaggtggacagtcaagttaa

SEQ ID NO: 20398 - DNA, 459 bp, Zea mays
  Peptide Sequence Number=SeqID_63773
atgggcaagggtaacaaacgcaagcgtgagccgactccttcgtcggaggattttggcgactcggaatactcggaggaggagttctcctccgagtccgagggatctccggctcccgtctctcccccggcgtcgtctgatgattcagacgactcccaggggattgccgcggaggtctggacgtatatccgggccgtcgagcgctccgggctcgagggctcggatgagtctgagttctcctcggacgaggaggactcggacggcggcgaggacgaagatgacgacggcgacgacgacgatggtggcgacggcgacggtgacggcagcaacggcggcgggggcagcggtggcaagggcagcaccagagacagcagcagcacgggcagcaccagaggcggcagcagcaagggcagcaccaggggcggcggcggcaagggcagcagcagcaaggccagtggctag

SEQ ID NO: 20399 - DNA, 888 bp, Zea mays
  Peptide Sequence Number=SeqID_63774
atgacgaattccggccgccaccggattgattccccctccaacccgtcaacggatgatccaccggcaagcccccgaggcaccgcggcacaccacgtactcccggacgccgaccgtggacgcgattggggaagtggggaaacggaaggaacggcgtgttggctttatccacgaagtcgaggctcccggacggttcgcagggaagttgcgaagagggttgaacggagtccgtcttcgccggcgaaggaagcggtccgcgcggtgcagagaagggacgagctgctcagcgtagaggggggggccaccagtcatagagtcactggcgcacgcgtggaacaaaggaaaatgagactggaggccgggccccacgcgcagcgaggacgcgagatccgcgcgcgcagcgagcctgacccgtggggtccttacgtcagcgccggcggcttgcttctgccaccttccaacttccatctctgctttctccccgttctgccggcggcagacaattttttcccctgtccgccgccccctcccgcaagccgccaaatccacatcgcaaaccctaacgccgccgccgccaaaacccagcagcccccactgcaacaatgtctggcggggcggtcgcggttcaaggacgtggacatgcgggtccgcgtccgcggcggcgggaagacgtcgcaggtcttcgccatccgccaggccgtcgccaaggggctcgtcgcatactaccagaattacgtcgtcgaggccgccaagaaggaggtcaaggacgtcttcagccgataccagcgcaccctcctcgtcgccgaccccaggcgctgcgtgtgggggatggatatccccgggcccactaaagaaataaaagacctcacgaaaggcccaaggacccaataa

SEQ ID NO: 20400 - DNA, 525 bp, Zea mays
  Peptide Sequence Number=SeqID_63775
atggtgagagaacgaagaacactaacaaacacaatgagcaagaacacaagagacacaagatttatcccgaggttcggtcacaccaccaaggtgccctacttcctcgttgaggcgcccacaaagagccgggtctctttcaaccctaatcctccctttgccgaccacaaagtgtgggaggtgtatataaaggatcccccaaaagctggcagccgttgggagaaaagcggtaaaaaccggttgaaccggtttacaaaccggttgaaccggtttccaccaggggaaacccggttcactaacctactcagccggagactcgaccggatccaaaaccggttgagccgggaaaaaatccggttgaaccggttttcccaaaagatctgcaacgacttttctgacagctctgactgtcagacaggtcagagcagggatggcagaggaacagtcccaaaaccggttgaaccggttttaggaccggttgaaccggtttccaaggctgaaaaacaagttttgaactttttgaagtga

SEQ ID NO: 20401 - DNA, 2265 bp, Zea mays
  Peptide Sequence Number=SeqID_63776
atgggagaagttagtgatgataattccaacatgtcctttctaaaaagaatcgctacaagtgacgtgccactgttgaaagagtatggtgtgaatggagttgttgtcgccctgcttctggctgtagttactcctgtcctgctttccatgatgtttggcaagaagacaaagcaaagggcggtgcgagctgatgtgggtggagaggagggatttgcaatgcggaacaacaggttttcctccttagttgaagtcccatgggagggcgccacgacaatgtcagctctgttcgagatggccagcaaaaagtactctcgacagaggtgtcttggcacgaggaagctaattaagagggaatttatggaatcttctgatggtaggaagtttgagaaactgcaccttggtgaatatgaatgggatacctacactgaggcatttaatcgtgcatgtaatttttcttctggacttatcaagatgggccacgacctagatagtcatgctgctatcttctctgatacaagagctgagtggatcattgctgctcagggatgcttccgacaaaatttaacggttgtaacaatatatgcatctcttggtgaggatgcattggtgcattcactaaatgagacacaggtttcaactctgatatgtgattcgaagcaacttaagaagatacctgcaatcagctataaattgcagagtcttaggcgtattatctatattgaggatgaacctgtcgaggctgagacactgaaccaagtgaagcatttgacaacattgtctttcactgaagtagaggagcttggcaagacatctcatgttgatgcaaggttaccttcaggctctgatactgcagttatcatgtatacaagcggaagtactggtcttcccaagtggtcaaagctttcacttgacattgcttataaaatatgcataccaaactctgatgctagtgcactaaaatgtggtgtaatgatcacacatggcaacatggtggccacaactgcagcagtcatgacaatagtcccaaaccttggcatgaatgatgtttatctggcttatcttccattggctcatgtctttgaactagcaggggagactgtcatgttagcttctggcagtgccattggatatggttcagcattaactatgactgatacatcgaacaagattaaaaagggaacaaaaggagatgtttctgtactgaatcctactcttatgatttcagttcctgcaattttggatcgtatcaaagatgcagtatttaagaaagatcatgagctcgctgagaacggaggactgacaataaaagctgtcttgattttttcatataagcgaaatattgcagcaattgaagggagttggtttggatcttgggcaccagagaggatgttatgggatcacattatttataaaccaatacgggcaatgcttggaggacgtctaagatttgttctttgtggtggtgcacctctgtcaagtgacacacaaagatttatgaatatatgtctaggtgtcccagtgggtcaaggctatggattgactgaaacttgtgctggagcagctttcactgaatgggatgatacaagtgtgggtcgtgttggtccaccacttccttgttgctatgtgaagcttgtctcatgggaagaaggtggttacaagatttctgattctccaatgccgagaggagaggtcgcggttggtggacacagtataacaaaaggttatttcaacaatgaagcaaagacgaacgaagtatacaaggttgatgagaggggcatacgctggttctacactggtgatattggtcagttccatcctgatgggtgccttgagattattgacaggaaaaaagatatagtaaagcttcagcatggagaatatgtgtctcttggcaaggttgaatcggctctagcaacaagcaactatgtggagaacatcatggtttatgccgatccatttcataactactgtgttgccctggttgttccagcgcaccaggccttggagaagtgggctcagaattccgggatgaactatgaaggctttggagagctttgccaaaacgaccgagcaattaaggaggttcagcaatcgctatcaaaggccgcaaaagcagcgaggctcgagaaattcgaggtgccagcgaagatcgtgctgttgcctgaaccgtggacgccggagtccgggctggtgaccgcagcgcttaaactgaagagggagcaaataaaggccaaattcaaaggcgatctggacaagctctaccactga

SEQ ID NO: 20402 - DNA, 354 bp, Zea mays
  Peptide Sequence Number=SeqID_63777
atggtgtttacagtctcttgttggagtgtccccaccacttatttagcggctacaggagcacgctacacgctgcagcggtgccccctatggtgcatgccaaatcatggtgaacacccattgtgcaaaatcgatagctgcatgaaatatagtgaactaaagtgggttcagcttgaagggccaacttacaatgtttgttatacttttttgcagattgatgtcatgtccaagttcttcaagctgatgatggcttactgtgtgcttgaggttcttcgacctctctatgaatcccctaagataccggcacaaaagataactgttgcgatatgtgtcattgatcaatttcgttgttactag

SEQ ID NO: 20403 - DNA, 741 bp, Zea mays
  Peptide Sequence Number=SeqID_63778
atggggaagcctgtcccatcactcctcatgctcctcctcagccgaggcggggtcccactcgacagtccaacccggtggcaagattacaatggatcaagcagtctcattagctgcgagaagcagacgattcgaatcgagtttttttatccttgcaagaacagggctcaccgccttggcgtacaatgcctcactgaccccgactgccgtcgtgcagtgaccgcacttgtacccaccataaccggaatgggagaccacgtctcaggtcgcgtgaggggcaaagtctactgccaggtcctctggtgcaggctctggtgctggatctggggctacctcctgagcagctccttgctccggcacgaggacatattcttcgtcagcaaggcgggtgttctcgtcggcggcgagtgtaccggccaaaccacggcgatctggttcaatccaagggcacgcggggttatgaactccggcgaccgtggactggcctctccggcgaagcaggcttcgattcctcgctcggggagcttcaccgaggcgcgggcgcgggacagggcgccggctggccgttggcgcgacgcggggcacgcgggggcgcgcgcgggcgtgctctggcgagctcagagcgcgtcgaacacgtggctcgttgcttctgcccatgttcttccctctgctgagcggccaaaacgtacgaatcttaccctatcgcctgtgggagatctcttccctgcacctagagctacctag

SEQ ID NO: 20404 - DNA, 699 bp, Zea mays
  Peptide Sequence Number=SeqID_63779
atgacgaatgggcaggtggagcgtgccaacgttcggcaagcggtggatgaaagagctaccctcggtggtctggagtctgaggacgacgccgagccgatccacgggtttctcgccactctttctagtctatggggccgaggccgtcctacccacagacttagaatacggttccccgaggacaaaggcgtacgacgaccgaagcaaccagaccagccaagaagattcactggaccagctcgaagaagctcgggacgtggccttactacactcggcgcggtatcagcagtctatgcgatgctaccacgcccgaatggttcggccccgaggcttccaggtgggagacttggtacttcggctgcggcaagacgcccgaggacgccacaagctcactcctccctgggaagggccgttcatcatcgccaagattttgaagcccgggacatacaagctggccaacgatcaaggcgaggtctacaacaacgcttggaacatccaacagttcagacatcggcggagggagcagcagcaccctcggtgtcgtttccaccctcggcggaatctggcccagcctcagacggcgacacaggtggaaggatctccacctcgaaggaggacgccagcaccgcgcttaggccctcacggccaggctctccgcaagggttccagcccgagcagacaccccggctagccgctccgtag

SEQ ID NO: 20405 - DNA, 1026 bp, Zea mays
  Peptide Sequence Number=SeqID_63780
atggcgggcggtggagagctcgtcggaactggagtttttgcttggggcgtgaggcgaagtgaagtgtgggctgctgcgcaccagagggtgatctccgagcgccataatgttcgtagtgcatatagtattgatatcctgcgctgcttcctcggtaatgcacgagtgatggcggcgcgccttatccgcaataaatggggcggccgcgcggcccagaggccttatgttaggctccacccgctggtttacgtcacgggcagtaggccacgtggcagcatcgggtctccgcctgagcgggtggcagaatcgtacacgatatggtccagacacgtgtcggctccggacccccgcttggccttgattaaggcctcggtattctttgtcccagaatcttgggaccctgctgagagtggcccagaccccacacagaggggtccggaccccatcctaggggtctggattgcgcccgcggtggtcctggaccttatccgaagggtaccgacagtggcccccgggcccacctcaggggacgatacgagcctgcaggtggggccaaagcttgattggcgattggtgtgccgcttccgtgcgtttgttgacaaaccgacgcccaaggagtacgactcgtgggcccgggctcccatgtcagatactgggccattgttttcggcagagatgaagaggcgcactagcacaggcggtggttcgctcctcgtgtggcggttcgccttcctcgcactcggagactcgcacaccagttgtatgacttgtgggctcgagcccccgtgtcagaggctgggttgctttggtgcgcatcgggcgagattttctgcggcatctcggggcgcgagcaggagagtcttccttgaaaagggattcaccccgcgtgcagcagttacgcttttgcattctctccactcgctgcgccctttcgtcttcgagctctctgcgcccctttgcattctcgttcctctactttccgccgctgtagtctccatggcttcgcttggccaacccgaccgcttctag

SEQ ID NO: 20406 - DNA, 456 bp, Zea mays
  Peptide Sequence Number=SeqID_63781
atgcagaagacacttgaagatctccaggcggagcagcgcgtcggggtccagcgcatcgccgcatggatcggcgaggcgagtacgacactggtgccgctaggggtgagacccatcccggtgtcggagctgccgacgtccatctccgacgcgctcctggccgagggcagcaggctctgccgggcggtgatcgagtacatcttgacgtgcttccggagccatgacccggccatctccttggagccggtgatcgctagttcggtggccgacaccgaagacgccgcccgggagagcgtacaagcttgggaccccaattctatagacgatcgacttgaggaaagcgacagcagcaccctgggtgatattgaccacaggggtggcctctggccactttgtgaacttgtcaatggcgacaaagaggaaccggtacccgccgacggccctggggaatggtcctag

SEQ ID NO: 20407 - DNA, 1203 bp, Zea mays
  Peptide Sequence Number=SeqID_63782
atggggatgatccgcaagattaatctaatgggtgtgcctctgcaggtagaggatcttctctttaacattgacaggaaaaagcaaagaaagagaggatgcttcgcatgcagggtgatggaccatttccgggacagatgtccaaatatggctgaacccacaaaggagaggagcaaaggcaaggcgcttacaagtatcaaaacttgggatgactcttcgagcgaagatgaacccctaaggacacacagacatcgatcctcatcatggtcatcacgcaagtgccttatgtcaagagaaaaatttgaaacatttgcaaatttaaattgtgtcctatcaaccaaaattgagcaattagagtctagtgctccatcctcagctaccgatgatgaccttactaaaaagaatgaaaaacttaaggctaagttagctagctctcaagaagccattgaaaatttgctagggaaaatggaaattgttagcatacacaatgatgagctaactactaagctagaaaacattggtagcaccctagaagtatctttggttgaaatgctagaaattattaagaaagatgcttctacttcttgctttgatttaattgatgattataacgcctgcaatcaagttcttgttaagaatcctgttatagaaacatgttcggatgagattgcaatggagaatgagcaattaaagcaagaggtggctcgccttggcaaggccttgtatgacaagaaaagcaaagccaaacaaatccaacctcctcaggataacaccactgctggagtgaacaagactgtggagggcgaaactatgatttgtaggctatgccacaaggaaggccacaagtcttaccaatgcaaggtgaagatcggggataaacaaaagcaaaagctaaagcaaaagccaacaagcaaaatctctaacacctacatcaataaggtggataaaaagactgctacaccatacttgatcaagaagaaaaagaatggaaaggtgatagcaatcaaggccaacaagcaagtctacaaaggaaaaggggccaaacacatttgggtgccaaaagagattatctcaaccatgaaaagcaccaagcagatatgcgtatctattgttcttgtatctagtttttaccttacatgcctagttttacatgtgatatttacttttgatattaactacatgcatattaggacaatcatatggtag

SEQ ID NO: 20408 - DNA, 405 bp, Zea mays
  Peptide Sequence Number=SeqID_63783
atggggctatccactgcggcccgagcctactggcgctccatcgagcacgccaggctcggtgggtcggatgactcggaggaggtctcctcgaaagaggtggactcctccgactcctccaaagagtggagcagtggcgagggtgatggcggcgaggacgacggcagcagcagcaacaacgacggcaagggcggtggcggcggtgacggcgacggcgaaggtggcaacggcgagggtgatggcgacggcgagggcgacgacaaaggcgacaacgatgacggcaagggcgacgatgacagtgacagcgacgacaagggtgacagcgacggcagcaagggccacgacgacagtaaaggtgatggcgacaagggcgacggtaaggccggcggcataatgctgttggtttag

SEQ ID NO: 20409 - DNA, 543 bp, Zea mays
  Peptide Sequence Number=SeqID_63784
atgaccccattagagatacgccacagaaacagtgtgtgggttgaggatggtcagcgtataaatgagttaagactgacatccgacatttgcaagacgagcttgccgaacgggatttggcactcgattgggctatcaacttacgttgcattgcttgggaccgggatgccaaagctcgagcccatgccatcccgaactcgtgcacatgacgacgcgggaacatcccgtggtcaagaagatacacccaatccaccgccggtaccgcccacgttggccgaggctatcgctgccttggtcaccgcgaccacttacaacacccgcttgctatgtgaaatggcaggacatcaacttcagcaacaaggcgggagggcttatccgcagggaccccgtgaaacttcgtacctggatttctcggaaacccgtcccccacttttcgttaaagatgaggatcctcttgaagctgacgaatgggtacgggtcattgagcagaaatttggactgatccgatgcacggagacccagaagccattttttgcggctcagtag

SEQ ID NO: 20410 - DNA, 381 bp, Zea mays
  Peptide Sequence Number=SeqID_63785
atgtaccaggaagtgttgtggcagaagagaggtcgtcctcgggagttatatccggatgtatctaagattggatgtggcgtaaactatatggcagatgaggcacatgcaagatacgttcaggaaaaattggcgacggtggagctgatggaggaggaggacgacgacacatctaggttgagtgagcttatcactctcgcagaggcaagattacatggggaagaggacgacacatcaaggttgagtgagctcatcgcactagctgagtcaggattacgtgctcaagaggaggacgagtttatgtctcaggccgccgaagtggtagaggcggagaatatcttccagcatttgacgagcttcgctttgctctcttgctctttttag

SEQ ID NO: 20411 - DNA, 1806 bp, Zea mays
  Peptide Sequence Number=SeqID_63786
atgacctggccaagctccagccgccgctgctacacctcctcggcctgggaagccacatgctcctgggccgacgaagcctcttttcgagccgacaccgcctccgtccgcgctgacaccgctacctccggcttcagctcatcgcagagcggccgaaggtatgaacaacctccataccagagggcctacgggataacaaactccaggtggctcgccggcgaccgctccaccggcagcgacaacgacctccgcctcgggcggctaaacagcagcagcgatgacctcagggcaaacgctgctgtgaaaaggccctcacccacgtccccacacgaggggcaaggacaagccagcaaagccaaagagccggaggtccgaccgcaggtggtgccgacggtctcgtcggcagagacaacctcctctagctgccaacacctcagcaccgacgacagcggccacttgcgcgccagcgccacgccgacgaatggcggtcgccccagcctgcaccggcagatccccactcaagtcctcgcagacgggccgacgctagcctccgcgcggaggcatcgtgccggagtgaggacaagacaatccaagaacacgaacgccgccctcgcggcgtacgacgtcttgtacgatcccccggtgctgttggcggcacgggaagggccacagacatgcccgacctgcgcgcggcgcgacagtcgcccgtgcggtggacggacagccacgcccggacgaagcggcaggaggctgcgtcggaagcggcgccagagccagctgagccagcatgccaggcacgctatagctgacaacgcttgcggccgaccgggcccgcgttatcgaaggaccgggaaaggggatatttcgaaaaggatccttctcagcgaaggaaacgggcccccgagccctcctactgatcaggggttcgaaggctggcccctcggaagggttcgacagccgccccagagcactcgaggtccgagcccattactgatcaggggttcgaaggctggcccctcggaagggttcgacagccgccctagagcacgcagagtgagggatgaccctgggtacgtccgttacatggccgaggctcgggctacgctcccgaggtaccctaggacatttccaagaccagcgggaacgatttgtaatggaatcccaccggagggaggcatcgagccctcggaccctatcgaaagggtccgggtccagcaaatcacctgcagtcacttcgccctttcgctgaccgacctgacaggaaaacagcgacgctcgccccgctccgactgctgtgccacccaccggggtaagactgacaacagccgagttcagcctcgggcgctgcaggaagctccgcctcgcccgaccttaggcctcggcctcgggaggaggtctccgcctcgcccgaccctaggactcggcctcagcctcggcctcgggaggaatcgcgtcctcgcccgaccccggcctcggcctcaggagaagtctccgcctcgcccgaccttgggctcggaccgaccatgccacaggggatacatcattaccctacccctagctagctcaggctacaagggaacaagaccggcgtcccatctggctcatcccgggctcaggcacttcttcgacgaccacgttattgcgtacacagggctcaagcacttctccgacagccacgttggcatgtacacagggctcaggcacttctctgccagacacaggcagcaacacatactccagcaggtcatgcctcgcgagtgccaaaatacagtcgtttctgcaatgggtcccaccagacgacatggatag

SEQ ID NO: 20412 - DNA, 633 bp, Zea mays
  Peptide Sequence Number=SeqID_63787
atggaggctcctccgaggtcgaggtcgagtttgtcttccaaggccgaggtcgagtccgagccctggtcgggcgagaggagaccgtcggctgaggccagggctgagtccgagccctgggttcgtcgtcttccggggctgagccccgagtccgagccctggggtcgggcgaagcggagttcgtcgtcttccggggctgagcccgagtccgagccctggggtcgggcgaagcggagttcgccgtcttccggggctgagcccgagtccgagctctggggtcgggcgaagtggagttcgtcgtcttctggggctgagcccgagtctgagccctggggtcgggcgaagcggagttcgtcgtcttccggggctgagcccgagtccgagccctggggtcgggcgaagcggagttcgtcgtcttccgaggctgagcccgagtccgagccctggggtcgggcgaagcggagtttcctatggcgcctgaggcaggacttggctgctgtcagcctcactctgacgagtggcacagcagtcagagcggcgcaggcggcgctgtcctcttgtcaggccggtcagtggagcggcgaagtgactacggtcacttcggctctgtcaactggagggcgtgcgtcaggataa

SEQ ID NO: 20413 - DNA, 999 bp, Zea mays
  Peptide Sequence Number=SeqID_63788
atggctgccccgcgaaccactcaccccgtcgcattaactccgcggcgggacaggcggcacctttggcaggagaagcgaggaccgagaaagggggataccccgaaagggatccttctccgcggaggaaacgggccccgagcccccctactgatcagaggttcaaaggctggcccctcggaggggttcaacagccgcctcagagcgctcgggctccgcgcccactactggtcagaggctggccctagaagggttcacaaccgcctcagacgcagagcaagggatgaccctgggtacgttcgatacataaccaaggctcgggctacgctcccgaggcgccataggaaactccgcttcgcccgaccccagggctcggactcgggctcagcctcggaagacgacgaactccgcttcgcccgaccccagggctcggactcgggctcagccccggaagacgacgaactccgcttcgcccgaccccagggctcagactcgggctcagccccagaagacgacgaactccacttcgcccgaccccagagctcggactcgggctcagccccggaagacggcgaactccgcttcgcccgaccccagggctcggactcgggctcagccccggaagacgacgaactccgcttcgcccgaccccagggctcggactcggggctcagccccggaagacgacgaactccgcttcgcccgaccccagggctcggactcgggctcagcctcggaagacgacgaactccgcttcgcccgaccccagggctcggactcagccctggcctcagccgacggtctcctctcgcccgaccagggctcggactcgacctcggccttggaagacaaactcgacctcgacctcggaggagcctccatctcgcgcgaacgcgaggggtcggaccgaccacgtcacaggagacgccatcattaccctaccccaagctgactcaggctacggggaacaagaccggcgtcccatctggctcgctccgctaa

SEQ ID NO: 20414 - DNA, 822 bp, Zea mays
  Peptide Sequence Number=SeqID_63789
atgtctttgcacccccttatgcatcgcgtctttccaccttctgagcccccggatggggaactctcgcaatccttccgccttgtcattggaggaacgcaacttcgcggaagttggtacctttcagccatcgttcggcttcaaggattttcatcatgcagcccggccgcatcccctcgccggcggtcacccaagacggtgacctccagttcgatggcggggaaaggcgagtcgggctgcgatcttgatcccgccctcagcttcaaggatgttcatcatcctggctggggcgggggccgggctgagccggagctctacctcccgcgtgggttcgtgggtcagcctctccctcaacattcaagggagagggcgctcagcggcccagcgggagggtcggacttcgacaacgcggggctggtcgacggcggggcgtcgtcagcttcagcgcgttgggctcgctggctcggcacgcggtgccccctctcgccgcaagggcggttgtcgcgccgcgcgcaccggaggaccgcccaagacgtcgcgcgctgcaagggcggcgttcgtgttctggggctatcctgcctttgccccggtacgacacctcagcacggagattggtgctccgctcatccaggaggatccgagtggggatctgccggtgggcagatggctcctgccgtcggtgcggaggcggcggctggagaagtcctcgtcgccgacaagatcaccgccaccatccgcgctcgaggcctccggctctttgtacttgtcctcgcccctcgagcgtcggcgtgggcgaggtcaaggttgcagcggcgtctgccctga

SEQ ID NO: 20415 - DNA, 165 bp, Zea mays
  Peptide Sequence Number=SeqID_63790
atggagctcgagatcctaggcatgaatttcgggtgcgtcctcgcggctctgtccgacgccaagatccccgacaagggctgcctgctcccgctcatctctaagctgctcggctacgccatcgtcgccgcatccaccaccgtgaagcttccccagaattctgcgtaa

SEQ ID NO: 20416 - DNA, 75 bp, Zea mays
  Peptide Sequence Number=SeqID_63791
atggccgtctcctccgtcgccacggaggttcagtcgcagcttgcgtcggcaatggggtaccctcaagacgcctaa

SEQ ID NO: 20417 - DNA, 520 bp, Zea mays
  Peptide Sequence Number=SeqID_63792
atgtctatgctcctttctcttcctatgatctcttacaaagccaaaactttcttgttcttccatgttgcttgtacacttcctatagaagcttttatgttgcgcattagtactctactaattattgcagaattggacatattaagaagacgtgggcctgacaaaagattttatacttctcttttctctgcagtaaacgttactggaaatggaggattgttggatgatatttccaggagtgttcgggatcttctgggttccttaggtgttgcaatgtctggtggtgtcactaacacggcattttcggttcctttgactagcacaccagaagggcccaataatgtgcctggaagaactcagccaatgaacccagcacaacctggattctcagttctaaatcatcaaatacaagtaacacaacttcatccgccaggagctattcctcgcaatatgattattccagattctttgacaactctttcggagtacatggatcgcattgacagagtactacagaataatg

SEQ ID NO: 20418 - DNA, 213 bp, Zea mays
  Peptide Sequence Number=SeqID_63793
atggctgaggatgcttctcacggggccagcagctcgactgtgatacctgctgatggtccagagtctaccatcgagatcaacatcaagaccctggattcacaagtccacaaacttcgcgtggataagaatgtgagaattctcctgcctccttcacattgtttatgtgtgtctatctgcttatcggcttatttgctaccgaactcgactccatag

SEQ ID NO: 20419 - DNA, 264 bp, Zea mays
  Peptide Sequence Number=SeqID_63794
atggcggcgacaatcttcttctttctcccttgctctccctttgtttctacgcgccgttgtttggggagcagcgattccgcttttatactccgaggagcacgatcggagaaatcggagtccgagcccaaaactcgcgcgggtggtttggtgtccgaagatctcagcatggaggagatgcgcgcgaagctattgtggtcatttcgcgaggtcaagaacaggtaccgcaagataaagagcatgaaggatgtcgcaatgagttcgtga

SEQ ID NO: 20420 - DNA, 426 bp, Zea mays
  Peptide Sequence Number=SeqID_63795
atggctcgcgcacgcgtaacggccgccccgccaaccactcgccccgtcgcattaaccccgcggcaggacacgcggcgcctctggcgggagaagcgcgcgacgcttcgccttcgccgtaataaccgcgtcaaaaagagggaccgggaaagggggataccccgaaaaggatccttctccgcgaaggaaccgggctccgagccccccctactgatcaggggttcaaagactggccctccgaagggttcaacagtcgcctcagatcgcgtgggcccgacacccactactggtcaggggttcgaaggccagccccccgaagggttccatggccgcctcaggctactcgggctccgcgcccatactgatcaggggttcgaaggctggcccccgaagggttcacagtcgcctcagacaccgagcgagggatga

SEQ ID NO: 20421 - DNA, 261 bp, Zea mays
  Peptide Sequence Number=SeqID_63796
caagccccacaggatgaggcaccccagccgttgcctccaccaccacccccaatgtcagtggagcagatgttcttcatgcagacccaagcagtgcaagcaatcgggcaaaccctggcagccatgcggcaagctcaacagcaacctcagccccaaccacaagtgcagatgccacagatgccgagagacaagcgtgcaaagttcatgagaggtcatccccctgtgtttgcccactctgcagaccccatggacgccgaagactag

SEQ ID NO: 20422 - DNA, 537 bp, Zea mays
  Peptide Sequence Number=SeqID_63797
atggatactgagccccgacatgtgggcccaggggcaaaacagaaggaagtaactaacgcctataacgcctgggcgatctccgagcgccataatcacgggcgtactgcctgccaacgggatggacaggcacgccgcctgcgggaaggcctggtcgcagcccgtcagcggagtggacagggcacattaaatgctgaggcggcacattgcctgccagtggattggacagggcttattaaatgccgaggcggcacatcacctgccagtggaatggacaggcggcgcgccttatccgcaataaatgcagaggtcgcgcattccataggccttacgtcgggctccgcccactggcttacgtcacaggcagtatgccacgtggcagcatcgggtctccgcctgagcgggaagcagaatcaatcccgggaccctgctgggagtggcccaaaccccacacagaggggtccggaccccatcctaggggtccggcttgcgcccgtggaggtcccggaccttatccggaggtccggtccgcatatatag

SEQ ID NO: 20423 - DNA, 273 bp, Zea mays
  Peptide Sequence Number=SeqID_63798
atggctctacgtgtgaggtgtcagattccgccgatgatctcatcgctgagatctagtctgataaagccacttaaccaggatcaaataccacaaactcacttgaagagcagcatcccactcgaccgtctaacctggtggcagggtggtaagccaagtcacaccatcaaccatatcctgaagcgtacctgcaaaaattatgccacaagcaaggctgagtatactaatactcagctagacttacccggtgtgaggagtctactcctctacctctag

SEQ ID NO: 20424 - DNA, 486 bp, Zea mays
  Peptide Sequence Number=SeqID_63799
atgtccatatataagcaccaattcggattcgaaattcaaaatcagcaagtggacagcaattggaaaaatgagtatcaggccgcggaccgtccgcccatggaccgcggaccgtccgcagcatcaggaactggacagtccgatcagcctcgcagacagtctgaaatcatcagggcgcggaccgtccgccgccccagcgcggaccgtccgcgacagggcagtaaaaacaggcagtggccgcaaactttggttttggtggtctccgcaagaaacttgcaggtcgctttaaatccaagcgccctcgtggaaatgatgatgactatacaccaaccactgattcagaggcccaatcctcagctgggggcactgaatccatggatgctgaagattttcctcatgttcatcccgattatcccattgatacccaaggctggacttatcccaagcagagattttctatggctgagtactgctctagacggactgtga

SEQ ID NO: 20425 - DNA, 378 bp, Zea mays
  Peptide Sequence Number=SeqID_63800
atgggtttttgctctattagggtttgggtctatttctgtacacatgggtttgttaacgggttcaatggaaacccaacggtgggtatgggaaacccgttgggtacccgaaacccgcatgggtatgggtttgggcaaaattttatacccgtcatgggtatgggttttttagcgggcgtattttttcttcgcgggtacgggtttgggcaagtaatacccagcgggtttttacctgttgtcatctctactcactatgacgttaatgtcgaggtagacccgtcgcacttggatcagaccaacgtcgccgacgatgctctacagcggggacaagggccgcgcgcaggatactttggtcgtcttcgaacgcgctctggtgcataa

SEQ ID NO: 20426 - DNA, 2475 bp, Zea mays
  Peptide Sequence Number=SeqID_63801
atggagcccgcgggggcgcgcaaggagtggcgcgccgtccccgactcctcgctccgctccaatggcgccgaggatgccgcggagcatgggaagctggggcagtcggaggaacgagctatctacgaggaaggggcgggtggactgggcgacttctgtaccatcactattgatgggagcggagggctcagcgaggacatcctgcagcagcgcctgcaaagtgtcgcacggcagcgggaggagctgcagcaagtcgagatcgagttgcgtgcgcaggccattgcacacccgcagatcatcgaggcgcaacaaagcttccaggctgctgccaaggagcatgctgcagctgtggcaaagatcaaggttgttccttttgctctgagctcagtgtttctctaccagtacccagctcaaataagattacatccgattgccctggggttgtctggtccttatttgagaataattttgatgtcctgtattgaacaggagcaattgcatgagcgggagcagtacattcttgaattagaaatgaaactcaatgacaaggatagagaactaaatgctctgaagattgatcatcaaacggtgtgggcaaatcaagatcttctcagagaacagaccaaagagctggcaagtgtcagaagggaacgtgacaactctgaagctgaaagagcccaacatcttaaacaaatccacgatctccaggaacttttgcgagaaaaagaaagccagttcattgcaatagaggaacagcatagggctgctcaagagaacattctttacaaagatgagcagttgagggaagcccatgcttgggtttctcaagttcgagaaatggatgcattgcagtctcagtccctacaagttgagttacgtgagcgcatggagcaatttaatcaatattggattagttctcaacaacagtatgctgaaatgcagcggagccttctccatacaatacaacaactccagcaagaattagctgaggcaagggaacggtctggtgcacaaaaggatggcccacatgtttctagggagggatcagctgaatcatcacttgttcaaagcatagcgaacagcgtgacttcaaatggtagtgcaactgcagatgggagccagcaactgttgaaaaacaatggaagtgtggatgtctctcttaagggcaataatgcctcagctgtacctgttccatctttattgggaataggtggtccggctgcgcatattgctgcaatgcattcttttatgattcatcctcaaggcattcctcaacctttagcatcacccaactctggcattcctcagtttggcagttttcagacacagcctatgattcaaccaaactcacattggccaaatcagcaggaagtacaaattgtctcacaaccacaagatgaaacaaactatcagacatcccaatcaggtcagactgcattgcaacaagacactattaatactgatgagctgtcccccaaggcaagtgagggtggccatccagaccatcttaatgcccaggggaaacaacagcagagccctgcaagtgcacctactgaatcaactcatgaacttactgttgttgaaacaaacatagctgaacatgtaccttatgatgaacaacaaaaaaccttaaaagaacaggattcactatcaaatataaaaagccatgttggaagagttgagcctcaagagcaaaatgctgaatccaaggtttctacggttgaaagagctgcatctgacaagcaatctgaacctcaatctagacagcataaaccttcaaacttccctccaactacccagcttaacttgaaaaacagtgcaacagagaatcctaatgttgtaaatcaggttgatacaatgaaatcagttacaggtggttttggttcacagttacctcgtgtacctaaggaacctgctctcctagatgagagatctctattggcttgtattgtacgtgcagttcctgctggacctgagggtggaatcaggattagctcaactctgccaaataggcttgggaaaatgttggctcctcttcactggcatgattataagaagcaatatgggaagcttgatgattttgtggctagtcgtccagagctgtttgtgattgagggagacttcattcaccttcgtgaaggagcacagcagatcatttctgctactacagctgctgcaaaaatagctgctgctacagcatcttctgccccttactcatccttactgccttctgttgctgttactcctgtggcacaaagcactcggcaaaagaggggccctgcagttgattccagatcatcaaatgcaattctttctggaaatggcttcacagatcaatttaacatcattcagggggttagtgacgtacctgtttcaggcaaagtaagaaacaccctagataatggcttcttagggttatggtggaaagcaacaagggaggtcaactgggatggcttacctttccagaagatgaagtag

SEQ ID NO: 20427 - DNA, 384 bp, Zea mays
  Peptide Sequence Number=SeqID_63802
atgccagaggttgccgatgccatggatatggcaaaagcaaagatcacttcgggttttgaagttagagaaggggatgatcttgcatgggctcatgtggatgatgcaatcggtgcttctagttcacttcaaggtcgcaactttccaagaagagcccgatatgagtctgtttattcaaggcgttgtcaagctgctgctacacaggaggagagagttatggaagaggaagagcaaagcaacaagggcaatgaacaagatgatgaagagtacatgcctaatgatgatgaagtggatgactttggtgaatccccacatgacagtccaactcaagctggtgctgattgtgaagaaaatgcaatggatgatcttgatttgggagatatttag

SEQ ID NO: 20428 - DNA, 588 bp, Zea mays
  Peptide Sequence Number=SeqID_63803
atgaaagccatttggttcaatagttgttttttttggggggggggggggggggggaacctattgtcaacttctcttagtgacaagtggccccatccgtcagcctcattcttccttcggatggatacccagctgaggtggcgcttcccgtatggcagtcgagatcatgctcaccaacggcaaaaggcccacgctcgtccacatggcgaccaaggacatggtcaaggggatagcctcacactgagaaggctagaggagtcgccagatccaaccacgggagaggaaggagcatcgcccaccgaacagaggatgagctgttttcagtcaaatgcaggccttcacaagaggttggggcagggcagctcagattggggcaaggcagcgcagatgacagcaaagcgatgtcgatgtgtaaggagacgaggacggagatcctcctatggccagcaaatggtgacactctggattcttgcatcagtgctcctcctgcaggttccagaggtcctgggctgggcggcgatgcttctgctatatgagctctatggctcctatgtgagtctagggcagaagtacagggcttcattgctataa

SEQ ID NO: 20429 - DNA, 843 bp, Zea mays
  Peptide Sequence Number=SeqID_63804
atgggggatacccgtcgtcttttcgcctcatcgttggaggaacgcaactccgtgggagttggtacctttcagccatcgttcggcttcaaggattttcatcagccagcccggctgtaccccccccccccccccccccgccggcggtcacccgagacggtgaccaccagcacctgggtggggagaagcaagccgggctgcgatcttggtcccaccctcagcttcaaggatgttcatcatcctcgctggggtgggggccgggctgagccggagctctacctcccgcacgagttcgcgggtcaccctctcctgcggcgttcgagggagagggcgctcactgaccccgcgggcggcccggacttcgacaacgcggggctggtcgacggcgggcgtcgtcacccccagcgtgtcgagctcgtcggcttggctcccggcgggccctcctgccggagggcggctgccgcgccgtgtgcacgagaggaccgcccaagatgctgcgcgctgctagggcggcgttcgtgttctggggtggtcctgcctttgcaccgggatggcgccttcacgcggaggctggagtccctcggctcggtcggccttgttgtctggggctcctttggcttagttaaagggaccccttggccgctcttcgacgagccgaggccagggccgaggcctcgggtcgggctggcgcccttgggagatggttggccgaggccccaggggcgtggcgatgacgtcgtcctccagaaaagggatccctggaccgcgttgccgtccgaggctaggtcggacctcgctgaaggtgtcgtcgatgccgagggtgctactgcctccttccagcgttaa

SEQ ID NO: 20430 - DNA, 843 bp, Zea mays
  Peptide Sequence Number=SeqID_63805
atgacggtggcaggcggacgggagcagcggtcacgtcgtcagccaagctcacgtcccatccgggggcagcaagagaaccccctctcacggcgtgaagacaacgcgcccgtgatccgttcctcgaacggctcgcgcacgcacaacggccgccccgccaaccgctcgctccgtcgcattaactccgcggcaggacaggcggcgctcctgggaccgggaaagggggataccccgaaaaagatccttccccatgaaggaaccaggctccgagcctccttactgatcagagctcaccggagacaccatgttcggcgcccatcaagggcaacatggcgctttccccccctcctccttgtggaaaggcgacgcaggggcgtatgtaaaaaagccgagtctgtccctgatcgccctgagcagaggctcgggggctgctctcgcaaacccggctccggccgaacagttgacagcgtcaacataccagcccgagaacttgggccccgaccgtacacccgggctactgccagttcgcatgagggaacgaccagaccagccgaaacattacgcaaggcattaagacctcgaaggagtgaaaccactcctccgaggcctcgggggctacacctggcgggtgcgctcgcgcgcacccaccggaacaaaatgcaaccgagaaaggctggtccccttgcaaaaaagtgcgacgaaagcctccaagcgagtgctaacactcccttcgaggctcgggggctactgtcggggaccataattaggggtaccctcaagactcctaattctcagctggtaacccccatcagcataaagctgcaaaggcctgatgggtgcgattaa

SEQ ID NO: 20431 - DNA, 192 bp, Zea mays
  Peptide Sequence Number=SeqID_63806
atgggtttgaaaatcctgagtacgaagtgtactttcacaagtcttacccgtcaaaggaaaaagactctcaaggatatgctggcctttgggaatcaagatgtcgaagtaaaagttgttctctactggaggattctaagtctgggagacaacttcttcctctactacagattcttcctcgtgttctatacatga

SEQ ID NO: 20432 - DNA, 702 bp, Zea mays
  Peptide Sequence Number=SeqID_63807
atggaggggcgcgtaaccacggggcagtcgcacgctcctcctttgggttggtctttacgacatgcggggcttggcccccgtgtcataagcccggctgtagtcccccgccggcggccacccatgaggatgaccaccagctttgtggtggggagaagcaagtcgggctgcggcttccctcctgccctcagcttcaaggatgttcatcatcctcgctggggcgggaggcgcgtcgagccagggttctgcctcccacgtgggccagtggcccacttctttctccagcattcgagggaggagaggggttcaccagccacgcgaaggaggcgaacttcggctacgcggggccggccaggtgcaggcgctgacagctgccgcgtgcctggcacttggcctgggtggccctgccgtcgcctccgacgttgccttctgccgtttggccagggcatggctatccgtccaccacacgggcgacggtcacgccgtacgtgggtccgccacatccacggcttctcccgcgccgtcggccgtacggggggaccgtccaagatgtcgtacgctgcgggagtggcggcgacgttcttggatggtcttgtcctcgctccgtgggaggacgggagcgaggacctcttggcggaggtcgttgtcgctgctaatgcagaggtggtcgccgccgctggtgaggcagcccggagcagcttctag

SEQ ID NO: 20433 - DNA, 297 bp, Zea mays
  Peptide Sequence Number=SeqID_63808
atggcgcttcctattgacgtggctggcctgcgccctaggccgggcgacgtggaggttcctccgaagccgaggtcgagtctgtcttccatggccgaggccgagtccgagcccctgggtcgggcgaggcggagaacgttcggcagaggccagggcggagtccgagccctggggtcgggcgaagcggacccgagtccgagccctgggtcgggcggagtggagttcgccgtcttccgggacctagcccgagtccgagccctgggtcgggcggagcggagttcaccgtcttccgggacctag

SEQ ID NO: 20434 - DNA, 182 bp, Zea mays
  Peptide Sequence Number=SeqID_63809
atgaatgctgtgcttcacacctactcgtctgtttatatagtactgcagggtggggccgctacgcgctgggaaattgaatcgtttctcgacaacgagctcagggaagcatttgagaacaagtccccaacaatatcgctggtcttttgtgagattgaagttgctattatgctggtgatatacag

SEQ ID NO: 20435 - DNA, 171 bp, Zea mays
  Peptide Sequence Number=SeqID_63810
atggggagtcatgatccccgggcaaaacgggaatcacggctcatgggtaaagtgtgcgatctctgcagagggttagaaactggttgcctttggtgcagtctatgctcaggtaaacaaggcgtcgaggcggatctccaggagttccaggacgtcgacgagttcgaggattag

SEQ ID NO: 20436 - DNA, 630 bp, Zea mays
  Peptide Sequence Number=SeqID_63811
atgggggtcatctgtagcgctaccgttcgaggaagcggtctaccgctcttgtttgaagacctaaatgttaataatggtgtgtctgtctgtctactgcttgtgtatgtctgctactcatgttggatctcttgtttcatattttgggatgtggagataatcttcgtgtcgctggaccgcgacgaggccagctttcgggaccacttccagggcatgtcgtggctcgcggtaccgtttgacgctgctggcctactacggcagaagctgtgcgcgcgcttcgccatcgagcgtatccctgcactgatccctctgtcagcgtcagcgacgtcatccagcgggctgggatgtagagaggacgcggtgaggctggttggcgagtatggagtagatgcgtacccgttcagtgcgcagaggaggagggagctggagagcatggacgatgccaggagagaaggaggccggcttcaggagcttcttggctgcgaggagagagactttgtcatcagtgcagatgacataaatatccctatagctgaccttactggcaagacagtggaaaaaacatcggagcacactggtgcccaccttgccatgtcttcaccaaacagctcaaggaggtgtataacgagctaa

SEQ ID NO: 20437 - DNA, 507 bp, Zea mays
  Peptide Sequence Number=SeqID_63812
atggccaaggctcgggctacgctcccgaggtacactaagacatttccgagaccagcgggaacagtttgtaatggaataccaccgaagggaggcaccgagccctcagaccctatcaaatgggtccgggtccagcgaatcacccgcagggtaagactaacaacagtaagtcacgtcctctcccgagttcagcctcgggcgcaacagggagctccgcctcgcccgaccccagccttggcctcgggaggagtcatcactacgcccgacccaggcctcggcctcaacctcggcctcgagagaaggtctccgcctcgcccgaccctagccttggcctcgggaagagtcacaacctcgcccgacctcagcctcgacctctacctcggccttaggagaaggtctctgcctcgcccgacctcagcctcgacctcaggaggagtcaccgcctcgcccgacctcggcctcggaccgactacgctacaggggatacatcattaccctacccctagctag

SEQ ID NO: 20438 - DNA, 396 bp, Zea mays
  Peptide Sequence Number=SeqID_63813
atgcaggcggcatgcaaccgcgccaagtggatgcccttctccgactcccaacacgcccagcctggaggaccaggcccacgcgtcatgcaaccggcgcgccgaatgggaccgggaaagggggataccccgaaaaggatcattccccgtgaaggaaccaggctccgagcctccctactgatcagaggttcgaaggctggccccccggaagggttcgacagccgcctcagatcgcgtgggccctacacccactactggttagaggttcgaaggtcggcccctcggaagggtaccacggccgcctcaggctactcgggctccgcgcccattactgatcaggggttcgaaggctggcccccgaagggttcacagccgcctcagacgccgagcgagggatga

SEQ ID NO: 20439 - DNA, 564 bp, Zea mays
  Peptide Sequence Number=SeqID_63814
atgggggataacccgccgtcttttcgcctcatcgtggaggaacgcaactccgtgggagttggaacctttcagcccatcgttcggcttcaaggattttcgtcagccagcccggctgcaccccttcgccggcggtcacccgatacggcgaccaccagcccctgggtggggagaagcaagccgggctgcgatcttggtcccaccctcagcttcaaggatgttgatcatcctcgctggggtggaggccgggctgagccggagctctacctcccgcgcgggttcgtgggtcaccctcccctgcggcgttcgagggagagggcgctcactggccctgcaggcgggtcggacttcgacaacgcggggctggtcgacggcgggcgtcgtcagccccagcgtgtcgagctcgtcggcttggctcccggcgtgtatcaccgcccccgtttcttcgtctcccattttcctccacggcaccgcgccgccgccatcttcctccgttcgctgatgggcaccatgcctccgcccatggctagccacgtcctccgtgatggcagcgatgctagaagctag

SEQ ID NO: 20440 - DNA, 765 bp, Zea mays
  Peptide Sequence Number=SeqID_63815
atgaagcatcaagcccgcctccacagcggaaaccattgcacgtcctttgctgactattgtgtttcaatggacaaggatggtggagatacatggttacatgattcttctttcagaatagacagcaaaatcagagcctttactgttgtttatattcttcagacccacgagaagaagccccgtgaatctctgctctgtgcagaatttgcaaaggctattcattacattaacaagagcctatctgatgacaagtgtctaaaatttctgcacatggatctgagtaatctttttcgaaggaaaggcaccaatgtgcttgcactgttgagcaaggtggcatcagatgtgttggatctaactgaattcctccactgtgaaataagtacatcaacaaaatttgatgacatctcaagtgaagaaaaaactgttgccaaatcacgtgatgacagaagtagcagagatcaaactgaatgtgcagctaagttggtacctcttttattacagaagggtgtcctcaggacaaattgtatagactgcttggatcgcacaaatgttgcacaattttcatatggtttagctgctttagggcgtcaacttcatgcactgggacttgctgaagcacataaaattgaattgcatgatcctctggttgattatctgatggatttctatgaacggatgggtgatacattagctattcagtatggtggctctgctgctcacaacaaggttgtgcttctttcttttgtgaatatacaacaacaacaataa

SEQ ID NO: 20441 - DNA, 2100 bp, Zea mays
  Peptide Sequence Number=SeqID_63816
atggatccgccgggctccaacccagatggagcagtaaacatgacgagggcaatgcaggctctgtccccttggctgaaccacccaaggaggacgatcgcccaggtggaaggtctggtgctagcggctgctgcgctgctgctgctccagctcttcttgggcttctacaggcggcggtggcgtagctccttcgccagcactgtcctgcgggcgtcttccaaactcatggaggctctcatcatctacacccttggtacgatgcagtcctccccaatcaagaactcgttgtatcccgtctgggctgcttttctcgtcatggcttcggcgggcaccaccgccgtacaggactatgatttctgtggcagcttctacaacaagtacatggagggtgcagtcgacatcatcaagtacgttttctactggatcatgttcggtctgctccttgatccaaacgcttataccttcaaggcagacctgaacctgcagcggcatcccaagaatcccagagcaagttccaattgcgtcgtcgccctcttttatttcgctttattcacaaagctctgcgaatccatgggtctagcagttgggggatacaacaagacgcagaaatggaatcttttcttccgcccaacgaagatccgtttcggcatacaggccgcagagacggaagagtatgaccctcagagcatgaagggctacgggtatgcagtctgctaccgtccgtttggaggtggactcattaccatcgaccagatatggtattgtctggatgtccgctcctcagcttgtctgaaagacctatgcctgtcccatgctttgtttcggcagctcattgtaaggcgcttctttgggctagtcgtccaacccaagatcatccctgaaataaaagaccatgatttcgtattcaagaaactgctgccctctggatgggatttcgaaagagcgttcaggattatcgaggcagagctgggcttctgctatgatttcttcttcacaaagtactgctacaccttcgtaatgactaatcagctaccggtgccggtcatccagtctttggttttagcaaagatcgttctaatcataaccgttggggtgtttgccgtcaggaattcactggtacttgagacgccaaatccgatcattgaagtacgcatctcaagagctaactacatcatcactctactgcttctgggtattgccctcatagtggagctggtgcatgtggcattttatctgtcatcggactgggcccaggtatcactagccaccatgcacgtcaagaaacaatggtatgaaatcagcccatccatctttggaacagtcatcgctttccttagaagggtcacgttttctggacagctgatgagaaacaggatgaagcagcactcattgatgagaaacaggatagaacagaaagatccagtggaggtttctgatgcagtgaagagagctgttgctagatcgctcatatcaacgtatggcggcaaggaggacgacgccgtagaaacatcgcaatggcaggaccagatgccgttccgtacgtattcttgggcactcaagggcctctctcagctggaagtcattctaatttggcacgtcgcaactgaacactgtgatatttcctctggccgtgctcctactaatcggagtcggactactcctcgagatgatgaccgaggcgttgcagttcatttgtctagatactgtgcgtacttgattggatctgtcccagaactgcttccgtaccatgaagccgatatagcagagttggcacacaaggtgatgggagaacccacggaacaagacgacgacgctcggaatatcttccataaaggcatcgagctcggtaagcagctggagaggatggcggatggggatcgctggaaggcgctgcaagatttctgggccaagacaaccatccatgccgctaagtcgcactacaccaccaagcaacacatgcaacaccttgaaagtggcggggagttcctcacgcacatctgggctctgcttgctcatgcaggcattctctaccttaattctgtgaaaaatgaggatcaggaggaacaagctaatctaggctctgggccttcagctgttgcatga

SEQ ID NO: 20442 - DNA, 279 bp, Zea mays
  Peptide Sequence Number=SeqID_63817
atgccgcgcgcgttcgacgactactatatcgtggactgtggcatcatctcggcaccggaggtgacgcagaggagggccgacagcaatgatcagttcgtcatcctccccaacgtcggggtagctttttgtgctgcaagcgtgtacggtggtgtgtgcctgatggctaacgatgtacgagggaatttcttccggcaggcgtggggtgtgctctcttatgatgaaaccatgaaaatcgtgacatatattaaagtccgcatgatactgatggttgtaatgtag

SEQ ID NO: 20443 - DNA, 252 bp, Zea mays
  Peptide Sequence Number=SeqID_63818
atggggattggttgtctacgagatgggaaaattggaataaggattaacattgccctcctcacgcgacctgagacgtggtctcccattctggttatggtgggtacaagtgcggtcactgcacgacggcagtcggggtcagtgaggcattgttctctggaggacatggttgctggagtgacttggccgtccatcttgccaccgggttggactgtcgagtgggaccctacctcggctgaggaggagcaggagtga

SEQ ID NO: 20444 - DNA, 495 bp, Zea mays
  Peptide Sequence Number=SeqID_63819
atgcggaccccgcaactcagtctcctggcgcgcgccgtggtctgcttgtcactgctgacttccgtatatatcgctcatggctcgcgacgggattcctcctcaactgtccgcggtgctatcgctacctcctaccatgcgccaccttcttccccgcgcatttgtcgggtggttccggccgttgaatcgtgcgaagtccgcgcgccgaaatcggagcgattgcaacgaaccgagcactgcgcgcgggagtcgtgggcgtggatcggatcggcggccgggatccgcggcactgcagccctgctcgcccataaacccgctggtctgcgcgagctccacctccgcgcgtccgaggcgctgaccgcaaccacctacgcggaattccgggtcggccaagctcggactccgcgcgctactgcggggtataaattggcgcgttcgctccataccctcgcgacctcctctctcctcgtcctcgctcgcgacatccctgttctctag

SEQ ID NO: 20445 - DNA, 945 bp, Zea mays
  Peptide Sequence Number=SeqID_63820
atggctgaaaggtaccaactcccgcggagttgtgttccgccaacggcaaggcggaaagactgcgagcatcccccatccgggggcttggaaggtggaaaggcacgatgcataagggagcgcgaagacgtggtcgccttcaagggggtcaccctccttttaaaggcgactctccctacttgcgtccccaatcgtcgtgggctgagtctcctccaacacgctccaaggtcctcccctacggcgtgggggctgggtcccacacgtcatgcaagccggctcagagcagaagaagccaaaccgccgtgcgcggcgcgtgcaaccgcccagcggttacaagcggctctccacttttgcccagaccagcgggcaaaagggcgggcagccatgcaggcggcatgcaaccgcgcaaagtgggtgcacttctccgactcccaacacgcccagcatggaggccaaggcccacgtgtcatgcaaccggcgcgccgaatacttcgtgcacgcaactgcaccgccacttgcgctaccacctcgcctcctcgactgcggaaccaataccgcgactcgaggcgacccagcgcacgacccagcagcgccagcctggcgcgacggagaagcgagcgacgcttcgccttcgccataatgaccgcgtcaaaaaagggaccgggaaagggggataccccaaaaaggatccttccccgtgaaggaaccaggctccgagcctccctactgatcagaggttcgaaggctggcccctcggaagggttcgacagctgcctcagatcgcgtgggctctacacccactactggtcagaggttcgaaggccggcccctcggaagggttcaacgactgcctcaggctactcgggctccgcgcccactactgatcaggggttcgaaggctggcccccgaagggttcacagccgcctcagacacagagcgagggatga

SEQ ID NO: 20446 - DNA, 186 bp, Zea mays
  Peptide Sequence Number=SeqID_63821
atggcacgggttttcccttcccttatccttctcctctgtgctcctcgcaacctgtgggaaacatcggaggggcgccttggcggaaggaatcgggtaccgacttcgagtgggggcgacggccactgccgcgacaacaatttctcaccgtcggcacagttccgctcgacaccgcggccagccctgtga

SEQ ID NO: 20447 - DNA, 342 bp, Zea mays
  Peptide Sequence Number=SeqID_63822
atgagtctgcgaacgtgggctgagtggctattggggcgggacccacagggtgaaattgatttagtaataaaacatatgccttcatcaaaagctctaggtcctcatggttttaatgtcatcaagcttatcacaaagatgcatgcaaatagacttcaatcaggtataaaggttaattgtagtaagtcttaccttcttcccatcaatgtgaccaatgaagatgcaatccaccttgctacaggtttcagcagtcaggaaccttcgtccttcgaagcattatctcccttagaatataatgatcttcagacgaagatcatgaaggacatatctacatcatttcagtaa

SEQ ID NO: 20448 - DNA, 1077 bp, Zea mays
  Peptide Sequence Number=SeqID_63823
atggccggaggaggtgcaacggtgtgcgtgaccggagccggcgggttcatcgcctcgtgggtagtgaagctcctgctctcccgcgggtacaccgtgcacggcaccgtccgccacctcagacgacacggcatttcaggtgacgagaagacaggccacctgaagcgcctggagaatgctgccggaaaccttaggatcttcaaggctgacctgctggactacgacgccatggcagctgcggtcgtcgggtgccaggggaaacaatataatgtgcagctacaaatgctgggtcctgctgttaccggcaccacgaatgtgctcaaagctgcctccagcgcgaacgtccagcgagtggtggtggtgtcgtccatggttgccgtcgagatcagccccaaagattggcctgaaggtaaggtccgagatgagaggtgctggtcagaccgagagttctgcaggagcattgagagctggtacccggtggctaagatcatctcagaggaggcggcgctggcgtacgggcagcaaaccgggctcgacgtggtgactatcaatccagggttggtgttcggccccatgctgcagccgacggtcaacacgaccatccagttcctcatctacttcctcaaaggaggccccgacccggtgaagaacaagctctggcatatcgtcgacgtccgtgatgtggccgacgccatgctgctgctctacgaggtgcctgaagcgaccggcagacacatctgcgcgcctcatgttatcagtgcccgcgacctgctggatctgctgaagagcatgtaccctgactacccttgcattgccaacgagagcatacttgacagagaccacccagcgccgatgacctctgacaagctgaagaagatcgggtggagctgccgaccgctggaggagacgatcgtggacaccgtcgagtgctgcctgcgggctggatttctggaccatctgattggggaggaagagcagggcaaaggccgggaagacgaacggtcggtgtcggggctggtgttggacgaatacgacgaggaggcgcctgctcccacgccctctaccgagaatgagggatag

SEQ ID NO: 20449 - DNA, 359 bp, Zea mays
  Peptide Sequence Number=SeqID_63824
atgtccggtgcaccagaggactccaactccaaactcgtcaccttcgggaaattccagaggcgactccgctataattcaccggactgtccggtgtacaccggacatgtccggtgctccaaggaagagcggcctcaggaactcgccagcctcgggaattcacttcagctgctccgctataattcaccggactgtccggtgtacaccggactgtctggtgtaacagcagggcaacggctacttctggcgccaacggctacctgcgatgcattaaatgcgcgccagcgcgcgcagaggaactttgtgttccaagtgattgagaagagaaagctcactcggtccgagggaccgtttgagagagg

SEQ ID NO: 20450 - DNA, 531 bp, Zea mays
  Peptide Sequence Number=SeqID_63825
atggccgccaccgtgtaccgaagggaacgaggcctgcggcgttttggccggaagaccattaatggagatgaaggggcacatccgagaggagccggaagcggatcaccacttgcgcgtggagaaggcccactactctctacagagttactcgaccaagataatgagcttgttagagatatgtattctcatttgaatctaatcatcaatgagctcaattctattgacatcaataagctaggtgatgcagacattatgaggaagattatctccctactaccacaacaaagatatgggagcatcgtcactatccttcacaacatcaagattaatctaatgggtgtgcccctgcgggtcgaggatcttctctttagcattgataggaaaagcaaagaaaaagaggatgcttcgcatgcggggagaagggccacttcagggacagctgtccaactatggccgaacccaaaaaggggaggagcaaaggctaggcgcttacaagtgtcaaaacttgggatgaccttcaagcgaagatga

SEQ ID NO: 20451 - DNA, 165 bp, Zea mays
  Peptide Sequence Number=SeqID_63826
atggcttctacctgcaagaatactttccttgagagcgtgcatacccgtgagagtcttttccttagtcaggtgaggaagcagcagatttttgttgcttctgtaccaaggtggttcctaatgaagataagcaagagtgaagtgcgggaggaaaggatcctccattag

SEQ ID NO: 20452 - DNA, 2061 bp, Zea mays
  Peptide Sequence Number=SeqID_63827
atggaatccttcgaccaaatgagagtgcacgtaagcggcaaggccgatcgagccgagggactcctacgcctccgggatacggatacctcactcatcaccttccgcgaaaacaccctcagcgttgtttccaccctcggcggaacctggcctcgcctcggacggcgacctgggcaaaaggacctccacctaagggaggacgccagcagatgtcttggccaagctccagcggctgctaccacatcttcctcggcctgggaagccgccatctcccaggccgacgaagtctctttccgagccgactccgcgtctgtccgcactaacaccgctgcctccggctccggctcatcgcagagcagccgaggcgacaacgacctccgcctcgggcggccagatagctacagcaacggcttcagggcaaacgctgctgtgaagaggccctcacccacgtccccacacgaggggcgaggacaagccattaaggccgaagagtcagagggcgccgaccgtgggtttgaacccaccgacaccgcgccggcgaacaacggccgccccaaagcacaccggcaggtcctcactcccgtcctcgccgaggccgccccagaacacgagcaccgccctcgcggtgtacgacgtgctgggcaaccctccagcgcggctgacggtgcgaggaagacctggacgtggccggcccgtgcgcggcacgaccgccgcccggacgaaggacggaaagctacaccctgtccagggagcagcagttcgccttcccccgcatggctggaggacgcctccacagggctggaggatgcctttctcccccaaacgctgggggaagaaaagggttaccggcccacgcagaggcaaccccccactcgacctcctcacttgcaccccttagcgtcacgagcaaaatctccactgacatcctccagggttctccccctacgacatgggggctgggacccacacgtcatacgagctgatccgaagcacgaagaaggcgaaccgccgcacgcgaggcatgtaacagtcccgcggttacaagcgctctcccatcttcgtagaaaccggtggtcgaaagggtggactgccacgcaacaggcatccaactgcaccgcaactgtgcgccccttcggcttcgtccacatccagcggaccagcgcaaaggaagcgggcccgcatgtcatgacccaacagtgccagttaaaggtgacggccatgggccgatcagccccggggcgaggcgagcgtcgcttcgccttcgccataatgatcgcgtcaaaaaagcgggccccgagccctcctactgatcaagggttcgaaggctggcccctcgggagggtttcgacagtcgccccagagcactcggacctcaagcccattactgatcaggggttcgaaggctggcccctcggaagggcttgcccctcggaagggttcgacagtcgccccaaagcatgtagagtgagggatgactctgggtacattcgatacatagccgaggctcggattacgctactgagggcgcctctgggccaccagccgacccctaacgaacggggcacgggcgtccactcggatcacccgttagcagctcactggaaacaccataggctcgggggctgctctcgcacccggctacggccaaaactgttgacagcgtcaacaagccagcttgataacttggaacccgaccacgcacctgggctacggccgggccgcgtgatagaacgatcagactggccgaagcaccacgaaaagcattcagacctcagaggagtcaaaccactcctccgaggcctcgggggctacacccggcggacgagttcacgcctcgcccgagggcctcctcaggcagcgggcgccccctcggctctcccgaggcccggctcggcctcgggaggaggtttccgcctcgcccgacctcaggctctagcctcgggaggaggtctccgcctcgcccgaccctcggactcggcctcgaccccggtctcgggaggaaacgcgtcctcgcccgaccccagcctcggcctcaagagaagtctccgcttcgaccgaccctag

SEQ ID NO: 20453 - DNA, 264 bp, Zea mays
  Peptide Sequence Number=SeqID_63828
atgactatacgaagtctgggtgcaccggactgtccggtggtgcactggacagtgtccggtggtgcaccggacagtgtccggtgcgccaggctggcgtctggtcaaccggctgctctcgggtctcgacagtggcgtacggctataaatcaccggactgtccggtggtgtaccagactgtccggacgttttgagacaggatcttctattccgctgcaacctactcgaagggtcttctcattccactgcgttctagtcttcgagtag

SEQ ID NO: 20454 - DNA, 1584 bp, Zea mays
  Peptide Sequence Number=SeqID_63829
atggccgagctgcggcacgccacggcggcgacccgcgccaccagttccccatccaagcgcgacgccgaggccgcgtccgcgtcctcgcccttggtcgcgtccccccgcgtcgacggcggcaaggacggcctccgcccccagccaaggtggtcactcccgcccccccttccgctccctcctcgcgctcgaggaccccaggtcccccacggcttccgcctcctaccggattctcgtcgccgcaatcgcctgcttcgcgctcactgcgctcttcttcgcgcctttcgtctggacacgcctcacctcgtgtcagagaatgaaacttctgggtttatatttattcatgccgagggtggattaaaccagcaacgtatagctatatgtaatgctgttgcaattgctaagataatgaatgccacacttattctgccagtgctaaagcaggaccaaatatggaaagatcaaacgaaattcgaagacatctttgatgtagaccattttataaattatttgaaggaggatgtgcgcattgttcgagatattcctgactggtttacagaaaaggatgagcttttcactagtataaagcgcactgtgaaaaatgtcccaaagtatgcatcagcacaattttatattgataatgtctttccaaggatcaaagagaaaaagataatgtcaatcaagccgtttgttgataggttaggatatgataatgttccaatggagattaaccgactgaggtgccgagttaattatcatgctttgaagtttctacctgacattgaagagatggctgacaagctagcaacaaggatgaggaatcgaacaggaagtttaaatccatacataatcggctgtctgcagttgagaaattattatctcatgctccatcgcacctgcttccaaagggctcttcatttgcgatttgagaaaggaatggtgggcctttcattttgtgattttgctggaactagggaggagaaagctatgatggctacttacagacagcagcaatggccaaggcggtacaagaatggatctcacttatggtcactagcactagaaaagagaaaagaaggccgctgtccgcttgagccgggggaaataggaattattttgcgtgagatggggtatactaaggaaactcagatatatgttgcatcagggcaggtgtatggtggaaacaacagaatggcacccttgagaaatatgttccccaatctggttagcaaagaagatcttgctagcaaggaggagatggagcctttcaagaagcatgtaactagtcttgctgcactggacttcttggtgtgcctgaagtcggatgtgttcgtcatgacccacggtggcaatttcgccaagctgatcatcggctaccgccgctacatgggccgccacaggctcaagtcaatcaagccagacaagggtctcatgtccaagttcttcggggacccttacatgccttgggcgactttcgtggagaacgtgatgatcacccatgagacacgaaccgggctccccgaatccaccttcccacactatgacctatgggagaaccctctcaccccttgcatgtgtagagcttaa

SEQ ID NO: 20455 - DNA, 789 bp, Zea mays
  Peptide Sequence Number=SeqID_63830
atggctacgcttgagaattttgcaatcatggcaccgccaacggcgggcttcacaaacatggcacgcccatcgcggcaattgcattcgtggcattataatcctacccgatttgaacatttagcatcggaccctgggtttgcagagttggaggctgccatggaacctgccgcggagctatgttcccagaagctgtccgcggccgttgatgccgcccgtgacacaatgaaagcttcatctaccgcctgtatggttgctggtgattattgcgccacattttccttaggtaacgatgtggtttctactcttgatgttcttgaatccgctgtggcggcggaaaaaagtgctatgagttcttacaaccaggcgagtgcagtcgtcgattgtgctaaggagactattgccaaatattgtgaggttaaccaaaaacttgcgcaagcactcagatattctatgtctctaatgagtgatacaactaagaaactacaagatactgcctctttgtgctacacagatgaagatgttgtcgacggtttcaagctgactcaagtggctcgttcattggacgagttagctgaaacactagaagttactacaattgactgtcaggtctcgatgatggatccaacaactatattagaagctggctacggtagcgaagatagtgcggtgtgggaggacatattccgtgaccgagaaataatgaatcagccattggaaacggagacactagctgagcactgtgctaagtgggggcttaattacaatgagatcagggatagatctgtgtaa

SEQ ID NO: 20456 - DNA, 303 bp, Zea mays
  Peptide Sequence Number=SeqID_63831
atggttattcaccgaggtgagatgatgatgaaatggcaggtggtttgggccaagaagaagaacacggactgcatctatgcactcaagatcatggaaaagaagttcatcacaacaagatctcatacgtcaagatggagcgcacatgctcaaccacttgggcatcatgaggatcttcttcactttttaggacataaaggtcgactctctaaggacgatgcacagttttatgctgctgaaatcgtcaatatattggagtttttgcatggcatcgggctaattcatcaggatgttatggtagtgtga

SEQ ID NO: 20457 - DNA, 255 bp, Zea mays
  Peptide Sequence Number=SeqID_63832
atgggggcgctgacgtggctggaggaggtgccggcactggagaagctgtgggtggcaggggtgcaaatcaagtgccagatcccgctcgaggagcactgggccttcgcctactccatgctcgaaaagggcgagtgcgtgagtcaggagggctcaccggcgttcatcgccgtcgtaccggtggcgcctcctggtctactaacgtgggtggaagagggtctcttggccgttgacacccagttggacggctcagattga

SEQ ID NO: 20458 - DNA, 216 bp, Zea mays
  Peptide Sequence Number=SeqID_63833
atgtcgtgctcgaccctagaagcctccaagtcgtcaacatcccttgcgtcatcgaaaaatcctgagagtttgaatagtacaacaaatcccatgtggtgcttgccgggaactcgaacaggaggtacgttagttaatcacgtaatgcgggagataagccaagtcgaccccaagcacgggctaatccgcatggttatgctgatggacgaacccgcctga

SEQ ID NO: 20459 - DNA, 216 bp, Zea mays
  Peptide Sequence Number=SeqID_63834
atggaagaccgaggggacgcaggcaccgcagtgcgtgagctgcgggtctcagaaacgaggagagggaggaagacgatggcaactcaaagaatgaacgagggaggtagacgacggcgcccaggcattcacatggaggacaagtcctctgcgccgaagcatgcctccgtccccaccatggctgcggtggcgaaggaccttcctgggcatggagaatag

SEQ ID NO: 20460 - DNA, 1338 bp, Zea mays
  Peptide Sequence Number=SeqID_63835
atggcggatgataccagcattggtagtgccactgccaagagggaaggggcacgaaggtgcatcatgcagcggtacaggtcccagctcgagcaggaagtcaagaaactgcaaaggcaactgcaagaagagattgatttacatctggcgttggcagatgccattacatataatgcggcgctgatacttaagtcgtctataaagcttccagataagatgcaagaggcatgctctatggaaaaagaaggcgaagaagatcagaagatagatatgttaccatttaacctgcccaatttgaagaaaggcaacatgagtgaaaatctgtggaataatccaaatcagctctctgaagagatggtgctctccatgaaagatatattccttaatttatctacatcttccaagatgtcaccagaggagcctttttctaattcatcttcatcagcagagcatctatctggttcaacattgactactttgtcggattcatctgtaatagcctcagtgcagcccagtccttcaatgtacctgaaccacgatgatggtaactttgacccgtacaatgttaatggaaaggaagcacagagagacattggcagctatagttcagtagctgaagtgtcttggatgtatattggcaatgaacaacttgaatatgcatctggagctctgagaaagttcaggtttcttgtggagcaactatcaaaggttgacacttcttgtatgaactgtgatgaacggttagcattttggattaacctttacaatgcattaatcatgcatgcctatttggcatacggtgtccctgaaaacgacattaagcttttcgcgctaatgcaaaaggcctgttacacgatctgtgggcagcctgtcagtgcagctgaaatagagtttgtgattctgaagtccttgatgctggcccttcacaaatttaaaacatcagagaatctcaagaaatattcaatcgatggtactgagcctcgtgtgctctttgcactctgttgtgggatgttctcttcgcctgcggtaaggattttctctgctgaaaatgttcgagccgagctacaagaatcaatgagagactacatccgagcatctgttggtgtcaatgacaagggggagcttatggtccccaagttactgcagagctatgccaagggcattgtggaggactctctgcttgccgactggatctgccgtcatctaacactagaccaactcgctgcagtccaagatacatcgtcgtcacatacacagcgccttcttggagtgcgcagtttcagcgtcatcccattcgattcaagattccggtacctgttcttgttcgacaacagtagatga

SEQ ID NO: 20461 - DNA, 318 bp, Zea mays
  Peptide Sequence Number=SeqID_63836
atggagtggaggcccaggcggtggcggcggctcactctctctctctcccctagtagtagtccccctcggccctcgccgccaagcctcggatgggtttactactatgtccgctcccaccgggtctgcgcatcagagatcaacaagactaggaaatccagagatggattttcctaccgatcagctgatcggctcggcgtttattgcctttgggctcacatttgttcgtattactgtctgcttgtgccgttgtcgcttcctgtaataatcgtggttgtctacctgcactggctcagcatgaagatgttcaagcacgcatga

SEQ ID NO: 20462 - DNA, 771 bp, Zea mays
  Peptide Sequence Number=SeqID_63837
atgccctcagggtttactattgtgtccgctcccaccgggtctgcgcatcagagaccgacaagactgggaaatccagagatgcatttttctaccgatcagctgatcggctcggcgttcattgcctttgggctcacattgttcgtgtgtttcttctacgttgccgtcgtgtccaagctgcttccgccacatcaaaatggattcctggccgccatccaaaacgactgcgtacagctcgtgcaaattatacaagaaattcacgccttcttcgtaattctgcagcatgaagatgttcaagcacgcatgaagcagtcatgcagcttccttccggtttcagaatcctggtcaaaatcgagggatgctattatctatgctatgcagcttcaaaagtcaaaaccatgggttcttcccttctatacatatctggtcatcagtatgtgcttgcccctctttagagacgagggtacagaaaaaggaattaaatggagtgtagcaccaattagttcgagtgatgtctctctgcccacatcatcattagatctcccagatgttgcagatctctttgctccccctgcagacaatgcatcaaggaagagggaatcaaatgggtctgctcttcatgactcgcgcaataaatttccaaggatgcaatcacaatcccaaggcataggaagtgctgcagggaacgccctaattccaccgcagcttcgtggaaggagcaatgttgttaccgaagacatgagcaaactctttgtggctaaacgaaaagagtag

SEQ ID NO: 20463 - DNA, 453 bp, Zea mays
  Peptide Sequence Number=SeqID_63838
atggggatcctcgacaccctgatcaccgttgtggatgctggaaggggggagggggaatccaaatggtgtgagcaaccaggggtggtggtgctccgcaagctggaaaccttggctgtccaaatgagtctggaatgggtggcacaacttggcatgccaagaacaagtttggagacagatgcaatgcaacaaccttgggactggctgctcgatggagattccccctcggccctcactgccaagcctcggatggtatcactgtccgcctccattgagtgcctgtgccggggaaacttcgcggccgcactgctgctggccaacgcatcggtgtccttccccagcctcggcgaccaccaccgcctcccctgccacagcaatgtcaaatccgagtccacccccacgtccgccacctcagtctcgcagccgtggtcttcgccggctacgagcacccaccgg

SEQ ID NO: 20464 - DNA, 159 bp, Zea mays
  Peptide Sequence Number=SeqID_63839
atgtcgtgggcggaggcgcggcgcgagattcctgggaggcggaggcgcgcgaatttcatagtagttctaaacacattggaggtcacaaaggataataaggtcgaagcctataaggtgttcaaggaccctgagtccctgacaatcgacaaattttcttga

SEQ ID NO: 20465 - DNA, 954 bp, Zea mays
  Peptide Sequence Number=SeqID_63840
atgccttctgtctctcctcatgcattgcgtccttccgccttccgagcccccggatggggagcgcctgcgttgccttcgtctcgttgtgggaggagcgcaacctcgttgagggcggtgaccaccagttcgatggtggggagaagcaagtcgggctgcggcctctgccccgccctcagcttcaaggatcttcatcatccttgctggggcggagggcgagctgagccggagctctacctcccgtacgggccggcgggccacctcctccttcagcattcaggagagagggcgctcaccggtctagcggagggggcggacttcgacaacgtggggccggtcggccgcaagcgtcgtcagctccagcgtgtttggcttgctggctcagcttccggtgccccctcccaccgctgggcggagtgtggctatctgcccgccgtacgggcggctgttgcgccgcgcgctccgggggaccgcccaagacgtcgcacgccgctagggcggcgttcgtgttcttgggttgtcctacccttgctccggcacgacgcctccgtgcggaggtcggtgctcgcccgtccgggaggacttgagtggggatctgccggtggccaggaggctgccgtcatcggtgctgaggtggtgtcatcggagaaggcttctccgccaacgagaccattgccccccccccccccccgcggactgacctccggctctttgcctttgatagcttgtcctcgcccctcgagtggggacacgggcgagggccttgtcgcagcagtgtctgccctgaggtcattgctgctgctgtttagccgctcgaagcggaggtcgttgtcgctgctgacggagtgggcggcggcgagccacctggaattttgtcgtcccgcaggccctccaatgtggggggttgttcgtacctgcgggagtggaactggagttccgtttgtaatggcattttga

SEQ ID NO: 20466 - DNA, 429 bp, Zea mays
  Peptide Sequence Number=SeqID_63841
atggcgggtggcacagcagtcggagtagggcaggcggcactgttttcctgtcaggcgatccttgcattgaatgctcctgcgatacggtcagttggcgaggcgatctggccaaggttgcttctccacgaagcctgcccgagctgggcctcgggcgagtcgaaggtgcgcccgttgcttgaggaggccctcgggcgaggcgtgaatccacctgggtctactgttcctacccgaggctgggctcgggcgaggcgagatcgtgtccctcgagtggacggagctttgacctgtattgcgcccatcaagcctttgcagcttgtgctgatggtggttaccagccgagttttaggagtcttggggggcgccgaacatggtgtctccagtgagttgctaacgggtgatccgagtggacgcccatgccccgttcgataa

SEQ ID NO: 20467 - DNA, 531 bp, Zea mays
  Peptide Sequence Number=SeqID_63842
atgtccagtctacagcggctgccgtcgggccgtgccgctgcttgctgggctggtgctggctgctcgtgccgtccggccgtccctgctctgctggagtgctggacgctcggagaggcggagagcagacgccggcagagacgcagagggcagaccgtgtcctctctccactgtccagtgatccagtctcctccggcctccgcggccgtgggtgcacggagccggacagccgatcagccggccgcgagcccgccgcgaggacaaaggaggccgccggaccggagcctggagactggagagccagccgccagagccgaggtatcctgttgccggcttgccgctgttggatctagcggccaggagggcgatttggtgccgttgccgtactgccgtgagccaagagtgactgctgttggcgctcggcgattgggcccatattgccatacactattgacctcaaaacaagagaacgaagaggacaaaaacattgagatcgttttattgtccggctcctgcacctttgatacgaactga

SEQ ID NO: 20468 - DNA, 401 bp, Zea mays
  Peptide Sequence Number=SeqID_63843
atggtgaatctcttgaagctggggacagggaactttgcaccgggtttcaggtgctccgcaagctggaaaccttggctgtccaaatgagtctggaatgggagtccccctcggacctcgccgccaagcctcggatggtatcactgtccgcctccattgagtgcctgtgccggggaaacttcgcggccgcacaggtgctggccaacacatcggtgtccttccccagcctcggcgaccaccaccgcctcccctgccacagcaatgtcaaatccgagtccacccccgcgtccgccacctccgtctcgcagccgtggtcttcgccggctacgagcacccaccgggtgtgccttcccactcccctctctgccgctcgaaaccgaccatcccaactgatagtcgcctag

SEQ ID NO: 20469 - DNA, 3042 bp, Zea mays
  Peptide Sequence Number=SeqID_63844
atggaggatgtggaagtaggtctagaaattaagctcgacattcgtgagtctcgagtgagccaagttgagctagtttttttggctcgttggtgcaacaaggaaaagcttcgtgttgcactctacgtgcagaaggctgcgctgcagttcatcgatgccgcccgcaagacggagcacccgttaccggagatggcgcgggaatgcggcttctccgtgagcgcggaggagctggccaccgtggtgcgcaaccacgatgccaaggccctgaggcaccacatgggcgtcgacggcgtcgcgcggaaggtgaacgtgtccctcgccgacggcgtcaagtccgacgaggtgggcgtccgggccgaggtctacggcgccaaccagtacaccgagaagccgccgaggacgttctggatgttcctgtgggacgcctgccaggacatgacgctcctgctgctcgccttctgcgcgttcgtctccgtcgccatcgggctcgccaccgaggggtggcccagcgggatgtacgacggcctcggcatcgtgctcaccatcctcctcgtggtcatgatcaccgcggccagcgactacaaccagtcgctgcagttccgggacctggacagggagaagaagaagatcgacatgcaggtcacccgcgacggctaccgccagaaagtgtccatatatgacattgtcgtcggggatatcgtccacctgtccatcggcgaccaggtgccagcggacggcctgtacatcgacggctactcgttagtggtcgacgagtcgagcctctccggcgagagtgagccagtgcatatgtccagtgcaaaacctttcctgctcggcggtaccaaggtgcatgacgggtcggccaggatgctggtcaccgcggtcgggatgcgaactgagtggggaaacctcatggaaacgctgagccaaggcggtgaggacgagacgccgctgcaggtcaagctcaacggcgtggccaccatcatcggcaagatcggtctggtattcgcggtgctcacgttcaccgttctcatggcacggtttctcgtgggcaaggcgcacgcgcccggcgggctcttgcggtggaggggagcagatgcgctctccatactcaacttcttcgccgtcgcggtcaccatcatcgtagtcgccgtgcccgaggggctgccgctcgccgtcacgctcagcctggcgttcgccatgaagaagctcatggaggagcgcgcgctcgtgcggcacctctcggcgtgcgagaccatggggtcggcgagctgcatctgcacggacaagaccggcacgctcaccacgaaccacatggtcgtcgagaaggtctgggcgtccggggcggcgcagacggtgagcaccgccaagggcttcgacgagctcaggtcgtcggtgtcggagaacttcacgagggtgctcctggagggagtcttccactgctccggctcggaggtcgtcacgagcaaggacggaaggactagcgtcatgggcacgcccaccgagacggccatcctggagttcggcctcgaggtggagaagtacaccaaggtggagcacgcggacgccaagaagctcaaggtggagccgttcaactcggtgaagaagaccatggccgtggttatcgcgtccccgaacgcggccggccacccgcgcgcgttcctcaagggcgcgtccgaggtcgtcctgagccggtgcggctccgtcttggacggcaccggggccgcggagaagctcacggaggcgaaggcgaagcgcgtggccagcgccatcgacgcgttcgcgtgcgaagcgctgcgcacgctctgcctggcgtaccaggacgtcggcggcgccagcgacgtccccggcgacggttacacgctcatcgcggtgttcggcatcaaggacccgctccgcccgggcgtgagggaggccgtgaggacgtgccacgacgcgggcatcaatgtccgcatggtcaccggcgacaacatcaacacggcgaaggcaattgcgagggagtgcggcatcctcaccgacgacggcgtcgccatcgagggacccgagttccgtgccaagagccccaacgagatgagagagctcatacccaaaatccaggtgatggctcggtcgttgccactggacaagcacacgctggtgacgaacctgaggggcatgttcaacgaggtggtggcggtgaccggcgacggcaccaacgacgcgccggcgctgcacgaggccgacatcggcctcgccatgggcattgcaggaacagaggtcgccaaggagaacgcggacgtgatcatcatggacgacaacttctcgaccatcatcaacgtcgccaaatggggccggtcggtctacatcaacatccagaagttcgtgcagttccagctcacggtgaacgtcgtcgccctcatggtgaacttcgtctccgcgtctttcacagggagcgcccctctgaccatcgtgcaactgctgtgggtgaacctgatcatggacaccctgggcgccctggcgctggcgacggagccccccaacgacgcgatgatgcggaggccgccggtcggccggggcgacaacttcatcaccaaggtgatgtggcggaacatcatcgggcagagcatgtaccagctcctcatgctcggcgtcctcatcttcaagggcaagagcctcctccggctgggcagcggcggcgatgtatccgacgcccagctcaacacgttcatattcaacaccttcgtcttctgccaggtcttcaacgaggttaacagccgggacatggagaaggtcaacgtgttcagcggcatctttagcagctggatcttcccggcggtcgccggcgccaccgccgcgttccaggtgatcatcgtggagttcctggggactttcgcgagcacggtgcacctgagcgggagactctggctcgctagcatgatgatcggctcgggaagcctgctgatgggcgccggcctcaagttcatccctgtcgatccgggcagtgaaggctcgtctgaccgccacgatgggtaccagcccatccccaccggccccaacgccgtgtga

SEQ ID NO: 20470 - DNA, 210 bp, Zea mays
  Peptide Sequence Number=SeqID_63845
atggcgtaccttcggaacaagtcgatggagttcctcaagcggttcgaggtgccagccaagaacccctcggaggacgcgcagcgccggtggcgggaggccgtcggcactctcgtcaagaaccgccgccgccgcttccgcatggttcccgacctcgacaagcgctcgcaggtcgagacggagcgccgcaacatccaggaggaaattaattaa

SEQ ID NO: 20471 - DNA, 324 bp, Zea mays
  Peptide Sequence Number=SeqID_63846
atgcggcataacaagtggagcacacggcgatgcgaggttgaacgcaggatcaatggcctaggaccaacgacaagtgtcgagacgacgtgcgtgaaccttaggggttttgcagtgtggactacgaggcaggacgtcggtgagctgcaggacgacgtcatcgaggtgaagaacatcggtgagattggggataggtaccaggtgcaaggaacacggagagcgaaagctgggagaggagagtgcgctgtacgaattccagagccgagcgcatgcgcagggagtaatatagagagatggcgtgagatatttctagagagacgatggtga

SEQ ID NO: 20472 - DNA, 522 bp, Zea mays
  Peptide Sequence Number=SeqID_63847
atgacttcccatggatcctcagacgagggaaatgcactgtcccacactgacgggcttgcacgagagggctttccccgcattttgttggaggtacttcagggggccggatacacgacgcctcctcagtacgcggtgcagcagtttgagaaggatcgggtggagcatgccaaggacatttgggctatctacccgggccagactgctcacttgacagtacggtgcatgaatgccctgtaccgtctgcaagtgatgcgtggtgaggcaatgtctcatctgatggcactattggaggcaacaaagatcaccttggacaacagagaagagcttgtagttgatttgtccactgagatggtggaaaaggacttgcaggtggagcagctatccaatgagatccaagagctggaagaattagtggggaccagggagaacaccatcgaggttctcgaggatcagcttattaacactcagcagcagcttgctgaggctaatgagcacctggatatgcatcaccaggagatctag

SEQ ID NO: 20473 - DNA, 603 bp, Zea mays
  Peptide Sequence Number=SeqID_63848
atggcccacgcccgcgcctataaagcccactcaggcgtcgaccacacccctccgcacgcgctcaacctcaccggagctcaaactcaccgtcgtttgcccgtgcacggcgtgtccgcggccacccgagcccctgccgccgtagaccggccaacccagcctttcccaaccccgtccgaccctcggagaaggctgagcacaccccgtctctacgtcaccccgtggagctcaccgtgccattggattgaactaggtcgtcgtgatttggccggcacacccgccgccgacgaggacagccgcctgcgcacgtggaccgagcgattccggccatccccgccgtcgagccactgtaaccttgctgacggagagtacgtcctcgtgccggagcaaggagctgctcaggaggtagccccggatccagcaccagagcctacaccagaggatctgcctgccacagccttggaaggcaagccctggaatccttttgagatggatactagttctctggaggacatggttgctggagtgacttggccgtccatcttgccaccgggttggactgttgagtgggaccctacctcggctgaggaggagcatgaggagtga

SEQ ID NO: 20474 - DNA, 534 bp, Zea mays
  Peptide Sequence Number=SeqID_63849
atggagctcgagcaaagtgtagacaatagagcctcggacgaggcggacgacaaaggctcaggcgaggcggacgacaaaggcttgggtgaggcggacaacaaaggctcgggcgaggcgaactgcaaaggctcggccgaggaggatgagggaggctcggccaaagtgtacgagacaggcaggctcagtgcggcacagacagcaggggctcgggcgctagggggagagacagagaggagagggcgccatgaggagaggaagaggcggccgacagattcaaggccattgatggcgggagttacagagaggagagtaaatggggaagaggaaagggaggtatttaggctagatttacgctcctttgatgactggttaagcgctgctttaatcattcgggaagcagcaaccgttatggtggcggaggtgctgttgcgagtgagagaaggggaggggaagaggtcacgacatcagtggagggcggaggggaaggggaacaacatccatggggctcctccactggagcaagcgaagaggtga

SEQ ID NO: 20475 - DNA, 174 bp, Zea mays
  Peptide Sequence Number=SeqID_63850
atggagagtcatgatctccgggcagaaagggaatcacggtttgtgggtggcaatgagactgatggttttggttatgactatggtgctggttgtcagcattgcaaccactgctcaggaaaagatgaatctgtggaaggagacttcctggatttccaagactacgacgagttctag

SEQ ID NO: 20476 - DNA, 558 bp, Zea mays
  Peptide Sequence Number=SeqID_63851
atgacggagctcgggcgaagtgtagacaatagagctcgggcgaggcggacgtcgggtgaagcggacgacaaaggctcggccgaggtggacgagggaggctcgaccaaagtgtacgagataggcaggcttgatgcggcacggacagcaggggcttggttgagcgcggccgagggctcggtggggctcgacgcgacttggcgggctctggctccaggggggagagacggagaggagagggcgccaggaggagaggaagaggcggccggcggcttcaaggcaattgatggcgagaattacagagatgagaataaatggggaagaggaaaggaagcaaccgttatggtggtggaggtgctgttgcgagtgggagaaggggaggggaagaggtcacgacatcagtggagggcgaaggggaaggggaacaggcatccatggggttcctccactccagcagacgaagaggtgacgaggagtcgaggagtcggtggtggcgcttcagagatgaaacggtggcggcgttgtgtcaacctcaaagagaatggggaggagaagagatga

SEQ ID NO: 20477 - DNA, 2679 bp, Zea mays
  Peptide Sequence Number=SeqID_63852
atggtgcggagtcccgccttcgtgctaaatctgcgaaaccgtgatccggccgcctttgtgcgtgaagctgaggatgaggcggtgcggcttgttgggcgttatgtgccaaggaccgagggccagcgcagctgggagatccgcgggtcgaatgaccgtttgaatagggtcttcgaattgaaccgactgccatatgacggctaccctggtcaagacgacgcggaccgccgggggaagaaaccgatggtggagactaaaggcgaccctgcgccggcggccgcgccatcctctaagaagaggaaactaggtactgccatgggaggacttggggtttctgatgggtttgctagagagttgatgaggacatgcgcggccccgggggaaaggatgtcttcgcccgagctccgggagtcttcggctcggatgctgaaggttaccgggggttgctggcctaggaatgttcctatcccccacgcggccagcggggatgtttttacatctcgcttggttcgcaaatggagagtttttccttacgggcggaatattgctgctgttgtgtcggcagtgatggacaaggaccgccagggggttgcgcaaaagcggcaggcggctatcaggattgttgaagccaggccaaagaggcaaaagcgggagtcggcgaaggctgcggcccccggtggaggcaagccgccgctggcggtgaagtcaggcgtccctgcatctggcaaggcgccagaggcagcggcgggcgccggaggctccaaaccggcgaaggctgtgccgccgctcagcggggtggcggaggccgcgaaggcggcccgagcgctgccgtcggcaggcaagcgtgtcgccgacttcgccaccaacatttgtgtggaggactatcttggtgggtcggacgagggccagcttgctatggttgtgcctgccgcggcgatcgtgatggctggcatagtgccgaaggcgaggggcgaggctcttggctccggaggcgaggtgtcggccctcgcggttgtcagggacgaggcgggcgcagcgacccgccggctgaagggagtgacggaggcgctgagtcaggcgacggaggcgctgagtcaggtggctgacttcgccagccgtgctgcgtcgggggccctcacggcagctgtatctgccgaagtcgagagacttcggacgcaacatgctgatgctgtccgtgagaaatcagcctccgacagcaagtgccggaaactgacggacaaggtggccgtgctggagaaggagaaggctgaccttcggcgccaactggcggcggagaggagggaggccaacgaggccatcgccaaggagcaggctgctcaggcggaggccaaactggcgcgggcggagggcaatcttgccaaggagctcgccgaacatctgcaggagcggctcaccgccctggagagccgcgcgaagggggccgaggccgcgatgcgtgcggaggcagaacggacgcgcacacagcttatggatacatatcgtgagctggtgggtgcaggaggagctgcaggaactccccgctgtcgtggggggtttatgtcgtacgcctccctggtcacctgcgagggggcgatgaacgcgctctcccgcgaagggtgccggcacttcgaggttttcgaccaggcggatgaagattttgatcgagatgtctataaggttgaagacctcgtggtgaaggattctgccggggccctctacaaccggttgtggggtccgcacggtcgcgaggtggtcagggagcgggcggagacggcaatggctcaggcgttgcgtggcgagcgggtggacgacctcggggcgctgaacagcgcgctgcctgacccggagccgacccctgcggaggccgtgtccggggtcgccctggagccaacccctgagaccgcggcgatcgcgacggctgcccccacgtccgctacggccggcgaagacctgcccccaaaggtggccgaaggcgcccctgatgcccccgcagctgttgtgccgagtgctgaagatcccgcggcggagacggcggaaacaacagcagaagcggcggcggagccagcggcggaggctcccgcagcgtcagggccttcgcaggttcaagattttgggcctgcgcacgcaaccgctactgctaaatttttggcggcttcgaccgcggaaggtggtaaagaatgtggtggatctggatctgaattttctgagttttttgatgttgctgattctgggagctcggttgagtggactgaggagtcgtcggaggatttggactatttcgcggctttggatgtggctgcggcggagacctcgccgcacgctgcggacgcgcaagatgtgccaggtccgagcaccgggcgccgacggcggagggcggttgcaaagcgtagagttagtacggaggaaaggtctcggcttcgtgtgagtagggctggtcggcaggaactgttgtctttgcaggccgccgcgaatacaggggaaggggaactgcggagtctttttgcgggtgaggagcttaggataatcttcgcgacttgttgtgctagtccggctgcacccttaggcgacttctgcgcggatagtcttcgcgatagacttcgtgttttttcgcacttgttgtgctggtccggctgcacccttaggcgacttctgcgcggatttgtcgcacgcgagggtggctag

SEQ ID NO: 20478 - DNA, 342 bp, Zea mays
  Peptide Sequence Number=SeqID_63853
atggcgtgctcctggcaggggggcgagctctgccacgacaagagcagggaagtggagggagacgctgctgctgggcgccggcaagaggtagaagaaagggggcgtgcccatgggagcttctcccactgcaccagggaagctagggaggagggagctcgccgggaggggcgccgagggaggtgcttgctgctcgccagaaggaggagcagggagggcgtcgctggtggctgttgctgccatgaagaagaagaggcagggaagaaagaaggtggcggctgggaaaatggaggggtgggagtgcaaaaatgcctccacttgctaggagagggctcctatttatag

SEQ ID NO: 20479 - DNA, 282 bp, Zea mays
  Peptide Sequence Number=SeqID_63854
atggatgtcgcgcaggaagccagcgcccttcctcctctctgtttcccttgggctcaagtgcaggggagctgtgccccattttcttcaataggagaggaaccccgtgttttgcgtggagaagaaggcaagccgctcgacgctcgtcgatgttcggagcgatgcacaaatcagaatcgccatcgtccttacaaacaccgattgggtttgtttatgttatacgcattggtaggatcgcgtttgcgattggagaacaagcggttatttgatgtgtgcgatttgtag

SEQ ID NO: 20480 - DNA, 228 bp, Zea mays
  Peptide Sequence Number=SeqID_63855
atggaggacaggaaacacaagatcggtggatctcaggccgggagtagcagtcgtccctgctactcagacaactcatctcagcaattcaagcaagccgctcagcagccgccaacagtcaatgccccagcaagacaaggagcaccacagcaagcaccaggagtccgtggtcaggcctacaaccgtggagaggtgaaccacctagaggccgaagcaatccaggatgcttag

SEQ ID NO: 20481 - DNA, 297 bp, Zea mays
  Peptide Sequence Number=SeqID_63856
atggtcaacctggccgccgtgctcaacacaaagttagaccacacccttgacgagttgggcaagatgtctgagaataggcgcagaggtgcaaggcgtgctcagccgaaacagcaggcaccccaggaggatgcagcccaacagcagcagttgccaccaccacccccgatgataattgagcagatgttcatgatgcaaactcaggcagttcaagcaattggtcagaccctagcagcaatgcagcaagtgcagcagcagccacccccacctcagcctccagtgcaagttcagatgccataa

SEQ ID NO: 20482 - DNA, 378 bp, Zea mays
  Peptide Sequence Number=SeqID_63857
atgctggtagactacacaacggtactcaatggaccaagtgtgtcggtcgaaggcccgatgcagcaaggtattgagagcgtcatggaagtgacacccggtctcctccagcagccgggatgccctgaggtgctgcaggggacatctctggctggggtgcaggggaaggctgcctctcggactccacctcctgctgaggcgagggggaagagtcctgctgctcctgctcctgctcctggcgtcggtgctcctgctcctcatgcaggcgacgatgcagtctctccaggtgactggactgacctggcaccatacaacacagtggatgctccaccaggcgagaaggcaaaaaggggatcacagacttacgtgcagtgcacctaa

SEQ ID NO: 20483 - DNA, 639 bp, Zea mays
  Peptide Sequence Number=SeqID_63858
atggcactcggcaaagagccaaattccggtagtgatgatcatgataggagagctgatgatctcaagatactctataaggcctatgctatagaagtactttcagatggaattgtggatgataagaaggaggtattatatatgttttggaaagaaatttacagacagaagcttcagcagtttgtagctgatggagagctgagcaaggaggaagtggaagctctgatggcattccaagtgcgtctttgcatccctcaagaaactgtggacgctgcacatactgagatttgtggacaactgttcaaaaaggttggtccaaccacatttgaagcaaagttgcagcctcatcttctttggagtcttgatcaggtgaaagagaacatcaagacccagacacatcaacttatagatgctcgatcaaaacctaggctacatgcatttggtagtttctatgactgcttgaaagtatgttcttctctcttttcttttgagaggcacaacaattttttaagtcgttgtaatgaaataattcctcagtgtgcagccgctcagtgcatactatttgatggtgcagttcccgagccacgaaaggggattagaagtgggcatgtgcctgggagcaaatgtgttccgtttcctcag

SEQ ID NO: 20484 - DNA, 687 bp, Zea mays
  Peptide Sequence Number=SeqID_63859
atgccgcccaccgcgcccgcctccagcccgccgcctgcagcacccgcgctgcccacccgcgccgcccgccgcaacctcccgtactttgcctggtacgcttcgtgccgccgccgcaacctcctcctccccgtcacaaggactggtgtcattccttgtgctattgcacaaatcgtttgcatgtattggagttttggtgtcagtcttagtaaatgttgcccatgtgttcttgctatgtatgttgctattcaagctgacctttccctatacgctagtgggctgtaccactgttgctcaatgcacattgggattttgttttggttgacagatattgtcctagattcagttgagaagagctatgagctacctgatggacaagtgatcaccataggcacagagcgctttagatgcccggaggtgctcttccagccatccttcattggtatgaaagctccaggaatccacgagacgacctacaactccatcatgaagtgtgacgtcgatatcagaaagaacctgtatggcaacatcgtcttcagtggtggatccaccatgttccctggcatcaccgatcgcatgagcaaggagatcaccacgctcacgccaagcagcatgaagatcaagatgtggatctcaagggctgagtatgaggagtctggtccagctattgtccataggaagtgcttctag

SEQ ID NO: 20485 - DNA, 237 bp, Zea mays
  Peptide Sequence Number=SeqID_63860
atgggcaagggtaacaaacgcaagcgtgagccgactcctccgtcggaggatttcggcgactcggaatactcggaggaggagttctcctccgagtccgagggatctccggctcccgtctctcccccggcgtcgtctgatgattcagacgactcccaggggattgccgcggaggcatttgcatcttctttcaaggaggatctactcgagttgctcatcgactgtctcttgaggatttga

SEQ ID NO: 20486 - DNA, 1161 bp, Zea mays
  Peptide Sequence Number=SeqID_63861
atggctttgcctccgctttccattcgaggtgatctgggcattatatctacagctgttggtagatacactccttcgttgttgaaatcattcatacaaatgggaccgcaaggagctctgggcgctacgaaacttctacgtccattcaaagaaattgttgattcgctggagctgaaaaatccatttgttcgtaactggatcgatcttctgtgctttctacttgctggagttaaatctgatggtgctctttctgcagaaatggtttatatgtttgcagaatggtacaaaccaggatgcttgcttgagtaccctctgggtggaactggagcaataatagatgcccttgtgagcggtattgaaaaatttggtggcagacttgctcttcgttctcatgttgaaaagatcttaatagagaatggtcgagcagttggtgtcaagctacaaagtggacaagttatccgtgcaaagaaagcggttgttagcaatgcatctatgtgggacactttggatctgttaccacccgatgctgtcccaaaatcatatgaagatagagtgaaagcaactccacaatgtgaatcgtttatgcatctccaccttggttttgatgcagagaatgctagagaggaccttgggatccatcacattgtggttgatgattggaacaaaggagttgatggtgaacaaaatgttgttttgatatccgttcccagtgttcttagcaaggacctggcaccgcccggaaagcacattcttcatgcatatactccagggacagaacctttcagtttgtgggagggactggacaggaaaagtgcagaatatcgaagactgaaggaagaacgttctgaggtgatgtggaaagctgtggagcttgctctcggcccaaaatttagccgcgaaaaatgcgacgtgaaattggtcgggacaccgctaacgcacaggagatttctccgaaggaacaggggaacctatggtccagccataaaagccggagaagccactttccctgggcaagcaacaccgatcccccagctcttttgctgcggtgactcgacctttccagggatcggagtgccggcagttgcggccagcggcgcgattgtggcgaacacgctggttccggtgtcgcagcattcagagctccttgacgctgttggaatctga

SEQ ID NO: 20487 - DNA, 567 bp, Zea mays
  Peptide Sequence Number=SeqID_63862
atgcctgggtcgccaacaaactcgcccctctccttctcatccccacctgccagtgtaggagaagaggacggagaggtcgcggacgacgaggttcacccccctcaccacgtgcagcttcagcagcccaacgagatggtccagcatgatctcgtcgcgctggtggagatggccgaagccgcggagtgcgaggaggagcaggacctgtttgccgatgcgaatgacgacgtagggatcgctggatcggaggtcgcggacggcgaggttcacccccctcaccacgcgcagcttcagcagcccgacgagatggtccagcatgaagaagaaaagcagaaagttctttactggcacaacgagaagctgacagttgcttttgcattacttagttcagaacctaatactgtgataagaattgtgaaaaacttgaggatgatgttgattcctgcacagaaggtcggtgcaataatcggccacaaaggtgagagggtcagaagactgtgtgaggaaacaagagcctgtgttcgtattattggcggtcatctttgtgcggcagagcaagctgtaagatag

SEQ ID NO: 20488 - DNA, 174 bp, Zea mays
  Peptide Sequence Number=SeqID_63863
atggctggaggaatcaacatcctgaacacagtagttccaggccaaccaggatacttgctttcaccagcagaggagtctaaacacatcctcaagtttttcacaattcttatcacagtattaggttctgaactaagtaatgcaaaagcaactgtcagcttctcgttgtgccagtaa

SEQ ID NO: 20489 - DNA, 729 bp, Zea mays
  Peptide Sequence Number=SeqID_63864
atggaccgcctaaaacggatgcctatgttgttcgacgactaccgtgaagaagatttttatgggctaccgcggaaatacaatattgtcgctcggggagcgaagatcgaggccataacatatatgtatgagacagtcaaacatttcgacaatttgctccatgaaaagcaagtttacgagatgcataatgtaaagttcagtcttcatccgggtgaatttaattttcatcatctaaatggtcccatggaattgtgtcttgaccaacaaactattgtggagccatacactgttccaattcaaatggcgccattcccaaaacaaatactcttgaaccttgctgatattgccgagttgccaaacaggactttagtcgacattatggctattgtagtccacttggatacaattcatcacacaatgtggggccctttcagaaagattgttataatggatgctagagggtatttacatatcattaaggtttggggtgacctactaaacaaaaatgcactccgctgggcgttggctaaggaggattatggcataattattgggactatgtttagacggttcagaagacaagattgcctcgagtcttcggatcataccgcaatacacttcaatccgttccatcacaacacccatcattttggaccaattcaacaagctttggtggcgctgaacaaccgtcagtttgctgttacatttcttgaagaacaaaggcgtagatag

SEQ ID NO: 20490 - DNA, 444 bp, Zea mays
  Peptide Sequence Number=SeqID_63865
atgggcaagaacaacaagcgcaagcgtgagccgactcctccatcggaggagtttggtgattcggaatactcagaggaggagttctcctctgagtccgaggggtctccggctcccatccccctgcgtgagtcgtctgacgactcagacgacttccaggggcttgcggcggaggtctggacgtacatccgggccgtcgagcgctccgggctcgaaggctcggatgagtcggagtactcctcggatgaggaggactcggacggcggcgacgagggtgaagacgacgacgacgacgacgacgacggcgacggtgacggcagtggcaggggcggcggcgacggcagcagggacagcaccaagggcgacagcagcaggggcagcaccaagggcagcagcaggggcagcaccaagggcggcggcggcagcaggggcagggccagtggctag

SEQ ID NO: 20491 - DNA, 297 bp, Zea mays
  Peptide Sequence Number=SeqID_63866
atggatgtggaggaaatggagctgctgtacgcagaggaatatcagggggaagaaaaggggcgtcggctgctctcctgcagggagcaagcgccatggacagaagctcggctggagcaggcccgcgcgaggcagaaggagctccagcgttggcgtgcgcgaaggagcctgcggcttcctgtgcgccggccatgtgggggagaagacgccatgggagcaggagctgagctccctgctgcaaccgtgaggaagaaaggggcagggaaaaagaaagtggcggctaggggggtagatgaataa

SEQ ID NO: 20492 - DNA, 2106 bp, Zea mays
  Peptide Sequence Number=SeqID_63867
atgtcttcgcccgagctccgggagtcttcggcgcggatgctgagggttaccgagggttggtggcctaggaatgttcctatcccccgcgcggccggcgaagacttttttacctctcgtatggttcgtgattggaaagtgtttccttacgggcggaatcttgctgctgttgtgtcggcagtgatggacaaggatcgtcagggagctgcgcagaagcgccaggcggtcgtcaggcttcatgaggctaggccgaagaggcagcgggaggctgcgaaggctgctgcccctggcggaagccagccgctgctggcggcgaagtcgagcgcccctgcatccagcagggcgccggaggctgcgaaggctgctgccgccggtggttccaagtctgcgaaggccgcccctgtgtccggcagggtgccggaggctgcgaaggtggcccaagagttgccgccgcctagcaagcgcgtcaccgacttcaccaccgacattagtgtggacgattatcttgttggggcagtgctcttagtgccggcggcaagataccgacactcactgcccgtcagggacgaggcgggtgcagtgtcccgccggctgaaggagatgaagcaagcactaagtcaggcggctgacttcgcagaccacacggcgtcgggggccctcacggcagttgtgtctgccgaagtcgagagacttcggacgcaacatgctgacgccgtccgtgaaaaatcggccgccgacagtaaatgccacaagctggcggataaggtggccgccctggagggtgagaagactgacctccggcgccatctagcggaggagaggaaggaggccaatgaggccctcgccaaggcgcagtctgcgcaggcggaggccaatttggcgcgggcggagggcagtcttgccaagcagcgcgccgagcagttggaggagcggctcagcgctctgcaggctcgtgtggagagggccgaggcctcgacgcgctcggaggctgagcggacacacaaacagcttatggattcataccatgagctgggcgcgtggaccgctgacttcgaagtgccggaccgagagcccggacttcgctgcctcgagtggatacaggaggagttggtggcgcttcctgccatcgtggaggggtttatgtcatatacctccctggtcacctgcgagggggcggtgaacgcgctctctcgcgaagggtgctggcactatgaggtcttcgaccaagctgatgaggatttcgagcgcgatatctacaaggttgaagaccctgtggtgaaagaatccgcgggagccctctacgaccggatgtggggcccccacggtcgggaggtggtcagggagcgggccgagacggcgaggggtcaggcggcgcgtggcgagagggtggatgacttcggggctttgaacagcgtgctgcctgacccggagccgaacccggcggtggctgtgtccgaggccgccctgcagccgcccccggaaatcgccgaaggcgttcctgatgcccccgcagccactgcggccggcggaggcccgtcgccaactgcggcgccgagggctgaggatcctgtgaaggtggcggcggagccgacagcagaggatcccgcgacggctgggtcttcgcaggttcaagattttgggcctgcgcacgcaaccgctactactaattttttggcggcttcgaccgtggatgatggtaataaatcggatgggtctgcatctaagttttctgattttggtgactctgggagctcggttgagtggactgaggagtcgtcggctaaggacttggactactttgcggccttggatgtggcagcggcggaggcttcgccgcatgctgcggatgctgaagttgtgcctggtccgagtactgggcgcaaccggcgaagggcggttgcgaagcgtagagaatgctccaagtcttcaccgtttggtgttgcgagcctgtatgcgctgggggatgccttcgtcttgacaatgaaggggccctcccacttgggctccagcttgcccctggactctatccgggctgttcggacgagtacgaggtcccctttgctgaattccctcgggatgactgcaaggtcgcgccatgcttttgtctaa

SEQ ID NO: 20493 - DNA, 201 bp, Zea mays
  Peptide Sequence Number=SeqID_63868
atgcaggacgagatcgcgaggtgggatgacctcgttataggtcttcgtccggcgccgtgtcgggcgaagggggtaggatatttctcaatagatatgcttcgattctggcacagtactgttgactgtgcgagcttcggactcctccctgaaatctcgctgctgatgggtctgttggctcccttctggctgctggcctcgtga

SEQ ID NO: 20494 - DNA, 372 bp, Zea mays
  Peptide Sequence Number=SeqID_63869
atggcattcctccaacaacaatcagagtgcatggctgcccacaatgcacatgcacaacaagcaatgaatattccaaacaacatagacgacttcataaacgacttcttcgcttctagagaccgcctggttaatttcggcggccactattttgggcggtacgatgggataccgccgaaaattgcttattttcggctaaatttttttggcggccagatgccgccgaaaatgctctcgtgtcctgtagtgtcgggaacacctgtattctaccactggcgcgtgataatcgaagaattagagcttatcatagaattagagctcttttatactagtggtagtatgcgtctaacttgggatgttccttacaaaatgtga

SEQ ID NO: 20495 - DNA, 732 bp, Zea mays
  Peptide Sequence Number=SeqID_63870
gaagataatatcgatgcagaatcgaacacggagcgtcccggtctcaccggggtgaacgacgacgacgatggggctgcgcaaaaacagcaaacaaccggcgagtgtcgacggcgtgctgtccactgtgcttcacggaacagcgagccggcagcacgcggcttgctgcacattttgtcgagcacctacgacgcgtcgatttggtggggctgcagggaaaacttggttgcggggcgctgcgctgccgggagagggagccgagcagaggcgctgcgcagggcgccgtccatggagagactcaccattggagctgaggggagggggcttcctgctagttttccatggaagaaatggggacatgctggagaggaagggctgggcgccatggctgctgtactcggccatgggagggagatggcagggagaggggtgtcgctggggaagggcgccatggctgtggaggaaatggagctgctgcgcgcagaggattatcagggggaagaaaaggggcgtcggctgctctcctgcagggagcaagcgccatggacagaagctcggctggagcaggcccacgcgagggagaaggagctccagcgctggcgtgcgcgaaggagcctgcggcttcctgtgcgccagccatgtgggggagaagacgccatgggagcaggagctgagctccctgctgcaaccgtgaggaagaaaggggcagggaaaaagaaaatggcggctaggggg

SEQ ID NO: 20496 - DNA, 375 bp, Zea mays
  Peptide Sequence Number=SeqID_63871
atggcaatgaatgatgtggtaactcctcaccaacctgtctgtttatatagtgttgcaggggaagaagtcgaaccaccacaccgcctacactggctcagcggtggactgttcgacgtgtggaatattttaatcgttgttcgacaacaagctcagggaaggtgttttttggacctttggcattctaaagccttcgtatttttcacggatcgagctcgttacaaaaaacgatctagcaccgcgaaggggctattgttgggggtcttcttctccgccgaaggtctccaaggaaaaaacaccttcggcaaaatgatacaaaggattgctgaagccaccttcagccttgatttatctcctcaagatgaagactctatatag

SEQ ID NO: 20497 - DNA, 1402 bp, Zea mays
  Peptide Sequence Number=SeqID_63872
atgccggacgaggtcgcgaggtgggatgacctcgtcataggtcttcgtccggcgtcgtgtcgggcgaagggcttttttcgctgccggacttcgtctgcccgcacatcggtttgtggagaagttctgcgaaggttcaacgtccagaaaaggaaaattggaaataagattgctcaatttggatctggcacatttacgccgaagacgggcaagacttcgatggaggtcgttgagttggttccttgtgcccgcaataaatggggcaagtggtgggacttttggttttatgttgccgagggcacagtcgaagaccatccggggcttcccgtggccgagatgtgttcgcattgttactctacgtacccgcagtttgaagtagcggaggaggatgcagacgaaggggcgctgcggtgcgcggccggcctaagtagcgtgcgcgatctggttgaggagttcgtcgcatatggggtgtggcccttggcgcgtggttgggcgctgggcgaagtatgccctcaccagatgccttcccgtggtgggatgctggtgcgaagtcccgccttcgcactggatttgcgtagccgcgatcccgtcgcattcgtgcgtgaggcggaggatggggcagtgcggattgttggtcggtacgtgccaaggacggagggccagcgtagttgggatgttcgcgggtccaacgatcgcttgaacagggtcttcgagttgaaccgtttgccgtatggcggttatcccgggcaggacgatgtcgaccgtcgcgggaagaaaccggtggcagagaccggagacgaccccgcaccagcggtcgccccatcctctaagaagaggaagctaggtactgctatgggaggactgggggtctccgatagctttgctatggagttgatggggatatgcgcggcccccgggggaaggatgtctttgcccgagctccgggagtcttcggcgcggatgctgaaggttaccgggggttggtggcctaagaacgttctgatcccccgcgcggtcggcgaagacttttttacatctcgcatggttcgtgacttcagagtgtttctttatggatggaatattgctactgttgtgtcagcagtgatggataaggatcgtcaggaagctgcgcaaaaacgcagggcggtcgtcaggctgcccgaggctaggccgaagagggcgcgggggatcgcgaaggctgccgcccccggcggtagccagccgacgctggcggcgaagtcgaccggccctgggtccagcaaggtggcggatgtcgtgaaggcagctggcgctagcagagccaagtctacctcggctgaagccacgaaggaccgagaattgcctctgccgggaaagcgcattgccgatttcggcactgatattagtgtagatcattatctcactg

SEQ ID NO: 20498 - DNA, 357 bp, Zea mays
  Peptide Sequence Number=SeqID_63873
atgtatcttgtcatccggctcttgcatttgcctgaaagccttcgcgaaaatgatatccactgcactgcctgtgtccatcaggacattatggaccaaaaatcccttgatgacacaagatatgaccaatgcatcgttgtgaggataatctttaagctggaggtcttcctgagagaacaacttgagcagcctatgattgggagcaccagcttcgtagccgaagctgccgcagcttggttgccttgcgaagccattgtcacagttgttgaagcgagttcaccggaggtgagcgccaatgttggtcacttgttctcaaatgctataaatcaagaacaaggcaacacaatcgttaatggttaa

SEQ ID NO: 20499 - DNA, 1785 bp, Zea mays
  Peptide Sequence Number=SeqID_63874
atgcaatttcataatcaaagagagcgaaaaagtagaacgaatgatgatattgaccatgagcgaacacgtgaaaattatgatttgaaaaatgataaaaatattgattacaacgaacgtgtcaaagaaattattgaatcacaaaaaacaggtacaagaaaaacgaggaaagatgctgttcttgtaaatgagttgctagtaacatctgaccgagatttttttgagcaactggatccaggagaacaaaaacgattttttgaggaaagttataaattattttccgaacgatatggcaagcaaaatattgcttatgcaacagttcataatgatgagcaaacccctcacatgcatttaggtgttgtgcctatgcgtgatggaaaactgcaaggaaaaaatgtgtttaatcgtcaagaactgttatggctacaagataaattccccgagcatatgaaaaaacagggttttgagttgaagcgtggtgaacgtggctctgaccgtaaacatattgagacagctaaatttaaaaaacaaactttggaaaaagagattgattttctagaaaaaaatttagcagttaaaaaagatgaatggactgcttatagcgataaagttaaatcagatttagaagtaccagcgaaacgacacatgaaaagtgttgaagtgccaacgggtgaaaagtccatgtttggtttgggaaaagaaataatgaaaacagaaaagaaaccaaccaaaaatgttgttatatcggagcgtgattataaaaacttagtgactgctgcgagagataacgataggttaaaacagcatgttagaaatctcatgagtactgatatggcgagagaatataaaaaattaagtaaagaacatgggcaagttaaagaaaaatatagtggtcttgtagagcgatttaatgaaaatgtaaatgattataatgagttgcttgaagaaaacaagtctttaaagtctaaaataagcgatttaaagcgtgatgtgagtttaatctatgaaagcactaaggaattccttaaggaacgtacagacggcttaaaagcctttaaaaacgtttttaaggggtttgtagacaaggatacggattttatgaccgatgatgaagaaaagaatttgaaacgtttgtctgatttggaggaaggtttacaccgtaaaagcgtattaaatgaaatggttttgaacgtctcattacctgatattgcaaatgattttaataaaccacctgcgagtacaaactgggtgaacacagcctttatgttaaccttttccattggaacagctgtatatggaaagctatctgatcaattaggcatcaaaagcgtgctgtcattcctgatatttgtaaaacatatcaggaaagtaacagatccttttgttgatcccggattagggaaaaatataccttttatgattggagttctttgtgggggaattatatttggaacagtagcagggtttgtctctatggttccttatatgatgaaagatgttcaccagctaagtactgccgaaatcggaagtgtaattattttccctggaacaatgagtgtcattattttcggctacattggtgggatacttgttgatagaagaggtgggctttcgttcaccaaaacagttatatcaacaattgtttcaagtagcttgaaacagcaggaagctggtgctggaatgagtttgcttaactttaccagctttttatcagagggaacaggaatcattgtcattagttggctggttaccttgaatgtatataaacattctcaaagggatttctaa

SEQ ID NO: 20500 - DNA, 447 bp, Zea mays
  Peptide Sequence Number=SeqID_63875
atgactgacacagggttgattctgggacaaccttcttctcatcttctcttcactatcttcttttcactaaccctttctttctctttactcttcccactgggggattctatcgatgagtattaccatcatacagaggaggaaaccaaagactatgaaccatgtgcaacagtcttcaatccaagaatcaccaagcattgtgatcttaggggcgagggagtggaaaatggagttgcttgggatttggcagaggggattttatcagggggcgtgggggcggtgctagtgcgcatggaggcgggcactcgtgcgggggcacgggtgagtggtggggtcaatgaccctgatgtttgtggtctctggttccaagaatctttgcctctctgtatgggctctagccaaagtgaagaaaaacttcactacccaatgcatgcagaggactgggcataa

SEQ ID NO: 20501 - DNA, 759 bp, Zea mays
  Peptide Sequence Number=SeqID_63876
atggaggttcgttgccaaaccagcttttgccagaatgaagatggtttccccaagttgctgagagcagacacaattcgcctcggaatcaggagccagccagagtatgatggtcgtgaattcgtcgagcatggcacagagaagtgtgtcgtgattgtatacattgggtccagtccacaccatgtggaatggagtgtcactgctgctgggcacagattcaaagacacctgccaagtcgtcgctcgcaaggcattgagggccctgtgtcagatctatgaagaagaagtggccgacaccccgctcagattctttccgccctttcagagagaccgtccagtttggatggccaggatgcgtgcattggaagggaagcagctgcttgaggacgacccacagtcatgtacctcactgcatacctactcatccttgatgcacagtatgatttcttggctcggcaccaccgtcacctggtctctaccagaggagaaaagaaggcttgggaactccccgaaaggagccatagtcttggaaggaattccagtcttccctcaggctatggataagcaagaacaccccgagtccttccgagatcccccgccagagttgtttgagctcctcgccatgaagaagattccagcaccatcccatgagatcaagaagaagctgcaagcaccccgccagcaccgccgccctctgaggagttacaagagccagtccagcttgaagaagagttcaaccccgtgttgccatctcagttgctag

SEQ ID NO: 20502 - DNA, 993 bp, Zea mays
  Peptide Sequence Number=SeqID_63877
atggctgaaaggtaccaactcccatggagttgcattcctccaacgacaaggcggaaggactgcgggcatcccccatccgggggctcggagggtggaaagacgcgatgcataagggagcgcgaagacatggtcgcctttcaagggggtcaccctccttttaaagacgactctccctacttgcgtccccagccgtcgtgggctgagtcttctccaacacgctccaaggtcctccccctacggcgcgggggctgggtcccacgcgtcatgcaagttggcccagagcagaagaagccataccgccgagcgcgatgcatgcaaccgcccagcggttacaagcatccctccacttttgcccagaccagcgggcgaaagggcgggcggccatgcaggcggcatgcaaccgcgccaagtgggcgcacctctccgacttccaacgcgcccagcatggatgcccacgcccacgcgacacgcaaccggcgcgccggtcgctacgtgcaagcaactgcaccgccactcgcgccaccatcgcgcctcctcgattgcggaatcagtaccgcgactcgaggcgacccagcgcgtgacccagtagcgccagcctggcgcgacggtcaatgcggccaaaaatgggccggcagtaatggcggtggcaggcgggcgggagcagcggtcacgtcgtcagccaggcttatgtcccatcctgggggaccgggaaaggggtataccccgaaaaggatccttctccgtgaaggaaacaggctccgagcctccctactaatcaggggttcgaaggctggcccctcggaggggttcgacagccgcctcagagcgcgtgggctccacacccactactggtcagaggttcgaaggccggccccttggaagggttcaacggccgcctcaggccactcgggctccgcgcccactactgatcaggggttcgaaggctggccctcgaagggttcacagccgcctcagacacagagcgagggatga

SEQ ID NO: 20503 - DNA, 300 bp, Zea mays
  Peptide Sequence Number=SeqID_63878
atggactacgctacaccagcaggagtcacgctggaagctggctccggacagccccaccaacggcggcgaccacctctgcatcgacggatcgccggcgacagcgaccacctctacaccagtagcgacaacgacctccgctccgagcggctcgccagcagcagcgatcacctcagggtcctcgctcccgtctttgctaagggagtgaggacatcaaagaacgcggccgccgcccccgcgacgtacgatgccatgtacgaccccctagtacgaccgggggcgtgggagaagccgtgggtgtga

SEQ ID NO: 20504 - DNA, 966 bp, Zea mays
  Peptide Sequence Number=SeqID_63879
atggaaaaagagccacttgacatggttgagagctcagttcgagtcatcgagacacatgttgacatcattcgcagtctagtgactgatggggttgtggatactagtgaaccggaatcagtgtacacacttaagaccactttgtttcaaattggagatgtatgcgacatgcttgagaagtgtgctttgtccatcaaaaagtatgctgaaattattcaagatgaagccctgcaatatgctgaagatgatgaagctgcagatgatttggaggaactcccaagcccagatctccttactcaagccaacatattggaaaaatattttggaattgaacagagaaggcatggttgtgatgttataatgctgaaggaccccaagaagagattaagtcctgtagtctaccacctcccgttatttgtgggcttcactgatggctggaaacatttggtgatagcaaacgaccttcgggctgaagacgtctgcgagcttgttaaggggccagacgatgagatcttagtacccgacctaagagaagagaagcgcacagatgaagccggggtggctttaaattttgtgaccacacatccggacatagtacactggctcaccatcgtctggccccttaacaagctcgcagacgtccccagcccgaagcattataacatcacagccatgccttctctgtctaactgcattggaaagtgcccttctatctgcgagcttgcttctcgacccgatcctgccccggagggggacaacgagcagcctagtatggatgtggtctgcaccggtgcgtctaacaaagttgatgaagacgcgaccaaacttgaatggcagacaacgagcagctccggtgaacggagcggggaggatagttctagtgacgacaatccttgtactcctatacctccaaggaagaaaaaaacatcagatgagcttgatgccgaatatattcccaacgatgaagag

SEQ ID NO: 20505 - DNA, 414 bp, Zea mays
  Peptide Sequence Number=SeqID_63880
atggagttcttctcggacaccatgctcgatgctctcagctgttgtgacatcgagggcttcgcgctcatggatggacaaggacagtgtttggacggcgacgggcgagggtcgctctcaccatggccagtggggcttgattccttgacttcgatggatttgatctcttcagggcaccagcaatcgatttttgaagcagaagaaaaaaaagaacatgttcaaagaagggaaaggaagatcaatgaagagaagagtgagcttgtggggtcccctcaccgtgggcagctaggcgattgccccactgtgcagttgccgcatggggactcagggttggggagctctgtttctcgtggtgttggtgataatgggcttatcatgatggtgtttggttctctaactaaagcatcaagtatctga

SEQ ID NO: 20506 - DNA, 1038 bp, Zea mays
  Peptide Sequence Number=SeqID_63881
atggcgctccctgttgacgtggcgggcccgcgcccgaggccgggcgacgtgggggctcctccgaagctggggtcgaatatgtcttccgttgtcgaggccgagtccgagtccctgggtcgggcgaggcggaagtcgttcggcagaggccagggcggagtccgagccctggggtcgggcgaggcggagttcgtcatcttccggggccgagcccgagtccgagccctggggtcgggcggagcggagttcgccgtcttccgggtcttagcccgagtccgagccctggggtcgggtggagcggagttcgccgtcttccgggtccgagcccgagtccgagccctggggtcgggcggagcggagttcgccgtcttccgggtcttagcccgagtccgagccctagggtcgggcggagcggagttcgccgtcttccgggtcttagcccgagtccgagccctagggtcgggcggagcggagttcgccgttcttccgggtcttagcccgagttcgagccctggggtcgggcggagcggagttcgccatcttccgggcggcgctgtccttctgtcagaccggtcagtggagcagcggagtgacggcgggttgcttcttagcgaagccaaggcctcgggcgagccggagatgtgtccgccgttaaaaggggggcctcgggcgagacggaagtccctcgagctttatgctgatgggggttaccagctgagaattaggcgtcttgaggccatcgttcggcttcaaggattttcatcacacagcctggttgctcccctccgccggtggtcacccaagacggtgacctccagctcctggatggggagaggcaaaccaggttgtgatcccgtccccagcatcgggcgtgttcgtcatcctcgctggggcggggagcgaggcgagccggggctctacctcctgcgcgggttggcgaaccacctcctcttccagcttctggtggtggcaatcgtcctcccgcgctgcgacggaggcatcctccagtcatgccggggaaggcgaactgttgctgtctag

SEQ ID NO: 20507 - DNA, 483 bp, Zea mays
  Peptide Sequence Number=SeqID_63882
atggcgcaacaaagctcagcttctccagatcaaagaaatcgtggtcagcacctgaagactgcagcttctgcgtggccgctagatgtcaggaaaggatcgtctgcttgcagtgtagatgcaactgaggctgctgctcatctgtgcttccaccgcccaatgggacgcttccttttcttgagcatttcctcgtcgactgtttacggcatgggagcctgggaggaggcgtccagttcttgtgcgcttgccgtccgtacttgtaaagaaaaaaaagagaaagtatttcgtactaaccagatcaacccaaaaaatgttgagatacgtttcaacattttctatcgttgctacagtaacacggtgaagaaaatggcagccacagctgctgcggctgataatgcctctgaattttccttgaaaaaatttgttctagcagacatagtaggtgaacaaaccacattgaaaacgaagaagagctctgagaagtga

SEQ ID NO: 20508 - DNA, 660 bp, Zea mays
  Peptide Sequence Number=SeqID_63883
atgaccatcgttgccacgaatcgaaacagctgcaacaacccgaccggactcgacccaacccaacccaacccgtccataaccccaccggcccctccgcctcgcctgtcccaggctccccagctcaggtcctcacgccacgcacgcacgagccggagccgagggcgcgcccatccggacccagacagagctcgccggcgcctgcgcctccaccgttcggcaagcgggagggagatgaggggttcgtcgcggaggccggtggccgtggtgatggcctgggtgcgtcgccagccgcccaaggtcaaggccttcctcgccgtcgtcgcggggatggccgcgctcgtcttcatccgcttcatcgtccacgaccacgacaacctcttcgtcgccgccgaggccgcgcacgcgctcgggatcgccgtgctcatctacaagctcaccaaggagaagacctgcgccgagagcgatttcacgcttatagtcaggctcgttggctcggcgagccagctcgcgaggcgacatcgagtcgagccaacttttcagagacttctcctgaggccgaggctggggtcgggcgaggacgcgattcctcccgaggccgaggctgaggccgagccctggggtcgggcgaggcggagacctcctcccgaggccgaggcctaa

SEQ ID NO: 20509 - DNA, 627 bp, Zea mays
  Peptide Sequence Number=SeqID_63884
atggcgtcgtccgcgctgccgcaacagaggtcgtccgccgcgatcagcgacgacgacgaccgcgccatcgcgtcgcggctgaccgcgtcgttggaggtggcgacggggaacgccgagctcgcggcgcggtgggcggggcgcgtcgacgacgagaggcccgcgtcttcgtcgctcaagaaggagtacgacgtgttcatcaaccaccgcggggtggacacgaagcacacggtggcgcgcctcctgtacgaccgcctcgaccacctcagcgcggggcgggtgcgctccttcttggacaacaagtccatgcgccccggcgacaggctgcaggagagcatcgacgagggcatcaggcagtgcaaggtcgccgtggccatcttctcccagcgctacttcgactccgactactgcctccgcgagctcgcctccatcgtggaggcgcgcaaggtcctcatccccatcttctacggcatcaagccctcggagctcgtcctgccgcaggaggtcgccgacttgtacacgagccaggacgtcaagcgcttcagcctcgccttccaggaggccaagtcaaccgtcggtctcacctacgaccccgccacaggaggttttggtcttaattttggtaattag

SEQ ID NO: 20510 - DNA, 711 bp, Zea mays
  Peptide Sequence Number=SeqID_63885
atggcgcttcctgttgacgtggcgggcctgtgccctaggtcgggcgacgtggaggctcctccgaagccgaggtcgagtctgtcttccatggccgaggccgagcccgagcccctgggtcgggcgaggcggaggttgtccggcagaggccagggcggagtccgagccctggggtcgggcgaagcggagttcgtcgtcttccggggcctagcccgagtccgagccctgggtcgggcggagtggatcggagtggcgcaggcggcgctgtccttctgtcagaccggtcagtggagcagcgaagtgatggcgctttatgctgatggggggtaccagctgagaattaggcgtcttgagggtacccctaattatggtccccgacacccggagagactctcccggctgctgccggctgcttcggaggtcccaggagtttctagggcgcacgtacgtgccctggaaattgccggcgaaggcctggaccaggtcgtcccagttggagatctgccccggaggcaggtgctccaaccaggcgcgagcggtgtcggagaggaacagggggaggttgcggatgatgagtgtcacacccggtttttagaaggcaaaccgaatgcgaaccatagcaagggtgagtacacatcaacatactcagcaagtatcctgtttggctgtagtggactagctttatgtggggatcagtcaagcagttgcttttag

SEQ ID NO: 20511 - DNA, 489 bp, Zea mays
  Peptide Sequence Number=SeqID_63886
atgggggggcctgtggagcaacagaagatcgacgaacggcatgccgtcacccgctccagcagcgacgacgacgacgacttctgctccgggcggccgaacagcggcaacgatgacctcagggcggatgctgctgccaggaggcccccgcccatgcccaaactcgtgaggcaaggacgggcagaaggccatagagttggaggggtcaccctccttttaaaggcgactctccctacttgcgtccccagccgtcacgggctgagtcttctccagcactctccaaggtcctcccctacggcgcgggggctgggccccacgcgtcatgcaagccggcccagggtggaagaagccaaaccgccgcgcgcggtgcatgcgaccatccagcggttacaagcgtccctccactttcgcccagaccagcgggtgaaagggtgggcagccatgcaggcggcatgcaaccgcgccaagtgggcgcacctctctgacttctag

SEQ ID NO: 20512 - DNA, 504 bp, Zea mays
  Peptide Sequence Number=SeqID_63887
atggagggccgcccaggggggcgaccggaatcgcggccacggcgggtgcagcaggcagggagcggccggtggcgagctgacacgcaggtacgggcggcggcggggtacgagtacgtgtcgagcaacggagtcatatttctcggggcaatgccttcggcaccttcccactctctcttcccctgcccgcatgcgcctccgtctccggccgaccggccggctctcctccatcgcaacatttcaagggggccgggcgaaagcaccaaaaatcccagcgcagatcactcgaccgccgcctgctccatttggaccctcccaaccgacagcgtaaggctctctgcaacagagccggggttccggttcgacccgacggacgaggagctggtcgtccactacctcaagaagaaggccgccatcatcgcctttacaagttcgatccgtgggagctaccttggcgcaacgtctggcaaccgcgagaaggtcggcgtcaagaaggccctcgtgtaa

SEQ ID NO: 20513 - DNA, 480 bp, Zea mays
  Peptide Sequence Number=SeqID_63888
atggcgaacgggccaaaaacggattttcggccacggccgcgaaaacgggcacgtggaagggcacgggaccctcccgtggtccccccgcgtgagacgtggaagttcgggtgcacccgacccccgctgccgtgcggccgactcccggcgcccgtgtcccatcgctcgtgcgggcatcccgtgcctgctgcgttgagaagtgcttgcgtgctgctacccgtcccacgggaagccgtgctcgatacacgttgccttcgtcgagctcacccccccggggtgcggctcgtcggctcgagagcgcccgcggcgtttgcctcgtgccgccgtcagcctatggccggcggcaccgaggacacctcgctggcgcttttggtctcggatgtggctcacgctgaaggccggagacgcgttggcgtcacgcgcccaagaatcggtccgcccgaacgaacgacggccagcccggcacgacgcctccgcgcgtag

SEQ ID NO: 20514 - DNA, 810 bp, Zea mays
  Peptide Sequence Number=SeqID_63889
atggtggcatcctcgtccaaggaggcatataggaggctgctcgcggggaagctgttcaacaaccagacacatatcttcgccttcaggaacaagctgccagaacccgagaacatgtctatcaccaattctgccgagaggaccgtaaacgcaccagagcttgttgatgactactacctcaacctgcttgactgggggagcaacaacgtgatgtccattgctttgggaaacaccgggtgcctgcgggatgcatcgagcggatccacatctgagcttgtgaccatcgatgaggacagcggtcctattaccagcccgagaacactgagaggtgtgcatgaggcaaggacatacgagaggcacatttgggatcagggcagcagctggccaggaggtgtgcggactcaagtggtctggagcagggcagcagctggccagtggaggcaacgacaaccttctgcacatttggggatgatgccagtattttctacttgctgtattgaaatgattactagatgggataattcaatgccttctgagggatcttctgagatagatgtctggcctgagttccagaatcttactggagatgttatctcaagaactgcgtttgggagcaactatcaagaagggaggagaattttcgagctgcaaggagaactagctgaacgcctcatccaatctgttcagacaatatttatcccaggctattggaagctccagacagagaaggcaccgacggcactaggacctaattctcaggccatcaaagcaaacactgtccagttaactggtcataacatttttttacaataa

SEQ ID NO: 20515 - DNA, 1680 bp, Zea mays
  Peptide Sequence Number=SeqID_63890
atgggcaactgctgcgtaacaccgaacggagccgccgacgccggcggcggcaagaagcccaaggagccgaagcagaagaagggcaagaagccgaaccccttctcgatcgagtacaaccgctcgacgccggcgagcgcgccgaggctggtggtgctgcgggagcccacggggcgggacatcgcggagcggtacgagcttggagcggagctcgggcgcggcgagttcggggtcacctatctctgcacggaccgcgcctcaggggaggcgctagcctgcaagtccatctccaagaagaagctccgcacccccgtcgacgtcgaggacgtgcgccgggaggtggagatcatgcgccacctccccaagcaccccaacatcgtcacgctcagggatacctacgaggacgacaatgccgtgcacctcgtcatggagctctgtgagggtggggagctcttcgaccgcatcgtggcgcgggggcactacacggaacgcgctgccgccttggtcacacgcactatcgtcgaggtcgtgcagttttcggtcactagtatgatagctttctcaaaatttgattcgataggttatgtattaaatatgtgccataagcatggagtgatgcacagggatctcaaaccagaaaatttcttgtttgcgaacaaaaaagaatcagcagcccttaaggccattgattttggcctgtctgtatttttcactccaggcgaacggtttacagagattgttgggagtccttattacatggccccagaggtactaaagagaaattatggcccagaggttgatgtttggagtgcaggggtgattctgtacattcttctctgtggtgtccctccattctgggcagaatcggagcaaggtgttgctcaggcaattatccgatctgtcattgatttcaaaagagatccatggccaagggtctctgataatgccaaagaccttgtaagaggaatgctcaacccagatccaaagcgacgattgacagctcagcaagtgcttgatcacccatggttacagaacattaagaaggctccaaatgtcaatttgggcgaaactgttaaggccagacttcaacaattctctgtgatgaacaagttcaagaagcatgcacttagggtcatagctgagcatctttcagtagaagaggctgctgacataaaggatatgtttgagaagatggatcttaacaaggatcaaatgcttaatttcgatgagctgaagcttggtctgcataaatttggtcaccaaatccctgatgcagatgttcaaatactaatggaagctgcggatgctgatggaaacgggtccttggattatggagaatttgttacactatctgttcatctaagaaagattggaaatgatgagcatcttcataaggcatttgcatactttgaccggaaccagagtggttatattgaaatcgatgaactccgtgagtcattagctgatgaccttggacagaatcatgaagaggttatcaatgccattatccgtgacgtagacaccgataaggatggcaagataagctacgatgagtttgcagcgatgatgaaggccggaacagactggaggaaagcgtcgagacagtattcgagagagcggttcaccagcctgagccttaagctgcaaaaggatggatcgttgcagatggagagtacgcagtag

SEQ ID NO: 20516 - DNA, 276 bp, Zea mays
  Peptide Sequence Number=SeqID_63891
atgtctcctggtgcaccgaacactgtccggtgcgtcaccggacagtccggcgagatctatgtgccgttggtgaacgtcgccactctgcgcacacgcggaccatccgcccaccaggcatggatagtccagcgcaaggcagaaacccagctactgcttccaggtcacggaacgtccggccctatgtcgcggaacttccgtgttgccacagagagcccgccgagcgaaacaactcctaggtgtttggcgtctggattggcgccaacacacaaggactaa

SEQ ID NO: 20517 - DNA, 192 bp, Zea mays
  Peptide Sequence Number=SeqID_63892
atgaacgtcgggattcaggattgtatcaagggaacgaagaagcttgaggacgaccatgggtggttgacacctgaggacattgacagatacactgctcacgaggggtttgatggtttggacctcaaaactattgggcatacggtttctcgtatttgggcctcaaaacctaggtggagttatgatgggaactag

SEQ ID NO: 20518 - DNA, 2013 bp, Zea mays
  Peptide Sequence Number=SeqID_63893
atggtcgatcttgctgatctcgagggtgcgggcgaggcggcgcgctcgcatcccgccgcttccggccagcgggacaggctggcggcgctgctggagctcgctgcggcggacgacgccgcggggttccgcgaggcgctcgcgggaggaggcggccagggcgacgcagcggagctggcggacggggtcgggctgtggtacggccgaagcaaggcgtacgagccgcgcacgccgctgatggttgcggcgacgtacggcagcgtcgaagtggtgtcgttgctgctcggcctcggatgcgtcgacgtcaaccggcgccccggcgtcgacggcgccaccccgctgcactgcgccgcttccggcggctcgcgaaacgccgtggccgtggtcaagctgctcctggctgccggtgcctgcccggtaacccccgactccgccggtcgcttgcctgccgacgtcatcttgcctcctgcttcgcccgacgccttgggcgatctggatatgctccttggccgccgccgagggctcgctgtcgcgacctcggtaccatcgctctcgtcgtccccgccgctctcgacctcgccggatgaaggtaacaggtcgccatcctcgcggtcgtcttcgttgtcaccgattaccgtggaccgcgccaagaaggagtacccggtggatccgacgctgcccgacatcaaaagcagcgtgtatgcctcggacgaattccgcatgttcgcgttcaaggtgcggccgtgctctagggcctactcgcatgactggacagagtgtccgttcgtgcaccctggtgagaacgcccgccgcagggacccccgcaagcacccatacacggctgtaccctgccccaacttccgccgccctggaggttgtcccagtggtgatagctgcgagttctcccatggtgttttcgagagctggctccacccatcgcagtaccgcacaaggccctgcaaggagggcgcagcttgtgcccgccgcatctgcttcttcgcccatgatgaagatgagctccgccatgtgcctcacaatagtggtgcaggcctgctgtctccccgagcctcttcatccattgacatgaccgctgctgctgctgctcttgggcttctacctggatctcctaccagacactttgtgccaccacctctgtcaccatctgccgccaacaatggtggaggtgctgctgctcattggcttcaaggtagcaggctacgatcttctttcaatgcaagggatgcacaggttgatgaccttggcgtgctcctggaatgggaatcacaataccttggagctctcagcctcccacaaagcagccgatcccagctgagtattcgtccaaccgcaattgctccatccaatcttgaagagatgtatgcttcagacatggctatgtcgccaagattctccaatgatcaagttcactcagtctactcaccagcacacaaatctgcacttctaaacaagtttcatcatcagcaaaagggccttctgtcgcctgtcaatactaacaggatatactcgcctaggggtcttgatccatcagttctccattctccatttggtggtatgtgtcctcggtcccctcggactatggagccagcatctcccttaactgtctgtgtcggggctactgctacacagcgtgatatgttggatcagttctcttccctgaacaagcatcaggtgccatctgcgggatcgccacggaatcttaatgtctcatggggcaacattggtaccccaaaaagtaaggtggattggggtgttgacaaagatgaactagtccgcttgaggcaccctgtgcaacctggaaatacagaagaggagccagatgtgtcttgggtgcagtcaatggtgaaccatgctgagctgagtggcaagaggggtgaaatggcaggcatggcttctcgaccaactaataggcctgaactgagcagtcaggatgactcactggatgagagtgttattgcttcttggcttgagcagcagatgcacttggagccgaagtaa

SEQ ID NO: 20519 - DNA, 342 bp, Zea mays
  Peptide Sequence Number=SeqID_63894
atggtgatagtgggcccgcagcggagccaaggacagcagtcaaatctcggggctgcgactgcgaggttggacccgcctgctcgtgatgagctggtggaaacggaagtatggaaacgacttgctcgacggggacatggtcgttcgccccgtctcgcagacttgcttggcgaggacttggtcgttcgtcccaccatgcagacttactcgggattaaagttagataaatggaaattaagtaggagaaataaagaaagtactacagacgggcattgggtcagtcaggtgcataaaggttcaacacaaaccaataaaaagatcaagttagggttcaaaaagaaatga

SEQ ID NO: 20520 - DNA, 774 bp, Zea mays
  Peptide Sequence Number=SeqID_63895
atggccttcccagtaccgtgtggtaggttcctcggaacccgaccacctcgaacgtcagagtctcccttcggaagttggagggcgtttccgaagctgtcggcgtttcgagacaggggggtccctaagccgacgagtgagtgtgctgcgtgccccagcccagatgggtcgagcgcgtgggcgagcgcgaaggggggagaggcgaggtggccggagtcgagcgtgagagaggtcccgagccaaggggtcgggcgaggcggaagtcgttcggccgaggccagggcggagtccgagccctggggtcgggcgaggcggagtttcgtcgtcttccgggtcttagcccgagtccgagccctggggtcgggcggagcggagttcgccgtcttccgggtcttagcccgagtccgagccctggggtcgggcggagcggagttcgccgtcttccgggtcttagcccgagtccgagccctggggtcgagcggagcggagttcgccgtcttccgggtcttagcccgagtccgagccctggggtcgggcggagcggagttcgccgtcttccgggtcttagcccgagtccgagccctggggtcgggcggagcggagttcgccgtcttccgggtcttagcccgagtccgagccctggggtcgggcggagcggagttcgccgtggcaaggcctgactgcctgtcagactcactctgtcgagtggcactgcagtcggagtggcgcaggcggcgctgtccttctgtcagactggccagtggagcggtggagtga

SEQ ID NO: 20521 - DNA, 681 bp, Zea mays
  Peptide Sequence Number=SeqID_63896
atgccgcacgcgccccgccagccatcgccgccgggtattccgcccccgagcccgcgccccctcccgtctccaacgcgcccgccgccgccggctgcccgtgcccctacagccctgccccagcccccgcgacgcgctctacccaccaagcacgcccacgcccgagcaggaagccgcggatcataccagatcctatccatgcctgagcaggcacgtagggatctcgcccacgccggatcaggcaggcgtggatctcgcccccgctgtgcccccgatgcacggctccttgcccccaccgtgtcacgcccgcggggccacggatctcgccaacacgccggtggatctctcccttcccccgtcgtgccccaggccctggtgcgggagtccggggaagcgagcgtcggctcctttaggattgggtcgtcaatgctgctgggccgcggggtgacgcttcgcgtgctcctcttcagctctctgtggcgcctgcgggcgcgcgcgtacgccgccatctcgtgcatgcgcagcgcggcgctgccggtggcggcgtcctggctgcgcctcaggaatacccatgtcctcctcctcatggtcgtcctcttcgccctcttcttacggaagctctccggcgcgcggtctcgggcaacgctcacacgtcggtgcaggcaatacgaaaagctcacttaa

SEQ ID NO: 20522 - DNA, 513 bp, Zea mays
  Peptide Sequence Number=SeqID_63897
atggtgagggtctgggcgctgggaaaaggctcaggcgagctcagggtgacacggcgggctcagccatgggcacgacaccggcgtagaggcaccagagagcacggtccgaggcaaagcagccccacggcggcgcagcttaactctggcgagcgattgcatggacaacagggcagtaaatgggaaattaagggcatgggtgggttggttacgtcgagagatgactctagagcgcttgagcaacggcgaggacaccgcgagggccctggtggacggtggcggagactcggctgcatggtgataggtccggtgagcgaaccaagggaaatagaggggctggggaaaaccagagggtgtctcgtgttgctggcgaggaggcgaagatcagtagggcaatggacgcgacaggaactcgacgacggccacggaacggacggtggactacggcagtgctccacggctgtgcgctcggtgcgagagagaggtgcgagggggtcggctgtgggacgctactga

SEQ ID NO: 20523 - DNA, 1130 bp, Zea mays
  Peptide Sequence Number=SeqID_63898
actctgagatgcatctcacatatttgctgggacttctcactcttctgactaccagcggcagatatgttgaggagtgggtccgtgtgttcaatgcgtcagtatggatcgaccccgatcaccagtggatgagcttgtgctatggtacctctgatcctcctcgtcgccctcacgacggagttgctccagctacagctcacatcgcggctttgttccgaccgcccttctcagatgggtcgcgacgttctccggcagatttcactacagtagccaagtacttatatcagctcatgagacggacgcttctgtcgtggatgggttatagagaggctaccactcatattcagctttggctcctcggtgccctgatctttcattcagagtttgatgttgttgacttccttatttgtgagatcgaggacacgggcacccttgaggcctcacgcctcctatttggctcctaccatccagcccctgaggatccagtaccaggcgcagcagttcctgacgatgatgatgatgatgatgatgatgattttgggattccgcctctgcctcctgtgcctccacgctcacatgaccatgaggcccggagttctcgtgctgcccctgctgttcctcctgccattgaccctgctctggctgcgatcctccagactcttactcagcagcaggctcatctggcagcggacagacaggacactctgcagcagcagcttttggcagacaaggctgagaaccgggccttcatgactcacatacttcagcataccggtgctcagattcctcctgttcagtctgcaccccctctagatcttcaggccgctgttgtgctagcccttcaggcaggaccccctctaccttcatttggtccttcttcctctccgctcctgccggtcaccctggttttctcgtcgccggtcatcagctccatcagcgctcagccgccagtgccaccagctcctgctgttaccactgctgttgtggcggtgtctgtgacctcttcagcttcggtagctcctgcagcacagcctccatccgagtcagtactagctccagcttctacggtagatcctggatccgaggctgactctgaccctcagctggcgtttgctcttctgccacgatcgtga

SEQ ID NO: 20524 - DNA, 693 bp, Zea mays
  Peptide Sequence Number=SeqID_63899
atgggtggtgggagccgagccctttccctctcctccctctgcgccaccaccctcgccgccgccaagcccccacagcaccccgtccccttcgccccggctcaccgcgcgctcccccaccgcctcgccgccgccatgtcctcctcttcctccccgacccccgccgcatcggtggacgccggtgccccggccccttcggcgtccaacgccatcgacttcctcacgctctgctaccgcctcaagacgaccaagagggcggggtgggtgaagcgcggggtgcaggcgcccgagtcggtggccgaccacatgtaccggatgggcgtcatggcgctcgtcgcggccgatctacccggcgtcaaccgcgacaggtgtgtcaagatggcgattgtgcacgacattgcagaagcaattgttggtgacatcaccccttctgataatgtacccaaggaagagaagaaccgcagggagaaagaagcattggaccatatgtgcgagctgcttggtggtggttcaagagcacaagaaattcgtgaactttggatggagtatgaggagaatgcgtctttggaagcgaaggttgtcaaagattttgacaaggttgagatgatacttcaagctctggagtatgaaaagggggaggcttgtctcgatttatcccatctcaagaccccactcatgtggcagcctccgccctag

SEQ ID NO: 20525 - DNA, 432 bp, Zea mays
  Peptide Sequence Number=SeqID_63900
atggataccgcgagcagcctgcagggaaccccgcgccatgggagaaaagcagagccgagcggctggggattcagccagcgagcagaggggagatgggaaggagctgctcggctgcggcttgctgccgggcctgacgacgacggccagcccgaccgcggcaaggtgaggggagacgcggtctgcgcaaagggcgagctcgagcaaggaactagagccgacgatgtccacgacgagcaggaccagagacacggtgctagtggatggaaactgagcacaggatggatgcaagctggagacgagcttggtcaggtcgtcgggcacagaggtgctcggagggtccgacgagcacagccggctgccggctgcctttggatgctgatggatggaagaaatgctggtcgctgggtaaggctggaggagagacgtgcgtga

SEQ ID NO: 20526 - DNA, 249 bp, Zea mays
  Peptide Sequence Number=SeqID_63901
atggacgagtctggtatgaaaaaagagatcggcctcctgggactagtaattgtatcacatttgagtcccagaggattggggacgcttcaagctgtggcagaacctcccaagttattgggcccacatgcacctgtccttgtcccaaagacctcagacggctgtgcatgtgcaccagataacttaacaggatctgtccgattgccccaaggacatcggataaaccacttacaaccagaaccgcaggattaa

SEQ ID NO: 20527 - DNA, 107 bp, Zea mays
  Peptide Sequence Number=SeqID_63902
atggatatgatggattcaacatcggaaaagatgtacctctgccaggaccttgtcgatgtaggcttgatgatcgaggaccctttaactggtcacatgcctcgtcatgg

SEQ ID NO: 20528 - DNA, 429 bp, Zea mays
  Peptide Sequence Number=SeqID_63903
atgggagaaaagcagagccgagcggctggggattcagccagcgagcagaggggagatgggaaggagctgctcggctgcggcttgctgccgggcgtgcgtggagaagaaacctgcgcgctggagatttctgacgacgacggccagcccgaccgcggcaaggtgaggggagacgcggtctgcgcaaagggcgagctcgagcaaggaactagagccgacgatgtccacgacgagcaggaccagagacacggtgctagtggatggaaactgagcacaggatggacgcaagctggagacgagcttggtcaggtcgtcgggcacagaggtgctcggagggtccgacgagcacagccggctgccggctgcctttggatgctgatggatggaagaaatgctggtcgctgggtaaggctggaggagagacgtgcgtga

SEQ ID NO: 20529 - DNA, 307 bp, Zea mays
  Peptide Sequence Number=SeqID_63904
cgggcccaactctatttccctgctccggcgcagcccgctcctgcccactctcgcgcctgcagccgcgtctggcatgtgggccatggccgtcaagtctatcctccccatggcgatcctgctcgtccgctgcaagctcgcctcctctctagtttcctctccttcagcatcgtgggctacgctcggtctgccgatcgggagagaaggcgccatcaccatcgtcgattctagaaggcacctcgtgcgagaacaacgaccagtgcatgcttcgctggtgacccgcggcgccacggagcaactgcgtggtggg

SEQ ID NO: 20530 - DNA, 564 bp, Zea mays
  Peptide Sequence Number=SeqID_63905
atggagttgctgcttggcgctatgtacaacagagagagggaggaatggcgccatgggaagctcgagctcggccaggggaaggaagaaaggggttcggcatccaagctgttggagcccaaggagagggtaggagctcggctcctgtggaaaatggcaggggcagaggaggccggctggagcaccgggcagggcgctcggccatggagccgctgcatgggatttgctgctgcgccctgggagaaaaacagtaggggagtgaaggatgccatggctgggggcgcggggagcagggagcctgctggtggccttgctgctgtgaagcagggaagaagaaaggcagaggacgccacgggaagagcttcggcgcgctggagggaaggaacgcccggccatggaagcccctgcgcgctggggaaggagctccagctctacgtgcttgaaggagcccacggctggaaaatggtagaggaggaagagaagggtgttggcggctggggtggaaatggaaaattttcagaatgcaagggagggaagcccatatttatagaggagaaattagggtag

SEQ ID NO: 20531 - DNA, 402 bp, Zea mays
  Peptide Sequence Number=SeqID_63906
atggctctcggacgtgaactctgcctcgctgaaggcgacctcggcctcgggacaaacttcgcctcgcctgagcccggcctcgtttacctgctccccgcgaatactggagcgggctcggtcgtgacctcgggcggacttctgcctcgcccgagcccgactctagcctcaatatccacaacggaaaggcgcccaacgtcaccatatactgcagagctgacatattacttagggactttttgccatactcagtactgtgtcaaccactacggcatgggcaacccccttgtcaggggggctcgggtacgtgaccaagcgctcagcccttgcctcggctctcagcagaaatcaagcgggcacaagtcaccaaacaagtacaagaccatgcttcttgaagatctttga

SEQ ID NO: 20532 - DNA, 576 bp, Zea mays
  Peptide Sequence Number=SeqID_63907
atgcctgagggcgcctataagtaccctggatgcacaatggtctgcccttcactccgcctcacgcctcgagcaagaactccaactccgcgagctctcccccgcccgccatcaccgcccgagcctcggccaccgcggccagctccctccagccacttccaagctgcaccagtcactcggttagcttcgccagtggcccgtgaagctttccaagtcctcggacccaacagagtttcaccagagacccaggatcgacctcgctggacttcggtcacccgcagccgcgcgccggatccctcgccgccgacgagctccccgcctgtgcacgtggaccaacctactccgaccaccaccgccgacgatccgcacctcgacgtgatcgccagagaccccggacctcacccgacccctcaccggagcaacctcgccgccgattgcaacctcgctgatggagagtacgtgctcatccctgagcaaggagctgtccacgaggaagaccaggagcaagctcccgagactgccatcgaggatctccccgcagccccatcatttggaggcaagccccggttttatgcataa

SEQ ID NO: 20533 - DNA, 285 bp, Zea mays
  Peptide Sequence Number=SeqID_63908
atggcggccaggtgtttgtttcaggcgctgaaacaatggagggggagagggctacggctggggaagtggtggctcggccacggcaagaacagggaaggggaggctggtcaccgaccttgggcgcggccagggaaaatggagttgctgcttggcactatgtacaacagagagagggaggaatggctccatgggaagctcgagctcggccaggggaaggaagaaaggggttcggcatccaagctgttggagcccaaggagagggtgctggccgccgtgcgcaagtga

SEQ ID NO: 20534 - DNA, 219 bp, Zea mays
  Peptide Sequence Number=SeqID_63909
atggggaacaagaccggcgtcccatctggctcgccccgatctatgtaccttatccttgctatactgtccatatatgttttcatgctctgcaaggtaaggtctgttcagtttggccagaaaggcatcccctgcctaaacacctacgacgaccgcaccatccgctaccccgacccgctcatcaaggccaacgacaccatcaagatcgacgaaatcttctag

SEQ ID NO: 20535 - DNA, 432 bp, Zea mays
  Peptide Sequence Number=SeqID_63910
atggataccgcgagcagcctgcagggaaccccgcgccatgggagaaaagcagagccgagcggctggggattcagccagcgagcagaggggagatgggaaggagctgctcggctgcggcttgctgccgggcctgacgacgacggccagcccgaccgcggcaaggtgaggggagacgcggtctgcgcaaagggcgagctcgagcaaggaactagagccgacgatgtccacgacgagcaggaccagagacacggtgctagtggatggaaactgagcacaggatggacgcaagctggagacgagcttggtcaggtcgtcgggcacagaggtgctcggagggtccgacgagcacagccggcagccggctgcctttggatgctgatggatggaagaaatgctggtcgctgggtaaggctggaggagagacgtgcgtga

SEQ ID NO: 20536 - DNA, 756 bp, Zea mays
  Peptide Sequence Number=SeqID_63911
atgcaggcggcatgcaaccgcaccaagggggtgcaccctttcgactccgacgcgtccagcacgggggcccaggcccacacgtcatggaccgggaaagaggatactccgaaagggatccttctccgcgaaggaagcgggccccgagccctcctactaatcagaggttcgaaggctggcccctcggaagggttcgacagtcgccttagagcactcgggctccgcgccctcctactgatcagaggttcgaaggctggcccctcggaagggttcgacagccgcctcagagcactcgggttccgtgcccactactggctggcccccgaaggattcgccagccgcctcagagcacgcagagcgagggatgactctgggtacgtccgatacatggccgaggctcgggctacgctcccgaggctcgggggctgctctcgcatgagggaacaaccaaaccagcccgagaacttggaacctgactatgcacccgggctacggccactggtaacccccatcagcacaaagctgcaaaggcctgatgggcgcaattcaggtcaaggctctgtccactcaagggacacgatcccgcctcgcccgagcctagcctcaggcaaaggcagccgacccaggaggattcacgtcttgcccgagggtcccctcaagcaacggacgcaccttcggctcgcccgaggcccaagcttcgcggagaaggaaccttggccagatcgccacgccaaccaaccgtatcgcaggagcatttaa

SEQ ID NO: 20537 - DNA, 594 bp, Zea mays
  Peptide Sequence Number=SeqID_63912
atggacatcacaagtaagatggacattgcacaaagtgagactcgggtgcgtagctcgaagacaactgatcaagccaaggacggaggcaagaaaagcttcgaggtaccaaatgcatgggagaaggtcaaggaggctgaggaacccaaagccaagggtgaagaagaaggcttgcaaagtcaaggatctgagcaaacggaggaaggagttgaaatagactccaagcccagatcctgttcccgggtcaaagggaactttcagcaacaaaaccctagacagctcgccgaggcccgctctggcagcagcgacaacgacctccgctccggacagccaaacagcagcagcgatgacctcagtgcagacgctgctgcgacaaggccctcgcccacgtccccaccatcaaactggtggtcaccgtcttgggtgaccaccagcgaggggatgcagccgggccgcctgatgaaaatccttgaagccgagcgatggctgaaaggtaccaacttccgcgaagttgcgttcctccaacgacgacaagacgaaagcaacgcgggcgctccccatccgggggctcggaagttggaagggcgcgatgcatga

SEQ ID NO: 20538 - DNA, 348 bp, Zea mays
  Peptide Sequence Number=SeqID_63913
atggacatcacaagtaagatggacattgcacaaagtgagactcgggtgcgtagctcggagacaactgatcaagccaaggacggaggcaagaaaagcttcgaggtaccaaatgcacgggagaaggtcaaggaggctgaggaacccaaagccaagggtgaagaagaaggcttgcaaagtcaagggctgaactctggcgaactggccgctctcgggaattcaccggcgatgtatggctataattcaccggactgtccggtgtgcaccggactgtccggtgagccaacggtcggccgggccaacggttggccgcgcgatctgcgcgggacacgtggccgagccaacggctag

SEQ ID NO: 20539 - DNA, 522 bp, Zea mays
  Peptide Sequence Number=SeqID_63914
atggccttactacactcggcgcggtatcagcagtccctgcgacgctaccacgcccaaggggttcggtcccgagacctccaggggaaaagaaacgccgctttacaacacgacgacggatcagacatcagtgggggagcagcagcaccctcggcgtcgactccaccttcggcggagtccgacccagcctcggacggcgacacggtcggaggatctccatctcgaaggaacctgtcagcaccgcgcctgggccatcgccgaggtgtcctccaggaacccggcccgagtagacgactcgaccgaccgctctgtagcctcagccagctgtcccccgaggacatcagcccggctcatggcctcggcaacccgactccggcgtcggtcccaccagtggacggcccgaccaggctccggccgatgaagcttctttttgagccaactccgcctctgtccacgctgacaccgctgacaccgctgcctctagctccggctcatcgcagagcggccgagggtttctttaactaa

SEQ ID NO: 20540 - DNA, 201 bp, Zea mays
  Peptide Sequence Number=SeqID_63915
atggcgtcggcgtcggccccggtggcaggggcagtggccgggaatgatgacgagctcgccgatctggtgaggcgcctcgtggacgccctcgctcgctacgctgatcgcctgcccttcgacctcgatcgccagttcacatgccgcttgcttggtgtgattttggaagaaacagctccagaggagcttcaggtggggctgtga

SEQ ID NO: 20541 - DNA, 515 bp, Zea mays
  Peptide Sequence Number=SeqID_63916
ctggtggagtggccgtgctgggctcctcatctgtaacagcggggacagtcacggtagacatgggaacatcttcagaggtttcagagacatcgcctggacgccgttcgccgctggccaagccggctgcttcggcgcggaagcagctgtcccccgtcaaggagaatcccaagcgacggcttgtcatggaggagcgccccctcgtggcgcaagccgcggcgtgctccattggtcggatcgggacgcaggcgcccgcccctggtgccgacgaagaagatgagcgggaggagggtgggggcggcggcttgtcatggaggaggtctggatctttgaagcgcggcgaggaatcgcctgctcccctcgccagcctcgacgctggtgatagcagcgccccccagggcgcaagccgcgacgggtggggcgggggcgtggtcgagcggggcacgcggaaccttccatccgcggcccaggcagaaccgtgcaccagtaaactgtggacgtctacactgtgctcttaa

SEQ ID NO: 20542 - DNA, 1521 bp, Zea mays
  Peptide Sequence Number=SeqID_63917
atgtcgacgacggagccgctcctctcggccggcgccgagaagaagaagggcggcaagggtccgcgcgtgggcatcgacgaggcgctgtcggcgcacgcgggggagttcgggcggtggcagctgcggcacttcgtggccgtgtcggcggcgtgggcgctcgaggcgctgcacaccatggtgatcatcttcgcggaccgggagccggcgaccgtgccggtgccctgcgccgccgccgggcgggagtgggccggtggcggcggttcaggcgccgctgcgtcgaccgtcgtcgagtggggcctcgtctgcggccagcgctacaaggtcggcctcgcccaggccgtcttcttcgccggctgcatgatcggcgcgggcgtgttcggccacctgtcggactcgttcctgggccggaagggggcgctgcaggtggtgtgcgtgctcaacgccgccttcggcctcctcaccgcgctgtccccgaactactgggcctacgcggcgctgcgcctcctcacgggcttcagcgcggggagcgtgggcgtgctggccttcgtcctggccaccgagcccgtcggccccgcccgccgcggcgccgcgggcatgtccaccttctacttcttctccggcggcatcgcggcgctcgcggccgtcgcggcgctcttccagggctcctggcgcgcgctctacgccgtcacctcgctcccctcgctcgtcttcgccgtcgccgtcgtgccgttcttcgtctccgagtcgccgcggtggtacctcgtgcgccgccgccccgacgacgccctgcgggtcatccgcgccatcgccgccaccaacggcagggccgtccctgaggatctcaggcttaagctcgacgacgaggagccagggaacaaggacgttggtgggagtacggcgcatgcggcgtcctcgggctccatcgtcgacgtgttccggtcgccgaccacgcgggtgcggcttgtgctctccgtgcttatcaacctcctcagctcggtggtgtactacggcctcagcctcaacgtggtcaacctcaagaccaacctctacgtcaccgtcgtcgtcaactcgctcgccgagatgcccgcctacctgctcacggcgctcctcctcgatcatttcgggcggaagcctctcgccatcggcaccatgctgctcagcggcgtcttctgcaccgccgggagtctcgtacccggcgcagggatcatgagggtggcgtgcggcgtggtgggcatcttcggcatggcggcaacgtacaacctgctgttcatctacacggcggagctgttccctacggtggtgcggaacgcggcgctggggtgcacggcgcaggcggcgcagatgggggccatcgtggcgccgctggtggtgatgctcggggagaggctgccgttcgcggtgttcggcgcctcgggcatcgtcggcggcctgcttgtcttgtacctgccggagacgatgaacaagcccctgtacgacaccatggcgggtctggaggaaggggagaagaacgttgtcaagtga

SEQ ID NO: 20543 - DNA, 2442 bp, Zea mays
  Peptide Sequence Number=SeqID_63918
atgccgcgcaagcacgcgccggcgtttacgcctgaggcagcctccgcctcttcgtcaggcggggctggccagccgcataacctccccgtgcttcaggcgaagatgaagcgtgacccggagggctacgaggaggagctccgccagctccaccgccacttcgagtcctcggtgttcctattccagcagcaggcggcgctggctacaacctcgtcctcgggaggcggcggggaggtggccaaggagctcggggacctcgccctgttccttgcccacgtcgcgcctttctacccggatgacctcgccgatttgcccgaccagattggtggcttgctcgacaccaacgcgcgtgggctgccgccggggctcaggtctcacctcgtgcaggcgcttgtattgctggtgaatcggaagattgtcgatcttgaggacacaatggagttattcatggagcttcaagttattggagatcgagctgtaaaaaagctagcattttcgcatattgtacacagtatcaggaggatgaaccagaagcacaagaatgaatcgacaaatcgtaaactgcaaaacgtcctttttaaattcttacaggctgaagaagagtcacgagcaaagagagcatttactatcctttgtgatcttcaccgtcggagggtctggtttgatgaacgcacaacaaatgcaatatgtgatgcttgtttccacccttcctctaggattatgatagctgctatttcatttcttcttggatatgaaaatgctccacaagaggatgatagcgacgcatcaagcagtgaagatgaagcagatcaaaacccacaaattcttctcagtaaacaggacgtttataaggcaaatcacaagggtacgtctgctagtaaaaaaaagaagaaagctaaattacagcgggtcattcgtagcatgaaaagacaacagcggaaatctgtcgaggaaactggttccagtttctattcacccctgacatatttaaaagatgcccagggttttgcggagaagcttttctctcggttgcagaaatgcaatgagcgatttgaggtaaggatgatgatgctaaaagtaatcgcgaggaccattgggctgcatcacttggttttgttgaacttctacccgtatcttcaaagatacgttcaagtacctccagatgctgttgaaccactgttcaagcagatagtaaatcagtttgtgcatgaccgttctcgtccagaggctattgctgttggcttaaatgttgtgagagagatctgcatgagaatacctttgatgatgaatgaggatctgctccaagacctcgttttatacaaaaagtcccatgagaaagctgtttccattgctgctcgttcgctgatcacattgttcagagagatctgtccttcattgttagtcaagaaagatcgtggccgtcctgtggatccaaaggctcggcccaaagcatttggagaagtcactgttgctagcaacgttcctggtgccgagttgctagatgaaaatatttcttcagaaggggaaagttcggacgatgagtctgatggttttcactccgatgatgagatggacttgacacctgcccctcctggaacagaagaaaatatggagggttcatctgttgcaaacaaacatgatgccgatggagataccaaagaggaagatgacgcatctgatgatgaagatggtacggatcaagatgactccaacagtgatagtgatgaactagacgatgactctgatgtggatgtgggtactgatatatctgatgaagacgaaggtgacgacggtgaactgaaagaaagcataaatggttcagaggatgaagctttagaccagaatgaagacagcgaagaggaagacaagtcaaaaggcagtggctctaaagcgcagaagaggaagttaaatgattatattggacagctaaattctgctgatgcaagccttcgagctctgaagaggttagcaactgccaagaaggctgaagaaccatctgatgaaactggtaaaattctatccgatgaagatttcaaacgcatcaaagaactcaaggctaagaaagaagcgaagctggctttggctcagcatggactaatcaagggtgtcgacacaaggtctgtaacctttaagatgccatcatctgaccagctcagcaggaagcgtgtcgatccacttgagcttgaggctcacgtcaggagaaagatgtccaaggaagaaaggttggcgttggtgaaagctggaagagaggatagaggtccttacatggcaagggcggccgtgaaacagaaaaagaccggtggactgagcaataagcagaagcagcacaagaagaggatgccactggcagcgactagagccaaggcagcacgttcccggcaggagaagaagcagcagcgcaagcgctccgggaatcagttcaggggccgcaaggcgtggaagtga

SEQ ID NO: 20544 - DNA, 714 bp, Zea mays
  Peptide Sequence Number=SeqID_63919
atgtccggtgtacaccggactgtccggtgtaactgcggggcaacggctacttcgcgccaacggtcgcctgcaacagcaattaatgcgcgccagagcgcgcaggcgtcaggcacgcccatactggcgcaccggacactctacagtgcatgtacgggggcacttgccgggttctgcttagttgtgctgccatcaacagaacctattggaattactgcccctccgattcgccttcgccgcggagtccgttgcgcccacccatgcttggttccgcctctggtgctgaaccctagcgtgccgcctatttacgcgcactccacatcccctgcgccgtcacttgcaaggcatggacgtctccgtgccgacggcttcttctttaggcttgtcggcaagaggacgaggtgccccctgccgtcgccaacgccgctccgcttcccgcgcgtcatgtccgtcgcgtccctggcctcgcccacctcgccgcccgcgcccgccccgccgcgccgcgtcattgtctcccaccgcctgccactccgcgcgtcgccggactcggcggcacccttcgagttcgccttcttcgtcgacaccggcaccgtcgtgtaccagctccgctcggggctgcccgtcaacgcgcccgtcatccacatcggcaccctcccagccgccgcggccgaagccgcctcagatgagctgtctgactacctgctggccaatttctga

SEQ ID NO: 20545 - DNA, 573 bp, Zea mays
  Peptide Sequence Number=SeqID_63920
atgtccgttgcgtccccggcctcgcccacctcgccgcccgcgcccgcctcgccgcgccgcgtcatcgtctcccaccgcctgccactccgcgcgtcgccggacccggcggcgcccttcgagttcgccttctccgtcgacaccggcaccgtcgcggaggatctgcttggtcagagtaaaaaggcagatgacatgagcagagttgctgggttagataaccaaggaattgttggccttcagaggcaaattatgaaagatattggtttattgtgtcaaacttatgctgttaatgtcgacaaatcttgtattggacataaatgtcttgagggtactagcttcaaggctttagtcgatagtggaacatcatttacttctcttcctctcgacgtttacaaggctttcacaatggagtttgacaaacaaatgaatgctacaagggtgccttatgaagacactacctggaaatattgctacagtgctagtcctcttgagatgcctgatgtgccaaccataaccctgacatttgctgcgaacaagagtgaaagggaattaggcttacacctagttcctatataa

SEQ ID NO: 20546 - DNA, 1155 bp, Zea mays
  Peptide Sequence Number=SeqID_63921
atgggtatgaaaattgacccaaacccgtaccctaatggggtaaaaacccatcgggtttcgggtttcgggtacccattgccatctctacgtggcagcagacatggcaacttgctcgaggagctgaggccggagtgggcgatggtggcgtacaaagcggtccctcctcgcgcgctcgcgtttaccggcacgttgtcgccggagtcggccatggcagagcaatccgatgatggagagtttgcgaacgccgactcgtcgtctgcagtcgccgctttactcgaagccaacggacgtgccggagaatccaggtccctgatcgccgactccatctcgcagcacctccagcagtcgaccgacgaggtagccctcttctactgcgacctcctggcggcgttctcctcgcgcgggctcaaggaccgggcaacggagttccacttggagctacggtccatgcctccgctctcagggcgcaaggcttacgcggcgatggtcaagtccctgtgcctgctgggcatgccggccgaggccgagacagcgctcagtgagatggtctcgcgagggcaccgacccgaggcggcccagttcggggccgtcgcgaggtgctacggcagggtcggctcgccggccgacatggagcgggtcatcgcgtccatggcggacgccgtgctgtcgtgctacagcgcctgccacgccaggacgctggcgtggctgaagaggatgcggaagctgcgcgtcgcggtaaccgcgaaaggctacaacttggtgctcaactcgtgtccgtcgctcgcttcggtggtgcgggagctgggccctgagcttccgctgtcgacggtcgggctggtcgggcggctcaggtctgcgtcgacaacaccgaaagcggaagtggaggtggtgcgggagctcctggcgtcgtcggcgtcggttctggacagggcgatggagtggtcggaggccgaggcgaagctgaacctgcacggttgcaacctacgtgctggtgctggtgctgcagtgggtggacgctgggaggaacgagcacagagatattggcggcggcctggaaaggaaagagagttaggttttcaccgagtactcattttcaccagcgtcggagactcacagcgtctggtagagggtaaaattgacttttaccgtagctaa

SEQ ID NO: 20547 - DNA, 705 bp, Zea mays
  Peptide Sequence Number=SeqID_63922
atgggggggcctatggagcaacagaagaccgacgaacggcgcgccgtcacccgctccggcagcggcgacgacgacgacttctgctccggggggccaaacagcggcagcgatgacctcagggcggatgctgctgccaggagccccccgcccatgcccaaactcgtgaggcaaggacgggcagaaggccgtagagttggaggtcctcccctacggtgcgggagctgggccccacacgtcatgcaagccggcttagagcagaagaagccaaaccgccgcgcgcggtgcgtgcaaccgcccagtggttgcaagcggctctccacttttgcccagaccaacgggcgggagggcgagcagccatgcaggcggcatgcaaccgcgccaaatgggcgcacttctccgactcccaacacgcctgacatggagacccaggcccacgcgtcatgcgaccggcgcgccgaatgcttcgtgcatgcagctgcaccgccacttgcgccaccaccgcgcctcctcgactgcagaaccaataccgcgactcgaggcgacccagcgcacgacccagcagcgccagcctggcgcgacggtcaatatggccaaaaatgggccggcagtaatggcggtggcaggcgggcaggagcagcggtcacgtcgtcagcccagcctacgtcccatccaggggcaatgagagaaccctctctcacggcgtga

SEQ ID NO: 20548 - DNA, 468 bp, Zea mays
  Peptide Sequence Number=SeqID_63923
atgacgacggcggctctcagcccccttacggaagcaaggagacgtcagcaaggactcgacagccccgacagctgtccttccgccaggctccagcgctcctccgacagccacgacatcacacgaacagggtgccaaaacctcttcggctgccacgacggcatgtgtcaaaggttcatctacaactatactaaatcgactgtccggaataccgtagattattccggacaggagaagctttttggaaaaacaggccaagcgcggacagtccgggcccttgcggcggaccgtccgcgacacaaggatgaccctcggacagaaccaatgcaaaaatccgagtctgcactatggaccgtccggaggataagcgcggaccgtctgagacctcgctcggaccgtccggcctcaggcacggaccgtccggtaggcaagtatccgaaaaacccgaaggtgacgggttcggaagaatga

SEQ ID NO: 20549 - DNA, 453 bp, Zea mays
  Peptide Sequence Number=SeqID_63924
atggcgcctcctgttgacgtggctggtctgcgccctaggttgggcgatgtggaggctcctccgaagtcgaggtcgagtatgtcttccgtggccgaggtcgagtccgagcccctgggtcgggcgaggcggagaccgtcggctgaggccagggcggagtccgagccctggggtcaggcgaagcggagttcgtcgtcttccggggctgagcccaagtccgagccctgggtcgggcggggcggagttcgtcgtcttccggggctgagcccaagtccgagccctgggtcgggcggggcggagttcgccgtcttccggggagttcgccgtcttccggggcttagcccgagtccgagccctgggtcgggcgaagcggagcttcctatggccggtcagtggagcggcgaagtgacggcggacacttcggctctgtcgactgaagggtgcgcgtcaggataa

SEQ ID NO: 20550 - DNA, 750 bp, Zea mays
  Peptide Sequence Number=SeqID_63925
atggtgacctccagttcgatggcgggggaaagcaaaccgggccacggcctctgcccctccctcagcctcaaggattttcatcaccaaggctggggaggggactgccgcgtgcctggctctcggacccgagtggcttcggagccgctctcggcgccgacttccgccacgacagctggaagaggttcttccgccgacgagatagccggggccgcctacggaccgacctccgactctacgaccttctgcccgtccttgcctcacgtgtttgggcatgggcgggggcctcctggcagcagcatccgccctgaggtcatcgctgccgctgtttggccccctggagcagaagtagtcgtcgtcgccgctgctggagcaggtgacggcacgccgttcgtcggtcttctgttgctccgcaggccccccctcgagtggggttactcgcctgttggttgtctgaaccgcttcaccaagcgtgagtcgccccgtgtaaaggtgacgagtgagagtggagacccttggaccgtgtcgccgtccgaggctaggtcggacctcgtcgaaggtgttgttgacgccgagggtgctgcggctccctcaattgttcggattcgagcctgcgggatcggatttgtagcaattgtttgtgcgagcgagagttgcttctcacggaaggtgatgagtgaggagtccctcggctcggtcagccttggctgcttacgtgtactccgtcgttttcaggatccactttcgaagtag

SEQ ID NO: 20551 - DNA, 309 bp, Zea mays
  Peptide Sequence Number=SeqID_63926
atggcccgcacccgcgcctataaagcccactcaggcgtcgaccacacccctccgcacgcgctcaacctcaccggagctcaaactcatcgtccctttcccaaccccgtccgaccctcggagacgactgagcacacctcggtgaagctccccgagcgaagaatcgaagtctgcttcgccggagaggccagtccacggtcgccggagttcacaaccccgccggagtgcgtggacagggttctctccatcttgccaccgggttggactgtcgagtgggaccctacctcggctgaggaggagcatgaggagtga

SEQ ID NO: 20552 - DNA, 576 bp, Zea mays
  Peptide Sequence Number=SeqID_63927
atggcgcctcccgttgatgtggccggcccgcgccctaggttgggcgatgtggaggctcctccgaggtcgaggtcgagtccgtcttccgtggccgaggtcgagtccgagcccccaggtcgggcgaggcggaggccgttggctgaggccaggacggagtccgagccctgggtcgggcgaagcggacccgagtctgagcccctgggtcgggcgaagcggagttcatcgtcttctggggctgagcccaagtctgagccctgggtcgggcggagcggagttcgccatcttccggggcttagcccgagtccgagccctgggtcgggcggagcggagtttgccgtcttccggggcttagcccgagtccgagccctgggtcgggcgaagcggagttcgtcgtcttctggggctgagcccaagttcgagccctgggtcgggcggagcggagtttgccgtcttccggggcttagcccgagtccgagccctgggtcgggcggagcggagttcgccgtcttccggggcttagcccgagtccgagccctgggtcgagcggagcggagttcgccgtcttccggggcttag

SEQ ID NO: 20553 - DNA, 546 bp, Zea mays
  Peptide Sequence Number=SeqID_63928
atggcccgcgcccgcgcctataaagcccactcaggcgtcgaccacacccctccgcacgcgctcaacctcaccggagctcaaactcaccgtcgtttgcccgtgcacgcgtgtccacggccaccgagcccctgccgccgtagaccggccagcccagcctttcccaaccccgtccggccctcggagacgactgagcacacctcggtgaagctccccgagcaaggaatcgaagtctgcttcgccggagaggccagtccacggtcgccggagttcacaaccccgccggagtgcgtggacagggaaaataaggaaaacttagaaaaaccctacaaaaatgaccccaagactgtcaccttgctgacggagagtacgtcctcatgccggagcaaggagctgctcaggagactttacgggtacaagtgtggtcactgcacgacggcagtcggggtcagtgaggcattgtacgccaaggcggttctctccatcttgccaccgggttggactgtcgagtgggaccctacctcggctgaggaggagcatgaggagtga

SEQ ID NO: 20554 - DNA, 666 bp, Zea mays
  Peptide Sequence Number=SeqID_63929
atggctcgtcttagacacactgcacggaagtctgtcatccccttcttaccctctcgtctcacggagcatccgcttcgccgtctagtgatcagtcagtctagccacttggagaggctacaccacctcctgcacgaggagcaggagcgtcggcgacaggagctcgagcagcaggactcttctttctcgcttcagcaggaaggtagagtctgtgaggagctgttcccctatgctcccgctggaggcgccccctgcaccaccactgagcgccccagccgctggaggagacccagacgacggaggtggcgacagcagctcgagccacgtcaccgaccttttctgaggagcaggagttggaaggatgggttgctcgacccatcactcacgacgctgctcgcgggtgtcatttccacgatgcgctcgacaccctgctacgtcgggcactcgaccggcgtacttggtctatcgagtatcgctgtgtggtcttccagcatagtcgtggggtttacccggactgttgggaggcgacctgcttggtgcgcagtctggagaacagtctctggggtgcggaggtctgctcagagcactattctatctctgagcgggactcagctgaggcggccatgcaagatgtcgcatggcgtgcgctttcgcactactgctctgtaa

SEQ ID NO: 20555 - DNA, 174 bp, Zea mays
  Peptide Sequence Number=SeqID_63930
atggagagtcatgatctccgggcagaaagggaatcacggcttatgggtggtgacgaggatgatggttttggttatgactatggtaatggttgtcagcattgcaaccactgctcaggtgaagatgaagtcgtggaggaggacttccaggagttccaagagtacgatgagttctag

SEQ ID NO: 20556 - DNA, 426 bp, Zea mays
  Peptide Sequence Number=SeqID_63931
gccttcgtcaaagtgccgagtcctgcgaagggtgtccctgcccgctttgcctccgtcggaccagcggctgcagcgaaggcctcgagtgaagggtggcgtctttgccttcgccccaacaacccccaccgtccatctggcagcataggaggcgtgattgtcccacctgttggtgaggaaaatccaaggttgagcagcatagtcaacctagtcgccgtgctaaacacggagctggaccatgcattagatgagctgagtagggctcgtgctgagatcgcccaactgcgggctgagcgtgcggagcatcgtcacctagaggatggctccctcgctcccgtcgggactcagcacccgttccgctcacctcggcgtggacaccagacttatggcgaccccgactacaggaccaggataaatttagaaccatag

SEQ ID NO: 20557 - DNA, 1023 bp, Zea mays
  Peptide Sequence Number=SeqID_63932
atggcaccggactgtccggtgtgcaccggacatgtccggtgcgccaacggatccaagactgccaacggtcggcttcgccatagaaggaaagaaatcgggcaccggacagtgtccggtgtgcaccggactgtccgatctgagcaaacggaggaaggagttgaaatagactccaagcccagcatcttagttgactctctttctagaggtgcttactttgccatcatgactagtgataatgatttaattattgatgctcatgatttatggaatagaattaaagtaaaatattgtgtggcaaattgtactacttctactccctatattacttgtgatactaaccattcaaagggagaagaacaagaacgatggcacccaaacgatgaatccaccgcaccgacaggtttgtcttccactagttataaatgtcttattgctaacaatgatagtggagacgaaagcgatgatgaggaggaatatgaggatgatagcaaggatgagtcttcatcaccacaaggtacattttcctgtattgcttctactaataataatgacagggaaaatgagaccggtgatgtggaagaagaggagattcgccagttctacacccatctcaacaaagaagacaaagtgctcttggttaagttgttgaggaggaacaaggaacaaggcgagacgcttctcaggctagaggagactctcatcaaaaccaacgacagcctggagaagatgaccaaggaacatgaggagctaaagtgctctcatgataatttggtccaacggtatgagtctattttatttgagcaaagaaataatcatgatgtattatctgatgttgctcaacttaaaactgagaattctatgcttaagagtcaatttgtagttggccaccaagcgatactaggtcaggattatttctttgctcgaatgattgcggctccgaccgagggtccccatgataatgagagcacagaaggcccacaaactccttggccaacgtcaacaggctggcgtaggtttcgatga

SEQ ID NO: 20558 - DNA, 339 bp, Zea mays
  Peptide Sequence Number=SeqID_63933
atgaccctctccaaggaaaatgacaaacatcaagcgtcatgtcaagttgagcgacgcttctgctacaagtgtggtgagcagggtcatatatcaaagtctctaggtggaaaagagaagataagcaagaaatggagcaatcaggacttgggtatctctgtaagtcaagaaattggtatctcaagtcgtgatgagactcgggtgcgtagctcggagccaactgatcaagccaaggacggaggcaagaagagcttcgaggtaccaagtgcacgggagaaggtcaaggaggctgaggaacccaaagccaagggtaaagaagaaggcttgcaaagtcaagggtga

SEQ ID NO: 20559 - DNA, 144 bp, Zea mays
  Peptide Sequence Number=SeqID_63934
atgtatggtttacaggtggtgacgaggatgatggttttgggttatgactatggtaatggttgtcagcattgcaaccattgctcaggtgaagataaagtcgtggaggaggacttccaggagttccaagagtacgatgagttctag

SEQ ID NO: 20560 - DNA, 180 bp, Zea mays
  Peptide Sequence Number=SeqID_63935
atgacgaaggtgatgcttgccgaaggtgttcaaagctcaaaaaatggaataaagcttcgtcttgaccatgcttttgtatatccgcaacctgattccgaagatacctgctcacatacttggaaaacattgtcaaattatgtttttgaggaccttcggaagccgaaggcccccaacaaatag

SEQ ID NO: 20561 - DNA, 456 bp, Zea mays
  Peptide Sequence Number=SeqID_63936
atgggcaagagcaagaaaggtggtggcccttcgcatcactccggcgacaaacgcaagcgcgagccgactcctccctcggaggacttcggtgactcagagtactcggaggaggagttctcctccgagtccgagggttctccggctcctgcctctcccccgacaacgtctgatgattcagacgactcccaggggatcgccgcggaggtatggatttacatccgggccgtcgagcgtgccgggctcgagggctcggatgagtcggagtactcctcggacgaggagaattcctccgacccgtccgaggagggcagaggcggcgacggtggtgacggtgacgacgacggaggcgatggtgacggcggcggcgacagcggcaagggcggtgacggcagcggcaagggtggcagcggcgacggcggcgacggcagcaagggcagcaacaaggccagtggctag

SEQ ID NO: 20562 - DNA, 825 bp, Zea mays
  Peptide Sequence Number=SeqID_63937
atggtggtgtgtggcgtaggcatgtgggcagcagtggccccgccggcatttgcggtggtgcgcgtgtcagtggatctggcgcgtcgcaacgactactgccagggttggccgatgggaggtgcggtggtgcggcgcgtggtgctgccgctgatcggccgggaccgtggggccagccggaggtggtggcggtccgcgctgcgttgcgactgttgtggcaaccggcacgtcgttggccctctggatgggtctatgtgggttggttgggcggcatcggttgtggcggcttgcatcgtgaagtcgaagttgctacgtcacgggatgtggcttggcaacgatgacgtaggggcgaacccccccttcttcgtgggcttgtttgcttcgaagatgaggcatttggcggaggcagggcggtggattaaggttttggaagtctcgctggtgaagaatcagagttgtctcgagtggagtatctcgtggcttggcaacgacggcgcgccacagtcttccttctcttctgccggtgttcgtagtcatcgtcgtgtttccttcggccttgtgttgcctgtcttggggagtcagagctacttgtcacttgtgttgagttcggcaacgatgactcacgatgggcattgtactccaggaagtgaaggaggggacaacatttctgaagatgcaatcattgtattgtttccaaagagactaggccaccactgcaacaatttctatgaaaaaacgtctgtcaaaaatattcttcgcgttcttaaacatgttgaagaagtcaagatcaaagttccactggatgcctacatattgccaacaatctga

SEQ ID NO: 20563 - DNA, 213 bp, Zea mays
  Peptide Sequence Number=SeqID_63938
atggcctttggtgaggcagtggagcttggagggtgtcgtagcaactccctggttgctgacaatgctctcggagccgccctcgacggagtacgagatgtttgtgcagctggtggccctgacgccgcctaccagcggagtggacaggacgcaataaatgctgagggggcacatcgcctgtcagcagggtggacaggcgacgcgtcctttccgtaa

SEQ ID NO: 20564 - DNA, 432 bp, Zea mays
  Peptide Sequence Number=SeqID_63939
atggttgggggagggggcctgggggcgcggggggcaccggtcactggagatggcggcgagcatcgtgccgactttcgagtgcttggtgtccgggacgagcgtcggcaactgatatgcatgatggataatttattgatctggataattgtctccgttgcatccgaggacgtgatcgatcgatcgactgggtatttgcagaacttacatttgtgcccacgacaacgttcagaacagtggagaacaaacaggaagagatcaatttctatggttgttattagatccatatttgcagcacattgctcgattttcatgcccaagttgattggtcatgtcatcatgaagcacaagggtccaatgataaagatattatcagcatcgctagagaagggtccaatgataaagatattatcagcatcgctagagaaggtttga

SEQ ID NO: 20565 - DNA, 294 bp, Zea mays
  Peptide Sequence Number=SeqID_63940
atgaaattcaccgtaccctgcaacaaaacggtgatcacgacaaagagcgtggagttcatgccattcttcctgtccttcttcctcttcctcaacggaggcgtctgggcaacgtacgcggtgcttgaccgcgacatcttcctcgggatccccaatgggataggcttcgtgcttggcaccatccagctgatcgtctacgcgatctacatgaacagcaaggcctcccaatgcagcaaagaaacagcgtcctcgcctcttctggcctccgaccggggagaagcatctagccatgtctga

SEQ ID NO: 20566 - DNA, 348 bp, Zea mays
  Peptide Sequence Number=SeqID_63941
atggccgctcgtcacacccaccgctcccccaccacaatgaacacgcatggcggcggcggcccggaggtgttggaggcgcaggaggtggaggaccccgcgccgctgggcgacgacgaggtctgcacgctgcttagcggcgggtacgccgagaaggtggtggtgccggcgggacagatgctgccggtgccggagggcgtgtcccttgcggacacggccggcttacccgaggtggcctgcaccatctggtccaccatcttcatgaccagccacctctccctcggagaatcgttccttgtaagatcaattttctatttccaagagaactggagaactcagttagccagatag

SEQ ID NO: 20567 - DNA, 1314 bp, Zea mays
  Peptide Sequence Number=SeqID_63942
atgcgcgcgcacggcaggccggtctcccacccgcagctcaccctcctcgtctgcctccacatcgccgcgcgccgccccctccgcgctctccacgcgcttcgccgcttccaccacgagttcgacgtccaaccccaggtccacgcgtgcaaccgtgtccttggcgcgctggctgctgcgggccacgttgaggacgcgctcaagctgttcgatgaaatgtcggagggtggtgtgcagcccatccctgtaacgtttgccatcatggttcgtgcactagcacatgcgggaatggttgataggcttctggagataattgggaggatgcggaacgaggtgtgtcggctcatgctacaacaccatgatgaaggaaaattggataccaaatcaaaaagcctagagaaagtcatcaatgtggtgtatgagatgattgaagtaggttgttcaatggaagaaattgtctattttgctatcatatatggcttctgcaagtatgcaagttcaactgaggcgaggcagatggatcgtcttgtaaacgggccctctaggaataggaaaaacaaactattcttggactccttagtgctgttctccattctgctcctgcaagaatgcaggtcaagtaaaaaaagtcacttggttattcacttattctttaaaaaaagtaatgcttctgataaactattatgctaccagagccacaatgctttcattcttgagcaggtccggctattcctagatcgtcaagattatgttcgagcacaaattttatcaaggaaaatcagtactagagtatttgacgcagatccatcaaaggaaaaaaagaaaccaaaggagggtgacaacattgttcaggatgctcctgcagatattccttccctcttagaattgaagcgtatctactatgaactgatgattcgatattacttgcacaacaatgattacctggaaatctgtcgttgttacaaggctctttatgatatcccagcaacaaaggaagatccaaccaagtggataccaattcttaggaagatctgttggtacttggtgctagcacctcatgatcctatgcaatcgagccttctcaatgctacactagaggataaaaacctttcagaaatcccaaatttcagggttaccataaagaggcttgctgatctgctctgcctgagtttgcaggaggcagagaagcatctttcagacatggtgaactcaaaatctctgactgcaaagatcgacaggccgatgggagttgtgagcttccgggtagttcaggactgcaacagcacacttaactcgtgggctacaaacctcaagtag

SEQ ID NO: 20568 - DNA, 369 bp, Zea mays
  Peptide Sequence Number=SeqID_63943
atgactcattttgatgatatcttcctaaatcctcctataacagttatatctttatatcttgaaaatcatggcttggagattccaggtttgaatatgtccgaagctcctaaggattccatggaagttgacctggtgcagaaaacagaaaaggtaaaagttacaggagaactgtcatctaaaggagttgagactgcaaggcaaacatctcaagtggaagctgcagacaatacatttgtcagtgaagttgttaggcttgagaaagcaggaaatattgatgctgagctaattgtccatgtgaatcagattggggaaggtgcagaagctgcatctgtatctgaagagtcatctcagcaagtgggcgacatttag

SEQ ID NO: 20569 - DNA, 120 bp, Zea mays
  Peptide Sequence Number=SeqID_63944
atggctccagagaagcaggagccactacaggttcaggagctggagcctaaaattttggctccacagctcctccggacgcgtctccgtttgctgttgctgttcgttttagcaagtaagtag

SEQ ID NO: 20570 - DNA, 231 bp, Zea mays
  Peptide Sequence Number=SeqID_63945
atgtgggactattcccaacacaagcgcgtgatgggcaaaaaggaagtcaacaccgctgccgctgcggcggagcagaagaaggcatggctgccgaaccctgtgaccggctactatcgcccagcgggtagccccagggaggtggacgcggcggagctgtgcgccaagctgctgactgtttgtattgctttaagatccgtgctccttgatagccgggctccttccttggcctag

SEQ ID NO: 20571 - DNA, 525 bp, Zea mays
  Peptide Sequence Number=SeqID_63946
atggacaaggatcgccagggggctgcgcaaaagcggcaggcggctatcaggattgttgaagccaggccaaagaggcaaaagcgggggtcggcgaaggctgcggcccccggcggaggcaagccaccgctggcggcgaagtcaggcgtccctgcgtctagcaaggcgccagaggcgcccagcagggtggcggaggccgcgaaggcggcccgagcgttgccgtcggcaggcaagcgtgtcgccgacttcgccaccgacatttgtgtggaggactatcttggtgggtcggacgagggccagcttgctacagttgcgcctgccgcggcgatcgcgacggctgcccccacatctgctgcggccggcgaagacctgcccccaaaggtgtccgaaggcgcccctgatgcccccgcagctactgtgccgagtgctgaagatcccgcggcggaggcggcggaaacaacggcagaagcggcggcggagccagcggcggaggctcccgcagcgtcagggccttcgcaggtggcgtag

SEQ ID NO: 20572 - DNA, 303 bp, Zea mays
  Peptide Sequence Number=SeqID_63947
atggagcttttccaaggcgtctcgggcccacgcccgctcgcgggcttgagccttcttcgcatcctttttcttcttcttcttctccgcggcaacccgccgcgccgctcggtccaccgcgtcctccgggacccgtggccgggaaggcttgtgacaccctacctcctggagacagatgaaaagtctcgaccgacaccgatgggaaggggatccgaggacatccgcgagccctccaagtcagcctccggcgtcatctcccaaagcggcaaccgccgctccgccaagggaagcaccctccggcgatga

SEQ ID NO: 20573 - DNA, 435 bp, Zea mays
  Peptide Sequence Number=SeqID_63948
atgggtgtgggcaagggacggtttgatgggtgggagtgcttattgaatgctttgcgactgttcagtgaccgcggttggaaacgactccaggggattgccgcggaggtctggacatacatccgggccgtcgagcgctccgggctcgagggctcggatgagtctgagttctcctcggacgagaaggactcggacggcggcgaggacgaagatgacgacgacgacgacggcgacgacgacgacggtggcgacggcgacggtgacggcagcaacggcggcgggggcagcggcggcaagggcagcaccagaggcggcagcagtacgggcagcaccagaggcggcagcagcaagggcagcaccagggcggcggcggcaagggcagcagcagcaaggccagtggctaaacgccactggtctttagatattagtatagtgtag

SEQ ID NO: 20574 - DNA, 696 bp, Zea mays
  Peptide Sequence Number=SeqID_63949
atggaggtccgctaccaaaccaacttttgccggaatgaagatggtttccccaagttgttgagagcatgcacagtttgcctcgaaatcaggagccatccagagtatgatggtcgtgaattcatcgagcatggcacaaagaactgtgtcatgactagagaccatcccgtttggatggccaggatgcgtaccttggaagggcagaagctgcttgagtacgaccccacagtcatgtacctcactgcatacctgcttaccctggatgcacaatatgatctcttggctcggcacaactatcaaatgattgcccgagcagaagatgcagagaagcgcaaccgtcaactccatgtggatctcatcatagctcaagcctgtgttgccttggaaagtcgtgaagtcattgatgttgaagccctaaagcaagccaaggatgagcacgtacataagttgatggagacctacttggtcacccataaccaatgtagagccctgcagatccaagagcccgcttcatctaacccaattcaacccacgagagctgaaggtccccagattcttaaaggcctcccagtctctataaaagaagaaaagaaggcttgggaacccccggaaggagccatagtcttagaaggaatacagtctccccttaggctatggataagcaagagcaccctgaatcctcccaagatccaccgctag

SEQ ID NO: 20575 - DNA, 756 bp, Zea mays
  Peptide Sequence Number=SeqID_63950
atgaccttagagcctcatcagcaccgggtaccccgctgtagggtgaggatgaccttggagcttcatcccttgcagccaggctggcgttcattggactccgagtctttcggttttagggccgaggatactattgagtccactgctctgcatgtgctgacgaccttctgcggctttcaccccttggagctatcaacccatcccattggcttgttccccgctgagaaggaggacgacccaatgtggaaggatcgggttgagcatgccaaggaagtgtgggctctctaccctggacataccgctcacctgatggttcggtgcatgaatgccctgtatcgtctgcaggcattacgaggtgaggcaatgtcacagttgatgggtctagtggagtctaccaagatcaccctagataacagggaggaccttgtggtcaacctgtccactgagctggtggaaaaggacctccaggtggaacatatggccactcaaatccaagagcttgaagatcaggtggaggccagggaaaacaccatcgagattctagaagatcagctccagaccacccagcaacagcttgaggaagccaaccaacacttggatctgcaccatcaagaaattcaagacatggaggcagaaggggccgatgaggatgtagacatcgagggaggagaggagtcggagcctgcatccagcttggacactgctggctcaggaagaccaccttcccccgagcctagcgttgccttgtttgctcattag

SEQ ID NO: 20576 - DNA, 387 bp, Zea mays
  Peptide Sequence Number=SeqID_63951
atggcccaccctccatcctcctcaccgcaaggcgaaggcttacgacaaaggcctacgaagaagtcttcccacctcacgtcctcaccagacctggaggccctcttgggatttggcccatcctccgaaggacagccacaggaaccacccctaggtttcggtccgctagagggcgcagacgccacagaggacggcgaagtcatcggcgtttcagcagaagaacaactacagctgcaggccctgcgcatcaagaaccgcaacctccagaagaagaaagaaatcctcgaggccaagcgccaacacgtttccacacaggcaaaggtgcgccagatgatacgagacgaggagcagagggctcaggaactcgagcaagagattgcgctcatgtag

SEQ ID NO: 20577 - DNA, 411 bp, Zea mays
  Peptide Sequence Number=SeqID_63952
atggggagagttgtcgctcacgacgggttggaattatgcgtaggtgcggcgttgtttattagcgtttgttatgtgaattggtgcactaagcatcgtacgttgcccgaggaggggtacgatgcggcttcatatcctttagtaatgaagacagaagtcatccttgcatttgcagacatttgcactcatgaggtcatggaattaccactagacgcgcagagcagcggaagacgtctcgatgtagacgaacgcgtcgagcagtgccgtgcagtcgccggcgtccttcacgtcctcgcacggttcgtccaagtgctccagatgcagcacctccgaggtatccacacgtacagggaggaagcgccgcgtaccgaactgctaggttcgcgacggcggcttggcgagggcgagaggtga

SEQ ID NO: 20578 - DNA, 558 bp, Zea mays
  Peptide Sequence Number=SeqID_63953
atgtcaactcgccaccgggtttctcaagaccagtccgagttcacgccaaccgagagcatcgatacaccaccgttcagcctcttgccatggagggtacacgctactctcgccatctctccactcccattgcgtgttggcctttctggtattggtctgcctgaggcaaagcttacccatgacgaggcatgtgaccagttaaagggtcctcggacaaccacatggcagggtgctgcacaacatcttgagggaactcgaagtgccgaggacgagaaacaacagtgcaatgcccaacgatctgacgtgcacggcgctgaggaggttccacgccaatgccacgacgagaagaccgatagagacagcacaacggccagcacagcttgggcgttgaggagcgggggcacagcaaggtcgagacggtggcttgacgacggaaccacatctgcgcccgccggccatggcgagctagaagacgagcttgacagggatgtagtagagggcatggaatccgccctgtccgagtgcagggacgcgccaggagttgaggagcgcaccggttga

SEQ ID NO: 20579 - DNA, 411 bp, Zea mays
  Peptide Sequence Number=SeqID_63954
atggcgggcggaattaagctcgccggagctatggaaaagtggctggccggtgaggagatatggagccaggaaatctggtctgtctccctgcccaaacccgaggcaaatccaagagaaaccctaggtgacactggggtgtcacaaatagacgccgattacatgtcatccgtgctgcaacaggtccccacaataggtgatgccaggcgccaaaacaattgcgccaaacacatcggcaacaaatgggtttccccagccatattctggtatgtcgatggactcatatccaggacgaccgtcaccaccatcttcgctaaatggtcggaccgttcggagcaccagaagtcacctgtgatcttcttagtgcagaaggccgacataaatataatcggccacccaagccccaagaactaa

SEQ ID NO: 20580 - DNA, 570 bp, Zea mays
  Peptide Sequence Number=SeqID_63955
atgccccaaaacccaatcagagagatgctacatgatgtggagggaagggaagacgtaatgggggcgacgatacctgtgattaagccacgacgatccccatccacgatgcacagtggcccggcggcggaatacccagacaccatgcggcggaggaccacacccgggcccccgcagcgccaatccggccacggcgtcgaagcccgaccatgccccaacctgcgaagacacggcgaggatcgctacccccgctgcgcctgctctcctgcggctcggctcaagttcaacggtggtggagacatgagctccgcggtggcgcaggcttgtaagaaaggtctgccctgccttcgtttggttaccgtggaggggatagagctgacgcttcggtcccacccgtcatccagcctgggagcaaatgcgtgtgcagattgtaatcttgccgacggagagtacgtgctcatccccgagcaaggacctgtccaagaggaggaccaggagcaggcttcagaggctgctattgaggatctccccgcagccccagcaattgaaggcaagccccggttttatgcataa

SEQ ID NO: 20581 - DNA, 261 bp, Zea mays
  Peptide Sequence Number=SeqID_63956
atggccgattctaaagatctcaacagggcttctccaaacagcaacacaaggctgactaatttatcggccgctgagcataaaagattaaaagatgacatgaagaaaatatatgaggaggtccaacgacaaaaagatcaggtgctcaaggtggcggataaatggttcctctcgcacttcagggtggattgccgccagaagaccatccaaaaaagggaaatagtgtggcagaaccacccgaattattccagcttaagtgcctaa

SEQ ID NO: 20582 - DNA, 780 bp, Zea mays
  Peptide Sequence Number=SeqID_63957
atggcgggcggaaatacgctcgccggagctaaggaacggtggctggccggtgaggggacagggagttgtagcgtcaccaaggtgccagtgtcagaatgcctggtcccgaggttgagctgcgccaaaaccgtgtcaaatggatttggtttgagttcaaattttcccagaatgtgttcaagagaaaccctaggtgacactggggtgtcacacagtccacggtcgccggacttcacccaaccgccgatgaacgtagaccgagctccacgtggactttacccctcacgcgacctgagacgtggtctcccattccggttatggtgggtacaagtgcggtcactgcacgatggcagttggggtacacttcaagacatggttgatggtgtgacttggcctacaaccctaccaccgggttggatggtcgagtgggatgctgctccgctgtacgaggagcatcgggtaccacgttgccgagtctggctgactctggaggctcatcctcttcagccgggttggcgttctcttgactccgagacaattagatttaggacggacgacaccaccgaagcggtagctatgaagaccatgacgactttctatggctaccatcccctggaaatggtgatgcaccccttgggactcttccctgctgagaagaaggatgaccccatgtggtgcaaccgtgtgagccatgtaaaggacgtatgggcgatgtatcctgacttggttgggagggtcactgttcaatgcatgagtgccctgtaccaccttcaagccctgtag

SEQ ID NO: 20583 - DNA, 93 bp, Zea mays
  Peptide Sequence Number=SeqID_63958
atggtctccgccgtggccctgtatagcgccgccgcttgggggcagtgcggtgtgggtgagattgaataccggttcaatttagacaacttctaa

SEQ ID NO: 20584 - DNA, 390 bp, Zea mays
  Peptide Sequence Number=SeqID_63959
atggtggtggccccctgggtgaagtaccttagccaagaatacgaccccatgttaacgtgggctgccagcacctaccgctccccctcttgcccatctttcagcgcggctcgcggcatcgcgctcggctggcggcttcgcgctcggggatggctcggcacggggcttggggtcgcgtgcgcgtcgctggagggcgcggctcggcggatgcaagcgctcgcgcgtgcggggcagtgtgcgcagggcaaggcgtcgcggctgggctcggccgtcgggctggcggctgctcggccggctgcgcaaatgcgcagggtgctcggcgcgtcgagcaggcacggcaagtggagagagaagcgagtggggagagagaggagtgagggagagagagaatag

SEQ ID NO: 20585 - DNA, 354 bp, Zea mays
  Peptide Sequence Number=SeqID_63960
atgtggccctcaccccccgagattgccgccgtctcctgcccgccattgcccgcgctccaccaccagggccacgacttcaccgagggtctccagggccacctcctcgacatcaacctcgtgctcaatgactgcgacgccacctttgcgcccttctacgtcgactacccgcccacgctcccctgcttcctctatggggagtcgctcggcggcgccatcgcgttgttgctccacctccggaacagggacctgtggtggtacggggccatgctcaacgacaccatgtgcggggtcagtccgaggatcaagccgccctggccgctcgagcacctactcgccgccgtcgtccccacctag

SEQ ID NO: 20586 - DNA, 165 bp, Zea mays
  Peptide Sequence Number=SeqID_63961
atggctccgcctagggcgaccacggtgctcgagcgcctccgcgtctgctacgagttgcagcatcgattcgaggaggacaccgtctgcgaccccgcctgcgtcgagaagctctgcaggcgcgccgggagcaaggacaagacgcttcgcgtctacctcgggatgtga

SEQ ID NO: 20587 - DNA, 420 bp, Zea mays
  Peptide Sequence Number=SeqID_63962
atggtggtggccccctgggtgaagtaccttagccaagaatacgaccccatgttaacgtgggctgccagcacctaccgctccccctcttgcccatctttcagcgcggctcgcggcatcgcgctcggctggcggcttcgcgctcggggatggctcggcaccgggcttggggtcgcgtgcgcgtcgctggagggcgcggctcggcggatgcaggcgctcgcgcgcgtggggcagtgtgcgcagggcaaggtgtcgcggctgggctcggccgtcgggctggcggctgctcggccggctgcgcgaatgcgcagggcgcgcggcgctgggtgctcggcgcgtcgagcaggcacggcaagtggagagagaagcgagtgtggagagagaggagtgagggagagagagaatagaggagagagggagtag

SEQ ID NO: 20588 - DNA, 1703 bp, Zea mays
  Peptide Sequence Number=SeqID_63963
atggctgggtgttgggcgaagtatgccctcgcgagatgccctccttgggcgggcagtgagtgcaaagtccagccttcacgctggatctgcgtggccgggatccggccgcattcgttcgtgaagtggaggacggaggctgccccggccactaagaagagaaaaataggtactgcggtggggggactgggggtctctaagagttttgcagtggagttgatggggacgtgcgtagccctcgggggaaggatgtcttcgcccgagctccgggagtcttcgacgcgaatgctggaggttacccggggtcgatggccaaagaatgttccgatcccccgcgcggctggcgaagacttctttacgtctcgcatggctcgcgacttgaagatttttccttacgggcggaatattgctgctgttgtatcggtagtgatggagaaggatcgccaagacactgctcagaagcgtcgggcggtcgtcaggctcgcggatcctttccgcgaggtaaagaaggcgcgggcagccacgaagtctgccgccccgggcagtagtaagccattgctggctacgaagccagccacccttgggcacagcaaggtgtcggccattatgaaggctgctgctactggcgcgagcaagccacccccggggtcggatggggggcaactggttgttgtcccgcctctggtggtagccacctcgccgacggtggtgactagggcgaagggtgcaccgcgggactcgtgggccactttctatgcggccgacttcgccgaccacgtcgcgtcgggtgccttgactgcggactttgctgccgaggtcgagagtctccggatgcagcatgcggatgctgtgcgggagaagtcggctgcggaaagcaaaatccgcaggttgtcgaagaaggtggctgccatggaggccgagaaggtgaaactccagcgccagctggcggatgagaggagggaggcgaacaaggccatcactgatgcgcaggctacgcatttcgaggtcttcgaccaaaatgacaaaaactttgaacgtgagatcttcaaggtcgaggaccccgtgcttaagcagtcggcggggcgctctttgacaggatgtggggcccgcacgactgagaaacggttcgggagcgatggcgcatgccgaaggcgtcgaggaccttggtggtctagacggcgcgctacccgaggctgcggaggcggatccggcgctgctgtcttatgccggcgagggcccctcgtcgaccctgcaccgacagtgccaactggagccagcgaagaccccgcgccgacgggcgaggacgccttgaaggcggtggccgagccggctgccgaagaccccacgaccttggccgggccttcgcagtctgatgattctgggagttcgattgcgtggacggaggagtcttcagatgaggacttggattattttgcagcgttagatgtggctgcagcggagtcttcaccacgcgtggagggttccgaggagctcccgggcgcgagtactgagtataggcgacgtagggcggtggtgaaacggaaagtgagtgaattgtcgcgaagtggtaggcgtcatcgtagtgagatggagagtggtcgtcttcgcgtggatgggactagtaagcgagaattgttgtcctcgccgattggggcgagtgtaggtgaaggcgagctgcgaaatctttttgagggtgaggaattgag

SEQ ID NO: 20589 - DNA, 585 bp, Zea mays
  Peptide Sequence Number=SeqID_63964
atgtcgccgcgcacgaggagaactgtgcgcaaacatactggactgattggtgtgccatgtcaccagctggccccaagacatgataatagtagtagtggaagcaacgatccgataggggatctcgaagtagaagtaagtcggctccaagcggaactccgccacaggacggatatatgggtcacagatggcgaccgaataaatgaattgagaagagacgttcgccacctacgagatcagctcgcggaccgagatttggcactcgactgggtagttcaatcttgttcgcttgcctgggacaaggaggaaacagctcaagctcgagtagcagagctcaacttggccgttgataacctgcggacatattgcaataccttacatgaagaagttcatgtattatattcgcaactgcaccccagtgaacctgcggatcctgtcgagtcggaagccggaccctcgcatgttgcgggagaagcgcttggtggtgagttggaccttttcaggccccctccttctatgaggctggtcgatgaatggtctcccacacccgacgacgaggctgccaagagcaatcggaagaaggaatag

SEQ ID NO: 20590 - DNA, 255 bp, Zea mays
  Peptide Sequence Number=SeqID_63965
atgcccctcataaaagtttacaacattgactcagacctttatggactaaaaggatccacttttagtaagcatttctgcaaaacagagtctttgattattgagaagccttaccttgactcccttaaccagcatacccttgagagtcttttctttagtcgggtgaggaagcgacaaacttttgttgcttctgttctaaggtggtaccaaaggaagaacgcaaggaatgaagtgcgggaggaaaggatcctccattag

SEQ ID NO: 20591 - DNA, 309 bp, Zea mays
  Peptide Sequence Number=SeqID_63966
atgagcggtatggtcgcgttctccctggtcatgggagggtccaaagagaagttggctcaattggggttatgcgtaagcgtgatggactttttcgtctctcacgctcgatccaagtttgcatgggataaacccgaggttatcggtggccggggagaaccggaggaaaaggaagggtcacattgtcgtcttggttttggacgagatggtggccttgttcctcttaatataaccaacatggtaaagtcatgcatgggagaaaagagtttcggtatcgggttttatggcagtgggactgcagagccggactag

SEQ ID NO: 20592 - DNA, 1632 bp, Zea mays
  Peptide Sequence Number=SeqID_63967
atgtcagcgccgccgtcgctcaagaccccggcaaccgccgtagcggtctctcggcgctcggtcgccaccccgagagccaccgggcttcgcggcgcctgtgctcccccgactcggcgcctccggtgctcagcctccgccgccgtggccggggcttccaccgagatggctgatgctccgctggactgggcagagaggtcgctggaggagttacacagcttgccggaccacgacacgttctgcttgatggcgctctcgccgctggacgggcggtacgatcgcttcgtcaaggagctgatgccctttttcagcgagttcggcctaatcagataccgcgttctcatcgagatcaagtggctactgaaactttctcaaattcctgagatcactgaggtgcctcagttcagcaaggaagctcagtccttgttgaatgccattattgagaatttttgcatagatgatgcaaaagaagttaagaaaatcgagaaagtaaccaaccatgacgtgaaagccgtggagtactttctgaagcaaaggtgcagctcaaatccagagattgcaaaggtgtcggaattcttccattttggttgtacctctgaagatattaacaatctatcacatgcattggctttgaaagaggggccagcatcaccaacaactgtgggaaaggagatggcaaacttcgcggccagattatctgatataggaaagagtttctcagaggtgaagatactagggaaatttgctggcgctgttggcaattacaatgctgatgtggttgcatatcctgaagttgactggcctaaggtggcagaagagtttgttagatccttgggtttgcagtttaatccctatgttactcagattgagcctcatgactacatatcaaagctcttcaatctattcacccagtttaacaatgtgttgactgattttgatagagacatgtggtcctatatatcattaggctacttcaagcagataccaaaggctggtgaagttggttcttccactatgcctcataaaatcaaccccattgattttgaaaatagtgatggcaatttatgtcaagcgaattctatattgtctggtataagcatgaaactaccaatatcccggttgcagcgtgacctaacagactcgactgttttgagaaacctgggtatgggattaggtcattctctattggcttacaaagctaccatgcgtggaatcagcaaggttcagttgaatgaatcacgtttagctgaagacctggagcaaacttgggaggtccttgctgagccaatacagacagtgatgcgaagatatgggatacctgaaccttatgagaagctgaaggaactgacgagaggccaagctgtcaccaaggacagcatgcagcaattcattaatggtctagacataccggaggaggttcgatcgaagctttcgaagctaaccccgcattcctacactgggctagcggaggatttggccagagacatcgagaagtgggttgatcttgaatctggatttcagatcaaggaggagggcaagggctacacgggcggcaggtgccgcatctctcccgtcccgctcgacgggattctctgctactgcgtcaagccttgcccatccaccacgacagaatga

SEQ ID NO: 20593 - DNA, 357 bp, Zea mays
  Peptide Sequence Number=SeqID_63968
atgaaaaggaaaaaacgtgtggatgatctcatagactcacagagaggagctattgacaagtttttcaagagcaatgctagtgcttcgacgaatccaaatgacacgtttgcgttggcaatagttcccgtggggacagaggaaccaaccaatgagaattctagagaagaagaacatgttgatatcaacgtcgatgataacaatatgcacatgcacagtttggtagcgttgatgaacaacctgacatgcacaactttgaatcaaatacaaggtatggtgcaatactttgaggcatacagaaatgaggggtttccttctagtctgatcatatccaaaggcattgggatgaaatggttctag

SEQ ID NO: 20594 - DNA, 639 bp, Zea mays
  Peptide Sequence Number=SeqID_63969
atggacaaggtcggttccaacgttgagctataccgaacgtcggtggcatcgagtccacagtccaggggtaccccttgccacaatatgaaggcactacgctggcggagaggtctctggttgcgcggagatcagttcgctgccacgccacatcaactgccccggggtcgctacgtggccagggaaaggaacgtgctccaggatacacgcagtgggtctgaacctactgcaaggagagcgtcagacccccgcacatggcgaacagacctccgagacgggccccagacccttctgagtggggtccggactactcaccgtcggatcctggggttccggggcaaagaatacccagaccctgctcaggaagggttccgaggacgatatgtgtccagacctagcttggtgcgaacctgtccacacaacgtggccaagcgaaggtctggtgcagccaagcggtctgctgtgcgtgacgacgcgccgcctgactaccccgctgacaggcgatgtgccccttcgacatttaatgcgccccgttcactcaactggcaggcggcgcccaagccatcttgcaggcggcgtgtccagctattcccgttggccaacagtacacctgtgtcgtggcatgcgccgcatccatcatga

SEQ ID NO: 20595 - DNA, 447 bp, Zea mays
  Peptide Sequence Number=SeqID_63970
atggggtccaggcacagtgcttgctctgctgaggctgagtgccgaggttctttcgttttgcttttgttagtcactctcctgctgggagagtatttcctctctgaggagttcgcattcggtttgccttccgaaaccgggtgtgacacccgggtcggggcgaggcggagttcgtcgtcttccggggccgaggctgagtccgagccctggggtcgggcgaggcggagttcgtcgtcttccggggccgaggccgagtccgagtcctggggtcgggcgagacggagttcgtcgtcttccagggccgaggccgagtccgagccctggggtcaggcgaggcagagcttcctatggcgcccgaagccagacttggctgctgtcagcctcactttgtcgagcggcacagtagtcggagcgacgcaggcggcgctgtcctcttgtcaggccggttag

SEQ ID NO: 20596 - DNA, 405 bp, Zea mays
  Peptide Sequence Number=SeqID_63971
atgccccgaaggagatggtggtgcccctcaccgttggtgtggagcagctttggggacccctgggaccgccgaaagaacctcccgtcgcagggacttgacactcctgcgggagatgagctcccagcttccgccgtacattacatacatcttcttgcggcgatcgttgtcatcgccggagtcagagtctccagtgaagacgtccttaaggtccccttcgggcgattggtagtcgaggtttcatccatccacaaccgcggcttcttcgtcggcccccttcttgctaggccagtggtgaggcggcgagacgtccttggaggactgctcgcgccgctcgctgacacgtctcgcgagtttgataatttcacggcagtcggcggcactgtggcgactgttggggtgcactag

SEQ ID NO: 20597 - DNA, 312 bp, Zea mays
  Peptide Sequence Number=SeqID_63972
atgagcttgacacaactaaaagggaaatgcattgctcaaccttctcaagataatcgtgatcacatggtgaagaagcttgagacgggaacaaccgtggcatgtactaaatcccttgaagaaaatgtcaaggacttgaggattgccaagagtaggaaacaaaagaagaaaatcaatacctcttccaaaagcctcaaccatgcctccataaaaggtaacattcaaggaaataaagaattaatcccatgccgaagagtcaagacctacaacatggaggaaagccaaaggatgttacatggaaaaggaagaacttaa

SEQ ID NO: 20598 - DNA, 1050 bp, Zea mays
  Peptide Sequence Number=SeqID_63973
atgaggccgattggtgcaaacccgaacggcccacatcgtcgagcgaataatcgcaacagagacccgatcttcccgcgcgggagcccccatgcagcggagccgtgcgaggataagtcggcgaggatcacgcaggataaactcgagagcacgaaccattttgctacagtcgttgacaccgtcctactcctagaaaacaccttgaggggcagccccggcccggctgcatcccctcgccggtggtcacccaagatggtgacctccagttcgatggcggggagaagcgagccgggctgcgatcttggtcccgccctcagcttcaaggatgttcatcatcctggctggggcgggggccgggctgagccggagctctacctcccgcgcgggttcgtgggtcagcctctccctcagcattcaagggagagggcgctcagcggcccagcgggagggtcggacttcgacaacgcggggctggtcgacggcgggcgtcatcagcttcagcgcattgggctcgctggctcggcccgcggtgccccctctcgccgcaagggcggttgtcgcgccgcgcgcaccggaggaccgcccaagacgtcgcgcgcttctagggcggcgttcgtgttcggggctgtcctgcctttgccccggtacgacacctctgcgcggagatcggtgctcctctcatccgggaggatccgagtggggatctgccggtgggcagacggctcctgtcgtcggtgcggaggtggcggcggctggagaagtcctcgtcgccggcgagatcaccgccaccatccgcgctcggggcctccggctctttgtacttgtcctcgcccctcgagcgtagatgtgggcgaggacaaggttgcagcggcgtccgccctgaggccatcgctactgcagttcggccacccggagcgggggtcgttgtcgctgctgctggagcgggcgacggcgagcgaccaggggccttgtcgccccgcgggccctccaatgtggggggttgttcgtacccgcggaggcggaaccggagttccatttgtaatggcaccttga

SEQ ID NO: 20599 - DNA, 1239 bp, Zea mays
  Peptide Sequence Number=SeqID_63974
atgcagtcggcatgcaaccgtgccaagagggcgcacccttttgactccaacacgcccagcatgaagacccaggcccacacgtcatgcaaccggcgcgccggttgctacgtgcgagcaactgcaccgccactcgcgccactaccgcgcctcctcgactgcggaaccagtacagcgactcaaggcaaccctgcgtatgacccaacagtgccagccaggcgcgtcggtcacgggtcagccagctacgggagaaggcgcgacggtcaatacggccaaaaatgggccgacagtaatggcggtggcaggcgggcggaagcagcggtcacgtcgacaggcggcacctttggcaggggaagcgggcgacgcttcgccttcgccataatgaccgcatcaaaaaaagggaccgggaaaggggataccccgaaagggatccttctccgcgaaggaaacgggccccgagcctccctactgatcagaggtttgaaggctggcccctcggaggggttcaacagccgcctcagagcgctcgggctccgcgcccactactggtcagaggttcgagggccggcccctcggaagggttcaacggccgcctcaggccactcgggctccgcgcccactactgatcaggggttcgtaggctggccctcgaaggccgaccccggaggatttacgtctcgcccgaggaccccctccagcaacggacacaccttcggctcgcccgaggcccagtcttcaccaagaagcaaccttggccaagtcgccacgccaaccgaccgaatcgcaggggcatttaatgcaaagggctcggactcgggctcagccccggaagacgatgaattccgcatcgcccgaccccagggctcggactcgggctcagccccggaagacgacgaactccgcttcgcccgaccccagggctcggacccgggctcagccccggaggacgacgaactccgcttcgcccgaccccagggctcggactcagccctggcctcagccgacggtctccgcctcgcccgacccaggggctcggactcgacctcggccttggaagacagactcgacctcgacctcggaggagcctccacctcgcccaacccagggctcggaccgaccacgtcacaggaggcgccatcattaccctaccccaagctgactcaggctatggggaacaagaccggcgtcccatctggctcgctccgccaaacaagtaatgatggcgccccgcacgctctatga

SEQ ID NO: 20600 - DNA, 462 bp, Zea mays
  Peptide Sequence Number=SeqID_63975
atgggcaagggtaacaagtgtaagcgcgagccgactcctccgtcggaggatttcggcgactcggaatactcggaagaggagttctcctccgagtccgagggatctccggctcccgtctctcccccggcgtcgtctgatgattcagacgactcccaggggattgccgcggaggtctggacatacatccaggccgtcgagcgctccgggctcgagggctcggatgagtctgagttctcctcggacgaggaggactcggacggcggcgaggacgaagacgacgacgacgacgacggcgacgacgacgacggtggcgacggtgacggcagcaacggcggcgggggcagcggtggccagggcagcaccagaggcggcagcagcacgggcagcaccaggggtggcagcagcaagggcagcaccaagggcggcggcggcaagggcagcagcggcaaggccagtggctaa

SEQ ID NO: 20601 - DNA, 2040 bp, Zea mays
  Peptide Sequence Number=SeqID_63976
atgggtacggagcggaagcggaaggtgagtcttttcgacgtggtcgacgagacctccgtctccggcaagctgggccgcgccgcctccaacggcgccgccgccactgcggcggggaccaatccgtctgtcaaccggtggaacggccggccctacacggcacggtacttcgagatcctcgagaagcgccgcacactgcccgtgtggcagcagaaggaggagttcctccgccgcctccgcgacaaccagaccctcatcctcgtcggcgaaacgggaagcggaaagacaactcagattccacaatttgttcttgagactgaaggcttgggtaaccgttccatggttgcctgcactcagcctcggagggtcgcggcaatgtcagtctccaggcgtgtggcagaggagatggatgttactattggggaagaagtgggttacagtattcggtttgaagattgcagcagccacaaaactgttctcaaatatttgacagatggtatgcttctgagagaagcaatggcagacccacttttagagaagtacaaggtgattgttcttgatgaggctcatgagaggactttggcaacagatgttttgtttgggcttctgaaggaggttctaaaaaatagaccggatttgaagcttgttgttatgagtgctactctcgaagcagagaaattccagggttactttagtgatgcaccgttgatgaaggtgcctgggagacttcatccagttgagatattttacacccaagaaccagagagggactatctagaggctgctatcaggacagttgtgcaaatacatatgtgtgaacctgctggtgatatccttgtattccttactggagaagaggagattgaggacgcatgtcggaaaatcaataaggaaatcaataatatgggagatcaggttggcccagttaaagtcgtgcctttatactctacactgcccccagccatgcagcagaagatttttgaacctgctcctgccccattgaaggaacgaggtcctcctggaaggaaaattgttgtgtccaccaacattgctgaaacatccttaactatagatggcatagtttatgtgatagacccggggttttctaaacagaaagtttacaacccaagaataagggtggaatccctcctggtgtcaccaatttctaaggcaagtgctcatcagagagctggtcgtgctggacgaacgcaacctgggaagtgctttaggctatacacagagaagagctttaatgaggatttgcaaccacagacatacccagaaattcttcggtcgaacctggcaaatacagttcttaccttgaagaaacttggaattgatgatttagtgcattttgactttatggatcctccagcaccagaaactctaatgagggccttagaagttttgaactatttggctgcactagatgatgaagcacccaattgcttcctccggcctagggaagctcaaaaggctgctgatgaggccaaggctcgatttggccatattgatggggaccatctgacgcttctgaatgtataccatgcatacaagcaaaacaatgaagatccccagtggtgttatgagaactttatcaattccagagcactcaagtctgcagacaatgtcagacaacagcttgttcgcatcatgactagattcaacctcaagatgtgcagcacggatttcaatagccgtgagtactacgtcaatatcaggaaaaccctgcttgcagggtatttcatgcaggtcgctcacctggaacgaactggacattacctgactgtaaaagataaccaggtcgtccatcttcatccctccaattgcatggaccataagccagagtgggtcatctacaatgaatacgtcttgactaccaggaatttcatccgcacagtcaccgatatccgtggggaatggctaattgatattgcgccgcattactatgacctgagcaatttcccgtcatgtgaggccaagcgtgttcttgagaggctgtataacaagcgggagagggaaagagctgcaaatagaggctga

SEQ ID NO: 20602 - DNA, 1719 bp, Zea mays
  Peptide Sequence Number=SeqID_63977
atggcggaggctgtcgcgtctgcgggcaggctcgccatggactcttcgacctccgtctcgcccggccaggtttctgctattctgggctttctgtgggttttcgcagcatgggcgtatgctgaggttctcttccataggaagaatactgcttctattaaaacgattctaagtgctataatggtactccctcctgccagcattacttgtttcttacaaccaaacgcaacagactacaagttaatttggctccctgaaacattaagtaatactgacaggagtagacattcagatgtcaatctagcagtgatggatgacagttcagtcaaagcagaagaccagacaatgttattggaggagggtggtcaagcaatggctgcaaagccagcttatacttccctcacatcacaaatactcagacttatattcatggaccagttgcttcttctggagaatcgtttaacactgagggcattatctgaatttggaggttatctactttatttttacatatgtgatcgtacaaacttgcttggagagtctgccaagaattacagccgagatctgttccttttcctctactttcttcttatcattgtagcagctatgacttcctttaaggtccatcaagacaagtcatcattcacaggaaaatctgtactgtacttgaataggcatcaaactgaagaatggaagggttggatgcaggtgctattcttgatgtaccattacttcaatgctaaagaaatctacaatgcaatccgtgtgttcatcgctgcatatgtctggatgactggatttggcaatttctcttattattatgtgaggaaggatttcagtcttggaagatttgctcagatgatgtggcgcctcaatttctttgttatattctgctgcattgtcctgaacaatgattatacactctattatatttgtcctatgcacacccttttcaccctcatggtttatggtgctcttggaattctaaacaaatacaacgagattagatcagtgatggcaatgaaatttgttgcttgcttcttggtagttgtcctggtttgggaagttccaggctataccgatccttctaaaccagatcttccccggttgcatgaatggcaatttcgatctggactggatcgctacatttggatcgtggggatgatatatgcatattaccatccaactattcatagaccccttggaggcaaccacatgattgtttcaaagagcgttgagaagtggttggagaagctggaagaaactgaaatgagaaccaaactctatattaagacctcaatagttacagtgtcaatgatggctggttatttgtggtatgaatacatttataagctggataagattacttacaacaagttgcatccatatacatcctggatccccataacctggcttggaaagattacactagaaacatacatatctcagttccatatctggctcagatcaagtgtgcccaatggccaaccaaaatggctattgtcaataatcccaaattatccactgctcaatttcatgctgactactgctatatatgttgcggtttcccataggctcttcgaattgactaataccttgaagatggtatttgtaccaaatcgtgacaacaagcgcctctcatacaattttgtggcaggaacagccatttctgctgccctgtactttgtatcgtttgttctaattggcattgcaggatactag

SEQ ID NO: 20603 - DNA, 387 bp, Zea mays
  Peptide Sequence Number=SeqID_63978
atggagcctggcggagggatagctgtcggagcggttgagtccttgctggcgtcctcttgcttccgtaagggggctgagagccgccgtcgtcacggagtacgcggggcgccatcattgcctatctggcggagcgagccaaatgggacaccggtcttggcgatgatggcgtctcctgttgacgtggctggtctacgccctaggttgggcgatgtggaagctcctccgaagccgaggtcgagtttgtcttccgtggccgaggtcgagtccgagcccccgggtcgggcgaggcggaggccgtcggctgaggccagggcggagtccgagccctggggtcgggcggagcggagttcgtcgtcttctggggctgagcccgagtccgagccctag

SEQ ID NO: 20604 - DNA, 375 bp, Zea mays
  Peptide Sequence Number=SeqID_63979
atggcggtggtgggtgcgctgcaaaggtgggggtggttggaggcggggcacgcatggggggaacgggtgagtggtggggtcaatgaccctgatgtttgtggtctctgcttccaagaatctttgcctctctatatgcttattcaatgcttcaagggtaagctttccggtatcttcttgggtaagagaaaacctttcttaaaagaaagaaaacacacaagctcagcaatgataagcacaaacaaatcaaatgttttgaataaggaaagaatagagtttttccaaagcacagactactcagattcgggggctaagcataactactattgcttggctcctgaattgagaattatgctaaatgcaacatatgagcactaa

SEQ ID NO: 20605 - DNA, 1147 bp, Zea mays
  Peptide Sequence Number=SeqID_63980
atgggccatgttgagaaccttgatgactatcgtatcacgttgaacctagaccagacgttgaaccagaagacatataacaaacctctcactttggagcagttcgcggtcgacacgtacataaagattgagagctctcgtttagatttcatatgcaagaatcaggatcggttaagggcagacctgtaccaaggtttagtggatagcatgctagatggagatattagagcagagaaggttggcaagcgaactgtgatgtcgacgtcgtttattggtggtcctcgtgacatgagacgtcggtatatggatgctatggctctggtgtggaagtttgtctgtgtctttcatgcgaagctacaagagttaaagcataggctgactaaacaaaatattcttggtaaggtccaagcctacgtctatgtcatggagtttcagaagcgagccgagatcccaagcaacaagtatcctgaactacgaaagatggttatcaagcatatgatgcatggcccgtacgtcgtgacgatgaccgtaaagaaaaggtctgagggtgcgaactggacaatagatgggttgtcccttataacccatgcgagcaaggcagatgatgatgttgatgagatcaagcagtatagagatgcaaggtgggtgactcctccagaagccttgtggaggatatacggctttgagcttagtcagatatctccacctgtgatgcagctgcaactccatcttccaaacatgcacatggtggcgtttcacgagcggcaaatggttgagcgagtcgtcaaccgtccaggtgttgataggtcgatgctcacaacatattttgaggcgaataggctacacgaggaggctcgtggcatcctatatcgtgacttccctgagtggtacacttggcagagtggtaaggacaaagtatggcaacggaggaaacgatatacaggtggacaagtcggtagaatagtctctgctcatccggccgagggggagcgctactatctttgtgttctcctaaaccacgtgactggcgctgcctcctatgtggatctaaggatagttgatggtgtcaccctaccgacttttcgtgaggcagcagagaaaaggggactgcttgagtcagacaacacactggatgagtgtctcattgaac

SEQ ID NO: 20606 - DNA, 188 bp, Zea mays
  Peptide Sequence Number=SeqID_63981
atggagcctggcagagggccagctgtcggagcggttgggtccttgctgacctcctcttgcttccgtaagggggctgaaagctgccgtcatcacagagcatgcggaatgccatcattgcctattttgtggaaactaggccgatgggaacccggtcttgttccctgcggcccgagtcagctcggggcagg

SEQ ID NO: 20607 - DNA, 360 bp, Zea mays
  Peptide Sequence Number=SeqID_63982
atggtttctttgtggcgtgacattcactaccttctaccgatcatgagggtgggttcgatgcatacctcgatatcccggtcgcaggggaagctcgatcccgcggtggcgctccgttcgcaatctaccgccgatgccctccttaaccccgtgtgcagtccgtgcgcagtaatgtggtggtcaacggattcgcgtgaaggtaggtcgcaggaggcggacttgcccgggatctttatacccagagcgcggggcagattccacccgattcctccggtcaaagaggtggctgcaacaacgacggcgcgattcatccgggaagaaagcgttgacgaaccgggcccacgattcaagaatttcttttag

SEQ ID NO: 20608 - DNA, 642 bp, Zea mays
  Peptide Sequence Number=SeqID_63983
atgggccgcgcgggtcatttccccggtgggccgaaaatggggtatggagcccaggagctagtgagggcgtccacaccttcaccacgcccccgcccggacgtcgcgcaaaccccgctgcccgcctggccccggaaatttcgcccgcaccacgatgccccgcccgcccgaccggaaatttcgcccgcaccgcgatgccccgaccgaaaatttcgcccgcaccgcgatgccccgaccgcctccgccgccgtgacagccgcctcgacgtcctcaccacggctccccgctctcgcgatgcccccgaccgcctcccccgccgtgggggatgactggacacgatgctccccacctgcatccaacaccacgctagcctcaccctggatccaggccgccgcaggtgtcctcgacgccaccctttcggctcgcccgtggttgattcctcttctccttcctcgggagggcgccggccactatgggctcctcattaccacgtccctcctcttggtgctcctcttcaccttccacctcctctgcgcatctttgttaggccgtcggcgctgtgggtggtaccctggccatctcggagctgatgctggcgaggtcatcataaagggcccccgcaacgtcatcctcaagaccttgtag

SEQ ID NO: 20609 - DNA, 156 bp, Zea mays
  Peptide Sequence Number=SeqID_63984
atggcgtttgccgcaggtgggatggcgcggatgcgctcggtcatcggagggcgagaggctccaagttgtggagattcctcgcaagcgggatatagagaaacaaagaaaaacaccatggtattcaagtgggtctttggatcgcttgagaggggttga

SEQ ID NO: 20610 - DNA, 345 bp, Zea mays
  Peptide Sequence Number=SeqID_63985
atggctcccaagaaagcaactttgaatgctaccacctccatcgacgacacagcgaaggcggcccttctcattgagaagaagggcaaagcaacccttgttagcaatgtccctcatgaggccctcgaggatggggcagtcaatagcaagcccctccgccaggcttcacccccagaagccgacgatatcatcgaggacgtcgaagtcctaggcatctcagccgaggaccagctcaagttaggagacgacaccaccatggccaaatctttcatcatagccctcgaaggcccagccctcacatggcaatacacagaagccctggcagaattatcactctataggcagtag

SEQ ID NO: 20611 - DNA, 156 bp, Zea mays
  Peptide Sequence Number=SeqID_63986
atggctttgttcagccaaaagtcagctctgtctgggtgcaccggacagtgtccgtgtaagggcgagaggctccaagttgtggagattcctcgcaaacgggatatagtaaaacaagcaaaacaccgtggtattcaagtgggtctttggaccgcttga

SEQ ID NO: 20612 - DNA, 1383 bp, Zea mays
  Peptide Sequence Number=SeqID_63987
atgaacaaggatcgccaggacgctgcgcagaagcgtcggccggtcatcaggctccccgatgctaggcgtgaagcgaagagagcgcgggggagtgcgaaggctgccgtccccggtggtagccagccgatgctggccgcgaagccggctgcgcctggatccagcaaggtgccagagagcatgaaggcggtcggcgccggcggaaccaagtctgccccggacggagctgcgaagggtggcgctttcagcgctggtgcggccgacttcaccgaccacgtggcgtcgggtgcccttactgcagatgtgtctgccgaagtcgagagacttcgggtgcagcacgcggacgccgtccgggagaagtcggctgcggagagcaagagccgcaggctggctgagaaggtggccgccttggagggcgagaggacggacctccggcgccagctcgtggaggaaaggagggaggccaaccaggccatcgccgaggcgcaggctgtgcaggcggaggccaaattggcgcgagcggaggggagtctcgccagccaacgcgccgaggaatgggaggtgcggttcaacgctctgcatggccgcatggagagggccgaggcctctacgcgctcggaagttgagcggacgcgcaaacagctcgtggactcatactgcgagatgggtgcgcggactgctgacttcgaggtgcccgaccgagaggcgggcctgcgcttcctcgagtggctgcaagaggaattgctggcactcccgaccatcgtggagggcttcatgtcctttgcctccctcgtcacctacgaaggggccatgaacgcgctgtcccgcgaggggtgcaatcactatgagggcttcgaccggtctgatgaagactttgggcgcgaaatttttaaggtcgaagaccctgtggtgaaggattccgcggggcccctcttcgatcggatgtggggtcctcatggccgggatgcagtcagggagcggtctgatcgggcgagagatcagatggcgcgtgctaaggatgtcgaagaccttggggatctgaatggcgcgcggcccgaggccgaggtcaacccggtgctgcccgaggctgatgcgaccatggttgcctcgggcggggacaacggagccgagtgcttcctcgccgatgtgcagccgtcgtggctggacaacctgctcgatgggcccaagactccggcgcggtcgcacggctggcccaaccatcgcgggtcgtccagcaactcgttcaagctcttcgtgggcggtagcgctgcggggggagcgacaaagttgtttaccaccaatggggagcccgcttatcatgactcaccggtcaagaacaggtaccgcaggacgaggcgcttggaggatgctgcggtgtgttcgtga

SEQ ID NO: 20613 - DNA, 396 bp, Zea mays
  Peptide Sequence Number=SeqID_63988
atggttgcgtcgggcggggacaacggagccgagtgcttcctcgccgatgtgcagccgtcgtggctggacaacctgctcgatgggcccaagactccggcgtggtcgcacggctggcccaaccatcgcgggtcgtccagcgactcgttcaagctcttcgtgggcgcacacctggtgattgttcgcgcccgggtcttggtgccccaaaacccgggtgtgacagaggctgaggtcaaccctgaagctgctgaaggctcctacgctggacctgtgcccactgtgtctggtgaaggctccttaccagcccctgccccgacggcggagggccccccgaaggcggtggtggagctggcagcggaggatcccaaggcggcggcagggccttcgcaggtggcttag

SEQ ID NO: 20614 - DNA, 357 bp, Zea mays
  Peptide Sequence Number=SeqID_63989
atgggaaccgtcggtatggcaagcattagtgaaagggtggccacaatcacgatcgcgcggcttcggcacgataggaatgcccgggatggcaaaaggagtgacgggggagggggcgtgagcagtggcgaacctacagggccctatcattttgtgaagaagcgtttggatcgtaatccattatcacccctaattgcggtttctacaacaaaacatgctggtaaggaaaagactaatgggaccaaaccgccacagatgcgtcctcgtaaatatttcggggacgagagtacgagacaatggaaggcgatgagacatccacatcagggggcagactgcaaagtgcaaactggtgtatattga

SEQ ID NO: 20615 - DNA, 393 bp, Zea mays
  Peptide Sequence Number=SeqID_63990
atggctagctttcaccaccccttgaggctcggcacagtgatcgggtttgggagcctggagttcatgtcgctcagaattgagtacgacatggagcccctcccacctggtcccctggctaacactcaggaatgtccaagcgttcgtcctcgtccttctcgtcgtaggaggcagagatggagcaaccgcaatcactccacccatggcaccatgtgccctgatgaggctcctgagctggctaatgatgcagactcccttgcaagggacctagccaacgttagtgtcacgcctagggcatcatcggcaacacacgcatccccagcaacaactctgttggctcctcctcccacagtgtgtggagcttcggttccaccagcccctcacgccatgggttag

SEQ ID NO: 20616 - DNA, 633 bp, Zea mays
  Peptide Sequence Number=SeqID_63991
atggagaccacttcccctgcctcttcacctgggcacacctccctcccagctgctgcaggggacatgatgctgggaaagagatctgggcgcccgtcgccggcggcgcggcagcacatgcggcggaccacgagcatgacggagttcgcggcaccgcacgtgctggtagacgtcgcggaggaggaggaggacgaggagctgcagctgctgccggcgcacgccgaggccacaggggaggcggccgagcaggaggacccctacgggtgggccatcggcggcgccgcggcggccgggcgcgcggactggctggcggcgtaccgcgcccgcgcggcgccggcactggcggggctacgccggaactcggccgacttctcggctgccgagaccgccgcgttcctccgcgcctgcgggctctgcaaccgccgcctcggacccggccgcgacaccttcatgtacaggggcgacacggcgttctgcagcctcgagtgccggcagcagcacatcacgatcgaggagtggaaggagaagtgcgcgctcgccacgccgccgacggcgccggcgtccgacccggtggtgccgctgccgcccagcggcgcgggctccgacaaaccaggcacgctcgccgccgcatcctga

SEQ ID NO: 20617 - DNA, 495 bp, Zea mays
  Peptide Sequence Number=SeqID_63992
atgggggctctgcggatgcacaaatgtgggagggggagagtgagtggggctctagaagctagaagtggccgagggtggggtagttgcaggctaggagcgcgacgtgggcgcggagaccttggcctgcgcgtggggtgtgtgtgcggatggttgaaggggatgatgctgataggtggggccagggcatcagtggttgagggcagggtgttacacatggacccgccctcgggagcaaagtccatctcgcccgacatagagctcgccctcaggacaaactctgcctcgctcgagcccaacctcggctacctgctccccccacgaatcatgcggaaggccactccttcaactgaggcacatgtcatcgaaactcaggacaggctcagtcacaacctcgggcacgcttccgcctctcccgagcctagttctgctctcaatatctgtgacggaggatgcccccaacgtcatcagatacagtggagctcacacattccttaa

SEQ ID NO: 20618 - DNA, 486 bp, Zea mays
  Peptide Sequence Number=SeqID_63993
atggcacccaagagagctagctcgaaggctgacgaggctgcgaaggcagcactgctggccgagaaaaagggcaaggtccttgtcgacaccacccaccaagaggcctgcgaagacgacgcactcagcaagaggcagcgcaacgaacaacccactcccgaaggcagtccccgcacctgtagctctggaggacaacagcaacttcccccaggcttcgctccaccggagggcgcggacgccaccgaggacggcgaagtcattggcgtgtcagcagaagagcagctacagttgtgcgccttgcgcatcaagaaccgcaacctccagaagcaaaaagagatcctcgaggccaagcgccaacgtgtgtctgcacaagccaaggtgcgacagatgatacgcgacgaagagcagaaggctcaggagctggaacaagagatcacgctcatgcagcgcgaaggccaactcggcctgcaacacggcccacccctctaa

SEQ ID NO: 20619 - DNA, 973 bp, Zea mays
  Peptide Sequence Number=SeqID_63994
atgcccccctcctgcggcgccagtggcatccgagaggagactggagggaccgaccaggagttgtctgttgatgactacctggtaggaggcgtcaccatgtttggcgcccagacggggctaccgcctgctaagaagtcgccgccgcatctgcggccgaaggggtggcggcggttgttgcacgatagctatgttatggcgctagtgaatgttgcgacctcgcagctgcgttccgagaggagacgggtggagggcaaaatagagcgccttcagatgcaacacaccaaagctgtcaaagacaagttagcagctgagaacaggagtcgaaaccttcttggtaaggtgactacacttgaaaacgagaatgaagatctcggtcgtcagctcaatgatgagaagaaagccaccgctgaggcgaagacggagggcaaaagtgcccgcgcggaggcccaagctgcccgcaagcgtgttggcgagcttgagctcgagttggagctggagtctctcctgtccatcgtgacgagcttgatgtcctacgcgtcgctcgtgtcctgcgaaggggttgtgaatgccttagcccgcgagggctgcatgcacttcgaggcctttgctcggagtaacaaggacttcaacgctggtgtgttccaggttgaagatgacacgacgagggacaaagaagttgaggacctcgctggcctggagagctcggtagctcgaaaagatgtcgaagttgaggcgggagctgaagagcaatcttcactcgcaaaagtcgacgttgaagaccctacagcggttctggtgcctgggcctacgcagacagattttgatgacattggaaatgacaaatcgtcgatgtgccaaagtttgatagttcttagtagtggggaatctcatgttgatctgtggtcattggaaagtgaggagttactgagcccgtttgctaggatggacgatgagtcttcagaggatgacttag

SEQ ID NO: 20620 - DNA, 294 bp, Zea mays
  Peptide Sequence Number=SeqID_63995
atggccgtgatgggttcaacatcggacaagatgtatctctgccaggtgaggaaacaacagacttttgttgtttttgtccaaaggtggtacccaagaatgagccccatcagtgaagttcgtcatggtttgatgttggcctcccactttataaacaatactcttttgtgcgggaggttttgcctcccaggattgtccaaggtcctcaggacagggacaactataggcggacctaataccttgggaggttctgtcacagctgccttcgttagggaagttgagtcggaggctgtttaa

SEQ ID NO: 20621 - DNA, 231 bp, Zea mays
  Peptide Sequence Number=SeqID_63996
atggacgagcttgctacaagggttcaccgcgacgtgttaaacctcccaggcacgtggcgcacgatcggtaagcggccaacgccggtgaagatcattccggccggccatagaccaagtggctccacggctgttgctggatcactaattgtcttcttcgacgacgacgcgtttgaggacgcagtcgcggcagacgacgacaaagaagaagacgacaacatcacataccgttga

SEQ ID NO: 20622 - DNA, 297 bp, Zea mays
  Peptide Sequence Number=SeqID_63997
atggccgtgatgggttcaacatcggacaagatgtacctcttccaggtgaggaaaaagcagacttttgctgtttttgttcaaaggtggtacccaagaatgagcccagcagtgaagttcgtcgagggaggatgttggcctcccactttaaaaacaatactctttttgtgcgggaggttttgcctcccagggttgtccaaggtccttaggacaaggacaactgtaggtgggcctaataccttgggaggttccgtcacagctggtatcggagtgaagcccatctctccagatattacataa

SEQ ID NO: 20623 - DNA, 612 bp, Zea mays
  Peptide Sequence Number=SeqID_63998
atgaacaaactcaccggcattcgaaatgccgttacaaacggaactccggttccccctccgcaggtacgaacaaccccactccgagggggaaggcctgcggagcaacggaaggccgacgaatggcgcgccgtcacctgccccagcagcggcgacgacgacgacttctgctccggggggtcgaacagcggcagcactgacctcagggcggatgctgctgccaggaggcccccgcccacgacaaaactcgtgaggcaaggacgggcagaaggccgtagagttggaggtcagtccgtgggcggccccggctatcgcgccggcggaagaacctcttccagctgtcgtggcggacgccggcgccgcgagcggctccgaagccactcgcgtctgaagaccgggcacgctgcaactgccagcgccacggacaacaaccgctcctcccccccatcactgagtgaaggagcgggccgccacccacgcgggggccgacctcaactcggcgcactcccctccccagccctggtgatgaaaatccttgaggctgagggaggggcagaggccgcagcccggctcgctttcccccaccatcaagccggaggtcaccatctcgggtga

SEQ ID NO: 20624 - DNA, 565 bp, Zea mays
  Peptide Sequence Number=SeqID_63999
atggagtacacacggggggatagatgggcgcgtctagggggtagacaagcgcgtcaagggcacggcgagccgtgccaaagcaccgtgcaccatgcgagcacgtacgcgcaaggccgcgctgacgtgtcgcgaacgagtcgcgcacacgccggggccgagcagcgcacgcgccgcgctacgcaggggcacaacggccgcgcgagccgaagccacgccgggccggggccgcgctgcgcaggggcaggacacgccaagacgggcggggccgagccgccatggccggtgaaccgggccgcgccacggccgggcgagctgcacggggagggcgccgcgccaagtggggcgaggccgggccgccacggcgatgtcacggactgtcgcgccggcgagccaccggagccggaccgcgtgggaccacgcgccgagggcgggcaggggggctgtgcggggtcgccggagggagggggcgccacggctgagcgccggcgagccggggccgcgccaggccgccacggcgaggacggggacagggtcggggacgccgggggagcgcggtgccgcgccg

SEQ ID NO: 20625 - DNA, 402 bp, Zea mays
  Peptide Sequence Number=SeqID_64000
atgaacaaaaacagaaacttgcagaatggaattgggattcagatgggtcagattcaggcgatagaaatcaaggagaccgtagaagaaaggagaaatgggcagagcaagtccgcggataagaaaaggaacgtaaaggacggattcatgggtgtcttctgtcggaacagtgaccccacggcaaattcgccacgagcagagctccttcggaggaagaaccccgatggaaacgagatgaagaaggtcggattcggagacaacagacatatggttacctgcgaagggcaactgactgttgggatcgatggggggaatgattgcgacggacgaactcgaagctttccgcttgggcgccatctcaacctcgccggcgagcggagcagaagcgatattgcaggaaagtag

SEQ ID NO: 20626 - DNA, 447 bp, Zea mays
  Peptide Sequence Number=SeqID_64001
atgggcaagagcaagagaggtggcagctcttcgcatcactcgggtgataagcgcaagcgcgagacgactcctccctcggaggacttcggcgactcggaatactcggaggaggagttctcctccgagtccgagggctctctagctcctgcttctcctccggcgtcgtctgatgattcagacgactcccaggggatcgccgcggaggtatggacctacatccgggccgtcgagcgtgccgggctcgagggctcggatgagtcggagtactcctcggacgaggataattcctctgactcgtccgaggagggcagcggcggtgacgacgacgacgacggaggcgacagcgacagaggcggcggcagcggcaagggcggtgacgacaacgacaagggtggcaacggtgacggcggcggcggcagcaagggcagcaacaaggccagtggctag

SEQ ID NO: 20627 - DNA, 1422 bp, Zea mays
  Peptide Sequence Number=SeqID_64002
atgcccctcgccagatgccttcccatggtggggaagctggtgcgaagtctcgccttcgtgctggatctgcatagccgcgatccggccgcctttgtgcgtgaggcgaaggatggggcggtgcggatcgttggtcgggtgccggaggccgcgaaggcggcccgagggttgccgccgccaggcaagcgcgttgccgacttcgccaccgacattagtgtggacgattatcttgttgggtcggacgaaggccaacttgttgttgttccgcctgccgctgcggctgccgtggtgccaagggcgaagggcagtgctcttagtgccggcggcgagataccggcactcactgtcgtcagggacgaggcgggtgctgcgtcccgccggctgagggagatgaaggaggcactaagtcaggcggctgacttcacagaccgcgcggcgtcgggggccctgacggcagttgtgtctgccgaagtcgagagacttcagacgcaacatgctgacgtcgtccgggaaaagtcgtccaccgacagtaagtgccgcaagctggcagataaggtggctgcgctggagggtgagaagactgacctccggcgccaactggcggaggagaggaaggaggctaatgaggccatcgccaaggcgcaggctgcgcaggcggaggccaatttggcgcgggcgaagggcagtcttgccaggcagcgcgccgagcagttggaggagcggctcagcgctctgcagagccgcgtggagagggccgaggcctcgacgcgctcggaggctgagcggacacgcaaacagcttatggattcataccatgagctgggcgcgcggaccgcggacttcgaagtgccggaccgagagcccggacttcgctgcctcgagtggatacaagaggagttgcaggcgctccccaccatcgtggaggggtttatgtcttatgcctccctggtcacctatgagggggcgatgaacgcgctctctcgcgaagggtgccggcactttgaggtcttcgaccaagctgatgaggatttcgagcgtgatatctacaaggttgaggaccctatagtgaaggaatccgccggagccctctacgaccggatgtggggcccccacggtcgggaggtggtcagggagcgggctgagacggcgaggggtcaggcggcgcgtggcgagagggtggaggacttcggggccttgaacagcgcgcagcctgagtcggagtcgaacccggtggtggctgcgcccgagaccgccccggagctgcccccggaaactgtcgaaggcgttcccgacgcccccgcagccaccgcggtcggcggaggcttgtcgccaactgctgcgccgagggccgacgatcctgtgcagatggcggtggagccggcagcggaggatcccgcgacggctgggtctttgcaggtgacctag

SEQ ID NO: 20628 - DNA, 880 bp, Zea mays
  Peptide Sequence Number=SeqID_64003
tcgtgcaccaagagaacaaaacaaacatacaccaacaatatatggatgttcactcattggtcctatatactatcttgatcacttacaccaccctgcatcacctgagaacaagtatgatggtacaattccaataactgctaatagttataacttagatttatacagtttcgtagccgtacagaaacatgttatgtcattgcaccagaacgacatgtttctgtcgtattcaacatatgtgccacgcaaaaagcatttgattggcaacaagctgaaatgtgtgccctcccagcatcgaccaatgttcgaatcaatgtttgatgcgcatgacaaggaggtggataagtactgtgattctcttcagcagagccatcagatgcttgtttctaagcagattgaactatctgagacctttggtgaaatgatcgatgaagttctaagggctgccacgcagcgtgatactcagcaagaagatgtcccacccactacctcaatgcccccgacaaatgctcgtgtatccactcctcatgttcgaacccctgatcatcagcaacacgatcaggaaatacatgttcctactgatgataacaaagtatcagaacagatcggcttccgtggtctgcgcgagattgacgacgtcgatgccctaccggcgaaaatggaggtcatgcttcttctcccctcgtttcgggaggatcaacgagctcgtggcagggtccccctccagagcgaggatgtcaagctcatcaccgtcgacgaccctttcatcaccacggactacatggtacctgagtgcccagcgccctgtgttaaggacgcatgtgccctcagacatctaggttatccccggaatattcccataaagcggggttacagaccgtaa

SEQ ID NO: 20629 - DNA, 776 bp, Zea mays
  Peptide Sequence Number=SeqID_64004
gtgctgcacttgatcctcaagagctatataggtcaaatcttgcaaagaaatcaagttgtcaattggctggtgactttgggcaattaagaaacttgccacctcaactaaagaagctgcagctgcaattgaccagttttctaggttcattgaaaagaaaggactatttggagatcccagaagctaagtggtcagcacttaatggcaaaccagatgcagccttcaagaaaaaggattctgatccatgtagtatgctgatggatgttgctctttatgatgaccaaaacccaatcatggattggctaaacaattctatgagtgattctgcaccaactctggatgaatatgatgatagtgatcttgattggagcacacctagcagttttgtcactgaaagtttacaaatgggcatagaagaggtggctggatttaagagagacctttatatgggaaaaaaggttgtaaaaacaaacagagaatgcaatgggatggagaagatgctgaaggtaccgcaaaagactatgaaactgattcttcacaagaacaaggcagcccaatttatgctgagtcaggtgacagtagttccaatgatgaaggtgatggcaataatgatgttggtgccgatggaagtggtggcactagggctgctgatggtcctgccaaaggttcgagacatggggaaccaactcctttgcgtccaagatcaacaagaaaaaggaagccaactctcaagagcattactgaattataaatggttagattaccctttcacctactaa

SEQ ID NO: 20630 - DNA, 906 bp, Zea mays
  Peptide Sequence Number=SeqID_64005
atggtcagtggaagcccaagatgccacatcgttctgatgtgggcagtagtggcagttccaacaaaggcaagctcacatccaaaggaactccaaggaggaaagggagatgagacttcaggcggctctacactgtctgttcatctcactgaagacaaagtggtgcctgtgatctgcccagatgatgcgcgtgggcgtttgacatgtgggccctacccgtcagggtccccatccacgccatcgcacacacaggactgggtctttgcgcggcggggtccactgctcatctattcatgcgcgcgcggagggtggtcgctcaccgacgcgtgggcctcagcacttgttccgctccacgcccgcgatctgactgacgtgtgggacccattacctccactgttcctcttctccgccgcaagactcggcacgggctgttgcgccgcccggttgatcagctacgggtcggtactatctgacctgcccataaattggagctgcgagcacctcttaacccctccgctgggcaccgtcaccgcattacttcgcttggatttcgatcggaaacgaagagggcacggcgaagagcatgtgactgaggatcctggtgcccagcagatagaagtagctgagcaggagctcattgaagatattataaatggacatcttagcatgtaccaccataagatggtctataccaggaagggtggtggaattgatctacctcccaatcgacacactcagaggatatttagacaaccacaacaacaacaacctgagatggatcctccacagcctccaccagtcggagttgatcccgctgttgcagcacagatgcggataatgaaacagatgacagacaccatggcgaatatgcacgcgcaaatgcggcaggaacgccaggagatgcgctaa

SEQ ID NO: 20631 - DNA, 252 bp, Zea mays
  Peptide Sequence Number=SeqID_64006
atgagcgagacgcacccgagtgccagtgctgagtcgtcaggcatcaaagagagttccctgattaactacgaagcaatggagatttgggaggtgattgacccaggaacgatcgtcaaacgttcccaggacaggcaaaccatgggcacgctaatgaggtttgtccccaaggagatgtggggaaccctaggcgccaagaagactgtcaaggaggcttgggaaacagtcaagacgatgaggatcaaagctgattga

SEQ ID NO: 20632 - DNA, 1022 bp, Zea mays
  Peptide Sequence Number=SeqID_64007
atgctggacgaggtcgcagtgatgggacgacctcgtcacaggtcttcgtccgatgacgtgtgggacgaaggctcgatgctgaaatgctcgcactctgcgccgctgaagcgtccgagagctcggttcgcgaggctgagcgcagagattgaggccgcggggaaggcaccggcggagcccaagccaagggtcgagcggatctgcgccatgcgagcatccccaattcgcaccaagacagcgagggtcgaatgtcccagcgagaggaagaaggcactgaccacgccgcggagcaaggccgttcgaccgaggcaggagctgttccacagcgtgaagcaccagaaggagccgttggccgctgcagctaggaaagggacggtcgtcaagtctctattcatgagcacgacgccaaaaaaggaactggtccagacgccagcggcagacaagagcaagggggcggtgtccgaggtctgttcgaagctgaggaagctgaacttggcgtgccgggaggtgccgagcaagtacatgtctcagcctcagccgaagaatacgaagactgccaagaagagtgaagagaccacggtggccaagagcgagaagcgggggctggaatccaagaccaatgccaagaagaaaattttaggacgctcaatgaagcgtgctaatgccggacctgatggagagaaccgaaatggttgcagcactgctgtagacgagaactcgcttgtagaaactgctggctcccatcaggaaaggaaggttgtgctgcaggaattgagaatcgaggtggatgcatcgcgatgtggcaattcagatgacaacaaggagaatgtgtccagtgctccgagtgaagaagcattggacaattcatcacattatggaagtgaaaacagactgttggagaacaatgataatgttcctctgaaggagaatgttgctctgaaggtggccaaattgcagaagaaagtgcatcaagagcaggcaggaaagctcaagaaaaccaccaatcctagggtcttatgggatgg

SEQ ID NO: 20633 - DNA, 1013 bp, Zea mays
  Peptide Sequence Number=SeqID_64008
tacagcttgattctgatgaagatgacttcatgccagctctgaagaagcgtaatgtttctgaaagccatacaagagttttaagaaaagttgtgacaaagaggattaaacatgaggatctaccccgacagaggctcaatgtgatgtgcaaccctcaagatgtcattgcaagcattaacattttgaacgaaagacaatgtgaggccataagacgtaaaggtttctctaacattcttgatatgacagtagatgcgctgtgtagtagatcacaccttcaatggttgatgaacaagctggaccacaaggacatgacaattcgtcttggtccaggaaaggaactaaagatcacaaaggacattgttcatcttatccttggtgtaccaaatcatggcggtggtaaaccattggggattgacgaagcagttgcagcaagcaacttgagggcagagcttggtttggctaaagacgagttcaatgtgacatttctacaggatcgtttaaggaaaggcgaggatgatgaccttacaatcagatccgctgcccctcaaaataagattggcacacctcgcattaaattctttgataagaatatcataaaagctttgaccaaagctgacaagaggaagccggagtgcaggaccaatatttttgatgcaccacgccctgccccaatgcctcggcccacttttaacatccaacttccatcgatcaaagagatgatgtcaagtaagatcaacgatctcccacctcgtcatcgatctaaattcacagaaattcttgctgcatatgacttggaggttgacaagtcatgcatagccataaaagacaacattgacaaaattattgagaagcaatacgacatagcagacaagtttatagagttgatcgacgaggtactacgtgccgagtctgataatttagaaaacgagacagatgagccacagcatccgaggaattcggctgattcagcaggccaatcttacaattatcccttgtcatacattcagaacctttaa

SEQ ID NO: 20634 - DNA, 885 bp, Zea mays
  Peptide Sequence Number=SeqID_64009
atgccggaaagtatacttgtgaatgcaaacattgggaacatacagattaaacggataccgaaggaatacattttacaaagatacacctactctgcaaggcaagatgttccgttttcaagagatgataggaatttgaaggggaaggatggagaaacaaaatcatatagacagaagatgttgctaaaaaaggcaatgaaagtagtgcatcatgctagtttatccaaggcaggaaatgatagagccctagcagtaatggatgagcttctcgaggtacttttgcgtatggagacagatatagaagttgaggagacatgtggaactagtggaggagatggtatacaggacgatgatgaagacaatagagacatcgaaaaagatggtgaattggatgaaaggaataacaaggaaattcaagacgtatctaatatacttgaacggggtgtggacaatgttcaaatacctataccgatacgtccagtagaagaggtacaggttaatttgcaggatcacgcaaatatgaatgagagtggtgacaatgaacaaaatgattatgccagaaagaaactggattttgcagtcgatgggataagcttgggaagaccaaataactcaaaaccaaaaggaagaacaataaaggggagtgaacaaaaggttattaaattgggagcaaaaggtacaaagaaaatgaccaggaatgcaagaagtgtggaattgctgatggtcacaacagtaggacatgtttgtcaatggaggaaaatagattacggttggctagccttgctggacgtaagagaggacgacctcctggatctaggaacaagtgtggaagtaatgttcctgattggaatgagacaacaacatcaaaaaaacacgcaattgatttag

SEQ ID NO: 20635 - DNA, 387 bp, Zea mays
  Peptide Sequence Number=SeqID_64010
atgcgccggcctcgggcttccccagcgtcgtcagcgtactacggtcctaccgtcctacgccctgcccggttcctcgcgtggaagttttgctcccgcgcatgtgaggatgtccctgctggcacggtgtacggagaattcctaatggacccgcaatgcaactttatcgtggtcgaagacgtagccttgcctccttcgcacagcttcgctatcgtcgaagccgaagaccagataggaggtgcagcacccgacgacaagttttcgagtttgcgcgggagcgaatgggaggaagcagcgcaaagtgaactgtggatatcgagtggtagcggagtccgccacattttacggaacacgaacacactctataatttaccggaggtcataccgtag

SEQ ID NO: 20636 - DNA, 2070 bp, Zea mays
  Peptide Sequence Number=SeqID_64011
atggcgcagtacaggcagcagtacggcgtcggcttttccgactcccgcggccaccatcaccaggtgctcccggactggcaccggccccaccacgcctccgccaagtcctcctcacggatccgccgccccgggaagcctgcgccgcgccgccgctcgccggctgctgctgccgccgtcgccgccgctctactcctcgccgccgtcttcctcctttcgcgccgcatctcgcgcagccccgcagagatcagccaagattcgagcgctagggagacgttgccggactggaaccagagcaagagctggaaggagctcaagttcgggcacggcggaggtggccgcagcgcgcgggactccaggtactgggaccgggacgataggcgccgcgacgaggactacacagaggacgaaaaggagaagatctcgggtggaagtgggacctccggcgatgctggcggcagcagcgataaaggtaccacctctgagggaggtggggaggataaaggtttgactaccggcagcgatgctaaggatgttccagaggtgtctgaaggtgggaaaggtgggaccttgtacaatgagggtggcaggaaggagctggagcagtacgaggctgcagccatgggagccacaggaacaggggtgaaggaggttgatccagatgatgagtatgacgatggcatcgatacacaggatgaaatggaggatgctcacctgcattcatctgatggtgggaggaagcttggtggtggcagccatgagggtgctgagaagaaggacgaggtcgctactgagaggcacacagaagcaggtggagggattgcgggtagtcatgatattagcagcccagacaaaaagaaggtttcaggtactggagacaagaagcatgggcccaagaagaaaccgaaacgcaagaagtctggttcaatttgtcaaatgaagtttcttaactcaactgctcagcttgtggagcctgtgaggaatgagaaatttgctagttttaagttggagtatgtagaagttgaagaaagacctattggatcagaattttgggaaccgagatttgccggccaccaaagcctgcaagaaagagaggagtcatacaaagcccatgaccaacagttgacatgcgcttttgttaagggtccaaatggtacaagtactggttttgatatatctgatgatgaccgaaagtacatgagtaaatgccacattgctgtatcatcctgcatctttggaaattctgatcgactgaggactccatttggcaaaacgaatcctgtaacatctcttagaaatgtctttgttattacaccttcacagattacaagcctctcaaagaagacagtttgctttgctatgtttttggatgaagtgacattgcacactttagaatctgaaggccagaaaatggacagcatgggtttcattggcatatggaagatcatattgattaagaacatgccttataatgacatgcgtagagtggggaaaataccaaagtttttggcacacaggctattcccatcatcgaggtctgttgtcttcttctggatgttctcaatctggttagacagcaaactgagactacaaactgatcctatccttatcctggagtatttcctctggcggcatggctatgaatatgctatttccaatcactatgatcggcattgtgtttgggaggaagtagcacaaaataaaaagctgaacaagttcaaccatacaataattgaccagcaatttgagttttaccaagcagacggactgacaaggttcaacccgtcggatcccaacaagcttctaccaagctatgtccccgaaggctcttttatcgtgagagaacacacaccaatgtccaacttattctcttgcctgtggtacaatgaggttgatcgtttcacgcctcgtgaccagctcagctttgcatatacgtacctaaaactaagaaggataaaccctgacagaccgttccgactcaatatgtttaaggattgtgagaggcgatcgatagcgaagctattccatcatcgatcagaagagagtcacagtggtgcacaactaacaagatga

SEQ ID NO: 20637 - DNA, 1596 bp, Zea mays
  Peptide Sequence Number=SeqID_64012
atggcgatccgctccaaggcctggatctcgctgttgctcgcgctggccgtcgcgctctccgcccgggcggaggaggagcccgccgccgccgcggagggcgaggccgtgctcaccctcgacgtcgacagcttcgacgaggccgtcgccaagcaccccttcatggtcgtcgagttctacgccccctggtgtgggcactgcaagaaacttgctccagagtatgagaatgcggccaaggcacttagcaagcatgacccaccgattgttctcgctaaggttgatgctaacgaggagaagaacaggccgcttgctaccaagtacgagatccaagggttcccaaccatcaagatattcagggaccaggggaagaacattcaggaatacaagggccctagggaggctgatggcattgtggattacttgaagaagcaggttggccctgcgtccaaggagatcaagtcaccagaagatgcgacggcccttatcgatgacaagaagatctacattgttggtatcttcgctgaattcagcggcaccgaatttacaaacttcatggaggtcgcagagaagctgaggtctgactacgactttggccacactttgcatgccaaccacctcccacgtggtgatgcagcagtggaacggccattggtcaggctgctgaagccatttgatgagcttgttgttgacagcaaggattttgatgtcgctgcactgatgaagtttattgatgctagcaccatccctagagttgtcacttttgacaagaaccctgacaaccacccatacctcatgaaattcttccaaagctcagcccccaaggctatgctgtttttgaacttctccaccggaccttttgattctttcaagtctgcctactctgctgccgcggaggaattcaaggacaaggaaatcaagttccttattggtgacatcgaagccagccagggtgccttccagtactttggcctgaaagaggaccagacaccccttatcctcatccaggatggtgactccaagaagttcttgaaggttcacgttgaggctgaccagatcgtcgcttggttgaaggagtactttgatggcaaattgacgccgttcaggaagtctgagcctattcctgaggtcaacaatgagcctgttaaggtggttgtcgctgacaacgtccacgacttcgtcttcaaatctggcaaaaatgtccttattgaattctatgccccctggtgcggacactgcaagaagctggcgcccatcttggacgaggcagccaccactctccagagcgacgaggaagtcgtgattgctaagatgtatgcacccaccacccccttttacaaaacactaacaccacttcgttcccaggacgcgactgccaatgacgttcccagtgagtttgacgtccaaggctacccgaccttgtacttcgtgaccccgagcgggaaggtgacatcctacgacagcggcaggacggcggacgacatcgtcgacttcatcaagaagagcaaggagaccgcaggcgccgccaccaccaccaccacccaggcgccaccggcatccgagaaggcagccgccgccgagcccgtcaaggacgagctgtga

SEQ ID NO: 20638 - DNA, 207 bp, Zea mays
  Peptide Sequence Number=SeqID_64013
atggcgtcccaaggccatcgccgcaaggcccccaagctcgacaacagctccacgttcttcctcccgagagtttgtgttcttgacagttactggtatgaccttgtcgagactgaagtaaggagggatagagctaaaactctcttgacattcgagctgaaaccattgtattgttctttggtgctctccctattcagtagaaacatatga

SEQ ID NO: 20639 - DNA, 945 bp, Zea mays
  Peptide Sequence Number=SeqID_64014
atgggttccaaagcgcctttctgtctcacgctcctcttgctgctcgctgcggcctgtggacctgcagcacatgcccacgatgctgtcgagctcccgcatcatggcttagccttgaaggaacaaatttcttcaaccaagattcctgcccgtctcaagagtggcagcggactatgctcggcctgtgaaaacttcacgagcgaagccgtcacttatctcggcaaggaacagacacaggacaggatcatggagttccttcatgatgcttgctcccaatcattctcctttgaacagaagtttttctctaacaacttccctatctcgcagtgtgtcgagctgatggactcttatgcgactctcctgtttgccaagatcacggagatcagaccggaagcgttctgcaaacggtatggcctgtgcagggacacagctcttctctccggtgtgggaagtgacagcacgtgtgtgttctgccaccatctgctcgatgaaatcatgtccaaactgaaagatccagatgcggagtttgagataattcagattcttgtcaaggagtgcaataagatcgaaggtcacgtccagcaggttgagcagatagtggttgaaaggtctgaaggttggcattgtggatatttttgctatcatgcatggattcccagacaatgtgaggacgaaccagaagggcgagttctgggtggcgatccactgtcggagaagtatgtatcctcggctaatgagctgccatgtcaagctgaggaagtttttgctcagcttcccaatccctgccaaggacagcccgatggccagatgcttcacatcatggaggacgacaagggagaggtgtccttaacctatagaaaagcacctagaaatgttggtgatttgatagagatcgtggagaaagaatatgaggactacaaactagacactcagaggagggtgttatag

SEQ ID NO: 20640 - DNA, 330 bp, Zea mays
  Peptide Sequence Number=SeqID_64015
atgctgtgcttatgcggggtacaggttttggccccacctgcaggctcgcaccctcccctgaggtgggcccggggccactgtcggtaccttgaaacaggggttcggagctcccaagaaggcatgccggaccccccgggtgggtcccaggtccccccgagtgaggtccggaccttagcaaggtcccgggatggagaggaccctggcacaggcaaggaggagtgggactttgtcgtggagtctgagaacgacgcctccctcactgatggtgaggacctcaatctcctccttggcgaggactgggaggagagtgacaacgacctcttcccctag

SEQ ID NO: 20641 - DNA, 198 bp, Zea mays
  Peptide Sequence Number=SeqID_64016
atgaagctgtggaaggagacttccaggagttccaagactacgacgagttctaggtgtgagttagcggcaacccccagtcggctgcctgtgaaggccgcgtttatctacgtttcttttccgcactttgatttattcaacattgataatcctacatacgaaacaattggagtaataacagctataaacatgacaatataa

SEQ ID NO: 20642 - DNA, 471 bp, Zea mays
  Peptide Sequence Number=SeqID_64017
atgctgcaggttctggtctccatccagggcctcgtgctgaatgacaggccatacttcaatgagccaggatacaagaactcggctgaaacgacaggtggtgagaggtgttccttggcttacaatcagacggccttcgtcagatcatgcaagacgatgctgtattcactccggaagcctccaatgcattttgagacccttgtgttgtggcacttccacgagcatgagcgtgccatcctcgacgcttgcagggcttacatgtctgggacagtcgttgggtcgtctgctgggactgggagcaaccgcagatacgtccatgacaagtgctttgcagaattccacaagtcgttgacgctctacactgaacatctcagggctgagtttgctgcaaacagaagacgagtgattgagctggaaacaaatcgagcggttacacttatggtggagcagcaaaatctggctcacaacaaatga

SEQ ID NO: 20643 - DNA, 102 bp, Zea mays
  Peptide Sequence Number=SeqID_64018
atggccggctcggccgccgccgcccttggccagttcggccgccccctgccccgcgcccccgccggctcggccgccccctgccccgccccgccggcaggctaa

SEQ ID NO: 20644 - DNA, 864 bp, Zea mays
  Peptide Sequence Number=SeqID_64019
atggaccccctccttacgcctataaaaggaaggtccagggctctctacgaggaggttggccgcgcgggagaatgggccgacgcatggctcgtattaaatgcactgcacggcataccggctgctggaggagaccctgacggagacaacgacgacgacgccggtggcagttcgagccacaacacggagctctcggaggagcaggagccggagggatggatcactagacccattactcgcgatgcctctctcgggtgtcacttccatgacgctctcgacaccttgctacatcgggccttcgaccgacacacttggtatattgtgtaccgttgtgtagtctaccagcatcgtcgcgggttatacccggaccagtgggaggctacttgcttggtgcgccgtctggacgatgatctccggggtgcagaggccttcttagagcactattctatcactgagagggatactgtcgaggcaaccatgcaagatgctgcacgacgtgcgcttttgcagtattgctcgttgttcagcggggtagctgacgaccttgccctgaagtactaccctcgtcgttcaaccggtagtgctggaggtgtgattgtctcacccattggtgagggaaatcctaggctgaacagcatggtcaacctggtcaccgttctcaacaccaagctggaccacgcccttgacgagttgggcaaggttcgggcagaagttgcggaattgcttgctgagcgcgcagcgcgccactatcaggatgatggttctcccgctcctgtcgggattcagcacccttaccgttcgccgcctcgttgtcgctttgattacggcacccctgactacaggacccagatagatttggagccatag

SEQ ID NO: 20645 - DNA, 240 bp, Zea mays
  Peptide Sequence Number=SeqID_64020
atggcgcatttcctcagcggcttcgtcgagcttcttctgaagagagagatcgtctcctggtttgtgtccagtggctgcagtgcagcccctagcactgctgtcttcttcggcggcatgacgaaggttgattctttgccgaaggatgtggaagtgagtacaccggaggtgggtgccaatgttggccacttgttctcaaatgctatagatcaagaacaagacaacatgattgttaattgttag

SEQ ID NO: 20646 - DNA, 141 bp, Zea mays
  Peptide Sequence Number=SeqID_64021
atggccatgatgggttcaacatcggaaaagatgtacctctaccaggtgaagaagcagcaaatttttgttgtttctgttccaaggtggtgcctaaagaggaaaaccaagactgaagctgtgggaggaagggtcctccgttaa

SEQ ID NO: 20647 - DNA, 141 bp, Zea mays
  Peptide Sequence Number=SeqID_64022
atggccatgatgggttcaacattggaaaagatgtacctctgccaggtgaagaagcagcaaatttttgttgtttctgttccaagatggtgcctaaaaaggaaaaccaagactaaagctgcgggaggaagggtcctccgttaa

SEQ ID NO: 20648 - DNA, 135 bp, Zea mays
  Peptide Sequence Number=SeqID_64023
atggccggcgccgcatggaaaacttccctcaggtatgatgatggaagacgccctaccctactccggctgggcgcagtaaatcaagatttttcagagcgggactcatttgattcatacctcactaagatgacttaa

SEQ ID NO: 20649 - DNA, 315 bp, Zea mays
  Peptide Sequence Number=SeqID_64024
atggagaagaaaatgatcgaagaggcaaaagaaaagttccagcatagaagtattgatggagaggtacctagatttagaagcaaacaagctgaagatgaatcgatacaattgacaagagaaagggaggcaagaggaggagatgacttctcaattaagaattgcatagcagttctaaacacattggaggtcacaaaggaagagaaggtcaaagcctataaggtgttcaaggaccctaacaatcgccagattttcttgagcgcatgcaatgatgatagagaggctgcattgatgtggttgagggacgagatggcttag

SEQ ID NO: 20650 - DNA, 180 bp, Zea mays
  Peptide Sequence Number=SeqID_64025
atgaagctctacatgaagaacctgtggtactacatgattgctattgcaatattgcttatgagtcattttgtcccactcgtagaccaaggttcaatccaacaaaatgcagatatcactcacgactcacagttccaggccatggttacagtctaccaccaagttgggccaaaaggcttctaa

SEQ ID NO: 20651 - DNA, 492 bp, Zea mays
  Peptide Sequence Number=SeqID_64026
atggcaggaaagggagaaggtaagggccaaaagaaaaccaagggcaagaaacagaagcgtcctctgactccaccgttggaggacttcagaaactcgaagctctccaatgagggggctcttctacattcccttggctccccatcattcaactgtatggacaactcgatggggttgtccttgcaggagagggcctacctccatggtctcgagcgcaccgaccttagtgacttgaaggagtccgaggaggaggatgaggaggacgagtatgacgttgacgatgaaggcggcgtggtcggcaaggatggtcgggatgatgggaaaggcgatagtggtggtggcgaaggaggcagtggatgtagcgaaggcgacagaagtggcaacagcagcagggcagcaacaacggcgatggcgacatcggtggcgagcgagatcagcaccaaggctcatctaaaggacctcctttggccaggtcagcaccccaggctcatctag

SEQ ID NO: 20652 - DNA, 177 bp, Zea mays
  Peptide Sequence Number=SeqID_64027
atgtactgttccttgtccggtgtgccagtatgggcgcgcctgacttctgcgcgcgctgcgcgcgcaattaatgcgccgcaggtggagaaggaagtggagggctccttcaagatggtggagaaggaggtgcagggctcctttgagttggcagaggcgttaaagggctcctttgactag

SEQ ID NO: 20653 - DNA, 546 bp, Zea mays
  Peptide Sequence Number=SeqID_64028
atggaggccgcgatggctatcgtcgaatctgaggtcgagtccagctatggccggaggatcctcaagattgccgtcacgcctcgcctgaggccaacctcgggtgggagacgcacttatgactcgcccgaggtcgggagacgcagtcaccactcactcgaggccaaccccaggcgggcgaggcaacctcgtagtcacggctcgcctgaggatggcctcaggcgggagacacggtcatggctcgccaagaatgcagtcacgcctcgcccgaggccgcccaaggatgggagacacagtcacggcttgctcgaggccgtcacacctcgcccggggctgctctctgttgggagaacgcattcacaactcgcccggggccgccctcgggcaagagacgcagtcacggcttgcacgaggccatcctcgggcgggagatgcagtcatgactcggccgaggctaccgcgggagacgtcgtcacgcctcgccagaggccaacctcgggtgggagacgtagtcacctcgggcaggagatgcagtcacggctcgcatga

SEQ ID NO: 20654 - DNA, 297 bp, Zea mays
  Peptide Sequence Number=SeqID_64029
atgtcttcgcctttggccacgacaagaatgcgtgcttccagtgggacgtcctgtcacatgacaatcaggttcaagaggtgtcacgcattcccaatggctccaaccccggaaactgcagcccctgctaagggtgagaaacccatcaatcatttcttgctcctccgtcatccattaaatgcgcattgtgatgttgagttaatccctctagacgtgtctatcattgacgatcttgacaatggcgatgatgaattgatggtggcgtgcaacatcacagggcctaaacgtgaaccagaatag

SEQ ID NO: 20655 - DNA, 648 bp, Zea mays
  Peptide Sequence Number=SeqID_64030
atgacgacacagcataatcaatcaattaagagcaacaaatccacgacgccatacgtccatacccatgtggtcgcgtcccccggaccaccatgggagacatgggacgacgaggagtccgaccgttctcccgcgcaggttacgcacgaaatcaggatcctaatcgagcctatcgtcgtaccaatcactcggattcttcaagggcgccagctatacacgggggcgcctagaggaagaacacattcctcgattgtgtcgcgctcgagtcacgtaagtggagcgcaggggtgggatagggggaagtctgttgacccaggggaggaggtcgtggggagagcgattgcttgccatccctgcagcgcaggcttcgaaggtggggcggtcggcgctagatccggcgctgaagacatcaccgcggaggcagaggtggacaggaatgaggccacgaagaaggatgcggatgcgcggaggtgggcacgggaggcagggcagcaacggcttgcacagagggggcgggaggcagggtgccgacggttgtggaaggaggagcgagagctaggttgctcacgcggacaggggaacgacgcacaccgggcgtgtgcatcggacgatgaagacagaggcgtggacatgacagacggtggagattga

SEQ ID NO: 20656 - DNA, 1110 bp, Zea mays
  Peptide Sequence Number=SeqID_64031
atggcgccccacacgctctatgacgacagcggctctcagcccccttacggaagcaagaggacccgggacgagttcgggcgggcggtggcgcgggccgcggtggcgcaggcactgcaggccgcggggttcgattgcgcgcaccgctccgcggtggacgcggtcgtcgacaccgtcctgcgctatatcacccacctgggccggtctgccgccttccacgccaacctcgccggccgcgcgcacgctaatgagctagacgtcatccaggcgctcgaggaggtcggcgccgacacgtatggtttcgctggcgcggcaaccacgggccactgcctcgtcggctctggcgtcgtcaaggacctcatggcgtttgtccattccaaggacgaggtgccgttcgcgcggccgctgcctaggttccccatccagcgcgtggagccgcagccttctgccagcttcactgtgactgggagggagactgggatgaagcacgtgccggagtggctgcctgctttcccagatccgcacacctatgtgacgacggaggtgtgggttgagccgccggcgaccaaggacagggttgacaaagtggagcaggtgcggcaacgaaggaaagctgagaagtccctgctcagcctgcagcgaaggctggctatggctggtgcggataggtttcgtccagctgtggcacatgataatgcgctgaaggggaaggagatacaggcagctgggacgaagagaaatccatttcttgagccagcattgttacctggacagaaggatgtatcagaggttgatatgcctccggaaaagaagaaattctctgtccttgaggcatttgcaccagctattcaagctagaaccatcagggagattgatgctagtgctgggttggatcaaaatcaaaggaacattgttccaaaagagagggctccagttcatcttaagattggatttagtaataagtcattagcagcagctcagaattcaagagccctggatctgagggatgatcttttcttcttgaaagaggaaacaaaggatgataagaagcggagagcgggcatgatattaagggcatcaatggagaacccacaagaacttcctcagctctaa

SEQ ID NO: 20657 - DNA, 294 bp, Zea mays
  Peptide Sequence Number=SeqID_64032
atggagaggaagcaagccctggaggtggactcgcaccggtttctggacccttctccagacctatgtcgtctcgtccagagggtgacagggggtaggttgtgtgagggtggtgtcgggaagcaggctcgggggcgcgtcggcgcgtcggtgaggacgttccgcggcaatggggcgcggtctcaggagcggcgcggcgtcgggccgcggtctcgagagtggagggggcggttgctgcgcgagaggagcaaagcaggaagaggtggctacgaagggagcgagctagggttaagctag

SEQ ID NO: 20658 - DNA, 510 bp, Zea mays
  Peptide Sequence Number=SeqID_64033
atggcgcctcctgttgacgtggtcggtccgtgccctgggttgggcgaggtggaggctcctcctaggtcgaggtcgagtctgtctttcgaggccaaggtcgagtccgagcccctgggtcgggtgaggcggagaccattggctgaggccagggctgagtccgagccctggggtcgggcgaagcggagttcgttgtccttcggggctgagcccgagtccgagccctggggtcgggcgaagcggagttcgtcgtcttccggggctgagcccgagtccgagccctggggtcgggcggagcggagttcgtcgtcttccggggctgagcccgagtccgagccctgtggcgacgctgtcctcttgtcagacgggtcagtggagcggcaaagtgactacggtcacttcggctctgtcaactggagggcacgcgtcaagataaagctttgtgctgatgggggttaccagctgagatttaggagccttgagggtacccctaattatggtccccaacagtag

SEQ ID NO: 20659 - DNA, 765 bp, Zea mays
  Peptide Sequence Number=SeqID_64034
atgaacaaaacaccagcattcaaggtgccatcacaaacggaactccggttccgtccccgcgggtatgaacaacctccacaccggggagcctgtggggcgacaagttccgggcgacccgccaacgacctctgcagcagcagctatggtcccaggacggacgcggccaccggaaggctctcgttcgcgtccccgctcaagggacgcgaaccagacatcaaagccaaagagccgtgcggcgtccgcctcttcaccaacgccgcaccggcaaacgcgggccgctccaaagcgcaccgacaggtcctcgctcccgtccttgctgggcagcaacagttcgccttccccggcatggctggaggacgcctcctccgtagagctggaggatggggctggtggtcaccgtcttgggtgaccaccggcgaggggatgcagccgggccgcgtgatgaaaatccttgaagccgaacgatggctgaaagaccagcgggtgaaagggcggacagccacgcagtcggcatgcaaccgcgccaggtgggcgcaccccttcgactccaacgcgcccagcatggaggcccaggcccacacgtcgtgcaaccggcgcgccggttgctacgtgcgagcaactgcaccgccgctcgcgccactgccacgcctcctcgactgcggaaccagtaccgcgactcgaggcaaccctgcgtacgacccaacagtgccagccaggcgcatcggtcatgggccaatcggccgcgggagggggcacgacggttga

SEQ ID NO: 20660 - DNA, 453 bp, Zea mays
  Peptide Sequence Number=SeqID_64035
atgccgcccgctcctcccgcagccacgccgcttctcgtcctctctatccggcgggggcttggcggcgcccaatgcagcgagggcgagcgggggaggagagatttgtgcggcgctagagagaggggggcgataggaggtggtttgggcccattcgtcatagaccagaccaaatccatggaggcgctcgcgttggcgtcgctcatcgacgatgagaagaagcttgacaactgccagttcgacctctggaagcagtcctacttggccgcatgcgtcgctatgttcggcaagctccggcgcagccgtcgcttggacgcggtccagagcggctacaccgctgtccatattcaaacgagggacctcatagtcgttgccaacgccggcgactctcgggttgttctgggcaccgcatccgacgacggcgccgtcacgccatctagctcatcatccacctga

SEQ ID NO: 20661 - DNA, 1014 bp, Zea mays
  Peptide Sequence Number=SeqID_64036
atggacagcggtgtagccgctctggaccgcgtccaagcgacggctgcgccggagcttgccgaacatagcgacgcatgcggccaagtaggactgcttccagaggtcgaactggcagttgtcaagcttcttctcatcgtcgatgagcgacgccaacgcgagcgcctcctgccagtggtgtttgttcggggtttccaagtaagaaacatggattcatctttggcatgcataccatttaggtatagagctaacaatgatgaaacctctggtgacaaaactaagaaagtcgtggaagttctcatgataaattcccagagcggacctggtcttttgtttccaaagggaggatgggaaaatgatgaaactgttgaagaggcagcagctcgagaagctatagaagaagccggagttcgaggtgatatagtgcattttctggggtcgtatgacttcaaaagcaagacacatcaagatgcgtgctgccctgagggtatgtgcagggctgcagtgtttgcgctgcatgtaaaggaagagctgaactcatggcctgagcagagcacccggcagaggacctggctcacggttcctgaagctgcatccaggtgccggtaccagtggatggaagaggccttgctcacaggcttctctgactggcacgacaagtggagcataggtgacggcggtggcggcggtgccaactgtcagctgcagcctgcaggcaggcacgcaccctgcgcactttgtaactctgctcctgattctggagatgcacatcctgtgtatgaactgaactgcgagaccacgccaggcgcccaagccaaatggccgatagccgcggcccacggcccagtgtccctgtcctcagaacaagtcttccaacgccgcccccaagccgcaggaacgccgccacccgccgccgactgcagcttccggctccggcgtgcgctcagctcaactgctccaagcctccagctctcgcttcattgcttcaacgcatgggcaatcaccaaggtagaatga

SEQ ID NO: 20662 - DNA, 505 bp, Zea mays
  Peptide Sequence Number=SeqID_64037
tcgaggctacgcgggaactggtcgcgctcgagatcttagcctccgcacctgaaaccattggctccattgctattgctgtcgtgggcctgctgcagaggggtggtattgtcatggctgcttgcggctatgctcttgggcgagctgagctgggtgctgccaagcgccagcagccggataaggatccatctgcagggacgcgctcctcgaatgttgcagccacgggatcactgggcagtgcagcacggccagacgtctcttttaggtacagaggggcggattcttgtaagaaggtagctgcaagcttgaagtcgtctgagccatgggggaacagggcattctggacaaacgccgctgggccaggttggaagttgagctttgctgttgagccatggaccaagggctttagcacgtcgtgtgcggcgccatattctgctggagccacagagcatcaattatcgctcgatgagaaggtggataactccaccgttgcatctgattctgatgg

SEQ ID NO: 20663 - DNA, 1482 bp, Zea mays
  Peptide Sequence Number=SeqID_64038
atggtggtggtagtgtccacctccctatgctccttcctgcccgcgcacccgttcagcctcgcgcgccctcgccgtccccacccaacgaacccgaccgccaaacccctctcccgtaccctctccatccgctgcatcgccacaaccgcggcgggacccccgccgctcccaccgccgaagctggtccgctgcccagctctcgaccgccaggcggcgcgcgcaagccgactccgctttgcgcgcaagctcctcaccctcctcctctccaagccgcgccatttcctcccgctccgcgtgctcaaccgctgccgccgcttcctcggcctcccgcgccgcggccgcccgctcatccccatggtcctccgctacccgaccctcttccgcctcttccaggcccacacctccctcccgctctccccgtccctctccaccctcgcggtcgcgctcactcccgccgccgaggcgctcgccgccgatcttgcggcgctccgcgccaccggcacaggcgcaggcgcgctcgccgccaagatccaccgccttctcctcatgaccccgcgccgaaacattccggtgaacaggctcgtccacctcgcccccgacctcggcttttccatggacttccgcgcgacgctttgcccccgccacccggacctcttcagactcgtgaacacctcccgcggccacgcactccagctcgctgatcccccgccaacgccccctccgccgcccctctctcttcgccccgccgcgccgcccgaccgcctcatggaccggccgcggaggtttccgcacctcccgctccgccgcgggcttaacctccgccgggtgcaccgggactacctcctgcggttccatagccttcccgaggtgtccccgttcgagccactggatgagggcgctagtctggagatgttggagcggcgggcgtgtgctgtggtgcgggaggtgctggccatgacggtggagaagcggacgctggtggatcacctcacgcacttcaggaaagaccttggcttgccaaaccggctgcgcgccatgctggtgcgacatccagagctgttttatgtcagtgtgaagggggtgcgtcactcagtgttccttgtggaggcgtttgatgatgatgggaggctcctagtggaggatgagatgctggttgggagggataggctggaggagcttgttcgggagggaaagcggatgaggcgtgctcggaagaaaggtgttctcacgttcgatggtgacagtgatgaggatgaagatgatgatgcagcagaagaggaaggttcattaaaggtggatgatgaatttggggacttgtttgaggatggtgtcattggggaggactgggaggaggtaggcgatggaggtggaagtgatgcatatgaagagtacgatgctgaatcaggtgacatggaggagttttgggtcaagaaggctgtggctcaaggactggttggcaatggtaatgagcaggatgtttggtga

SEQ ID NO: 20664 - DNA, 333 bp, Zea mays
  Peptide Sequence Number=SeqID_64039
atggggcagaccgcttctcgcgacgccgaacgcgccacccgcgtcccgccaagtgcgaccggcaggcgctccatcggccgtcccggacttcccttccggagctgcccttcgcctggaacttggacttcctcgtcggccatacactacacctccggcgggccgtggttccagcgctacagggactgcgagttcgccgacctgatctggctgaaggaggccgaggagctcagggtcgagaaggacaagcgcaggctcctcgaggacaagaaaggacgacgccaacatcaagcaagacgaggaggaagcgccggcgcaggagaaggttatgcatga

SEQ ID NO: 20665 - DNA, 860 bp, Zea mays
  Peptide Sequence Number=SeqID_64040
ccctggggtcgggcggagcggagttcgccgtcttccgggtcttagcccgagtccgagccctggggtcgggcggagcggagttcgccgtcttccgggtcttagcccgagtccgagccctggggtcgggcggagcggagttcgccgtcttccgggtcttagcccgagtccgagccctggggtcgggcggagcggagttcgccgtcttccgggtcttagcccgagccctggggtcgggcggagcggagttcgccgtcttccgggcggcgctgtccttctgtcagactggccagtggagcggtggagtgacggcggtcacctcggctctgccgggggcgcgtgtcaggatagaggtgtcaggccacctttgcgttaaatgcccctgcaatttggtcagtcggtgtggtgattcagtcaaggttgcttctgagcgaagccaaggccttgggcaagccggtgatgtgtccgccataaaaagggggcctcgggcgagacggaagtctctcgagctttatgctgatgggggttaccagctgagaattaggcgtcttgaggcccccgagcctctgcacagggcgagaggacgatcagggacagactcggctttttacatacgcccctacgtcgcctttccgcaaggaggagggggggagtgcgccatgttaccctcgatgggcaccgaacatggtgtctccggtgagctgcaagcggcaactggcgtgccagttgctcgacgcgtgggcctgggccccaggctggcgtgccagaagttggagaagcgcgtccatctggcgcggttgcatgccgcctgcatggctgctcgccccttctgcccgttggtctgggcggaaatggggggttga

SEQ ID NO: 20666 - DNA, 849 bp, Zea mays
  Peptide Sequence Number=SeqID_64041
atggaggaggaggcgccgcccatggagttggtccgggagaagaagctctctgagaagatccgcctttgtaagatggaggttctgaagaaatcacatacctctgttgaagacagtgatcacatatttctagagtcctctggcttgcaggatggtttgagttgcaagaaggatctccatagttgcggcaccaaagcttcagatgaggaaatttctgatcggttgcaagagaatcatgacaacacccagccaagtgataaccataactattcggtagatcaaactcaactgccctttcttcaagccctactgagagtacagatgaaacggagtcatcgtttcttggacaaactgccagtggttcactggcatcttctcacagataagtctatagatcctacgtatttggtagtgatgacagcaacagcagcagtaggagctgcaactctactgcagagagtaattcagatacggaccaagccaactcctcccaacccacgaaggccaagttcagttcaggcgtttcactcttcgacatcctgcgcaggacatcagagcagagcaatcaggaaagctgtagcacagtcagcggtgcatcggttctcggcattcaaattattaaagaggttttctaggattctgaattctgaccactggcctggaagttcacgacgaaagctgtctagaaaaaggcttcaggcgaggctcgtgaaaaaggagaggcgaggatggctcctggttgccattcatcttcgtgctgttagtgccgtgaggttcggattaccactttcatccctaacggtggatgttcctgaactgaatgttgaagcctggccctgctgtagattttga

SEQ ID NO: 20667 - DNA, 906 bp, Zea mays
  Peptide Sequence Number=SeqID_64042
atggcggccgcctcatcccccgctgcatccgccgcctcccccggtaggggtgccggcgaccctcccgcggcagccgcggcggcgacggcgaggacggctgggtgcccctgccccatatgcctcgaagccttcaaagacgaggcctacctcgacacttgcttccgttcctttctgaaactcctagctgcttctgcagattccttttgctacaggtgtatatgccagtgggtaaggatagtagcgagcaagcacgcagaacctttgtcttcagttagatgtccactttgtaagactgagaatctatccgtcatacatgcttttgatggcgaatcatttgagcggtggtacataaatcaggaacctaggaagaggcgtctttcagatgcacacgagttggtgtcacaattctataacatgaaagagaccacaagcaacatttctggggtgcagcaatactgggagcaacaaagatatctccgtaagaaaatttggcttcaaacctggctaagacgggaaattcaggcccttactcgggacgagaacgttgaggtcatagtccaccacattcacggtgtcatgggatccttcatgaagaggctcgaaaaggagcacacgtcgtcaaggtggacgacttcaccggagaaaaggagggaagagttcaggagattggtttccgatgctgctaggccgttcctcctcggccgaacggagcgattcgtcgccgaggtggagctcttcctggcatcggatctcaacatggaagcctacaacaaactgcgcgtccagaggtttagggagtccagctctcatctaacgagagagcaagatgcactgcctcgtgatcggtcgcttgaggagcactacatgtatttcctgtgtaacgacacggactgtgatgagatgtag

SEQ ID NO: 20668 - DNA, 546 bp, Zea mays
  Peptide Sequence Number=SeqID_64043
atgtgtgcagaagtactcgataaacacttatctatggtccaaagggatcatgaacaaaaatcccagattgttgaacgccgaataagagatgatgcagctcttgaagaagctaaaagaaaagagcaagctgtcaaggaagaaaagttaaggcaggaaagagcccagcaagaagcagaggctagacagaaggaagctgcaaaattagcagctgaagcacgaaaaacagcatttgaggctgctaaaaaggaagcagcagaaaaggaagcagcagaaaaggaggctgctaaattgagagatgcagcagcttctcaacctagtccgaattcccagaataatactgcagaaggcattaaagtttttggcgataaatacgcactagaagcagagtcacggaggcatgcattagtacagaatcaagtgccagaaaacattcatcacagcaaggaattcagcaaatatgaccgacaaattgccaaatccataagtaaacttatgccaactactgacagtgtcagcccaataacaatgaaacagaacaagggctag

SEQ ID NO: 20669 - DNA, 648 bp, Zea mays
  Peptide Sequence Number=SeqID_64044
atggcgacgccctgccgcagcaggggcttcgagcgtgtggagctgcggtgtcccagggagctggacccacggccgagctggacgctcggcgatgtgctcgctgagcttgacgcgctggatgccacccgccgcgctgcgccacccacgcccctgaagcagccgccggattgggctaacggtggtggtgagaaggcctttgtgatgcgggttgatgacgacgacgaagacgacacagaagatgaagacgatggtacaagtggtgggaagtcccgggctctggtggccaaaggagcaaggttctcgtgtaatgatcttgcatcaagtgattcagaggatgaattagatggtcaggttgccccataccacttaatggagaaaagggacctagcgaagagcattcttcttgagctggaacacgagcatcatctaaaagttcaagaagaagttagaagtaagctagcttcattggaggacgatgatactattaccaacatggctactgcatctagtgatcgcgcttcttgcaaaatttcccgtaggacgcaatcgctcctaggagccctagaccctgacacacgggaaagccctctaacccggcataccgcggttacaaacttaactgctacggcaggatttgtcacgctgtga

SEQ ID NO: 20670 - DNA, 2703 bp, Zea mays
  Peptide Sequence Number=SeqID_64045
atggaggagcgtttgacagctgcgctagctggatccacatcgtcctacctagcgtccaccagcgaggccgtcaacaagctccgattggacctcgacccttgctgcgctagccaagacagcagccagcaccaccgagtcgaagatccctctagagaggagaacctgcagccgcaagtggagacggtggagtcattcgagtcggatcacgttcctcctcccgtcgtctacgaccgctacgacgagccaaaccacagcgagatcgtcgaggtgctcgtgctactatacaggaccgctgcgctggagcccgtcgaacaccaccgatgccaggtgctaaccgcggcaggcaaggccgagcaggaaccaacaaaaggcattaccaacgaggtggaggccgaggaggcatgcgaactccctggagatgcgaccgacttctccgaccataaagacactccgacctcgcccaccatccaggccctcgccgacacgttcgtcgacagcaacaagctcgaccacccatcgaagtacagggaggaagtccaacttccacgcgcggtccacgtcgagctcgacctctatagtttcacaccgctgatcttcagtgtcgagcaagttatagaggaggaggtacccgtcgatatgcccaccaggtgttcgagaatggaccccaactgcgacgcctactccgtcctcaacctccacgtggtctgcatcgtgggcgggcgcaactccaacgaatacggcaccaaccgcgtcctgcaccacaccatcggcctcccggacttctcccaggagctacggggcttccaggctatcacctactaccaagccatcatcaacaatctggacgacgcacaggagcagatggacatggccatcgcaacggcgctaaggaagagcaagcaagtgttcgtcagcgtgagctgcaacatggttgacctcttccactcgaccttcaactgggagcgcagcatgagctacaacatggtcggtctctcccattcgaccttcggcctggtgcccctgttcatctcgacgaggctgatcaacaaggccaacctagagtacgccggggaggcacaactgcgcctctacgacctctacacaatctccatcgccaccgagggaccctacaccacaccacagtcgtatgtgctcaagcgcgacaggcccgacctcgcgtccgacacatacaccgtgcagaacgcggcaaccggcgcgctctcacttcggctctacgcgcgggcgttgctgctctgggagctcggtggcgccgaccacgccttggcagtgtcgcgcgacgtgctcatcaacaactctctcgttgacctctacgacaagtgcgacacggtggagctcacacgccatgtgtttgaccggatgccagagcggcacctcgcgtcctggaacaccatggccctcacgctcgccaaccatgaccgtgtccaaggctcgctcgatctgttcaatcggatgacgagggtggagaatgtggcgacaaatgccatcacgttcgtcgcggggatcaacgcctgcaaccacggtggactggtcgacgaatggatgaggtactctgctgccatggttagtgcgcacgcgatcaagccgaggatcgatcactttgggcgcatggtcgacatccttgcacaggcagggttcatcgagcaggtcctctatgtcgtggttgggttgaactgtcgtcctgattccagcatctggaggagtcgacttgacgcgtcctgcaagagaaatgctgggttgacgctgagtgaggccgtggccaagctagcgcttgttgaaaatgtgcagcaaaattgtagcgacggcgatacagacagggatctagccgccgcctccaccagcggcctcgccgtcgtcgtcgtcttgacggccagggacgaggcgaggggcgcagctgccgtcgggaagctcagaggcctggggctctccaacgtcttcttccaccagctggacatcacggacgccccgagcatcgctcggctggccgatttcttgaagtcccggtttgggaagctggatatcctggtgaataatgccgggtttgttggccttgagtacatccaagatcgtatagatggcacttcaacgacgagcgaggagttttgtggcatggacatggacaagaggctggagctgctgctgaaatggtgcctccgggagacttgcgatgctgggaaggaatgcatgaggataaactaccacggcacgaagcaagtcacccgagcactcctgccactgctgctggcctccgacagcggaaggatcgtcaatgtctcctcggtgcttgggcagctcaggtttttcggcagcgaggcgctgaagcgggagctggacgacgtggcgagcctgaccgaggagaggctggacgaggtggcgggcgcgttcgtggcggacctggaggccggcgccgtggaggcgcgagggtggtggcccgccgggttctcgccggcttacatggtgtccaaggcggcgctgaacgcctactcgcgcgtcctggcgcggaggcaccccgcgctgcgcgtcaactgcgtgcacccgggcttcgtcaggaccgacatgaccgtcaacttcggcatgctcacgcccgaggaaggcggcagcagggtggtggccgtcgctctgctccccgacggcgggcccaccggcgcctacttccaggagcgccagcaggcgccgttcgtgtga

SEQ ID NO: 20671 - DNA, 294 bp, Zea mays
  Peptide Sequence Number=SeqID_64046
atggcgccctctccctctttgcccaacttcggcgatcccggagccaccctagcttgcgcctgccttaacttcggcgacctcaccgccgcggagaggagtggcgccgcttcgcgcacgtctgttacccagggaaatgttaatctattttcaaataaagttaagacaacgagcagctcgtggttcctgagtgttgccgaagatccccctgagcaacaacctggtgaaggcaagtgtcctcagacctatcatgtcctactttactttataattcactgtcccgcattactttattga

SEQ ID NO: 20672 - DNA, 99 bp, Zea mays
  Peptide Sequence Number=SeqID_64047
atggggtccgggcacagtacttgctctgccgagtgctcaggaggtgaagctggcaacatggatgacttcgaggagttccaggaatacgatgagttctaa

SEQ ID NO: 20673 - DNA, 246 bp, Zea mays
  Peptide Sequence Number=SeqID_64048
atggccggaatggctcatcggagttgctccggcttgcccaaggatttctcaccgccgttctaccctctctgcccgtggattcatggcctcttccccgccattgagttcgtcgtggcgccctctccctctctgcccaactccggcgatcccagagccaccctagcttgcgcctgcctcaactccggcgacctcaccgtcgtggagaggagtggcgccgcttcgcgcatgtttgtttccctggtctga

SEQ ID NO: 20674 - DNA, 1116 bp, Zea mays
  Peptide Sequence Number=SeqID_64049
atggcaaagcctctcaatggcagtggccgtagcatgccaagatcgaatgagggaatgcggctcatattttcggcagttgtaggtgtcatgctgggttacctgtttgggatctccttccctacagtcaacataaccaagcttcacttcccttcgagtatcatctcttatatcgaagataggaactctggcatcacaacccagacattgttgaaccatgcttgggcatctgcaaacaatcataaaaagaatagttctgaatctaacactgatgaaattcccgagatttatgttcctacaaacccaaaaggtgctgagagacttccaccaggcattgtagtgtctgaaacagatctttatccccgaagactatggggtgatcctagtgaggaccttactagcgagccgaggtatcttgttacttttactgttggtattgggcaaaaggcaaatattgatgcagcggtcagaaagacaaattcaccattatgttgttccattatgatggtcggactacagagtgggatgaatttgagtggtctaaaagagcaatccatgtggtatgcaaaacgatttttgcatcccgatgttgttgccagatatgattacattttcatctgggatgaggatctaggtgtagagcatttcaacgcagagaagtacattgagcttgttagaaagcatgggttggaaatctctcagcctggtttgcaacctgatagaggactaacatggcaaatgactaaacggcgtggtgaccaggaagttcacaaatttgttgagattatggcaacagtgttctccagaaatgcatggcgctgtgtatggcatatgattcagaatgacttggtccatggatggggtcttgactttgctcttagaaaatgtgtggagccggctcatgagaaaattggagttgttgatgctcaatggattgttcatcaatcagttccttcacttggcaaccagggcaagtcagataatggaagaccaccatgggaaggggtaagagcacgctgcagaaaagaatgggggatatttcagacaaggctggctgatgcggagaaggcttattacttggagcgaggcatcacacccccgaactcaacatcagtttag

SEQ ID NO: 20675 - DNA, 1566 bp, Zea mays
  Peptide Sequence Number=SeqID_64050
atggcggcgctcgtgaagtatatctgggctatttcctcatacggcggacaaccatctgtagagctggtgcgaagtcctgccttcaccgtggatttgtgcggccgagatgcggctgcattcgtgtgtgaagtcgaggccgaagccgtcaagattgtcggcaaatacgcgacgaagactgagacgttgaggagttgggacatccacagttccaatgtcaggtttaaccgcatgtttgagctgaataatttgtcgtatggttcttacccggagggagactccggcgacaccgctgatcgccgagggaagcaggtgaggtcctcggccgatgaaggcccctcaagggataaggctccgggagttgctggaaacgtgcacggctcccgagggattgatgtcttcgcccgagctccgggaaacctctttgcgaatgctgaaggtttggtggacccatgccggaaggtgaagttggcgcgacctagcgcgaaggccgtcgcgctgggtgccgcgatgcctccgcccgctgtgccaagacccccttcgccaccgcgcgttgttgagacggcggtggcgggatccggtggagtcgccatggggttgtccgtggatgactacctggtgggcagggtgaacatgtttgatgcccagacggggctgctgccttctggggcggagtctgaccagctggcgattgtggcgcaagcgtcggctgccgacctggtggttgcagcgacggaacacgcagccaagggtgacacagggacttcggaggacccgtggtcgcggttctatgccggatgcgagatcacctccgctgttgttgctgccggcgtggccgcgtcagtcgtgcagcagctgaaatataggcggtggcttgagggaaggattgaacgcctccgcacgcaacatatgggggcggtaagggacaagtcagcggctgagaacaaaagccgcaatctcctggagaagctctcagcggcagagaaagagagggaagaccatggtcgccgtcttgctgaggagagggaggacgctgaaaaagcccatgcggaggcccaggccacccgcgccaaagcccagaccgtgcgcatggaagctcaggctatgcgcgcggaggctgaaatcgctcgcaagcgcgccgtcgacatggagttgaggaacatctgcagccattgcgagaagacggaggcctccacccgtaccgatgttgagtgggcgcacacactttttgtggaagcgcacttcgaagtcttcgatcaggcgaacgaggaattcgattgtggagttttccaggttgaagatgatgtgctaaagcggtccgcaggggcgctttatgataggatgtggggttctcatggtcatggcatcgtccgagagagggccaaccgagcgttggcgcatatgttgaatgaggaagaagttgacgacctcgccggtctcggaagctcgatgacctggatggatgtcacggtggaggcgggagttgaagggcactcagcacctcccggaggttctggcgaagaccctgcagcggcgtcagctctggcgcaggttgaagagatgcattag

SEQ ID NO: 20676 - DNA, 816 bp, Zea mays
  Peptide Sequence Number=SeqID_64051
atgggtcggcgcgagacggagcacgaaggggggaaacgagaagacaggtgtaaaggggaaacccgcggccttcgtgtttgtcctacgcccaggttgggtgcgcttgcagtagggggttacaagcgtccgcgtgggagggagcgagaggcttgcacgcgccgtcccgtcctctccgcgcggccaaccttctcgtacgagtgccctggaccttccttttataggcgtaaggagagggcccagggtaatgatggctccctctgtgacgtggttggtccgagccctgggtcgggcgagatggtggctcctccgaggtcggggtcgagtctgtcctccgaggtcgaggtcgagtccgagccctggggtcgggcgaggcggagtccgtcgtcttccggggccgaggccgagtccgagccctggggtcgggcgaggcggagttcgtcgtcttccagggctgaggccgagtccgagccctggggtcgggcgaggcggagttcgtcgtcttccggggccgagcccgagtccgagccctggggtcgggcgaggcggaagttcgtcgtcttccggggccgagcccgagtccgagccctggggtcgggcgaggcggagttcgtcgtcttccggggccgagcccgagtccgagccctgaggtcgggcgaggcggagcttcctatggcgcccgaggccggacttggccgctgtcagcctcactctgtcgagtggcacagcagtcggagcaacgcgggcggcgctgtcttcttgtcaggctggtcagtggagcggcgaagtgactgcggtcacttcggctcagtcgactga

SEQ ID NO: 20677 - DNA, 537 bp, Zea mays
  Peptide Sequence Number=SeqID_64052
atgggaaagaagcacgcggcaggtggcggctggttcgccgccgtcaggaaggtgttccggccgtcgggctccggcggctcatccgcgaccaccaccacctcctcctcctcgtccaaggacaaggataaggacgccgtgcagcacgggaaacaggccaccgccgccgccgccgccgaagagccagaggtgctgctgctggagcacttcccggcgtccgagacgtcggcggaggcgagcaacgagggcggcgacgcggaggcggagctggcggcggttgcggcgacgacgaagggtcgtcgtcgtcgagacgacgaggtcggcgacgaggatggggagatggaggaggagctggccgacgacatggagcgcgcgagggcgctggcggccgcggccgaggctgccgtggccgcggccgaggcggctgccagagtggtgcggcttgcggcgctccggcgcctgtcgcgcgaggagcgcgccgccgtgcgcatccaggcctactaccgcggatacctgtttcacattggaggtggaagctag

SEQ ID NO: 20678 - DNA, 1242 bp, Zea mays
  Peptide Sequence Number=SeqID_64053
atgggtccacaggtcccagtgagggtcaatccccaagtatccttcacaaatcgccgcaaagatggcggcttgcgagatggagttgggactgaggttgtgcagctccaccccgtagtcatgcagaatcgcccgcataaaacggcttgccggcactccgaacccccgctcgtgaaaggagacgaagctcacgacataccccggcggcggggacggggcggctccgctcgaaggggccatccactccggctgcgagtcaccggagagagggcgaagcaaaccatcagcaacaagggcctccaggtcatccgccgtgacggtggagaaaggccacgaatcgcgcggcggaacaatggtcacccggtcgaccatcaccaagcagaagaggtggcggtggaaggaactgggtgcgcggacgggcggcacctttggcgggcgaagcaggcgacgcttcacctccaccataatgaccgcgtcaaaaaagggaccgggaaaggggataccccgaaagggatccttctccacgaaggaagcgggccccgagcccccctactgatcagaggttcaaaggctggcccctcggaagggttcaacagccgcctcagagcactcgggctccgcgcccactactggtcagaggttcgaaggctagcccctcggaagggttcaacggccgcctcaggccactcgggctccgcgcccactattgatcaggggttcgtaggctggcccccgaagggttcgacagccgcctcagacacagagcgagggatgaccctggcggccaagtccggcctcgggcgccataggaagctccgcctcgcccgaccccaaggctcggactcgggctcggccccggaagacgacgaactccgcctcgcccgaccccagggctcggactcgggctcggccccggaagacgacgaactccacctcgcccgaccccagggctcggactcggcctcagccccgaaagacgacgaactccacctcgcccgaccccagggctcggactcggcctcggccccggaagacgacgaactccgcctcgtccgaccccagggctcggactcggccttggccccggaagacgacggactccgcctcgcccaaccccagggctcggactcgacctcgacctcggaggacagactcgaccccaacctcggaggagccaccgtctcgcccgacccagggctcggaccaaccacgtcacagggggagccatcattaccctacccctag

SEQ ID NO: 20679 - DNA, 450 bp, Zea mays
  Peptide Sequence Number=SeqID_64054
atggctgcgacgacgcaggcgcagcagcaggagcacgcgcccgaccacgccaagacgcaccagagcacccccaccaggacgacgtcatcctacgtgacggcggccgctgctttcgcgaacggcatgtcggagaagacggtggagacggagacgacgtcccggagcccactgaaccaggcctccgcggctgctcacgggcgtccgcccgcgatcccgggctacatggctgcgacaaggtcggctcgagccaaggcgcgccccgcgccgccatcggctacacccacgcatgccaggagccggtcgggtggcgggctcgccggggacacgtcgagctcgggccagaacggcagtgcggtcgccgggtacagcccggactcgagctgcacaggggactggaccccgccgcggctcggtgtcagcacgcgcaccagcagggtggcctatacttga

SEQ ID NO: 20680 - DNA, 348 bp, Zea mays
  Peptide Sequence Number=SeqID_64055
atgtggtggtctcaggaagaaggtatgtgttctagaaccaagggtggtgaggggtacaacaagagggtgctggaggcaggttggagagaaggggtgtgggggtcgggagagtacaccccgggaccacggcagcagaaaactggtggcagctctagcgacgttggatctaatgattcgaccatgggacgttggagtagtgggagtgatgtatccagagaatcgaaggaatggggaggatggattcggaaggagaggatggagcggagtgaatggagaaggacgagcaatggcggcatgggtcaagaaacgcgagggcagggaggaagcgggaggacaaacacaatataa

SEQ ID NO: 20681 - DNA, 378 bp, Zea mays
  Peptide Sequence Number=SeqID_64056
atggccggcgacacgctcgcggtggatgaagaagaagatggcaaggtcacgtaccgtcagcagcggcgcgcggtttacttgatgcgagccatatcaccggtggagagagagcaaagagggcaggtcatggaattaccactagacgcgcagagcagcggaagacgtctcgatgtagacgaacgcgtcgagcagtgccgtgcagtcgccggcgtccttcacgtcctcgcacggttcgtccaagtgctccagatgcagcacctccgaggtatccacatgtacagggaggaagcgccgcgtaccgaactgctaggttcgcgacggcggcttggcgagggcgagaggcgagcggcggctgctggtttgcaggtggcaaattag

SEQ ID NO: 20682 - DNA, 270 bp, Zea mays
  Peptide Sequence Number=SeqID_64057
atggcgctcagcggtgcatatcagcagcaagcactgcgcgatgacgagcgcagtagtgctctgtccttgatgtggcgcgacggcaagagaattgaaaggaaaaaggtggacttggaccatgaaagacttccactgcactccgatgagagggatcacctattcaccccccctctaggtgctctcaatttctccggacttggtaaccccagtgccatgcgggacttcatggccgcatgcgactactgcctttccgactgttccgacgggtaa

SEQ ID NO: 20683 - DNA, 786 bp, Zea mays
  Peptide Sequence Number=SeqID_64058
atggcgcctcctgttgacgtggccggtccgcgccctaggttgggcgatgtggaggctcctccgaggtcgaggtcgagtctatcttctgtggccgaggtcgagtccgagcccctgggtcgggcgaggcggagaccgtcggctgaggccagggctgagtccgagcccctgggtcgggcgaggcggagaccgtcggctgaggccagggctgagtccgagccctggggtcgggcgaagcggtgttcgtcgtcttccggggctgagcccaagttcgagccctgggtcgggcggagcggagttcaccgtcttccggggcttagcccgagtccgagccctgggtcaggcggagcggagttcgccgtcttccggggcttagcccgagtccgagccctgggtcgggcggagcggagttcgccgtcttccggggctgagcccgagtccgagccctgggtcgggcggagcggagttcgccgtcttccggggctgagcccgagtccgagccctgggtcgggcggagcggagttccctatggtgcctgaggccaggcctgactgcccgtcagcctcactctgccgagtggcgcagcagtcggagcggcgcaggcggcgctgtccttctgtcaggtcgggttgcttcttggcgaagactgggcctcggttgagccggaagtatgctcgtcgctggagggaggcctcgggcgagacggagatcctccggggtcgactgcccttgcccgaggctgggctcaggcgaggcgtgatcgggtccctcgaatggaccgatccctga

SEQ ID NO: 20684 - DNA, 738 bp, Zea mays
  Peptide Sequence Number=SeqID_64059
atgcaggcggcatgcaaccgcgccaagtgggcgcacttctccgacttccaacacgctcagcatggaggcccaggcccacgcgtcatgcaaccggcgcgccggatgctacgtgcgagcaactgcaccgccactcgcgccactgccatgcctcctcgactgcgaaaccagtaccgcgactcgaggcgacccagcgcacgacccagcagcgccagcctggcgcgacgcgcgacaggcggcgcccctggcaggagaagcaagcgacgcttcgccttcgccataatgaccgcgtcaaaaatgggaccgggaaagggggataccccgaaaaggatccttctccgtgaaggaaccaggctccgagcctccctactgatcagaggttcgaaggctggcccctcagaggggttcaacagccgcctcagagtgcatgggctccacacccactactggtcagaggttcgaaggccggcccctcggaagggttcaacgaccgcctcaggctactcgggctccgcgcccactactgatcagggcgggaacgatcttgtaacagaatcccatcaaagggaggcatcaagccctcggaccccgtcgataggggaccgggtccggcagatcacccgcaggctcgggggctgctctcgcaaacccggctccggccaaaccgttgacagcgtcaacataccagcccgagaacttggggacccgaccgtgcacccgggttacggccagctcgcatga

SEQ ID NO: 20685 - DNA, 657 bp, Zea mays
  Peptide Sequence Number=SeqID_64060
atgtcctcgggggacagctggctgaggcttcggggtggccggccaagccgtctgctcgagccggattcctggagaagacccgggcgacgatggcccgggcgtggtgctgatgtcgtccttcggagtggggaccctccgaccgtgtcgccgtccgaggctaggtcggacctcgccgaaggtgtagatgacgccgagggtgctgctgctcccttcaactatcaaggattctgctatcgatgtagtcaagaaggcccgaaaaatcgtttcgggagaagaggtttcgagcgtgaagacttgtttggtccgcggaatcacttatccgagcgtgagttacttatcgcagaaggtgaccgttggcgcgaagtagtcgttgccccgcagttacaccggacatgtccggtgaattatagcggagcagccattgcgaaatcccgaggctaccaagttccagagccgcgtcctcttggagcaccggacactgtccggtgtacaccggacagtccggtgaattatagcgcaccggctccaaaaattcccgaggctgaggagttcagcgcgaagtcccctggtgcaccggacactgtccggtggcacaccggacagtccggtgcgccagaccagggagcctttcgggatgcctttagctctctattttga

SEQ ID NO: 20686 - DNA, 1923 bp, Zea mays
  Peptide Sequence Number=SeqID_64061
atggagcccagaagacgagagcgcagggtcatcgccatcgccggtgcggcagcgctcgttgccgtgggcctcaatatcgccttctccgccgtcgtcgcccaccgtcggaggaagcgacgagagcttccagggtttactgctcaagtcaacctatcagcagctgcgattaaaagaacgaccgaccgtatcatctctaagtcaagggaaacttatgattcagtggctgcagtgcccctagataaagtcagttttgctaatgtcattgcaccattggcagaattagatgcgctgcaattccctctggttcaagcttgtgttcttcctaggatggtatcaccatctgaggatgttcgcaaggcaagtgctgaagcagagaagctattggattcccactttgtgctttgcaggtataatctggctcctgagtggtctcgtaaggtgaaagagtttgagcgcaatggagtaaaactatctcaaagcaagagaaaagaaatggagaaattgaaatctcatatagatgcattaaacttgaagtatctccaaaatttgaatgatttcaccaaattccttcttttaggtgaagatgaactagctggaatgccctttgagttccttaaggatctggaaaaggctgatgggaagtttaaggttccgttgactagttaccatgttactccagttcttgagcactgcaaggttggctctaccaggaagcagattgctgttgcttatggacaaaaaggtgggaaggataatgtagccatcctagaaaatttggtccagctaagacacaagtttgctaaattgctggggtacaccaactatgctgattttgctattgagcccagaatgccaaagacttcgaggaagatcttagagtttttggaagagatgtctgaacaattaagtgatgtggctaatagagagctcaacatactcaaagacctcaagatcaaggaggaaggaaatgctcagtttggaatggaagatttgttgtactacatcaaaagagctgaagaattcaaggttgatcttgacgttggtgaaattaaacaatacttccctgttggcctggtcatatctggaatgctgaagatatttcaggatctatttgcactacgattcgacgaaattaaggatgttgatgtttggcatgatacagttcgtgtgttttctgtttgggatgcaagttcaagtgatcttttgggttacttttttcttgatatcttttccagggaaggaaagtatgcccacacttgtgttgtgacccttcagaatggatgcttatgttctaatggtacacgtaaggttccggctgctgtgatattatctcagtgtccaaaagagtttgatggtaattcagcattgctgcggttccctgaagttgtgaggctattccatgaatttagccatgtggtccatcacgtatccaacagagccaccttttcaagattttcaggccttcgactggagggtgactttgctgaaattccaagcctgctactcgagaattggtgctatgagagtatttctctgaaaatgatgtccggcttccatcaggacattacgaaatccataagtagtgaagcttgccaatctctgaaaagaaggcgtgatttgtttgctggcctgaaaatgaaacaagagatacttttgtgccttgttgatcagataatacattcaagtgagaatgtggacattgatgacttaatcaaggatcttcaccccaaggtgtttgctgctgatctttttgtatcaaaatttaaagatgacttgctcaatcagcatgctggattgcggttcagaaataaggtgttggctccaggaggctcaaaagatcccctggagataataacggactacctaggaagagaaccatcactccaaccttttattcagagcagaacaaggaacagtctgtga

SEQ ID NO: 20687 - DNA, 1257 bp, Zea mays
  Peptide Sequence Number=SeqID_64062
atgccgagcgtcggcgtgaagatctacagcgtcttcttcaagctcttcctccgccaccgcctccagtcgctggccgccgccgccgcgggggaccccgacaacgcggccttcggcgtctcctgccgccccgacgaggccaccgcgccgcccaacccggccttctccgctgccgccgacggcgtcgcctccaaggacctccacatcgaccccaactcatcgctctccgtccgcatcttcctccccacgcccccgccgccttccccgcacgcccacctcctcgcgcacgcgcacccgcgccgcgccagcgaccccaccccgacgacccccgcgcccgcgcccgccaacggcgcgccgtaccgagggtacctcccgcacgccgtctcctcgccgcgcgccgccgcgtcggcgcgccggaggctgcccatcgtcgtgcagttccacggcggcggcttcgtcaccgggagcaacactgccgcggccaacgacgccttctgcaggagggtcgccaagctctgcgatgccattgtcgtcgccgtggggtacaggcttgcgccagagagccgataccctgccgcgttcgatgacggggtcaaggtgctcaagtggatcgccaagcaggccaatctcgccatgatgaccaaggtcgggggtggtgttgacaccttcggtgcatccactgttgagccgtggattgctgcacatggtgatccagctagatgtgttctacttggtgcaagctgtggtgcaaatattgctgattatgtcactcggaaggtggtcgaagatgggaaaccgtttgacccggttaaggttgttgcacaagttctgatgtatccatttttcatagggagtgttccgacacactcggaaattcggcttgcgaactcatacttctacgacaagtccacatgtttacttgcttggagactatttttgtcagagaaagagttcaacctagaccaccctgctgccaaccctctggcgcctagcagacgagctcccccactgaagtgcatgccgccgaccttgacagttattgccgagcatgactggatgagggatcgagcaattgcttactctgaggaactccgcaaggttaatgttgactcgccagttcttgactacaaggatacggttcatgagtttgcaaccctggatgtgttcctaaaaacaccacaggcccaggcctgtgccgaggacattgccatatggatgaagaaatatatatccctccgagggcatgagttctcgtattag

SEQ ID NO: 20688 - DNA, 780 bp, Zea mays
  Peptide Sequence Number=SeqID_64063
atgcaggcggcatgcaaccgcgccaagtgggcgcaccccttcgactccaacgcgcccagcatggaggcccaggcccacaagtcatgcaaccggcgtgccggttgctacgtgcgagcaactgcaccgccacttgcgccactaccgcgcctcctcgactgcggaaccagtaccgcgactcgaggcaaccctgcgtatgacccaacagtgccagccaggcacgtcggtcacgggtcagtcagccgtgggagaaggcgcgacggtcaatacggccaaaaatgggccggcagtaatggcggtggcaggcgggcagtgaggctgacagcagccaagtccggtctcaggcgccataggaagctccgcctcgcccgacccaggtctcggactcgggctcagccccagaagacgacgaactccacctcgcccgacccagggctcggactcgggctcagccccggaagacgacgaactccgcctcgcccgacccagggctcggactcgggctcagccccggaagacgacgaactccgcctcgcccgaccccagggctcggagtcgggcttagccccggaagacgacgaactccgcctcgcccgaccccagggctcggactcagccctggcctcagccgacggtctccgcctcgcccgacccaggggcttggactcgacctcggcctcggaagacagactcgacctcgacctcggaggagcctccacctcgcctaacccagggctcagaccaaccacgtcacaggaggggccatcattaccctacccctag

SEQ ID NO: 20689 - DNA, 720 bp, Zea mays
  Peptide Sequence Number=SeqID_64064
atgtactgtagtgtccggtgcgccacaacgcgcgtgcctgacttctgcgcgctctggcgcgcattaattgctgttgcagagtcgcgtccttttggagcaccggacactgtccggtgtacaccggacagtccggccacctttgcattaaatgctcctgcgattcggtcggtcggcacggcgatcgggccaaggatgcttcttggcgaagactgggcctcgggcgagccgaaggctcggaccttgatagttgaagggagcagcagcaccctcggcgtcatctacaccttcggcgaggaatccggctcgagcagacggcttggccggccaccccgaagcctcagccagctgtcccccgaggacatcagcccggctcgtggcctcggcgactcaactccggcgtcggtcccgccagcggacgacacgaccaggctccggccgaccaaatcttcttttcgagccaactctgcccctgtccatgctgacaccgctacctccggcttcggctcatcgaagagcggccgagggtacgaacaaccccacacgattggggagcctgcggagcaacagaaggccgacagatggctcgccgccgcccgctccaacagcgacgacgacgacgacttctgctctgaggggccgaactgcagtagcaatgacctcagggcggatgctgctgccataaagccctcgcccacgtcctcactcgagaggcgaggatga

SEQ ID NO: 20690 - DNA, 276 bp, Zea mays
  Peptide Sequence Number=SeqID_64065
atggccgaagctctggcgacaatggcgagcggaattgagctcgccggagctaaggaaaggtggctggccgatgagggtgagtgcggggcgaagagagagatatggagccaggaaatctggtctgtctccctgcccaaacccgaggcaaatccaagaaaaaccctaggtgacactggggtgtcacagccttccccccttaaaggaatctcgtcccgagattcgggccagagtcctcccagggtgaagcgaagggtgagacttataggaaatgggtga

SEQ ID NO: 20691 - DNA, 162 bp, Zea mays
  Peptide Sequence Number=SeqID_64066
atggtggatacaagtgcggtcactgcacggcggcagccggggtcagtggagcattgtaccatgcaggaattggttgatggtgtgacttggcctaccaccctgccatcgggttggacggtcaagtgggatgttgctccggcaggagaggagcctgaggagtag

SEQ ID NO: 20692 - DNA, 1860 bp, Zea mays
  Peptide Sequence Number=SeqID_64067
atggagatggaggccgtggagtcgcacggaggcgccgggcgccggacgcccaagagggatcgcggcatctcctgggcctgcgtcttcatcctggctttatatatggcctcgctcgccctcaaaccgtctggctgtggcctctgcactgcatgcacccgtacatgcattcatggcggcgatggcgggactcggccggacatcacaccagcgagtaactgcttccagttcatcgcctacttcgccgtgtcgacgaacctggtgaactacctcaaggaccgcctgcaccagggcagcaaagccgccgcgaacggcgtcaccaactggatgggcacgagcgccatcacgccgctcgtcgccgccttcctcgccgacgccttcctcggcagatactggaccatcgcgctcttcctggtcatctccgtcctggcctacgtggtgctcacggtgagcgcggcggcggcgctggagagcgcggccttctacgcggggctgtacctgctggcgctgggcggggcgctgcagccggtgctgtcgtcgttcggcgccgaccagttcgacgaggaggagcgcgggcgccagagctccttcttcaactggttctacctctccatcaacgtcggctcgctggtcggcggcaccgtgctggtgtgggtgcagtccagcgtcagctgggggctcgggtacggcatcccggcgctcttcagcgcgctggccgtcgcggcgttcctggccggcaccgccacgtaccgccgccaccagccgccggcaggcagcccgctcaccagggtcgcgcaggtcgtcgtcgccgcgtgcaggaagtgcggcgtccaggtgccggaagacgcgtccacgctgcacgagtgcgaggacgtcggcggcatgtccgcgatacaggggagccgccggctcgcgcacaccgatcagttcaggttcctggacaaggcagcgtcggtggagccatcggacgacaagtcgcgtccggcgagcgcgtggcgtctgtgcacggtgacgcaggtggaggagctcaagtgcgtgctccggctgctgccggtgtgggcgagcgggatcgtgttcgcggcggcgtacacgcagatgaccaccaccttcgtcctgcagggcgacacgctggacccgtacgtgggcggcttccgcgtgcccgccgccgtgctctccgtcttcgacacgctcagcgtcatgctgtgggtgccgctctacgaccgcctggtggtcccactggcgcggcgcgccacgggccacgaccgcgggttcacgcagctggcgcgcatgggcgtgggcctcgtcgtgctcaccgccgccatgctcgccgcgggggcgctggaggtggcgcggcgccgcgtcatcgcgcgccacgacatgtacgacaccaacacgggcgccggcggggacggcgagtacctgccgctgtccatcttctggcaggtgccgcagtacgtggtggtgggtgcgtcggaggtgttcacgttcataggccagatggagttcttctacgaccaggcgcccgacgcgatgcggagcctctgctcggggctctccatgacgtccttcgcgctcgggaactacgtcagctccgcgctcgtcaccgtggtggcgcgcgccaccgcgcggggcgggcgggatggctggatccccgacgacatcaaccgggcgcaccttgacaacttcttctggctgctggccatgctctgcgccggaaacttcggcgtctacctgctcatcgcacgatggtacacatacaagaagactgtggactacaatcctaacatagaaatgagtacaattcttaatgaaggtgcaactgcaaaaaccagacctaaagaacatatcttgaaatctagctag

SEQ ID NO: 20693 - DNA, 138 bp, Zea mays
  Peptide Sequence Number=SeqID_64068
atggctgtcaactacctcactgatgaattgatcatattgcttcagactcaggctgaagttgctcttgctgcagctgatggggatccaaatgttgccattgagattctgatgagtcagcagggccgtctatcccactag

SEQ ID NO: 20694 - DNA, 87 bp, Zea mays
  Peptide Sequence Number=SeqID_64069
atggactacatggtgtttgaggttgctgaattggatgaaacagcaatgatttgtcacactaacaacaaaatgaaaggagaaagttaa

SEQ ID NO: 20695 - DNA, 1035 bp, Zea mays
  Peptide Sequence Number=SeqID_64070
atgcctccaacaaatgatccagtatccacaccaactgttccaacacctgataaacagcaacatgatcaggaaagccatgttcctactgatcatatcaaaatatcagatgatgctcccacaacagacaagcctgctgctcctaagttaacaccagatataaatagtgaaggacaaaaatttgttacacatgatactcctgtatctggtgcacctctgttcgataaaacaccactgacagatgcaactactgacctggttgcaaaggatagttcctgtaaagctgcagtcgctgaacatccccacgtgtcacgtgaagactgtgctcgcaacctgcttaagttcattttgtcaggaaaactagatccgagcatgtctatcattaattttggaggatttggagggtctgtccttgatgttgtccagtcgtttggtcccaacaaatgtcttgagaatactttcatgcagggatttatcgactgtattcgtcaggatgatgttttatacaatccagattctgtaatcaacactctaatactgaatgtcaacgttgggaccgttttgaatatcgaggagtttgaacaacactgttcaaatccacagcccttcacaacatcacttcttaaagaacaacttgaaccgacccttccttcagatgatgttctgaaccagattaaattgataccttggtctagattaataatgagaagacttagcattgccttacatgaagctcgacctgagtcaactgtaccaaagtttggcaactacaagattgggctccttcccaattgtccaaccatgacaccagggtcaaatgattgtggtttttttgtcgcaaacttcctccgctactacgattttgatgatggcgacttatcagaattttatactccggatgaaccattggaccaatgtgcctttgttctgcattaccttacctttcatcgcaacaacatggttgccccccttcctgcagaattgctgcctttcaagtatgctccaaggagatgccgttgtttgaaagccaagacttag

SEQ ID NO: 20696 - DNA, 396 bp, Zea mays
  Peptide Sequence Number=SeqID_64071
gctgaacttatcaatgctcaactgaatgggctacaaatagcgcttgcggaaaaaggtattcctttattgttccgtgaagtggatgactttgtcgccagtgtcgaaatagttaaacaggtgtgcgcggaaaacagcgttacccacctgttttataactatcagtatgaagtgaatgagcgggcgcgggatgtggaagttgaaagagcgctgcgtaacgtggtgtgtgaaggatttgatgacagcgtgatcctgccgcctggcgcggccgaatctcgcgagcactgggtggcggagctcgccggcatttgtcaatatgcggccggatctcgcgaacaagtcaggaaggcggcggcaccgaaatggttctcgtacaagagacaattaaaaatattataa

SEQ ID NO: 20697 - DNA, 1263 bp, Zea mays
  Peptide Sequence Number=SeqID_64072
atgtactgtagagtgtccggtgcgccagtatgggcgtgcctgacttctgcacgccggacatgtccggtgaattatagcggactagccgttgcaaattcccaaagctggcgagttcctgaggcgccgttccttggagcaccggacactgtctggtgtacaccggacagtccggtgaattatagcggagcgcctctggattttcccgaaggtgacgagtttgagttggagtcctctggtgcaccggacactgtccggtggtgcaccggacagtccgccatcgtttggcttcaaggattttcatcaggcagcccggccgcatcccctcgccggtggtcacccaagacggtgaccaccagttcgatggtggggagaagcgagccgggctgcgatcttggtcccgccctcagcttcaaggatcttcatcatcctggctggggcggaggccgggctgagccggagctctacctcccgcgcgggttcgtgggtcaccttctccctcagcattcaagggagagggcgctcaccggcctagtgggagggtcggacttcgacaacgcggggctggtcagcggcgagcgtcgtcagcttcagcgtgttgggcttgctggctcagttggctctggctcggctcctggtgccccctcccgccgcaagagcggttgtcgcgccgcgcgcaccggaggactgcccaagacgtcgcgcgctgctagggcggcgttcgtgttctgggtctgtcctgcctttgccccggtacggcgtttctgcgtggaggtcggtgctccgcttgtccgggaggatccaagtggggatctgccggtgggcggatggcttccgtcgtcggcgctgaggtggtggcggctgaagaagtcctcgtcgccgacgggatcaccgccaccatccgcgctccgggcctccggctctttggctttgatagcttgtcctcgcccctcgagcggagacgtgggcgagggtgttgttgcagcggcgtccgccctgaggccatcgccgctgcagtttggccacctggagcggaggttgttgttgctgctgctggagcgggcggcggtgggcaacctggagccttatcgccccgcgggccctccaatgaaatctcggccgctcttcgatgagccgaagccggaggcagcggtgtcagcatggacagaggcagagttggctcgaaaagaagacttcgtcggccgaagcctggccgggccatccactggcgggaccgacgccggagtcgagttgccgaagccatga

SEQ ID NO: 20698 - DNA, 981 bp, Zea mays
  Peptide Sequence Number=SeqID_64073
atggacgcagccaccagaaggctctcgttcgcgtccccactcaagggacgcgaaccagatattaaagccaaagactgccaccacgtcagcaccgacggcggcgtccgcctgtccaccaacgccgcaccagcaagcgcgggcgctccaaagcgcaccggcagcaacagttcgccttccccggcatggctggaggacgcctcctccgcagagctggacgatggtttccaccaccagaagctggaagaagaggtggccagccgacccgtgcgggaggtagagccccggctcacctcgctctccgccccagcaaggatgatgaagatccttgaagctgagggcggggcagagatcgcagcccggcttgcttctccccacccaggagctggtgaccagcgggtgaaagggcggaccgccgtgcaggcggcatgcgaccacatcaagggggcgcaccctttcgacttcgacgcgtccaacatggaggcccaggcccacacgtcatgcaaccagttcgccggccgctacgtgcaagaaaccgcaccaccactcgcgccactaccgtgcctcctcgactgcggaaccagtaccacgactcgaggcaaccctgcgcatgacccaacagtgccaaccaggcacatcggtcacgggccagtcagccacgggagaaggcgcgacggtcgatacggccagaaatgggcccgcagtaatggcagtggcaggcaggcggaagcggcggtcaagtcatcagccaagctcacggaccgggaaaggggataccccgaaagggatccttctccgcgaaggaaacgggccccgagcccccctactgatcagaggttcgaaggctggcccctcggaggggttcaacagccgcctcagagcgctcgggctccgtgcccactactagtcagaggttcgaaggccggcccctcggaagggttcaacggccgcctcatgccactcgggctccgcgcccactactga

SEQ ID NO: 20699 - DNA, 81 bp, Zea mays
  Peptide Sequence Number=SeqID_64074
atggcacgacgacgtggaatcggcggtggctcgatctacatgtaccattttgggacaattttaaagtgtttctatagctag

SEQ ID NO: 20700 - DNA, 1071 bp, Zea mays
  Peptide Sequence Number=SeqID_64075
atgccgccgccgccgccgctcgtgctgctggcgaagccgctgttcccgaacttcgcggcggcgctggagggccggtaccgcctcgtcctggccggggacgccgacgcggccacggcggcggaggcccgggtcctgctcgtgccggggctcgtggccgtgacagccgagctcgtcgaccggctcccggcgctggagctcgtggccgcgacctccgtcgggctggaccacgtggacctccgtgcctgccgccgccgcgggctcgccgtcaccaacgccggcgcggccttctccgtcgactccgccgactacgccgtcggcctcgtcgtcgccgtgctgcgcagggtcgccgccgccgaggcgcatctccggcgcggcgggtgggctaccgatggcgagtacccgctcaccaccaaggtgagcggcaagcgggtggggatcgtggggctcggcagcatcggctcgctggtggcgcggcgcctggccgccatggggtgccgcgtcgcctaccactcccgcgcgccgaagccgtcgtgctcgtgcccctacgccttcttccccacggcgcgcgccctggccttggccagcgacgtgctggtgctgtcgtgcgcgctcacggaggagacgcggcgcgtggtgggccgcgaggtgctggaggcgctgggacagggcggcgtgctggtcaacgtcggccgcggcggcctggtcgacgagccggagctggtgcggtgcctgcgggagggcgtcatcggcggcgcggggctggacgtgttcgaggacgagcccgacgtgcccgcggagctcctcgccatggacaacgtcgtgctgtcgccccacagggccgtgctcacgccggagtccatgcgcgggttgctggatgtcgtcgcgggaaacctcgacgccttcttcgccggcaggccgctgctcagccccgtgtcgctgccccaaatgggaaagctagcggaccctagcggctaccgccgtcaacgttcggaggaaggcgccgctgcgtgcggggccccctccctcaccctgagacagcggcatgtgctcacctgcccagacatacgctag

SEQ ID NO: 20701 - DNA, 777 bp, Zea mays
  Peptide Sequence Number=SeqID_64076
atggctcgtagaagatcccacaggaacaagaagactcctccatcgaacgtaactcaaaaggaggaagaagaagaaaatgaacggtggagaccaaacgatgaatccacctctccaaaaggtttgtcttcccatttcgattcccacatgtgttgtgtggctaatgcaaatgatagcggaaggacaaatgaggatgaggaggaagaaagaagcttcttgcatctctacgctcgcctaagccaagaagataaggcggtcatgctcaaacttctagaaagagcgagagagcaaagcgaagctcgtcaaaggctagaaagtattctctcaatgaagatgcaatgctttgacgagttgactaaagaacatgaggagctaaagtgctctcatgttgatttggtccaaagcaaatcttcctttgagctagaatttgcaggaacaaatgatgattcatatcaaaagctcaaagaagaaaatgagaggctaaagaagagcttgacacaactaaaagggaaatgcgttgcccaaccttctcaagataatcgtgatcacatggtgaagaagcttgagacgggaacaaccgtggcatgcactacatcccttgaagaaaatgtcaaggatttgaggattgccaagaggaagaaacaaaagatgaaattcaacacctcctccaaaagcctcaaccacgcctccacaaaaggtaacatccaaggaagtaaacagacatcatatgcgaaaaatcaaggcctacagcatggaggaaagccaaaggatgtcacatag

SEQ ID NO: 20702 - DNA, 1104 bp, Zea mays
  Peptide Sequence Number=SeqID_64077
atgaggacccagtgccagtggtcccggaggatggtcagcagctccctcttgagttttttggtttgggtcaacctgtgccggctgtgggctgagatcttaatttcccgccagaaggcaatgtccaagctcaaccagcagacaacattcaaggagattgggaccaatggattgttaatgatccacctgtgcagcagcctcatctggacctgccacctgacgagcaacaagtcagcaacccgcattcggacctgtcctcagatagttcttctggtcacattcatggtgctctgctgcagaatgggcagattcagaatgggcagattcctgatgatctggtggctgcggggccggtgcccaactttaatgcccccgccccctgccttgggtgacatccctatgattgggccccaggaggttgacggcccaccaattcaaggtgttcttcatgtgcctggggatattgttatccctgatgcccaaccggtggaacctaacgttaatggccacaacaacgctaactattttgccccggctggtaattcggtgacctcggtgcaggttcccaagaaatgggcgccctttttcctatccaacttgctgcatgaagattcttttagttggtcaaaaactttcctgtcttcggatattccttctgctctcatggagccagacactgagacacatccctttgtcatccccagaaagtgccctgatgacaagtttcttgattcggtcctttctgaggaatctgctgacgacgcttctgctccctcggactcggcctcctctccaccaaaacttgctgttgtggaatctgacctgaggagaagcaagaggctccgtgacgcccgggctgggttcagacagagttcctgccacaagaagaactgtttgatgtgtcaacataagtttgagggtcccccctccctatcagccaagactatcagacgcttaggagagagcttttgcaatctgtcagaagaggagctggctgacaaagtcctgaagaaaaagaagaactcgcctggctgtgttggctctaataagtcagggaaaaaagacaagggggataagaatcaagactcttcagatgatgacaactga

SEQ ID NO: 20703 - DNA, 246 bp, Zea mays
  Peptide Sequence Number=SeqID_64078
atggcgcggcggcctgcgtctgactcacgcccgcctggctcggtagagattctcgccggtcccgtctccgcgcatgcagctaggtcgtcgaggggtggagtaggcaagctggcagctgctactgctatggcctggtgcgaccgccttgtgtcagcagcatgggcggcattgcccgtggtggagaagagctgccgcggcgccggcgacgacgacgacgacgactacgacgtcgctccggctgcgtaa

SEQ ID NO: 20704 - DNA, 225 bp, Zea mays
  Peptide Sequence Number=SeqID_64079
atggcgcggcggcgcgcacgcgggctgaggagggaacgtgcaccgcgccgcgacaccacgtgccggcggccgctcgccatgagcaccgcctcagccccaatgggagtgggacgccgctggccagctcggacggacaagctccggcggtggcccaccggtgccggggactgccgcggcaccggcgacgacgacgacgacgactacgacgtcgccccggctgcttaa

SEQ ID NO: 20705 - DNA, 1017 bp, Zea mays
  Peptide Sequence Number=SeqID_64080
atgaagagaaggggcgccaagcacagagcgatgaacggggaaggcatcgtggtcctcgcatttaaactatggagcgcagctaggatcccgacggaaatcccccgattcacggatgctgttgcgcggcgacggaggtcgagatctcggcgccgaggagctgcgcacgccattgccgcggattctgttcctgtaccgaggagggagctgacacaggcggccccacgccgcagggcagggtcgtcgaggatgccggagcactcagagaacgcggcggcggacctgatgggcaacatcatggagaccatcgcggagaacctcccgaggcagaagtccgtgcggttcgacgacggcgacggctcctccatctccgagcaggccaagaagctgttcggcggcggcgagagcaggaagaagtcggtacaccacgtgctgggcggcggcaaatccgccgacgtgcttctgtggcggaacaagaagatctcgtccagcgtgctgggcgtggcgacgctggtgtgggtcttcttcgagtggctggactaccacttcctcaccatcctctgcttcatgctcgcgctcggcatggccgtccagttcgcctggtccatcttctcgtccagcgtgccccgcgtgcagctgccggaggagctgttcgcgagcgccggcgcggccgccggcgcccaggtgaacagggccctgggcttcctccaggacgtggcctgtggacgcgacctcaagcggctggtcatcgtaagtgacgccgtctcgcgttactctttcttcgccgaacggcttttgcagaactgcagtagctattcctggttatattgcagttctgaatgttctggatacggttcagggttcgtgtgcgcgcacaccctgccggtgctgtacgagaggtaccaggaccaggtggacgagttcctgtacaacatgctagggctggtgcagagccagtacagcaagctggacagcaagggcatcctcaaggggggcgtcaagttcaggaagagcgactag

SEQ ID NO: 20706 - DNA, 153 bp, Zea mays
  Peptide Sequence Number=SeqID_64081
atggcgcgtcggtggcagcaagtggtggaactaaggcctcgagccctcgacgtcgggccccccggcgagacctggaaggaagggagaggtgttgcaaacctcaacctttttttcccctgtcgactgtcgtacaaggggttccttaagggctaa

SEQ ID NO: 20707 - DNA, 1075 bp, Zea mays
  Peptide Sequence Number=SeqID_64082
gcgactttcagtgcgcgcaactgcccagcggttacgagcattcctccactttcgcccagatcagcgggtgaaagggtggaccgccatacaggcggcatgcgaccgcaccaagggggcgcacccttttgacttcgacgcgtccagcatggaggttcaggcccacacgtcatgcaaccagttcgccggtcgctacgtgcaagaaactgcaccgccactcgcgccactaccgtgcctcctcgactgcggaaccagtatcgtgactcgaggcaacaatgcgcatgacccaacagtgccaaccaggcacatcggtcacaggccagtcagccgcgagagaaggcgcgacggtcgatacggccagaaatgggcctgcagtaatggcagtggcaggcgggcggaagcagcggtcaagtcgtcagccaagctcacggaccgggaaaggggataccccgaaagggatccttctccgcgaaggaaacgggccccgagccccctactgattagaggttcgaaggctagcccctcagaggggttcaacagccgcctcagagcgctcgggctccgcgcccactactggtcagaggttcgaaggccggcccctcggaagggttcaacggccacctcaggccactcgggctccgcgcccactactgatcaggggttcgtaggctggccctcgaaggccaagtccggcttcgggcgccataggaagctccgcctcgcccgaccccagggctcggactcggccccggaagacgacgaactccgcctcgcccgaccccagggctcggactcggcctcggccccggaagacgacgaactccgcctcgcccgaccccagggctcgaactcggcctcggccccaaaagacgatgaactccacctcgcccgaccccagggctcggactcggccctggcctcagccgacggtctctgcctcgcccgacctaggggctcggactcgaccttgacctcggaagacagactcgacctcgaccttggaggagcctccgcctcgcccgacctagggctcggaccgaccacgtcacaggagggaccatcattaccctacccctag

SEQ ID NO: 20708 - DNA, 1587 bp, Zea mays
  Peptide Sequence Number=SeqID_64083
caagggagaactgcacgagcagggaagaaaggcagtgcaattctaatatacacgtatgaacagactagagctgtaagggtcatcgagcaagatataggatgcaggttcacagagcttccgaagatgccagtttcagacgaggctgcagacatgtttaatgtcatgagagatactcgctctagatcagttggaagcagaagaacaggtggaccttttagccgtgaaggttatggtgactttgaagaccatcgttccagaggcttcggtgattttgagagatttggtggttcctctgaccgcggcggtggattccgtgactcaggttcaaggtaccacggtggatctggaggtttcagacgatcttccagtgactttggcaggcctagcttcagtcgttctgatagatttggcgactttggagacagtgatttcagcagacgtggtaacgctgactttgggcgttcccggagctctgatgattcaggctcctcacgttatccaagaggctatggtggttctggcacgtcagattccggcaacttcggtggcttcaagggttccaagcctgtagggttctttcagaacttctgcacttctgatacaaggttgtttcagaacctgcatcactactgcacgaacggcggcgtccacgagtcacgaggagcccagaggcttcttcacagcagcagcggcaggtccgctgatgccagactccccccagctccaccaaccgcctccccctcccgcgccgccgccggccagcgcaacaccagccgcgccagcggcagcaaatgcgcaacccaagctggtactccgctgccgcccaccattgcttcttctattctccttttccgcgggggaaaaaaaagtcggatctttgatgaggcttttgctgctgcttgcattgttccttttgtccagactgccgtgaagctgaggatgatcatcaagggcgtgctcgggcggtaccagcgctggaaccccgtgcacccgacggccggcaccttctggggtgtggggctcggcgtcggctgtggcgtcggctggggccccggcttcgggcctgaggtgattgggtacgtaggcgccgggtgcggcgtggggttcagcgttgggttcacgctcgccggcgtcggcatcggcctgccgcagcacagcctcatcaggaaccacgaccacggtggttttgcgagcagcgtccctgttgattcagcgagattctacgccctaaccatcatcagaggtctggtatgggacgccatcagctacgtgggcaatgcagcggctatgaggaaagaatctcgacagaagcttccgaggttccaggacagccctcaggttccaggaggagttgatctgccgaagctggggaagggcgtgtcgagtagcatccggtccacgcttctgattgtgtttggaggcgagcgaatgatggagatagctctcaaggatttcggaactctgaaggcatgcatgcgttctggctctcaaggaccaggagtaggctgtaggctgcgtatgagtgcacatgctgactggtccgtgtacaggagcaggctgccgcagcaaaaccagcaagatggctag

SEQ ID NO: 20709 - DNA, 237 bp, Zea mays
  Peptide Sequence Number=SeqID_64084
atggcccaagggcacatttccctttcaagaagcaagcgacgcttcgccttcgccataatgaccgcgtcaaaaaaggggccgggaaagggggataccccgaaagggatccttctccgtgaaggaaacaggccccgagcctccctactgatcagaggttcaaaggctggcccctcggaggggttcaacggccacctcagagcgcttgggttctgcgcccactactggtcagaggtttga

SEQ ID NO: 20710 - DNA, 1002 bp, Zea mays
  Peptide Sequence Number=SeqID_64085
atggcggccttctcctccagcaacggcgtgccgccgggcttccggttccacccgaccgacgaggagctgctgctatactacctcaagaagaaggtcggattcgagaagttcgaactcgaggtcatcagggaggtcgacctcaacaagatcgagccatgggagctgcaagagacgtgccggatcgggtcggcgccgcagaacgagtggtacttcttcagccacaaggaccgcaagtacccgacggggtcgaggacgaaccgcgccacgacggccggcttatggaaggccacgggccgggacaagtgcatccggaccagctaccgcaagatcgggcatgcgaaagacgctcgtcttctaccgcggccgcgcccctcacggccagaagaccgactggatcatgcacgagaggacggatgggtggtgtgccgcgtgttcaagaagaagtgcttcttcaagattggcggaggcgaagggagcaccaccagcagccagggcgcggatgccggcggccacctggccaccatgtcgccgccgctcggcggacaccacgacctggcgtacatgcacccgcacccgtactaccaccacgccgcctcctactactcccagatgcaggccccggggccgcatgccaccgcatactcgcaccacgtgcaggtccaggacctcctcaccaaccaccgacccacggacgacgacggcgccggcaccggctacgacttctccggcctgcccgtcgagaatcaacccggcggcggccttgacgtcggcagcagcgatggcgtcgccacagacgacggtggccagctggctggcgaaaggagggatcagaccaccggtacagccgcagatcatcagtggcaggcgatggatggtttcagcaacggcgggagcgccgaggtgcagcaaatgaccggcgcccaacgaggcggggagatggatttgtggggttacggaagattgtgtggccatgcagaagaaactaataagcacaaggattga

SEQ ID NO: 20711 - DNA, 612 bp, Zea mays
  Peptide Sequence Number=SeqID_64086
atggcgtcttcgccttcaccccaacaattaacagttgagaactgtgagttgtccagtattggtgtgattatacttctggactgcctcacaaatgcgaagcaactccttgatgtgttatctattgcagacaatcatctagggagtcctgtggcagctgcattggccagattcttgggttcacatgtacgagctttaaatgctacagatatcggcttgggaacagtaggcttccaaatacttgaggaaacattgccaacagaagtagctctttcccacatcaacatcaggcccaacttggcaactcgtccgaatcaaaataacctaacactagccgcagttcgctcagcacccaggctccaagcggccacttcgcagctcgctcagcaccaggcggacactctgctgccacccgccgcccatcgcccgagtctccacgatccatccgtctaccactgccatctccctcgcagcccgctgcctcgccaagaggaggatttcaaggctgacttcgaggagttcgatgtgaaggccgacatcttggagctcgtgctcaaggatgaggccaaaaccttcgttgccccaggagcgcactcgctagaggtttacaactga

SEQ ID NO: 20712 - DNA, 1026 bp, Zea mays
  Peptide Sequence Number=SeqID_64087
atggtgtgtttgggtttcggcggccgcaaaaaacacaaactacaagataatacgatcctgcaggctcggatcttgacagttgaaggaagcagcagcaccctcggcgtcaactacaccttcggcgaggaatccggctcgagcagacggctcggccggtcaccccgaggcctcggccagctgtcccccgaagacatcagcccggcccgaggcctcggcaactcaattccggcgacggtcccgccagtggacgacccggccaggctctggccgaccaagccttcttttcgagccaactctgcctctgaccgtgctgacactgctacccctggcttcggctcatcgaagagcggccaaggggttcctttaactaagcaagagaagcctcggacagcaaggccgaccgagccgagggactcctacgcctccgagatacggatacctcactcgtcacctttgcacggggcggctcacgcttggacggacgcggccaccggaaggctctcgttcgcgtccccgctcaagggacgtgaaccagacatcaaagccaaagagccggaggccggccccaacagttcgccttccccggcatggctggaggacgcctcctccgcagagctgggggatggtttccaccaccagaagctgggagaggaggtggccagccgacccgtgcgggaggtagagccccggctcgcctcgctctccgccctagcaaggatgccgggctgcatgatgaaaatccttgaagccgaacgatggctgaaaggtaccaacttccacgaagttgcgttcctccaacgacaaggcggaaggattgcgggtgtcccccatctgggggctcggaagccgtcatgggctgagtcttctccaacatgctccaaggtcatccccctatggcgcgggggctgggtcccacgcgtcatgcaaactggcctagggcagaagaagccaaaccgccgcgcgcggtgcatgcaaccgcccagcggttacaagcattcctccactttcgcccagaccagcgggtga

SEQ ID NO: 20713 - DNA, 432 bp, Zea mays
  Peptide Sequence Number=SeqID_64088
atgggcaagaacaacaaacgcaagcgcgagccgactcctccatcggaggactttggcgactcggaatactcggaggaggagttctcctctgagtccgaggggtctccagctcccgtctctcccccagcgtcgtccgatgactcggacgactctcaggggattgccgcggaggtctggacttacatccgggccatcgagcgctccgggctcgagggctcggatgagtcagagtactcctcggacgaggaggactcgcccgaggaggacggcgatgacgacgacaacgacgacgacgacggaggcgatggcggcggtgacggtgacgacggcggcaggggcgacaacggcgacgacaagggtggcaacggcggcagcagtaggggcggcagcggcggcggcagcagcaaggacagcaacaaggccagtggctag

SEQ ID NO: 20714 - DNA, 282 bp, Zea mays
  Peptide Sequence Number=SeqID_64089
atggctttgaacaaccttcgttcagaggccgaagcccaaaaggttgaaattgaagaccttcgaaggcaactggccgaagctaaggaaaaatgcgtactcgcagaagctgtcggtgttttgggtccgaccgcacacccagggttgcccctcaaggttcgggccgctttgagatgcgtaacaccctacgtcctggcgagtgtgctttatgtgacgggttacaagtggacccgggggatatctgtcccccacaagcccccgatcttcgggctgattttgagataa

SEQ ID NO: 20715 - DNA, 615 bp, Zea mays
  Peptide Sequence Number=SeqID_64090
atgacaaatgtgcaagtaagtcgatcacatggattcaacctgaacgagtcgagacttgccgcatgggctgtccacgcggctcggcatttcgttgaacggcgcgcggcttgctgcgcatttgccgaacagccggcgggcaccacggagaaccgcgaggaggggttcaactcgaccaccacaccggctgccatgggtgagcagaggcaaggggccagcgccatggctgccagcggccatgagcagagagaaaagggggaaaagaatggagcagggaggggcgccgaaatggacatccccagagacgagggccgaccagggaacaccctgcgcgcccaccatggttggggaaggagtttagggaggcgctggagggaagggacgccatggacaggagctcgacgaccatgggaggtccctgcgcacaagcctgaagggggcgcgcccatgggagcttggagctgctgctgggcgccggccaggagaagcttctgcgcagcgtccaaagcaggcaaggtggagctcgcgtccatggaaggagaagggcagggggcgccggctgccctgcgcgcgacggagaagaaaccagcagagagcttcgcggcgagcagcagctag

SEQ ID NO: 20716 - DNA, 3318 bp, Zea mays
  Peptide Sequence Number=SeqID_64091
atggggaaagggggtatttcgaaaaaggacccttcccagcgaaggaaaagggccccgagccctcctactaatcaggggggttcgaagactggcccctcagaagggttcgacagccgccccagagcatgcagagtcagggatgaccctgggtacgtccgttacatggccgaggctcgggctacgctcccgaggagttcggcctcgggcgcaacaaggagctccgcctcgcccgaccccaagcctcggcctcggcctcagccccagcctcggaagaagatctccgcctcgcccgagcccagcctcggcctcaagagaagcctccgcctcgcccgagcccagcctcggcctcaggagaaggctcaaggcacttctccgacagccacgttagctcgtgtacagggctcaaggcgcttctccgacggccacgctcagacagcggcagggggaagagcgacaccctcggtgtcgttctcaccctcggcagaatctggcccggccccaggcggcgacacgggcggaaggacctccacctcgaaggaggaagccagcgccgcacttggaccctcgacagccgcgtcaagcctctggacctcggctaaggcagcctcctcatcgtcggatgagaagctgcacgcgatgccccagcaagcagtattagttgggttgacggcgggcatggtggcggcggaggggaaggcagctgggaacaagacgatgatgcagaagcagcaggcgagcagctgctgctcggaccgtgaccaggacatggcggacctggagctggcgcttgaggcggttgttccggtgagcgtgcagcggcaggactcgctgtacagggacgcgacgagggcgggcggcggcgggcagcagcagcacgaagggtgggctcggactctgaggctggccttccagtgcgtgggcgtcctctacggcgacatcgggacgtcgccgctgtacgtctactcgagcaccttcgccggcggcatccgggacaccgacgacctcctgggcgtgctctccctcatcatctacagcttcctcctcttcaccatcatcaagtacgtctacatcgcgctcagagcaaacgacgacggggacggtatgtatgtgctgctgtcgtcgatccatccatatatggcggatgcatcatctcattctcatctgaatgtgctggcatatggcaacttaggcggcacgttggcgctctactcgctcatctctcgccacgccaaggtgagcctggtgcccaaccaccagcccgaggacgagctgcagacgacggacgccgccgccgccgtgctgggcaagcacgggagcgtgcggcgccggaccgtgcagctggcggcgtcgcacgggcgggagcagcgggcggtgtgggtgaaggagctgctagagacgagcaagcccgtgcgcatctccctcttcttcctgaccatcgtggccaccgccatggtcatcagcgacgcctgcctcacgcccgccatctccgtcctctccgccgtaggggggctcaaggagaaagcgccaaacctcaccacagcgcttcggcacccacaaggtgggctacctgttcgcccccgtctcctcctgtggctgctcctcatcggcggcgtgggcgtgtacaacctgctcaggcacgacgtcaccgtcctccgcgccttcaaccccaagtacatcctggactacttccggcgcaacggcagggacgcctgggtctccctcggcggcgtcctcctctgcttcaccggcaccgaggcgctgttcgccgacctcggctacttcagcatccgctccatccagctcagcttcggcttcggcctcgtccccgccgtgctgctcgcctacatcggccaggccgccttcctccgccggtacccggagcaggccatgatctcctgcgccttcgccaccatctcccactcgcaggcgctgggctgcttcccgagggtcaaggtgctccacacgtcgcgccagtaccggggccagctctacatcccggaggtgaacttgctgctcgccctcgtcgcctgcgtcgtcacgctcgcgtccaagaccacggccgtcatcgccgaggcgcacggcatctgcgtcgtcctcgtcatgctcatcaccacgctgctgctcaccctggtcatgctcctggtgtggcgcgtcaacgccgcctgcgtcgcgctcttcttcgccgtcttcgccgccgccgagtccgtctacctctcctccgtgctctaccggttcgcgcacggcgggtacatccccgtcgccatgtccgcggtgctggtggccgtcatggtgctgtggcactacgtgcacgtgaagcggtacaagtacgagctggagcgcacggtgtcgcacgagagcgtggtgcgggacctgctgccgcgctgccgcaccgtccccggcgtcggcctcttctacacggacctggtgcagggcatcccgcccgtgttcccgcacctggtggacaagatcccgtccatccacgccgtcctgctcttcgtctccgtcaagcacctgccggtgccgcacgtggacgcaacggagcgcttcctcttcaggcaggtggcatcgtcgtcggagtcggacacagctgcaggcccacgggtgttccggtgcgtggcgcgctacggctaccgggacctgctggaggaggccagtgacttcgcgggcagcctggtggagcgcctccagtactacatccgcgacgtcaacctctacggcgtggagcaccagcagccgggcgccaaggtgagctacccgagctcgcgctgcgacagcatgatattgatggcgcggcagaggtcgtcggtcatgatgctgcggcagtcgtcggcggcatcctactactcgtcgtacgcagcggcagcggagacccagcagctgcagctggcgagggccaggtccacgtccggggcggggggcatcctcctccactcggcgtcggagagggccgagcagctggcccgcgccaggtccacgggcatcttcgcggaggagatgctgacgccggcggagtcgttctcggagctgtcgaggatggggagcatcggcggcggaggaatgcaggcggtgaagatcagcctggaggagatggcgcggatcgaggaggagcagcggtttatcgagcgggagatggaaaagggggtggtgtacatcctcggggagagcgaggtggtggcgcggccccactcgtcgctgctcaagaagctgctcgtcaactacgcctacgccttcctgcggaacaactgccggcagggggagaagatgctcgccatccccaagtcgcagctgctcaaggtcggcatgtcctacgagatctga

SEQ ID NO: 20717 - DNA, 243 bp, Zea mays
  Peptide Sequence Number=SeqID_64092
atgaatttcccaagtaagaagaagaaaaagaagaaggatagatcggacaagaagaagaagaaattatatcccaagaaggatggcgaagcctatgtagtggaatgggattcggatgcaagtgcggatgatgatgactcttcatccaagcttaatgtcaacatcaccatcaaggaggctccttcactcttctcatctccacattgtcttatggtgaagagagatgcaaagttaaattttaggtga

SEQ ID NO: 20718 - DNA, 630 bp, Zea mays
  Peptide Sequence Number=SeqID_64093
atgccgtcaattgctcgtcgtgccttttccaccaccgtcgtgccaccccgacatcgaggacagcgccaccgccgtcaccccttccggtacgaattgcctcagctaatccgcaactaccttaacttcgtgaccattgattcacccacaggcagatccgggctggtctcaggggaccgctgtcctcagtcgttaatcatagatcgagcagacgagcaagccactaaggacccaagtgttcagcaggtggagactgttgagcaaaagctcgttgaagagtgtaaaactggtatatcagccatgctcacagtcatgagaagctcgatagtggagacgacggggagcgtccaagaggagccagaagcggagcaccacttgtgcgtagagaaggcccgcgactctctacggagttactcgaccaagctaggtgatgtggacattataaggaagattatctccctgctaccacaacaaagatacgggagcatcatcactattcatcacaatatggaggacttgagtacaatgaccccgaccattgtgattggaaaaatcgcggtctttgagatgtcgcaaaaaatgtgtcaggtcctgcaggaagaaacagcttcggctgaagctgtccgcatgtga

SEQ ID NO: 20719 - DNA, 975 bp, Zea mays
  Peptide Sequence Number=SeqID_64094
atgaggagggacctcgcatcctccttcgctaccgccgcatcctcttcctcggcagccgacgcgctccggggctggtgggatgacgtcaacgagtcgccccagtgccaggacgcggccttcttctccctcgccgccgcctacgccctcgtctccgccgtcgcactgattcagctcgtcaggatccagcgccgggtgcccgagttcggatggaccacgcagaaggtcttccacctcatgaacttccttgtcaacggggtccgtgctctggtattcggcttccatgtccacgtcttcctcctccgcgcaaaagtatacaagttggtgttgctagatctccctggtctgttgtttttctccacctacaccttgctcgtgctcttctgggcagaaatataccatcaggctaggagtctcccaacagacaagctgaggcctgcatacattgccgttaacaccatcatatacgttgttcaggtttgcatatggatataccttgggataaatgataatgctgtggtcgagctagccagcaaaatattcatcgtagctgtctccttcgttgcgcttcttggcttttcagtatatggtggaaggttatttgtcttgctgagacgtttccctattgaatctaaggggcggcaaaagaagctttatgaggtgatcgcaacccagcaacaactacctttactgttcaacggccattctgtacaaactaggaaacaaattgtcgatgttgggactgtgacagcaatttgtgttacctgcttcctgataagatgtgttgtggttgcattatctgcgtttgatgccgatgtatctctcgaggttttggaccatccagtcctagatttcttctattatatgccggctgtagttggatgcttttgcttgtgctgttatgtttatggaagcatcagtgttggcgatgaatataatgacgatcattctatatggggaagtggtgctaatgaatga

SEQ ID NO: 20720 - DNA, 1305 bp, Zea mays
  Peptide Sequence Number=SeqID_64095
atgtctcagaagaattcgtcatttctgcaagaacactatgatctgtggtttcatttttttagttatattggcgcctgggagcatgttcaacagcaaagacatgctttctttggtaaaatgcaggtgtgggattacactggacttggatacacgaggtataatgctagagatgtgggcaaagaacaccttggtggccatatctttctttttgtatttgtgtctcttagatgtgtggtggagaacaaggtgctttgcaactcactgctcttacgtttacagttacaggaagaattggatgatattgaaaatgtgatatatcctaccagattggtgtctcttactttcccgttgaagaccagacaagcaggaatgaaaccaacatcaagagaaccattatctgttggtcatactacagaagagttccatcgcagtcatttagttaaacttgatctcagtgatggacggagtttatattccaaattggtgataggagctgatggttcgaagtccaatgttagacagattgcaggcataaaaacaactagttggaattatccgcagagtgcaattatctgtacagtagagcatgttgtggaaaatgattgtgcgtggcagaggtttctcccttctggtccaattgcgctacttccgataggcaataacttcagcaacattgtatggacaatgagtccagaggagtcactgcgccataagtcaatgagcccagaagagtttgtgaattctgtgaaccacgcattggattttggttatggtccgcatccacactctaccgctcttgaccattacatggaacagttcttttctggcattgggagcagtgcagcatctacaaaggaatgcttcgaagtgccaccgaaagcaacccgtgtagtttctgagagaatggcgtttccattgtcgttgatgcattcccatgattatgtttccaaaaggttagcattagttggagatgctgctcatactgtccaccccttagccggccaaggtgtaaacttgggctttggtgatgctgctgctttagcaaaagttattgctgagggagtttcagtgggctcggatgttggggatctgactttgctacagcggtatgagaaggagaggaaggctgccaatgtggcgatggcagcagtgctagatggttttcagaagatgtactctgttgatttggggccccttaatgtagtgagagctgctgcgttccacggtgcccagtacatatcaccactaaaaaagaacatcatctcttatgcaacgggtgacacgaaatggtcactatttcagtga

SEQ ID NO: 20721 - DNA, 354 bp, Zea mays
  Peptide Sequence Number=SeqID_64096
atgaagcgttcggcggcgtccaccgtgcccctcgccctcgtcctcatcgccgtcgcgacgacggcggcggccgccgacatgaccggcgccagcaactacctcgtgtacgtcgagccacacccgccgggcgtcgactgccaggcgtaccagctcggcatcctggccgccgccctcggaggtgaggcccaggcgaaggcggcgatgctgtacaactacaggaacgtcatgagcgggttctcggcgaggctcacgccgccggagttggaggccgtcaagaagcaacctcaggtgagccgggtgctgccgagcgcgaccttgtctctgatgagcagcaagttcgacggcgtcagctga

SEQ ID NO: 20722 - DNA, 378 bp, Zea mays
  Peptide Sequence Number=SeqID_64097
atgactgatgagtcactgaagaattacaagggtgagagagatggtatctacggccaagccaaggttgctggagccagtgtagaaaatgcacttgttggcatctacggtgttctgaagcagaagagagggcatgtctttgaggagatgcagaggccggccaacatgatgggctctgatcctttggaggccggctcccaggctgctcagctagtgctggatatccgcaagaggaagggtctcaaggaacagatgacccctctttctgctctaaggcttgtttggttcgtggctaactgtgtcacactttgcctaaagttagtcattcgaattgaacaactaactttaagcagaaaagttaggcaaagtgtgacaagttag

SEQ ID NO: 20723 - DNA, 636 bp, Zea mays
  Peptide Sequence Number=SeqID_64098
atgagccgcatgccgatcctgcagcagctgcacctggaggagcagctcctgcgacgcacatcagacaactggtgtattatcaacgatggcacggcccctgctaccatcgttatgggcgtgtctgggagagtctcggagcttgtcaatatacagctggtcctccgggacaaggtgccgattgtgaggaggttcagtggaggtggcaccgtcattgttgatcagggaacggtgtttgtgactttcatttgcaacaagaatgttgttgctgggctgcagccctttccacgggacatcatgtcatggagtggtcagttatatggcaaagtttttgacagatttggtgaatttcatctacgtgagaatggtatggacaaccagcaccaagactatgcatttagtcatcgaaagtttggtggaaatgctcagtcaataacaaaaaatcgttgggttcatcacacatcgtttttgtgggattatgatgtaaaaaatatggattatctcaaaatcccaaagcgtgcacctgaatatcgactggaaaagtttaacagtgatttccagaccaaagagctgagcattactagtactgaacttggagagttaaataggttttactatgagacgaaaggtgctgggtag

SEQ ID NO: 20724 - DNA, 348 bp, Zea mays
  Peptide Sequence Number=SeqID_64099
atggcaggaatgtactgcaacgcccgcgactgcctcaacaagagaatgcagccgccggcccgcaccgctgcgcggatcctcctctcccccgtcgacaaggcgaaaggctcggcgaagaagaaggaccggggaagggggataccccgagagggatccttctccgcgaaggaaccgggctccgcgccccccattactgatcaggggttcgaaggctggccccccgagggttcaacagtcgcctcagatcgcgtgggcccgacacccactactggtcaggggttcgaaggccggccctccgaagggctccacggccgcctcaggctactcgggctccgcgcccattactga

SEQ ID NO: 20725 - DNA, 1362 bp, Zea mays
  Peptide Sequence Number=SeqID_64100
atggcggcgcctgtcactgctctcaactgcgtggtgtacctgcgcgcgatggtgtccgtgctgtgcctggggcggctgggcccgctggacctggcgggcggcgcgctggccatcgggctgaccaacatcacgggccacagcgtgctgcgttcgggtccccgcaacccacgagctgctgacgctgtccctccagcgcgcccgtgctgctgcttctcctggcggcgctgccccatcgcgctgctgtggctgaacgtgggccccatcctggtggcgctggggcaggaccccaccatctcggcgcacgccgcgtcgtacgccgcgttcgcgctcccggaccttgccgcgggcgccgtgctccagccgctgcgcgtgtacctccggtcgcagggcatcacgcgccccatggcggcctgctccgccgccgccgtggcgctgcacgtcccgctcaacgtcggcctcgtcttcggcttgggcctcggcgtgcgcggcgtcgcggcggcgcaggccctcaccaacgccaacatgctgctcttcctgctcgcctacgtgcgctgggcgcgcgcctgcgagcacacctggaagggctgggcgcgccccgccgacgtcgccgccggcctcccggccctcgccggcctcgccgtgcccagctgcgtcggcgtctgcctcgagtggtggtggtacgaggtcgtcaccgtgctcgccggctacctccccaaccccgccgccgcagttggcgccgccggggtgctcatccagaccaccagcctcatgtacaccgtgcccatggcgctcgccgccagcgtctctacccgggtgggcaacgagctgggcgccgggaagccgcggcgcgcccggatggcggcgctggtggcgctgtggtgcgcgctggcggtcggcgtgctgcacgtggcgtggacggtggcgctgagcaggcggtgggtggagctgttcacggcggatcccggcgtggtgcggctggcgtcggcggcgatgcccgtggtggggctgtgcgagctgggcaactgcccgcagacggcgggctgcggggtgctccggggcacggcgcgcccggccgtgggcgcccgcatcaacctcctctccttctacctggtgggcacccccgtggcggtgtacctggcgttcggcgcccgcgccgggttccgcggcctctggtacggcctcctgtcggcgcaggccacgtgcgtggcgctcgtcctcgtcgccgtcgtctggcgcacggactggcgcgtcgaggccatgcgcgccaagaagctggcggggctggagctcaccaacgacgccgaggaggagagcaggcgcctcgtggccgccaccggcgagcaggcggaggatactagctag

SEQ ID NO: 20726 - DNA, 1947 bp, Zea mays
  Peptide Sequence Number=SeqID_64101
atggcttgtcgcgccactctcctgcctctcttcctcttcctcctcgtggcgcccgagcctgcgctcgccacatccggcaccatcgtcttcaccacgctgggccggagccgctacgcctttgacgtcttcgcgctcacgatcgccccgctctccgccgcctccgcggagctgcgcctcacggacggcgcctccgtcaactacaacggcaacttcgcgccctcctcctccggaccgccctccctcctcttcgtctccgagcgcaacggctcgctcaacctctacctcacccccgtccccacatccgcctccgcccgtcgccgcgacgcgctggaggaggaggaggaggactcggcgccgcccacgccgctgctcccgtgggaccctatcgcgctcaaggaccggccttcgctcacccccgacggcgcccacctagtgtacgtctccacggcggagcccgcgggggcgccgcgccggagctgggcggccgtgtactccacgagcctggcccccggccgcgccacgcgccgcctcaccccgcggggagtcgccgacttcagccccgccgtgtcgccgtccggggtctggaccgccgccgcgtcacccggcccgcgcggctgggccggcgaggtggaggacctccgcaccgacatctacgtcttccggacctccgacgggtcgcgccgggcgctggccgtcccggacggcgggtggccgacctgggccgacgacaccaccgtcttcttccaccgccgggacgccgacggctggtacggcgtgtaccgcgccaggctcaccttcacggacgacgacgtcgcgtccgtcgtcgaccggatcaccccgccgggtttccacgcgttcacccccgccgcgtcgcccggcgcgccggggctcgtggccgtggccaccaggcgcccgggttccgactaccgccacatcgaggtcatcgacttgtccggcggcggcggcggcgccaacaacaggagcgcctactacgagagcatcaagggccccgcgccggacacgttctcgctcttcaggatcgacgggtcgttcccctccttctcgcacgacggcaagaggatcgccttcgtcgggctgccggggctgtacgtggtcaactccgacggctccggtggccgccgccgggtcttctcgggcaacgcgttcccgacgacatgggactggaagaggaaaggggtcatctacaccagcgtcggcccagacttcgcgagcgagagcaccgaggtggacgtggtcgccgtgtcgctcggcgacggcgacggcgacgaccccagcgtctccatcaagaagctcaccgtgggcggcgagaacaacgcgttcccgtccccttcgcccgacggcaagtgggtggtgttccggtccgggcggtccgggcacaagaacctctacatcatggacgcggaggacggcgaggccggcggcatccggcgcctcaccgagggtccttggtccgacaccatgtgcaactggtcccccgacggcgagtggatcgcgttcgcctcggaccggcacaacccgggcggcggcagcttcgccatctacatggtgcacccgaacggcaccggcctgcggagggtggtgcacagcgccgacggcggccgcaccaaccacccctggttcagcccggactcgaagacgctggtgttcacgtcggactacgccgccgtgtccgcggagcccatctccaacccgcaccactaccagccctacggggagatcttcaccgtaaacatcgacgggtctggcatccgccggctcacgcacaactccttcgaggacgggacgccgtcgtggacgccgtaccacctcaaggcggaggacgtgggcgagacgctgcaggcctccgggacgtgcgcgttcgaggactgccactggctcaacatcgctgcccggcctgatggcctcatgtgtggcaagcacgcctag

SEQ ID NO: 20727 - DNA, 783 bp, Zea mays
  Peptide Sequence Number=SeqID_64102
atggtttgctcctctattgcgttcgacaaaggagtcgaatcatgtttgaagtacatcgaggcagttccatggagcgagagcgaggaagagaagctgaaacacgtttttgccagatgcactttcggcgaatcagttagtaaagatgtgctggcaagattgcagcagcagtgcgcgagcggctcggaggacctggcggtgcagctcgtggaatctatcacgagcggagccaacaacggcgcgaggaaagaaatgcagtctttggactcagatggcggccaagctatggcaccttcaggcagaaggcctatggttgaaaggatcagtcagcaaactgagaatctcaactggctcttggacatccttctgaacaacgacatggcagaagaatacgttgagctgtggggtacgcaggaggagctcatcagaatgcacgagcgagcatcgccgatgttcaggtacgagctcagccgggtatcggcgagcgtgttcatggctctggggagagggagaatccagtgccccagcgacacgaggagccagctgttccgtggatggttcaggcccatgcttgtggacttcggctggctgcagaggtgctccaaggggctggatgtgagagtcctggaggagaacctggggcaggccctgctcacccttccgctccacctacaacagagcttgttcgtagaatggtttcagtgctttgcgtctagaggcacaggaggatgccctaatctcagcagagctttccaggtatggtggaggaggtcatttgttaattag

SEQ ID NO: 20728 - DNA, 264 bp, Zea mays
  Peptide Sequence Number=SeqID_64103
atgtcgctgaccgtcaacattcttctcgaagactacttccgccctcctggagataagcttgactcggaagctcgacactttgtggcgagccgatctctcccccatgggaagctaagctcttgggcgaacggagcgactacaaatgaggacaactggccaagactaccactatccgatctctgtctaacgatacgacccctgacggcacacggactaaatggaacctattggcgagcatttgctggtctcgcgaacttccattga

SEQ ID NO: 20729 - DNA, 546 bp, Zea mays
  Peptide Sequence Number=SeqID_64104
atgatcaagctttggctatggttaaatttttggcagcaaaacagtgcaataacaatgaatgatgtggtaacttcacatctacccgtctgtttatatagtgccgcagcatttgagaacaagtccccaacagctggcgttacaaattttgtggcggctgctactgtggtgcctgctgattataatgtgcctagttctgagtctgagtctttttcgtttgatgatgagtttgggagtccattttcctggagtgaagagtcgtctagtgaagatttggattattttgtcgcgttagatgcggtcgcgacggagtcctcgccgcgggcggaggttggcgaggtgtctgatcttcctggtgcgaggaccgagggccggcggcgaagggtggtgtcgaagcatagcgttggtgagttttcgcgaagtggtcggcgccagtggctggggatggagcgggaccgtcgtcgagtagatcggtttgggaaacgagagctactgtcttcgccgattgggatgagcattgatgagggggatctgtggaagcttttttag

SEQ ID NO: 20730 - DNA, 306 bp, Zea mays
  Peptide Sequence Number=SeqID_64105
atggccacgatgggttcaacatctggaaaagatgtacctctgccaggatccactttagtaaatttatgtaaccgcttccgcatgttcgtatctccgatgatctgtaatgtctgcgtgacgggtaaaacgctcttgggaaagagtttatatgaaagaccagatgggaagagtgcaatgtatagaaggttgaatcaactaaggcctattgtaatactctacatgatgaagttcatgtattgtactcacaactacaccgcagtgtacctgcggatcctgtcgggacagaagccggaccttctcaagtag

SEQ ID NO: 20731 - DNA, 429 bp, Zea mays
  Peptide Sequence Number=SeqID_64106
atggagatgggcgccgagctccatagatgcagggcgagcagaaggaacggggaggaagacgcagggagggagcgctgtgacgagcgcaggggctccacggcgggtattcctgctttggtgcttggaggtgattatggtggtgttgatttgggtggtgcggaggtggaggcggggtgggaggatttgtacttcctggcgatgttggtacacgttgttgggtgggtgctggacgtggtcgttataagtcttcaccgtggaacaggcagtagaatctgtgcggctgctgcgtccgtccccggcctctccctcttgttctgctggactgcggagggtccttgggcttcctatgagattcaacctttcgttgatgtaactcttcggacctggcgtacttctcgaatagctggtatagctcttggaaatttctag

SEQ ID NO: 20732 - DNA, 292 bp, Zea mays
  Peptide Sequence Number=SeqID_64107
cttcgaggaatcgacgatcaagcatggcgaccaagtgatcgaactcttcgagttctatgagatcaaagaccctgagcatctgtttggtgaaggcaatgataccctgccggaccacctaggaagtgatcaatggggagtcatgatccccgggcagaatgggaatcacggctcatgggtaaaagatggttggtttacagatgatgatgatgatggttatgactatggtaatggtaaacaaggcgtcgaggtggatctccaggagttccaggacgtcgacgagttcgaggattag

SEQ ID NO: 20733 - DNA, 321 bp, Zea mays
  Peptide Sequence Number=SeqID_64108
atgcaggcggcatgcaaccgcgccaagtggacgcgcttcttcgactcccaacgcgcccagcctggaggcccaggcccacgcgtcatgcaaccggcgcgccggatgcttcatgcaagcaactgcaccgccacttgcaccgccacctcgcctcctcgattgcggaaccaataccgcgactcgagctcgcgcacgcgcaacggccgccccgccaacaactcgccccgtcgcattaactccgcggcgggacaggcggcgcttctgggaccgggaaagggggataccccgaaaaggatccttccccgtgaaggaaccgggctctga

SEQ ID NO: 20734 - DNA, 141 bp, Zea mays
  Peptide Sequence Number=SeqID_64109
atggggagtcatgatccccgggcagaatgggaatcacggctcatggatgatgatgatgatggttatgactatggtaatggtaaacaaggcgtcgaggtggatctccaggagttccaggacatcgacgagttcgaggattag

SEQ ID NO: 20735 - DNA, 915 bp, Zea mays
  Peptide Sequence Number=SeqID_64110
atgtcttcttcctcccttatgcgtcgtgtctttccatcttccaagcccccggatgggtggtatccgccgcctttccgcctcctcgttggaggaacgcaactccatgggagttggtacctctcagccatcgttcggcttcaaggattttcatcagccggcccggccgcacccctatgccggcgatcacccaggatggtgaccaccagtttctgggtggggaagagcaagccgggctgcgatcttggtcccaccctcagcttcaaggatgttcatcatcctcgctggggtgggggccacgctgagccggcgctctaccttccgcgcgggtccgctggtcacccctttccgcggcgtttgggggtggaggcgctcgctagccctgcggacggcgcggacttagacagcgtggggctgaccgacggcgggcgtcgtcacctccagcgtgtcggagtcgtcggccgggcttccggcggcccctcctgccggagggcgaccgccgtgccgtgtgcacgggaggaccacccacgatgccgcgcgctgttagggcgggcgttcgtgttctgggggtggtcctgcttttgcaatgggacggcgccctcgaacagaggccgggccttccccatagagtggggttgttcgtacctgcggagggggaaccggagttccgttcgtaatggcacttcgaatgccacctcgcctgttgattatctgaaccgctttcccaagcaggagtcgccccgtgtcaaggtgacgagtgagtatgaacagaggcggagttggctcgagaatgggaacctgattggccggagcctagtcgtgttgtccgtcagcggagccgacaccaaagtcgatcagccgaggcctcgggtcgggatggcgcccttggaagccggccggccgaggccccaggggtaa

SEQ ID NO: 20736 - DNA, 1791 bp, Zea mays
  Peptide Sequence Number=SeqID_64111
atgggtaaagacataaagacattccctctccctgctatcatcgatagatatgatgattcacaaggtattgatagagagatttatgaggaggaaagtatcgaggcgacgacagaagatgttgctttgcaagaaactctaaatgaggagcagaagtctgcctatgaaaagatcttatctgttgttgacaccagtaatggcggtgtgttctttgtggatgggccaggtgggactggaaatacttatctgtataaggcattgcttgcggtgctacgtagtcaggacaagattgcagttgcaatagctacatctagggttgcggcttccataatgcctggtgggagaactgcccattcacgcttcaagataccacttactattgatgatggtgctatatgtaccttcacgaaacaaagtgggacatcaaagttgctacagaaagcgtcgctcattatttgggacgaggcatcaatggctaagagacaatcaattgaagcgttgcacaacagcatgtgtgatatcatgggacgcctgcttgttcgcaacatgagagcaaagagcgacccatggtttgcagaatatttgttgtgtgtcggtggtggaactgaggaagtgaacaacgatggtgatgttcgtcttctagatgagcatgctggaatgcgggttttcttgcctcggatacccctgtgcccttctgatgacgagatgttccctttccattttaaaaggaagcagtttccggtaagactaagttttgccatgactgttaacaagtctcagggacagacgattcctaatgttgttgtgtacttgccagaaccagtattctctcatggccagggtgatcttgcactcatcgattggattaaagaaatcccttgtgaaccaagggtagaagtcgtgcttattgatgatgcctttgtggaaaggaagtggatggaatgcctatttcaaccggacgcatatctaggtgatgaggtgatagactgttacataaatttaataaaagctcaagagcatctaaaatgccgatctagaggtcgtgtatacatagaaaatgcttttcagttcaactttctaaagcgagacagttatgttgaaactaaaacagatgagttatatccaattaaagacatggcacaaatatctagcgcggaaagaagggttttactttatctagaccatgacatggtgtttattccaataaatatccgagaaatgcactggtatgttgtcgtgatcaatgcaagaaatatggagatacaagtgctcaactcacttggtacatcatccggtcgcaatgacctcattgacactgggatgaattatctgataattttacccaggatgacatgtcacactttaggaaaaaaattggttgctatattaatatcttcatatataaacaagagaaaggggtgtccgttatacaagtatgacaaagaagtcgatgctggaagctcctctgatgttcagatattagatagtcccacaaatcctaagaagaggaaactactttgtgtatctgaagatagcgaagtattgatggaagatgatgatggccccatcactcaagcagacttagaaaggtggtttgttcatgattgggataaaagaactcctataaaactctcgaccgatgagtgcactaatgaatttttactgagtggcctttccacaaaggatatgccagtgaccaaagccgatttaatagatgttctatgtgattacatcatgacaatccaagatgataggacattagagtcagtgctcattgttttatctattttatag

SEQ ID NO: 20737 - DNA, 1260 bp, Zea mays
  Peptide Sequence Number=SeqID_64112
atggtggattacccacttccatcagaatttctcttgcctttgtcaggcaatcctattaaagaatttctccagttcacagacacttccaatccagataagccctctactccacgatttaaaacgaatccacaacaaaaaattgcacaaactttacagttagataaccacaatcctcaatcaacaaatagacgtagcattcagaaacaacactggaaagacattattcagcaagaagggcttctcatttcccctatatcaaatttaagcatgcttgattacaatgactaccacagaaccatagattgtatacttcagatcgccgtcaagaagctcaacccggagagcgtccagggcctgcagagtggcaggataacatggagaacttcaaccctttcggtcaccatagaatgttctgggctcttcagtactcctgtactaacaacggtacgcattggtgccagcttcactataccttggttttattacattgatcatttgggttgggcaggcggggtcgagatcggcattgtctccactgtcatatcgtcgagcaaagactggtccaggagcgcagaaacatgcttcaagaaaaagtgtttattcttgttcgattacttcgattctaggactgtgattttagttcgattacttcgattctgggattaccaaaatacagataggggttacactgtttacttcgattctaggactgccaaatgtctctactgtttgaaggcggtgtttattcttgtttattatttactagatgtctctgtatgcttgattatgcaagtagattattcagcttatgtccataattcttcaagtctgcatatgactgcatcattcttcagccttctagactccttccacttctgccccctcggatacaaggacttcccagacttaggtaacacaacctcttctcttctttcaacatgttgtcatgtggtgctcgagttatggtacaactggagttgggtgaaagcgacatggagccttgaagtggaggtctctgacaataactgtgtctatcggaacgaggtgcaccacactgctggggaacgaacccaggtcttgcaggatgtagcttctgatccaactcttcccagaaccaagactgtccgctgcaatctctgtgggcatggagaggttgttttcttccagcaaagtgatatttgtatttcagtagttgcaattgatggccgcggcaagaggggaggaggggatgaccctgttctttgtgtgctgcagccctga

SEQ ID NO: 20738 - DNA, 312 bp, Zea mays
  Peptide Sequence Number=SeqID_64113
atggctcttcgattgttggccattaaagagtcacatatgtcgaaagatgaaatgataaaggataaaaaaacattatatggacatgcgcttctggttggccaaacattattctataaggttaatactagctacttcgttttacaagctatggtcatgtgggggagtgctagacgaatggaatttgatagggatgcaaagattcttcgaaggaactttgcaattgatctgttaagttacgaggacaattcatgccgctatgccatccttgcaaacatacaacaacgacttatcaatatcgctaaaaaggattag

SEQ ID NO: 20739 - DNA, 1362 bp, Zea mays
  Peptide Sequence Number=SeqID_64114
atgcccccagtggcgctgcccggcaagaaggctgggtatttgggggattatcggcgaagcatcatggctcccgacgaagcaggggctgcgaccagcgcgctggatgttgttggggggccgcctaatgctggcggcggttgctgcctgggggcagcggcagagctcatgatcgtcgagacctttgataccagattgcttggcatggtcctcctccagattgatttcgcactgcagtgtaggtgtccacactacagcattctgccacctgcagccgccccgcagccgccgccgtccttgcgggcggaggcgagcatagctgtcgcgcccgtagtccccacgccagcaacgcccgcagaatccgccgcgccagcaacgctcgcagtccccgccgcgcccgcagtccccaaatcggtcgtgccctcaaagctccgcgcatcgtcgtctgctccccgcccatcccgccgccgcgtccgccccctcccccaccgaaggaatccccacggacttcgccccgtatcgcctccccggctccccagaatgcgatcctctctccctcaatccccgctgcctcaacctagatcgccaccctcgctctcgatcctcgtcacgccatctgatgatccactctcctttgccccaacgcaccgacccaccccggctcttcagggcctgatgatgaggggctccagctggtgcgcggcgcgcgcctgcgcgaggatctccgtggctcgctccgacagccgcgggaatggcaggacgtggaagcgggtggagggcgcggcgtcggcggcggcgaggatctccggcgcgacgtgcgccagcctcccttcccagtccaccttccccacctacgacgatcgccgcggatgggtttctctagaggcggcggcggccgcaataggggcagatggcgctcttggggatgcgggggctctcggtcttcatcagcgacatacgcaactaccacaacaaggagcaggagcgcctccgcgtcgagagtggacaccatacttcacccattccttctcggcgctcacccaggaagactacagccagctcacgctcaacgtgcccagcggcgagacctcgctcactttcgacgatcgcatcttagacgaaaaatgcttggagggaaaagaagagcaagttgagctggaggtgttcaacttcactggttcaagtatcttcagttcttggtttaccatatccaacccaatttgtgcatgggcctccgacgacgccacagtgatcaaggctatctgcccagttaacaagaagatggcttttgtcggctgtgccagacatgagcttgttcatgttggtcaagatactcgcttgaactacaaagttatcgagctatga

SEQ ID NO: 20740 - DNA, 1011 bp, Zea mays
  Peptide Sequence Number=SeqID_64115
atgaccccagacaagatgtatgggcctttgatactgtggccaagccatatgaatggagaaaacttgaacccgaaggtgaagggccaccaccatgcatattttggtcctccaacagcttctttaactagatgtccaaatattgctatcctctattccagatttctggctaggcaaagatgcagagctatattgactctagagtgtgcacaagatatagaaaaactattggaacggaaccgtagcgcgcggcactcgccgggcaacgcggacaacggcctgctgtggttctacctcacgccgattcgtagcgccagcggccgccggactggtgtcctcccagtgaaaggcggtcggcagctgaggtcgcagtcgttcgcgcggacgatgctgaggctagacaacaatggccatggagacgtgcttcagagcgtgggcgctgcacgcccccgctgggcagcaaaggacaggctcctcgtcggcaacctggtgctgccgtcgaagcgggcgctcgcgccgctgtccgtgggcccgcgtcgccacgcgccggccgcggcacgtctgccagtccaagaacgcagtggacgaaaggtaataattggatacacagttgctagctgccaatatatatgtatatatgaaagtgaactgactgacgatgaccctcggcgatatatgcttgtcggggcagttgtggtggcggacgagaagaactgggacgggttggtgatggcgtgcgagacgccggtgctggtggagttctgggcgccgtggtgcgggccgtgccggatgatcgcgccggtgatcgacgagctggccaaggactacgccggcaagatcacgtgctgcaaggtgaacacggacgacagccccaacgtggcgtctacctacggcatccgcagcatccccaccgtgctcatcttcaagggcggcgagaagaaggagagcgtcatcggcgccgtcccgaagtccacgctcaccaccctcatcgacaagtacatcggtagttcatga

SEQ ID NO: 20741 - DNA, 270 bp, Zea mays
  Peptide Sequence Number=SeqID_64116
atggccatgatgggttcaacatctagaaaagatgtacctctgccagagtccttgattattgggcaaccttaccttgactccctgataaccagcatacccttgagagtcttttctttagtcggaacctccaagttattgggcccacatggacctgtccttgtcccaaagacctcagacggctatgcatgtgcaccagataacttaacaggatctgtccgattgccccaaggacatcggataaaccacttacaaccagaaccgcaggattaa

SEQ ID NO: 20742 - DNA, 1137 bp, Zea mays
  Peptide Sequence Number=SeqID_64117
atgtgttcgcattattattcagcatacccgcagtttgaagtagcggaggagggtgcagacgaaggggccctgcggtgcgcggctggcctgagtagcgggcgcgatctggttgaggagtttgtcgcgtatggggtgtggcccttggcgcatggttgggcgctgggcgaagtatgccctcgccagatgccttcccatggcgggatgctggtgcggagtccagccttcgcactggatttgcatggccgagatcccgccgcattcatgcgtgaggcggaggatggggcggcgcggataattggtcgctacgtgccgaagacggagggccagcgtagttgggatatacgcggatccaacgatcgcttgaatagggtcttcgagttgaaccgtctgccgtatggcggttatcccaggcaagacgatgtcgatcgccgcgggacgaaaccggcggcagagactgaagacgaccccgcaccggcggccgccccatccacgaagaagaggaagctaggtactgtgatgggaggactgggggtctccggtagttttgctgtggagctgatggggacatgcacggcccccgggggaaggatgtcttcgcccgagctctgggagtctttggcgcggatgctgaaggttaccgggggttggtggcctgagaacgttcctatcccccgtgcggccggcgaagacttttttatatctcgcatggttcgtgacttgagagtgtttccttatggacggaaatattactgctattgtgtcggcagtgatggacaaggatcgtcaggaagctgcgcaaaagcgccgggtggatcgggcgaggggcaacttgttgttgttccgcctgcggtggcgaccacggtgtctgccacggtgcctggggcgaagggtagcgctctcagcgctggcgtcgagagactttgggcgcagcatgctgacgctgtccgggaaaagtcggccgccgatagcaagtgccgcaagctgacggagaaggtggccgcgctggagggcgagaggactgaccttcggcgccagctggcggaggagaggagggaggctaatcaggccctcgccaaggcgcagtcggcgcaggcggagaccaatctggcgcgggtggagggtagtctcgccagttag

SEQ ID NO: 20743 - DNA, 2055 bp, Zea mays
  Peptide Sequence Number=SeqID_64118
atgcccaatatctgccactccagcatcaacaaagacacacctaggaaatattgtttacaagatcaaggaacaaaaggagcaatacctgttgtgagtgtaaatttctgctttgatggttttcattttctgaacactaaatccaagtcggcgctttctgttcttaacaagggcactcttgttatggatcagataggatacaatgctggtcgcacaccattcacagacatctcaaacaccatcattacaggtaatcaaaatgaatcgaactcgcttggaccaattgtcgatgctaaggaacgtaagaggcaaagggatagggaaagatatgttgcgatgactgttgaagaaaagaatgagaaaaataggaagcgtcgtgaagcacgtcaacgaaataaaggactatcgatggagccactctcatctagagccttttgtaaatgggtgacatatgaagaagacgttaatacggaccaggcatgtgaggtggttagctttccagatgactctagcaccattgatttcacaaatttgtcaacacaagacattgcaggtggagacgaacaagtaaatctagatgcatatgatgacagcaattggttgcataggaatgagacattccaggcaaacaacattgccgcaagtaaagaccttctgacaccaggttgtgtgcatgaaactgttgataacatacctaagcatactatgaaaagggccgcctactttagtgagcggtacaaaaacatgactcccatcgagagggagtctagacgtgtacgccttaggttgtataataagacaccaagacggaaagatgctaacaaagagtgcagcagaaaacgtagagcactgcagggtgacactttgaatcaggagtccatcgccatggagaacccattatatacccctaaggttgtacgtcctacaacatatggaattgaaccatatggatcctcagttaccacttgtgactgggttatccctgaattcgtcatgacatctttcctgccaacttcaacacagactaaggatgttggttcactcgatatgtctactgagccactaagacgtagacatcatgtgctatctgagacacgaccagctaccttaggccgtcgaaaccaacaatttgaagccggcattgcaaggaacgtggctacagtgaccgaggatactatttgtgacgctatggaagaagacgattggacacaaccccatctgaatgcagagatccacaacaatggtgatgatgatgagggtgtcatattcgaagaggatgaggatgatgatgagaacgatggatacctattcgttgggcaatatgatgagatcgatgaggacatcgagatcgatggtactcaagatgaatctactgccactgatttgcctgacccgtatgacaaagtgtacagtaacgtgcctgaagaaacacatatgctgaagtcagtttccaactgcggttattgcactgcgaagaagtttgagtatgagccacctgggttttgttgtcgtggtgggaaggttgagctagccccactggagacccctccccagctccggaggttgtgggatagtacagactctgatgctagacactttcgtgataacattagattttttaatggccatttctctttcacttcactttattgttgcctcgatagtatgacaactaatgtgagagattctggtatatacacgtttcgggcacaaggcatgatgtaccacaatatcatgtcatttggtagggaaggtggggcggagcataaacaccttgagctttacttttacgatgatgatcccaatctcgagcatcggtaccgtaagtgccgcgaagaatgtcaacagaaagacaaagatgttattaaacaattagttggcatactccgtgaaaacctgtactctgagcaccttaggagcatgtgccatattgagaaccttgatgactatcgtatcacattgaaccttgaccaaacgttgaaccagaagacatataacacgcctctcacttcagaggtcgctgctgtctggatcgaggggagcgaacgacgaggctag

SEQ ID NO: 20744 - DNA, 81 bp, Zea mays
  Peptide Sequence Number=SeqID_64119
atggagaacggtatcgatgacattatggtgtcactagctgaaaaagacggtaaagccaacaaagttcaatatttacaataa

SEQ ID NO: 20745 - DNA, 822 bp, Zea mays
  Peptide Sequence Number=SeqID_64120
atgcagcctgctggaatgccacagcgggacaggagcatggggatgagcaggcgcaagatgacagcaagtggcgccggatcccgacgttcggcgactggaacctgcgggacgacatgcctgtcacccaatacttgcaagcagggacttcttcatcgttgtgtcgccggcagagaaggacgacaacgaggatctgttcaaggtgccccagtgttccctgccaagccctacaactacaagaaggagctagctcaggcttacgaggtccttagtgatcctgaaaatcaagagatctatgatgttgtggagtcaaaggatggaaccatctcggttgcttctgcatttgctggttatcaggaagctgtgcaagacagggatcacaaattcttgacaaaagcagtggaagaagcatatcgaggagtcgattgcggtgacggaggtccattcggagcagttgtcgtctgtaatgacgaagtagtagtcagctgccataacatggttctgaagcacactgaccctactgcgcatgctgaagtaactgcaattagagaggcttgcaaaaagcttgggaaaattgagctctcagactgcgaaatttacgcgtcctgcgagccatgcccaatgtgctttggtgcagttcatctctcccgaatcaagaggctggtttatggggccaaggcagaggctgccatcgccattggatttgatgacttcattgcagatgctctgagaggcactgggttctaccagaaggccaacttggagatcaagaaagctgacggcaatggtaccattgtttttgaggaatttcaggtaccattgtag

SEQ ID NO: 20746 - DNA, 393 bp, Zea mays
  Peptide Sequence Number=SeqID_64121
atgggcactgtctctattcccaccttctacccaccactgaaacaatcttcctctttgttccccgcatctactcacggcgccgcaaatggtcgctctgcgacgattgttctcttcgtcacgacgccacgagcatccttccgcagcaggtccccttcgccactcactggcgattctcgctgccagggtgccttcgtcgtgtcacaactggaggtagaaagtccggcgatcatcggagttgagcgcgaagaacatgagagggattcagatggagaagaaagaattaaactcccgtgctcagtcgccaccatccccattcgtgacaatacctcccctgaagaaccagttgttccccagatggttgcttgtggaaaacgagatttgagcacggtataa

SEQ ID NO: 20747 - DNA, 321 bp, Zea mays
  Peptide Sequence Number=SeqID_64122
atgctgaggatcagcaccaaggatgagagggtccgcagccgcaaccgcaaggagaaggtccgacagaacgaaacgaacaagcagtcgcggaagccataccagcagcgggagacgatgttagaacagcggatctccgccgatcgccggcagggggaaggaagccagaggtccctaagacgaggtgaaaagctctccgccgctccccggcagggaggaacgaggacgccagtgggcgttggcgtgagatggacagaggtggagcggtggccggatctggtgttcgacgcggagggtgcggggcagaaggctgccaacggctaa

SEQ ID NO: 20748 - DNA, 801 bp, Zea mays
  Peptide Sequence Number=SeqID_64123
atggcgcctcctgttgacgtggtcggtccgtgccctaggttgggcgatgtggaggctcctccgaggttgaggtcgagtctgtcttccgaggccgaggtcgagtccgagcccctgggtcaggcgaggcggagaccgtcggcggaggctagggctgagtccgagccctggggtcgggcgaagcagagggctgagcccgagtccgagccctggggtcgggcggagcggagttcgccgtcttccggggctgagcccgagtccgagccctgggtcgggcggagcggagttcgtcgtcttcaggggctgagcccgagtccgagccctggggtcgggcggagtggagttcgccgtcttccggggctgagcccgagtccgagccctgggtcgggcggagcggagtttcctatggtgcccgaggccgggcctggctgcctgtcagcctcactctgtcgagtggcacatcagtcagagcggcgcaggcggcgctgtccttctgtcagccggtcagtggagcggcgaagtgactgcggtcacttcggctctgtcgactggaggacgtgcgtcaggataaaggtgtcaggccacctttgcattaaatgcccctgcgatttggtcggttggcgtggcgatttggccagggttgcttcttggcgaagactgggcctcgagcgagccggaagtatgttcgtcgctggaggggggcctcgggcgagacatagatcctctgggctttgtgctgatgggggttaccagctgagaattaggagtcttgagggtacccctaattatggtccccgacagtag

SEQ ID NO: 20749 - DNA, 117 bp, Zea mays
  Peptide Sequence Number=SeqID_64124
agatactttggtacaagtggctatgagatcgatggtttcggttatgactatggtgctggcgaagatgaagctgtggaaggagacttccaggagtttcaagactacgacgagttctag

SEQ ID NO: 20750 - DNA, 420 bp, Zea mays
  Peptide Sequence Number=SeqID_64125
atgttcttgggagcgggacctggcgtgatgatggggatgggggcgatccagatgtgcacgcgcggattggtacaggaactcgcccgccacctgcgctgggacctatgcccgtgtatgctcgccagggtcccccgcggaatcgccatgcgtcgtggccaaagctgtgggctttgcgattcacgattagaaatccaaaggccggggctaggtggtgtgatggatggcgtttgtaccgtagatcgtggatccatcgactctggttgcctaccggttggattcaacgccaaatctaatctggagcgttggtttttaatcgtgcggccatggttggcatataccccttcgccgaagccattttacaaaagggaccccacgattgtattaaaacaacccgcagtccatgtaaggataaggaactaa

SEQ ID NO: 20751 - DNA, 999 bp, Zea mays
  Peptide Sequence Number=SeqID_64126
atggcgccgacaccgtggtcccactgcgcagtcgcactgggagattcctctcttatactgaccggcgggcccaagtcgttagggcggcccatcctagctcgcggtgccgtcatctgggaccccaccggtcggtcactcgccgcgcgtctcctcaatacttcgctgaaaatgagctgggggcgcgctggtgattgctctccctcactgcgcatggggcccgggggacgcaagatccacggcgagcatggcgggcacgccactgggcgattctcgcaccgcacgcacggtcgccctggaatttcgccgctcgcgtctgactcgccgctggcttcaaaaagcatagctcacttctcctctcaccctctgttttcgcatccactcttcctacagccgccatcgatccacgcaaacgccgccgcgggggaatctctaatttgccgccgtcaggactacaaccttgggtctggcagattccgtgatgacctcctcaccgttccgtgcgccgccatcgcaacaacgcctgggttgccaccgaaatcgggggagaagggcaccgccgcgggtcatgggagccattgccgtcaacccgaggttgcgtcacagttgaggcctcgaatctgggctgtcgcgcctcggggagacacactgatggtgcatagggtcattccgggcgcgattggggggcaaggcgaagccgaattcctcatcggaaatcaagatttggggctgtgccgccatctcccgtgggcgtgcgccttcgcagcagctaggccggactgcttttgcacaaatttggttgggggaaacatgcatggtggcgccaaatcgggtatctccggtgagatcaccgtctctgtggccgctccgccgccgcctgggcgcatcggggaggaagaatcgggtccaccgttggatcgcatagggttggtccagattagatgttggaatgatgcgccaggagtcgtgtgttttggatcggatggtgggggatgcagttaa

SEQ ID NO: 20752 - DNA, 114 bp, Zea mays
  Peptide Sequence Number=SeqID_64127
atggctcatctccaccgataccccttcgcggacgagcaagccactgtggattctgaggttcaacaagtagagatagctgagcaggagctcattgaaggcaagttgtgcccttga

SEQ ID NO: 20753 - DNA, 699 bp, Zea mays
  Peptide Sequence Number=SeqID_64128
atgacgacggtggctctcagccccttacggaagcaaggagacgtcagcaaggtcccaacagccccgacaactgtgcttctacagggctcaaacgctcctccgacggccatgactccgcatatgccgccgcacacgaggaaaaccacacgtaagtccactaggccgattggcgtaccttggcaccagctggctccaagacatgaggagagcagcagcggcaataacgaccccattggagtcctaaaagcccaggtggagcagcttcgaacagagctacgtcacagaaacagggtgtgggtaaaagatggtcagcgtataaatgagttaagagttgatgtccgacatctgcaagacgagcttgctgaacgggatttggcaatcgattgggctgtcaattcacgttccattgcttgggaccgggaagccaaagctcgagcccgtgtggaggagcttagcacggccgttgacaacttgcaggtgtactgcaatacattacatgaggaagtccatgtactgtattcgcgactacacccagacatacctgccgaccctgttggaatgggagccggaccttctggaacagcagatgaagcacttggtggggaattggaccttttcaagcccccttcttctatgaacctggctgatgaatggtcccctacaaccgacagtgaagctaccaaggacgataaatactag

SEQ ID NO: 20754 - DNA, 1173 bp, Zea mays
  Peptide Sequence Number=SeqID_64129
atggtcacccaggatggtgaccaccagttcgatggtggggcgaagcaagccgggctgcggcctctgccccgccctcagcttcaaggatcttcatcatccttgctagggcggggggcaagccgagccggagttctacctccctcatgggccgcggagggggcggacttcgacaacgcggggtcggccggctgcaagcgtcgtcagctccagcgtgcctggctcgctagctcagctgactctggcgctgcttccggtgccacctcccaccgctggggcggagcgtggctgtcagctcactgtggggcggctattgcgctgtgcgcaccgggggaccgtccaagacgtcgcatgccgctagggcggcgttcgtgttcttggattgtcctgtccccactccggcacaacgcctcagcgcggaggtcggtgcctgcccgtccgggaggacttgagtggggatctaccggtgcactttggggcggtgctggtgggcaggtggctgccgtcgttggtgctgaggtggtggcagccggagaaggtttctccgctgacgagaccgtcggcgccacccgcggactgacctccggctctttggctttgatagcttgtcctcgcccctcgagtggggatgtgggcgagggccttgtcgcagcagcgtctgccctgaggtcatcgctgctgctgtttagccgcccggagcggaggtcgttgtcgctgctgctgcagtggtcagcggcgagccacctggagtttgtcgtcccgcaggccttccgatgtggaggttgttcatacccgcgggagtggaaccggagtttcgtttgtaatggcaccttgagtgctggtgtttgttcattatggctgtcgaggcctgaacatctagccggagtcagaggcagtggtgtcagcgtggacagaggcagagtcggctcgagaagaggcttcgtcggcccggggcacgtggcttccctggccgagaaggcgcagcagcggcggctggagcctggccaggtcatccgtgagcgggaccaacttcggagtcacgctgccgaggccgtgagccgggctgatgtcctcgagggacagctggctgaggctacggagtggccggtcgagatgtttgctcgggccgggaccttggaggagaccctggctgcaatggctcaggcgcggtgctga

SEQ ID NO: 20755 - DNA, 837 bp, Zea mays
  Peptide Sequence Number=SeqID_64130
atgcaggtggcgtgcaaccgcaccacgcggacgcaccccttcgacttcaacgcatccagcatggaggcccaggcccacacgtcatgtaaccgacgcgccggttactacgtgcgaaaaactgcaccgccacttgtgccaatgtcgcgccttctcgactgcggaaccggtgccgcgactcgaggcaaccctgcgcatggcccaacagtgccaaccgagcacatcggtcacgggtcagtcagccgcgggagggggcgcgacggtcgatatggccaaaagtgggccagcagtaatggcggcaacaggcaagcggaagcagcagtcaagtcgtctgcaggctcacgtaccctactggagcagcaggggagccctctcccacggcgtgaagacgacgcgcccgtgttctgtccctcgaacggctcgcgcaacgaccgccccgcgaagcaggcgttgtttcacctccgccatgacgaccacgtcaaagaagggaccgggaaagggaatatttcaaaagggatccttctccgcgaaggaagcgggccccgagccctcctactgatcaggggttcgaaggttggcccctcggaagggggttcgaaggctggcccctcggaagggttcgacagtcgccccagagcacgtagagcgagggatgactctgggtatgtccgatacatggccgaggcttgggctacgctcccgagcctcaggcgcaacaggaagctccgcctcgcccgaccttgggcctcggccttaggaggaagtctccgcctcgcccgaccccagggctcggcccccgcctcggcctcgagggatggtctccgcctcgcccgaccctag

SEQ ID NO: 20756 - DNA, 519 bp, Zea mays
  Peptide Sequence Number=SeqID_64131
atgttcggcggcgacgatggcgctagggtgctgcggcgagccggcagtttcccacgggcaccgcccccgccggcgacggcgaggcacatcctctccaggagcgagtcaatcaagaagaagagcggagccgcgaagcgggcacgcgtgcgcgcggggctcgccgccgcgctgcaggagctcaggctcgccgggcgggaagcacggggccataaacccggggaggcggggcgttgtcaaaaacctgtcaacgccggctcccggaacccgaaccccccccgggccctcgggtctaaccatagaactccaaaggaggaggctgctgcgccgctgctccccctgcacatgtccctaagacgccggccgtttgctgctgcacctgtgcggcatggctgtgccgcggcccttgtgcggttcggcctcgacggacgggcgccaccggagcagcgagccctctgctgcagcgcggtgcagcgtcagatgcctgtggctgtgagcttaacattggacatgtacgagcag

SEQ ID NO: 20757 - DNA, 786 bp, Zea mays
  Peptide Sequence Number=SeqID_64132
atggcgacctcccttccaggggacgaccaccaagtgcaccgcctgcgacaagacggtgtaccttgtggacaagctcaccgccgacaaccgcatctaccacaaggcctgcttccgctgccaccactgcaagggcaccctcaagctcgccaactacaactccttcgagggagtgctctactgcaggcctcacttcgaccagctgttcaagaggacagggagcttggacaagagcttcgaaggtatcatcgttttccccccttccctttgcagtacgaaatagatccagtggtgttcttgcgtgtctcctcacctacaaatggcttcaggaactccgaagtgcctacaaagtttgcatttttttccttcactttttcagtccagagtagcacaggaaacaaatacattcaatcattgatgcacaaacaactccttaaacatgatgtgagatgcttggatcttgaatgcacagcaatcccaatgaatgctactaaagtctcaagcgcctttgctggcaccagagagaaatgtgttggatgcagcaagacagtctatccaactgagagggtcactgttaataacactatgtaccacaagagctgcttcaagtgctgccatggagggtgcaccatcagcccttctaactacattgcgcacgaggggaagctgtactgcaagcaccaccacatccagctgatcaaggagaaggggaacttcagccagcttgagaatgaccacgagaagacatcacaggctgggtcactggaggaggatgaacaagagtattga

SEQ ID NO: 20758 - DNA, 321 bp, Zea mays
  Peptide Sequence Number=SeqID_64133
atgagggtggaatgggacacccttagctcattaattagaggaaccagaggagtagttggcttagccgtagggccgtcaatgggtttcgggcacagtacttgctctgccgaggctggttgcagaggaggagatgctggcaacatggatgattttgaggagtttcaggactacgatgagttctatcacctggagagactgcttcgtcgcctgcacgaggagcaggagcgccgatgccaggagcaggagcaggagcagcaggactcttccccctcacctcagcaggaggtggaggctgggaggcagccttcccatgcaccttag

SEQ ID NO: 20759 - DNA, 207 bp, Zea mays
  Peptide Sequence Number=SeqID_64134
atggtggttctctggcccctgttgggagtcagcacccttacaactgatggccttgacctgaagtactaccctcgtcatttgaccaacagtgctggaggtgtgattgtctcacccgttggtgagggcaatcccaagctaaacagcatggtcaacctggcagccgtgctcaacaccaatctggaccacgcccttgacgagttggactag

SEQ ID NO: 20760 - DNA, 201 bp, Zea mays
  Peptide Sequence Number=SeqID_64135
atggggctcggtgtatgcggctcgctctgccaagtttgggttcgccccttggggaggagtgcggtgcatttaggaaacctaatgggcggctacagccccggtggcaatgagattgatggttctggttatgattatggtactggagaagatgaagccgtggaaggagacttccaggagtttcaagactacgacgagttctag

SEQ ID NO: 20761 - DNA, 1278 bp, Zea mays
  Peptide Sequence Number=SeqID_64136
atggcggaagagggaggtgcagggggccacccccacgaacatctcgctgaggtggacgaagatggccgcctggaggatggagtggggcgtgaggtgctgaagctggagcccgagctcctccaccagtgttgtgctcgcctcgccggcccatgtagcgatgcgctggaccccggcacgatgctccgcctagagatcttcaagtactttcttcgtcgcctccaccgccttggggctgatgttgcctgcgcctcctggaactaccggatccgctctaccagctttttctccttctcctccgcctcgagctcatgctcggccagcaacttatcccgcctttcaaacatttcctccctgaaggcgagatccttctcccgccaggcgagatctgtctcccgcctatctagggacgcatccttctccttgaggttctcctcggccagggcaatgttcctggccttgtcctccaactcccgctcccatttttggatcctctatggcctccacttgctggacccgctgggcctccagggtctggtccagggccttcagcttggctcagagctctgttgtaagggtctccctttcgctcagggcctcctccctcctggccaatttcttctccctctaggatgcctccagctcccgggcatacaccttctggaggtcccttttgtaatccttgtggtcccgctcaagctcggaccgctcggaggcgaactggcaggacgccgccttggtgcgctcctccagttgggtgcgccagtcactgaggcactagtgttcggcctcaagcacctcccactcccgcagtatcgacgcctcagtctcatgaagagcctgatgggcatgagacagcacccgggggaggggaactggcgctgcttctggctcggcgccggaccggagcatccacccaaaaatcacctctgtctcctccggagtgggcggcgggatggagctggacacgcccccgcatcaccctcgatgacgggggtgggcgcagttgggacctcctctgccgctgccaacggtgtactcgacggcatcgccgtcgttgaggctgcggtagccgtcggagcagttgggaccccctccaccgctgcgatgccgcttgacattgctgccgctgctgccagacccccagctggagcatgggagcccggtggcactgtctcggcggcagcagccgggggcggaggaggcacgaccttgggagcagagggggaggaagccctaacaagcaaaggatgggttaagacttgtcggcataatagatag

SEQ ID NO: 20762 - DNA, 1029 bp, Zea mays
  Peptide Sequence Number=SeqID_64137
atgaaggcccccaacacctgggtattctcagtcctagaatcttggtaccctgctgtgagtggcccggaccccacacagaggggtccggatcccatcctaggggtccggtttgcgcccgtgggggtcctggaccttacccggaggcccggtctgtatatacaggggtccgacactttcctatgggggtccggactcactgttgacaccttggagtatatcatcttctctggccacgtggcggccccagaaccgcccacgtggtggggtcaggtgctgttgctggcccagagtagtcacccgaggctggggcgtgccatgggtactgacattggcccccgggcccacctcatgggaggatgcgagcctgcaggtggggccaatcgcctgattggtgattggcgcgccgcttccgtgcgtctgctgacactagcactccagctgtatgacttgtgggcccggacccccgtgtcagagactgggccgcctgggcgtcagcagttaggctttcgcattctctcccaatcgctgcgccttttcgcctttgagctctctgcgcccctttgcattcacgctctcctgctctacacccacgccgccgccgacgccatgactttgcttggccatctcgagcatttccagtctgagggggcgcttaacctggtgtgccacctgctcggatggagcacgccggtgcacgccggaaggatccatgccggcactactcccctcggcgatctcgccgccggggagttcgtgctcttcgtctcctacctcttttgcgggttggcgttgccgatctcgcctttcttcttgctgctcttggaggagctcgagctccagcttcagcacctcatgccccactccatcctccaggaggccatcttcgtccacctcagcgagatgttcgtggggtctgggaaggctaaagatcacctcggcgcctactacttccagacaaggttagattcagctgtggcctacatccccacccttggcggcgcaaggtgggaaaactggcgcggcgactag

SEQ ID NO: 20763 - DNA, 333 bp, Zea mays
  Peptide Sequence Number=SeqID_64138
atggtgcacctgttcccaaatgggcaggtatcggtggagctgcagctcctgcgcgagaagtgggggctcctactggccggtctgatctttcagtcttgctctgtttgttggtacttcacagatagctgggagcaattccgtattagtggcagcatagatgtgattgatgcttctactacagaccctgccaagctccagcacaaggagaaagcatggttttcaagttcactgaagtcgagattgcagtacttaggaccacagccaggcattccggttctagatgatgagcatgtgatgatgagcatgttaagggcgttcatctcgatcctttag

SEQ ID NO: 20764 - DNA, 396 bp, Zea mays
  Peptide Sequence Number=SeqID_64139
atggaggcaacatttggtggtgtcggtgctggcggcaggcacaacgtggctcttgcggcgtggggacgcggacggacacagagctgcatctcagccggtcagggggcggcggtgactgttgcaggtcccgggcatctcagggtgaggcgaaggcgcgttggtggggagtgggaggttgctcacggctcccggatgaggctggcggtgttggacatgtgtggcatgtggcgggtgcggatggggcgggaggtcggcctgcgcggcattcggctgctggcggcggatgcagatggggcgagaggacggatgaggctggtggcgctgatgccgctgggggtttcgggcggggtgcgtcggatggggctggttgcggacggtgtagatttgatgatatag

SEQ ID NO: 20765 - DNA, 732 bp, Zea mays
  Peptide Sequence Number=SeqID_64140
atgacggcccagcctccctctccacgtccctgctctccaactcacacaggcctgcacgtgctcaactccatcgacaaccccaccttcacgccactcggggagcgtgccgagtggcgatgtgacgacttggtggtctatcgtcgttgcccttcgcgaggtgccgatctcttcgtcggcgaagagcatccaccaagcgcccctttccctctctgcctcacaggcctgcttcatcagcgcgccgagtcgtttcccccgtgcacccgctctcccactcgctgcaccgtgggaccgccctgtcagctccgccttccccgcgacccgtcgtggaccagcagcacgcatgcatgcacgccgagatccccggccacgtcgcccgcccatgcaccccagctcccttttgagcaccgcccgcacccgcactcgctcccccgtcccatttcacacaggttcgctctctcgcgcgctctgccctcgctgctcgacctcgccggagacccgcgccttccgtgccggtcacctagcccaccagaagctgcgccaagcgaccctgagcttcgccccgaggtgagacactcgttcccatgctcggtttccccaattatgctttgtcgttggccaatttcggcttcgtcggtgttcggccgcggcggtccgccgcgcccgcgcggtgaccagtccggtggccctgcgtcggtccctaatgttccccttaccctgctgaagttagtctag

SEQ ID NO: 20766 - DNA, 1035 bp, Zea mays
  Peptide Sequence Number=SeqID_64141
atggtccagatcgtcgagcaccatgacttcgttcccgaggacttcccgatggaggaagaggctgcgtcttccacgccacgggcctccagccgccctgcgcttggtgctgccgctgtgtgctctgcgcggcagcacactcctgcgcagacatccagagcgtcaagggctgcacctggggccttgtctgcagccaaggagttgctacgccaccctcctagctccacggcctcgccgggggccatgaagcagtggcgtgacgatgtcgtccgtcttctcggcatggcgcattctggctcagctaggcccaggcctcgatcatcccagcgtcaacatgaggcgtcggcgtcagtgcactcaccctcggtgaaggcctcaccgactgaggacctacgggtggagctcaaccgcaggcgtgcggtagaggacgccccagcctctctggagaggcctgatgacctgcgggcaaaactcaaccataggcttatgggcgaggatgcccgactctctctagagagggcgcctgagcgccagcaaaacatcgagggtcgcaacctcgacctagacttcaccgtggtcgcgctgcaaactccaagggcgacttggccatccaagttccggccacacctgccggaaaagtacgacggtacgtcaaacccgtcggaattcttgctgcgaatttcgccagtgcttatcagcagtggcgtggaggctcacctccatgcagtgaggcaggaacccgaggaaactctccgggctttcatctcccacttcactaaggacggcaaaaagaagaagaagaagaactgcggccatgagaggtcgccgtctgctgctccggtcatcgcagccgcgactgggggccggaacgagcgcaacaaacgcccacggccacagggaggcaacagcggctcatgccctgtgcaccccaacaatcgccacagcgcctcagagtgccgcgagatcatcaagctcgcgaagcgcgtcagcgagcagcgcgagcagacttccaaggatggctccccacctcgtcgctag

SEQ ID NO: 20767 - DNA, 567 bp, Zea mays
  Peptide Sequence Number=SeqID_64142
atggatctcacctggcgggagaaggatctcgccttcagggaggaaatgtttgaaaggcgggataagttgctggccgagcatgagctcgaggcggagaaggagaaaaagctagaagagcggatccgacagttccaggcggcgcaggcggcaccaggccccaaggcggtggaggcgacaaagaaagcacttgaagatctccaggcggagcatcgcgctggggtccagcgcattgctgcatgggccggcaaggcgagcacggcactggtgccgttaaggatgagtcccatcccggtgtcggagctgtcgacgtctatctccgatgcgctcccggtgctggactctgccgccgaccgcctccgacgcctagaccagattcttagcgcccgcctggaggccgagggtggcaggctctgccgggcggtgattgagtatatccggacgtgcttccggaggcacgacctgaccatatccttggagccggtgatcgctggtccggtggccgacactaaagacgccgcccaggagggcgtacaagatactgtggagctggtggccgagcgcgtctag

SEQ ID NO: 20768 - DNA, 579 bp, Zea mays
  Peptide Sequence Number=SeqID_64143
atggtggttcgccagaccggtggccaggacccccaccacgggatccggatctttgatgcgccggttggaggtccccagtctgccggcgtggctcccggcgcccccgccgtggctcccagcgcccccgccacgccccccccgccccttggacaagggcaaacgggctgcaagcagttcctccgccccaggtggcaccgggggggtcgaatgaagagaggcgacgccggctgcgccgcgccgacgggtcatttgtttcggacccccaaaagcatcagaggactgctggtggggccgaggaggccgacccccaggctcacgttagggcttcctccccctctgctcccaaggtcgtgcctcctccgccccggctgctgctgccgagacagcaccaccgggctcccatgctccagctgggggtccggcagcagcgacgtcaacatcaagcggcgtcgcagtggcggagggagtcccaactgctccgacggctaccgcagcctcaacgacggcaatgacgtcgagtacaccgtcggcagcggcagaggaggtctcgactatgcccacccccaccatcgagggtga

SEQ ID NO: 20769 - DNA, 189 bp, Zea mays
  Peptide Sequence Number=SeqID_64144
atggcggaccacccaaagttcgaaccccggccgtattactctgatccaaacggactacacgcagagggctctcaggagaacgtaatggtatatgtagatgcaattgtggacattactccacaactcaccacactcaatcaaagatccaaatcagacaagtatcataagaacaaacattcaaattcatag

SEQ ID NO: 20770 - DNA, 324 bp, Zea mays
  Peptide Sequence Number=SeqID_64145
atggcggaccacccaaagttcgaaccccggccgtattactcggatccaaacggactacacgcagaggactctcaggagaaccaaatccccatggcagcaacgcccagcgaccccaagtccggcgagattcacaccccgcgacacctgttgtccctggacaccgacaccgatgtccacccttctagcgcccccagtgagatccctcctgagcgaccagtcgaggtatatgtagatgcaattgtggacattactccacaactcaccacactcaatcaaagatccaaatcagacaagtatcataagaacaaacattcaaattcatag

SEQ ID NO: 20771 - DNA, 159 bp, Zea mays
  Peptide Sequence Number=SeqID_64146
atggacccaaatatgcaactatgtgaaaatgttgctaactatgtttgtctaagcactagggaacatctcaagtcgagccaaaagaagccaaatgaatttggcttagaattgaacaaacatgggtcagtctgggctgcatcggacatgttcgatgcctag

SEQ ID NO: 20772 - DNA, 237 bp, Zea mays
  Peptide Sequence Number=SeqID_64147
atggaggcgaggatgatggcggagcgggaggcggagcgggcaacccgcctggcagatcagcagaggatggcggagatgttccaatacatgcatgcagagccttgcgcgcacaggggccaatctagggcggtatccaacaaccctcatgaagtgctcagcccatcgcagcaccagtccaaccgcccacctcgatcagagcttgagacttatgtgttgatacttctgaacttgtgttga

SEQ ID NO: 20773 - DNA, 366 bp, Zea mays
  Peptide Sequence Number=SeqID_64148
atggcggaccacccaaagttcgaaccccggccgtattactctgatccaaacggactacacgcagagggctctcaggagaaccaaatccccatggcagcaacgcccagcgaccccaagtccggcgagattcacaccccgcgacacctgttgtccctggacaccgacaccgatgtccacccttctagcgcccccagtgagatccctcctgagcgaccagtcgaggtctcgtggcttcacaagcaagctgcagcgcatggattttctctctctctgctgatctctcttggtgtcgcgttctcccagctgagccatggcccaaaggagaagcgcgaccatatttatgtagcccgtcgaccaagcttgtaa

SEQ ID NO: 20774 - DNA, 402 bp, Zea mays
  Peptide Sequence Number=SeqID_64149
atgtgggcatcttcagttggcatcgatgccatcagtgtacatgtaccaaaaaaatgcttttatggtttacacgataaggcatttattgcattcgaggacttgtggttaatgatgaaccttcagagactcgacgtgcaactcataacggtgtttgcattaatgcaacatgatcagcaggagatcctttatggtaccaatcttgatactagtgctgctaaaagggttgggtatctcaacccaatacagatatccgagcaaaatcacacttccataattggaaaagataatgaagaattaaaaggaaagtcggacgaagaagttgagaagcatatacagtgttggggacttgttctcaaatgctatgagttaaagaacaaggcaacacaaaatattaaatgttaa

SEQ ID NO: 20775 - DNA, 330 bp, Zea mays
  Peptide Sequence Number=SeqID_64150
atgcacaccttcatctcaaagtcgaagcctcctgtgacagcacctagctggatcaaagaacgggtgaaagaatcgggcagcgcctggcgctctactcgctggaggctggccccgaactgcgcggagaagatgatcccatgctcgtcgatcgtcgtacatgaacatgacggggacgccgccggatacctgctggctgctgcggcccgctcaactactcaaggacgtcgtcgaccagaacgacctcaagtgcctctgccgctctgcgctaggtgccgaagtcaatttcttcttcttcttgctggggaacggtcccccagaattttcttgtag

SEQ ID NO: 20776 - DNA, 453 bp, Zea mays
  Peptide Sequence Number=SeqID_64151
atgggcaaggacaaaaaaggtcagggctcgccgcgtcgctccggcgacaaacggaagcgtgaaccgagtccttcgtcggaggacttcggtgactccgagtactcggaggaggagttttcctccaagtccgagggatcgccggtctacgcttcccccccggcgtcgtccgatgactcggacgactcccaggggatagtcgtcgaggtgtggacgtacatccggtccgtcgagcgcgccgggcttgagggcccagatgagtcggaggtctcctcgaacgaggagaactctttcggctcgtgcgaggaagggagcggcggcgacagcgatgacgaaggcgacgacagcgatgggggtggtggcaacgacgacggtgacggcgacggcagtggcggcgatgacggcaagggcggcagcaggagcagcaaggccagtggcaaagcgccactagcttaa

SEQ ID NO: 20777 - DNA, 696 bp, Zea mays
  Peptide Sequence Number=SeqID_64152
atggaggcccaggcccacgcgtcacgcaaccggcgcgccagatgctgcatgcaagcaactgcaccgccacttgcgccaccaccgcgcctcttcggttgcggaaccaataccgcgactcgaggcggcccagcgcacgacccaacagcgccagcctggcgcgacggtcaatacggccgaaagagaagccggcgacgcttcgccttcgccgcaataaccgtgccaaaaaagggaccgggaaagggggataccccgaaaaggatccttccctgtgaaggaaccgggctccgagccccccctactgatcagaggttcgaaggctggccctccgaggggttcaacagtcgcctcagatcgcgtgggccctacacccactactggtcagaggttcgaaggccggccccccgaagggctccacggccgcctcaggctactcgggctccgcgcccattactgatcaggggttcgaaggctggcccccgaagggttcacagtcgcctcagacgccgagcgagggatgaccacgggtacgttcgatacataaccaaggctcgggctgcgctcccgagggctcggactcgggctaagccccggaagacggcgaactccgctccgcccgacccagggctcggactcgggctaagccccggaagacggcgaactccgctccgcccgacccagggctcggactcgggctaa

SEQ ID NO: 20778 - DNA, 801 bp, Zea mays
  Peptide Sequence Number=SeqID_64153
atgaacaaaaacaccggcattcaaagtgccactacaaacggaactccggatccgtccccgcgggtacgaacaaccccacgaaatcggggaacccgcggagcgatcgcgagccgacgggcggcccgccgccgcccgatccggcaacagcggcaaccacccccgccccgggcggcgaagcagcttcggcagcggcttcggggcaggtgttacgacaggagggctctcacccacagaggacgagaaccagccattcaggccgggagacggagacccagggctactggcggagttggcaatctcatcggtagagaagccatctccggctgccgacgcctcgaagcgcgccggcaggtctttgccctagtcagaaccgcccagagcgtgggcgccgccctcgcggtacgcagcacaaccgtcgtccggacggagggcgcagtgctgcgccctagccgagtgatggcggcccacctatcccggcatggctggaggaagtctccgcgaaactggaggatgccattcttccccagacgccaggggaagaaaagggcagccgacccacgcgggggcagccccccgactcgcctcatcctccatcttggcctggatgacgaaaatcctcgaggccgagggaggggcagaggccgcagcccggctcgctttcccccaccatcaagctggaggtcaccatcttgggtgaccgccggtggaggggtgcagccgggctgcatgatgaaaatccttgaagccgagcgatggctgaaaggtaccaactcccacggagttgcgttcctccaacgatga

SEQ ID NO: 20779 - DNA, 219 bp, Zea mays
  Peptide Sequence Number=SeqID_64154
atgggtatgcgcgatctggtgattcgccttctcgcatactatggtccaccgttcagtgggtgcgggcgactgttcagcgggtgcgagcggcttgacaatttaccttcccacctacaacactatataaacagacggagggcgcctctgacgaaggtgcgcatgctgccgaagctgaacaagcagatattgaagaggtttatactggtgaagaagagatag

SEQ ID NO: 20780 - DNA, 666 bp, Zea mays
  Peptide Sequence Number=SeqID_64155
atgccggctgtgaaaccgatcgcgcccagatccggcaagtcgtcggcgagcgcgaagacagccgccgctggcgggaccaagcctcccccggtcgaggctgcgaaaggacgagagctgccctcgccggggaaacgtgttgccgacttcggcatgaacatcagcgtggaggactattttgttgggtcgggcgagggacaaatggttgttgtcccgccttcggtggcgaccacttcgccatcggcggtggtaagggcgaagggaaccgcgcaggacccgtgggttgccttctgcgcaagcggcgagattctgacagccgctgccgctaaggacgtggcgggcaccatgtcccagcggttgagggaggcatcgcagcggctgtcgcagcagctgtcgcaacatcttagtcaattggatctcatgtgtttttgtctggcggccgacttcgccgttcgtgttgcgtctggtgtcctgactgcggacgtggctgccaaagtcgagaggcttcgggcgcagcacacggatgtcgtccaggagaagtcggctgcggagagcaaaaaccgcaggctggcgaagaaagtagccgccttggaggccgagaagacggacctccggcgccagctggtggaggaaaggagggaggtgaaccaggccatcgctgaggcgtag

SEQ ID NO: 20781 - DNA, 213 bp, Zea mays
  Peptide Sequence Number=SeqID_64156
atgtactcgtcctcatcggtggatagggcaacggatgtttgtttctttgaactccaggacaccagggaccttctattggaacttgctctcctgggcaagttgatccaacaggggaatgaaaacagcgtaaacagggttacagctcgagatggcaatggctctgttaatccggcctctcaagggcactgtgcgggggtatttaaatgtgcctga

SEQ ID NO: 20782 - DNA, 3403 bp, Zea mays
  Peptide Sequence Number=SeqID_64157
atgctcttgttcgccggtgatctggctcgagtgaagcagaccgcccgccaccgccgacggtacgtagcgatgccgacctcctcttcttccgctgccgctacgccgccggccgacgcctcgtctgaggagacgctgagtagtttggaggcggaggagttgcgcgccggcgattctgtggattttggcgtgtcgcggatgtcgtcggtccgcgtgcaagatatgcagaggctgggttactttggcggcggagttgctcgtgtccccggggatggaggaagtccccgagccggaaggcgagttgggttgtgttcgaggcattcttcgccgccggcgacgacttcgtacggcggacagccatcagtagaagtctttgcgaagtaccattgcctgcactggcagaagaggatgattggagacgaagttgcccagtttgggtcctgtacatttacgccgaagaccggcaagaccacgatgcaggtagtcaagttgtttccttgcgaccgaaacaagtggggcaactggaatgaattttggttttacgtcgcggagggtaccgtcgaagaccatgaagggctccccgtgtccgagatgtgttctcatttttactcagcatacccgccctttgaggtggcggaggatgatgcggacgaaggggcccttcggcgcgccgtcggcctgagcagtgggcgcgatttggttgaagaatttgtagcgtacggggtattacccttggcgcttgtctgggcgttgggcgaagtgtgccctcgccaaatgccttcccatggtgggaagatggtgcgaagtcctgccttcgcgctgaatctgcaaaaccgcgatccggccgcctttgtgcgtgaggcggaggatggggcggtgcggctcgttggtcgttacgtgccgaggacagagggccagagcagctgggatatccgcgggtcgaatgaccgtttaacaggagagttgatgaggacatgcgcggtcccggggggaaggatgtcttcgcccaagctccgggagtattcggcgcggatgctgagggttaccgggggttggtggcctaggaatgttcctatcccccgcgcgaccggcgaagacttttttacatctcgcatggttcgtgaatggagagtttttccttacgggcggaatattgctgctgttgtgtcggcagtgatggacaaggatcgccagggagctgcacaaaagcgtcaggcggttgtcaggcttcatgaagccaggccgaagaggcagcagagggctacgaaggctgtggcccccggcggaggcaagccgccgctggtggcgaagtcgggcgtccctgcatctagcaaggcgctggaggcagcggcaggcgccggtggttccaaatcgacgaaggctgtgccgccgtccagcagggtgtcggaggccgcgaaggctgcccgagtgttgccgtcagctggcaagcgcgtcgccgacttcgccactgatattagtgtggacgactatcttggtgggtcggacgaaggccaacttgctatagttgcgcctgccgtggcgaccacgacggctgccgtagtgccgaaggcgaagggcggggctcttagcgccggaggcgagatgtcggcactcgcggctgtcagggatgaggcgggcgctgtgtcccgccggctgaaggagccgaggcagggtcccactcaacagtccaacccggtggcaaggtggacggccaagttatcccagcaaccatctcctccagagaacctatcagggctcaccgccttggcgtacaatgccccactgaccccgactggccgtcgtgcagtggccgcacttgtacccaccataaccggaatgggagacctcgtctcaggtcgcgtgaggggatatgtctgcgggcaggctcgggtgctggatctggggctacctcctgagcagctccttgctccggcacgaggatgtactctccgtcagcaagattacagtctatcgaaatgcaatgaacatgcgggtgtcctcgtcggcggcgagtataccggccaaaccacggcgaactggttcaatccgaggagggattgggcggccgcggactcgctgcgcacgggcaaacggcgacgagctaactccggcgaggtgtggagggcggctgacttcgccgaccgcacagcgtcgggggccctcacggcagttgtgtccgccgaagtcaagagacttcggacgcaacatgctgacgccgtccgtgaaaaatcggccgccgacagtaagtgccgcaagctggcggacaaggagcggctcaccgccctggagagccgtgtggagagggccgaggccgcgtcgcgcgcggaggcagagcggacgcgcaaacagcttatggattcataccatgagctgggcgcgcggaccagtgacttcgaagtgccggaccgagagcccggacttcgctgcctagagtgggtgcaggaggagttgcaggcactccccactatcgtggaggggtttatgtcgtatgcctccctggtcacctgcgagggggcgatgaacgcgctctcccgcgaagggtgccggcacttcgaggtcttcgaccaagccgatgaagattttgagcgagatatctacaaggttgaggaccccatagtgaaggaatccgccggagccatctacgaccggatgtggggtccgcacggtcgcgaggtggtcagggagcgggccgagacggcgagggctcagataacgtttggcgcggcgcgtggcgagagggtggatgacttcggggcgttgaacagcgcgctgcctgacccggagccgatcccagcggaggccgtgtctggggccgccctggagccacccccggaaactgcggacgacgctccggatgcccccgcatctgctacggtcgtcggagacctgcccccagagaccgccgaaggcgcgccagatgcccccgcagccgctgcgccgagtgctgaggatcctgcgacggtggcggaggaggcgacagcggaggcaacggcggaggcaacggcggaggctcccgcaacggctgggtcttcgcaggttcatgattttgggcctgcgcacgcaaccgccactactaaatttttggcggcttcgaccgtggatggtggtaataaatgtgatggttctgcgtctgagttttctgattttgctgactctgggagctcgattgagtggactgaggagtcgtctgaggaggacttggactactttgcagccttggatgtggctgcggcggaggcttcaccgcacgctgcggacacagaagatgtgtctggtcctagtaccgggcgccggcaacgaagggcggttgcgaagcgcagagtgagtgaagcggagggaggtcggcttcgtgtgagtagagctggccggcaggaacttctatctttgccagccgccgacagtacag

SEQ ID NO: 20783 - DNA, 768 bp, Zea mays
  Peptide Sequence Number=SeqID_64158
atgccgccacgcaccaggctaacggcacgcaagtcaacgggaccaattggagtgcctcggcatcaactggctcctcgacatgaaagcagtagcagtgggagtaatgaccccataggagatcttgaagcccgagtgagtcgacttcaagcagcgctgcaacacaggaccaatgcttgggtcgcagacggggatagaataaatgaactaagaagggacatccgtcacctgcaggatcaacttgctgatcgggacttagcacttgactgggcagtacagtctcgcttgctggcatgtgctaaggaagctagggctcaggcccgaattaaagaagaagagattcttttgtctctccccgtaaccaatccagccaaagcttctgcaaggctaagcatcaaaatcttttttgtaaaacgggtgatcaaggaagatttccaaagtgctactgaaaaggaaaaaaggaaaggcttctacagtactggtccgattccagcccagacggcccaacaacacagggaatcggggcgcgcccacgcctgcggtggaaacttcacagaaaggcccttggggttttcgctaactgggaacgggttccttcactgttactcagagtcactgacagtttgcactaaggcccttgaagttctattcctttacaccgtccgatccccgacggcgtcaagcacggccgagctccagcgagctcgtaggccggccgattggggcaagtactggcgcccccgcgtggcggacatcaaattcaagtcttaa

SEQ ID NO: 20784 - DNA, 426 bp, Zea mays
  Peptide Sequence Number=SeqID_64159
atggactactctgcaccagcagggtcgcgttggaagctagctccgggcagcctcaccagcggcggcgaccacctctgcaccaagcggctcgccagcggaggcaaccacctctgcaccgagcggctcgccagcggaggcgaccacctctgcaccaggcagcctcaccagcgccggcgaccacctctgcaccggcggcttgccagcgacggtggccacctcagcacgtgccccatggcgaagaggccctcacccccgccctcctatgggggtgaggacaagaccatccaagccatggagctgggagcacggcgacaagcggtgcttgcggtctggccgagaccgcgtagccgaagttcgcctccaaccttcacaaggctggtgatcatccttttcctccgaatgctggaggaagaggcgggtcactag

SEQ ID NO: 20785 - DNA, 1362 bp, Zea mays
  Peptide Sequence Number=SeqID_64160
atgggatgggcatggggcggcggagggtatgggaaaggtaacgatgggttcacaaggttcgggagaggagacggtggaatgcccatgggcaatggcggaggcggtggaatgctcagtcattcatccaccgtggagaagctctacgcatgggagaagaagctgtttcttgaggtcaaggtccttttgttgtgttggtttgttcacctatggtctgtgatggggaatgctgctaacaatgattcagctgtggtggcaattgattttgctgaagaaacaagaaagagttacgaggggtataagcaggagcatgataagaaggtcagtctgttgaggaagcaagaggtgaagggtgtggattacttgaagatggagaagaacaagatggagattgagagcctggagtccaagatgctggttgccaaccagtccatcgagaccaccacttctgagataatcaggctcagagaatccgagctatttccccagcttcttgagctgattgctggctacttccacttgtacctgtcgttttgcattgcatatgagcatgggagtaaggtgggacatatggtccatggtttgcgaccttctacccatgctcaagtcttgatgagcatgtggaggggtatgtacgagtgccatcaagttcagacccacatcgtgcagcagctggagtacctgaacaatgctcggaataccaatccgacttccaatgtccaccggcaagcagctcttcagctcgagatagaggttgacaggtggtattcagccttctgtagtctggtgaaatcccagagagactacgtctactcattgaccggctggcttcgtctatcgctgttctgccaccacgacccactgactaaagctcagaactcagatatctatggcttgtgtgaggaatggcagctagccatcgacagaatcccagataaggtggcctcggaagggatcaagactctcctgacagtgattcatgctgtcgtcattcaacaagctgaggagcataagcagaagaagaggtcggagtctgcattcaaagagtttgagaagaaggcagaggagctgagagccctggagtcaaaatatgtcggcgctgaaggttacagagaaatgtcacgaaaatcatcggtagctgacaagcgggcgaaggttgaggctctgaggagccgtgccgacgaggagaagatcaaatacgagaagagcatcggggtcaccagagcaatgaccctgaataacctgcagactggcttccctaacgttttccaggcgatgacgggcttcgccagcgtgtgcatggaggcatttgagtcggtgtacaacttcaagcggagctcggacccgaagaggctgctgacctga
